United States Patent Application Publication US 2011/0183924 A1 - sequence listing, part 296

SEQ ID NO: 996400 - protein, 441 aa, Homo sapiens
DKNQELEVVSASMTRSSLRETELSLGERSTHCIELHTASTAAMLCSSGCQQEIASDVCVDKDRRTVQCWKQNVARASHGRPGGVAAWNATEVHDEAIEGCTVAGGSDENYEAGRPGEEVTPGYNESTGPPDSAQFIVVQGEHTMRNERMHWVHGARVLRNRGKKMRECDQGNALFTRHREDLDTKCNMHLCTGPEVLCQHRQPPSSSYPECGQAAFAIKLPGGDITLCNHHIIPKSTQSWKRYPLPGSGSGQRQEGRKTREPDVYNTLYPQRKEPTLLVENGLSHMFHFSTEGFDLALRPKKPSQDRGSPNIRTTHIEGAYVLTTTAHIEVQNSWQRTAKGEDAETKMCVRREHSNRSYMTHSEQAETKLVPPRFADILTIDIGAILRQCSAARYGRQKTGVYQFPAGDQRWVARTEGPMVVTIVPPVSYARLASRAKSNT

SEQ ID NO: 996401 - protein, 68 aa, Homo sapiens
GFDSSYQRTKVIYYGSAFEPNAGTVVLAARTRISGRGVKCEDFSPMTTATQRRCGNCEIESKHVKTLK

SEQ ID NO: 996402 - protein, 131 aa, Homo sapiens
SSSIAYLAPIARKGNMSSKAEHTGLEALPGLTKVSPVTHSQQEGLSNINDSVVVRVDPSSISNLHDECIGLSSIFSLTTAPAVLPNHSQAGEVRISKVRQHTTCYVSPTGCRKDEKVRYWIEIRDLSISMW

SEQ ID NO: 996403 - protein, 166 aa, Homo sapiens
MSFFLNILNREITQVGERTCRQSKKTYVSSEYSGQYLPNSVTNKNKTNTSRGVHKKVDEGSRSRRARQQRAGHVPIGHSSRSGDLLEKQKRTQKLDGPTPDRKPPNEEERPDTHNAEEWGKATPDRSNRQRTTRSGAETRLARGIELRKQQRTRPRTTRHKRPKPI

SEQ ID NO: 996404 - protein, 282 aa, Homo sapiens
  misc_feature (48)..(48): Xaa can be any naturally occurring amino acid
MVLLGHAYQVDVVLTCLCINASLFTTERERDAHLSKGQDLTSPMHPGXSFAILEGRRQCLPPVLRVGQGLVSVAVLPRAIVIASPSVVPDCLWPHKRVLGKRLRRAEWALGRRFDVEGLSLCWPFSAKSGPRNCHIAIVPFGDLRAKAKGSQEGDSYYGRDPYAYICEGNGAKYTGSLPTLRGIDLPKTGIEKYHVTQYYILTSLRKVPTRGNFDRPKPLVDEDRAAWAHQGGLNSGVFKVEAHLGGSFVGPMRTSVPKRACSHHGGAFPCGSRTALLHRRN

SEQ ID NO: 996405 - protein, 227 aa, Homo sapiens
MVRATFPHDIAITLPWKGTQRTKHKKRKQKTKKHGKEKEKREKREKSEKRTITEKEQKRRGSKNGETSQDEEAGARDEATIARAGASSEQEAEKDTKKNRKKRSKDKHKLKSDTEPEQGSEEQERTSGEELDEAGQDGREERGGEQEADREETQEKKAGTSNDDNRRGGRGEERRPTNRIGEGRAGRATRQTSERRKQEKGGDEDRGRKNERGRPAARGRQHEDETK

SEQ ID NO: 996406 - protein, 105 aa, Homo sapiens
MSQPGSVSLRRDDRTEPSHNLHTHFARVAAQNSWIDHTNTTNTAMHSRDDTYNNTQKHYYIIILYHTNYDTQLKQQDQLIYARQHSKTINITLYITKHKCHHPIN

SEQ ID NO: 996407 - protein, 262 aa, Homo sapiens
NHLCVSHHVAGFIDLIVLAGLAERIAVGHLLVNTGARFPRPAFASLPRIGAPEPAGVYTHFLGSSLGDLGMLNAHVINCFDYARYIFEWLDLLCRILGRYLSVFAYLSEWLLCRITVRWSESMTASNVHEIKEQLCSFVECIPEQREDGRVRAIPSLLGGLIDVKATFIGYSTGIQELFKLHLQMQFTAMFRRKAFLHWYTGEGMDEMEFPEADSNMNDLVPEYQQYPGTPTGDEQGEVEKEGGQELNGFKNVLQNSFVAIP

SEQ ID NO: 996408 - protein, 109 aa, Homo sapiens
MFRGTLGPLAYVFRHLLPLEGWFMSGVAIGCTGYILSPSWSCYRGKLPEGRIMPLYELKYLMPTFGKGLSAVRIEIKCLVNDRFGKDRSGVSHGLQKNVGQKTDYGYVQ

SEQ ID NO: 996409 - protein, 73 aa, Homo sapiens
VAGMKKKGDLDYLQLVKVEFDEEFSGAPVEGVGEEALTPSVPINKGAKPKRDKKEPWYQTWRIRHLTYIVCKS

SEQ ID NO: 996410 - protein, 342 aa, Homo sapiens
MKPPPPDRRLPSNRCRRRPGRCPRRRGAAEVWCVGGWRVTVLLAAVDREPCDSWRSVVGPVLLMLSSYLPQGPLPGPPGALHRWALGPCLTGAVAGPRPQQASPPPCEGPRWSRRSVPADALGAVASGVGASGRGGCGAGVVPASLSVGTSTRARESERENSGDTHPKHTSEQSIGIDRNRRNSMRHSTPNNDEKLKKKAYNGSHITTIAGNTKIKPSTLRFTMVILEQLRTGLHRMTHIATTPLLHETTEQTGTSLGLLSLTTLRVGTKQVKEEKEGHTKKSASDKRKHKQTTQQDHTLPAASQRNETTVTEQRDNTNAQSPIYTETRNDTDPLTQWRPKY

SEQ ID NO: 996411 - protein, 139 aa, Homo sapiens
VVAGWVALGSRSALALRVVGRGGGGVRAHHRGPRPSGPRSAITGTCPTHDIYCRFAECCREERPLKRFGSRELDLEEKSVLDSDLGRRQVIFQGARNWLQEQTRNPNETTDPFPYTAGLATGKNFCQSNCGCKIFTHKV

SEQ ID NO: 996412 - protein, 179 aa, Homo sapiens
QKLQLLEKSLDKKLPKPLVTHRSPMLAARCHAVVETSCPAGQEPCSHVTVRRCYRRTNTDLSSMDAIYSELVYVARHPSPQWQTDLVCGPVQQDRPCGPGLLLWIVSSLQDRDVLWIAPKMRGCSKSVLLQDICEQIIVCVIMRHNLEEGATASQTLRIPYMGSGHVDWRTVITLTRIH

SEQ ID NO: 996413 - protein, 184 aa, Homo sapiens
MILGSPSNSSRRIARRLSSFDWPVVFRPVSFDPRFLVPPSKAIGCLSMATLCGPIGEPWRGHWSWGGTDRFIQRQAPVKAPTRMKEDEPQGETQGPGGREDTDLEAKRIIQEKRMRENERSHKPTKEQGEQKQNDDHAGRREKTIIRPTPEEPLGGNREHDTKHPTKDRGCEQKLSNHNPLDEP

SEQ ID NO: 996414 - protein, 132 aa, Homo sapiens
LRKEAGGGLCGARLPAYLSCASSNVRGSLTSTSTRWCCGGPGVAVSARYVLPEEAGARGPAEGGGGRGVVVLDQAAATGQESCERRSAARVVLTSLLACLPAGPRSTSSKGDMRLSIGISLSVAWIVKPISQ

SEQ ID NO: 996415 - protein, 66 aa, Homo sapiens
MKLGLTKGMRRRRRISSGQRIIACGPWWSPQLGNIPILASHGDDLELHIVGDYEDMKGDYSWTDDG

SEQ ID NO: 996416 - protein, 126 aa, Homo sapiens
AWRRMCIWAADDACLRVRWVLFVRLLCLALCSGPWAPSQSWWVPSGSRYHLVLRRGCSGVRIWVLIYVLCRKVIGSTVGSTVTQLQTTGTKGISVMHSFCRSQHNVDVVLDMIKVPVVPDRACHIT

SEQ ID NO: 996417 - protein, 260 aa, Homo sapiens
GLPGFPLWMRGPAALLLPAHEVAGRGHMERDLARDFSRNGRRLAPDPASGGSVNDEEAGGGDRPMVLLSSRVLLVLCTLVLLLVPSVLDGGLDGDKGAEHCPGLQRSLGVWQPVRRRVAGDTRAVGLRRRGSRARNGGATTRFSSGSQCNLTRRCPGTACVSRRMQHIYVHDALGAPARPSWANSLIQPPGRMLPCMSPCGTLWPGAVSGRRRELAWARWLHAASLFRADFSVLRCTRAGDPWARPDTQLTGRLFGGAPR

SEQ ID NO: 996418 - protein, 56 aa, Homo sapiens
MSPGDKFIDQYKGGRWYKTLNGDLIQPWLWTIKKSRDYTYYDILLYRHRVSYYNQT

SEQ ID NO: 996419 - protein, 422 aa, Homo sapiens
  misc_feature (163)..(163): Xaa can be any naturally occurring amino acid
LLTGWCSCPGTSSVDSIMGLWSGSPGEPEVVKPWRVPVELRGDGVASVTCLEACRCVKPGAKTGNRPVPALRDALVFKTAPREYAYITSQLQYKRRYGGGPCGDLSSGEAVFPFQPGQYVCREVCINRSTQANLDRLMLAQIGLGIQVPRNALNLWVPSNSHXQLDGDFQDLNVVAFDVDNAASSMDPNQRQLASDPSELGLRRNIQILDGTNIKRCAGHITNSVGGLTRSGNHQQGSELPGGHEGQQGIPTLDIEASLIQHECFQNDYSSMTRGHLFWKNHITKGVGQGGSPLFGAFTFPGDTKWWTGENNIYGVKTHSDSGHEEMYHDNSSKSETPQPEHPQAGSKRKTRETLITTDDTVRDQHLGRPRHRWSHKTMNRLNKEQSDEDTRDATKMGDPTEEPTRMTEDRAPRTGENHGNK

SEQ ID NO: 996420 - protein, 494 aa, Homo sapiens
  misc_feature (87)..(87): Xaa can be any naturally occurring amino acid
MDEDEQSTSLSLDLSVMWDSDFMTDPCALARPRVTQDVIASSETDIDAHPESLLHVVPCGVTAIGARVPECLARAELLLVQVKSVDXAARDTSVSCMRDRNMDRRSTQQESSVLDDASMTIEGARKNMDKTRLTNSQGGGDKISRPKSPRRGRGDSSKGVLSAILAKGGPRQICERDEIEPLRRDVVRGCHYSRRHMRQNSCLGKLTNFTEELSLHLEQSPATDSPEIIGQEPVDTNLVRASREHVGMFFPMSTPKTTNGGTADLIGGSVYRGEVPRTLELCDPERVVVWPPVRGHYHTAFNLSCRPKRQENPLYGTAPLYPFCKSLAQVNGGVCFVVGKSSPGEGHGICYFGNHSYVFPMPLVKGRYGKLCVGAYVGCRTPRGVAVSSFGNLKSRRDISQEATLGLVFTENRQMLFGKRHLLASVSTTLTQAVTKERPYFAVKQKERAKEAQAFATAFRGRGANRGGGLFVHLWPSKGPLGRVFSPETLENNF

SEQ ID NO: 996421 - protein, 223 aa, Homo sapiens
MFPVCLFENSLLEETWSTGTYIPVWNNPRRLVCTLDLWYFPDTEWPGEPVTIKLARVLGVHLVNAYWSLRYGGLITWSAVHLSFCCEGACVNPKSLLVSSSTVPLFRPKRFVNLIQGLRIFAPSPVDVPPWDPTEIIVSQLVVHTRGPPPTIHETNGTLHHEPDLPFERVITPLVTFVCERPYGTCVELPSGWLAGVGRSSSWFWGRVGVSKSSCRALGIARF

SEQ ID NO: 996422 - protein, 230 aa, Homo sapiens
AGSGSEVVSGVQKELPAAAPYIPNAGRQWAKVCAVKRHNAVSLSPPLFGLLGVQPLSPRSVASHADIGLWSTVDYWGPGHSRGLGNLLEHVCGLGSQMGTPLDETQLGPDSPWEPSKCSVTREFHCRGPLSNHCDRSLCFRLGSASSVWGFREELAPLVGPTLCATPRCPSRTPAIAWGEVPRHQLRGHLTTTLVCTEWNQPSVCMNVSGNTQKCHPWPDFLGVPVELVG

SEQ ID NO: 996423 - protein, 66 aa, Homo sapiens
AQGFTLYDHLWFSVNNALSTSRLENQQQEKHLVFYLVFYDMKEAVAFHSALCSTCCFESVYAIVCK

SEQ ID NO: 996424 - protein, 242 aa, Homo sapiens
GLPLTHSLGSILTAYAAPMAQHMCVNEEEHPSFTLALAKVHGSGPPREGSNDILSCLERQRAGSWHSPIFMASCILNGTYDNDVRLQMPTMQSDRPVFFTLGFQKSPHLSLLHPVLAHMHLTLSGCRSIKGPNENESVHSSRVLHGVLWEVRHECPEIGSDEQFTLPKRMPLVSYTYSRLFTCVVPEGVRGPEEKRRGGPHDPGGGAGRGWLARTREHMPLPSLGGDSSWRRGQVLWEPCGP

SEQ ID NO: 996425 - protein, 104 aa, Homo sapiens
MSSQIRQNVFDSDVEAGVNRLVNLYLQASYIADLSLGFYYDRDECGSGRREPRSYPTNCIVGEARWRYRASPEDANISVRSGSLPGHQGSQLKSDVVVKPPDGH

SEQ ID NO: 996426 - protein, 138 aa, Homo sapiens
TLNTELKDNLKLTPCTKRYHQPGHECLGPALCDQLQQEFHMLWQQQHHRDWLRHVSWIRSQEAVAVCSQTAAALPVVALCRTAQTMPTNIYKVERRLASPTLETFIQEHLRDIGACRRIGNMPVVAGLKSHDLSRCLT

SEQ ID NO: 996427 - protein, 227 aa, Homo sapiens
LVVVMVTKTKAGQVPQSPPEASPRAAPECLYILRRCGTHVRTMSSSATHVAWTRVGRRARFHRAIRATKQVPHGALESVLLESLPFTGEHGSRMMGSTAGTYLPSDVRSTGSGEDDSMHGKKYLYVETYRALSHAAGAIDPSLSTERNLHGPKRIATQKARIGHVHPFGSNPEQITLGKDPTRIRNWHTHRVACVPKVKYAVGWVLARARSRVPLGPSDLVTETFPR

SEQ ID NO: 996428 - protein, 172 aa, Homo sapiens
QAERMPEQIRLKVGGVDPKQVAVYEECELAMSPWLSYLQMTLSQPTGFLAQADEASLGRQSDVAQIYDKCFTELERHLHAIPPNIGHEPSSSGSSKSLGGCSINLEMSRDAIACSLDCSEKAVEGLLDATSGADADLLLRYRECHLLVLKALQDGRAYGSPWCKKRSARCRN

SEQ ID NO: 996429 - protein, 387 aa, Homo sapiens
RRGESRARESGACARMELRRNALGTSEEFYNHGALPDRGQAEGDAPKNGPGRRFSSSLKTCYRSISIRAVAVYRSCYPGAGWGNAQRRCAYFIWFSELWTHWKDDSDQSVWKEKVPRVYSNFALCSFTKPDWRFMESKEKDRQVLEDFTNESPCEFRNLAEKYQRVIADICRRMGIGMAEFADKHVSSEQEWDKYWHYVAGLVGTRPFRSVLRLRVEDPEWATIQSVQLYGAVAAENKDDRDYVEEHEGAEEFWTAEVGPSMLRSRGIGKARRIWTWAVHVPQGTRAKALNAIQEVLTRHFANVEPARVHCVDITARSPGELERLVHNPQEEKGDNKLCSENTDRETSDRGKNYYTRRINTKPKTESTTTTVRYHMTRARQPTNTIV

SEQ ID NO: 996430 - protein, 237 aa, Homo sapiens
MKRTRRRGEKIKKERRDRARKQAENKTRRTGKRGDRERRTEEEGRKGKKREEREEKRTKREQREEERSRAATKRSTKRQGKRHRAKTKERRKTGKTREKRRGGTREREGRGRREAKDGQPSESKKERAEENQREEEEEREETRNRKREERGRENETGGKEDREEEKKRGTGDDEDASKAREKQEDGRERERERGGEEQGRSQATERGGEEEKAKERGKETRMRRETRRGEGKSDEER

SEQ ID NO: 996431 - protein, 166 aa, Homo sapiens
MIGVVLYVVCGSVNEEGKAVRIEPYVTHAAGPRVGKGSSQIDTTLLHACKPFLNVGRNPGKLPGKGLATPLAHNGGLLTAMDITERRLRALRNTENGLFVAEHRKGPFWERRGALTHTTGLWDTNPLCVPRPLIVGNGVGGEHLGHKASVGGTLFDFQPRLADLAL

SEQ ID NO: 996432 - protein, 419 aa, Homo sapiens
AVTDTRKDEQERSDHRSSQHAASPIFYELSENDLNFISSSKDGAGYPHQTTYDSPGHSRLTPRRCLLALSEYTDWQHWAGRMDMRVSADACDAEQETTLPAGSAICRDNNQALLHRLNENTEWNRRTCHGSQTGKRRTEGRNISRSITKTQLGWTTPLNRIRQITKHITGPDGRRTKPSATHRRATRLPRTRNPKATYAHTPAADLRTDPRTFPPRQQAHHPMDTPQTAPPTCPKRAPKPTHPDNRAREVGHHPRAGPRTAHSEPRRKGKQGHTCHDIETNLEKRSDPRPTQARPTANTAQKIPHHKLSKTDSPTQKSKAHQQSTTTPRAKAENRKHPRTHTAHQKDGNTSNQNHNAGTQRKHLPATTGNNTTETHSVENGNRKRTAEKERDKERKRTDHKTKEQHRNIQEQPENAGNT

SEQ ID NO: 996433 - protein, 103 aa, Homo sapiens
MELACSFTINTANLETKQKGGGDDKSPEGGQVTPTRGCWCNRGDIMAGSYNKATAHEKKEQSETRQPDFSTAALWVEKARPQKEDRGKKTWTTTLDVRITAEH

SEQ ID NO: 996434 - protein, 202 aa, Homo sapiens
PFRQGWQPIISEDQEPFWGTRASELSISTADWVQSATSQHSPHQADIIKQTWEPGSTLENLSLRHGSLEAECCGALLSWPSDEEGKVPWGMGLQLHGKHYPTSGWSYSQCHYNCVSSLDWRLFDERRGIPEARESSEYIGGSCPWSRKHFRVLRPALSDPVPGPLMQLRCIRGADDSRSICMRDSRCQTHTLEGVVTSMGSS

SEQ ID NO: 996435 - protein, 488 aa, Homo sapiens
  misc_feature (345)..(345): Xaa can be any naturally occurring amino acid
  misc_feature (488)..(488): Xaa can be any naturally occurring amino acid
MMPRLICGYFFKKRVGLLCHIFVPGLWFVELSYTTLKAFSSPHLCVLLPKMCCGTPQRVCLTAQPVPPRDFRLSRGVYVCVLCGLCVYTFVVCESVIERALSQFVWGTERREQHRAIFILSIYDITLCVCLPLCEKGYSQRRESERDNKEEVWRPVERNTQSGCVRNSPTPSSAVPGGGSLYLMPRGSNTTGEAEPKRAEDQRRSVWRHHIGRHRLQAAPLISSVGGGEPPAVFAVFYCQHAENKTSASRMCGCIQKPPSFTNNGYQLWVLFQASQNHLCYERHLCWVCERDAHLFSNEQNKSYKGRGAMWYEERATQPPPPLSPLYVCCLSGPTNTLVLHQFVXPSIQTRRRRRQSVEQESKKAHPHRWLETPAAKTRNNNETQQPRKRQQKQRQTHKQPHPSGRPATSLSYHSGDSQQPNKTMSINEKRSRPPSELNRTHRYSISLQHNHIISVSKQRGGGRKPPRAPPNHSGGRAIQTTASPGLX

SEQ ID NO: 996436 - protein, 135 aa, Homo sapiens
GGGGLAPRGQNRLFGAERGENQGWDLGHTPQLVLSFLMGYRISEGRLLAALIELICQALSNGSKCPEKAASQAACAHEAKWPVSHTAQGETHPQPVVSQSRRRPMRVESPRGTHCRMRASTQDLKRVFSPVSSVV

SEQ ID NO: 996437 - protein, 50 aa, Homo sapiens
QDEAVVLSYVNGDRCPPETDERLSPCVFPVVWSVVVLLCFVLSFVCWFFA

SEQ ID NO: 996438 - protein, 302 aa, Homo sapiens
ETLGAMPGWGLMSGVGPAGGRPEHDLASLCLKKPAFLQPHTHPGLSWGPKGWGGHTMKRGRWPGRLLRDHAAAGAAGAAATPQSQPSNRCRGDSSRFSPPPSGLRHSAPSGGASPAVASLRDLVLSILVCIIYLRRLHACLCLVALVAQLTNMSSDLFVPFSVRTDIRLHVIVLKPDDTGGLSVPCLPGGLGPGVPFACLGSLLIVPGKDVRSGVPPAGARRPGSLHQGSPLSPFLVRPMSFRDRRGGGSASVRPWLGWRDTMLLCRALKVANSGLMPNRASPILVRDWGGRRGRSDGLTPV

SEQ ID NO: 996439 - protein, 130 aa, Homo sapiens
MVGLSSHNCRWIPLGMEAADQASGGPEHPASTHCGWRLKPLALESSRAREHNVVNQQPRCRHSHNTDRRPNREGRSKAKMRQRQLEEDQQDKRRDREDRERTPDRADTTMRKPPEGRGGQIMLSTPPVRR

SEQ ID NO: 996440 - protein, 102 aa, Homo sapiens
MRPRNSVPAGGGFVTGRRRALLCDRSRGLWLAGLARFGGGPARRRAGRLPQVVLTTEECGRRAPRGVQSALEPWLAASPFLLDHSASSVKIRFTRRRHNSSR

SEQ ID NO: 996441 - protein, 120 aa, Homo sapiens
WRESKTLSQKKKEEKIRKSKKKNQKALRAYKSRGGFLINGPCAVSPVHLHWLASPWVGWGDPRSGGQAPLEGLLLGVGQQATQHPAPWGGAGLAGLLRTSLLGRDLTAGSNSSAGPWVAG

SEQ ID NO: 996442 - protein, 253 aa, Homo sapiens
MGASWVRGGEPPRHQGKIHGSSRAIGENSIFVNSPYAREPGAEKEPCRRTHRAVNWLGKIALDHAPGMGRACVPMKGARTFYEAPEGGDVHRHAVYTMGGGTPLSPKISCLYNRSWTINAIWLNPTLCSVDTCRPLNQGGKPVRNAGHMAGSSKAAKHVSGDIQTSAEVTLEATARAPDLVGSPGSQWEKAGYEQRRGGNGTMFTGSYGGQIELAGNATQAVAPLGDTPGAAPTGGGPLELHSAEAHTERHAI

SEQ ID NO: 996443 - protein, 397 aa, Homo sapiens
MRPLQMAGSPRAQSACCRRQIARPSASERRGRNRAQGERARAPPDPAQPSPTPFPRCQGHAVTVALAEKGERKNTPDRCDAPHHLSDQLNDIVEQTMSDYNDSLEVETGTGDLLRGTRCWRVKQAEEEMHRFDGIGVTSAPSEKAGDTASRNIDRGSSGVSGLRASLASLALGRVISTSEQLVAKAKAAEGNDDEVAQGSSIASNKGPWDFHEPAKASRLGVHREPNAKSWDGKLCTNDPWSIESEDLHPCAFRAVPRNNYTDWKQERYEPKENGAETLVGVRRDRPRAPESKHCVPMPETLTQYALNSDRPSGNTRTVGATTGRPAVPKVAISHHRGKDQWQRGDHHLDNDGEIYGMLATGDNVFPCWFHPKIWMPTIRGKAPDRTADHTRQSIAD

SEQ ID NO: 996444 - protein, 115 aa, Homo sapiens
  misc_feature (96)..(96): Xaa can be any naturally occurring amino acid
GQATFHASFSPAVEPRELVGPRLAGLLAWTNGRVPMVRESSAYKLDGNRNLDRETSSRTLNVGRLRCKDAGVTAFSQRAPPLAWDSCSCYIEPDLXSSRSGISCWTFTDTCDVMS

SEQ ID NO: 996445 - protein, 69 aa, Homo sapiens
GKRYDAATTYGHDAAAAAASQWAAPSLCLWSSCRMAITAAGASATPSDQQQYGFQYPLGMAANYDVYHQ

SEQ ID NO: 996446 - protein, 134 aa, Homo sapiens
EPCSLARIVRNRSAPQDRAAEPAAAPRRDLLTLDPDIPLDSAPLPPEPRPGRQQTGRMSGGRRKEEPGSAAAGLTVSLKCLRLACKVLRTRPRPWDGLRMNFFEIVIYWFRQIIACGPGMSFEGVVAITRVLVK

SEQ ID NO: 996447 - protein, 169 aa, Homo sapiens
  misc_feature (3)..(3): Xaa can be any naturally occurring amino acid
  misc_feature (14)..(14): Xaa can be any naturally occurring amino acid
MSXSTLDKAWGWCXQGVASEVCYQRNGRGKPGCEEENHHPAFLVGTPGPSQGYCSESVHVRRPPGEVTSLVGIRGGLRPCCVRSVVPGPSYAPGRFTGGEEEEAALGVGPEGSGMLVGAVFRGRGGGLLPGVNWAQDGLAHGCAPVAYQSPCWRLGGLCLVRPLVVVRD

SEQ ID NO: 996448 - protein, 115 aa, Homo sapiens
AKAGASESPQSMTKPQLEGASVFSVTVWTDYFMKPLAIESGLGYKSYTMTHGLILCGYEPSQGEVLHGTYGSMDERVPCGSPWVDCALPRLITGTLTEPVSRNDNKIAMSRLACR

SEQ ID NO: 996449 - protein, 138 aa, Homo sapiens
MRYLVGRPWLVGIDDRAVNLSANLSYCARLQTAGRGTESLRRPSQQATEWQSVDVQMSARTGFASLVAVRGAVCQRALRATLTSTVFQSSKGRPVRVSEMFMFLMQTTVRDAHGHWPGQHCVWLACAALGRLAVALRP

SEQ ID NO: 996450 - protein, 147 aa, Homo sapiens
  misc_feature (80)..(80): Xaa can be any naturally occurring amino acid
MLQPVNDRRCKNAERSTRVAICLWHRAEHGAMPDKIGWRKIGRTETVRVLTLACSTCHREETFEGDTERMRAGVISTSEXRLQMNAARVKYAVMLSRDGEEWPSDGLDSPDASAFHLANEDDIQAWIEGTAVRHRMRLGQRRRPTSF

SEQ ID NO: 996451 - protein, 121 aa, Homo sapiens
MTRPCDASSLSHAVLPPASDARWADRMAVTVLEPVVAAGVRDVISRCRGPPICHVWRLAGEVDPHVTCMELAKDDDVVGATLDRVRSAWPSLCLPIVIATPHPLQRPLCNWGQKLPTDLSL

SEQ ID NO: 996452 - protein, 114 aa, Homo sapiens
MCCELNRWGCDCITNDGATILTMMDVDHQIAKLMVDNCPTSHDDEIAQHGYARASGIVRGPWLPLFSKKRQANVLDTRPFTQSKIADGLMTLRVARAGLIVNTCVRRSADSGPC

SEQ ID NO: 996453 - protein, 293 aa, Homo sapiens
ERGKNEESLESYENGFRAAEEGVQKPAAETPDSACIPGQALSIHITLWDGKKRGDLPAEPVVFALKGAVQEHGCMREQSGEFLTRAVLSLSFRLWLSRSPSTIRVSTRLAFLYTYSKTHRNLQWARDDVARQQYPCGNNCSTCRAHGALLREEKTNFFNGIWRIPVREIDRRDSFAWHMNRSIVLLLKVLAELRDHRTLLKVSSMLQRTPDRARSICEIADRQVLVQWAFILTVKGAQRDADRAREGVRTAQGQVWGFPDRMTTMFTPRPSLRWQEAPMKNRWYGRRASREVA

SEQ ID NO: 996454 - protein, 152 aa, Homo sapiens
MSYDQRQRKGRDPGEGGEGAPRSGSTTRRTDANLKIHHVDFISTKPKAVWGWPGAPRVARYPSGEGETRGSGAPPGLKKVQKEEDDHLATGLAYMHIEGSLRDRHGSTSKNLDFRKSLSTKQLPEGAKQSTNSPPPTPTTHQAQTRQARRNP

SEQ ID NO: 996455 - protein, 158 aa, Homo sapiens
YFPAKRLLGSRAQLEKRSIEEKMRLLIDNEKDRWRTVRREKDAAEMLGAEIMAMETKLPCWRNKYMYDRYDMDSMHEKILAKHEYWTMVITCDGGSKPRRTENVRVHRGLRNDQRCSDDLCDLHETYYAQLARRRRMDIQWTDVNSVKSLFLSGLQCE

SEQ ID NO: 996456 - protein, 81 aa, Homo sapiens
MGHYTKGAKVIPIPLQLRGHPCSSHNATRIWQWMARPEPPTKWRWRAQNELCEEHEVGPDQREGSEDHHSPTVDYINPIDQ

SEQ ID NO: 996457 - protein, 136 aa, Homo sapiens
  misc_feature (4)..(4): Xaa can be any naturally occurring amino acid
  misc_feature (15)..(16): Xaa can be any naturally occurring amino acid
  misc_feature (35)..(35): Xaa can be any naturally occurring amino acid
MEGXVGGCQPFGNTXXRWGTTRSSAGLLTVQVTKXGYGYPQHQAWLDHQQPSALARAALCELMCPYAYVVQDPFHLPTIPTGTSNETGFIATHGKGVLYDCKDMLTNLGANVIRSLPMEFPPYIGNFQLNVLGIKR

SEQ ID NO: 996458 - protein, 168 aa, Homo sapiens
GPSCPYIQTLRVLSGDLGQLPTGIRDLVRAQCPPVPNQRAIHICDGIEADNTATLTLLEQSGSSSESSLKYNNVRGLDPVSSTPRSVARAIEQDGELEAPSQRGHGYHSRLVGPVGSWATGCPQLISSRAVDERFPGCMQGAQPCMCFHSAWVLWVSPLSRIRGAATT

SEQ ID NO: 996459 - protein, 296 aa, Homo sapiens
MAVAVMVLLCFGLLEAESCWSAGAVHKAILIFDCTLRDKLRRGPDEDRPVIWNCRRSASPVLQVGLSMRGSGHRQWDNEDTSCVLKEEIDTREQLLDIEEIPVSDSLVGHGSKSIEFQAQSRNEQVMEGAGSLRKMSVLEHRIARWLIVHWTRGRRWMRGGDDIAGRWSNQEEDQNEGPLGRMDSPSREDGKRALFIGRNVDAPIFSAIAKIRSLDKTGFAIQRPPVPLRKHPHDEVIAWAMRQRDPCAQAGGRRWKALVQRWSSAVCGTPRADCPGDLCPHRRVRVTGTPHDGVL

SEQ ID NO: 996460 - protein, 217 aa, Homo sapiens
GVPWITVAFDNEALYDICFRTLKLTTPTYGDLNHLVSATMSDVTTLTSDFPMARPSMLTIRKDWQINMVPVPTVSISLCLALPISPDRGTPRSIELSQMTGTHTRQDHSHGQEHEWLAGEAHGQRRRDILLPTRCVVCGSLAGSASSSDHNDRGRVRMTHKNDLTVARKNETGRPTFDWELGITTKQMFKEQGPVLDETNSTTLRWDLKGMDKFNPL

SEQ ID NO: 996461 - protein, 93 aa, Homo sapiens
EDAGAMAGEGGGWRQEFSEEEAATGMTGQIRLWGLEAQKRVQASRRCFYAGTLKRTLRVLKLPRISSLAGVKGLTMLESRSRVTPEDPGASVL

SEQ ID NO: 996462 - protein, 75 aa, Homo sapiens
PASRFQWRRLKEMIKVWNAMWSLTSMELMSHAEPSDVRTPESLLLTHLYGRAVALDTKDEIHWAIKARHCRGGAE

SEQ ID NO: 996463 - protein, 244 aa, Homo sapiens
AQLVLVTKGTGRRPGAHSGREPGCTPGCCFVRLSSRAASHAKRNRSYVTGAGPGERTAPPRETRPTEHGPATILFQKADSGTARECGLWDTRASSYLSERTSKNISSLPAFELNTGTVKDLSASFSHRDWETSVPFTPSVVSQPLESRPGGTHGFIRHKANKTPISTARLDGSTIAILVRAQAAQAHILGTRARKGESAPKVIRALGSKHGSKKLEQRDIASVTQRVKRPLVAPEWRTDGIVKA

SEQ ID NO: 996464 - protein, 147 aa, Homo sapiens
MWTTGLTKSPNVAPTLIHKTRSNCFQVHLNVTIHSAKEDRIFALFREHLAPRGHHNNRATRDRLNFGNEEKPFELRCNRWAPWIAHRNLCPIGNGCEGGDSFSFARNYTEGGDRSSSYLGPVNQPMCNDPLDEAAKKPNNTPPVPDG

SEQ ID NO: 996465 - protein, 91 aa, Homo sapiens
MQLSRATSAEKIFKPFVVVTPVSYKLSIEVSTLKGLLVQWYTVRNKARRLGLGPDWKRSNSSLAGNSGGSNSSVSITPPVETPVRRAHTFC

SEQ ID NO: 996466 - protein, 482 aa, Homo sapiens
RERPPLVLLLLLVQRERAGVCAARSSGQAEGGRPGQQAPGSLCQPTRAPSLSCVLQRRSAAGARQRAGHLPSLLRLSRFAGTRPRLYVLERHAGATTTYPAMFGTEHASGRGAPRRRRGTPGHTGRGRVQRRAPARAPPAQGTGTPLGSARDEPHAGATRVPRAASNSGHHRGHPGREPAHTRRFPWARATTAQRGSHAARKLRRSARTEHQFGRPRSHTHTARATALHRGPSSPRAIQSPPHDTASAPAQEPRDTKTVGSGTLGHPHLATHSGERPLYAPRRPPPHQPPPPRPFDQANPNPTPPNNFRHGHAGTPAATQPRHRSRNPVTHPAARTQRAAPRGHSRTSTPPAQSREQQTHPQRSTGAKPTITFYIYQIATNTIQTITTATNYIHTTPILQHPLPPPLLPLLSHYTRCTILTSLHDIYLHTPCTHTLTTTTQRYLYLHHLFTYTPTSPPTPPPLTLILPLSSHQHDNNHTTTH

SEQ ID NO: 996467 - protein, 221 aa, Homo sapiens
APEAATLRRWRALLLACALALAMAGPPPCLPADLLFLVSGSGFLLPLQKKFGPVCGPKAQSESLPGPGTAEPPPGTLGPKLLHSMGLGVARFPTDGPRKDFPLPSNLALAGAIGDECRAVALRKSAFPARTNSTADRRKSKRTTPLTADEENDEGGPDHNSTPYITPRRPGRINITRKQRRREHSRKAGRPVARSTRPPRYSLEPTRRAQAPGRTKSGREH

SEQ ID NO: 996468 - protein, 221 aa, Homo sapiens
LTFSASDSSAMAPSRKFFVGGTLEDELGGNAESGWSSSALLNAAKVPGRQPRLVCASPYCRILDVSPGEKHRSQELLVGVRSDTAHKCGLIGAFELEESQPLALIRRSAEATWCGPGAHLSRRTGDSLLEEVLDGDKMWVSQRCALVLLSQEPELREENRTCQYGRWERTIDTGESVCQSLGAEGWLLQEPRTKEVYQPAFTVARTGEPQVRSLCLMHASC

SEQ ID NO: 996469 - protein, 94 aa, Homo sapiens
MIDVAFEARTARTLTFVHICRKSSKGPYGLTLLGQGTPRHADDILRRIRKATGITRHGPVATGYRRCDHSVTWDGSLNRVRAVGRRAPFGLKTG

SEQ ID NO: 996470 - protein, 68 aa, Homo sapiens
AVKPDYDGSGLYQSRSLEFLLQFFATMMSARHISDDAADSWDECIQMKNCIGVIKNGRIVPNDARLKG

SEQ ID NO: 996471 - protein, 271 aa, Homo sapiens
MACLRRQLWCRKRGCWRLPGQRLACSSLSARTLPQNWLALPLSAVCCDCLVLPDAYQMGGLGMYFVAGAVAAECMPWGSLMCWFTPGEADGPHATCLFLLLASLDHLAQALARDAPGDALLLACLYCDASLATVGCCDLPLLLRTRRALFAHTFAWIAGSLVVAPMALYGGSFPTAGVPCAWNSSVQFSQKVLGPRLRYSFSCTTFPTESPNGWFGSTARPIYGPHDTNLRAPTFFHWAHWEGLALFSTQRGKPASVGLAIWGNPLVSTGY

SEQ ID NO: 996472 - protein, 106 aa, Homo sapiens
GRKIGIISIILYVQKTQQGTLNPVKGQVLKPLCLFEPVGIRPKNLRTQDMATPVRGDLIVSGHGNGPEIATHQLSQSAYGLPSHRCEGDSGAGLSGGLDVPVWPSP

SEQ ID NO: 996473 - protein, 110 aa, Homo sapiens
MAPAEHGRTTLEGSVMANDKCTGRTSASAKDRPRSRGNGPRKEKVVCYETLSVLGFSFGIVESVVSARFSQIHSKVLRMGPCEVTRAVRCYHSSCELELETAFLMYDTLV

SEQ ID NO: 996474 - protein, 303 aa, Homo sapiens
MLCVGPGALWPWDGNLGCFRGGFCVLRCRGRFRTWAVAEAAELAEARPRIRSGKQINKLGRLVNGTERSSPWRMIYLFSLPIKESEIIDYTILGASLKDEVLKIMPVQKQTVPDTTRFKGIWSAIRGLTIGHVRSRGSKVATKGRVGHRTYQRGHKYLRAKHTPWYPGAAAGILGGNTDSGKTHKTGPIERVDRAASGSCAGYVSNPGHPRGHLGNSVLTKTCGLKEGCTMNGLVQNRQHRPTEPKIKQTTMGKKRKATLYAILKTTVTETRTRKKEITETTNRGRCNSQENNDSDRNNSRGT

SEQ ID NO: 996475 - protein, 181 aa, Homo sapiens
RGRGSRRLRLEGLAGGCPAERYPRASRHSRATRGKAPAERLPGAPNSPQLWAEVCLASPRPTPVRRGPEEQERGTQGDAAFTGGTRWLRTYSCISDRTADSRPNDLQNRVRRPETAEYRDAGMPERAESDLRKTQQSTNMNSRDRNQRLRGLGQTPNGKPSDILNPERIQKNVTGLPDQNT

SEQ ID NO: 996476 - protein, 86 aa, Homo sapiens
GKMASRNRRLPALLPTLPGSYRRGASRKGKRQMAGSGDSAEKASADKMALLVLNDNSTHPSWKKGQWELTVVQGVLLGSGCQTIAR

SEQ ID NO: 996477 - protein, 222 aa, Homo sapiens
MKIWGVCIADGLVWCPELCAGRISSPLLVHMTDPEFTAKRIELVSKSLKRAIILVEEAKTFSKIQGAGANKDGTALTVKSAADAEGYLAHPVTCLLEAGDRRVNTRAGLLAGRDLVLQDSACMVLSGNLSVQRKFFPKLSSGRDEELSKACMRLQRRRYRAGPRHKFQRGTSRNQVPGNAECGMTALGNGPLGAYQVKGDLINHTGGCGIGPTVANKQFEAR

SEQ ID NO: 996478 - protein, 47 aa, Homo sapiens
HGPSPYPQGGYPQVPYPQEGYPQALPKGYRLRIPLEHLEITLIRESP

SEQ ID NO: 996479 - protein, 284 aa, Homo sapiens
MPFDELPWSSSTAFLYRRASTVILQGGPGTSWTANIGACMLGLASDRRGEAHDNDWRKKPEITVAQPSSSVSSYLSRTYRAVPDATQQNDRPLRREMNIIRRLLENVYLRAETTRQPLEAARKRTNIRTPSMTGIPNQDAPCQRLIPNARLGDGEPQGPTDRNDRRHHRKAIYTSMAEKQFGHLTIPNIAHARNWPSNRLTEKISLRTTEEQRHPTTWNKAAMRPYKQTQAGHTQMRPDGDAAKQHPSKTQKRMRATRERYTTPHRTRENQPTQRHTTIDYAQS

SEQ ID NO: 996480 - protein, 311 aa, Homo sapiens
MPCLWLTAGRDLCGGCIESEDPVLPTGLAIYLTTLLPEQCPARPVLALQWLSASCHAVALPTAVGHRFFVCTGDCFLCSMYPMGEPVSDLAGNPDGSLCAQCDYRYSRERLLVASTELCDPVQTQTWVTCLGDKEILGCPRVPLQRAEQTVLMLQVASCLQLLPSVPACAPHRRRPGGNVVGLSDSCWLDPLMRRDEEGGVKRLCPLMGHLARVLQEPEDPCQREGSGTPFKLPGPVAPVPRKILVHAGLPFLVPRAVGPARMLGHHTHGLCEKACGGCVTGFGVPPCDETSCRKLDKSNHMTTSKLRNNP

SEQ ID NO: 996481 - protein, 252 aa, Homo sapiens
MRRQSWRVDIRHRQWTEKVRRQGAPRARDIYPEGCIGHAYTRLTVQKKPIPLFNQDCQLNKVSNHEVSTNRTRTSARLSRDVIRIDEAFLGAGKINYGRGCGDHILTEWCAVSRRYPILKGMCTAAMSSRVPHAASSGQGGKILTFDQLWPLDSPNGSVDTVLLSGPRHGSERCTGHFGKAPGNPDQQHQTYVRSKGRKCERARGRRAAEATKSNPGSYSLIKKDLVSRNTRRGHRRPDPGWATQGMNGDMD

SEQ ID NO: 996482 - protein, 50 aa, Homo sapiens
RCSEKPDYDGSGSIKAEPGSFLLTVFCHHAVSSYTCMQLQFLRARSNKQL

SEQ ID NO: 996483 - protein, 314 aa, Homo sapiens
GACGVPDGRTGPPGPPGMAVVTLVRGATHMDTCTWTLRHLTWSSTATDFDWFFLDCLRARYTEAHGLAQPNWTPSDLASGATCTWAGPRTSSAESPPPSATATEALGCCCPRMLLQQTRAPTWKACLHTDNRTVLAHDRVAWVCMHFSECHRVDVDVDTLVNTEEGVARNKPSEDAEALGEKPVARRGTPTFSRKIDTKRTKTMKRERKSRDEQERHKRDNGTRHETGNTGNQGDYKRYRDRTRKPRPTDDEDREREMIDRRVYTNDNQRHRQKMTQDTSRGTKTREKHRTTKGHDDGTREKKKTQPQEKTRRN

SEQ ID NO: 996484 - protein, 125 aa, Homo sapiens
MVRTRIADEDHLITQFVCHRIISSLVRTGCGILCFLTSYKGGPSVKNKYPDASRAKLYIRIRLKKPPPALTHVKAPPQFNSKKSGRTPSMCVTLEVHRMRIKIRTRPSITIACLFPESSCLQVCA

SEQ ID NO: 996485 - protein, 200 aa, Homo sapiens
AAVPPASAPARKQTRSPAGPDCTLHAAALQASVLLHMFHVLCLSCPTVQCGSIVMCAPLLTVAEEVSCATGRPATTCGLDSMKDEEYEQMVKEHAGDPARAAGGASAAQEPWKQQLTEDGDSFLHLAIIHEEKALTMEVIRQVKGDLAFLNFQNKLQQTPHPLGCDHQHRQKLLRHFWELDVILETPRLSRKYPTLQLDM

SEQ ID NO: 996486 - protein, 139 aa, Homo sapiens
LVRRASSYKGSTFHRDDPFLHVPGGRHSPTHDGHSAGSPSTEAAFLTRTLHLNARGARCPVQWHNCLVHNRATDSQCLSLRAPIKTDWVGVARHVVSRITYHKRALDGVNKSRICSCSNSVDVTSMDDCQSTDLWPLER

SEQ ID NO: 996487 - protein, 213 aa, Homo sapiens
LLEIITTEKTSTDTSAYSCEQYGLKQGKVIIVVKDGPGLLYYQVSMLPMMSEVIRILQEGVDPKKLDSHDHKHLAYPVGCRHTGWMQVEVVDVAETCGGQILGQKTKEAARLAAERTTKNTDSHDSIESHKRDYNITVTSHINGQEAYTQYTYQSVVTAPPRTTQLPDTRTTHITHQTLQDRQPTDKKPDNTHYKTDTHHTTQHRPERTQSHK

SEQ ID NO: 996488 - protein, 322 aa, Homo sapiens
MPNLFKKLESDPRTRTLLSDPTYRELIEQLRNKPSDLGTKLQDPRIMTTLSVLLGVDLGKYEMRSEEIATLHSNPSQKGDQGRDQMEEDLPENKKQALKEKRAGEQNATKKKDKTQTVKPNDNSQGAGPNNMTNINKQAEEYFEKGDIQLKCREARVTKDTERWGEKTRERIYDRRQQQHATNRQNQLAKKKKVQGMHIQECNKVYGQSTETQDMRQEMASRKRNTRRRTDGTDVHKPDRSRPREQRENGTEREHRQKRTKPTRTGRSTTRRNEDEARQRTRRKDSDQKNETTKGTGDRKHKAENRKQKADGRKHTQAGQDN

SEQ ID NO: 996489 - protein, 227 aa, Homo sapiens
MQETDAKSRANVARGPKAKTQPYHEDGSKKAHAGQGTQQTGDTHNKKTMKTNRSSAGKRIDITKERHMTPADRRNGQRNRIVDDTKGEHKGSPEKKTEQQGPPNAVKDNPSEAPDRGNQTEQGRHIATKLDRHGDNRWETKIETENQKKHKEKDSAKTHTENINTPKREGEQDDRQHGRRSGQKRRDAMQDEPEPERQKKELRRRTHKTPKREESHKKRKQGPRRNR

SEQ ID NO: 996490 - protein, 404 aa, Homo sapiens
LSQQADGDRFGSCKSCGWLAGRTVLAPCVETSLQQKMSAQQAQAMELEALALGGSTGRPQLQAEGLRAALAEGLRLSGKNFGTAVVQPAVSWHSRFQQAAPKQQLSSLTTGSTQECSFQFRPCKAAGLCEQVSGSQYLANPAQQPGGTAHRQLGLQAQRGRPELASGKRAGSKHHRQDLAVTQGATLALAHSTEKIYAGRQTRYPYLQNPKTSNWDTEEQTRKSTQGTTHCKRTIAEARNRRDRPDQATQREHRRQGAGMHETKDSIARTGRKDEHASGECGTSQQWEQGVTCRENRQAGNAEVEPRTGTRRSEVYDDGYWVTCHHVKGVGACCRELRAAKDNGEQAQGEEGARRGETHEQRRRRIGAGGTEKQPSRRGEPADRQEGRGNGEDHRKKGGGRQTE

SEQ ID NO: 996491 - protein, 402 aa, Homo sapiens
VFVYFLLLPRRAWRSTYIMMRKSVHLHGQGRAAATKVGSQVYGECDQTSEHEHSDSLAGHLPRGQRSCQLERINVYYNEDNEAGKYVPRPVLVDLEPGSMDSVRSGPFVDRSSGRNNFVLSVRVSWLGNNLWTNGALAQNGAELVDSVLDVCEEQGGFMSLLTDLGWALPDEPTTHGVRGDVSICGCVYPYSLRPITGDRRYGKKKGFVDSTYTGYEAFNPKVCNHKGMDVTNFKDKESDREFLTGTINSRAGPEQANRSNELTENSIEQTDGAYQKIRQQGDDDPPKGNHEGPMRGRATKHRESQARRRGHSKDRQKTNLTRKAGEPKAHESRHEACTSQECDPQRTGTVETEGQHNEKTRQIKDKNLAENPETDKHSSHANRQNDRQPTKQDRVILPLQK

SEQ ID NO: 996492 - protein, 354 aa, Homo sapiens
MKEAGDGSYHCYCTGDRSIAKEGFEKIATGANPGGNQERCDVSCWNAVIAELKKQSKPVHHPWTRLHSVATISAKRKTNDIVLNINLCMHSETTMLERKGVITAKGWQNTPCHCLEFTTVIDRQLKFDSTEYFELQYTFLTTLKKVSKHDPFLGITYVPDGPEPSKQHIGIKAQTEPDCTENAPPQHRKTKGQRDRKSMRTGRQHCPTQPRHTELGIRSETQGARQPRRPQGRGETTKTTQPYKMNYAHGGANTHRKEGSDTAISKKQKGKSEQRREAKQTRRKNRNKRTRQRSANKREEKTEKRSTEETEKKREVQEEEKQGKEKKRGNKDTAQRPTNDDNTTRSKKTNKEKP

SEQ ID NO: 996493 - protein, 380 aa, Homo sapiens
RATRLAELQEQLKAVHEQLAALSQAPSKQTNSKQARQHSTGSTGSTAQQQHRHTGSTGSKAASYDKCTGRRQAAQHRPKVCSAMTKQAQHARQALCHRRPTVTTTGPADQLKQRRHSSIMPSYDIRGTRRRACHMSYDEQRQLSLDINRLPGSKLGRVVHIIHISESPRSGTPTQDEIAHLTLDSETHHLRELGETMSSHLFPAQEKGSTGHHSKTRKAHTAPRSPSSAHSGQPPRQLNKHLRGVQRQEHHHQHPAGQKKAQDTTTTGRPDPGSRTSKTTEIRETHDRGPRRNAKTRQTGTAPTNRQTQTQTQNPQTTENRPGAHRHHEHENRQEPKTNSGNTGAPNPRHPRDARTPPQPHTPPTRHHTQRTRRHDPRTD

SEQ ID NO: 996494 - protein, 281 aa, Homo sapiens
MRLGAPPKHGKPKKQKLEGKAGHGPGPGPGRPKSKKLQAKIQEYDSSLMTLSTVPRSPQEMMPPTGSGLQWQPYCADITSEEVRTLEEWLKPPEDEAEHEKIPPLGKHCPSAGAQEDLLEEQNGWGPGKRMWLTRRQAHGATDQNWTLKDVDALVKKSEAQHGDSGRWVPFGALSKATAGLVKKNIPREDPFCHGVEHNREKEKTHEKKEKTAEAEDKRAKRKEDKDREKGKDQTNQRDRDTEKGTQEQRRTNTDRTRDTKEHQKAEKKKMTTPRTPQHKA

SEQ ID NO: 996495 - protein, 460 aa, Homo sapiens
MLSEISLTNTSVLYKTLCQRGPLSSLYNCISTKISQFNPRRCKGGFRNLPWTLFMLVALVVDTEAHKSEHVPLKARGSQEFTLTNGRANPTLAILYTGSCTRVRYTAYARNRLRTVEKQNTKSNQNTNSKKVAISHNTEQAHENVYVPGTSANGKSPKNPTVELCARDTMTPCCLWRTNMHESLHRGITTEGHDIHIDVNHRKAYTERHAARQCHEPTLKGQLQNRGHTGTILDDHEKHKNSIRTSADKQQTEQPTETQETRGRPKDRQLTRIPRPTDTRQNEKQNKRDKPQAIQQTRQRTAPTMTPHERHTERQKCTRTAAKRNSRHTTQGPAHKKQHEPNALGYARPPTAAAPGKRRRQDDPPSNRAQRTQPQQSTRVARRQQIQNEPPYTGKHTRQRHTEQTPRRRNQEKGNTKPRRRKTEHTAEQTHRRKRTHSAQKPNGAPHTQAHNTHNADEHN

SEQ ID NO: 996496 - protein, 209 aa, Homo sapiens
MIDARTTTTGNPGKSKVATTISYRIDKLLDAIRTSEIPFHFLQGWIPGSSNGQQNLRYYLLDLRNNYYALSRGVRKALIDYPFWMASEREPYWDQGPLGTTETYRITRPRVIVHLVVDADHRTRDRPRRLGTLTREQELHTAEPSQNPQRVGLCNMTNYNSSGAQRGATTPGERQHNRRQRQRKQTKKGVHEGNMVASPRAEMTGAGTR

SEQ ID NO: 996497 - protein, 339 aa, Homo sapiens
MEGGPHNIQADDDTTEKEQIPTLQPTQSQPRFIRTRIRHPGAARTKMLEHQRVSPPDTPAQRPARTATPLGPTMSRRRPPLQQPPPGQARMDAPQGPKETAERTDARTTGNPCPGRTPASALHDPTHRRAADQRPHPQHSKHPTRPPTPPRTATRANHSNHGAPRRTHHAQVTEHATAPHKPTLTTGTPVTSQGRLPVTAPYTHTPGPPLLCSLSPCTPDVVPSYLRRHSLTGTSQQRRRTLPRRRNHRRAARPTESADRQGELVVLSCRPRQPRASTIRKQQSQHGCRRATACDARTTRSPRALSRAPRARAEPPPTAQRANASHRPRPRPLRTPLPH

SEQ ID NO: 996498 - protein, 394 aa, Homo sapiens
WWTQREGEEWWAFALGSEKEKSMPPALGALCGQCVGWMLGTPELVVVTDVCSACGLRHALLPSCSASRSCWCFGRTEIAWVSWQVYCWWPPNLLVVHPNTTGLPIRQQYMDSQSDADVGCPMTARVLSDIGRKTPCVMRERACRPCRGMRRSQGHMTYSSTRTSMHGLPDRTAPDDLTEALSRQHATNHTFRDRQKHSEIIGIHNMHAGFSTGHNVDLKQDERRILIDIGQACNGSSANLKTRKLQFIQMRDEESSSSVALLHNGRTEPERSILAQGRISALAPKGPQRVHEDQRHGERNPDFPTTQHWPPSLERHLAVMLRTISQPVLTPPMPYTDPQRKGIYTPHTKPRIHTVTFMTVSLSKVPNRNATTQTNHHTSLPTHAASPQHHPLFT

SEQ ID NO: 996499 - protein, 78 aa, Homo sapiens
GQHGEDGDPGSTTQTEPVNGFVVTMDDDIAALVVDNGSGKCNGQGYLQVLTDSHHQRVVIYHTPRQIEEQPHNVPKRL

SEQ ID NO: 996500 - protein, 341 aa, Homo sapiens
MSGSSRSEGAEPAMVGIESQADSRDRHGLACLSVPSPVRMSASTPLAAISKARRGHGLDHSDVWTVHERDGAYRAMQHNGLLSWTGGFQPGVTTIGAQKIRASPKSRSMYIHCVTRATGHRTRGHLGKQCLSAAHSFANSFVYKYASGTWHSKDPYFPKTPGGPRIVIHPVRKGQGSPPYAVGLEDPESFLWDPLEPPTSLGRHMGQPRTIHKPEREFHQGGTLALDEYAIVSFLRTRSATAARFQKIPVTWSGAGVTRMGKFTPLYVREAAGREADRGIAQWDTRPHYIRSSGQATIHTRDFSRWFVITCRTGERYAKCTSTVECNIVVATGAETTVRRQ

SEQ ID NO: 996501 - protein, 406 aa, Homo sapiens
DLCTLGEQAKETEERSELQCRRWLLADGGDSAPLSPGDKEDASHQECPGAICPHPSEHNASRMPPGYRRNLKAQGKPSTSEPKRAQNMQATKEPQLSEACGPTAQTWCAGAAESWTGPGLLCHGQRHNSAQKAPCPDNPNTFRMAHCCSEWQQGTTISRTQDLAVYRTRDSPLHVSFAHSNGNHGIPPITASRKKDEHHEDAPEASRLTQKPKPGENTMKETHTTHTTDDRNDKEASKGPAESRPSATGHTASTPAQKDEKKDNSLERQWNQATRGLDEPTQHKQAKNTPSSRIAPTTQRRHTTLAHAKRANELHTRKLKGKNNTLTHSEHPRQVYTDIITTTCTENAEETKHKDLNTTTGRGKSATKGRRHDNEVTSDTTRDNTRSADKRDQAYQTNNTTLTPYQ

SEQ ID NO: 996502 - protein, 221 aa, Homo sapiens
SSFHHTPVEELYKRFHACWRGPRDSMGRGRDWNVDLIPKFLMANGAAGNRCYCMTEVTRYPGTIDRVGAMVQTSSFYKGGSDTDRTKDATPSDGLMVLRLPRSDGLVFEKAAVFRIVSWMLCRQTFDENDPKTFEGVDPQTTSMRDVYRKYVIWGQDVIDLSLAMPWRSIRICDYRGPGHALRPCNRFKLYSESLGRYGKSPYLYPLYGLGRAAQGLQIEC

SEQ ID NO: 996503 - protein, 299 aa, Homo sapiens
SAGASVHHERWWSIVKEGWLHKRGEYIKSWRPRYCLLKNDGTFIGYTEELAAEDVDQREAPLNNFSVRRDVPAELNDWSGPGHSVTFIIQIVALSMVAPAGHTIAQPSHVDDSLYGAGDGVVATVIRDCGCRAHKKQEEWGRWTIRSELTHGDNSRGMKEYVEVSLGQAHRHRVTMNEFEYLRCWWARALSVKVILVKEKATGRYYAMKILRNEVDRGQRNEGGPHSQRVTELLAEVQATLSCTGPGSTSAKTQEPGFCFCPLEYAQRGQLDPPTGPERGVLPGDGPVLMGLNGCSLAN

SEQ ID NO: 996504 - protein, 282 aa, Homo sapiens
GEESGGRRRQRAWRRHFAKWHFGAGGPPGRGLALRGGERLGRRTPRAGLTGGRGPDPAASQASFLLCSLHPPISHAALGQTSTGLVGSGANTEQVGVEQLCSPGGKLNGWNQDDRWRLAGKTREASSLQEGSQPGDSSSPGPAAPISCNTGEVGFSGKAPTVLDPAPPSRSSQRYFLGWPAPSLRYSRPRGGHISVTRLKKRQAAFPGGQWLSKSRCLKPAPFRQEVGQVRWNAGWKAFPEKKGYPLLCMEVTQASALMENTPAGGDQGRTGRRESQLGWEQ

SEQ ID NO: 996505 - protein, 80 aa, Homo sapiens
CKLRGNRYLQCMMKLSQSIRSDGMPEDKHFFAAMELMMLLLDQVVAVAPTSQSLYHRKEIDYVIALIVEGYELWVWFRWD

SEQ ID NO: 996506 - protein, 174 aa, Homo sapiens
MPSANLGRKSSHRGVPPQGPEGKTAAPWDRKYTTRSHKPREGYEEKSTRGHKKTKRGVPAGGNHMKRPGVRRRLPKNAVVCPRPPERKLWNITERKKERPKRKKKNKKYEYHHKNKTDTRKEKAQTHRYHAATHSKQTHTTTQPSKKTNTRQRRQAVDNRRNTSTHPRSLLYKT

SEQ ID NO: 996507 - protein, 114 aa, Homo sapiens
MDAGDRGQGWILSPIFFTKGLTHEFLKKSVIKFKKPGNHDKNLRKQNKNTAASIAQEQHTKLLIHGEANNTYKEKSTHNRASIEPQPRPLTTKTQQHNTQTQKKQSNKTKPNTP

SEQ ID NO: 996508 - protein, 68 aa, Homo sapiens
EEGGRGQGAGGRSPVVSDGGAPGGERTRTCESVKGADGDAGDRRTNRTSRQLSLNDGVTMTSTMNLES

SEQ ID NO: 996509 - protein, 415 aa, Homo sapiens
TDLVGQDCIRLEEQLDNRDQGAPGSPANRCVWTEKKAEGVCCLHGGLYVAVGIGLYASTTVPRTVQGHSTRPVRQLDAVSLVGVPIVGGPGGRNALPTGELSSQLSWRYAYCRRPMLDVTVKSSFPKRTSSGSWGTCRLVGAPDEWRQERRPGDGSDVKRVDGKSVMGAEAEAAVKAFCSCRLEMDGQTDTNRAPLSQEARSKAFSAPYLEEHMPVEPMPSYSEEYRTLLPNKALMKHILELSLEKRVSGTHHGDMTRDDCLGEGQKERVTPRRHKGARGPRRRGARGKTRDKTLVRQHAEELSRVPNDTPGGMRHLKKQGEQDTLKQRTLERGGNRKYRRPNNGARATTEHGRYISRAKGDEQSSIVSATKRSEDHTSPYYTIAKGGTKNERKIRKKNRRTTKKKYDRDCNAAE

SEQ ID NO: 996510 - protein, 390 aa, Homo sapiens
MSRVHSLERRLAQLLLAAHFPPNWQQGRPMRLERLAAAGTGAPGPGRWWWPAATQAHPVRCWRGSVQPPVQACHCKAGISAQGTNCMLDIPGKQLLPVQQQQPSSHSTPAQHHLRQHSIWSGPLPQSSTAGIAIPARLQVQTVGTQATDPREIHSTDDASDARSMTASWRNQDVDTRLQDRTRGRLWHVTAERSRERNDVGTQHAPETASRTDARTTVGTLRIPGLDQAQYPCTEGGRGDQRWGLTSDDEEMTSSAWEQLEDKTHQPMMAENAGDTVGTREARGPSLSQDSWRTGRSDSEVNTRQQAEPRRDAGPDEAKGRPTLGVQTRPETRRGQGKKKRKRVKNKKQEGKHKQKRNKMNKQIDRNPSERHTQRATGDKKRSQRENTKE

SEQ ID NO: 996511 - protein, 96 aa, Homo sapiens
DYVKRSHQDGRRSLEPASPSVSYSTMLIHNRQSQQVWEAARSMRSRTGSRNQAGGMSRNRHQEVLSVYRMLASRYASAMGQDAYGKYCTQMLLEAK

SEQ ID NO: 996512 - protein, 189 aa, Homo sapiens
  misc_feature (28)..(28): Xaa can be any naturally occurring amino acid
  misc_feature (35)..(35): Xaa can be any naturally occurring amino acid
MGFCSDRICGLCYLLCSFEEAFAVPPRXARLCGGXVHPFRNCRDGNPFAQRRGVSQRIGRTILCLAWPSYSALGFARRKVISPSEIILILGPYVIHADSRSTRCRWSGKKGISHYRYTIRMKGASQGCSTRTLDQNARFVSYGGRVPRRHDYLGVTPGRARWFKFGAPLPRNFPARKGVLGNGKGGCSS

SEQ ID NO: 996513 - protein, 108 aa, Homo sapiens
PAGSSPAAARRSPSRPADWSRTVLGTGRQKTLAMRAGNQVPAELLAPGHELDVRGLVCCAYPREPLCPCPETAPPPLGPDSPNRSFTEMHCMSGHSNFVSCVCIITLK

SEQ ID NO: 996514 - protein, 209 aa, Homo sapiens
GPTVQRHTGGTHSSAVTLILQARAYVGPHRPGQVVTRTGFCTAKGGLVSSYRCDPPALSNLHMFYYTTSYEDYVGWPFSVPGSLSVTIYSIFYPHTETWVPLNEIVIQGSRSGDRGVCQLPMPAAMTVCTLYCPEPLRRQGIFCIHPLRINLGGKLQLVCFDKTGTLTEDGLDVMGVVPLKGQAFLPLVPEPRRCLWGPARALAAAMPS

SEQ ID NO: 996515 - protein, 276 aa, Homo sapiens
LFNRFSRGIYTTQTIVHMLRVIADELKVKYLATYGNFDKDITGAELYDSSMYLISSETLEMKLVSCNDAQEKTVLYVRHLVSVVTGGNSCEVHVECINPGCRFWWDRGITVNLKSEKYWNRYPTIEWIDGMNKAEESGDMSAAIFPYFPEMSLTLYDKGVLWHRQLGMDSDYTKATYGNLKALFPAEAGHLVHYVVPVAIIAKFRVHSKSAQSLALPSEVAPPRSRALHNRNGLAGGQVLYRKYAHQLNCRAGRKPTRGMYRADAGPDPPVERIPK

SEQ ID NO: 996516 - protein, 296 aa, Homo sapiens
MVIRVGVFVEITSGVGSKRPLCGYNTARDSTVDDSRDSAALTVCSTIGPGMVSCLFQTLYGVALLVVAAYVASVSGPLSVLALGPESSSSAPRMGDLPSSTKRMTWFHRCGGEHPAHRRITTLWSLLSGSLFLCLWRATACGCPSLWALFVSRFGRRNSMTECMNLLCFVSAVLMGFSISGRSFDMLILGRFIIGVSAADHSFVPCMFVQVSTIVARGALATLPCWHLSGFSSPGSADSSWQPDLWLLWLSSPALRALVPCRIPSVSPPTAVSPPPLPLRQIAPPHPAPPPLPASS

SEQ ID NO: 996517 - protein, 240 aa, Homo sapiens
  misc_feature (66)..(66): Xaa can be any naturally occurring amino acid
MLGMLLPKAGHLPPQSLILMLHGQELGVHALLASHFYRRMHGPSSELWCTACPWLDLLVSCDILRXVDTTWSLFLLYVLQWKLLLGHARKHGCWNSVSSLSGLDQAPCLLDVGANFPAKPYMLSLRRHEAGHVVVLEVLGHHRPWSKRGPGRTTVEAVSRSGSSQMSASVSGSLTRVHSCGQEEPGRCVGPVAPGSTGRSISSKEGIGGRGAGRNEGAEGPGVPPRRPDFPGGRDRWPWP

SEQ ID NO: 996518 - protein, 53 aa, Homo sapiens
LVQIKGHQKGLQRPKGRALQAPGVFGDVGLARLPADSQSRSPWYRVEDATPRR

SEQ ID NO: 996519 - protein, 242 aa, Homo sapiens
AERVPGAGRMAITARRAGTPCVPACWRPAPVSPRPSPGAPLTRCAARPAAPPRPSWILRSDVAARGRTAEPEAMSHEQSYWCPGDDVVLTTRERGYPGGGHQEQQMHASNRNDITINIGAGDNTRRDHGISKERQRKRANRAKQKAEDLTPSATLRGAQAWEQMNPPMANTHESQCGDSSRTEERQKTQIQVDGSGCERRRTTKRHRAEPRMEQRTHRRTDTPKITRIRVACCPRDAAPSYA

SEQ ID NO: 996520 - protein, 123 aa, Homo sapiens
GPAPAQRAQAAEPAVVTEQRFRVMTADEQIRHGDAELRPDSRCALCASHPTCCDPSAESFASDRVFGKVPCVQRAQGRITPLDDPVTPARMLSKANWHESFVRVYSRKDIESNLLLPFAEPEG

SEQ ID NO: 996521 - protein, 208 aa, Homo sapiens
HPTPSRSRRLPSETCGSPRGCVCLLPGPHPTGTAPHHGWHRRLGWHPGIHRPRQGLRQLAYDWATVNGSRVAHGGEGDTRSSLPVALVVMAVPRQTNRTTAFSHLPTLMAPKSSLRTRAVAQASHLSVEVQREVVHDKDQFPEVTVGAVRMRNFGGNLSFRHWPTLFSYYNITLAKRYISLLPVIPVTLRLNPREALEGRHPQDERSA

SEQ ID NO: 996522 - protein, 204 aa, Homo sapiens
AGNDGGHVSARAEWGPYKTEPATDLVPAGDSSLREGGRQTWTYLQDERAGREQTRPVKPTPVRAGHQEVTLNGLAHSPHRRLTGGSERDDILTWVLQAEDGHMEGDYGWPTFILLIMALSVITCTQWHAIPLDSREHDEEIVLDTLRVKCSVPDVWLVAVHIERYSTVFGTALNYVSLRTSGCWRLSDPDLATSPETFLQQAKG

SEQ ID NO: 996523 - protein, 310 aa, Homo sapiens
PAPPRLMATDSRAHRDPPAVAGEAPVLGPQPRTCGDSAAPRRLPVRGEKEILALVQGPAGDRVLRIKVMEKKTNDTPCCHHTSLLHTRDCPQKCADTLSLTDDWQPEHSRERSKNDTYFSVASPEALKRNSASFADHYADHQPAPTHHTTGTTSRHDKSAPPPPDGGTTRDRRKSTDPQRERAHGATDQAPPTPHPRTTRRHSSTPTPAATRTTPAQATSRQRDNTAQTADTAHAREQGREHRPEPGNHAAGAGSERDKKYESSARAVERKLGRQSEGRGSARPRDTPAQTPDSAQEPEGAARAREPERA

SEQ ID NO: 996524 - protein, 270 aa, Homo sapiens
RMKKQTKVELPQEAQIYEERLYVLLYETPRVPTSPAGRPQAVAAGRVPASEDEETFELRDRVRRMHVKRLQQLRVNRTDSGHRDRTPSRSDQDPSGEIRGTGGPISRSPAGNPTPVGPTTNVLTGLHMWVHPDVLGNPRAQCTRGHWRPRMSPRRGPRGDEGWGPRFAHAVAPGDATSLGRPAVLVPILVTIILPARAEAWFWSLGAYGTDPTPAEKLPLGPVQKGVLALSGSAWGDQGASGGCEGPLVRTSSGTGDIHLRVTHAAGIAS

SEQ ID NO: 996525 - protein, 232 aa, Homo sapiens
MTSCDVVCHVKTLTDVQVLYRSRNTGQRAVLKFAADSGGNSNVLERVHSWNLSLEPELPEARPFPSESSGRIFWWYTDPQVMMHSEGVPQRTASYVNRMAYLLRCVHTDSPLHYVDIAIPMSNKQGSSRSGLIVVDAGSGKLGAWRGNMVPGSTKWEGHAVMLELLQEECARDETRRGQLVLKRAAAGRNYGARKGSKTETPVPAGVTTGSVQGPRGIRPSKWERANVPPET

SEQ ID NO: 996526 - protein, 112 aa, Homo sapiens
MRVRHVCLVSGFGPRLGCSYINAQQTSPCHSALLDQALLDSLSWGGGRPVRALTSVRSNRCLGPLPSEPMGNEPHRQERTGVRVCHRSTNEEQGFVEDTDGHSSICAQEGNQ

SEQ ID NO: 996527 - protein, 92 aa, Homo sapiens
MPTGSPSPDLAPAAEPAPWDAAATVRRHPTDQRHSQYLREGVSIDDIVEGKREKIPRLYNKIIKIETILYEKVKKEREIKLYNKKDIKEKKR

SEQ ID NO: 996528 - protein, 102 aa, Homo sapiens
MTSSVLCGAPADGGLVIGGNPVSAERVEPVSSEIQGQSLESRWLLPPAGGQRLLSPDRPPSTNQSGHRTSSHGIKIDLVQKAKVDEQAERDDDIGSLHEVCD

SEQ ID NO: 996529 - protein, 122 aa, Homo sapiens
MCLTMGCTITEDERLEEGLSTGSEKFIISSDKSKVKFSVRWKFCLDMIEAQFLVYTKRFWLVDEQLIRCCQNENDESIPVDLGLEWAGPKTSPFRSTVWQRLAWVGQGSGSRYMCALEVTVR

SEQ ID NO: 996530 - protein, 324 aa, Homo sapiens
MLLEPGNTVQRGLGVQCYKTSSSHPVRSMNCASAVHEPPGALWVSLRWYLQVLRRVSDVATEAATLGLMLLEAVWLGTPGPCEPLELGSARSEMCMRIVIEGNTVCPTSGCDLGGKPTGEHDGTLLLSSGCQVPRCMDRVIITIDNPSRVTCSFQLFISKESVSHMQITKRVSLCCFLLCILVSPPGAAQGPQELSVGKTLLGRGHEPTWAVFARHLAVQSPRSSRGGPWHELSPQGPEQRPAGLVGGTGGKNSWSPGKVERCSAETVRQSSLTGRVKARRGPDPPRAPVPRVEGQSTLTRVIQRKASTRKGAPRPDSGGHASA

SEQ ID NO: 996531 - protein, 361 aa, Homo sapiens
QPHSPRAEPGSVRAASMLKPFGYLLEGIFSLRLHLPMTLFIVSWRLGVLAQVRPGFLGARCAWMLGLQGVACALYRHVGTQALVHIYSGFVSGVPRSRYLPQCVGLRVVSLHTSRPSRVYSLARLGPPRSLLAISSCVQPTLAPDPCSLSAYYCKLGVYSRPVSMLIFEWGLLETCGCAWRVAAWGVVSWLAVGDDHAFHACFYGFTVNPCLFPREAFDSWKGLIYAYRPESAPGVTGVNSCLRHRVANYPFFHIDVPRPRKLISRYSRIRRGLSYRRKGSAQSKFSEDCPGWSSPPIIVLPPWLIRGINTDFGAAHALGCLLERQIINTCVAKAGYQKAGITFHFLAVDHVRGGSRKYQG

SEQ ID NO: 996532 - protein, 270 aa, Homo sapiens
  misc_feature (126)..(126): Xaa can be any naturally occurring amino acid
MPLRAKYDTESEDDCKRPFIAAVPYLELLLEAHCIALAACAQRILRPLGDGISAEMLCDSIVFVSQATRISSGALDLLEALRSVDHIVRPTKTLSRCDGLIDCLYRHCLQIRTVTVDPEEDVSLVXLLADTGHVESVVMSVPTVRCLVLWHRRTMRYINELETPMVWVGRLGRRGLQRPMEGGLDWCAGSGVLANLAAEGISCEECEAVRGLWRGTLVIDVPVAPYAWLPAWLDGAMSAGGGNLPCLGAPAVGWSVGAFPTPPHPWSSRG

SEQ ID NO: 996533 - protein, 161 aa, Homo sapiens
DTTHRRTHSGGKENNKGRRRTPLTDSQTGPKRQNTETHTLRTETEKTKAEADRRRHKNPTKQEDNKVKTRRIQTLGDSTRTDKGHGRGQGTHRHKHTPTGRPQENKARSSKKIITINHHPNCMIGDKEPDSPGQTPPQKHTRQAQWDNMTRKKTRDDATKP

SEQ ID NO: 996534 - protein, 266 aa, Homo sapiens
RAHPVKRQRMECALDQLKTGSPPWWARHGATSSVHRRVQGPVMLPSQAPSAEFPGPQCTRMPAYQELGGRRLDLPYGRKRGRVTIEDHELQICVCDSILCCWLSMESESTVHEEFRAESIHSKLDSKGVSFDNRCEMVAHEPVRVHQSLSRMGYRLGDHERILNSSEACHSTWEGIQAGIGARGAGMGFTAYDDRYSCSFGQAVGCAEARCDPHLPICCGACLIGMWQTPRRNSMMALENLVVKSVGKIYYYYRRSRYETSVMGAL

SEQ ID NO: 996535 - protein, 111 aa, Homo sapiens
GLLKKVTLLFLLGLWQIKTWHKSGVALWGDYSSKKHQIPIFLRLRSPSRPTSLGFHTYSEWGACTDTTRRESAALCVGAHTRAHTRGEPSSAQQKSAQRGETINAQERARA

SEQ ID NO: 996536 - protein, 319 aa, Homo sapiens
MLRRALLCLAVAVLVRADAPEEEDHVLVLLEKQLRWRQLGVHNDSAGGKFYAPCVVGHCKGIVAPELCQEPDWRNVEGRRFPRSRLARRAGRHGRSLTLAPVDVQGVRRFIPHNQLFLQEWETQAFPQGNIQGGQKRLTDIVNWSEEASRARHVQQPGWRRSCERSWVESSEVAVIGFFKDVESDSAKQILAGVAEVIEDIAFGITSNQVDVFFQNTSVDKDGVVLFTEVDEGRNTFARGGHPENLAALLSNTTVPLVTEVTEHKAENLGEPNSLLVVCPTGCMRDWHFNARASGQLPSPRDRTALCFRRERGHRESTP

SEQ ID NO: 996537 - protein, 289 aa, Homo sapiens
MTAREPRKEPGRCVPQEGPSIAGKVVAHQEEPHKEGDTHCGPLRVTSQNDYEAVAGSTHWQRDGVAHRKGKSIEARRRSPQAQQKLGQWGNITKETWDTNMAEREAPGSNGTRWNNGTGQRAHTGDKGGTGRYKSTRREETSVMPHRRLRARASKKTTVDTRENALGSTHGDREGVKGEGASPKTGAHYAKGESLRAPQVHMEGIKRMASTTGSRNGGPPSRRKMSHGEQNNYRENNKTTKACIEGHRRDHIGRLTRRLLQKARPQEENETNEGATGDESHKKDVVRHD

SEQ ID NO: 996538 - protein, 91 aa, Homo sapiens
MEPEFGGIMRATDVPDQVPCCVTCCGLPDEDLQRCGEDDRGASYLWSRAVAGPHAGRFDPCETPLAQRHGPGTRGRALPPSAQQTRASLAP

SEQ ID NO: 996539 - protein, 450 aa, Homo sapiens
  misc_feature (85)..(85): Xaa can be any naturally occurring amino acid
GQLSGVAELLGLRAPGVFRGSVRVWVASGVQCSRSGMRSSYARSAGQGRSQERWQRRHEVSGSADPVRLAAGRDGPCGPGQRLRXSQQTCIYPISQSQASECTSSEGMEKTVRRTYGARHRPSGLGLAMPQEASSEVAVCGPPMPAGDDCHRTCWHQPYMAGPSGDASIVEEIELGQAVVAGGELPVSTMGPGVGPRKTKEACSRPWGPRGVGYRTRRGRKQRDRLLKWDPKPLKKRDILAPRSVCAKGSGAVRAAPGGQSLPGGGLMGDMPWGQEKREYARTEPRGYAQSFHARGSQELQVGFIRPKAKGPGTGAHRNRRLGPGAGSHTKIRLQPGWLLPQGGHTRVRRNGPLGGGNWKEPEIIKANEGALAGWTQEGLRGGRGPLGASMTGQQQRVARISGGSRRHTQRGDAGRPATGIKGGRNRTHVKDRGRGGEPQKTGEGREQSA

SEQ ID NO: 996540 - protein, 63 aa, Homo sapiens
MFRNSREDDIKVRQVTQQTATAESEKREHERSAKRSVVVWRHTPVRGVKSDGARTVTEEENKQ

SEQ ID NO: 996541 - protein, 128 aa, Homo sapiens
KAMSKGRAEAAAGAAGILLRYLSESSNRPYSSQDVFGNLQREHVTWATRRCAGEDSWSSWRNQGKINREDVRQAEDLFVRIQDQFDTGVVMRDLQVLDGKIEWTLTAKVQSLQQELPLPLEAELKGII

SEQ ID NO: 996542 - protein, 351 aa, Homo sapiens
DQTIKAPRHLHNVGAGKHVRRDPCRTVAGPVALHQHGPCQPLCLLHGGASSEHAGHLTQIQGPCSITYGEPSNGGFGTQPSWQDLGKRPVACSCAAAMVDMPASKHRCLIFLEQELSTLLQPRTSCIPAGGSVRHEPCLPEAGPCGLKAPASLCSQTLAEWAQSAQNKAAVLGCRDKKSTKNTFTKPYSRGGPHEEQVAPDHTGSGLKSAADIGIYNRITRRSPQMRFIFVLPNSVDYTRMPVTLRRSKYQGMPLQQAFHLTARRLPRAFHPPVDKHLRQRGENRYTDTSAITKSDPLQAPHGQRTSGADATPPGNSTRPPPTYTRRDMVAAQLSPRTAADKPSYDQTNET

SEQ ID NO: 996543 - protein, 111 aa, Homo sapiens
LISNSWPQVIRPCLALPKFLGLQFRENILGGCAICADQIRDDYFLLRWLRLKEGPKAHQGACPGQSRSRVIQCSLVSPDIISSIVASLGSKNKAHLASVSFDHVEKLRGDA

SEQ ID NO: 996544 - protein, 238 aa, Homo sapiens
  misc_feature (65)..(65): Xaa can be any naturally occurring amino acid
EQRSDSSVGALYGDEAWRSGPVLVEVLAQMGHGAVVVAPWDRLRAYRAVTWRSLGVAAGGIRRAXGHGSLPRLAGTSRAWLPVLTLDMGFRCARSIGRAREWFLGYGASVGPDGVAVVARASHVKRGRGLLYYVTAGGEDRAHLEGPRSLGRATVETRGTRDARRLVLHVWRASRDWFTDLQGGYVGSPGKAPQFVLRECFGNGCGFQVMMMCRHRDRVLELVGSWKEFSDHGGARRF

SEQ ID NO: 996545 - protein, 108 aa, Homo sapiens
AKNGGRDGCGYPERHPRAVTCKKRFEVKKWNAVVPLGLGYCWLITVPSAGTTLWIFRRDLRVWYATGRGSLHTWLHSASLLYFGLPNNVGASIGVHADMWLRALTYFS

SEQ ID NO: 996546 - protein, 100 aa, Homo sapiens
ALGSVCAGCPVALAPSGRWPTPSAPELREAAAGGAVRPGWARWGSSLIATRSLKPYFNVSAALRSCVGAQIEKLGAPWRIEHRSLRGSTEASLAGERMEK

SEQ ID NO: 996547 - protein, 212 aa, Homo sapiens
LALDVTELDKPSGTGLGEWQRRFCILYEHGLLRYALDEMPTAFLRAPVNDDTTCSRMWVDGEGRTGHKFSLCILTPEKGDIAIRCGEARMYRASRVSVDDAHVSIPGSNKAEIRQKKGIVESPHSTGAWACQGGWLPAAAAAAACSSIPSAEKVPTHKIHNLGGRHEDQGTQPDGSSLSASSESQPEPGSWCQLPAGTWAERAKKRESAMSS

SEQ ID NO: 996548 - protein, 299 aa, Homo sapiens
ACRGLGAPLTEDQHKRLSEEIEKNVAGELEKLTLRGENKRVLPHCPAQPKPAESAEGPQVTARGIGERRFRLFGPSWRRGVSKGRLLIELHLMIPVRMAHHPPVATISQVGMWSCSLAEMESSHQQVMEELQRQPRAGAAVHCKQEEGGGSWLKETASLRASMLIDRSSDLRPTRDRAEPEERDQHTPVVVQQGPGWALRERKHQFTIVEAPEAESLESGYWEPSSHESAGDWGTHAAKLEEREQHRCAVPAGKGQELCAHQELMAAVGEDNQLARVIASRLAIGAAPHERGLQLSLFR

SEQ ID NO: 996549 - protein, 296 aa, Homo sapiens
GAVLLVTGWGLPSVKPVTRLACLTYARFTVCSSEGTQGSAHPLRRALQELLPGLRDQFMDEVSLRFHSKESSLQTFLQEEKEQSAELLTRRASIRAKGGQRQRHGPIRCRHPLDGRRVVIARDDVVGYYVGIWSNDSRKKRYVENGASTRYELVVHGWLVLTWSAIKLRIRVRWNRYVDDWRVTMAYGYMTGLDCGQQRGTERAGGESVDEGTTVAEEAAECTDAMTLFSAWSSQQVLSFWRCPCLLGRLRTSDYFGPCLLQAKAAQVGKRAGPPAWACTHLCAICAHSAQSLVTP

SEQ ID NO: 996550 - protein, 62 aa, Homo sapiens
  misc_feature (34)..(34): Xaa can be any naturally occurring amino acid
  misc_feature (40)..(40): Xaa can be any naturally occurring amino acid
ARLPLRAAALPAHRAQRPPPGFPPPDPCTSGSPXCRNRGXQGQRSAGVLWADLRRRNDNVNP

SEQ ID NO: 996551 - protein, 546 aa, Homo sapiens
EEEEEEEEEEAEDEDLEELDGGMESEARLTGTVLRPSVPTCALTHWLLSPDVTSEKVTSVHDVRPRWNTHDTESDIHHQSRTPRGRKARSYEGTTLMTLDDRSEPGGHQTHNPTSMIHALTRKILRHFTEEITMEGNEEKAHRWGPGGQLREIRETSRGAKDSTKRRMEEEKTQQNKRDRDRKKKRRTRQEETNRGQTEVRKQETRETAGKERDDRKEQEKEEEKHRDTKRGQQTQERRARKREVAQMRGRTSRQTTTEEGRGRKGRNRGGKGSKGEEEGEGTEEGDRRREGGRRRKEEEGAEGDGQEKEEREEKEGGRGQRSKRKQAGDRGGKKNERGEETRKRQERSGADRTGEREKRTKEREKRTGVRRKRREERRRRGGRRRGERGAGRKEEREERERGREGREEKGRQTAETQRETRGKRQDKRKGKGSQGERERPQRERSERESTEARGKGREEEAKRRNEERGEKQHEEEETKRERQGKGRRRNTKKNATAESETTSRERETRAKRREREEKRQERRKEEKKNSKKDRETTSKRTRERE

SEQ ID NO: 996552 - protein, 435 aa, Homo sapiens
AESRRWFPASTVLGREPGARSPPLAWPAHSQPSVTSITAPIGHAPTAHRPTIQRPRRQPPHDEQPLPIVADHDDPQIHHRRMRQNITKQGLQDGRHQTRTDQHWKLNGLLTDYTLSHVITYHMDPANELVAYAKENLAQKYITYTHIIIDGRRDHIDCDQHDMHAMTRNPNATAGARTYNPYTEKESQDNTRPVMNGTQGDDARAMTTATRRQMIAINPLQGEEHTQWYDTTKEQPYPEATQAKRLTGTHTTANNMQPHKYGDNKRHIAQTHNKHLDDDATDAQAHQKTIEDRTTIQRKIAARKGQTTATHEDIRRKIHYIEAKTKAARKHAPTIKRRDTAAQHLPKYPDRRRTRLPRARHEREREQTHKTKRVTKQYQRQEETHKKETEQDTQTKRDSTKERKKEGESKRKDRDKRQHKKRRKKERRKRGDAAL

SEQ ID NO: 996553 - protein, 78 aa, Homo sapiens
DWIAQRSPVALYGRTPCCVGFEELGDKSIYSHCLSISLLVVDKNGFQLSVIAGCEYINWLRVRSMPRCRYHCEGADRL

SEQ ID NO: 996554 - protein, 433 aa, Homo sapiens
VGKGGGMILDIYRLRKSSLTGVTGLSPQAPRRKQGWEDPDERTQQTSAATTASAANSCQPAESAGKRAAYSIRMGRGHSDSTRHGIPLWTDHMATLLHDHLPEGKGKLDERSRKMRHPSGLETDGDDIKLSEPDATWRPDTAFSTQATIQHRDQKGPPYPQNSRESRWTGDRVRSRGNQRPDRTERTRGRIGQDRTTDTHKKMDTEKTITQSQEMREHREGDQTRTENGRPERTNGHTTTWMGEDNTDAAIITDNRHSTDGLNLGQRIEDAGKGQKKRQHITPDDENMEDKPCKARETELIDTMRYVDQQPGHQRNATLDMGHKKRNNETERKKRETKNKHRTLTHPRNYKEPNINNKQRMRKQYREENKEKQTRQEEARMEQGTTRQQNDTRKYEENLKMKRTKDKNNKGHTGAGKDKKTEAKRDKNREDDK

SEQ ID NO: 996555 - protein, 363 aa, Homo sapiens
PGRAVTLLLEVRMSYPGYTPNRLPTITLDILLQVRIIYYPPSGQYPYPSGLPPMGGGAIPTSDQVDGYPESWRLHLTHWRLSRPTGGYPGCPNSQGGAPILSPEFLQAKELWRSTPGGAGLIWSIHSTHYHSLIGERIPRHRIPHNHGWHYPGETDAVHQISWTDNTNFTLGQTCTQMNSEYTQGTLIQTPDCHTRMLLQTTAAQYIYDRQPTGVQGTRLNQGKKRTGEGHNTATQQGIQRHHTNTHRHHNQGHSPIHAKGITTKKSKHNQTDDTTQKRTSPKKTPKQNPHRNHDTPGEPEPPNAKGHIRRQKQHNNRKRNDPTNATQTKKPTTEKKRGRPDRPGQHRRTRPHKTTKNETKGK

SEQ ID NO: 996556 - protein, 82 aa, Homo sapiens
MWYTDRQGLTELALLTGRAVLWLTLPTNCAGVTHDSPLRYVDMVIPCKNEGSSRQCGLMVVDAWLGKGYCAMRWTDLPGELA

SEQ ID NO: 996557 - protein, 490 aa, Homo sapiens
FKTDSAGAVRSLRNRPRDLLSLEPGAGAWGLAWAAEALSWQERRRGALSQAAQSAENAAAASALPGRPQAPGAGSNEGMGTGSQTLTGSQARPLEGAEQREAAEDNLDPQTRISRTMGAVRDGSMPHAPQGPPLWTRHPASRDHTKHIPIVDRRISKRRVSNGRHGDAVNCTGKGGASRVHWHWNKTRGTNHAMHNCGAPRTFPQPVVPPLSRWYLKAPTGRKTPGVRSETITGTMSGKIPILGPTQGQALTPRRNKGKDGERRRGEQHRKKGRSPRKGKQGRECRGKGTNRVAVCGAEPSQDTKPRDTKQSAQGKRQAGGKEPTTVYRPAYPAKRPIARNGQQTPKKGPRVTQERETRVTPDLEGLSGQEQNRRRDGTKANTGNRSGEEHSGNSKPGKTKEANRRETYPAQRPLDKGWAQAPNYTAHNEAKEDTNDDGDPKPGSATTVAPNTTTKAIKTHRDKTNTGNQKNETRTYKTTYDTNENHIHQ

SEQ ID NO: 996558 - protein, 74 aa, Homo sapiens
GREGGRGSWKCWRKLCHSAPLRPPPRQERSKSGVGQEMELRQETRLGPGGRGCGGAEIGPLHSSLGNKSETLSQ

SEQ ID NO: 996559 - protein, 215 aa, Homo sapiens
MPIVQRALQVPFQRTRPEDGRPNIIGYDVLPDSTKKDLAPYLPSVTPGLKRHRLMDPVPVVECSVPDICLEGSFVVMVKGMGESAAFEALVAGWSDSGDELTYETRASCESRIQERANRELAEVMTGIGGWKQRKEEKLGLSTQWSWRFTVSVEQVSLLLWPNVRSRCYFSRMIGFRLGHHRFSGLRGPGRSCWGAPLSGCFSLPWSYECLRALR

SEQ ID NO: 996560 - protein, 362 aa, Homo sapiens
SEPRGNRDPHGPGPPTRRSPACCSVYCWCLLCLPAACRAMGVPCDAWWLPSMEPAPCMWSLPALVNRRCTQRATRWTQPAAVVPVPTSYRQSSTHTIEDSDTTSRSTPQETDLRIASFRSRAKTVDKRGVVQSRAKEKQETTQVCTKGTNDTLRHDIREYAPRGNTHRRTSHREPPKRDTHNKGTTQNKNPQDTESDKAKKEKNNHKNDIDRKTQMKRKRRKEERKKKKTKKTQKKHSEKRKDRDTKRNKETREQEREKHNKTHRDTKENQTRNKRKKRKRKKTKQERKRRKTKRKRKQRKKTKEQPEKTTQKRTKRRKQKKKKERGPKKNTKLKETKKEKNNNKKKEKKNKKTKKTTKKKK

SEQ ID NO: 996561 - protein, 337 aa, Homo sapiens
MAAVQMDPERSQDASSLKGATDGHPEDMPKGSRVLGYDYNSWECQGPKYPGDVKHDPIQWILSLPPTYKHRDVTRSYITRGQYGTISYEEFRYHYAMQPCEAAAHVTADVSTTRGQDGETMSASTTGSLRVRGQMRAQASKEAGRSSHGDISRYANHEEVDVTHQRSSEKTQWRSYRPRIDRSVPKTMCYLLLSMKAHKERVGQNLPDVAESAKATKRDLGPDNEKMQPRSVTQIRITDRCQSEMSRGSTARMKNTDSWTLRYAGTGPKRRTAKTPKQCKANTMREETQQGSDEEPSTDTGDQSLYGQKQEERRTADARYEEAWQHETRKDKARGER

SEQ ID NO: 996562 - protein, 244 aa, Homo sapiens
ASCRAYARAPGRLLPLLARPAALTALLLLLLGHGGGWAAGCARAHVRRGGGGDGPPGDGEDGQDPHSKHLYTADMFTHGIRAPTHFVMFFAPWCGHCQRLQPTWNDLGDKYNSMEDAKVYVAKVDCTSHSDVCSAQGVRGYPILQLFKPGQEAVKYQLILGTSSTLENWMLQTTERGSQENTTSRKLAPVQLPRCSSKGVYELLRKQTFELQQLHKEDHFIKFFARGVVTAEPGSTWKQVALGL

SEQ ID NO: 996563 - protein, 577 aa, Homo sapiens
MGGTMRNNSAGMEASPEMMGLGDVKLTPATNMTNKADGTPKTESQSKKSSSSTTTNEKITKIVLSMGWMSHEQEAVMAWTSSILALHHEEQKSQWAMTKICTADRDKGHTPYWEPCLQRPYVLAATSQHTRTNYAQRRSRRTTEHTKENHNKTSATPKPTATPQDIQMNAEHHYQCYTRTIYKTLPKDTSYDRHYNIHSRGDNNIDPKREQMPTEMRHPAEQGHAPPIRPQCTSFHQTTTQPRTPPQKETAPPRNHNNRNCRHDVPQQLRRQREKQGKPYRQQRRHKKPVTDRTQTKREKHSRTQRGTGSSITADTTTQQRRTPHRHNNTKPKQRHQQSKKAQSDRTTTPRDRQEGPPQALKREAPATQQEEEHRHYNPGEKPTTNETPTEKKTVNHSNKQPTKRHHYQTTEPQNDEKKSRASIGDNDTERDSETEPRQHTRQKVEENEDHQRESTIERSTRTSYTDKQHRRRAEQEDDRSPEQKKEKTEEICIDQKKHRERRRHISDTSNTETQEKGRTEREVKKGRERRRKSKNDDIRRSEQQRRQEEHEAKNKAGNRAQEKKGASKKSQKPDQN

SEQ ID NO: 996564 - protein, 364 aa, Homo sapiens
MGAVSWPSCEAWCWAGTEPATTALGAGTVAVSCAAHCTWRRCNIPSLPDEEKSAACGQLPLACTCATLEGADTRVETRSRGRNFLPEKGDGEPGGIGRSLGKSKKGLSQHPVMPVLLEPGESPQSSTILTDTSTARESMPEKGHSDSQTWQGTAVEGLTIVREHPATYRRDYMEAEHTPTENSLSLPALHAPLRTKYAVKRGNPGVVLRMQHRLRQKRRTVHPTREARTDRSTEQIPRTHTQDRANTTAQERRRRTDDKTPGATVEQRSEAKTRRRALRTRVTHEKRQQKPSHEAERIQPQTAQETPVHTAVRHSEQGAVDALGEENADQRKGWGEYGAPGYPEWGHIRRRRGEEEAERIAEDN

SEQ ID NO: 996565 - protein, 237 aa, Homo sapiens
MRLWDEYRSLDNACPCSQKIVAVRAWASQLVYIMRREHAHEAIIIVTHEATLSVYGEDCKQVTWVTEARGVVSDSHSTDNEKADSLLTSESDGYCRGLGTGAVDPHASELTRGNSAPSATRRTGGAACEGGRAVQLTGGSLALAESPPYKAIKNSCDRPPSLEVTADAPHDTHQRPKEGQHAGAMSRVEEKEPFFMGPGRGGWGCLLKRRNVVVLKQNTGKIGHWTVDASDLATPFT

SEQ ID NO: 996566 - protein, 83 aa, Homo sapiens
GRGRRLGRWAPRAKKRVLLPTRTPSDNWSCGRASQCHILARNPSPSDDEVRAGEQLYTKRLRVQHVTAARAEQVVTLHERETD

SEQ ID NO: 996567 - protein, 107 aa, Homo sapiens
MPRSVAVHSDEIPARLEDEVGGLAGTPEEATLHGRASLTVRRVQEDAEQSKHVSNLGDGYNQYSIRKHHHSITYQSRQRPSQSRQLVLCARATDRLYDLAKLVRSSA

SEQ ID NO: 996568 - protein, 144 aa, Homo sapiens
SIMKCDVHSPRYDTGICQASVTVGVEHTMYPEDIADRMHKEITVLVPSNMKIKDHTNTPDRKYSRCWHLAGIPSVGSTCRNHSEPECGIYPKPGSYDEFGLPSYRSHLHNAFHKQVTSSSMRSHLAAIGVKYADIETFAPWQMR

SEQ ID NO: 996569 - protein, 472 aa, Homo sapiens
SQISPTYDVPPRDVLQDSRLHSLILPPTAGLLAETTKIPHSDLIYSKSRMRTGDRLTCFAGNSHEPAGSACIVLSTYRRVSSVRLSLPNGCVSSWVLVMKCPLRTLRGTRVTRSFAYYWRNEGVCKTRRSGTQCTLKKHNRAALDTLGFPGNGRTGTRLQQENQRRTGLRPDNWHFIADAWGLGTMKESTTYLQVSGDRQNSSTQFRGVGDCPHYGPVHCLEGPSACTRPKANGAVPPPMGTPRSTLSPWVHYVTIWCQDFLGKDITFPMAAQKSSRGRFPILCPNPKLGSGSTCNWHEDKMKGPGRQIVTEKFHTMNPFPPERCQAAQNRPSRDSPNCRRFGKTIKGFNAAKPPGPKMVAHRVTQSCGHQECRTLVLPALDNHGEYDPRKLRERQHTTGKDTLTENKAAHGKKCVRHSDKRREHTKWTKKAQTQDLEQQTTLYPHIQASPKLPSEDTVTRTNDEALNDTHG

SEQ ID NO: 996570 - protein, 304 aa, Homo sapiens
MPVLRWATHGATGNSCGISLSPQWPASVQPVSVTAASILCCGSRDWTRAVGSRVGRAPSSGPAEPGCLFRLGFCTGTTLRENLTVSIGRTSTRERNTLRKTEWRKSYGYEERPWYTMRPRTFYSNKTSFYFQKIYRVSQAYARRGPLGGGPFSQKPLVDFGVAGRRPSVPSSHKRGDPRLGREGFPQVQWGTRDPLFTGNIGSGRHWFSVYAFRIPRVQFVERQHPGLRPHPKANPIGAQHGRPKAKSVARKVRRTLVESIVWGHEFRSASTFCAVGHCKHFRLPKLRVSDPQRGPHETRRGTL

SEQ ID NO: 996571 - protein, 283 aa, Homo sapiens
MRLRDAYVKSAYVSTRQATDVVRQRSAVDPGAGLWSQRCPRAARLWTSGSFSEAPDSILADNWWIRSLHSKCYMRGVEEHDIRYCNSGWDEKIKRSSNHIYYKAERKRMHTRKTQIDRALGEAEEKGKKRKDRHTQATPRSGRYKPETNQGAKSMQRRQDGTHYRNTKTTRPRRGARHNNNPHQRETTEERKEEAAAETEEGGSSTEARNQRRKQTREEGREKASGSHSTHARAPGGENHTRPRQGPRDTTSKARTDAEGKKQDRTKAREHGKHAGRPKRGEK

SEQ ID NO: 996572 - protein, 365 aa, Homo sapiens
APQSTLSSSATQSCNLSLCYGSQQHPCALRCPHSCDAMLCVALYPSDLCNCPDICVPTQKSSMPLEDVLRAGDMHAPPDDHAQVVGARDPVCLKMEFAPAWEQPEGVLQLSNVQEDANHCAIQTALMGSQQLKPYLTVYWTPERVELAPPPLLAAQWARTLPYAATVEGGAPRAKLNVVLLRGEKELHTGASCSGSQRMRVTTHGAASRPDHHGSQVTRCRTSTGTMQGTKGAGTCTSSTTGPPYPAAKPLHKQESTTRAMTRHGEQEADTPRSPRDATLDRAVPKKGKHQGPAHGAPRRTQRARRNTTPGQPKTGTKPKTNETSPTQSQTRHGPDPGAPRRKADSRATAPEEEAEARRPQRRAA

SEQ ID NO: 996573 - protein, 106 aa, Homo sapiens
MIKTGDQVRARRSHAAEHATTSPPFSFGLVIQRGVLTMTRQLQPMKCIDITEETLHARFLEGVRKLPVSDCRLATQLYASVPHSIINGYKRFLALSVETDYSLPTC

SEQ ID NO: 996574 - protein, 305 aa, Homo sapiens
  misc_feature (201)..(201): Xaa can be any naturally occurring amino acid
MRAIFVLRTFWGCLLLLARKRLRGTPGYVRHAMLVPGGYLCDPPCTRQSALSDEAAGSWTVATPTMVCRCFTSRLDRQACRCVSARYRLHLRSRLSCRVLVDCRDHPFATRNEGLRRSQDLQGTGCCVEDSPRANATTCRATGAEALGYHFSQVVFHRWTIQSLVPPVVCTPTQSCAYLPCAACRGTSRPVDGPPMPIGKXSVESNRESSSPVILRSQQGPVLGGPGSCQNPMRLSRQYSLSPGWPPLLSPWVCLHDHLCVLRYVYLPGFSPKVNRSTTKGMPGSSHQKYPGLIDSGEKGFRSGH

SEQ ID NO: 996575 - protein, 384 aa, Homo sapiens
MGGSHSSSSYRLAVLLTGWADPPRAQGLMVRSAVSFPQGQVQGQQTFCEALLVPWAWRETLHASHSINRARANGPSGAGATPFLHNSRAHDLNHVLGSIRLSSNVDTETAKDQVHLWNPDRHWGSKPLTHYNAYNCSALSNAFASKADTLFQLTESRPTFYAPLEETTLRAKPSDGIRPSRQYTVSPWNHDMNLTHSAEILPCDLAPSVTQHLLGGCLSEKYMSASSGTFRQVSGTTSHARHSKENQSEATAYALSLHCILYTIISLRPHVQLEGTRTDCTAITLPHVCSGRRPPASTTGAQRRPESPTLRSSCQMAPTAKRAAIVDALTTRELTTPARPRNGTALQVELLRSAQRTADNRSGLDHAPDQGVAECTCKSERSRP

SEQ ID NO: 996576 - protein, 401 aa, Homo sapiens
GAGRLAQTCRRWPEEKARHPEGSLPKPLGTCRGLGDQQATPRAREDALAVCPASPCPTPGPVAPSCIKWRRSEEAGGGWHHGPGLVPSMPWGMKTLLPWTDQCQYRSPIRSGLIHSDYQGLRAETHWRPEPGRARMGVDELPAHVPLIPLTTQHVQRDAIDESTRERGSEEHHKRPQANYTKCQNLIRYRKMRRARTEREEADSALAEVETPQERTENSKSGDKTKSAAPGTATALRTHQNGQSWGRKDMGGGNAQSAHKTQRDAEAKEAKKPRRARPRKGVQRTLETSTEEKRARATRGEWEKWGTGQRHERSGPERARARSGETSRGSKKDGEKPSGEQEERDNTGENEKKGSRKRTEREKDEQQKETESERRKKTENRRNTDQSGENEDGTQKDERRR

SEQ ID NO: 996577 - protein, 396 aa, Homo sapiens
MAASLSSGRLVCPCKDESAEDAVAAGVRSVTEAECVRLWTCVLSFFLWTLCVLELDEWLETKPDACWLLAAGADALSCSCQCEDVCERMAGAGEMRGLGPQGPHWWPGDEVRRGTGTQGGTRSTTDDGGRRAERTELGRHQDTSSRCKKARMSHINQKAPEADMRTNTGTHGKETIEGYTGNQKSKRGKGCVKVHERAAGGMERHVEGTRETLTWERQSKRGAGTKTRTEPKNGPPSGTPKRRSGVGERTSKHAADREVAQERGAGGDGRWTQTAYIAGERVGGDREKRTTKGVYRREYKMRNQEGTGQQPERRTKDERREGNPGDGEMKQSKKVRRGTDQESGEKRPDDMGGHTGKDGGPDGHRAEQRSQRETERSSADNEEGERRRLDQRSRAR

SEQ ID NO: 996578 - protein, 225 aa, Homo sapiens
ALQPAWNAPRSSVHPLEWPTGDLHMAMSRGTVQQKIEKNMMQIWRQILIQWITTQCQKGCGPAPDWTREHSEELAQMDGTVLCETSLIATDYTLEGQPQVKKIQALHHEPHKSDVMQILSDACKQLSAYVHYHHWTSSKAVDLWKGQQAWPVLKAERWIESASGRGSSHEIDGLLLWGLASVAAVRDPKESPRDFSDNQMQRWKNVIVVTDGHTGRVHAGLTAQD

SEQ ID NO: 996579 - protein, 564 aa, Homo sapiens
MHQTLMAQQQRVNQEEAKHHIRDASSISNIHKHAICKTATQHNVCMSHASSVQTSPSSPQEAGNSRAICLTGIQALFGSTTITRFHLAAALAKACIVHSNDILSLSIKCDQTTTFCDNSKHSSSPNSRKHHGQQAFMGSCLMIPASNAVHSSGNVQDIRTDCNRSRKIRVKWSMQEEICDTRKSIAYTFELVDTVQGDTYGQEEQDYRCSLALARDYSVQKDLPDGRQANIMGVSQSGQKGEKYSSYGTKHAETTTTGNRAGRKDHKELTGSAKASAKGKERQVRNARERINRCSHGQSPDMGRFHRRENLKDNRWTASTLSHWGHSAKPQVDQVGHQRPHGDIDTTQLGEDKERAHPEANLKELTTVRRRRQNRDAWGTSKSSGTKRDRTEATDRQKQDEDPKGAGSEDTEGGKRQTEHTRNMVGTEPDRDTKKLKTVRTTETTVGGDKTKDHTEQQQNSKGGGHERREREETAWHETCAVVAKERTLTKDKRADGRKRYTPDRNASGRVESVQTSRDSKDAERKERKKPGGESRTERTTRQPRDQEQTESTDRTDELGRRDR

SEQ ID NO: 996580 - protein, 309 aa, Homo sapiens
GACSGCWRRGSRGGPGGGRGSRTRRYGLRRAKKGKKPGIVSPFKRVFLKGEKSRDKKAHEKVTVEAPSAHCGVVHCLNASSQTRLLTQTILRTEVKYLGQLTSIPRIPESLQEDMKSCISETNAKREPTSFQGQIDVRSTMLCSNCAAYNRQWLALGGTGRISSSGCPSMTSTPISYVRDDSCEHLDGPERQARNPGICPRQRLCAEKFQRPQGVSILSAECSWGPRGTACCLGPSWLQRSRSLGRSLGWSARRSPPAVVTGSPPFISGTSAIGGAYTRTPLSLQENLSVASGLQGARLAEEGGAPTFG

SEQ ID NO: 996581 - protein, 56 aa, Homo sapiens
MVPTYDGKDTCNCAGNLLEGMLVGGGFDMRRFETHAMHELDPPVCDLLCHPDFGGP

SEQ ID NO: 996582 - protein, 66 aa, Homo sapiens
GNLRGRTCQARRPPAAEILLATPRHNPIGAGSPPRDLVSCAYPGGPECMDVVWSPRSAYTETWPLR

SEQ ID NO: 996583 - protein, 444 aa, Homo sapiens
MWYPLSARALPSPRGATRTIASSPSCANLGAPRVGWSSRSFTCSWCKGLPLCRPVAPGRGFTVPGLETLIRKTLERLSTPSGPSVCQSLDKDTVFHIHQETFAERMSPSFHVISTPHILGESLGPSPCLYFSPASWGLFTPLVSGAPFIGFIPRGVGPHAMLARLGAPGPLAVGPNIRRGSPSARRWHPLRRAVSCPPPSGGEPTRGNLGPPFRVFDTRRHSGVARRDNAARGIQRPKLRRRAPYRCAQSRGPYRALEIRDPPCVIALATSAVSPHSPLLRARTTKSGVNLAPVYCYPPAFQIWGRSPMSNVRRHAEAPRDTTIVESAILIVIPPPRVFLLFVCSPPMSLRSLCVSRAVTLAWILLPPRVAARLDDSDAQRIVLRSVTLRSRTRSAPRRAISLRIGARRLHPALHLCCAANYSLAGGGAPRARPRCRPPHRCVR

SEQ ID NO: 996584 - protein, 157 aa, Homo sapiens
  misc_feature (32)..(32): Xaa can be any naturally occurring amino acid
MPGVSRTCRLLSGTLTINCQSPGALIVRRTTXKGLRHSLSADDMEGPWMKALSLNDRLYAMWSLVELIRRCGPEGRVAAFYAQLKLLCPSGGPRTHCSHAPKAVAMFSPQKVSPLGYRLWGKTTLGRKRTHPLRGFFLPKHNFPFPLDAGAVIPFGC

SEQ ID NO: 996585 - protein, 355 aa, Homo sapiens
MTGYGEITTRDMHEERCTSPPHKERHTTKGGYVGMCSPPLKRIHTYNTPRIKTSPSEARNTSAFRSANTHIRTITFKNIHRGGAADRIIRPNFILSQGSHGYLDHTHTAHTEEDTQITTRRRAHIVPTEQQRMQTPNSFLWPHQTCSNVVNLNTEFISSPLITSKHTRTQSSMYPQHARQVNTTNPRDRIQLIVVNTTQKQSTPPNHNRLAQIDQRAQNTKNAIHRATHAYATQNENTENEEQLANTTTERQDETVRAQQSVRQVDSIQRYVVNRRPIKQNNSPNQTRMRDPKPAHEARQDRSETLATRQQRERRQTRASTRTHRAEHDETIQRDTQRSQQIRTQTQIRQNTTPQ

SEQ ID NO: 996586 - protein, 105 aa, Homo sapiens
ADARCATATIALQCQCASNGGVVLSRAAVLCVHVVAAARQMETSHSGTRLHSSMEQRGRSTVLPQLWGCPPPELRRSMHVMGPFMTVPRESYCSLACRTHSQKWC

SEQ ID NO: 996587 - protein, 305 aa, Homo sapiens
VFKALRWKSLDAPSVLPEARHIGRSGKSNYFLMIIQLLDDPSEECAIVRSETMWAPSRCTQIRNVPFVLVRTSACWVLMRASNTMMRKAIRAHLQNIPALEHNCCLISGWECGLQCSPTEDLTDASRDTVARPIRCQGCCPEAWLRELPPLSKSSCSQGSMQHWIYVGPTNDLLLAKAHSVITIYQSPEGHPFEIPDVIVLLDPTTLDDNTLGAQANATPGLEHAPTSTPPLSLLRLCSSSNVLRTHGQGNPINPEALLCIIHQTEKLLHFSPFPGGGVPHMQPDVCLASIGLPTLFAFSNPFYY

SEQ ID NO: 996588 - protein, 294 aa, Homo sapiens
SPGILVLQYRSPRVGMADFGSSVADSPARPPVPARAPPPTPARRGRRQEEGSLEPGVGTQTGSGPLWCSPLEECRGSMQDAQRLLRGSEGMALQLCALCGCVTRAYAAYQCSMKPLHPGEGPHHAVTPQVKVSGFKVELRKQGPTRVNSQMRDDTCNQSLHCGHCDVRIKTTGNPLVPISWDICHLKTDINEVRPSLGQRSVTGKEQNCSSSRVMQFPKCRWSGGKLKAEFFTVHEPCALARGVVDPGDGDTTGTTNVQRTNDPTGKTAIREKPWQDAISAGPDKVLRANKRRT

SEQ ID NO: 996589 - protein, 123 aa, Homo sapiens
ASALTTPEMQKEIQELNEGMRCATERDGENIKAATNHVTPARERAGVHEERHQDTVKAVVGERKRMATELSDAITLRIPQEQEAVRLRKLGYETDERLRRHTPSTPEGCTVQDCVGTAAMSEE

SEQ ID NO: 996590 - protein, 104 aa, Homo sapiens
GRRELDLAPPNAARTGAKGWSAVVRPWLTATSALPPEFKRSSCLGLPSSWDYRHPPPHPESVTIPLMRLRCSEMKTLALIPSLKRENSEMAPLQIESRYGVSPC

SEQ ID NO: 996591 - protein, 103 aa, Homo sapiens
MVNKLATFGWAFVAKMTPEFRAGVAERLGMVYDMGRMPGGVGERNMECNSKYTQVNALRIVEPQTVDERDYSNNPFIFFMDGDSRGKMGKRRDFNVFPGKLLV

SEQ ID NO: 996592 - protein, 389 aa, Homo sapiens
SWGLFFPGKKTTPGHGPLSGLRTRDNTQHQTHTGESGRGERHEEHRVSKHEVVHVGHRGWVPVGGSQREKRSVPGGWGAHTEHTLWGNKSAPEAREGHEGTGTRRREESKETYGKAHERGGPREGVATSGGGGGRESCAHKKKRRLWREEVSGAHRERKRGHEGDTQQPREQKRARNKKNHTNPPRERKKNGEGHTERHRERKHEGKFTTRGPPAEHQHSPQDSDGRRRPTAFPISDTGLNGVQEKNTWGANHTEEMEEESKQHINTPQEENRAQDKKPFNKNCITAKANKRTNHKKTTHQNHTEETIGTTGNTHGDPSNKETKEHNSDPPPPKRANKRTNPQHEPPLLTPERKRRKKTRTEKPKKNKKGRKRRTQKTREKKGEKTTQR

SEQ ID NO: 996593 - protein, 205 aa, Homo sapiens
EDEEMKRMRESVKLFDSICNSEGGYTDTSIILFLNSKDRGSRGEECVEQQVPWIGSSGITLSYTGGAIVDTEMEGSAGVTSISKVWRTMKKGAERATYEEESSTATSTVAPADCNVTSHVRVFWRPTPDVESSQNRPERTAGLILRGRRRAGGNEGSARLWNAAQKPLKEEWWQEGIDALAGRGFSPGSVSHHSFPLVLCFSFTH

SEQ ID NO: 996594 - protein, 281 aa, Homo sapiens
MNAGDSGGARRPLGPWDGECGGFRGGFGSGIRGSVGSAGRCDGDRGRMVCVEASRRQRPRTKEWMLALSIGGGRIVSVGTMNDQDPRWKDDSYSLFSSVAHLRNQDSFDVSFRGGLFSTDDGLKIYATCCKKARTPCRPGDSQVHTVIRSLSGYYKVAKSVLGVKVVHTEWLVTRPLRCGSFILAHKLVHRSLDACKSVYWWEATIEALTCAIAEVEQGGCGSGAGTGLVLRPQGDRGGRTSGCCWLTNAGPEWVVWMRVNPQPGCEWSPGKFRQGTFDAF

SEQ ID NO: 996595 - protein, 261 aa, Homo sapiens
MATQGTGERDPVLQAVLSVPREDATVVSVRTASVTQLPSSIGRAKDWWGVPRPLPRGLGRIPTAPKGGGLCHGAQCHSSTGGPLRGPGGRAKYSPKGAGRPGGGGERSGESLKKTQRDEANPFINSTRAPRWLKRSSGQGWSPASTPGREVLQKSQGPRKRSREGKRETSRIVQGRSQPAKSLPSRSRGQREQCLRGLRGERKRPSGQGKGRRETREGSPVSDRQPDPPRRAKSSAAKKFAAGGNERGVKGQRGMPRRDTE

SEQ ID NO: 996596 - protein, 252 aa, Homo sapiens
VEVEAVCAWRGRGGGPGLCTLPLSFSKAPGSAGHYELPWVEKYRPVKLNEIVGNEDTVRQAEVFAREGNVPNIIIAGPPGTGNDHNAFCAVSLGPCWAHVTHKMPCCDTRMSSIMTGALTVCDGIRIKMFGSNKKSLFPEMADIDHHSGMKHDSDVPTEPSKPGGVTMVNLSLITTRFALACNASDKIIEPIQSRFVQSSRYTKLTEPRYHQADECYREGERYPTLMTAEAIIFHGPGDMRQALKQPESPSQ

SEQ ID NO: 996597 - protein, 301 aa, Homo sapiens
GGQRSGWSRRSPPAPFSGETWVGDCRPPGPESGASLTLLVPPWENRPPSERNYSQGNPLFRKERNGPRGLGQLPQGGELLTSTWGTLGPGPAGSGYSRVSLKTFFITRQEGLCREAQTLDRTLMSAEANLAGLFLPTGMQPLQPEQSRGSLFLCTTGCPFTEDQACWKVPVGAHVPRYEQLQKRDPGRHQEVSEGKFSELPHFLAPGGARRTGVPTLDTWETVSGEWVLLTHLLLVRANRAGLALARLGLSPNLGGCSRPGYRGIPSCAFSFGIFPRGERPRSRGGLARVPRRAWLIGGTP

SEQ ID NO: 996598 - protein, 361 aa, Homo sapiens
MSASNRSASVDHLAVSQEQIPTGWTGWIIFSCFQKRSSLYETRCCTQNALEFNLGVHLTEKATIESWPGSKSTKTFASILGGKRGVRTKQALMNPQHSKLERSTCKAGWAWAYDAKGQAGKRYKSKQVEDREQRLDDRMMEWKTAENKIYSSGSETAIYVAWVITLVQTIDTKTRCLIEKWGYPTLEQANIDVTFAEGKLCESHYLDTTPGRKIVIHRGRFTRVGNNSGGMTERIMDPSQSCASILQGSPCRIASCIVERSLRARKKSLADRKMSERMITQRTDDDWRVDEHITWGNAAQLGEEHLRNGNSGAPIKREGSRSGTTLVYQDYLMEAPHTHLTFTHDIMYNRATVEHTRRIEQ

SEQ ID NO: 996599 - protein, 55 aa, Homo sapiens
VHAEKKVKMLEQQRSELLEVNKQWDQHFPAMKQQYEQKITELRQKLADFAEQVTD

SEQ ID NO: 996600 - protein, 145 aa, Homo sapiens
MPFWLTHPGCDNNYLSVLTTMDSTESTLQPEEIMRKSLRKSSTYIKKNWNNPDTVAFVAKFLLDMVTTWLGASANMLGSRDGKSPRRSGMAVEPRVESRTDPTQLASESLGCSRRHKWGRTSWHRLFTGGAWPNKVIRPKDRRKI

SEQ ID NO: 996601 - protein, 112 aa, Homo sapiens
MTAMPTTSERTYCSGKCHSTRSQLPVGGSKPVYNLIALLVKKGLAHSTRPEELSVNDGRVDLRILDGAQKPSYGLGSVTGRVLALRLVVNGTRVYALGVEVTVHVGSYPIGV

SEQ ID NO: 996602 - protein, 196 aa, Homo sapiens
LDREIWAETRLVLMATDRGSPALVGSSTLTVMVIDTNDNRPTSPNLGAPSVRRCVIGPQRLTQVTGNDVDSGPVHVVCAKPIMGPRIPSDVGRYGGQCLPHGDPWTFEQMDTAEQTAKLLAHDGPHEGRDQPSQCYVEDVNDNATCLHHRASYQVMLLSTHPTGQSPFISVSATDRDSGATGHIYYNWIPLRWLQC

SEQ ID NO: 996603 - protein, 141 aa, Homo sapiens
MVQQAPHCAVCMIFQTYHQVEFGGFNQKAVESASDLGPQKQRTKPLIPESVRSLRLAAGADIKLSYSLSLSEDGTKTYFVSLQECAAVRVHASRYGVPLLKDSEDWNVFSVFSTMPRGGAAVNAHYEEGPCNSNDDWWVTF

SEQ ID NO: 996604 - protein, 203 aa, Homo sapiens
MRARYKIPHFKESYLSMATNVLENCVAIGPIEVKSGGAGRTLGHQDHPPTSLDASVYDQRPPQALRLACVETPRARNLNWEWQSSGCNVQAHWKGCVKDIRELVDQKFLSHWATDSNPGQTERLQEFSQKMDQIIEGYMKATFIMEIQQETVYLQNVYAPEDDPEMKRGAVNKADFDQNEELGLHELKTEGLKELVEGRVVQA

SEQ ID NO: 996605 - protein, 309 aa, Homo sapiens
MRDPRSWIEDDDEPANSTEEAPAGPGLAVSCRILKQSPNVVVTGTEPMRCAARAPGPRGSWDLDGAHLGECFQRSKSVFVALERERLLDVTCDHTNPRLPASSYPARRYGDPGDTRKGYRVPTPSNPGHHGPTCAGPAEVLTNPSVEPEPLRVRRTALRRGPPPHGAGMLQDNSQAVTWEPPPACDTRICPLPQGGNLPLLPPPGVRPLASGHSTVFPCLVTQHRNQHQPPPRIPSRWSPCTPACHTPSTPVSHSHGLTLAAHGPIGTPPTARRHAPCAPCVPMDLAPGQNSTPKRVTPRPDNTASCTA

SEQ ID NO: 996606 - protein, 218 aa, Homo sapiens
LQESPCIDWRVALRFLSLTLRAHMSVSNSVAVLGLYRCISRLAYPSCIHVGYRLGVEWICSWRSAACQTDPRVNMSAHIVVIPIPIDKCYHCSTVQLSAHMEYNLRCTSLVYSPYSYLCKIRIFPPLSSGGDALFAWSYDLCDVPRGVIQTSAIGERLGLICSGGEPKGSVIICPLLLNAPMFVMGVNHEKYDKQAQDHQTMPPAASKCLGPLAKVIA

SEQ ID NO: 996607 - protein, 102 aa, Homo sapiens
MSHCLRVFKAPIRPAYCELVQPQLAQKLTDRPMLSSELRRSIQHVNAAVLGYWAQIVVRNSQNVRGGWDSPLLGLGVSFREIMMSWRPQCYAPTKYLEPLAS

SEQ ID NO: 996608 - protein, 209 aa, Homo sapiens
MAHRTWHVEKAVSRIVMSSRENEREDSSGHSAQLQGTCSGAPPQQSPGTRATRGILEVQAAELRSRRDPYNQVQKNRHESHEISLGRSPELTIALACSNEGKRDHLRFRRGRGPRVASESCRNCLECHLYPHAGARLMMFHRWSMCTQGGPGSGGSDDDVDMKNSIGYRGNEIVTWRNRSNVIEDRKSERIVDESMGLLWDDINLVRCN

SEQ ID NO: 996609 - protein, 168 aa, Homo sapiens
MLGRGRSSAWLPASLADNDWSLSMPPRMVIEEFYNQTWVHRYGESILRRTYCITSASWSLSVGIVFLVGGMIGILLCGPFRYTGLVRRNSSADDEPAWPSCPPCSWASRSWASPFEDADPGPFIIGCVLGLTQASLPMYVGESVTQGLVGALGTLDQLGIGAGIFIGQ

SEQ ID NO: 996610 - protein, 178 aa, Homo sapiens
WRISGRAHLTVYRHDSRLLPVWTHTWYMSEHYAQLFDDAIGVEGAAPRVHEEVQLSSATLCTEAIMALQGCQESRKLKPDDSSRKLEGQQQLGAKSWNERSCESQAMFIMEIRCKILTSFKIDEIMLFVVDAISPEEPTFHAPCETCASDRSTGVRLRVRNPVRDCVIDVVPCGKMRT

SEQ ID NO: 996611 - protein, 225 aa, Homo sapiens
KCVIALQEKDVDGLDRTAGAIRGRAARVVHVVTSEMDNYEPGVYTEQEFWVEAHYSCISQASSLCSGRFTEQVEAAVDRPSARSLPSPMDENEFIECVSRLVYDGYRGTSGKAVLMIKEPEELDDSEFETEDVMSDSRTSVQTRRRSADRLGMSARAIMAQLPQDAKKREICGTGGQFPGRKEQAVDAEVSQMGRTVARTVIVSGQADVHDYEGDDRLYPEVKVH

SEQ ID NO: 996612 - protein, 319 aa, Homo sapiens
HTFYNELRVAPEEHPVLLSEVPPGMPKGQSREDDRQIMLETFKQPQLMYVAIQAVLSPATPLDRYHHGIVSGLPVDWVIHHCCPIYEGVCPSPMATPCVMGAMRLYQRDLELTSFTEESFTWARDTVFTMHGRAGNVVRDGLRRSCATVLSLVLRSKEMATACVRMLLRWEQSYELPDGTGRSATWQMSGSRMRLRHSSSLPSWALESCGIHEDYLAIPIMKLLTVVHPAKDLVLPTHVLVWRYHLCYRVAFADRHGRGRSLALGARPMNDPDPCSSCAQSPVWIGRVHPGLGCPPPEMLGLQPGYEDSALIVPEWFRG

SEQ ID NO: 996613 - protein, 296 aa, Homo sapiens
ADSVESSCQGRGRLRGRDDWGATHARRSRYRRCGPRILGFWGGCSGLGVVARSSCCCLWQPPGPQAENDFVLVQPLVTMDQHAVACAGSTDRLTWTPSVIPFIRSHSAVGHSSLPLSECEEVMCSSDEGANVRRPAEVPGPVASAWLSYSVQLSDDCGMSPTGLNLGADSEPPVDDLSIVMCWLVPIVLSRTDVWSAALTVVGLSCWMSTMECMYRPSCPRKIPENCNVFRHPGPRASVDSREYHVQPRKWGRPPSRSVDMGKPAKWKRNTLSLPQPNENGSKLGATERGDMGTRT

SEQ ID NO: 996614 - protein, 338 aa, Homo sapiens
  misc_feature (176)..(176): Xaa can be any naturally occurring amino acid
  misc_feature (179)..(179): Xaa can be any naturally occurring amino acid
AIHAAAPIAVMQPRQLAVTSRQLPAIWATGQQPIDEWLVLSYREKKFYDRPEVESRPVTLSGEPVFLVGITLSVLGHHFEERHMQDNIVCRQTHEVEGIERTDLSHLMKGSTGISVVIILTLSNIRKQPELAVIAPRGGSRGTYLMLNSRGKKAALCDDARVYDAGQQLTYPLVQXAIXPFACSVLMANVKPAWQGEPFYLVLLGATGEHDGERSHARIWSAHGILKRDKWHPYHEKNTLPIWLRTPIFQESTWPDGIGMRRNGFVEKHGIDQVGMGHPYPVHDTRPVLTSVSFDGLVATPTMGTEGLWSQCKEGKFPNERGLGLLQNTLKRRFRHMT

SEQ ID NO: 996615 - protein, 256 aa, Homo sapiens
MANTYSGYEGHKMNKGANSHTQTLAKHPQHGSTKGDTPKYAQTKLKPATLRKTGIDHNHKIMNAKNQKKQTSTHIGGERSQRKGTAYKRDHGHTTETKLQPAMRMGKQSHRESITNQQENKKDRQNNIKRTHTWTSDPPVPKASGTRAQGNRRTKRPDTQNTRKERDKATSRTVGKNTMWNQKVGTTNKREKQQPTQKSNRQAQTEADTCNTQDKSKKEQREKTKQQEAKNKNKRKEKPDRKEKNKKERRERRRRA

SEQ ID NO: 996616 - protein, 305 aa, Homo sapiens
YFDFVTRCVRAVDQGCGDLRPVEDNSSCGMISLKTGIQVLLTEYSFDSRHKPAFTEEDVLNIFPVVKHVNPQGPRMASISSRRGQCQEMQAGLSCKEGCELINEALNLCNNVYRSHARGELCLSAPPRPLHYIMGDYAEALSNLHEGGADDASGVDGHRGTTNTIQEYMHLALYCFASSQLSSRLSLLYRARTHAAGVGEDTRDGAVDNNIGARCCTAVVEYDLSLRFWKNALAATPNTTGQAPQVASSHHLIARVYQTKLSRARPRRKRGQPPQTRGGELENTEPAPRLTPAGRAQNDTAGSNA

SEQ ID NO: 996617 - protein, 176 aa, Homo sapiens
MPEREVLSNELAEWILRTRRSLTLLRTWTALTGVCWTSTFEKTVFYLPLTHQCLCLSGVVASTFKAVGWNVSRLHSQCPVIATMFPQPPQPQVLVPSMTTYEIIDSSCGAISRMCCSQFSHTQQIVNLEKQAKLSRAYDGTTLTCGYCGLVTLLAMIIATLPQGSIYGLSRNTSGT

SEQ ID NO: 996618 - protein, 193 aa, Homo sapiens
PLARRVASSLVCCVVPAPWLLFCAVLLCSRPVLCALCAPACCPVAVVPANVCPTMLVLACHSMCSCGPAMHVPNCELLVASTVVHLGTTSVQVTYTPTATSECVHNMAHTSRWPKSNQSIQLHAVLCPCGIIAHTSVTLGGSNVGLVQSPGHNTHILRKTLYHLKQPLGEVCCGIQPTQLNALVPAEHTCHRE

SEQ ID NO: 996619 - protein, 445 aa, Homo sapiens
GAILSHHADAPSLEPPSIPPGHHPTITVLGRLTIIDLETRSHRRLRMISRSDHWLHLQSNQKIPPTSQVDLEWCHVVVYARPAHHSNAMHLDNVMNMNGYTREVLTPYVGPNGAHRLRNPSTCQCTSQEQMIELGTMNEVRDEPPRSNTMYPCMLPTEHEHHVQITLIHQRPKSKRHDEPTLHHTAPATCHRRTITAHGRRNNRMTYQHDTQLDTTRKKTQHQSTNALDQKRDYNRGDREQTPNNNTRKQNNNMETNKNKRNPRHQQTTRRRNDGRHSTRKRIKQGTTTCRTIQPIGNNAPMGTHNKEPDTDNTSNDNRDLTLSTTERRTHQLKQSRTKHANHSEPLITTHNLITGTPTSTTTHKNELKSSTYQTTNKASGRTANIADKNKRTYKTGHNMTPNNEPTNREPRKETLSPTQSPQQRTKRRKQVKRTVHIKDKIGNA

SEQ ID NO: 996620 - protein, 138 aa, Homo sapiens
MGTVKVGVDGFGPVLECALVDQGVLLISAKDGYCRHQMTPSLILNYHALYMLPISFHTMDTIPIGTCTMAEERRSLSSMEIPSPSSRKRDPSKHQVGQMLALTYVEGSTTGVFTTLENGLGAHLAYGGAKRVIISATL

SEQ ID NO: 996621 - protein, 174 aa, Homo sapiens
MPSMLVRYVILTLQSYPIKHGVIINCDEMEKIWHHTFLQTELLRGPEGAPHVLLTEAPESQGQHERRMTQIMFETFKTPDMYVASKARSCPSKPLGDTHWHCHETLETGSPHGAIYRKGYAAPPSNPASGLVGRELTDISMKILTDARLQLSPPTAEREIVRDIQEKMCRSPGI

SEQ ID NO: 996622 - protein, 132 aa, Homo sapiens
GTCAQMTPPWCGGPQPPSWGSLPMCLELDNVKSEIIPMFSNLDSDEQDSDAACCASGRRAVNISPDILHPGRILEALADALLMRQDDRRQVLARPLRWWLTSSRELQKAVGPRDQPRQTLVHCHSRTIDERL

SEQ ID NO: 996623 - protein, 335 aa, Homo sapiens
IVTVHCARTAESQTTMQPTGWCTIIDKVISTITNNIQTDQLRSRTPYETLRSCCGCIRDQHDDLKDNRQQYTTYMAHRPTEAISQKIPIENIMNRYPGTTQEDPEGEHDEPSHIIEDATYCCCMKDHNRSAAADMIMLRRTPWEARNGPPRDKAEGHATEERHNNYNILHNARKEPTTTPTTINKNHSHNTQPKRGVLNSQHNPLAYNAITYKFTQATSTTPKNTITLRNYRDLRPTRMTNETQVQYPKHRTQTVPIQPSTNEGKRTGTQDENYESDKSPKILTQLGTTRTQQREYGNRHVNHEKHHNARDKIVTRYYRKQEDIEKKEPTTQQDK

SEQ ID NO: 996624 - protein, 189 aa, Homo sapiens
MPIEIPLGALLWNMGPWVYRGMEGGDEGHPLVEAAGKCLLRLSRFTPGPGRRKQLLQLLKLGHRYRAETKHEKKHETVARAEERGCGHRDVPRGDNRPFSRSYTPDLGGEQKAQRCVHRRDRTSGAICCRKKGGRTYPGRTRGCQDGTASQNGQAAQGLRHDEPRGTAHGHQGTTGVKNQKGRRRGEDI

SEQ ID NO: 996625 - protein, 347 aa, Homo sapiens
MARSQTASSCDPPPDAGTTHLPGRSAHVRMRLHRARAEDEVVRLRTADPEPERLSEELRGAPHRHETRLHDSAQTPHRLTRTRCSARERQKSREGQGAGRELAGTDRFGLRSLDDRSAPEARRKDEGRKEAAEGTGSRDMRSHYSEDADNNKSRYTHGDRPETLNQKKANHQTHRNGERRNIAATNRTSTRTHEQIITSRNPGGQINANGATRSPYTRANDTMRHQNVGRSVRKQKKTKNKEGNDIRTAETLNQTADDRKTRSKGEKNTPTLTGRATQKMRNKEDTKHQSEGNTHQTIQRNERQRKTKRKRKGEKHNDGTERRHETTTGTRKHHRRRSKKANRTNRE

SEQ ID NO: 996626 - protein, 171 aa, Homo sapiens
MRSQRMNRSQDPGMRCLQVLLVTHYPRSSQASVSRGIMDHIHYMTGPDYPYRTMRALKNKVVECKSLANEFLGRPLRCSTDTRHPRKDIEGRCLHDNKSRGKQWRQEFDRLNIEALRGNITEARETASAGKNEPRKETAHPLVGLPPGQVARPHAAPPGLPGYENLSGNLG

SEQ ID NO: 996627 - protein, 427 aa, Homo sapiens
MPPTQTQQRRVCHAVIEGHHLALARCTLRDTNAHATTDHSDLITAMTCTDTATTTFIFDWNARSTPLGHQAPRVAPCERKTTRNYIKPSSCKDVPTPMLRRRGLFKQERIVGAVEERNGLGLRVVPLVTAGRNLQTVGRPILRVGKALGRALVLPIAPSYRFPRHWRFPGQGAEALVSKARGHSAMPLAKCLNPPQERKPRGADRAFLGPTGPLWGPLPVSRISPGLSMRPNLQGAVSRAGSGVPPATQSEPAGPFPWGWRPGDQARGASPRRPFSTAADHLTRSVLITPHRVAPDSRRQSPWIERRAPSSVPGPCRGTEQETRRTKPRRSPSVEQPPGVITEREHYRPRIRTSHTRRPHRRDGLYLLQHTTAADSRAARQTTRHKHMRAVTKSSSYDEQVTRKITEALKRNPQISHEAQKGYYHAR

SEQ ID NO: 996628 - protein, 66 aa, Homo sapiens
DQWRMSRQRGAGGLVAWDGDRGGFRGGFGSGIRGQGVAAGGRGRGGGGRWGAGRGGGGAGAWGPGG

SEQ ID NO: 996629 - protein, 276 aa, Homo sapiens
  misc_feature (194)..(194): Xaa can be any naturally occurring amino acid
GTRRMELLIAFEVIGGDPAHKGPLQVQAAALHVESPGSILWPSDRSLCWWTIQLQTLVLVMDKSPVRTRALFWRGGHVGIEVMSWTYRYHCRARMVRNAPLPHGLLNDKLGRNRREGARLGTGDRLGHVRLAVASTEVSPWAKVCGVAVYATESIDQCSMGHTEDSLVLCTETTLWDEFSSLEPLPRKLDVLIXVEPLWSKHGCDASHLTVVPVGPNDVDRNRGRGRLEGALRTTLVAPVIERGALCGKEEPMVMMEHAAEKAGGLAMCSDYQHGE

SEQ ID NO: 996630 - protein, 128 aa, Homo sapiens
MGVGVPAPLHVCVVASVLQRAQRDHVQLQLKAGPDLSELHVAGGSGLLIHLGAWGGNTLVGVNVQRSTRYTGGGAYRGTCARGPTGVDIVVVRVGKGDDPGVCNLGAREIGIGGCHSAVDQAGRKSSV

SEQ ID NO: 996631 - protein, 101 aa, Homo sapiens
LSSSLHTSTLYPKKTHGGALQTPPSSRARKPSQPGPGMPEVSQVIYGGGTQAVPPCAQEEEASRELQFPDPFPGSRPGWKGRGPYIGGANSNSTASWEHVA

SEQ ID NO: 996632 - protein, 79 aa, Homo sapiens
MWSLGRIVGGGRVSSTTDLFGGNHGIIETTRGQRGAQQAIFRSFEAPDNLSHVPSPSLAQRPQGAPGRPLKRVGETHIM

SEQ ID NO: 996633 - protein, 82 aa, Homo sapiens
FRAWTRGRGGTCPTFLVGNPSPPNARRNPVIDVSSLPQFAEYSLTRSHELVLNTHKRILALSNGRCNSPQESYRLLYVEWPM

SEQ ID NO: 996634 - protein, 96 aa, Homo sapiens
AEAEAWDASRIQLHPLNPSPWSRKVAAGGVVDVNTSLQEVLKTALIHDGLASGIREGARCLRLAPSPSCVFASNCDEPMYVKLVEAFVVNTRIVDA

SEQ ID NO: 996635 - protein, 135 aa, Homo sapiens
  misc_feature (36)..(36): Xaa can be any naturally occurring amino acid
  misc_feature (42)..(42): Xaa can be any naturally occurring amino acid
MGENPSLLKIFSKNLAGNGGQMPVVHLLGTMQARKXVEPQKXTLHCSPNGAMHPNRGRNQPGPHKQHTGRAWPPRMGPRGAFPQLLPRWATCLGPRRGNSPKRAEDTRVSEHGTRGPHDTATLPRDRTHHKTPRL

SEQ ID NO: 996636 - protein, 388 aa, Homo sapiens
PCGPPKSRRPRPSRMENMAEHSRKLWCCLPVTPEQQEALQEGQEVRHGAEPQGVCMVKQTIAHQQQQLTNLQMAASDNGLWRSSLTFATRQAGSSGQRALAIMCRVYVGSYYYRAGESDTNPPGLSTPIRHHKQHALDTVHGTSDITMQDTTRFALRAHAMTDPPDSLHHPAPHTGSHTEHPHNATHDAKHTHTQTPHTPRPPPTPTTHRTAPRRHPTTTSPHRRTPRQTPSATHNARPQNDATQPTRTHDPPKPQPTPAKKDPTPHKRPPHPRHPTTDQRPHTQPTTRTPPQHHRTHTHTPTQPPAPHPPKRQRPHDPTIPTPAPPPTPTVQTNPNARHTHRPPHPDSPTQTTPSHPTHPHPRPPHTHQPTHPQATRTTPAPPTPPQ

SEQ ID NO: 996637 - protein, 51 aa, Homo sapiens
MTHCTRHKTRARPRAGSRDDPLNDCLKVAWAHYYALLIIYAIKYRSVYTRL

SEQ ID NO: 996638 - protein, 181 aa, Homo sapiens
MLEALINPIKHVSLMDQRARQLACPHWGELRLRLAKRRARTPSTRAGWEVLRLSFKIVQAPLPRMYHTHRRTDFPHPHIRSHRSISPTLPLHPHAPTAFSSLPPHTHPPPPLPTTPPSLPSPLILPILPPPPPHNTLLPTPPLHPHSLPHPPPLSFLPSHPHHSPPPSLSHTLHTSHTNLP

SEQ ID NO: 996639 - protein, 191 aa, Homo sapiens
MIYMLTGTRLAGGEGVLLANPTKDFGLEAVNDKEGTLAVLVLFVSPPLQVIAWGCLPCPPFRCRLIWEISTLKQGLGSVVWALGVSPACSLYVGDTDFGACSIVGMQVQVCVDLSVEGRSNAALVRPPFLDPLAGSDQGSLQHLALEAVAWAAPFLAILEPVCVGDASLGRGMPFVRTLRSPCRRQGFVCA

SEQ ID NO: 996640 - protein, 269 aa, Homo sapiens
  misc_feature (248)..(248): Xaa can be any naturally occurring amino acid
AHLKGVPCMECEQIPQEMTKLGHRADAVCASMYQCAPQGLCLPPSKQLTLHGPVVVDIRSGCLDRIRDASMIASVAVTWSYFRKEHAGEESNRRPLTSRGASFIVSAPTLDRIAPMKSEQLLDPGGPLGPLRAPVSSYLKAMTLVIAPVGLDGEPRIARSCPNAPVWQARMTCSCLCKAWTEVDVVAVKKLACLTCNVLYTPEIPLHKYDAKGASLRGAAMRRTFKDAYDQDSCVWVHYPTSNQAESXALSPESNDDELGECLPRAHAL

SEQ ID NO: 996641 - protein, 309 aa, Homo sapiens
IQEWGGGSRGLQGSYILEGGGESSSMIMSFQKLCLVGRGREVGMKHIENAWEESHPKNGIDIGAKGPMEGAAWILARSPRSIKCDASLPEHQSYEERAEAKKRPHGKKQGGYRDTQRYSPRTYYTPKFTILQGKTIEPSGTESVHLPTDEKGYWSRSEPCEQGTHDMTSWSREPGETKEYSQRALTSGLPLGFAIEMRGQGRAGGQQQDQQEKEQYQHKDKRERRKKQKKHTPQKTRAITTQKTMKKNTQDTEKETQKKQEHRKEKQQKEGQNNKSKRKGNNKEKTRKKRKKQRKKGKNEKRQQQKRIE

SEQ ID NO: 996642 - protein, 429 aa, Homo sapiens
GYLSSILRVLCQDPCAEQELRLALAYSATYVIIRPSVFISRMWTETTWRSVDSKYSSSFLDSGWRDLFSRFGANQMAELNVDDALRVEVMQITSNGAATNNTSFPSVPEANADVAGITFPDETTPISKFIARSLVVAEWWVWLNESRLQRLVRLRARTIIPVGYSPIRGSTVPRVIHAIQSSRPLSTKEGLRAKPSLPPYTIEQLHPLAQSRGEDAPLIRRNYWATVDWGHPWVEQIEMGATPRGEAGRKLRGNTERNNPVSKGKDRSEETGPSRPPKAPGGSGTVPKKVRRGQDGIPGGPWGTKRQWGDSREKRQQKRLPHEIPENKHPQGKQRVVYKNAREERNKSHTKRTTKARKIKNIKKEKRTQTNKGTQLSHDGKNKEEKEQDKRDQKKTREKKTREETTKEKREENATRESNKKKKDDTRTR

SEQ ID NO: 996643 - protein, 172 aa, Homo sapiens
MAKGTLDSDHWKAMGMQRRDNTRPIRKGPHFRRGPEELHRCQRHWGGIRARATHRIPKGVEELYQAPGDRYSHGGHVGWAPCITTRPPGTPGRTQRTNGQTTGGPEEQRQRGQERHRGGVPRRVLGWETPKARLYECYSKDTRRNCCVRRQLPEERHTHKGARQEKLHTSSR

SEQ ID NO: 996644 - protein, 283 aa, Homo sapiens
RQKQLVGNTEAQSAKSKDPSGLLIICAQALMSHSVHACRKHQGTNANRVSLASKPHAANVDRAPGMQLHCTATHTAIDAQPIRTIPERITAAHPLTPEHKHNSQVQREPAFMHRCCCTCKTGMQLREHCGLHRQLQPSSHVTDTCMDATLRHHQARKPQTAANKCNGPDKHISQMPHEHVRMSAVESYGGPPASRMAGLSDLRLELHSTKMNFNLVLIDEIKRHCTSNQTREVVAGVTKEKGENQDPRGKMLDVHMIDVNKLTYYIEDIPDITNHNDNDVKPQ

SEQ ID NO: 996645 - protein, 166 aa, Homo sapiens
MQDDNEKISEKRADITNNKALYQLTRACVGAHLPHYVGGGGNHCGLGNVAAGNTKSTVGEPEITHSLWETTTNHKSRALRRAHSINPKRGRMREEAKSSPGGATQRHFSTTSTSQGVGPPSEDERRRGRAANYGGHDREKLAVRNRGPRKNRGCAQHSQEEGPLGE

SEQ ID NO: 996646 - protein, 118 aa, Homo sapiens
MGCGASRAALLGAARIGCATIGCSNLDSYGVAEGMARKKRLSSRILLSTVKIPTIGDTGHRSPICSRVTGTHRLLGIQILFIYGEAADAQPLLNEVYALDGCMNADGRAPETCDKEAT

SEQ ID NO: 996647 - protein, 291 aa, Homo sapiens
SCINPGQAAAIASSTIMVPFGLIFIVFAYHFYRLIWISHKTDRQCQELKLSWREFARYYRSSYGTQLEGNATPLTPQVEQLMPRSHVVLGPFQVAIGLTPFPLEPVSLAPSLTEQTCAGRLVLQSKVRQKHWTANEGCCSIYRGILACTYMNKLDPRKVRYKQLALSFSRLQGPPSRVMVKAVEGGQKVGPRSTSDGGSRSSLTLMTICPSMGVSVRPVHDADFNPSTSPAPKQSDAVVQLWWWCSTSQIVPSLTVSPSIARVRCVSLGHGLRAHTWIMGEALRKKIMPSL

SEQ ID NO: 996648 - protein, 629 aa, Homo sapiens
  misc_feature (46)..(46): Xaa can be any naturally occurring amino acid
MGPRSRPDSREGVLYHEIIDIMKCREHSRAWDTPQVSQDRDQCRQXGCRKVCILANVIPRKLERMLRSVGQYFHVFIRFNGQLFAHEKTDTTKRNAAQYYTVGATTPDHSRRPEHCTRMMEGIRERKHIISFVLGDRLVEDAFVEFHLDVSNCGHRLTCAICTYLERGIELASKYGVYFGKRNPVGEATSLCQKPLCKVVANVPTPRLTDGLWRLRLGRPLVHRTTWAPLSVGHKGTVGFPEDNSSYCNLFGSRLGTLGRGPKVGILQSYIHRVPEADGNQENFTPFSQQPRPSGRFTDTCNPPRVATPLIGGKDEVAAPAAQEQTQPCGRKHRPLLENLIDGPTEELGAFGVNNRGESIGGPLAGSHIGRGLLVAVSPYWRRAANVGETRGTHSETKLPSHSYQQNLTFPTSTPPDRTNFHQRVNILSCKSFPTRLAIRTPRVTFRKRVASPPKRRTYFSPPQRHTDLGTCGPPAINHRGFPLGGLFQGVAQWAPLTLGSFVSNSNPTGAATREQGHRDNQPWSNEADFHTCGMLPPPMAYATLQAPPRDATLVDAIAQSLHHLPPGRRRKATSVHFPPKRHRVTHHAGKVNPRSCCTETRTTHSHHADPTADTTSPAWSPLYHTTAT

SEQ ID NO: 996649 - protein, 210 aa, Homo sapiens
MVWNDCWVRASCASDARDRGSGRVVAELSPAVAVPEAPPALGPGGSDVARAALALIVSVIGDEEDLRQATRVDRQHLDELCRMCNEYKDLCVAPEAYIAWMRRWRVEAAGSTVAQVRPGVCEPPQVGERVSCDVFPDIETTSSAFIIVAWGGIVRLPLSCPDPRREEPLQTRGTAGSSHDMSPSPQNERPFRSALPTTQETGHTSWRTIA

SEQ ID NO: 996650 - protein, 104 aa, Homo sapiens
MQKRQIGKYEEVARKWVIIEGDLERTEERAELADAPVCREMDEHGLELMDSDTLTVVKKLLLYTKQYFSYRNTKIRYEERNARVLTDSYSDGGRDPWLRLLRDR

SEQ ID NO: 996651 - protein, 264 aa, Homo sapiens
FSDQCYHFFGELSWCAVKDYLVKTCLSTDHDGSSEASKQDSLAPLPGASPWAPDVAQIVLTIHVTHVPWNLYSARIAHSAVCMHLFMLNSLWMRRVSCTRSADNTCMAISRQCRRYVVNGGGLGRQRELASRMDAPARRQLATCLWQFGMEEAHRTHILVPSGGRLPRTRVGVRFGEAKATLGRTLRTPVVGFPRPYPLPIQQGKRVGGKPWRVGVFDPRPSNFRGPVNPPESRYGGLGLITGLQIWVHPRSRHRGWNRRPRST

SEQ ID NO: 996652 - protein, 139 aa, Homo sapiens
MRAQIGLEGCSPEATEGMIWVAKITPQVTLIRVVHSSTGCHLLADLAIPWTQSAPVASHNYLTASLPFCQPTTLACHLHPLSSGAVPSQQPGTHLALGLPALCPWANAPRPRNRFSACTSLLLHILPHPCPPPRSHYGV

SEQ ID NO: 996653 - protein, 492 aa, Homo sapiens
MRVEAAAWCYGQRLAGSASSLSLPQQLVGAMAAWWLAEVGCPHEFLSCRTAGWLARRHSPTAAACGPCTAPWGPGVLECCLPGPDSHRGPEGHTTSRTTDARPSSHLVDRRPDVPDQGPHSRRKARHIVKKVVDCSVHWSTWPIAQVTFDLPYADRSIVNFMGPSLLARNRLASSLAPPGEQHPGGTSPSPLAHHRRPETAVGALYMDRPTTRNYGDFRGERSGSRGDSHSLGPAQQTRRVFKYWPTGSDVIPFGKFPQTGLTTTPCVHKSRGRNRPPAVRNQLQNIHNGPQSLMYTINGTHCRVRVLPGISSCGTEGTLNRDNFRRGPMHLGPGVEAMCAPQQVVHRLAMYQNGLAKPCEQVSYASLKLDDKPLWHAATHIVGANAAFDDTGNTQRWDNQTTERQWALTARIQHTSGRKYTPDTTTTKEGPTSPPAHTLTSSRHDGGRKDPRKEPPHRQTNDGPNDKPTPAPTAQQPSPTTAHHHHNTGQG

SEQ ID NO: 996654 - protein, 108 aa, Homo sapiens
DSPPRCSVESWQCPLWQDWDLVQTLGRQVPHGASSTCCAIAVTEASSRSEDCRYASVPLSTVPGTIFKQQQHLVIHITQMLTIHANMSDKDSHGSTRQQHRRIIRIIL

SEQ ID NO: 996655 - protein, 321 aa, Homo sapiens
AAVNLPLERDAESFLLKSPIAALIAWTRESSIIIPHVNSLSDALVPRDVPVFIEGKRDLCDVNYYAAAIVRSPLRSSYHMKRQAYNGSSIPSRDRERSCEAHRHYLAACKPRRRFNGMTLQDRSTVNDSADMELEEAETGEEAHDETRLTGPSDRGLDAKSLHTLHIAIIRGREAMLTLWAMPRLRACLGRPSRCMSHEEADEQMRVVLTLLMTASTTISTLMIIANQYNTNTSAGRTHNPLSTRPAPRTIGRRHQRITALEALRQDPTQKTTGAQQHTSTVTTHPTGKGAITTGYTTTDTRGAAEHPSKTSNPRREYPEH

SEQ ID NO: 996656 - protein, 217 aa, Homo sapiens
AGATLGGQRPLPLGGLAGDRVGPWMRSAMLADAPQCAQCLETLPGESGVPDFCSAGSYVASEVGDGMESGCTVSHFGPECAFLRGSAFPCGCNRRALSCVGPASLRRLGTLSRSPTALTDAALFLIRAGLVSGLGRGYSTCSPGSGTLTQLVYRRLLFPVPTSKTSLSACTNRQANRLDSGTPLGGLASHRPRLVSSQGATVSTSQAPAPNSSSLGP

SEQ ID NO: 996657 - protein, 618 aa, Homo sapiens
ESPWRLGPCTRIHENWRAIQGVIIACFSTGGAQVTRCVSGTSTTSDFGAKPTDTPGSFSREISVPAQAPQPSRQGCMHGIPAVLLQQTTTNLPSRHAAANGQADCWRASYIHRGQSRPNGLAASMVLLPYVALTYHSSTWIAHSQDTRITREEMIPATNRYVSPVQLDNANETDKHRGHNDGQATWHKSGMGTRWQGPATYPKGELVALTHTARYYHLPHHGTRKRHHYPPSRMRSTRHTEQLEPHSGQPSDTTVPAHRTRASRGDPPPAAATQHSRHCPQLTQHHRQRHSRTRHTNHYNSAGDPRAPHHPPHETIQHQNPGTSRAIHSKTTRTTLGPPLHNPSTGTRLNRTTQRGDHLATFSQREAEHNVGATAPVSQGYSKATQSNIGATPKRTREHGRRNAHEASSAPPSNTHTTPAQHTQGAKPTTHRYTTLTEKQGNAPAHQTPRQAPRHQAPTAAGRTTPDRNTTDTPTAARARSPPGDNTRDSQHPKQLAQTPPKFTDTDARMTRQMEHTRRQEDPRQSHTTRGTDRTQHTTAQRIAEKRAKMYTPGGAAHEHVTHDTQQRGHEDQNTRGSTPRTHNTKRDTQPTRTNQREPTHRYSADRRRRQKTHSHRR

SEQ ID NO: 996658 - protein, 154 aa, Homo sapiens
  misc_feature (111)..(111): Xaa can be any naturally occurring amino acid
LSRLPDLTAIDASTAVQPKGAPQYGTVVHECLDDSTAFRARDDYGARPEREEQSVRDSGIGGDSSCRRPIGTRELPDRALKGIVHHTRYSHTSVDNNAYRPGHPVTPRDSXRDIQSKKALCYLLHIERHPGPKRFHFGTGTHGMLSYTALIDTP

SEQ ID NO: 996659 - protein, 302 aa, Homo sapiens
  misc_feature (7)..(7): Xaa can be any naturally occurring amino acid
MLASMGXSVDRLSVIAHGVSASDSMHVARKGSLCDPCWLGASSSSLVLAGSVIVPCHLRGPRSHPLCLAASKLHTRGETGPKSVLKERLGGGGPAVRWTQWTLAREQGTGRRTSGQIMPGKNAPGDTHHRRQGTRNTPANRHRHTNPKRTKHKNKCPNRTTGTTKTEAIENKARRTHHADKRGGVTIPSDLTPHGDRGRRTQGHSQSSGPKTRGTNHERTSEHETPQTNTRRKKNITNKQRDTTGANTHEKDHEEQTRHTEIAAQPARTTSTKHKHEARKHEEARQPIKQHTHSEQNKELQR

SEQ ID NO: 996660 - protein, 174 aa, Homo sapiens
WTYMRYQVTAPRVNSLRVHLERLLCLRSSRLQLFVPYSISLRGRTPAHSPDPQQPARSTPKHSRDGLVSDPGTKPQAYNLPYGNVHVANEQPDSVILGPHMSWWQVVPKLITNCSISILLFSALSGELVYPFKDEYTPGASEHTYVVAGHTEAMNALGFWPNGHRGESISSLEC

SEQ ID NO: 996661 - protein, 467 aa, Homo sapiens
LYYVYMVAAWQLVLYQVPSQVSQQELTGLAGWPGHIGHFCLPVMCLTTVDSSCKADRSGMIMVFVPSTVTAYHVLYVFTHYCEIALTDNWLPNHGLVQLRQIRFMLTLSLGHDLMPLAAALFEDHFSKDHCYYILTCPNGCPTFLLPHLAYTLLAYSSRCASSTRDYLMTQLSSTGNIWTHELSRKVPPTNEPPLPWAPSIPTGGERALQPGDQLHHECSTAKIVVHLRLTMYTNIDPSSTLTTFTALGAQYRAAEHASHIRAPGRQRWQTSRAKRRHTVPPTSRKHHTTHRNTHTTERTDHTQDTNSAAQPHTATQQTPLETRPNQPSTCESTQRATMHTAHDTQQTNKTPSRTNDATHTFNLPPQSTCHTRQGYIMTHYTHHALDLSHTLLIHITTSNYSPHLSSYNDDTTTPLPPTTQSQPLTPHRHIIDPPHISNSLTLILITIDKLLISEHQHINNHTATIH

SEQ ID NO: 996662 - protein, 405 aa, Homo sapiens
GLSPGHGCSLQGWWCVHRSPVTASCLPVGPACGSEWNGVCAPCPMCRGMDASVPDKCMKHPAAPLEPLARCPCSQKSRSHVDRGGRILPKHFLLEATPDVLPVRLAGRELCLPRGYPLPAAGTWECWRQTVSIFPTFIARTHPDPTGWAFAASRAVLAGGVSVILSYAGVCTWLYSHILCTPAISQAANAEKSWEFATGHYSAHQSISRPWRSTGTHGPTPNNPAKSIMYTPRCTRRCSVNPGCPNGPPQIPPDLQISLGDEAWRLHPPTYALPPNAYRGSRASRQVLAASSPSWLASPYACSPLGKHLQHPLCTSPFMRAANEHTTLPTPHHSSCHSPHPLATQLINHTQPQPTPTPTHHTTSTPPPTAITTRQYTQTLNTTSTTHPLLPFSTLSPAVIISPLY

SEQ ID NO: 996663 - protein, 414 aa, Homo sapiens
YNNSTKVAVKTLKPGDYVLCTAFLEEANLHDSTLPAMHTCSVSALTLCVTQWQEPHLHHPPEYMAKVPVLPSAFPCTAAALHRCAHSCLLSHTASIFTLFLASSICQHGQHRPITIRQRAQDTTNYNLVNLDDARLNLYPRILPTVTSLVATHFGTTLSEAYCYARYTSERLQLHRYPPCHKRCTRVALQSFRTSLYTLADRAHPMTGHIPHFMELANPPTLNVLHLWSGPFLGTLPLPSFTHTKLMIRPLSCRDTNIVPTNSPRGHATPYNVGAATDCNPDTRTRRSPSGRFPLSNLVLPDGLLGNHAASQLTAFHYCKHIYVGTNLVCLGSTRQSPGPAPVIDNLPTRHYARLTLTQDSRSLANVNLSNLPSSTCDNSGRQSTTRHILVAPYRPTEGTDDQSHHYCAHACYM

SEQ ID NO: 996664 - protein, 321 aa, Homo sapiens
RLRHERVTLVPPALSQNSYEPAESSLLLMWIGHVVHRQKWDPGEPAGLDSRGREATSDLAVMGSVLYQKVTRYFLFLFNLIFFSPGAQCSWAIGVWILADKSSFISVLQSSSSSLRMGAYVFIVRGGSHYAHGLPGSASDCRLRRLRSPAVGCTLLSCLLILIDQVTVGDLYKFNMGKLKQEHGPGIADLSFIRRSTHTQLAERQSDDAWGLTMQGSAVKCCGPGSAFYKRGQDATHELMALALKVQLPLVPCQSVTCGIEEQAALLCAGMGSSALPWERGIPNRDQLYGNMLPCVTQVAILWELVPVFYTGLMTAIKIIS

SEQ ID NO: 996665 - protein, 126 aa, Homo sapiens
MGLALYVSSTALLACTVAYHSVRELPGWCPRKCCCSWVPCPDLGPPLASIIGKGGMNIALGVLAWINMCRIALGAGYADDEWPMCRLCTLARLIHNRWFRGVPGSCPGLDPSANLAAMRLSTPHHT

SEQ ID NO: 996666 - protein, 272 aa, Homo sapiens
MRSATLLLTACTPATLHLTALLSVAGCDWARTLCVVLLTSRTCTVLTSGPWVDPRNRCRSSCVACWFYRGDDGRLAGRPALGPSPAATTRLTAVDPRHRTQSTPGCYANWWLSKMTQCKATPSCPGAHNFPVAVTIWKPGNPQHLHSGQGGKCSVPVVRTVPVSGNPFYRQPTVPISQPFGLTATPNHYSDPKILIPDDPSAAYYHSPQFGTWSAADINRVDVTPRTVAPHWDYHLARHSGHTTHTLASDYVECAPFLITPLVAVPSNMSPL

SEQ ID NO: 996667 - protein, 247 aa, Homo sapiens
MAIHSRKTIWLQRASPLIQGTPIWVGSSSRLLMQHFGFIGRLFARDDSRNAPALIHGRFLGNPRKQQLKPLRAIPSVATRAFLCLLLVWWDSLSRQLGLLLARSVFGRGFHGTTWLAPGQPPRARVFLPSEPLSKETPRAENHASHRQRPVHHGDRDRGLSFRTAVTLFALAMTTYHGERAPGHIPSISGSQIVACTEEITAAGKHPEDEDHSPGLALHAVVPIQILTTFKAFSRRPSYPCSLDADS

SEQ ID NO: 996668 - protein, 237 aa, Homo sapiens
SISNFEEARTSYGTDEDILFVYLDRMTAVSLVLPGPSDPITHHQTVALLMWLPCDPVLGCCLVCLEMWNMQANQTQSWTEVPRNIRRTGTACFVLPDCRVFAHCHITTNATCMRCWTRIPPKRPTALTSTLLPHHVQCPKLPDKWPLFALLTHQHPMRNWYSPATRRRQGTCTHWQQAGPLRYGPDWPPRSADQLLAELILGRHSTIAGPPRSSLSPRPDPPSPGATLILAIGNDST

SEQ ID NO: 996669 - protein, 111 aa, Homo sapiens
GQGRPSRATDTRPRVPVYTTSHRGAPPRTPMGADVMGMEFRRIPMWAHEDPEQERHSSPCKYTQSKHGIDQPTWYDMEKIWHQEPFYQMTLRCGFPAGSTTRACMNQRHPL

SEQ ID NO: 996670 - protein, 251 aa, Homo sapiens
GIFSIADSPCRICIPCDTHRGLLFAASHSGVSMCPWPTACLYRESVGTASLPGDPYCAWSGSSCNHVNLYQPQLATQAVDPWTSREPAPMDLCTRVCGCVPVFCTNRGERHVSKSSFQPNTVNTLAVRLLSKLATPTLATQRGPRQCLRVSCARCYPLGTLLLVGTQTGWGSSRCWSLERGLTRQTGSQHTAQKVVHGRGGRPKQDDGWKCTPSLVKNIGVYNAPSLLAIGSWAVKTGLLGKELMVKVHAL

SEQ ID NO: 996671 - protein, 279 aa, Homo sapiens
MPCCPNQCIQSNIACEHALETVTVAPQEGPPCATNNTGIGKLLGNFWAAIKTGNFVQLRSSREGNYEAAGLKLFTRAGQVGEIPLRQRPRAKHDKGRRPWYTHICCATRGYKVKESFRKRCDTSATLIMSSRTMDQEQNHVYTWIRHTAIELVQQGDITDTRQAEEIARRRSITTPQNYKKGVWTHGAYIQTRYTREQPHAETGTTRATEMRESKEEEMTHQQTQTEQTTVRVPTEGHRGQDERHTEDIDSRSTTTSVDDHDNPTDNTTAETTRQSSRS

SEQ ID NO: 996672 - protein, 72 aa, Homo sapiens
GDRVEIRCVADGNPPPHFSISKQNPSTREAEEETTNDNVGTCVAMEPARKEHMWSAIECQGLDLDTNDIRSS

SEQ ID NO: 996673 - protein, 112 aa, Homo sapiens
MGDLEEEPAGVSARDIEAWASSEQRINGSITRGTALWHSAYRPGAPADNALLSADVRTENLLGAETRINLCNANCDQCARECRGEASFERQPLDGTPLGVKARTEGCDLKIS

SEQ ID NO: 996674 - protein, 188 aa, Homo sapiens
MLRTTPDNRSSTDHIQTHSSDQARQDPTNTSQPIKPLRPPHRNCQTYQQSRNANQQTKDMCYPPTLPTHSYTSSRTTHSTTHPLPQTTPPTTPLPQLPPFTLQRYDSSHPPPPKHILTPHYPYKTTDTLHHHQPIPATYTSQLTPFVHFYPPYHLILHSNPHSSYSTLQNHKHTHPYRTPHDNSQQNK

SEQ ID NO: 996675 - protein, 421 aa, Homo sapiens
MCALRRTAVGPELLLQWFLMLPASWLCAAHCCSFPCAVCGCAVVDAERGPCSVVSAGDVPVVHDWGLVSPVAGNPPVQHPVPHAYDGQMLKKTHHGLLMLASWGYFLQDSPQCRLQSHYFQEDNSHSSSHWYHSALVTLGCRPLPCINGPSENPVQPYIKQTVLYFAQEAIVSLGRGPAEAGLLPGSNKAGLLSVYRGFTCPGNQETVPAVHHRARPDWDQMRQRKRSINGPENVSLWRCTWKLAMPEPHTARTHTMTPKGFVRIQSISRAHFQHAHKRGHTHFTLRTVKVIAQLLYLTNRVKSSCTYNYTHQLHNSRLRVPPILPTTKGLSRTDRLNRERKVRTPRTNTLASRTKSVYLGNSSHVCDPLFIASLERLVRARVQNDRCKSKRYTRVTEPATRTRSSEVVGLTSSKLDKLRG

SEQ ID NO: 996676 - protein, 143 aa, Homo sapiens
MPRMNARRAEKDTVICVTIKRSLYPGNLRQTIVNLYMRAAQLIVYPDNDPKKRAPKSSVLQTLAKRVMCSYALDMDTTCVTNQDPENDLCNGHMAMFHYDPRPVTVYTPNTGSWQCSVYPKVRSIDTSSLPVTRIVPKQASTH

SEQ ID NO: 996677 - protein, 280 aa, Homo sapiens
MSNQVESCKIAVSETSSYPEHVTLLAVPHRPRATSAYDQSEVSAVQLDQAKGALGHTFYALQAFAMSLDSNAVCEVKGVMPKESILGCAGFAHLTRTFLLPDSSEAQGSPELSLLKFTLVGPFHRFLVPIGCSTSFATVGTRSPASQLPRKVLDFALALRCMSRSLTKDVTLRCRCLDLNRVVVMSVCPGGALRGTLWWYHSPSTRPPRKTFRLALHPSDPALAFAISLAYTFTHGIRGPWFSGLPLPHCASSCVGMRVPLEGSVSSSSGDLTLSCPEVY

SEQ ID NO: 996678 - protein, 229 aa, Homo sapiens
RLFGCKRALIRRPTVAGLSEACAGGQASVRTSSHVLAVVRLLYQLEEAEGIDPQGAMVICEQLGDLFSKAGRLSHGQLRLYLEAAAVIADLLVTDRVLQRAIIHVSLDSTLGDMKDHHMVAVSPLLRRNCRLRQLATVLDEAKTWLNLLHCACEEAGDAFTRLLAPCFQKALSCASAGTRVASLQRARSLGSIYHTCAAEAAAPVNAPVEETQTAGAFSVAEDEDDGWT

SEQ ID NO: 996679 - protein, 301 aa, Homo sapiens
GASRMRCLNRAYAAAGPGPRLHVQRPPGGRSLHQHGCTWQPIYNVCEHAGIPEMDMKVSDLTGLARSPAVDLELFRGLGMTLSYLFRGYRAAILGLSRSEKGPLSPRFRGEHALLRYPSGEERCIVCSSARPSGPPSAITIWVLSQELYGKPRDHPSMSINMTKCTLLRLLQEACPVDAIVEGPNFEFSTETHEELLYNRRSSQHTGTSGEGRDRRNIQADLLVSGDALRAVALLTSRPFDLILLRWASAVGRFFLAARGPFSKTRGGGVSARLALGGRPGVPGRLVRHALVPGPSLSRGG

SEQ ID NO: 996680 - protein, 226 aa, Homo sapiens
MAGPLHAYVQEQLSYLLNQLNVARIAGCLHMTVETAVLIETLVTLGAEVQWSSCNIFSTQDHAAAAIANAGTSVYAWKGETDEEYLWCIEQTLYIQRTGPQPMILDDGGHLTTIIQHQGTAVLPGIRGISEETTTGVHKHLKDDGQGILKWLHQGHDQTQTSCNLYGRRRHHNGTSGTHSQNAQDQGPERAGKAPSEGRTDKQKAPQRQRQDPKESTDPKKQQTKK

SEQ ID NO: 996681 - protein, 412 aa, Homo sapiens
MRQPAQGLLLQGARRQLAGNTASIQLFLLLCTQHSSIHITTLTFTHTHHQIHISASRHSIISVHASPQLSLSHRSHLFTSASQASFHSSTPSCTALQHTQSAMQRTRQHSITPGSLHTPCTAQALQHAQLSVHRPGKQHNGPFNHSHHIWSSTQALTSSAPHIPITAIQHKGRDASFKDNGKSTAQGSSIGNSTTPHQIHHITQTAQPQAGARREYPHRYTMRQPGRTRCVQRQDALQAPGTGRDIYTTQATLLATKCPIGTDMQGTQISGRSQFVTTGHYTEHTGTFTPPTPPSNDNHWRIQHLTFGVKVGERDLHNQNFARAKQYRTGSGPLGTNHLGNTTTRHTYTGHAAATTTGTSAHTDRRHTQQHHMKSHTPSSHATTIHNNRTPRNHSLGPARTYIKRATLGQHN

SEQ ID NO: 996682 - protein, 302 aa, Homo sapiens
MKPAEQVFFNQTPSGRSSVAQQPGKWNQYSQYSNDTDFPKFNHRFPRSSIYIPTWVSTHQQPEEWYSPGIYAHSGVCQLRLSTREKLQVAEMPVTKKPRMGASAGRIKGDELCVASGDRASGYHYNALTCEGCQQVPPGTKPFTTQRLVYTVYKPEATGLMAYCHMRTATCPECRLRDNGHIRLAHAWLEWYGIPGLLNPELHTRYILTQTGQTPVPPALHTTTVQLQARDTAPRLRRTTGDTLQHKTQSMSRYAPTLNSLNQRINDADSPIHSTIRTSHNHNHVLVLSTNHTQTSRITDTT

SEQ ID NO: 996683 - protein, 299 aa, Homo sapiens
MTTASTSQVRQNYTPGLRGRINRQINLQLYASYVNLIQVPHYHRPRMTPRPDDPLPQITSIHQLSCTTRTHCPRHPTECCQTHPTARRHPSLPGPIKHTPHPATDRTAPRPALAKDAAHPPPGNHHRAITHTPENRHKTQRHPDPPPTEPAPTQIMTTTLDDPPSPAETHAALNPPHHQTLKIAPTHDHPPEAPHGQAPRQIRAGRDTIPIHKDTNPGGNPRPTRRAHRLRPQQHMTQTVPPRTAGSPYSIGDPTNPTPSAPNRHEPQQAPPTPHPPRQYGASKETHTHPSASTTKRET

SEQ ID NO: 996684 - protein, 188 aa, Homo sapiens
MKPEPDGEPNAFNSRQDMTWSSSDDNTAAGPSSVGGELEWGGIHDEDCMGHDMSGSQVSALNRQAPQRKEPGPEDKLHEQCRPWRKNACCSTNNSQEAHKDVFPTYIDSTGTTVREMAHCLQTGISYQDTCTLRVLPQLAGPGSRQVESELAQHERVLNVTPVPKRTVEQWWRRSSAPPTPERAMAQG

SEQ ID NO: 996685 - protein, 253 aa, Homo sapiens
MLVTEGGVPHTLCHRGLIWPHCLAALSTKWVGSYRRASDPLCPPERVLLISKARGECRILFTTKDCSLVCKSKRNIFYFLFFKTCDQMFMPPTTTFLLGGTSTDMTTIFCRAPVSFIPMITPTFSHATSVLPCRINLVVIHCGRRVVTPMGGATDPLVLGSCAIQTGGVTRSPMALRGLPRTGTSRLGANLYERRGATGGVLSSYEVVHATNSTITGCGTQPVPENNVQDYDWVHLDRYDISPRDLLNVLATR

SEQ ID NO: 996686 - protein, 214 aa, Homo sapiens
MAYLAWRLARRIVSDVTTCPVVQLALEYNSNESQQKDFDEFIESEVTCLWINGSMVNERCTRYRALRCYISTATEGPCNMPKPGVFDLINKAKWDAWNALGSLPKEAARQNYVDLVSSLSPSLESSSQVEPGTDRKSTGFETLVVTSEDGITKIMFNRAKKTNAINTEMYHEIMRALKADSNDDSIITVLQEMVTINSSGNDLTNFMIFPWWSN

SEQ ID NO: 996687 - protein, 237 aa, Homo sapiens
FQGSHCILTIHGAVVINSFHIIIIHTLSSINQHTSHSAPINMFHVPCNPSRTTHLPQPPGPIAHTTLVFPPKLSSHGAQTQVVGTHCINTQFTISSQFTFHRAKSPFISNIPLHRHQFPPLFHYLFFLSSSPALLSTQQSVSSFSQSDSLGTVSGYLVTLPLILINLTPGPEGLPISIINLVQHTSMQATISRATLPYVSDKYTYIPNPITKSHISYVHKPAPAAQLFSHMVKTGYI

SEQ ID NO: 996688 - protein, 487 aa, Homo sapiens
GTTPGMVQQRTLLTLLVDALSLDSLPCTLPDGAPTRDPQTTVTFRTTTDVDTLSYLHTTPGHDLTGPSYDVWTHTPNSDDRHQPYPWSSDCHADYDTCLTTARFDTPKLPDTTWWTHTLTTLTNGTPLTCGRCDLWDDTRTYRPRLCVTRTLPDKRPSTYLTKTTGVAPMTPDRGTNQNHYAFTTSVAVLSMTVRQDGHATHSSFQSHMAKQTSMDVAEQAGHSPSHIATPPGKAEQRNALVACTLSTARQQHIGTRRSPCAGWSPGHHWGATSPIRIEPKHRTQNNGRTVQPEGTLHAWTPTTHNGETPDQPYYLTDSPTTNDRDTQQRGTQHMAGDRQQPDNTGPPKQKTEKPTNPHNNRDQTNPTSTRAKQQAARTTNNNKSHTTATTKVITRNRLTDSSTADADTRPLETADQQHTNPQYTQQQTKPDDINQHTTRPRRTKPTQRHRTATTNLRDHNQTTSKRATDQQGTSELAPDDENENHS

SEQ ID NO: 996689 - protein, 294 aa, Homo sapiens
MVYERGGEKPSLLDGLREKFPRSAHLGGPENAPSAPLRLKPSSAELQLGAVPVYFQPLGQVLDTACRAARLGALSPGFWHFPDPIDTLIYLECQTLIEEVSAGFPIVTDDDVTRERLAMRGPGFPELLMPHPFLEGRDEDLDGAMRAAGVPCDPDQQQPFICVATWTGGNHRDPAFLIPASGHYPDLRDLREPTAPSSSRNAWAHLVPEGFYAATCIPWSRTTLDTPRTTLPTESRSPCSQAKFSDAGQWAGANTHPARPPILHTYTLATSGMTARCQSDTQPRTADATTLETG

SEQ ID NO: 996690 - protein, 217 aa, Homo sapiens
MAGTALKRLSGRDTNKLTLNPPGRNVAGPMNEENLIWNGRHLIMGPEDIWLELGCYSYLPYLSFPLVLPVNGHRQKYEIYLWDVSSQHLTLMGESAFPSSYAQAMTPMGSESSAERWSPVQKCGEDPAVSGEHAGRAQLTTVELTCDASKDVGDDRRAVLLTLRRDRPESLWDWSDLARDRRAPSRLSTISIIPAHLVTVMVCAGTNKADLQNHGTF

SEQ ID NO: 996691 - protein, 166 aa, Homo sapiens
MPGPADCHINLSYLSYGLTPDRDPYDTTTLTAYTRRHVGIVVGYVSSNASGDTPDITVTHTFIHDCDDTQFDVHTWTHTDLIYVTFAIYALLMESTPTCVPQLNKKSILQVPMSAHNLTQLYEAENNGCTHYVPAASVMCLFCRRHVTWNTYNTVHGVPNANNTDT

SEQ ID NO: 996692 - protein, 151 aa, Homo sapiens
MGGTRVSWMWKSYSSYHPDIGASSCQLSLTHSPDQPDLTFITILTSLGTISLGDCVLCEADSNTVYITVTPGTGRWEERDNQSLGDYYRRAHTQSSIQKILVLEPVLPNSTSRTMLDASPSWIALILRIRLHPPLGHVQTCTSLAPLDMYN

SEQ ID NO: 996693 - protein, 413 aa, Homo sapiens
MQARHNRSNRFPKTNARRYENASYPSMAVTNNMSSLKEKLQQQQDYQQTPQFNNPHQHRGHIVFSGFTQCTGRIMNTRLSQGLQLLTKSSVKGSISPNQTIGNGRIILYTQPTHFNTGRVEFHTQNPLKHYRMDRQGARTFCRYTPNQALKDYTTIKHNHRIDRHKLGHHALYIGAELGPPACNNTNARGKTNNQATGTGNDGATNLGQQQTRTESPRRTERTTTNSITTPRRRYTHHLTSPCARQPGEPRDKQHNSRQNTHTPQTCSSSADPPTLIVYQLAQTQLTLHKVVSAHRDRTRGEYDLRASDQTTPQQQTRASREMTNPASELQTHNTKNDIKRNVTLRSHDDNNRRKHATTRRRQTTVSKAREKRRKIDTPSSTKDDDKKKKRDKTRHHRRPLPLECHRRPETQL

SEQ ID NO: 996694 - protein, 192 aa, Homo sapiens
AVQIIPYSSYGCIPILQMGKVRLRKSRWKCTQRANGGGRLDSPVLAGSQELGLSLESFCILEPIPQGLFSGVQGSPRNVSVLLSATSLNPFEAPGTTSKQISWEMAVPPRGQMANPRHLPGGGEGCVTGGAVVEQLVQALLSEGGVTATCALTAVLLGEWQPYRLTTCLLRVERRGLGVSVLNQELSWKVGT

SEQ ID NO: 996695 - protein, 297 aa, Homo sapiens
PGIEQAVSAASTTTSAVSEGAFAAATHSCATHSRLRLGSSSAHTTTIYTTLGQLSRRRSNRSRLHQRETGAQNNERTGESRREENKKSDKRRRKQDKDIKQLTEQSSNPARAGQEDTSRQGQKANRSNQKARMHAQRENEYTSGGREARQQHATEGRKRHNTAKMTTERRPERRHPGPPKGDNARHAHRSKNERDEQVRRKRGTERRRTQTNRQSKEERRADHYGKGRREGRGQEQNGTRRQPAARARTTRERREGRNERGRRADQRKGGRRDATEAARRERTRRASKRKGERTNQR

SEQ ID NO: 996696 - protein, 259 aa, Homo sapiens
MLTRLASRDFACGWENLGSCRDWIDIVWLAMNRISNRRVLDSHVLRSMLSIEVRSHLLATTQTHGHEHCIHIAILIHHVTQSRNIPAIQRAIPTTDVILDTTRGGVVQAARNQTYDRGTREHHNKMTQQQTRRRQLAHKRSSKNNITTTRHTNDSTQRGHYHIEHTRQARHTDRYGGDINPREDIDTEAAHSSNDRDDDHQTETKNDITRRASQVHSIEMNRRQPETEKETRRKKKALSTHVAAHSEHHDTTKADTERR

SEQ ID NO: 996697 - protein, 398 aa, Homo sapiens
QWLFPANPSNFGRLRWEDRRSSGVQDQTGQHGKTPLCCKQLTNYLAWHWCHYCLYSRLLWEADAREDSHSAPSRLNGCTPCPAPLPTDTYKEGQRTRLRLTCHASGRFVTTPWPHTDANPALYLQQYKQSGPGLWLEPGHVLNPKLLPGRPAAPATQITFAHSMGDALAPGMPRRNPHDLTTPPARHQAYGQRGTTRTDLMSTPTDTTHPQTKHKKSQSTNRRNAKDTKDEQTTSEHHSESTQHLKWPCEANNTASWARPNERGTGLPRVPPCGEIKTARAPSNTPQRERSRHSHHNQRQKDKPTHRTPQTRATPRGDPRGAQQPYPSAPAHADKEDRRTLRGNNETKSVDSAPAVPRLRDKRSKDTSKKREKNYTTTPTPPRRGQLVTPRPTRTAQS

SEQ ID NO: 996698 - protein, 429 aa, Homo sapiens
CIYTLELLFSRTKQNEILSFAATWMELEVITHYGDMSQEPEPTNKPSTYWSILTMGTPKTNRGFPCGWHEKRGQWQVRNAPSTKGTRTTDGGEMATQTVHPHAVTNTIPVQAHTVQRRLLPNFAINPPSTRCKNTYVSYTILMVNAYSKKIKPSAPGRKRKVWPVANSPNQHSLQLKADAGQVAMRNKKPTPNPTKNGDEHNNTKKGTHNRSVSQQQNYPKLVTAHPTKNDNANNKNDSGSTNRRTDVTAYTHTETTREHWKMARASTPNANGGNESATVQPHRYRTTAPDHDQGGTRSKTPKHANKESRLINSTDQLCQNRHTDSNHYGRGQDIAHENTRTASNKRRGHKGKADITTNIMRVENGRVQNVLRNKTGKSKAAQQTPRGRNEIETKMERRTQIKQATPPRRNEEKRNKTRKRIETDKRHN

SEQ ID NO: 996699 - protein, 290 aa, Homo sapiens
MRAHTNAGAHECGRTRMRAHTNAGAHECGLHTNAGAPLSLSTADMTKGLVFRNLFQRTQEDDVPQFTTVQESNFDHTLSELATLQQSTSEPYLAPPLQGQGKHSQPSHGLHSGLPHAWLLAWPSANTQAAGTRRNQATLACTGHRKHQSCCCSGVQADSRTGALVCGGGSLLETLRLLRRERCFGLYELQMTLHATQERWLVSAKIYGSGAQDGLADRSSVWILVPDTSGHRRNWMRRTRTANSNMDSPAAFGPTFSRTNLTTLHSVNPQVLINTTVCIGRHGLRILTHV

SEQ ID NO: 996700 - protein, 150 aa, Homo sapiens
SIHHYSRTDYNHDNDMKNHRCISTTRTPMTPIRKINPLIKLINRSFIDLPTPSNISSMMKLRLTPWRLLILQITTGLFLAMHYSSDGRQPPFSINSSTYTRARTLWLADLDHVPLHANGAINYSVSASSYTLGRGLYTDHFSTQKPETSA

SEQ ID NO: 996701 - protein, 423 aa, Homo sapiens
RSDQWCVNQRTMLVVSTADAELRAAKDTSIGRTSTPVSHCKAIQHPSPATTLMHDSQLLNALISRHNQSPATRAVISRHDPLQHHGNAHPTIQHPMPKHATTHCPAPSIHQSTRFINMAAPWHFITTLCSIASAHAMRKLADGNLTGRHSRLFPARMPLFKPCSAQPGCSLLGNSTSDDSMRPTALHWPHRTLYHTPLTPHLTRHLCNGATQGLITHVFTLAHPVSHCPGLDMQMATTLAHHIRPPRDRYSWMRSNLAPRDQQPRNAIVTNNSALTRNLGNYLELASGTVTQLLPHTHTCHTYRSQLLPSATTYQTPADQLTRYLTHTVTSFTPDRIPTQYHLGQCCALKPHCNPPRGHLTPLTLRPHHNRVRIPARESANTDFQRIASYRRTTVINHTRSNIIATHYTLSQPRVTHPTPSTP

SEQ ID NO: 996702 - protein, 116 aa, Homo sapiens
MLAFICPVAIPETKIAVLVPQNAAIRYLLHAQHYARYISPVYIAILFTYIILSRTRMNHNQNTSAIKYFIIKYISNWLIAIKTVRNMPPTQLLSSRRFTAWHPSDIRAASAHMTEH

SEQ ID NO: 996703 - protein, 32 aa, Homo sapiens
  misc_feature (32)..(32): Xaa can be any naturally occurring amino acid
MRFNTEVPTRSMVCWIHPPTKGQRHPQSPPWX

SEQ ID NO: 996704 - protein, 167 aa, Homo sapiens
MWSHPKFQATNKHSPLSTSPPISSSLPSGNNHGRSSQLTTVKKEAETRPVIQCTSDIMKGVDIHQTLDGRTQNTQSFSHLTVPKVATVISTYGLTLSRSDDDPGLMLCHWRWMGLRCAGNDGCLRITPNAECTSTPHGKPGTRTIPLVMARPKTRPPHRTPVTHNVH

SEQ ID NO: 996705 - protein, 88 aa, Homo sapiens
MKARSPYNFTFHWPRYARRFEMTLLPPWILSTLSSLDNLHRRLSSALRVSQHSPYSSPNSVQPSTAYAIRRQSYDPTDPTITTAHRTL

SEQ ID NO: 996706 - protein, 302 aa, Homo sapiens
MPECPVSCLLAVVFAWVMVLMEMCACVAFLESTWGWGIVALSGGVAGDYHAAAIAKNWLNWCDFIRSGSITCTYVLEAWRSLGNSNRDVAGWAIDTILQSRTVSGDREQWADAGQWATIVYAVDSQEGQGPSRASLELRGLPGAILQYVLLAAVLLSTQGPRLMPHSEIKTPVCCRHHPAEWGIPAGMNGTKFTLVGPERPGNTSVSGTTLDRRHQMVLVSFDPGSTACGHANDEMWLARREPLSCTGFACWHFTRRPTLGSTPTVIGGRAHNTAQTKTKTLKMTHTTTKLEDPSDHDIVVL

SEQ ID NO: 996707 - protein, 133 aa, Homo sapiens
MLLMVSYPILRSPCSLAVVGVLTGLAVIPEAVNPSRDLGTGMVDKHSKVRSDYYTNHTSYVVMFSMKLPHYQSKYLTIFEYHAVCLVEEHEYSYYTYVFMKFLRMNGINHVVRTILQISWHDFSRVQRRQLAS

SEQ ID NO: 996708 - protein, 146 aa, Homo sapiens
MAKSMLLVNAVSIRSVVRSKIRVSSSFRIYAMIIVSIVLLYNVEILGTWLHQYLNRLPLVPYIPLLRDSVVGVPEAKQGRYVFDTAFPYPKRSFPASGRIKVAKDADEIIAGNAHNNKRRKPLIGPMMGPAKAHHTIHKGQRTPST

SEQ ID NO: 996709 - protein, 601 aa, Homo sapiens
GNLPTQPACKAQHASFAIFHQPACIPPATAAISVGNPCVLFAVPQHTHAHSGMHSTMPSSTHIAKGSIAHLICNTCLFIAHTHLPPRHEHHTSVAHTTHDFLHVIYEALAANGYINTLTGLADSQWVHSLIRWLGPHLPPNTPLGTFFLAQSADGVGPIGYLHHATHTIPQQHQHAPLVNIYKVHNRPFHTRAFYERPNRCGSHAIGGRPQPSTRVAPQGQHATNTRQDGPVGGTTFPSTTTQLEDTAIMSSHIADKDQHPAQEDTTQTTDANLTGGDTSMFQPTVGKHEAIQRNRMAKRSSRQRVHTQPGTPLGRPTDLTECHKHANRNQWDDITTNGGQPQHYQVGNHNIHTSAAPMSTDETAPPNTQQDDSHASRESPRTTQSQREWATQQTSLHKTAHGGIFRDHTHVGQRSTSTHHANRQAMDNSRTRSNRQHHSIRPEWGHKTRLWHTRQQARHEVCGSTHSGVFAHTHEGGPVYIGYALTYTTGINVQTRRGDEYTDTAWRLSVRSSPHEDNHPPKETTEHSSSNTMSRPIAHKEQLTTHGGHHPGMGEQHMSRATGRMHKRDNHPIALEHHRRATQQLDQLTQRKRTTREEEQ

SEQ ID NO: 996710 - protein, 74 aa, Homo sapiens
RETGVRCGPNGVTVVGRNPEVVPEMVSAHRSMEIVAWQWYSMELLLIGLALLLHDGKLDITDEFMTEWECVHHF

SEQ ID NO: 996711 - protein, 230 aa, Homo sapiens
KNSRLYTTTRRPQRVGPYGLLQPFADAGRELFTKEPLKTRHIVPSRLYITGTGHLGSHTSIFYYETPPSHIHQRPQGQHIKTRTVANIISRPHSGTKTEGRSKAILTQGLRHLREQIERRMKKDGKSIRKGRRDRPESSILNRSTRTTIQNPHLEKQQDATTAEPQCKMRTSQTPLHHQTTPTIRNDRDIPRQSTNRRPPWRPTHKSNEIPQKLDRDNRQQRRTNPRGKE

SEQ ID NO: 996712 - protein, 350 aa, Homo sapiens
GAGCTAPSSGRPGSTINFSSHMVQYVDYLVKATGSEDTFLCNGHNQADRPVPAASPAASPRLPEEWVTNRAQDKLASGDQFTVGALQLDRSHRHTGPNMQQQHRSCMAIAVICTFFLKPWTKDILINFPKGSGLLTPLPCHIHYYHIPALTGVNDFVLRSSRTGTLDKIPHLPRAEQFQCYSISETLRGQAVDPHIDRHTDWHTYQEVAEPPHARGTGRMRHNWTQRRRHILITLGNTRTQPDMLRGPHRTPTTGTHHDAMQRNHEAHSQKDFKQKIGQTNTQGIGRSMTAKPKTQPSNNQEPSGTSPRGHTRGSPSSTRAPGEIAGLASNTTQQHTEGITINQRHNEEE

SEQ ID NO: 996713 - protein, 136 aa, Homo sapiens
MPATSDLAPNMDTVQRPEPMSNIHNKPDTGPTQQAVTERARQTQTHKQRMHQRSPTYTQTHHPTTPKASHPNQTEKQNQHQQQAQTTPIRNPHNSNATQDPTPPTPTPPRTCYKHTTPQHNPPPHHPTATDPPTHH

SEQ ID NO: 996714 - protein, 428 aa, Homo sapiens
TAKFTAHIHQQQAHINVSCNTVAASIGNHFFIHSSHISSSFIAQTKHSWDPGHSSTAPVVPQHFEGNNTVIFQTTQTGERHTSYLFRAGLSFTLHQSTITSIIHRHTSRQSIARNSRSLTPPACQTNLSHNPQCSNMSQHNHTNIDDHSEGYHFTPSNMYGLGPTFHKSPVKLSHFKTAPSKMGYRPTANDKTSTIPIHALRHFEPKHRHIQGIYNLGKGAIMGKNRHTANKHTINKRTIITQTKIQKMKRDDKIRPKALPHVRPGESEDQRTCDRLYNYAHKTTTMVKEDTTQKEENQGVTKTNQLRRKPHDRGGPQITQQRAQYVGNRQVDATAELHTREGTTPSTTTSQRTKKKSKHNTQENAAKRSSTADRHPHPHMNPARSRTWKHTESDTHTQNHNGQNQQKVDHALTNKKVKNKQGTPHTP

SEQ ID NO: 996715 - protein, 430 aa, Homo sapiens
MRRAGLGEGVPPGNSWAHSWLMLHQWGHQVPCCKHSTQCSRPPLQQSAASKSQLLITQSSFPSGTHQGTIGKAYRDLKQITTSHLDLSHMGISTTLLEFPTKHGHCLRGQTHLIGANTLSQESDAIHHSRGQARNLKSLAGWHSSWHRPVFHFLHPGSFSLLIPFSCGQFTSTPGGWHGHGFTLSVAPLRGTHLWMPQTFVHLGFWPALITLFWDYTHPIHGNPNRTHYSLRLGSHHINSGGAIFVPSVDDQLWVWNIVGPLRSRNIPESNQYTLTLYSKGGAISGKITLVAVKDEQHHMHQGHRYIKVTGGRTSCNNRGTDKHTHQQPYTSDVGHSTTGTRATKPHNIHQHDYIRNSMCGALHITGDGVNEPTGVDDNLDESTALHPTVPAAHIDYCATMEGTLSHMRATAEVDIHIAAPLMKRITDYV

SEQ ID NO: 996716 - protein, 187 aa, Homo sapiens
MDPPISTLRRTQGRPYVAKANIDGNTWGPSRFPHIARSTDQRRKEAPLREVTPHSLQREHTGGCSDPSYPQAKANNVGAITREHNLDTLVQTATGGRNNSTPRLPHFVSPTIGNNLRTAFGDYNAAFTTPFGDCIYHHFSITHSAINNHRAIGGSPAPHMRTTPTVGGTCDFFTIPHTVWGALRYFA

SEQ ID NO: 996717 - protein, 459 aa, Homo sapiens
  misc_feature (197)..(197): Xaa can be any naturally occurring amino acid
QLWAHPFHINRWPSANAQGGMAHKHSSKQTVLHKQHSRHQASGAVWQAHNSPCNGHAEGTHNQLCQHSSTAAQGRCQGYPTTIQGQAADLKAQSIHTVTPCHTQHTSPKHRHAQGSTQQPFHCITGPHLISVQPPLKPSAHNLYQAQTGGSHKQAQHTPRAYYRKHQHTPWCRPNCKSHYPRQIIGRMRGHRTAGNXATHTYARSRSSPMGHTLAFSPTTGSSKGGHRPMCWRSPASRAASLLPTKPKPQTATQQNCTIGRDNTRRHRPQHMERPTSNDYNSYNFRPFQTPTRRGRNKPRPTQTHEATTQRTSGRDATGRTIDTNRTGGGNTPALGVNREATTTQTQRGLVAQHAEGGNRTMDTPAPNGGASGTNRISVDSPPQLSHIGYTMHICTNEHTRQSAGGDSHHQAKHRHPTTTHHKPELTTEDGCPATTRHHSAVPTQTHTAASSEPTTPKA

SEQ ID NO: 996718 - protein, 135 aa, Homo sapiens
ARHFDHVNFQPRHGQQMISTTPWHLAANHMQHCIAFSSLTNCPASFIMVPTSHHSLHSTHSFSVSATSNSELQSAIISIIFQHICNRCIINRALSLFISDQAPIYSSHASILLVFIRNHHITISVVIVQQHITIQ

SEQ ID NO: 996719 - protein, 133 aa, Homo sapiens
MWTLVGNTRGTWPYITLVGIKPFNNANAGDLPMWRQYFLYKPNCDHCGHAGHHTRSEPQTELDKQENTVESGPKRDVHKNHPERMRQENVSSKQHARQTKNTNYNHEAHSVPQTSQTVFENAALAPNVVERQT

SEQ ID NO: 996720 - protein, 148 aa, Homo sapiens
LPAKNVCTMAGMHFHVRMHAGKALTHHGTSLMHSISHTTAAQHVGIMAQHHSHIITVTHTSHSHTAQHRTPTHSRPYHKPSISPHHRVYNRHTIAQGLHTHRAAHRRHFPHRPTVAHTHTSTFTEASPTYPTDIGTHTTYITQGTTWQ

SEQ ID NO: 996721 - protein, 414 aa, Homo sapiens
SSTATQSTHFKSNIVAQTAGCISSHVLVITAARGQAIHNTHSSSTISQHNIIIINSNRSHHLCVFSHRYVVMHRAPPQHMSPTEQHNNTHQRQPIYSAAVMRYKQTTTNETKTTKARHQRIHQPKNPTIIMRYTISNNNNTMHTSNTKPTPANYDQYTTTNTKEHAKRDKQRAQFRRRTLNIGGQQGRERRNESTPAAYQGAPHLLLTPNENHRNQRGNMLPQHTGHLGYTHQRGHPKNERTYRKSEPQAHQTGHNKIRIYTTNHTEDTFTAAATRNPFKLTETTAYNTDDSIHNKMYSTRPMKFTVSVTPYKDKRIISTPRRCAKPQANTQLITIQPTHTNTTHTQSATSIRMLIRIITTHIPYTLHTTTLSYGSIQNIPFYQQQTHKTKKTYNLHITTKLYYFNNITTLHTT

SEQ ID NO: 996722 - protein, 143 aa, Homo sapiens
AAIIHCAFIHNQCTAHHAIILLHSSSSVPAHGPAISTATQDTHHPANVILIVMSIHYGSICTTFNIHSFTFTSQHTSNIWHQHTHMYFLFLCSSAINHTSSNHSTILLYSNSSSHLSHSISTQLCRNRQPRHTHIISEIKHIH

SEQ ID NO: 996723 - protein, 47 aa, Homo sapiens
MGETVARLRAPGHETADKEIKRAKRETEPDNRPTSTNQEGTTHEDHH

SEQ ID NO: 996724 - protein, 145 aa, Homo sapiens
MVRQAQPIDRHGRYLADTRNTRWDNRDTHTNDHPPDSTDRTPQANPRDTHQGTNTVTRTIHTQLNAYLPTIAHPNTPTTTSNQTYKPDKHTGNNIQRTPIVAPPRPIHRTQKLENTNEHRQAMQHNTNARNHTQEHKKTTKQQTT

SEQ ID NO: 996725 - protein, 152 aa, Homo sapiens
GERVASGLPRLHAQGRRRNIILSHPPILRSVAALWCIPLLILFCFFFGFWRTGFRFGRPGWNCSAANLGSREPRASVDSNDIPCLSFPSNLSSSLYPASDSSRLRMERGDTAGRERRPEMRVQGQHRLLRELSPGGPGRGIRTPCRSVTALL

SEQ ID NO: 996726 - protein, 36 aa, Homo sapiens
NKATNNKPLGRKRYHNVAGRPLSERSSAAKLVARKR

SEQ ID NO: 996727 - protein, 73 aa, Homo sapiens
DLQTLPWRMPEYRPSGVEVFGCQKEPEERFFLMILCNITNSTVTYGKAAEGMSSHDKAYGFGVVKIDLINQVL

SEQ ID NO: 996728 - protein, 258 aa, Homo sapiens
MTGHRDHIKCGWHSTKRTFDNTWKKEAAEHGERGSFKYDLGSGITLKAERDRGITMDISLWTIGDQQVTMVTIMDAPGTQKNFIKNCDFTGTSQADCAVLMVCCMVSANLKAGISKMVADPRACPSGFTQWVGEHNYLVGVNQNVDSMSAQPYSQEEILSRKWVTEKVPRTYHLHEHMGYEPPEHKMKQFWVPHYTGVATLACNHNFAGSPDGAKPIALGIQRRHVEKFHQRIESDVTTWPWCNHNDGLERSSELDFT

SEQ ID NO: 996729 - protein, 117 aa, Homo sapiens
MKLSCTRIASHSERYLLTDSTEDSLKAHVEARIAGSTSTLPQLLLSTRRRSGIIRLTLILKAPEKRHNQYPFLCTIPMRHNDSSSICLRKNRPKSLMAYSSIRQIGLVVTGILIQTP

SEQ ID NO: 996730 - protein, 106 aa, Homo sapiens
YITQQGCQKTYTVKSRKRVSGTDNDGKHELHSSYVIIVTKRREVLTTGQPRASGCRRGVPSYNSLENPLGIAGGPDGDVSGALKDITGCTLGTNKAAARTLRGEHK

SEQ ID NO: 996731 - protein, 113 aa, Homo sapiens
MRSYTSLRHDGNFGSPPWSRAVSPPEVDPMRHYSVCAVHVVTRRPLIRQCIIKIDPRSFDDVTLLVNHPLTFTPMAPQYSLSASSYTSGEAYITDHFSTQKPETSALSSCLQL

SEQ ID NO: 996732 - protein, 300 aa, Homo sapiens
GQGMPEPARDIDGNSQLTFYLSFFLETECRSVWPRLECSGAVSAHRQPLPPGFERFSCLRLLSGWDLQACAQPTLTDFVSPVETEFLRDGQVGSSNSQPQVTLYASASQSAEDCSGLELQNSGTSLITFLDENPLPSSLRKRAELTQYAPTSNYPSQGRSQVAELHDNSYQGPANTGPNLTWTKPLSDSLDTYARSRPLKRNGHGTPDTNYRPLTETARPTGWTTTNKSQARHTAKTMREQQHGPPALERNITGQQYNSAIDYLHKAGHTTQRPTSEAPASPKKHNDQACKQSKKKCQNT

SEQ ID NO: 996733 - protein, 122 aa, Homo sapiens
MPRCISPYCLIVTHLLYLYAIPITINRRGSKGIPCSLSIIDSDSGTTRKWYLDAYGVDTDFGAGRKILPISLHTFPRIYILRNPGQNLGGHPMWPDLTKLRKYKYFAEMGKYPSNFGYLNHS

SEQ ID NO: 996734 - protein, 288 aa, Homo sapiens
MQFHAIDGWPDNRDVLPLPSYEYKFRQDAISNPSLILAAVTMIARHIAMAACSGSEADLLRMGQGYAWAGVIAEDQGIKKVLLDEHFLVLFGSMETSTEDSGPSIHRSRRKGSPCDQGCDGGLEPGGVQSSSTKEAGDQLGPEFFMKLSSSVGRKFRLEPELEEQQLESTWDDDVTSSSFAQACGLLPRRVLTLILPHKVGLQSLTGACWQTMRRRRRMEPLEDPWGTTGVTKDRQVVQGSSVTQTVVIVGLFRKQGRDKCMGRWGFLNIKPGSGKLVYEGHVVHVLA

SEQ ID NO: 996735 - protein, 410 aa, Homo sapiens
SPRTGSREERARSDLSLPCSFCSPAWDGRIPAGRALALQSLKARGRACGAGGPESPTRKSSLWATCECRAEGPGRRSAHSCDVVRVPQCWGRERHVPHRPACRGTGGVNGATKGPAGWQRFRLPADTPQTTGSQFPGPCGQMRRTGRLRHLSTPDRQWATFELGPGGQTAKVYVETGNEGIARPMARRQTPRRGKIPRATGAGSQMENSVSTRGTPRTRGRHMAPDSMETHLDTKQPQDTPSSARQLGNTTTDGGTPLAAKRKNTGSREPRPNEKKGKGTADEKTCDRRPPQPNQQHTSDAAALKTEARQQDRGKYQGQPTTHNRQKHTHKQAHPQSLHVRAHRNRHGGRRHNQTHAANDQHPSTLEGQQVGDLQPEGRRTRRTTRTRGRGTTENNSTKPVHRGTTRADK

SEQ ID NO: 996736 - protein, 309 aa, Homo sapiens
MNLARNDESKRYTFRYTRIDPSDTSGTFTSISCNLLRLIQAPQLCPEHDHAQFTHGGIQSSATPLGHAKGNVIGQHFKVPRITAEYLKRIGPRPNKAPIFLSKSTPHGSTDTATRYEHLRLTLYRFGNGNSPLIRTGPTTHLIRAKGHTQSVSSINRKQHEQREAVIAEIAGIHICTINLPFLTCSIATTTLGPDTVMIRPPGRTLHRNSPKSTPLDEQRTYQHTGAVPKERNSYTARRQSRPPGRVTLYTNFRSNYNCLNCLGDVMATEKPCTTEVPGNWGSSQDGSGIVNNNLVHATTGTLCENIFN

SEQ ID NO: 996737 - protein, 431 aa, Homo sapiens
  misc_feature (341)..(341): Xaa can be any naturally occurring amino acid
  misc_feature (355)..(355): Xaa can be any naturally occurring amino acid
  misc_feature (369)..(369): Xaa can be any naturally occurring amino acid
MCLTLCAASYKSVKTRYFPTSVKTTQTYVAAKRKSYPVHVIANGGGLQIVNPRYIEEKENIQGRLTMVKTHGGESARKVHTHGIPIQRLLKLIKVSSNTEICRYEHKILTLGQHETYTRTSNRASLLITRNSPMLNTNSPFASDAGEFHLEKAKPLLRMAVTSTVPTEHYPSEEHRSGAQPHRMNAAQRRERATVTSILHSESTTHRSRLKPSCKRTASFGPVTETIERHYRHFYIRTPLGTTNGRPNDRDMAMTSPQAQWCRIDYAREDLRHKERQPARLTIGSPQHAIGANTPTLRCVSPPRSYVRPQLSEHKQDPYTYTSCLQEVTPVTPGPTEYCQXQRGSAHMRSSPIHXDPARTRSTETMSCXHTGYERHHLSEQLYEITRTTTYIEIGDHTCIRPTRHRSAAQTATRRTHTATHRTNHTQRSQN

SEQ ID NO: 996738 - protein, 258 aa, Homo sapiens
LALIHFPPTSMSHPRPNSSSSSSPSPPASLCPIWVYVSFFWFPRGPSLVPFLLSGTPLAPTPSHASDNSSVKMSHPPRGLLDHPVLNTLLSLSLFLLEMESRSVTQAGVQWVRSTDQCNLCFLGSSNSRASGSRDSWGLQAPATTPGIIVIRNSQARDQGFTIWDQAGLKLLTFVSTHRGSQSAGMTGVSNRNRARSNKRGTALSSDWSGHGGTIATGTRPLGQGTLRLSPKQWDRGQPATGNSAPRHTGERRCRGLE

SEQ ID NO: 996739 - protein, 94 aa, Homo sapiens
MAYRIRGLTTGPVPASKDSAGSTPSRERVAPQPNRPAGGSHRKHSQQQQEHDMWPPPTRAPHRDPPPKTQQRSAAHRTNEQNEPPSGRTTDTRD

SEQ ID NO: 996740 - protein, 334 aa, Homo sapiens
HEAMWGKALVTYDLETAIPSSTRQAGHHSGLADIGTLPYSFRLFNQDWIMTLQHWCPELEELHYQAAWRNMQWDHSTSVQQSKKTGTSYHESLYKCSTISNETENSLHFMTSLKYARVTTQRGKRCVSAALSLCIRSIPQLSQVAGHLESWNKHWGRFTHRSVTHKKLSEVYITWQHNTAQTSPRTRDISFSRSLIMASKAPDTTRAYLTGNTALGAAQKRRSYYRTILTPNHLRHTVTNTGPATPQKATPKPPPGNEAQHHQHNRTRREHQYKRYTPGKQHNTQSDSPATKQPQTTLTANKHKTTETAHRAAEQTTTHTHHRVPNRQETHRGK

SEQ ID NO: 996741 - protein, 95 aa, Homo sapiens
SLCRMEDVCEQHLKFWEGVGCLASKTRRRQKHQHRRDQTLSSWPCCMSFYSRKRRATGKSQPSYENLQVTLRGMHSYAQSIRGAEYLCIKAGWNS

SEQ ID NO: 996742 - protein, 116 aa, Homo sapiens
EIAPLYSSVATARLRLNKKKKEKSQKKTLGKYIQLNGKLRIEIGGFKNILAMDFWTTNYPKLGPNFTDLKGIILHEIGPQVQTTSSRAQGVSRATLVIWTNWPTISRDSHYPWYMG

SEQ ID NO: 996743 - protein, 335 aa, Homo sapiens
MGLTSWGILHSRHWELGDAEHRARPNGQRGTWWFANGPQLALWAGKDTCARHTRRKASFATRLCAKRNGVNAPDTFGAALGKKVNVSQGQQFDMRRARLKYSVKHIHRTIYGSGAYNAQEDKPFQGIAATSKLFAQVSNMGPPLGTPHFCREHLHKQGGTSYAVTPRGQSASYTRDNNTHMRGTEVRVDTRAEHNRRTSQGTQLVIPEDPTAVHKQQAAGHTPVDDQHSSHGYQGQGRQPEEIKTIRKHTLLATRQRDHTCGAQHQYDQTEHNTVRQASQKHAKRQSDDWGRPLRLDGGTQHRGAEPNRTKNHTMSDQMWRHPTCGETRGGTPVD

SEQ ID NO: 996744 - protein, 223 aa, Homo sapiens
MEDSMDMDDEPSCGPQNYLFGCELRGRSDRLSTLRWIDDEKMSTRFIFKNGQYRGWCYRMRLHYVECRGNELRRQFAIKVILVTLKMVCTDNGFPVVGFEHNTRPSGSISVDTCRYQGTVHYYLDRYLGAVEEDAESEDEEEEDVKLLSISGKRFARGGGSKVPQNKSQTCLLMTMMTMMMNEDDDEDDVMMDDFDDEEVKKTRSEEIYRDIRGKNAESRNEN

SEQ ID NO: 996745 - protein, 274 aa, Homo sapiens
KISRKGGLDTGQGDPFVLWTQLSSLFAHGMDTAETASNNEFGATKRNSEKANLFQTDGNPIAIELGGFSYAPGQDSWLGTGEVLNLHETKGPDRASKHKGLNWRRSGMAHIFRQGGPLNQITGHEKCLEASIPKALPRHVFFPPILPVHLEQLSNYGSGKWILRCQSPEKKTEPGTTSSHQIPPSLDLILERGSLIHGLCLELEQASAPLRRLFALTRIRWGDSEPGVSAPEYYREPKYEPGKPKTDEPLLHARSTSWGQWSHPEKWDSWTNGT

SEQ ID NO: 996746 - protein, 143 aa, Homo sapiens
RDTREIPHNFLCFSILETGVWLPVTQGLSHKGGDPQLMATSASQVQEILPPQPPEGVTPGHASLGLKSSGPPGDLAHLGLWKCRGRLKGVSHWCQALPYFFHNGEDTSKAIYEAGPHTRTINIAQVAWIRAIKSMVGSKQPQV

SEQ ID NO: 996747 - protein, 131 aa, Homo sapiens
MAVALGLKRMLQEISLPRSSAEHERAVFKRKNSKERPRSSGGGGIESPRIKIDDTTRVWAHSKRDCLTVSILWDALCKDTFSVKLSGVLTGIYCEACSHVGVHKKFAVDSNDEATQSVSRNTAIGLGPGGK

SEQ ID NO: 996748 - protein, 111 aa, Homo sapiens
MTPIRKINPLIKLSGTDITSSSSPALNRNISGMMKLRLTPWSPAGSSNITYMDYCQTMHYSTETPYEPRFSSIAHDHVETVNDGCIIRYLHANGASIFLDLPLPTQSGEGL

SEQ ID NO: 996749 - protein, 225 aa, Homo sapiens
CCRGKQTHPGTSSAAWCCLAMRMCRMRTAWSGCSCPAAAACPAAGLWACVAWPPVLGHVCTGLRGSAGCPGCSCKQLACVSGHWELNGGTIGLRQRNRPSGREEGDVVGSQGCGALYGTGCPLGIGPGVTLDKIFPREHTPFKGVTPTLGAPLQHFIWGPGSYTREPERLYYQHFNQNCGDLVARLILLSVRQKKPSLVGRDRYGHLADNGPQDIELRSMCGAYL

SEQ ID NO: 996750 - protein, 75 aa, Homo sapiens
GAPRVPNLRLDTKMPGEQQAEEEEEEEMQEEMVLLVKGEEDEGEEKYEVVKLKIPMDNKERHDLALSPRLECSGT

SEQ ID NO: 996751 - protein, 217 aa, Homo sapiens
  misc_feature (49)..(49): Xaa can be any naturally occurring amino acid
  misc_feature (180)..(180): Xaa can be any naturally occurring amino acid
IPKVAELIAKEDVDFLPYMSCAGGIPKEAVRNQSLLASSEWPELRVIQXDEHMENSIFHKRKRVELVSARMLAEQILHRRMPLGVLPAFTSKFGKRGRSGTTPYRYFRVGQSLCKIKHAHLNPLFNDTVKSMRKNIYLLDFFLHIFGIRSQLGFPNLNPRTARLLNRSLLPLSFGLDIGXGSIVYGSSCVIPKKSFECISNSSQRPLLPWAPLVGLN

SEQ ID NO: 996752 - protein, 227 aa, Homo sapiens
MISPPELLMFSAVCVEEKLFFPRSFFKTHHNQVTTRAGPTIQSAARTHRGEKHPTLSITLGRVPQGADIIYPRAASTTIRAIEGGRPLVGRGDQPWVATHFVATENKRPPTEECLGGNQLLDTALLVFHKVWLNTGAPQVKESSPIAGQKKGSDILLTTADGRRSTHSSAGQQHNSVFFWTQQELFCGATPPQLLVASNSIQSNNTLRAREGKPSLANHHVRHYYRA

SEQ ID NO: 996753 - protein, 104 aa, Homo sapiens
MAENQVTGRKSGLDNRELGHWELGKTGLGAMELGYSLKEQAGFSGDINKAWDLGGKQVGQMARGSGVAKGCIPLGVDWQNPEKEYLHELVRKHRVQGQENGQKC

SEQ ID NO: 996754 - protein, 80 aa, Homo sapiens
RNILQERGRRRSVNMGVAVTEEILSQIVLSAWSILLSESTNKTPRVDGPERYHWTLFLGIAQSIDRSIYVGSNRTSSAES

SEQ ID NO: 996755 - protein, 78 aa, Homo sapiens
EEDSKFEVEQLEDQKYGTGEENELDDRYGTLRQTKNHTFRTTQTIHFNTLNNVRTVRQNTKTQLGKHKRLRGTTCTKR

SEQ ID NO: 996756 - protein, 182 aa, Homo sapiens
MEKHSPQIASRWEHSPANIFVFIMCMLENGYLTRVCMPEVCVRSGVDRGSGGISSRPPRFGWLFAHRLLVTVLHGTSLTCVRSCEDRKWGLHWGFSMRILPSSSGFGFTRVSVLPRSRRGSSSRVYEGTAETRRSLPVTENNGRDSNDHSGMAIVSGLRGVPTETSVGEGVHVGRLGSTRRI

SEQ ID NO: 996757 - protein, 66 aa, Homo sapiens
HNEAGWLLLSSVDKVMKENDELGDSISRLQKQILSLKSAKIALSESLISCRERTEMWKNRHKLLSC

SEQ ID NO: 996758 - protein, 69 aa, Homo sapiens
YTSKMCVIRLPVALGLCDLLSMYPAASSSAACTYSWTRTAPYVCLVLILSHRGSCDDTLRCNTSSYVMA

SEQ ID NO: 996759 - protein, 47 aa, Homo sapiens
MCTGGKTIPPGARTHSVGATVGHPTLKKSGDAHNPPGVHKLPGEGEQ

SEQ ID NO: 996760 - protein, 142 aa, Homo sapiens
MGRTCSRYLLVLDDPVARGFFARRELLPGPIRKGASRERLPSWALSLKRDGWRSARSWQVYTARVSSREDCPFPELRPTKRYTGVEAPNVYRQSLRCPAVTGQTPEVSLLLHQCPWWALDYYQTCQDWWGLPGWHLAGPLSE

SEQ ID NO: 996761 - protein, 201 aa, Homo sapiens
MMLRQIHRYRSNEACETSSIVTDLPNVLPCVLSMSFEGAPSCSSSLGTSIDLRAHLLVRQMQILTRLVLCHLSWSQVSVKPLRHALWASLSDRMDRRPDIGRDTIQSKFFLVSEYRKQSGGRSSCARLCWSRRDEMCACVGHETSIGQVPYVFTISGGLWYSPYAPTGLRYITGVRDSWNPHLVMDVVVRGKLRQCGIFAV

SEQ ID NO: 996762 - protein, 410 aa, Homo sapiens
SSSLLSPLLFLVLDRATLKKQFRVVTKNKKHTKRLAATKGMKFLLGHSSWVLPLLDRLASLESFVKLFIPKRRTTQSPGEIVAGLQELGARATGETGLAYELAVNSKTQAGSSGDINTRMATVEEHSLAKIAQGTGGGPRVSIPLGREHTGKTHRRSIISHAPGHHERVELRRNLGDDLAHTATSSYRTTTTLGSAGIKLHKLALPETSGLLAYTPTRISLSGIVDPHEPFVQTATTGYPVPPSSPGGLTTNGALLPSPCDTMDRDLHITAIGAPINWCPPSGWRHFLRLTPGAPICLMRSTPPYLFNFVNSTTGVTPDTEDLRDRPDRGSSHQANLIAPQAIKTPASVPLTQHNTSDRSDKTTKQPGDGRTLNSRTAHTPPGGFTTHHQSPQHQTRVCVNTPPTWEATP

SEQ ID NO: 996763 - protein, 86 aa, Homo sapiens
  misc_feature (48)..(48): Xaa can be any naturally occurring amino acid
  misc_feature (81)..(81): Xaa can be any naturally occurring amino acid
GPRSRRQGAEGSEGRPRRGGGDGGAERWQLTVLFGPTFTRMCDPCQRXNISAAWMIIGISMYVYTELSAFPQGLGRHPRTXVTFRN

SEQ ID NO: 996764 - protein, 236 aa, Homo sapiens
MLGAAQGEGSPSRVRSPCRCDLSGHHERCPPVVGQDEAREEAVLERLNAGEIVNGDGGFVFALEKRGYVKAGPWTPEAAVESTQKQIRQLHREFTSELAQNVMQSFTFYASEDKLETQGQLCLRRRYLAQEVNEACLRHRPDKWLMTGDAWVAGGVSHDTLPYLSCKSETDSHNQSFLQQSEVFMNDGNVDFLIRRSILNTLKKLCGQFDTSHSLRNPVGSTHVHSAQNATLAMAC

SEQ ID NO: 996765 - protein, 67 aa, Homo sapiens
RNIRVKLVDEYAGARYGDRYAGGSCLLPRVDTSYGCGTKDDRGYSEAKVVSRSAFIMTGRAQQRQTR

SEQ ID NO: 996766 - protein, 109 aa, Homo sapiens
MTNVQWRLTKQVVISVTEIICVVPCAREVDSVMKIVLLHYSSTTNVRIRLLAVSRCTLPCCSCITQCPICSDNLTLELGYSCSGELLLRTMRYRSLRYCVTKRTLFKLY

SEQ ID NO: 996767 - protein, 102 aa, Homo sapiens
LLNYNMHSHRSNHIGYRSSKPTLIPHRWVSSPDEAIRQNAVNAGTYFLFYTLGRLPFPLLIVLSLHVTSTARRRLKIRTYITLSWPEGTIKTPEPTNCNVVT

SEQ ID NO: 996768 - protein, 119 aa, Homo sapiens
PLQVRNFLESASPVPKAPPASQVASFGQPSSWSSRLAFPGPAFGFWQPLQAQNLYLQSAFAGRAPASRRPALGPASASASQGSPAQLALASMRLPQSKSSVPFRSLRQGPASCPASVLV

SEQ ID NO: 996769 - protein, 189 aa, Homo sapiens
  misc_feature (5)..(5): Xaa can be any naturally occurring amino acid
MRPRXTKTVQKCVVSEGFSFQPVFETTTRNNGPSRVRSQEKLGGTKEVVVHGNCSNRQGPGRMAHLGYLYSFQMSYRGGEQAVVRPFAVVGFQKAGSNPCAWPLRRHVPWKVRLGGNSTEGSTNRVEYKGPPGCKILQRVRFHYRVEHSNQRKGVIHPGLCLSAKGGLRNRSGQVSLDPLRVISNAANR

SEQ ID NO: 996770 - protein, 106 aa, Homo sapiens
ACCFLLLGSPCQTNKGRRDWSGHGEAEEEEAASHGEWMMKYPWTFRILVATKYILLQKMHAFMQYLTSCQCYRNVTAHKRLLGPTPRQHCCTQFWTKGRNMPTAQS

SEQ ID NO: 996771 - protein, 94 aa, Homo sapiens
LSLQGFFLVCKELFLFGLTVKYYNGDLEGLCGPSCLELETEAFVSLAPSRAYLPTAGVASRSARRYHQGMHIEDKQIVETLSPTSTVNSGRRST

SEQ ID NO: 996772 - protein, 141 aa, Homo sapiens
EIPGSRESRKRSWWAAMLSPEESDVLRYLVEVEELAEEVLADKRQIVDLDSKRNQNREGLRALLKDLSSSEACDGSASGNMFIKMPHPETKEMIDKDQDHLDKDIEELLEVELNSEWSTAVCEAQGKPELKGFTVEPPQPG

SEQ ID NO: 996773 - protein, 290 aa, Homo sapiens
VTAMTRRWFPSGRVQLQGAPGRFISTVGSMDGSERVGSGRVSIQVTGHRSSLLSEEALPGKWGHSSHSLYGCCMVFAYLFRVPWQEYWAYSCIGHVPKDLYYRGCCVQCELYFGSWVGTFPIALAGLPPLSRLIWRRSIGPAVGEAFPVGQAWSVVFAFWVAWWSPPWVLVQFHRFAVHFGQLRNGTFSRVAFSSTGTLWATPEGVPGALWWTTGGAPSFGCQTVQTNSASGFGHSDCPGCGVTSQRLLECGIDLERPEVYPSGVRDPGCVDAFPCKQVAAKRIRGGLSH

SEQ ID NO: 996774 - protein, 155 aa, Homo sapiens
MLGFTAALVHTGGYRLFLRLSIGASHSGSGNLTRPVAATHSATQPCTGDKYLHVATVGDLVHPMGVGHPSAVGSLREERPLSNCSTGLELLPPRTLGAHSPQKVVPKSILATAPKWNPHGGHPPGTPKVYTFMRLQCTSSRSEGTRSQQWGDHML

SEQ ID NO: 996775 - protein, 104 aa, Homo sapiens
MNMAVGVGTDCSERRSARTCECHSLVAFLPLKTLRPAAMLERTEHRHKIYYVFWYPCLSKKLLQHPVPLGAMLAMLVTAACTLFERVRPVSMESLKRPSALMTF

SEQ ID NO: 996776 - protein, 146 aa, Homo sapiens
MASYTVSFVATTDAVVSGNGLAKGWHWRMHPSSRETTRRCSPSHERIGNMPPTVTWEYHNRQCRTTRVAIACNLEFAILLTYTYFRLEVRGLCPNLSLSSLAELDEANIALWVLFPVIYESAVSGQFVSVYIGLLACQKRTRAICR

SEQ ID NO: 996777 - protein, 232 aa, Homo sapiens
MPPPVRGATAAPFRAPRGCFAYRPSPFARGFLFSPPASLFCAVPLRAPPSSCAALPSGAPALSPPESSTASLFSPPAPPPPPPPVASLPLVPPPFPPPAPLSPTNPYHLTRTPPPLPPPLPQPPLSPSTIIPHPFHINHNETKPLPHTNHPHRTFPPPPQPTIHQHHHTTLTTHPSLPHPPTHHASTPHSPSLPSQHYITPHYLSTTPPQSDSKPSSNPPHYTHTTILPLPS

SEQ ID NO: 996778 - protein, 133 aa, Homo sapiens
PLDREEQDNKGFYNMTEVEMKLLHGVKIVFKKKIDEKGLTRAPELIPKRTGNCYKINTCTGDLKQLTVIVQQRRQVTFQDTFGKRRSFLTTGRLQPDTGDLTQALENSHGRQGNIGRHLKAKVKPLFTKTQTK

SEQ ID NO: 996779 - protein, 178 aa, Homo sapiens
MLSPGDLVCGNCGGSSEGGLEGQVMPNSAVGQESGEARTKLQAHGIQTPLSVYIVRNAGDSRAACIAKSMLRQFGRVKRLFRRSVFVAANHNGSPLSIQECAQRTQVRCTCSSLARIQPVCLEASQAYAGGKGPSVCLSCGCFTGHESLWLLKADAFSDLVIRVAEDFRVDDWSGLPR

SEQ ID NO: 996780 - protein, 67 aa, Homo sapiens
MACISHVNCYGKDSEVLLHLVRGKMGRRKWPMNGKGSVLSYIRQIEGLEGIGGWCMRQLANSIEGII

SEQ ID NO: 996781 - protein, 112 aa, Homo sapiens
ITSVVSMLSSRIEIREIRNGLLILSVTGVHPRVNLHIFPQYLHSFITASVFLQRGICRSSSDLIGRVRLRLSSMEHTYHEWSHDSQVQCAIPTVEHRASGPVMPFECVTRPQ

SEQ ID NO: 996782 - protein, 103 aa, Homo sapiens
SLQNLGLSYKQIAQTTRDVSQYLEYRSIEDHTVSPAWTIITRVRQPSARDAVKRRLGYFRILGPRSRLPVPRTHRRSNCTSVHEAPRRLTNTFVADVHPQRAQ

SEQ ID NO: 996783 - protein, 161 aa, Homo sapiens
MIPPTLGLNLSGAIRSRVGGSHASDANLKGRCHDSEMDETQLRRSRCKNLLPVYPMTIGANVSAFLRLLQRTPRHVLIVFPVLSQSKHLLTMIDHFAYRHENLSQKLRTSIYCEDTKGATWHLPLGSWNLPLETGQALVPYLRMGPFTAVCAFGTFNWPLH

SEQ ID NO: 996784 - protein, 33 aa, Homo sapiens
RWLMPVIPALWEARRCITGPAIETILLKQETVL

SEQ ID NO: 996785 - protein, 101 aa, Homo sapiens
KGAVSQPPKDSSRVCVEEGVAKLALVNLRDSDRVIEHRRPGDSRPKVEYLLAYRFAAVQGTDCEWQMHEVPVTRQWFYAIYLPKTGELEGMITISAAALSS

SEQ ID NO: 996786 - protein, 259 aa, Homo sapiens
MRTQRHCIITNHVTMHLSEKDTHKSRQSRAKHTNSPHSTSAIHSASYLTLSHTQKSDKQSYLTLVRPNAFVLSGPPIQQRPPLTTLTHTQPCTFLPPSSTLHGPSPKAAHINSASLTRQRNSNDKTHTLYPLPTNSYTRSTSQTDTFPITHNYTDSTQPTLRNRINLPHNLCQATRCTYREVNTQQHTISYPPNDAVGGQGLARPHTTGSGKAHTTQSTNGQRAACDNAAHVTHDCTLTTQHDTEEADIAYRGCHCTAD

SEQ ID NO: 996787 - protein, 35 aa, Homo sapiens
MYFIPVAEDSDFTPYQKLPYGVFSTRGDQGARIGV

SEQ ID NO: 996788 - protein, 153 aa, Homo sapiens
MAVLAPLIAARVFWCRCTFTDGSAPSFSNLMIGAWLYVGLYSCAGNCPTLPGHGPATQCASTVTRVHFDLAEQVAASCMYSTVPHCACNEATRRSIHCGGKHHRQHLSCLRYRVANTIYSCFRFGIFCIGPTFTYTLCIVYLMTCKPHPIYGP

SEQ ID NO: 996789 - protein, 111 aa, Homo sapiens
DADLRDVNAARVCECCRSFIFPSLAGTSQCSPGTTKSSYCVASSHQLGNMLSQASGPPNRQYVEANKLCRSRCCELWWCMGLLEYMLLQEVRVIPWKQTNFITLHGGMEDV

SEQ ID NO: 996790 - protein, 41 aa, Homo sapiens
MGVPWKNQCARDADYRHARVLFDPLVIWGYGNTWFKRLAVT

SEQ ID NO: 996791 - protein, 79 aa, Homo sapiens
LRQAGGVPQVAGSAWRTSQAAAIDQDPRAQESARQGIHGGLKRCNWTCPYEGHWMTINLHNHAWGMWNKRWIHCTKKGA

SEQ ID NO: 996792 - protein, 184 aa, Homo sapiens
MTPYAVEKQCDFRRFGQGAKCSKVKHCSKHSSFVQQVACTAAPVHTATSRMVPCAFLPSKMHKAGTPSPAYAPVTNHEEGDQLSTTQACKGTGEQQYFNDSSTVSIDNEKLPTSIQNNKETRQHGLLQKNILAHQTTSYIVKPTKNDKTYRNQYRYTRCQDTDTNFDIPLTRRQHQTQNINRQE

SEQ ID NO: 996793 - protein, 265 aa, Homo sapiens
MAKACTYKKIQQVSQDVVAHAYSLSYLWWQRWDSLFEAYGGYMAAGQAEIRTQIRFQDHVLTRGRKPVVFTNNKMWTYQEFQEPDVAKHPVQNPLLIRKERPQEFPALEHQNSTMDPATLDKYPRTQYMRKGPKGSGEIVHDATGDHRRVYEERQTDEHPTYLDGKNERKIVHNTKEKSNKKNKQRKTKNEQHPQGQMEKGHDKMANIHRRPKRKQDRERKRISETRKEEINHGERESKRKGKRQKEQLIGEKNTNVDKQQEKTQ

SEQ ID NO: 996794 - protein, 135 aa, Homo sapiens
MSKHSTKRQGADRYMTSMKRKIKLGTKDETKRRTKVIPETKLERKNTQEQDSVNNNCSSEKRAGQTLTEQNELETPFKTYHNINLESTRLTLKQGVNRCDNSGSRHSADKTHREQGGKKQEDATRGAKRPQRNDK

SEQ ID NO: 996795 - protein, 170 aa, Homo sapiens
MGKLPVDTTRQNCAEAHEVVTQTHANIRDRATLNTCYQSTYTINTGQTKDHVANTRPNNGSHEQSKKIKHRQHIDNQNNQTNSDQQVRRAEERRHKQTQQAEETTTQKGYTHAKTQRGQSTKKNATKGIRTPEHNETKHGTRHQTTTATEKNTKKKTDTYEATQRENNNS

SEQ ID NO: 996796 - protein, 80 aa, Homo sapiens
MGYVFTPNSANNSTSRYPKFFTYRIRHCATNNFQILITRGNPAKLCQLTIFTFNTTLKLTLLGSTFGLQYNAYRPEVMCP

SEQ ID NO: 996797 - protein, 243 aa, Homo sapiens
GAASRKRKKKEKRRNEEEELRRTKKKEKKKERRNEETEQRNEEELRRTEEETKEKERTTPEKDARTQANARNGRTERGRKKLKKTRRTEDGHRTDERTEDDTNRTEPRTEATDGHERDASETNATRRNRSDRELRDATPARHETQDETTGEDSDLDGHGSGTRSGGSATDTGPRQHTENTTRLPHRFAKHTPNRDTAHGKKATGPDKQTLIANVGGKPRRGRANRQGIKSKRTRLWDNQKQRE

SEQ ID NO: 996798 - protein, 97 aa, Homo sapiens
GAVQREGSANLVRIRVDHLSGHHEDASRLAGKETAKKGILERVNAGRDCDWKMDGGDFALDKTGYVRRQVIPGAPESCIMEVIHKTVTASFIDQVPQ

SEQ ID NO: 996799 - protein, 72 aa, Homo sapiens
QWLTPAIPAPRKAEGGGSLEVQEPESRLANVVKPCLYQKYKNQLGVVVGAYNPSHSEAEAGESLEPGRQRLQ

SEQ ID NO: 996800 - protein, 119 aa, Homo sapiens
EPEMKPLHSSCGQHSKILISKQTNKQTKKPLKPKERKREEDGKEQTRGATGGDERVESPRNIPSVSLAASLSRVLSLSTIFLFKPPLSHCGLGQGLWGIPTRRALGDRWCHVLAFCVSP

SEQ ID NO: 996801 - protein, 140 aa, Homo sapiens
GACRVSASRALRGAMKMAASIVGAQWPMDPAFVHFLYLHACMHATAKPTSLGVLQRAQIGFIAGYVPTESYHSTSTWKNEEGYASITNDADDGSDLLEVDWETDDDIDRRRSSTSYKKILLAALSSFSERYDPSIACEAY

SEQ ID NO: 996802 - protein, 224 aa, Homo sapiens
MVFVAQGMDAAAAGSSVLLLFLLPTLGFCSPSAKYFFNDGLLLMAGSSSWLCSRSLCVPCEDATSRTMKHLASNAGSTSKLPVAGIRVEVLRGSANSLPRKRLCCCLQALMSSLESACGMMAVLPWSCVAIANRELLWGGSAGTGLLCWRGVMFIDRKRNGGCQSESCLRSSRSVSKPGREGLRCEPEGKGRRPTSVIHAGLSHRGALTILRQCRAPGCPFVPQ

SEQ ID NO: 996803 - protein, 110 aa, Homo sapiens
  misc_feature (21)..(21): Xaa can be any naturally occurring amino acid
MRWWTELIPMMQNMVTPYMEXSDMKYKIGFHRGHKQVQVAVPKHLDDIVKIIGDYKSYTILGLRCDDSTQKTYILLFDVVPEYVVDTVGHVPHDMSMLPGSVIALKELLI

SEQ ID NO: 996804 - protein, 119 aa, Homo sapiens
MLPGLRLTLQDSPRAGPAMSSTSQGLESGTPRGFLVLYPSVVELAAEVQDKVPFTFSSVILKQVGSLTVTTTAGKCAVLHLKLACLRVSPSAIAYYLGYCCYYSGSQGLFSQKGDGSSH

SEQ ID NO: 996805 - protein, 103 aa, Homo sapiens
GKTAATMEEYHRHCDEVGFNAEEAHNIVHQKCVAWEFYGGRKIYTVTNNINPGETASIVEQVLNTPGSVGKQPINICDPVHVARSKSAYGFHTASSCSLGYHI

SEQ ID NO: 996806 - protein, 221 aa, Homo sapiens
RVCAGHSGPLQSTPSPVVSGWPSTRWCAWVVPVSLAPSYVGFLHSRTMPILSPASVPFVTARLVLTAHLSGVGALASRSSNPGRVDYAMRLVCHTICCPHYHLWGSSNCRSCSSVLPDMYASELSYLGMAVRLDALPKQYGQMHDIGWRRLGPNSRNASMACAILDVAATVGAMLRTSVSALLLVARCIIARLTCSEGAAISPNEKPHRVNQSSDLVVQES

SEQ ID NO: 996807 - protein, 81 aa, Homo sapiens
GRGGIVVKTWRLPHNSRVVRGPAQWSRSAITCNRPTIVLMSTWPSSVIAYAFYQCRSIDLYVEKVRLFRLDHVVIGGRLWL

SEQ ID NO: 996808 - protein, 286 aa, Homo sapiens
TNGSSLVYRMCDDVERLGSVSDLEENFGEQKSSPSKYVDVVLYPRPQTFRRDLPVLMSPTQSYQERTFQTPDVICEQSISGGGLVMKLDELTRLAAAFSLKSFLILSFQCITRPRYCCSVNILNRTQPGSSEEEEASEGYDQALEQLIRDCNTQCPEYATDRGANLAEPEQIEFECKIFPLISQSTAGWVKSAERDCLGVHVRSPGHTKEAEHASVQLHLFNDCLAAVSAREGSRFLVFDHAPFSSSSGGKRVHMKLTWTSQKAVPTLSAENIRRQAESSPDGDSL

SEQ ID NO: 996809 - protein, 150 aa, Homo sapiens
KKVHDNLWEGHIVMAAMSPLGALNNVVEEIVLSSSIAVNEHVYLGACVKCCLLPSSFSFYTYDMNTRSSEHGHGTIKTCDNLSRMMRSLPIGYQEFPGSYVVWTASAGHRWIFNAYMLKLSIYISMWVKKWVVLIKWSTMGGDSLEALAQ

SEQ ID NO: 996810 - protein, 198 aa, Homo sapiens
MNLNGVELCCYNTLPHWLNNRQGERTFVHHWTTAATIKNLVKTHPQGNWPDDENNIFSNKPFERDNKAKVSHRKHAIILRTNICRNLPGNIRSSRIFNSTSDSTNPFQRQPLNGTNRVTQRSATHIPYYQTHRLFIGHTETFRTDAISISARPTTCCTYPAGINTLCYNLLSYRVSYTQARQNPAERDLRHTPPSEHH

SEQ ID NO: 996811 - protein, 123 aa, Homo sapiens
MSENRCGVVIVLLILRSLGIEGHVEYCDEESLDDVETGKDSCEFWSSLLICDGGSQQHNASSCPWINSRSPSEGTRRQEMLSDFTSAGYCTCNSMIQIGFILGGGPARPYMRGGLVRILVGTH

SEQ ID NO: 996812 - protein, 249 aa, Homo sapiens
EVLILSEKGHTKCEFSQADFPGPYQMKQQKLFTVLCPMATPQTDNTKHLRTVIRKVMPEIDLDHMRVPEISKAWTNELRERQRQEAGGLFWLRKFKDSLVEEVVCLKIKFKAEKQTGEYWVSTSVTRLNSHWPGAISNCTVNQDAGVISLETRNMFNSWLTTKYMIPKGSFLMREDDIKENLKKSIRERRYACEGPDSDVGKVKRKELVQTGADEFVNAIASYESLQINGNIVAIVINTRVRMPDRYRE

SEQ ID NO: 996813 - protein, 85 aa, Homo sapiens
GVRYIGGCCGFEPYHIRAMQRSWPQERGFIATSFRKTWQRGEDGLDMRTKPWVQSKGQEGILGSNLRIASCRTIQNLQCRKPDGW

SEQ ID NO: 996814 - protein, 103 aa, Homo sapiens
MISMDSGSIFTANYYWRLGEIIVIHSSMVVTKCMASIASAFPCLTRVLTEILSRAIFKELHSIALNLEISALRCHIHLTGIMHRGHTTLNYALIGRVMYGTEG

SEQ ID NO: 996815 - protein, 82 aa, Homo sapiens
EVEARSSVINLCRRRPPMDPIDEALSAPVPFRLSRPSNVDYPLYDFRYRAYLIILGSYLYSGQTFMAVFGTRDRSSHGYSTV

SEQ ID NO: 996816 - protein, 54 aa, Homo sapiens
MYQIAGKTAGITSNTLPAFEPREVTLDNKLPPRLTQYYPQPHTHSKTLMYGHEA

SEQ ID NO: 996817 - protein, 136 aa, Homo sapiens
MWCCWGGPGDVIEDPLRCLRLGHQSSVCSILLSYGAKVNPPLYNSVPPARGLAMSGQSRMCEASHRPSRANLGIRTDLPFREPLCTLPVPGEHLDCVNSAAQMQGRTVNCGKLHENCLQHAARFQNDDLHRNAYRD

SEQ ID NO: 996818 - protein, 71 aa, Homo sapiens
LNRDHLRSRISYRDRSFQVSAKKRHDHMDDMDDEDDDDHVEQQEYIDSNDSDDVRMTLMILSSPDELHHSD

SEQ ID NO: 996819 - protein, 30 aa, Homo sapiens
MKEKKHEQSKNARKATKTNDKAAPATRHKK

SEQ ID NO: 996820 - protein, 97 aa, Homo sapiens
GKREGLQISIMAYGLPVDKRVIGKDYVRHSTMGAKPRERISYWESYSNLCFPVKDSWWEGLPVPGLLSITTRHERGSSFTQDSHNHPELKPSERSGS

SEQ ID NO: 996821 - protein, 125 aa, Homo sapiens
GVRWPNRCYYFSEVSSRLLAETHLTAKMPRIMIKGGYGGIPRDEILKAEVMKYGKNQWLGIAVIAAYENQSNASGKTRVVMNGCIQAIKKKNGPENKRKNSCELANVDANSVDEIIALIIGKNSG

SEQ ID NO: 996822 - protein, 105 aa, Homo sapiens
MRRVTSVPVVIDPVDNEEKKRLRSLRTCHHRAISGRWLSGSSSQEQLSTQIEQYEEKKPLMLEAGRFTLYPRPGGLWCPNRMSVATRLGYGHGKADQNVVLTELQ

SEQ ID NO: 996823 - protein, 173 aa, Homo sapiens
  misc_feature (51)..(51): Xaa can be any naturally occurring amino acid
EAQRAEIAIVPICHRTFLRRTYNESLRSRGKRPVGVLRSIFTLWCREVLAXLSFPSSYERLELLQLQSNIGKCYRELKEIAGRSIGEVVMHRSEKNNCRASRCAGRRFQWRLSKNLLVKRLGRYVDGGRMKTSIVGGSGGALKDFFKNSFMYSFCRTMSEPIAEEATETRGMA

SEQ ID NO: 996824 - protein, 104 aa, Homo sapiens
MDTPGPSQTFTFKYIYMSLFRRGLGLALQTVGHTDSLRHFNAHLISLAGKQTEGFLGAPLPIITGEHSRTKDLVLHPMGRHKRWGTNTLRPSTRGYTPKIIREW

SEQ ID NO: 996825 - protein, 111 aa, Homo sapiens
MEPGAGRRWQVEPQIGAIGNSERGATRPEELPRLETQKKQEARTWRTLAQGEPTWAPPRKEKSAQRQHGAPWGRPLIGGRTHWLASGGERHSSARESPLWAPAKGVNPGGG

SEQ ID NO: 996826 - protein, 77 aa, Homo sapiens
  misc_feature (43)..(43): Xaa can be any naturally occurring amino acid
MQKQIRIYIKNAVELLLTKNKNKATRKKPKLWNRLQNTNKKPXQGTPNSANTQGNSTQILRSLIYPPNYILFLNNLP

SEQ ID NO: 996827 - protein, 70 aa, Homo sapiens
DIDFARWCGARSHCQNDEALVKVKCIDKDYYHTASLDECTLINMIVDEECAYSDQDYMVCSRRVITLNRP

SEQ ID NO: 996828 - protein, 128 aa, Homo sapiens
MRLQPWEGTRVPFPKAPFLSPLIWGTKFANKKCGGLSPLGAPKAFTRAGQHESTEHKQGFFLNKRSRLNPDFCRIVSFRPCWRYLPLGVWFFQPFPRRTPPVGAALKYTVNPKFYNQFSKRATKGLPL

SEQ ID NO: 996829 - protein, 67 aa, Homo sapiens
GGDDPNMPSDVSVLKSRWLFLSLEWRQACCLYIATVSTPDYQPSSYYIISTAHKIIRNTHKLIFNHL

SEQ ID NO: 996830 - protein, 114 aa, Homo sapiens
MVCQVPRSKNSVSTVGVTWLCKSPFHYDFYKISKAAPLRTKAISGHHTNLLPGFAHTTWRRQTSFSGNCLPQQFLGFHLSNNYLQYTPEVHISCKPVEHHGGNHAFTTGPFQII

SEQ ID NO: 996831 - protein, 279 aa, Homo sapiens
MIGLRGSQEVSLSVPLCAPSSGTTTFHHTHRTRGECLGGLAIGARESQGQGPKRKLLGSLDLQEEERGGDAGPQVPLSQPPEDELDRLTKKLVHDMNHPTSGEYFGQCGGCERQMWMGTGAGRCGPLHQQSFHSGLLSVFYMPRPASRPAYLRRGRRTAYCEGLLRGHLEKCATCSQTILDRILRAMGKAYHPLDASTWMVCHPRTRGGIPLHQGDCYEAQIHCIDGTVHQGQASDPKNASAVAGQRPQTMSWNPESRRETRRRSRVRPAHTKDRHNRT

SEQ ID NO: 996832 - protein, 123 aa, Homo sapiens
MGDRMKVVSALMDHLGPETKRGDCEEINRVYREMCKSDLEKDIISDKSGDLRKLMVAVAKGVEEQEDGSVIDYEMMEQDARGMLMNAGCEEGKEGCSQEWIRSNDERRVPMSRKYLKSTRSEE

SEQ ID NO: 996833 - protein, 151 aa, Homo sapiens
MIPICKSKPGNKINLKAELQFIAEPRTRSHSNDLSAVSECVFEAQIHWRACGECASRVSQQRVIRIVHVTTHQEASNEVLHQIAHSHSETETIWAELDPRTFERRIGSASYILYRALFAYTIGRGPIVTDQFLLLMNTLKRSGNYRSCFAS

SEQ ID NO: 996834 - protein, 246 aa, Homo sapiens
MDRWRCVLLPKDFLAGGVAARLSPRQAEQPIERVKLLHAGAACQQVRCTADKQYKGMIDCVVRIPKEQGVRVLRGCGNLANVIRYFPSQALNFAFNDKKQADLPRVRVDRENRSVWRDLAGELWHRVDAAGGHIPVFCVPLLILRVTRLAADVGKAGAERECRGSVSAWCKIYKSDGMKGLQQGFNVLVQGNDDLASRYFGIYDLQRECVRIQEQSIRHQGMIAQNVPAVAGVDPYHLTPFAAAWI

SEQ ID NO: 996835 - protein, 150 aa, Homo sapiens
MTPIRKINPLIKLINYTHSSILPNRHPSDLRMMKLRFTPWRLSDPPNHQRTIPDHDTIHQTPQPPFPSIAHITRDVKYMAEVIRVAFIANGASEYSLSASSYTSGEAYIHGSYLYSEYLKAIGYYPLCLGKYSKHAVHMAMSSREAKYRF

SEQ ID NO: 996836 - protein, 72 aa, Homo sapiens
  misc_feature (50)..(50): Xaa can be any naturally occurring amino acid
GHSRAISHGVSNLECESCRVCDPYGDLKFIQAAVLESSTAVVRYLQESTXQLQLECSPCHVTITDLSLLLST

SEQ ID NO: 996837 - protein, 185 aa, Homo sapiens
MIKQLYLVEMRQINPRLIDSMTIQPNVLGIAGARVDQERWTPCLKQEMRTTWMKTHDRTCSNSRELWERIVSSENGVASFSAEGGQRQCGRTREHWVTERAVICVLCRRSTYGSSWGHLARFADKIRRCRTFVVQPTGFFEAAGLISCTPPVWGRKREPSWVDALRLNKCSPAGNSSSPQAWRWF

SEQ ID NO: 996838 - protein, 67 aa, Homo sapiens
RTGRWRAERSCVVREHVTGGICRGLPDDGRPPGREDPSARRRGAMGVVRSRRWPNSKISSKSRGRPS

SEQ ID NO: 996839 - protein, 172 aa, Homo sapiens
  misc_feature (116)..(116): Xaa can be any naturally occurring amino acid
MAGACRIRCAPGQSRGPVQCRSAWHLFDLRWLALSSCKYLKGLGWMMRERCIIRHPFMCCFWGAHYLASIPYQGATYAVHAHVTLLVHRKLWRPYIYTGNQPVCHIGKTSPKEPYXAFGIETFNSGETKFLGTFFIPNPFVGISTLLVGASYRKIGLAFKWTKSLNEILTDG

SEQ ID NO: 996840 - protein, 142 aa, Homo sapiens
  misc_feature (2)..(2): Xaa can be any naturally occurring amino acid
  misc_feature (110)..(110): Xaa can be any naturally occurring amino acid
MXGSQCLYVCFNRIAKKESPGSSHRARGIIHIQKTFLSPMFLMHILVTHLGHPAKFLRYEGRTVSYINDTKGGHLNFGNEDLPFTMKKFPDVAPVNYGVLSPGKFINRKXSVAAHSRENKGLKCILTNQLMGFKVKGINAED

SEQ ID NO: 996841 - protein, 193 aa, Homo sapiens
MHGNEAVGREVLSCSWPSTYATNSQKGKRDKLSMLIHSTRIHSHVLPCNPRNGFENGSVSAGELMDWLVGRSNAQGIDLNRNFPDLDRIVYVKLRTEGGPNNHLLTTIFQNDLGDLISQKLGPETKGLSLHWDYGIFRLGAFCPSLHGRMTLLANCIHMMTNAEWVVLRNNSSSPDDAIMPKLGPGNTSSFKP

SEQ ID NO: 996842 - protein, 102 aa, Homo sapiens
MPHKKTFTKVQPSVHYVGESSFLHADTEPMEHNELSTIPRWLHLTKNCNTSTNKTKCLPPHLNERSQGTPITPDILITQEETSDEPLTLYGGPGLVHLLIAN

SEQ ID NO: 996843 - protein, 79 aa, Homo sapiens
INPLAQPVIYSTIFAGTLITAHDARTDFLPEEAVEITHAELVYSQFCTEEKHKTLRSTKKLGIKVFSLHAKQTVSINPF

SEQ ID NO: 996844 - protein, 429 aa, Homo sapiens
HETTHQIKTSKQTNSKQETKNTTKHHNKNKEKQKIGQETRSNGTMTDNRTTNYTEQPDRTKNEDKRKHTDHKGQERDTTGVQQVGRNINNKRIHTARRGQWTRETKEPHRITTRDNNKQANNRSRHRHKRLRTGTKREQTDRDTAQNARGTQDVTTNKRQKDQNVGHGGHRDATTRRSTQSAHHPAQLSPQTTENTKIGETAARSATKDRSEQNQTTRKTEHQLTTMWAQAHVNTKDALNWPQTKETNRNERSDQEQARHRGNTHDTRTPDAMSNHTPSNTSCTPPRHTTGPTRSTPQDHHTQRQTPDKQKENPDQRTTPPHHHPQATTKPHRVATASMHTHAAQKQSSKRPIVHTSDRRTVATHNPPTLDERAKHKTTHNVKPTTPTRANTVGQHTDEEQNPEIDTRSRRHNQYEQIRMRATRRTTAE

SEQ ID NO: 996845 - protein, 393 aa, Homo sapiens
DICEELRLRELEEVVKARAAQMAKTMRWWSDCTANWSSTQWQSQFELKGNKCQRGKARPSPDNTQTRKTGRIDKRTFAGYHLRQQGHQEDCGQPPGTRRAISGQALHCVNPKGILGTPFPCGLSGKDTENFPLSGTPLPRNPKLFQTWDRFSNTHLAPDGSLFPAGRYFWGNNTMNHTFLPEQPRGQGTHQRLHLQRTTKGLVALQSRISLFNTQLPRWTARMTPPPNFLREFGLASHFSIANTQRAAALSLANHRRLAQTPHTHAACLGSHLGTTPHSNNSLAPFSGQPPLRTVLTPGNPLPWHLFGHTDSTHHCGTLQTFPPNDNNLPTNWRKRGNPRTDHTPPRPPRSSGRTKPTATTFRKETTPGDAPRRILGSPIGSRQPVDHRLCQT

SEQ ID NO: 996846 - protein, 157 aa, Homo sapiens
MAFLRLTERKILGYIRLRKGPNVVGPYGATYYTRFADAYNNLFTKEPLKPARTIVLSHRSIIMDPTLGLTHRLFYYVTRSSTDDATAWSKLQTKGRAYTITQHISFSLNLVITSDIRSEYQGMEHQEGSEIRSTGFGGILRKEVGRQNAISIMQVIL

SEQ ID NO: 996847 - protein, 159 aa, Homo sapiens
MVMQYFKTFATTLAPKHGYQESTKLTPYLHICRALINSYTSMVEAENNQTEQGFTRHKDKLHSAPRGQTGPFRQRKKREVGPARFKKDADGDTKGGEPSQVGADKAKTASRGGGNGTAVVIEHTGERHDRRTCEWRDHKNSEVPVCGTRHPGQEEDKRT

SEQ ID NO: 996848 - protein, 93 aa, Homo sapiens
SWNSPAAAWVSGGFLRYWSQVYSPASMFQGMRATICVLICGQTLYILVWVSCAVERKKFDDNLPNDSEEEIETISNRLLIDRLRDYLERVRSG

SEQ ID NO: 996849 - protein, 248 aa, Homo sapiens
AAAAAAGAREGGGGMAVGRGAENARKRPAVSIVRPARDVKYPGRTRESTRTGVHLPGHAAGGSRHGHTDRRPPLHLLLMSGKRLSMRRASPVYGVPVATCEGNSLWTPGEAFLGVLWENFSGWRRIRIRGKALALSISSFVKLKLVWAVGRSKWVLGGLPQAGSEGGVLCGTICYQAVPSPVFYMGGPRGCANHAMGPIWGCGAFEKIFGLALKAWRTDLIPVGETFRVAPVTLPSYSGNQMGSQVIG

SEQ ID NO: 996850 - protein, 188 aa, Homo sapiens
MCETQKARKEREVEEKRHWDSSWEYEDYGSVRKRNLTVLDGLYRENDLDPRYWAKGQHQPYRKRDCGYWDFEQSEPSYMDCGEAHESGKGCVYHGGHDGYRSPENVDYESLSPGTKDNSPTRSPDVTSKAGGYGEANGYSDCKNLNYNPEDSKKAEQLTDCRGMDDSSANLGQPQLWYIEHENVNHKS

SEQ ID NO: 996851 - protein, 104 aa, Homo sapiens
MRQTPWWWYHITAGTILLQQQIKILSLHVEKALNAVALDLRCYQMNLLRGVLLCCKIKWHYTSLQQPKEGFAPYCMLNVVCISLTILTILLSLPKTCKNKAVRI

SEQ ID NO: 996852 - protein, 72 aa, Homo sapiens
RWLTPAIPALWEAEAGGPRGQKIETILANTVKPRLYQKYKKLARCGDMCLQSQPLGRLRQENHLDLGGGGVQ

SEQ ID NO: 996853 - protein, 260 aa, Homo sapiens
MTQPERAVTHTISSFFLNSVTEGAFVYLFLGNSASPLKVLCTPEGIRLQCFMKYFTDEMKVNWCHKDAKISSSEHMRIGGSEEMAWLQICEPTEKDNGKYTFEIFDGKDNHQRSLDLSGQRFQMNAFAEFQQFKAAAFADEAIVARLIGGLPDVVTIMEREDLESDLHGVGNLPRSDRFKNRTTDIQLSEHFSVKVEQAKYVSMNIKGSDSEDSGKATAFSIKALSIGGTKIDRDRAPCSNTRETDPGQWPRPTKQAQAI

SEQ ID NO: 996854 - protein, 168 aa, Homo sapiens
EIPPELQTSGSGAPGGLTLNFCRSSPFQASESSSLRYQKGETRRDMGGGVRRRAENRSIARRRSRRAVISRKHSIPVIVDVRKSNNVNTGGGVTAGVADCRYWRAMPESHVRDENAGRLPLRRVCTEAPWVHPKAVTHWPIRLDVSSTGIPSILQSVAARGPCIRQAP

SEQ ID NO: 996855 - protein, 66 aa, Homo sapiens
PGVNAQRKEAGPLASGCDKPEQVCEKPGGLPWLSVSSHREDTESQDQSSLCKQTPAWSIRASTIQC

SEQ ID NO: 996856 - protein, 318 aa, Homo sapiens
  misc_feature (264)..(264): Xaa can be any naturally occurring amino acid
MPQHITDGVACIVPMSVDGSQHEAKRAHYCPNQYWFERTLEEKTLPGGTAPITMYADKTQPPEGLGVNTLGGRRASAGFEILRRIIPFRAPQVARPCIAHGLTTRCRHEKSSPIDYPYSDSNNQEHPTVGTHSGHTRGEGTPRGPPHPLGGPDPRIALITYWYSHGRGPSNPTRSSAPTARLERTTKRRHQSHHQAARVPNSAWAMARRHIDITDQRGIRYPYATRQSYPREHHGRCRTTRQLTPKAARPRRDSSSSPRVHLTXPKVDSRTRQRTPAHTHGLARTHDRTHHGTFGSTPHSRPLRAQQPAPYKTRPCPR

SEQ ID NO: 996857 - protein, 118 aa, Homo sapiens
DTTNMYTCYVYIVLETVVVTLSPRLEGEWRFTAHCILNRIGGSRSPPDQSSQVAGHVAEQVQLMFVSLVEMGFRHVAQVGVEFLGSSYMPTSDSQSAGITDVIQRDLVQICILFEHFL

SEQ ID NO: 996858 - protein, 225 aa, Homo sapiens
MRIPGGDFTTIVAILERPNIIFGAGHNFKTWHRGAPPKKIYLWAITYTKNAHNLLATIDKTVGPYINTSIDSTCITHISIYDIRMAQKSGHSVIPHQDQFRLGVPPPPRRVASARHVVRTHDIVTGGPETLPPVGHRTAGTNEHQPSDAITPKEAIYTQRNKSCVCHTTTGHFTPGTDTTPRGANPYKQDGTSPYNPKKRREHRVRHKTLYSAGGRAELTRIQHT

SEQ ID NO: 996859 - protein, 347 aa, Homo sapiens
  misc_feature (89)..(89): Xaa can be any naturally occurring amino acid
  misc_feature (255)..(255): Xaa can be any naturally occurring amino acid
EGTCEECGIDEDCGNRSNEADGCMRKMHISRTSKQSTCMIILILGSNRASEMQWCLYGTTWKALSACVPMMLTHGNEVPCVLICTKRSXRIVTLEVDYAECGYGAYSKGTQKERYPGSTWGCSGYVETHYDRVRTETTWWGTGGKIVGNRYWAIAPNVIKAEATPLSYPWEQNKEGVHSEFSVETFQIECNIRFHNYVTMHPERFPLEETFEQTVRVVAIKDPGTLSKYQTVGSKDGFDKLLVRMRVAGLSESEXKIGLQHGVGEVEICASPPGFSERTPPNYIFKPTGDETHLYSKNGFAQFAGPNRQLGDRSLGRRFIIYITSAGLREDISVGFTGIWECGGRQL

SEQ ID NO: 996860 - protein, 284 aa, Homo sapiens
  misc_feature (91)..(91): Xaa can be any naturally occurring amino acid
VRDVKIDWNEECKSPNEGSVLCHISKCPKLRSGSARAMSSTQSFHRLSVCVYGNISMGNSEVNLHGWLGNLGVETLGSLFRQLTIHGPNQXLVDDYVGGDAYPFSPGSIAEKTSVRLSLVKGQYFPLRNDACGLARNGHSTKPIKTIFTYELIVSPSKHTRLLHSGLHDAFHVPHATIVPQLRHVISPITMRNIMRQPRTIDMSFPERLEHITVRASQCAFPEHLCKARSSSKQLPWLHGTGSPKHGFNALIVGRKTICVATMSHHSPFLRHSSNAQRRYTRVR

SEQ ID NO: 996861 - protein, 191 aa, Homo sapiens
EVGGKRAVSQQWRRSQLPTGTGNWLFGFGAAGDSSQMPSHPHIPFHSILDATPNTGLLSLTVCQYHSGYYDGNFSSGRLDYPPFFCTGLSTILLTLSPNTSRSTNMLNCPLTSTLTPASRHLYSSPRSISPLISYAMLPLSASYCCSAHVPAKLHRTAHNTSGVNELTATRHKILFPARVLSPSCWNLSRA

SEQ ID NO: 996862 - protein, 335 aa, Homo sapiens
MALQHKFFLLFYPIYLSSPSFLPLLSILSTPGIPVLTSSHWVFPGVERAPWVTTLQPSLCNLRDLRGLTSDIRACTSALPSIARDVQGHAHTSPGATFAHYSHVQTRGIPPQCCGHAWLLETSVTLAKPVPCPVAPPKGDPPTGPPGGHGIGTSRRTPDNALGPTQRQPLLRCDDKTASSVRYKTHRVTQSCAQHLFPLLRPPIRATGNFLPHNTANTPSGGSLELFLTNTGFPHKENPYSQQAVMSQPNLISHHFATTAYTQPFSLPPFGAILDVRRNLGRDQHTATSSFSRVSVREIFYAYVSLYATSSATLTKPSLPQLSSSLSPSDEQAYK

SEQ ID NO: 996863 - protein, 194 aa, Homo sapiens
MVLDLLRVRVTFVEVARSLEGGSVLLTDGVHEFQGLEPLLTWFYQYPVLRLWPMCVPGRSSWGPGYMVVRPIDGQFCCRVEVTHPYSMASLSTFSYEVIGMLLCRLREWLSNACVLCCLSSVSTCLIISSMLVHGATLLIKMGWRDSMLLLPTLMTCVLSCRGCLLVLSPICQESRNIWINYLILPTKDDLLVL

SEQ ID NO: 996864 - protein, 139 aa, Homo sapiens
AKSKGVVLMALCALNRALRSLNLAAPERRPPHAHRVVFPARPDDEQWTPSKQTIMTLMLHHPDAQISILHVEHLMHNYLCTWKSTVTKYKHYTRFKMSEALGVPSNTQCRIPGCHGIGQGSTQKKNGYSEVNSELISGD

SEQ ID NO: 996865 - protein, 129 aa, Homo sapiens
VLWRLMRLRGGASHPANWSLDPWYFTGCCLPGRVTALSDLWPAHHVIRTRRLVPDGGGTRSDCRCRRSDHEHDRCRGSIRKLWRLCESVPDGPQHCASRFMSIRSVGPSVEMGVPASKCKSANQQGGLG

SEQ ID NO: 996866 - protein, 114 aa, Homo sapiens
MSSSTGQQEECHEQGLLERDGRVLQKDFERADVGRGDLWVQEKCSLQVIDLMDMASDILQPKEMMWPDQLVTPLNIITRYQENFNVIERCPKPVIGCVHGGCNWRRCGPWLPAC

SEQ ID NO: 996867 - protein, 107 aa, Homo sapiens
MRKDQDERLSKTMTEVEIEALFMEEQNVFAEDTLRELELTELAIFNTNRMGQCVIRFNIAGDLKVVKVSLKVVGDEDNLKAIFSKEIKAEGDLQDLEIHDRRESCVM

SEQ ID NO: 996868 - protein, 75 aa, Homo sapiens
AWCDSVLRGCSPVSERSVVSLSHALSAPYTKVSVPDILDGKIRWDMDHEPPEAPELSFRLCTRGLTKIIDFKVDK

SEQ ID NO: 996869 - protein, 74 aa, Homo sapiens
LQIIDAERENVLYVCMSIHALCLWLAEKGKVDGSSFLEGWTATAAREESEELPANTLDVCKQPSSICQMTYIRY

SEQ ID NO: 996870 - protein, 135 aa, Homo sapiens
RVHGGTHTGEKPYECRNVGKPSDLPHTFECMVRTHTGEKPYECKECGKAFRYVKHLQIHERTEKDSKNALLEKDLINVVYVRKAFISGQVIFKKMTKVTLARNPMNATNVVKDLQMLANMRIRYHERTHNGEKAL

SEQ ID NO: 996871 - protein, 69 aa, Homo sapiens
MTPIRKIKPANKLKLIHVYIRSTRLATLMPITRPTVMEDFGSLLHWSHGLESRPTVRRYMDSFSRPSAT

SEQ ID NO: 996872 - protein, 87 aa, Homo sapiens
DNTCDRSEGEGENNSNNKWSCIREGMFRPYGRWISPKKPLHVSRSDHQVDVCLLCLRILFNILLSHFQYWLSAIAQSDGDSSSLWYI

SEQ ID NO: 996873 - protein, 103 aa, Homo sapiens
GGQVMCWYFSHLLYHRELRFPASLLYSCSYSDGLAQGGPAPLPLCVCLLLTCGFAEAGKLLVDAHGWEPLVHHESRWWRNSLLRGHEVVSSHARGELGNWEDH

SEQ ID NO: 996874 - protein, 183 aa, Homo sapiens
MRECIRQVKYQNSESSEDIIYRKVQQGFGFVATKGNRLQPNEMEMRKALSHKYGQRREDGHGPMDNKGASPDRGEKNEDKQRRVGITALKGGETHPHGRGKERGEKPCDETECVSSTCMTGKPKAGRHRAQHRTKDIDYSGQKRDSRHSDMSIQQYATRTTDEPEQGPTTRTMNQRHAKATAR

SEQ ID NO: 996875 - protein, 384 aa, Homo sapiens
MVSTETMAQSIALTKPSAAGKMSKYQSDDYINILAAPSVQITMSEYPEKQMQRFNVGEDCPDIDGPVTELHVTRSYLVRTCETRCMDENINKDSKKGTFSMMHIETMTRPWTATYTRRSEGIWLHEKQSEGHNRRDGETNPMRNGDKGTRPTKRAHDTIGPVGQIQPNERPGTQANEGKNRKTKRHQEATMKQARPAHNKRLMEATSIRDRPNGADRSETLTGKIIRSKSGQRGQELTNTERTDNKITPARTEEKGEEGGARRPQVRGQRKNKARDTHDSQKAEKWTDDSTPSEQENAQEHTTQRVIDITEQRHIHRGKKTTKTGEPQTPNESNKQNNEQRRHEHTKRTTTEQKKDIIKARQSEEPKTAPHSTAKEATSIGHNK

SEQ ID NO: 996876 - protein, 187 aa, Homo sapiens
MSASSISRIRFSIYTSMCQPICCRISGSRISMWISKYCRQCLSSSSDMPAWFAMRKSLIIKSQQVKYVTAYRLTRYGTLMDFDLTHVAYESPHTPGFLGPYYGHYAGDELNQPDSLQVLKRCIQALFAMFWAARTVPAMVQWVSIDPCESGNFRVHYESMTLEPAGHGLAIQAQTLVRILSHGGFRK

SEQ ID NO: 996877 - protein, 128 aa, Homo sapiens
  misc_feature (7)..(7): Xaa can be any naturally occurring amino acid
  misc_feature (101)..(101): Xaa can be any naturally occurring amino acid
MEKTPTXQPVVTRRVRSGHHLRGGSNPTRETGRRYNRATDPRRDTMSRAPGQGVHHFVHTTERTSFPRRAPTSACEAVHTPLPRVWDARTHSRPISGTESXHIILRHVQHSLRKVRRATPAVVTTSSG

SEQ ID NO: 996878 - protein, 109 aa, Homo sapiens
  misc_feature (32)..(32): Xaa can be any naturally occurring amino acid
MAYGLQMIGLRTHPQQTTWTNVREPMCLRYAXTLCADYLSPGRNGRAFYVPNITFVVTLCVESLRKQLVPWTLSLTCIMMVSIAITSVGVIAEVAVSRSQSVHLSSRGY

SEQ ID NO: 996879 - protein, 39 aa, Homo sapiens
MALVAKRPFRTWNWSGGHNPNGSNKQKNTKRKIPKTGFH

SEQ ID NO: 996880 - protein, 123 aa, Homo sapiens
TVTTAILSGTRGLIGSINMVHTCFLMRSCSMSYVSLLYSSLICLASKSLHTSGCVDITVPDDAQLLHACTLLVILFITRECADWATTYILYLQTSGLLKLIVFSFGKFLIFVYFALFSFSWKP

SEQ ID NO: 996881 - protein, 177 aa, Homo sapiens
MPYPKRSRAQSILLLKKLKQLEEGLAMYCDVRDEQQISAAVEKAIKKFGGMDILVNNASAISLTIHWTQLQEIGSDDELNTRGIYLASKACIPYLKKSKVAHILNISPPLEPKSSWVQTALLLYTIAKYGMSIVCAWKWQKNLPVHIGSQMHYGLKQHTHWCYGYAGRNRYREDSVK

SEQ ID NO: 996882 - protein, 266 aa, Homo sapiens
MKLVQGELKTYRERYTNETIIPALKRLSHGPFLASGATHCISPHIYSKYYSPLLKIYDNQPFVVPLHVHADLGQVRAVQEYVTCWLVHTKEYAVCDGAWDFNGLEEWGKAIVGCLCHIMKVWLCETNLPFHMGTIALIQGVLEHSNARGVDPRSSLQTDLKFLGNSTESLSGSLVADSWPSGHGLRLRIPGLLARWNSSYVMVERPGCEAHSREPEPGASWNAHYCPTSPSTNFGCKQDLSDWALHGLTAMNGFLPLQGGDQMGLE

SEQ ID NO: 996883 - protein, 106 aa, Homo sapiens
MVVRHSGLSGSSALSSSHICPIGHVQEVPCVLLSRHPMLYSMFQRSITIQKDKWYRPYISLVGAEHWDLHHRDACTDAWIVAHVTQRLRGSLVLYLRKQSSGVALV

SEQ ID NO: 996884 - protein, 77 aa, Homo sapiens
MRIAKEDLQQGVRPSQVLWQAARTALFWYRGLQVLVCKDTCLLCTTFHILLLPTNVSFEFPKSNVNSGRAASLLTND

SEQ ID NO: 996885 - protein, 131 aa, Homo sapiens
MRGYSVFLGSGGRDLSVTSASCETSLPVERFNNPNCGVEELNEHQAKKEFLCKKCLLHVISSFQFYQSVKTNGEELKRFAQGDFNRSVVERYTRKEKGYGNFIDWKVNLEHCLAVHAKLDNLIRMDSFWDA

SEQ ID NO: 996886 - protein, 73 aa, Homo sapiens
ALCAVVALLGPVADRTTLCGFVWLGIAEERVRDSLYGIARQGMKCCREDVFNLAMWVWKKYSPPPDRQIWDLI

SEQ ID NO: 996887 - protein, 139 aa, Homo sapiens
DSSAHTQMIRKQNNLIADMETVLVVWIEDQTSHNIKPKQTQSKALTLFNSVKAERGEEAAEKLGEVGSQGLRKEDSSKSYKWKANQEVADVEAVASYPEDVAKIIDKDGYTKQRIFSVVETAFYWKKMLSRTFLARGEK

SEQ ID NO: 996888 - protein, 331 aa, Homo sapiens
  misc_feature (126)..(126): Xaa can be any naturally occurring amino acid
  misc_feature (196)..(196): Xaa can be any naturally occurring amino acid
SEIQDGCCTMSVVCARAPSQTPGVHVSGDRSKRDSLLNYVVCCWVGQGKFQVYLVRQLVAQGAPSSSRAPSLPYQDSFGAAIARELHRSDHGSSHTAITEIAGRETLPNVAVSLMWLWREGKSPWXTVFLMYPCNSYLDTVGLSVGTHFLGPRNDFAQWGFPYHGFALGYRIGPFGAIRALDFPWLGLVWGLGTKXGLHWALTPQRARDFGESTQGALFPSALSRNPLHLVNKWRRLKSFGEGASPTCGKRNMCFWVPGTLAKGSLGRTPPMAGECEAAISRFGGPTRGYFEHRVLWEEGVTPLSNRRTKVTYAALWNVATPGGETTTKQL

SEQ ID NO: 996889 - protein, 145 aa, Homo sapiens
MTPLTQNLSPNHIQLRRSLSRSVRYARYNMLRHDDNFGSLLGWPGLILQNHHRNYSLVHCHVLTSTPSIRAVSFYSRAYYSLLRMVTLMGLNHHAYLALPRWRASEYVLFIVHSFATHRGEGLIVTGVSFIIACEKTRDDQCVPI

SEQ ID NO: 996890 - protein, 278 aa, Homo sapiens
  misc_feature (198)..(198): Xaa can be any naturally occurring amino acid
MEFLWAPLLGVCCGLADVDRHTVLLEQFKSQVIREVTDYHQYNVHVCNDHTDGASIGPDILERSASVDGQLAHGSKVPLSVTPVWKHEGRIHDGARPQVQRTTCVLLVSATGLSGNAIGPENACLMNVPRRLHTLSTAWARSSTEGGQEYYLRSFRELIRSRHWERRCFEGWTGCTCSWGQVSLRQCPPGPMAKASRXEGDFAAGMETYEVAGFVLVSTRFQQVLAPLPSWTNLSVELVLDPFTTFLRAWKPRGGGVPQPGLKEGTGPEKSGGLARTD

SEQ ID NO: 996891 - protein, 346 aa, Homo sapiens
MHLDMTSQQILTRAIYTGPDPLAFNQNTGGVKPSICIHIMMHHDNPIFTHEARDSMRTYDRQRHKECIRCTTCMTANGIHTGTTLVEEQQRNIGNERCHEQNPMDHPDRYHYMETPQEAHQCHPQNHRLTHERRNNTPKRDTTKTTSRADTNTGEHDHTTDVTTAGTTNPGANAHKRTETSGQQRTKTDTKRQHPCPCNTQNHRHTNQAQENTPPESLNTTNKTNEHSQNLHAQDQKTHKQQTHTRQKPTHNDANKSTAQRHKQQLNRRNKNPTKKTTPQHQHLSQTEGPTTKKTINKQNKNSQNNKEKHTDTKTTQNKTKGRTHKRQQREQTPKRKEKHTKKTNK

SEQ ID NO: 996892 - protein, 247 aa, Homo sapiens
MQEPIDNQHNKSKTEQQKHTDNKKRTNNQTPNTDNNKTQETTSDQTHHSDDTRPTDIGKHKGSNTHTDRSNNKKQPHKKTSNTRQATTDKPHTRPHNQETTTTDKHYAAHTHTNRTNTDTPTGSGQHKQTNTQRTRTTPAEPSRTPAKKQHNTQTNTTQQKKAKSRARTRRDEPRQRACRNRRAQRQRHDDRVAQTDNQTNSAQTTLRSAETTHRQQQHGDTGTHNDTDRRPARRHSTQNKHTSRDI

SEQ ID NO: 996893 - protein, 293 aa, Homo sapiens
MCNSTGHSPVSFMSNDSSIMAHAPCTCHVIQGTHNVFTCLYHSNSTTSSFLITGILGRHEATAGVIGIKQCAESRKHTKQSVSYCNYSKKKYKEKREESATLGEGNTAFPNTNTTNHPTSGSVTHKTRDAPSTTHTNVTTHTGQPQYSHHARDTSKCTQHAQATGLKPPHTQNRHQTPPRHTIRYTTTKAGETPKTNRDPNRRRNTSTRKDMKKSKEATATANNTTQRHRTDTRAKHKKNVNERQGEHNPTTKDRSHQDSRTTNKTTQAAPGKKRRKKHTLRPTRARERRRQQ

SEQ ID NO: 996894 - protein, 138 aa, Homo sapiens
MKTRNSTIRAYTSPPKQNPGTQATKRSPKRTTTKQTKQTNEAKQNNTTKGHKQQPTARHNQNSNSRNNTRQTTHHDYRRAQRKRTQQTTKNQRHRQTTETRKQTKIQKKQKHKPATPKRKPRKINGRDKRADKKNIMN

SEQ ID NO: 996895 - protein, 121 aa, Homo sapiens
EQQQEEAEHESIVGNHDSVSGPRCSPFSRPERLTKEKLTYLVRIASDFAFALHRLVTWCPYQIEDRLDSWKVLEEHTQTLQRDTSMMTVGNMGYICLDPVRSEVRNTLIVRQHGMLVFHLT

SEQ ID NO: 996896 - protein, 192 aa, Homo sapiens
DVKVRDFVGWFRDHMQTSYGQKMGSNGAQTQGLASLGEDFSDAHDAKPGLNDLMENLPLPDNIAKLRMARLTSWPPRLPSYLGKGLDLGPKDVQRLMGFCINQPRRTNARSGIQQIFTFSMLSWHAGPICTARLIAQGNSPQSGGTRGGIHGTRTRRTSTRNQYARTVKIRRHERENDKQEQNPIEMGTNRR

SEQ ID NO: 996897 - protein, 387 aa, Homo sapiens
TQYSEMPKMVLANCSLMCSTTMLLFCITITLLTGQQHTIHLNACSTLASVHFRHMQNHSIQHTITQFMHQGTHYHIVFGLTIDHKASTLITSSATVVIPILVWGYNQIGKHNTIGSIRINGKRFTVGRSIFILNAVVFSEEQVGSATHWYRSFSRINYLLRRLFGNRFHWHEVGHWGQNSNFPKFVGILVTHGRVGASHMGDNTEGHPRIDYYYNTTLKTVYFLGEQTGYTTFNDQKPFGHTEGNSFPLGVIPSFTFNRQLPEKGALKQQNHSGLEYGQRHGNRNSFPKPPQRGGTKSSTTGHQILGTHNGGAIHLPKATVPTGGYHQFQKTPSVDPTITITHSQNSQGESELNNHITYTLGAPTTRYRHRKEGKHSTTPATSSTRG

SEQ ID NO: 996898 - protein, 228 aa, Homo sapiens
IVVVMKVAEQTPLSGLYVAKLQLKEAGRYPPGCCVNNCALRFGPHELRSLAFNSHEDVGQSGIQQAPLRFGRVIQCCCWEQTNLQESELESWGGEGAPKHHHVHDACYGLGPVGTGPFRPVLQQGASAVLCRLPVTFRAGRTSIDEGNVEMRAAVARAKDLRVDRWKPALNEAKNQKTGVPHGWTATSAFNETIRYVITIRYHGGNPNSTAERNTGPVACAEQANLEW

SEQ ID NO: 996899 - protein, 86 aa, Homo sapiens
MQTYISVVSDANVITLTAFYTMTLIFFHCIRSHTDSKPIKNLDSINFYRPSTDNGRNLEPVHGPKVKQKRKAPKLKFGAQCRLPIN

SEQ ID NO: 996900 - protein, 139 aa, Homo sapiens
DLEHVEVLQKKFEEFQTDMAAHEERVNEVNQFAAEYSSRSYYPEEELIKTKQDEVNAAWERLKGLALQRQGNALWGSEKFERFNRDVDETISWIKEKERLMASDDYGRDLASVQALLRKHEGLERDLAALEDKVKSPVC

SEQ ID NO: 996901 - protein, 185 aa, Homo sapiens
MRDSRCAHETWALSHSLQPRTSFPEVYVDHSGEENYVADIEVDGKQVELAMRDTAGQEDYDRLRTLSYPDTDVILLCIPSTDLIVSENIPEKWTQKSSFLSQRAIILVGNKKDLLELTSTQGGSIAKTKHEPVTPERRQSIMATQGMGASGVPWTEDHQHTKDGVKRAHDNGTQTPPRPPNHGRQ

SEQ ID NO: 996902 - protein, 213 aa, Homo sapiens
MGIGADWTGAHEFGVTFKEQAGSSGIITIKPWALGAKQLAKMARGPGSPRAPYLWGQTGQQPGETYLSTSSLAQYTSVASGRTSGPIRHRILHVNSLGRVQSGLITFTHPLLREPTTRFPSENLGHTATPFCENSLNWGSPWAPILSGSIYQKGATYTSPLAIVNPLVQLSPKGRHEIGFIWGLPFPETDCGNNGSQRFPPFLLKRGSTRCST

SEQ ID NO: 996903 - protein, 37 aa, Homo sapiens
MVCRTKIGLKTPVVPQRRTVDVKNDDALRQYFPLAKN

SEQ ID NO: 996904 - protein, 70 aa, Homo sapiens
MRTGGNAPPFAARWGTSAEHHWRHGRTQRGHSKRDTLGPHEARHNVQERRHEEAGGRADTPTGRMSTQRT

SEQ ID NO: 996905 - protein, 179 aa, Homo sapiens
MRRPVGYILVDTRIQSIGQGDNKRWHRRVHNTGVTTPLAMMQTHYQYAMHRSEYKQPDAEVTRDYTSRQQLSNTVDLTRSNRKEPPRITLQRKTTTECTKPTGYKSNVPDTKEQERSTTENSQGNVNYKRRGKRGSQQQRSATTRDHHRNERNTHHEHRERPHKKENEEEDKPQHHPRD

SEQ ID NO: 996906 - protein, 216 aa, Homo sapiens
MLSRLKCFGPRAVDSRTRVQPPHPRRPSTSAHDPFMPHPEPPPAASTPLTLPPTPLPPGRTPPARPHPTPQSPRAPTPPRQLHHHRHHPDRSPPPPDPHHPPHPPHAPPPRQPAPPPPPPHPPHTPPPTHPAAPPTRHAAHLRPRPPTATRTTTPRHDDPRTPPAPPPTPAHSRTNAERTTPHGAPQQPEPTDTQTPTNTPATTLSPRAHARPHHG

SEQ ID NO: 996907 - protein, 128 aa, Homo sapiens
MSEGNSYIIIIIFFWRRCLALSLRLQCSGATSAHCKLRLPGSCHSPVSASRLAGTTGPRHHAWLIFLFVFCLSLPTGWDCRPLPPRPASFLVCIFGGDGVSPCRPGWSRPPDLVICLPRPPKVLGLQT

SEQ ID NO: 996908 - protein, 358 aa, Homo sapiens
MDITREVCGAMENRSEIVQYATYMTIGNTTFIKAEDRENISGDILQYKALWDTWNGKTTDSETQNSKRGSMGSMAKRVSPKTHIVRDREHTDPMGTTTQATTGTTTRNILSTHHQSNSHANTHDRQPERSEPTTDNATNHLTPGHTHQEAHKAKLVDQRESQPDTLGAKERTADQERTHTTRPHPSAPTPTPSEAPHTTRTQTKDANQYQTRHKAARKRQPLTYATTRTPTPRNPKQRDPPTLATGRGHTPTTTTDARQPNNNTRPACAVRSEPATRARQHNNANATMNDSAEGVQHTPTPDKGKRSPTDKGRSYTETSNTTAEDNRATIRSQPTSPPHPTITCTKSASDKTTPEEHE

SEQ ID NO: 996909 - protein, 91 aa, Homo sapiens
QTPILCLFGKTKIFFADNRSMRKCHHQQTVHLIEWYSEFHEQSICVWLHCIAFSTSELLSFHPAAQTLIKIVKKTYRDLSIAGCDGRNTEQ

SEQ ID NO: 996910 - protein, 103 aa, Homo sapiens
GSPNLEKVISHALLRGLVLGKLGKAGHKATLEEARRRFKDHVEGKQILSADLRSSCLSDLVRKHGDGTTLAYECVRNFINEADMQEENNRNRKSPWSLLFGLT

SEQ ID NO: 996911 - protein, 201 aa, Homo sapiens
MFNVSKFLWRLYTSLGFLVQRVRTAFFPPLSLSYLVFWIDLTLKRLRELTKLTDFNVIWWNNGHFNDCPGLAGVTRICNPSAMNGRRRRQPLDRKYRDQAGPRVGETPCPLIKNTKTLVTALRTINTTQKHVKHPHSSTGHRTPTVWDNHQKETTRDRHSARGPDPTTPPPLTPHSRRDYSDGTHHPGRHPPTGQHTPSAH

SEQ ID NO: 996912 - protein, 72 aa, Homo sapiens
EPYIKVRICFVAGATLLIAGTPGNHWLCVVMLFDVYVERSTLVFAQYHFLVSNITFGWSCRLGMARVSGLLI

SEQ ID NO: 996913 - protein, 39 aa, Homo sapiens
MTEEEREKATREVNDGETRDEEEHEAKYEKCEERQNNTD

SEQ ID NO: 996914 - protein, 76 aa, Homo sapiens
INPLAQPVIYSSPIVCEAHFIDQRISIARDLFTVVVPRNKPCVALDYQFVTKKFKPVSSTRSLPVTYFHHVKQPYP

SEQ ID NO: 996915 - protein, 97 aa, Homo sapiens
GNLLRTHKTKLKSLFGSTVKRPEHILQKAQRKDVLMDYYRKYAAILLVTLSAGVCMFVRFRSCCAGWPENARYEENRILLPDRVTQYFSAMGMHACS

SEQ ID NO: 996916 - protein, 79 aa, Homo sapiens
  misc_feature (61)..(61): Xaa can be any naturally occurring amino acid
TLYCCGTSGSVFVGILVMNSRRYIENMIVCVFHVYIYTTYLYPFGITANVTRSTGMRLPFXIACVVCADSIHTFGNKYD

SEQ ID NO: 996917 - protein, 73 aa, Homo sapiens
  misc_feature (54)..(54): Xaa can be any naturally occurring amino acid
YSGINGVRYAEMLMRELNPSVDYNLLTVPCAAQFKTCQSRLACQGNFRRKTVVXLDEIIVTNRYDSSFALLSR

SEQ ID NO: 996918 - protein, 108 aa, Homo sapiens
MHVAVARVNGVLYLQCFKERTREVRCAKGGGAHASHQSFDSYLKKGVKVAKSICTLLERVRSKFRCRGEWEVWVSGGELKCSGIMPMEFQGCEGMGGIWRRTIRLELD

SEQ ID NO: 996919 - protein, 172 aa, Homo sapiens
AVRFCFHCDKAASNSMQCLTIAALSFFQAQRFSLYATKPLPWDGDRWHQQLKTVFPTLFIASFNSMKLKSGTVSAHPIVGSYDEGAFLCVDSFKFYVPVGDGEMEPSIQPSCSTSYNGSPQPPGHGLVLVCGLLGTTLQQQEVSSRQASEASSVFTATTHFSLPPELHLPSY

SEQ ID NO: 996920 - protein, 69 aa, Homo sapiens
ECDESPKGATVSMSQCLDESSDATESVLSTCASTVSRSALRILWVLGAEVLSSAGVALVVWFLMAKGSF

SEQ ID NO: 996921 - protein, 300 aa, Homo sapiens
MFNVNATYLVSTKRVKLCKIFQEIYSEPNVSDQWPVTQPSGDPENMRPRQLSYNLVLYISGRHNTSINICKMYIGSVQKAGTIEQVGDFPGRRQIQRFFCWVQWLIPVIPALREAKAGRSLEARSSRPAWPTWQNPISTKNTKISQAWCVHICNPSYLGGRGWEQSFSMQEARGCTEPRKRHLHSILGDTEDSNPQQKHSATDKTQETISRQPHRTENRARQTHRSAPHGPRTGTGRRLPDTARDPLREDLAGETKGTEHVHPSEEKDPAAHQAVLEQHSERGTLRTHKRRNNTGENNRT

SEQ ID NO: 996922 - protein, 291 aa, Homo sapiens
MREKPRATKHKTVREERPPPHSTKKRREESNRDTLREQQSPHQRTSPRRPQRGNSIQTHREESTTEQTTREIFKNNTATGRCGPTRRRQPEETAGNRAPKNDNHVAHHTSRHTNTTRHEDRGDNTPTGTKEHEDVKRRRQDTNGQSNEHPIGENNKPEADAEPIDDPTKRTARSSTTNEDVCHYNQNNHISHHIHTTFKAAITYLNPHYIYNSHTRLPPHITSTKNPPPPIESRPHNTSGRRARKHKESGRTTRQHGSITKDHSRKGKEGSTTKVAHKGAQTEARREQPAG

SEQ ID NO: 996923 - protein, 200 aa, Homo sapiens
MSEDEHLYMCLKAICMFFSVIFFGRILCSFFYWIIHLFLIHSGKSSLYIEEIGSSYTVGVINIHSTLSFNFSSPRRKSHPGCPAWACSGPDLGQVQAILVPHPPEELGITGAYHHTQLIFGISSRSRQGLAMWARLVLNSLISGDPPCLDLPKCWDYSQEPPHRGHGPLNLDLGISHYSFKTYWNSLICNFHASELWHDF

SEQ ID NO: 996924 - protein, 213 aa, Homo sapiens
NGMEWNRMERKVMEPTRVEWNGMEWNGMEESGREWNRMERNVMEPTRVEWNVMEWNRMELNQLERNERNGMEWNGMERYRMELNQPNGMEWNGMEWNGMEWNRMELNEHERNGMECIENGMESSRVEWNGMSWNGMEWNGMEWNGMEWSVIEWNGQLLDLEWNGNGVEWNGIKQSGMEWNGMEWNGMEWNRMELHKPRGMACNGMVWKGKDCN

SEQ ID NO: 996925 - protein, 85 aa, Homo sapiens
QSDMFDQRLQIKSFKIELIYPMVVKMDSTKLVELSTEVLSNVNFHLRRQKIIRTITLMKSSQDTGKLLSWRVRRYTKRLRKMGAV

SEQ ID NO: 996926 - protein, 128 aa, Homo sapiens
MESRQNQRRGTRVAKKPVYTVGGWSNVDGKFAWEKSVVTWTCEPAQELIAKCCGQPLTKRDLSQYCKPRYIVQCDDFGIVEQFCQGMSRDIELPIIDEGSQPILSCPCVMRCLISALDRIMQVSEKFH

SEQ ID NO: 996927 - protein, 67 aa, Homo sapiens
LKKRQKTERQQKETKKKDTSTERKKETKQKTEDQKRRKKTKQTTEDKKKTHRQHKENTNKNKTTTQI

SEQ ID NO: 996928 - protein, 175 aa, Homo sapiens
  misc_feature (172)..(172): Xaa can be any naturally occurring amino acid
QLLRTHKRKLKSHLRIRQFKRPEHTPCRKAREKWSAMGLLTGTMYADSLSGHICRDGVHAVILQFLHPDCAGICPECTLTGKDPVSFLPGRRVSQVHSGAMGLGVLRLEAYPHVQLNRSIEGLIVWIARRRTGDLSEVAVACCRLKVHINLGCDQLIWGGFQKGVRNLNGRXANG

SEQ ID NO: 996929 - protein, 75 aa, Homo sapiens
GKWVAALDERGPPLYVPAARVEAVGLSLAADSCCLVPRCWSSRRRGLREESSGARDARLRRLPGGIGSVSKLRMT

SEQ ID NO: 996930 - protein, 282 aa, Homo sapiens
SPSSEPQPVQPCHGAKTLQDSLNGSSRCSMVSLRCSQWLSYGGALSLADGEPVQVSRDPSRVYTPKSPDSDSLLERLTRTLLNSRLQGPSRAGRIRYDTSSVPGPPCKFREYIDAKKSAGLGASRAEAHLDNTGQYTLLSALSLCSVVALLHGVLLTELSLRVFVFPELVTPHRQFEWFGVNCLYNVKRHDEAALTFRMTYGKLLPSETPRSGRLFDRKRGQADLLDSTTSGKRNFACAGNFSSGFPELGPKSWNVSQLVACPGTAVHGWAASVKRALFAPS

SEQ ID NO: 996931 - protein, 169 aa, Homo sapiens
RKIKRDKEGHYMMVKGSFQQEELTILNIYAPNTGAPRFIKQVLRDLQRDLDSHTIIMGDFNTPLSTLDRSTRQKVNKDIQELNSALHQADLIDIYRTLQPKSTEYTFFSAHHTYSKIDHTVGSKALLSKCKRTEIITNCLSDHSAIKLELRIKKLTQNHSTTWKLNNCS

SEQ ID NO: 996932 - protein, 100 aa, Homo sapiens
ENQSTEVYCYLMELDGVSYQVEPSNVAPFSHRKLCRITSNTTGLGREGIGRGIHVNRTISGPCLLIEYSPKKQSDLHLYRDRAAVIPALLTNRKHKSKYQ

SEQ ID NO: 996933 - protein, 70 aa, Homo sapiens
ETDKWVANSKVLCLFQSQVVKFVFRYLWMRNEETLEYMKNEVDLADSIRDSNKYATSAVFEEYGDKVMVR

SEQ ID NO: 996934 - protein, 118 aa, Homo sapiens
MDPQTGGAISSTGSVMMDSGYCFPIPSWPFGHPAIMNRSCVGHMAAYEEKMLLFPFEDGKPFELCIYVRRKEYQVMVNGQRIYNFAHRFPPASVKMLQVLRAYLPDPECSSRASQAQH

SEQ ID NO: 996935 - protein, 93 aa, Homo sapiens
MITMPEELIDDYVITYMREKERTRGRIVKRYLWKMEMEVLVVHYVFYSLGRMYIVESTDMQHVWLICHELRLYGRDDFGIGFVLQEAENEQFP

SEQ ID NO: 996936 - protein, 101 aa, Homo sapiens
KGLKIQPWVTSGRSKLINSCNFFMEAMNVFSGTDRLRKIVSLMAIGTINGTYVVLCSAGALLDRPSVRSTWVVRGIRLLVRLVWHILGHFRLLFSENTHNN

SEQ ID NO: 996937 - protein, 215 aa, Homo sapiens
MPVDLSKWSGPWACKKWNEQRSTVMSLRRGGVDELASADAHQVRIDHSIRGWSDQEALHLVWQTRMLQRKDPNTEMDHSVVNMKGNDISSAQSLSDLWARAPKARLHRCCWLRADSRKVTAISERLEHVESSGVFVQVELRPGLPVSGEWMTMAKCRPVWSRGSGDLMLGPACPVRVLFWSLSALAVHCGPWIGASARPFLPLPVSSAVDSWGVG

SEQ ID NO: 996938 - protein, 162 aa, Homo sapiens
MDCFLSILKKLINMTELCHSRKVGVRNSEQDNGDRIVLVMDMNFLVYYRVGSRWLKRDDPEVDYCVDERPGFVNDYEQRKGWLGLIAKELVTLGVPSHQGIGQEEALSSLICMQLVLWNVVWTRKSVSERRAFWEQPGLCFSPVKPSDHGQTRSNDDYFYHD

SEQ ID NO: 996939 - protein, 47 aa, Homo sapiens
MNEPDGPGCGRIAPAHEREKNRGDTEKAGALEKEIIQTAPHTRKSQH

SEQ ID NO: 996940 - protein, 402 aa, Homo sapiens
GSQLLTPCLSLSSSCYFSLQSTHNVASRQSHKGKSQHMSIGAAADIYCMMHHTQNINQCMAKLPFHAAAMGYQALCVGTWINAHKPIRTMTVIDWLPQVKQWGPKPFILEILGKGCHRTRSLMPANPQWTLLDSLCKDASVTNRKMVAGSLRESPYPGTNKGSQFGGAHGGGLVGKGQKVNRFRHKWRHRPEHRPQYTSGSTHTCHGKRENSHRWKGNSWRKGNQEGRIDGTAHNARTRKIRAKNRDTTRDNPTRNVRNRIRTNNWAWATHQALRIATPPDRDTADPDTQGKETQGKQPTLPKPTPGARGTNDNDTARMNRENAHSHHMTVQDKALTRIVAEKAPVTQVPISTRNVRARKQGHRNTQRDEKTNYHSDGTTTKRPHIIKNITETSVTAIHHNG

SEQ ID NO: 996941 - protein, 208 aa, Homo sapiens
MLIRCCIENVERHYFVGIFAILMNSARVGDENASATNAQYERSMHVSVTVLYSIRAMLLCYGMSLLFTAAEEGLMATLCGSGSAMGRRECCSITFLNGFCMLALHSALRLCDSDGHFSTDTFGLFAISYHEIVILDGNSCKCRGLNMVIVTPSTSSKAHDLGAPWSWTEEEAAQRESSWSKTSPAAPTQPAARWPRRPPGMALATGPG

SEQ ID NO: 996942 - protein, 246 aa, Homo sapiens
MTAESTAQQPVGSRVVPEQSDALILAHSILVAMAVNEDRDLRRHWTRSGDSTTHGARECQHVLLELTVLRAGLLSWLLIRGRPAAHVVVGDVLQAADVDKTVAGQDAVIVLLGTRNDLSPTTVMSEGARNIVAAMKAHGVDKVVAAPRLSCSGTLTKVPPRLQAVTDDHIRMHKVLRESGLKYVAVMPHTEETSHYTGAYTVTLVDEGPQGSSPKHDLGHFMLRCSTRMSTTDTGLTLTQYSSICP

SEQ ID NO: 996943 - protein, 116 aa, Homo sapiens
MCAYSRIFQPLWGETRGGKHGRPEGTSLQRGPPQRFTTRAHASVGTITKRRQILVGMVGTRGEPITIRRGDNNKRGHGLEGSQKRSAKMTAPQRGDPLKECKISRTEGGPRGKIHP

SEQ ID NO: 996944 - protein, 96 aa, Homo sapiens
MCCTFKQHERHTISGNLVEQGQNNELHEYYATQGVRHTKGKGGSLQNRLPLDTPIREDRNPAARRSQEQSPHKESLGGIQPEAGERPPGNTRKAHV

SEQ ID NO: 996945 - protein, 60 aa, Homo sapiens
MHPGTGLTPFYAGLDLPNKVFKTYDGTRGPPERTVNTGAKAAPEEKHGAREQGERNATNT

SEQ ID NO: 996946 - protein, 284 aa, Homo sapiens
MRLYLRRFTEKALITVALALGSFQIGGTLKPSFPQLVYLGPITHSEWGFIFSQNGASWRLIKRPQRAWWCSWGGANKNWWVWGIPKRAPKGTSFNRFIIFGSSHTTEVNHVGRQVFRKKAPRRLRYTLLRGEGNFIIKGTSVGPEGIFKRSRTRKDDLWGGIFLFPQRPQKQPSTKEQKNRQTVFSAATWAAPREKRFPTNTMGVGARRHPTMGDAETHVGKQGVPQEEHAGDTNRGGGISARKIKERGRGTNRAVLCNTTGEGMRKGNRGDHNRRTQSEDDKN

SEQ ID NO: 996947 - protein, 116 aa, Homo sapiens
MLSKTRILDLRSPPVAQVFLRGSFEWRLDPRGRKLVLVKMWGLLRDWTGEILGRCICGQKKRTSPYYQVKTMFGIASLVSGKKPLANPWLLGEGRALPVDGHQLIQKCRDEGIPGK

SEQ ID NO: 996948 - protein, 172 aa, Homo sapiens
MLVSGGVLLVALLPMCRMHGLLLSRGPGPGSSAGAEAPQALILAACVVVRAAPASRRLGRCCFREGEEYFLWPGGDRLQEPGVPFRPPPRSSPEAAAAALRRNRRRQLFPRVLQQLLLASELARTARGLAERGLGMPSGAPGGTGERKGVRGSSISWISLPLLRESLWKWQA

SEQ ID NO: 996949 - protein, 239 aa, Homo sapiens
MIPMMARCRHEKALYQGHSRHPTCPKRGLRYGIIPIYYLEKFVFFARIFLSSLTISSSSSTSTLNYREGPHGIALKHGHHPVIGNPLRSLHVLNDYSVFTALITEFIRIHADVFTHRCIVCNMANSYKSIINFSMPSWLILQYVHSGVLLIYVTPTLIKDSFRKLTYTDRYFTLLIAIFPEGGNSYGASISISAGYAARGHIPSGKVYHPVHFTCALRDLFAHAKLRAGLFNSRGQKQK

SEQ ID NO: 996950 - protein, 337 aa, Homo sapiens
GPAPAPSPDLARGSLRLRHGHLPAEVAFCPQVYTLPKSPRSPQEEIDSILGETLEGPWTRRKKAKEVSELQEDGHELTINLPPQTNIPNELDPEGHECWKDNERAKQRTRSQTSNAAEPHKTINTTLALTGYFKSDPGTSTDCSTRLATTTDMHKRHTTPRLESILGYIDLEEPNRSHSTRHRIMSTTKQLSGRQIDETAIQHMIAHSKRITTTMTHTNEHHGIQDNRPQHAPCARHTWYTIANHNMKIPQRGNKAHPREHIDSHSPPIRKAHISKHRHVENKYDIAEIITTSDNTHYDPKQKTRITITRYERNNNYLLTIQHPQFSNYHNLLRTPI

SEQ ID NO: 996951 - protein, 129 aa, Homo sapiens
IQRSLYDRPASSSDRNLCSDSEVQTHLHFEHASTPAQAFNYQFGILVAAYTSSKLPAGTWQFIRRSTKISVPPCIWLLANVLLATKEQNIEASDRLMAMASSTSIAMHSETHGSRTQAGHPYHCPLQVA

SEQ ID NO: 996952 - protein, 36 aa, Homo sapiens
MAREEIIEEGADYTNNGEGGATKEAKATPNKKKKNH

SEQ ID NO: 996953 - protein, 105 aa, Homo sapiens
  misc_feature (32)..(33): Xaa can be any naturally occurring amino acid
  misc_feature (36)..(36): Xaa can be any naturally occurring amino acid
  misc_feature (41)..(41): Xaa can be any naturally occurring amino acid
  misc_feature (75)..(75): Xaa can be any naturally occurring amino acid
MGRNGTQCRRERVPKPRSGGVKPHRSQWLNKXXLTXWSWEXPPSAGALSSSTVRLFHNKRVGSQCPRTQSTGARXSKRTSEEKTRARRVCRRGNCGKCNALRGGG

SEQ ID NO: 996954 - protein, 103 aa, Homo sapiens
  misc_feature (39)..(39): Xaa can be any naturally occurring amino acid
  misc_feature (56)..(56): Xaa can be any naturally occurring amino acid
MNSEEGNIARQSYPLSGIVDLIMIILAPFIHMTVHVGTXMCWAVTDLLACMTGTQXQCTASEECMLCSTRVDSGGLPNAYLHCPRWTLGLACICTCTTPITEH

SEQ ID NO: 996955 - protein, 233 aa, Homo sapiens
DFATELILAEKRGDLTERECEPSAVLEMLISSILDRCLVIFVLSCYFLICKCSAKCQQEAHNKGIVHDVSIRWSRVHTRLHEYTQKLQGEWKNVHFYRDRTRVASTSRWTLDHAATAVEKSDVNRWSTSVSNRGQTVIQNIGEDAQTSSDNPKSQMKYTLENLAENVALYGTFSHLASGPVAVQESTSPMVMMKAILVTLLRRFHVTDNCKDSGVDEHTDRYTDLSLAPKMQH

SEQ ID NO: 996956 - protein, 352 aa, Homo sapiens
GVRSPPRPPRGPSRPSLSCPSIVHVCPWIFIIRRLKPGLLCGQLSRPVCACVPESPRGPLACMQPSTASGPRWLRVAGAALSYWWGRGWCVPALSAHRAPFYVGSPCVALTFSVFGTVRAHSSSIGVLQRRGELVKSRGPSNVLRVCPPFCSCSGARYPGGPVASRIWLVLCTAGDACLGFVSQAVGAMVLGGVPRTFFGGSQIGWGFRGAPLPRLCGVGMVGSGWECASLVVALAGIAGVGERSRSQCKSPEGTDGFGPPVLPWFRTCKFVGALEDRELVDLLANALTSRGGTLGSAQWVHVLALCWGCNVAPGNPPVFHGELAPSPVRFPGDLRPILAGVPLPHGPEASV

SEQ ID NO: 996957 - protein, 294 aa, Homo sapiens
ERTRRNGKGGGEKKEGKIRKRGRQAEAARCQAGNTGSQTVEEQAASTGSQEAAASSKGDGARTKQAMLELLNKAARHSNKRQWTHSEEQASNYRQLPQRKERSTASKRHSSAASRSATQAGRSDRRQGTSEAAQHNSGHKAQRREEAQAQRAGGAPHTHTQTQRAGTGTRQARGTQQGLPTRKGQHKHTRQFTHKVGATRKASATHTHRGRLSGKGQARDAKAHHGVCTGHVNGTPTARSTFVQDTLTLNTSKQAQRDGHHTGEVWGRNRGRERTFTETYRGGYATGTAGNDRH

SEQ ID NO: 996958 - protein, 40 aa, Homo sapiens
MRQALHIHQPARGRCTHNRKRRVERYIYKIYNRAGVYCWW

SEQ ID NO: 996959 - protein, 157 aa, Homo sapiens
MGVDLFEKVYGWAVAGGRGYTAQKPRIEGASRGPRGDHSGGRWAVLPVVYVLYFLNWNNRIDATRVQNPPEGSLGYPWARESPKWGWNLGRQSTGIPRGGGTDTELVQDTTHRGGPPGQGGTGDTGGGVPSPAALGFCAPSKGALGHARGYLWGGGE

SEQ ID NO: 996960 - protein, 106 aa, Homo sapiens
MKLLAHSLCAVPESSKSPRGAYCLAMRYLHQIAVEPLLFSQFGPTIYSETVDSEAEIIRVPSRQMAPQYSVICLFRTHRARPILRIIVSSSEDAETCGHYPPAMQL

SEQ ID NO: 996961 - protein, 191 aa, Homo sapiens
MLPFRGDRTVVSSSIEVAILASSCKSVPCTFKERLVERVHGGRALCTEDSWNARFLITLHVSIPTRSPNATFQGLFKWILGLDPCSLYLLSNYTGWSKRIPDGSLGDLHLTFDRGAKVVVPLNLFTKSSKNLVAGLPFLDMVFYCFPRIFNGSLLLASGAHNLAYQCNTLLAAKRRNRSGTALLDIVGLRS

SEQ ID NO: 996962 - protein, 92 aa, Homo sapiens
TQRHKKHNQTTKNTQPSRAEKRQRTAKDQPPRPAAGRQSNEPYLEAEPDRQTPTGTRSNGQTAQDKAGHHPPERDKTTNRQQRREDRKKEKN

SEQ ID NO: 996963 - protein, 164 aa, Homo sapiens
MVTMQALYMVRTEDAYCHPSHKNESLIILVMITALISHVSCSLLFRSPGMPFVLTFTKKVSNTNISDSQEIETVLKLSCPTVILVLHRPSHPYAILYITRRGQRIPSLYLSNSIGAHEMVLNRTEYSRLQAGRNLSISLTYFPPIDWLEPWRTCRRPLTVDKST

SEQ ID NO: 996964 - protein, 144 aa, Homo sapiens
MVTSQSFAIVPPDEEHGKQAENLAYRLELNGHYGDDVTWESDSIDLFHDGMATAIHEIRDLSSPMTTSNCTAYGRTMGTSGIHVNYFHVSEIGKSKHILGHGGSQLQFHQTDTGTHLSGNLEALTGTGDAQTPWQGYHHDRNGL

SEQ ID NO: 996965 - protein, 83 aa, Homo sapiens
  misc_feature (66)..(66): Xaa can be any naturally occurring amino acid
EHVSTLAERSNTARMVLREDREMKEEEIQSDNFHRIYRTPAAYYTQLSHGCRTQERLAHILPCEQXSIQLYTSAQSEYSITHV

SEQ ID NO: 996966 - protein, 394 aa, Homo sapiens
MCRCVLLDVESTHRIQHMGSVHVTARQNERFSRYTGGYLGSEGCDMEEMRYWNYVVYSLLQLSKLRRVDSRGKLREQIVVNEVHLGESGLKHAYVGRIVGPIGIAYVLESTLVTGHGRAIWLAGYAQASISSSFPFDQLPEEGSQYWPVSGPPADKTRGPISRPNKPLCNSTLDNMEWNEEPLILNNQKSTRRSVNRLFEESKYTMVMTTLSHREKPLCSSPLFGNLRILSRRAPQFGFIHPIFEIADSKRANFQTFRRELRIYKGDMVHEHRRFYTTSTCLPNSAPISNIFVVDTPTWRNYISKRASLVDLTEDKRSLHWDLGSFFPGAEDRSGNPCIRRHIPIHTESFDETNGDTPAITLGKFPLWPEKNSTPRRRATDHEANTRSQSEIES

SEQ ID NO: 996967 - protein, 154 aa, Homo sapiens
MYCYPGSHLARAADCGRWLLALVLALLVGPFLSGGGGDPMRRGGRWARDGPVPPALTQGRIGAPGRLVRDRLTYGGRNATLTPDGHWSQTLTKSHTERLGLGLPWSLGTSRPIQMTGFAGPYSRRDSGERLSLCTRTAHYIHTCNKRTGKHRQR

SEQ ID NO: 996968 - protein, 212 aa, Homo sapiens
MPFSPGPLAVHVSSWERVLRLMEEDPAFRRGSSSPCGIVQRDSYGCRGSVEGVWGPWGGGAVVDGPPARLCVAHFDEGPKRIDFAHTVHMRRNPHEAKRGKYFEAQGNYGGRRVWRACLDHLVVPNGPLESNEIQRQLQMGKGAKTTLENQAQEGHTPKRYTQRVIRRSTQGREAPLVQREYQCPQEGKFWVDESDLGNTHRRGSKPRDDYG

SEQ ID NO: 996969 - protein, 280 aa, Homo sapiens
LRNEKCHDYYTTEFLYKPVLIEQGKGRSSDCRYLTLSMRRTLAAMGWTHPNPPLTSELCGPSVVGEWPCMWFVSEKLREVDLLKGRVFIQLPQTRPCVIGLNKNGGWLVLAPVTEAQGKTLISMHRDATGAVVAEPAAHAEDAGTIPHQYGRLRVRGAGARDPPDPEHGQGLLRPAMPTPLPSPHPCQRSARAQMGPGLLCLEPAGRWGLRTCSAHPCLYAWAPARPPSGWCLETSLPGPPDRRTEYPGAFNFLTRGRGSCTAYGGYCPWLKETHEASRI

SEQ ID NO: 996970 - protein, 67 aa, Homo sapiens
  misc_feature (14)..(14): Xaa can be any naturally occurring amino acid
  misc_feature (40)..(40): Xaa can be any naturally occurring amino acid
MDEGSPSTFSSSAXHLHLTLDQSRYSTSIVLSTTRTFRSXPSVHTRPETPDYTPYILSPVTCKKVLS

SEQ ID NO: 996971 - protein, 167 aa, Homo sapiens
MQPLRFPNTTQFSCECRISLILNTSLYPHTLLPLLPVSETYVELAIYYVICALSVHPSCPVPSLPFSSGAIQSLFLPSLLSVPSPSFVLSASSRRPPAFPVDYQRTVLQPCALPLYATPHARRSRGGGCALPTHVTRSRLVLLSSSRHVHCSRILFCALVSTALASP

SEQ ID NO: 996972 - protein, 225 aa, Homo sapiens
LESMIKKPRPTRGLKAVMWPMQSWMDPELSSCCLEKQPRGDYPLEAVRYAGTLIRPLRQKACSSTSCKLFRGISCQRMAPITRRPQASIALACTMGACERPPFYSDCKWWPIISPHPVSVQVVHHSGWPRYLSSVTAQIIACDPGIPSTALSGPPVLVASSLCCARHPVQDGLGLRTWTLRVNFAYEVLAKARGFFKKGDVVIVLTGWRPGSALHQAACVSFPVP

SEQ ID NO: 996973 - protein, 73 aa, Homo sapiens
MGEQVESRLESPDRKGHTQFSRKAMGPWDYWSPWSRKGMGTSVPYQQILMSGRLFTFWDYTPKTHLTYCSGEP

SEQ ID NO: 996974 - protein, 215 aa, Homo sapiens
MCYWDISGHECKYGGNTPKAPRGPPDSSQPTSPITCNVATEGYTSVDCSDSGVVSPTLHQPCLTVVRIFPVTTIIASRSMIEDALKHTHTTYTILVYPVAQQASALPLSSHTPRVHHVRSRDVYCILALLSSLITAMRAIELKIHHTYVLVPSHRSTLRTTRITALDRHYGTGAYCIDASVTKNRPRDMDAVVRHVIGPPLDPHYYTPPSSSIDR

SEQ ID NO: 996975 - protein, 181 aa, Homo sapiens
GHTTLLYQRGPRARPHALRIALRVRLGPPPSRPFTLYTSSLCPGEEAIVVSLVGPVRSMADGGGGRGNWQRWAGQELARLCRGSDWRYWASGGGWPHQTRLRCLPGEPAVIAHIGGAAQEAGASEDSYRTGRAWPDVAHQASVTKTEADKWIIIVSTHLDKQEWNPTDEQNTDAKRSEAEC

SEQ ID NO: 996976 - protein, 254 aa, Homo sapiens
LRPETHPSVLPVAPCIESANLGCDGSGEDEFTCYADYIAQRSHIQSKHMQDMQDLNSGSCIVVMLLWTLCCPCLTAAASNIGHMAQSYVTSSSHMDVQCMSLCIDWFSQTSDVAEVRALGLVQSPGQSADVLVAEHCSMMHQESSSNALEVVSTVEPSDPHCSLRRSTDISTFRNHLPLTKAQPDPAGMTVEEQPLPPTSNQDLGEASLQATLLGLAALNKAYPEVLAQGRTARVTLTSPLARPLLGWEYPGPG

SEQ ID NO: 996977 - protein, 111 aa, Homo sapiens
MAFPTHTGVGVGSPPHNDESSLITHYISENRGGTNKREGSPTSVGCAQFPIGRRGSAIPPKERPMGIFYHGDGGAVAEQGLLNNKGGAQGNTYHMRTQRSETTQAGIPRRH

SEQ ID NO: 996978 - protein, 113 aa, Homo sapiens
MATLRDRADRMTTLVRIAVPCIQSNLKSEWVFPKFRVKSTRIGLLAFCREGRFLEHMEQLNNTYSHGSLTCTFARLFDTESISRGNNAQSQVISWLDCEGPNIGTNLSLENLP

SEQ ID NO: 996979 - protein, 121 aa, Homo sapiens
PTAAWSLAPDPAPAPSVRRAGVRLPVAAPELGAWGATIEAGVPAAMCAWMLERAACHLHALRKLGLALPCALALEALVAALEHPHMSLIQTWQKEYKCGDLVFAKMKGYPHCAWPWIDADA

SEQ ID NO: 996980 - protein, 99 aa, Homo sapiens
MLEESVGTGEEELIGTDFLSTPLTGGWKMGYAEEVSYDALMWELQPLLYPMLLIDQLKPGGRLDIACGCWRRETKCGEQCDKLQDGGGDFLAGGGGDMR

SEQ ID NO: 996981 - protein, 167 aa, Homo sapiens
RIKRQLEQLQLADKPRKMSNSRVPTHPVEKGWPQGPNAQPRRGPYPPPFRENSLSNLFGHLNDKASGFLGGQGGCPGLTIPQTPKKLKGSKSRGVHVPRRFCVRTQIDKTWSVSKRCSLSRTPGQPVQTLSLAPPRESAPAGDLLDLIKGCARHTSRNVVPPSYNVR

SEQ ID NO: 996982 - protein, 161 aa, Homo sapiens
GVEHAPGRPWGLTVGKCLARRGSGLKPRAGGDQCPYQGLLAACGRAVAEGAPQCLRPWGFSEPASGREDVRRRTEKYNSKVGKGTCSYSLGCRRHCPRNPQKPWQVQEVLGRSHVAIGEPPPCGEVRCTHGEPWVSTGIIPKENTPVLVTQAESIAVEANV

SEQ ID NO: 996983 - protein, 147 aa, Homo sapiens
MGGLNTETNEKALEHIWKYGHLGNTLDENLKPQIRGLDFGHLLKAQQTAKDCRQKPAMEQSLDAKTTIQGGTRHQTLISEHVVEVWTGLQRSKKKRPSRGLRGGTSKDVNGTQRNLLNGEGQIHITGDISKHNVKHVKYFPGNQSTI

SEQ ID NO: 996984 - protein, 167 aa, Homo sapiens
MKNINFGSSLTNFDVWKKYLYFVARRKQTIVSRPLQRTQVNNINNHYLLTISTVRIKTLLFSRPRYNITSPVFPSSLPLLSLLALAGGLVSFPLLSLPFLSCLRPLAPICFVSSPAFHLFSLHSRRSPLHPRFRHPALLYSFLLTSFIYGWFSMGLAPSVTYHQRPA

SEQ ID NO: 996985 - protein, 124 aa, Homo sapiens
MVGELGVEKGRHRIGEQPSRTLVVLLHFVVYSQEVVVWIEYPRGVTGTPGHSIRPTGGSVYTEGNLSRLDNEPTADYCHGYRAILKRNPPVASLQEVRKDTPSLKGPQNTYHEQGSILRDPGNE

SEQ ID NO: 996986 - protein, 109 aa, Homo sapiens
RHQVSQDGCIQVHPGNYGERISSDVMRFLLRVRCWQLPPTVSASPAWAPRPQPVSDQCAPYLASTHGPQSTRSRYYYYGVRCFARGWPINVTSSSRVAYFIAYTSCSIR

SEQ ID NO: 996987 - protein, 324 aa, Homo sapiens
  misc_feature (288)..(288): Xaa can be any naturally occurring amino acid
RSLIQPPPPRQGHCDPEFQELTQWQKKLHRGQAHSPASQNFLGQARTKSEMQNGGPCSTSSQHENSIMLAIATTSISPFLRQLTCAPGSWYSCTSLSSYTSTNTPHLRHKATPLYSSPATAEPVHPPENQNPTAITYIIVPHPQSLYSSLNYYSPPTTPYNIPTITPLNARLPHDDDVPRPPYYIITTTNHTPPYLHASPIACSSVPFIFSPPLPSCSPSSTSSPPPHYYITLLSSTYRYTQLRLPLPPNPYTSCRIPLTETTAHPPPSPHEPHITPRHFHPTITPPXPAPTLLTTLILRTKRPLTRSPTHSHFPSHLSIIAIF

SEQ ID NO: 996988 - protein, 136 aa, Homo sapiens
MRLAIELPTSGDPAVSASQIGAITVREPTRHGQESKSVTESSTAGSGRVHEELRAESPEHMGVTRGDQRGCVENFRSLSWACVTEQSAGPGLDGETYGLMVPQRPHMEPIGLAREKAEGESLQISRLKDARSNVLT

SEQ ID NO: 996989 - protein, 183 aa, Homo sapiens
PREHRASPFADPHDRPHPPTSYTMDDDIAATRSVDNEIRHVQGRRYAGRRCLPGPVFPSIVGRPRHQDVMVGMGQKDSYVGREDQSKRGILTLKYPIEHGIVTNWDDMEKIWHHTFYNELLMWTPEEHPELTEPRTPLNPKDNREKMTQITCYETFKTPRHVTVAIQAELSLYASGRTTWHRR

SEQ ID NO: 996990 - protein, 271 aa, Homo sapiens
MWGLAGLVYSASIACCIWSREPKAPGAPGPHQWGTMTEQGRYMDRGVLNVVIQMERMTLLAPRPVDICAIAIEPGWRICDQLALVNICLIGTQKLFALVAGPVGMQMTGASVEDDRRELAAFLAHDIQQWLLAMDHPSLGHPANSGLELLAQMAGSMASFGDWSISLGLGVAKLCVLAVTVDCVGIRKFTLMVGYQGTPASSMPGNPTTVFEKDVHAELISDIDIGPPEDWSRDWKRSLQAGELGKTEEGQLEAPQGWTYQGTPNRNRRQE

SEQ ID NO: 996991 - protein, 270 aa, Homo sapiens
MRLCQRRHEQDQRGREAAPCACLQLGQDPVRCSSGSSSWRLLQRLIQEQEQELVGAAGLLDLHKNEWNAYYEAVVYGPSSEIRSTLTPGRLLEVGPRHLRPWEQEAHIDFSEAELYDRTREATWALGPSVIRATLGIFNPFKRYKRIPRHHEMVAALSGLDRWNTCNVGGSALQEAARSGHRRMDVRQATHHCGRQALGFEHNPIQYHTQVILGTNGDILVTPQDITSNIGGDLDPPHAKQTNRRRHWAFQRGTARVYRNRLYTAWITQS

SEQ ID NO: 996992 - protein, 363 aa, Homo sapiens
GAGQRPTTLVQHGITNLCVIGGDGSLTGANIFRSSGGSLLEELVAEGTISETTARTYVATEHRGPSGLIDNDFCCTDMTIGHGLGPPPNHGGHRCHHQTLTQSHQRTFVTGSDGTDNAWYLAHGYLHWPPRDRVDCIIPRGFQTEDGMGETPCCERLGDDSETRESRLNIIIIDEGAHGPQGEEAISIQDYVKGPGRLKRTGTFEQTVYNVAGANVQRGRGQHNAAYDTGYVRQTRWGNGQSRDELGSMDGNDPTALEQRPEDLDVSEQNQSYKGQPHVDEAGMDTLQGKLRQTRIHHKGKDAHENDASVKVTRKGSEGQSNTKQNQREGGGTRRKQHQDTIKRGNNGPQTAKTHQREKRRSE

SEQ ID NO: 996993 - protein, 293 aa, Homo sapiens
QSGGGVRRKKGEGWSHTDYCLLGSIFKLNLGHVGNICSKIFCSIGFAIGPLDLDDFSLNRWGQLQTALRYDVLKTRGCDNGPSQSMTPYIVSEGHQAPSEPGYTRAGNGKVTSGGEKKNRGGGEQMHEREPWVTGGTGRRTTWVWRRDTWDKGRPRKQGTKRAGAGGHRGRHRAKENEKPKRRDGNTLARHPGGGAVGDRRERRGDVAGTVRAEDGWWRHTDLTETRSQPASEGDPQRASPAAGGVTRQPLGTRAPTTGGGAGTRVGAAPHSTHTRVQQPRDTGGQTQHETVV

SEQ ID NO: 996994 - protein, 167 aa, Homo sapiens
MWKSMEVLLSWKNCKNIWTIHKTDPSHILNTYAITNILLPPHILNVTCSPTTTFPTPPPSFTPAADHFPSPRRPILLTSIHPLPHPIPLPTLITPPTKPPPPLMPTHTVTPPLPTHASHLIYTILTPYKPTTPHHLPPNPPPPYALTSPSPPPPSPLALYVPPALSP

SEQ ID NO: 996995 - protein, 229 aa, Homo sapiens
MVHVADLLSGAPGQQEGAKTMQIPVNIPVPVLRLPRGPDGFSRGLPLMDAEPPGGQRFLKSRSVLTMLKNPWNPRSQRARAGHFGSVDLRRPAWANGWVMQVRLHVAIEGVRVCRPLVEPPTWDVDNFLRVTDAAFPKVCKARGADSEVKYDIIVHYTLQAELEDYWCSHCVCCEGYSDLYPRGTSPNGSHELREPRGARQWEVYMTRPLDSFWSPNAFNRQRSGRFRE

SEQ ID NO: 996996 - protein, 197 aa, Homo sapiens
MRTCSKTIWVSAHMSLLKIKLTFTRDHGTLTHTKLNPNPISTLSAQLPFRKPIYLPNNLPFYLGDQKNPMFPSLRNSLPTTTKPAQLYWLLQPSNTFLLFILNTKQHRLFASPRNFPTPPLPRRTRHPLTNPFLRPLVRQPPPPPQPSPVSPIPGTPPTPLPLPSPAVPLTAPSRPSLPRSLPITYMLSSRCGPHRL

SEQ ID NO: 996997 - protein, 253 aa, Homo sapiens
ARTLFFRRSAVAFLMPCRKWNEDDRRAGHLTMAPDMCKAGFCLGNERIPEDQVYSVPYDTGGTQHTQGRPSDVAIGGPETDLTKPVGAEQKGPTEANAVGQLPLDAPMNNVTPHNMGRPLGAHFRYKPKPLVQNRTHLANGTRRFLLGPQHQTQPPDSTVKQKTRHGPIGQTPELGEPHPVSKRENDQNTPNARRTNGPVRDTPPANAEPTDTPTNSPTNPTPQTHGGTTESPQRQHDQHKNGHTLRHPIPNS

SEQ ID NO: 996998 - protein, 367 aa, Homo sapiens
PLAADELQSSRYRQMLADAPRLLEKSIHGLRKVIDAHQVSTSDMLVVADSDLRRLQEGAALQLKKNHEEEVTGLQAQIASSGETVEVDAPKSQELDQRSWTDIRAQYDDAGSGQNREDATTTYWSQARLEDEQCTVVTLDSLLRLDAAQSTDAHESLETVQSTSLRESTLELHEKSRTVQLGETCLTPVAALVMPYKIEKHSSNGILPAAFEVQELGTGSRGQKGQRTRSQDDMGALVDNMNGQSVVGLRIAQPYRTPCLERWRGHFRSWIECLGESSNNPMQNRIQRRPAQALPGQYVQKRNRHARVLKTQMDNHRVQAAIKSTPRTQRIRTMGANKEAPNNRAHRSTKANTNTTRRRRDTLRGHD

SEQ ID NO: 996999 - protein, 133 aa, Homo sapiens
  misc_feature (1)..(1): Xaa can be any naturally occurring amino acid
  misc_feature (84)..(84): Xaa can be any naturally occurring amino acid
  misc_feature (105)..(105): Xaa can be any naturally occurring amino acid
  misc_feature (133)..(133): Xaa can be any naturally occurring amino acid
XEGTFVKAYMAGRPRTSQCGPGRDIMPGNTAKMGVKTIFLARGGDGMVARESEVGCVLGLAVCRLLCAGLRVGKIQKGSCIAGXRVGLCLGVALVCVRVARFFSXLLCAFPVPPVPRTRAAAPPPPRPPPARX

SEQ ID NO: 997000 - protein, 180 aa, Homo sapiens
ASSQLSVLRPQVTDSTRAASPSCASPTSGRPSGAFSQQQAARRTVRQRKREKTSSEVQPVHGAGPGPHSSEQALLRAMGPRLDIIFLYLVVHAMRNSAFFLHVGTCELETCGNSTATGHGPHGLLLTRVTWWGHSVTGSYKASHGVALSFLTQVQGYSKCLSVARPYVSSETQLGPPVEP

SEQ ID NO: 997001 - protein, 102 aa, Homo sapiens
MYTLLARVTYGMCDLLTHMRQGRSRNPIDTPFAERIEARKSVRCQTRRSLRSSEPIRRVSARQEPTVSGPLNVPSSRHRNLTKKRGNSLHGLNKSSACTTSK

SEQ ID NO: 997002 - protein, 136 aa, Homo sapiens
MFDVYAPGRKDEGPPGRAQATKRVNRFALDNAQYAEIGRGDHGQLRRAIQTSTETVPTTGQRKNPKRGGERKELYTKRGGSNPRSGYGGDRPRKKIAIDTQEEMKPPKPGMGHLRATRVLALVALRRAVVHFLGLR

SEQ ID NO: 997003 - protein, 135 aa, Homo sapiens
SNRRSAALLQEHEVLQVTAGKLATGDRLIPEESRGPREIARSRSSVGLVSTRRTEIPECPSGTHGSRRRVCAGPLFGQCRLCQVLRDSRDAGSPRIVFASQRLLPKSVCCVKAALEKGGMMSHWKVSSSTGAFCA

SEQ ID NO: 997004 - protein, 174 aa, Homo sapiens
GHTRLPPNKLKNRNFQQLERGGLVKLKPHEEPLRSEIFSGKFTILVHLIILVKVDSLWKALFAHYKYMLIPEGMRHSPCAPHHNNPPNTTLSGPSIPLLQNANLFISHNPHYPHLNTLIHPPTPHNTYKTAPRPHPHTLNNTPTSLLSTHPIKVKPYIHSYHNHLPTPPPPLKH

SEQ ID NO: 997005 - protein, 122 aa, Homo sapiens
MPSASVPALKVGGPQSSSSKRTRAERLPLHLVHRLKGLPFLTLRFGHFLGEGRRPGRVGCGRRGPRLLARRFRVGAPDFCCRRLWALGPSVLIAIRRLGVTSPLVGPLWHLCGLFVRQRGRI

SEQ ID NO: 997006 - protein, 213 aa, Homo sapiens
GFNPSLLSWLSAMMCVLTCSHGGTWQHMPVRALMPFSDTLRSGLRDPTPPDFGLGVERAIWSVQACIREERSSLKQLKRVECFPQDLLATIMASKEATVPRVQLTVYRCRRGASPRGTVEHGDWKDSAALDEQEQSLLAVWHVRAPARNGGSLINSRQSTFMSAVRRGLKPCIPLRPCKLSSLTRAGLVFVFAYIEDGQKHRKVHRIIAIKIP

SEQ ID NO: 997007 - protein, 102 aa, Homo sapiens
FLSSSNNNNIYRLQLIFLLSISPLLLHISLHNQKCSADMLLSLLIDQEEILCSIRATLTHNVHNHNQQNPLNMYLYYTPPTIQQHTISIITPSSLLPHTLLS

SEQ ID NO: 997008 - protein, 129 aa, Homo sapiens
MQTWTQCLAIWKHNHENWSRAAITSSEKRKSPMHRQPGATEREKQRPIIGSLALVIPHQSTLCLAPGAIRRVLHYGEGVTLTDTGFKNREIALEANYPATTMRALSSSSPGGQATAQLRQRNAFGKHYR

SEQ ID NO: 997009 - protein, 515 aa, Homo sapiens
  misc_feature (7)..(7): Xaa can be any naturally occurring amino acid
  misc_feature (9)..(9): Xaa can be any naturally occurring amino acid
  misc_feature (12)..(12): Xaa can be any naturally occurring amino acid
  misc_feature (17)..(17): Xaa can be any naturally occurring amino acid
  misc_feature (35)..(35): Xaa can be any naturally occurring amino acid
  misc_feature (135)..(135): Xaa can be any naturally occurring amino acid
  misc_feature (195)..(195): Xaa can be any naturally occurring amino acid
  misc_feature (219)..(219): Xaa can be any naturally occurring amino acid
  misc_feature (232)..(232): Xaa can be any naturally occurring amino acid
  misc_feature (268)..(268): Xaa can be any naturally occurring amino acid
  misc_feature (300)..(300): Xaa can be any naturally occurring amino acid
  misc_feature (323)..(323): Xaa can be any naturally occurring amino acid
  misc_feature (378)..(378): Xaa can be any naturally occurring amino acid
  misc_feature (380)..(380): Xaa can be any naturally occurring amino acid
  misc_feature (385)..(385): Xaa can be any naturally occurring amino acid
  misc_feature (391)..(391): Xaa can be any naturally occurring amino acid
  misc_feature (399)..(399): Xaa can be any naturally occurring amino acid
  misc_feature (402)..(402): Xaa can be any naturally occurring amino acid
  misc_feature (411)..(411): Xaa can be any naturally occurring amino acid
  misc_feature (414)..(414): Xaa can be any naturally occurring amino acid
  misc_feature (416)..(416): Xaa can be any naturally occurring amino acid
  misc_feature (447)..(447): Xaa can be any naturally occurring amino acid
  misc_feature (449)..(449): Xaa can be any naturally occurring amino acid
  misc_feature (464)..(464): Xaa can be any naturally occurring amino acid
  misc_feature (475)..(475): Xaa can be any naturally occurring amino acid
  misc_feature (492)..(492): Xaa can be any naturally occurring amino acid
MRLRYVXPXTCXDDDYXDYDGSDTEIVLSRRDAAXCDYARCCDVAAAPREISSVQPHQVTVSLRIIYAICSHVVSRNPPVSWTVSAISLADVCYYNYRLIHNYLPHHCLLSLASVMHYVIANTGVASCVVTYSAXKYIDDLSLTTYHYSLRMSCVYYNISIYYYCAVPRSGALGYTPIDYSVSTCHAPMSMYASXFAREYSSVVSYSPSCPRRSGRYVXGVHLIVLRLARSXLQLRAGCVYASADSRADACVVIWHVLMTCRGKMLRXCSSRGGELSTRRHRLRAYYYLLVVRCVASWTXSVYRDSTSVLIIYVLFHTLQRSXAVLRASTACQIRCVSRARALSARCEPRCVQSVESRVAISVRVAHASLSVHSSRNXLXRELMXERCVSXLYGLHSSXSLXSTHHVRECXLAXSXVTLDYIVLRMRAESTDDVATVCSVDICLRRXTXSSSDVTELSGRFGAXDYDNKRGHAIXRDAPTARYDRCLLRVIXAYCYTRPDSNRVTHDVWGRVRRA

SEQ ID NO: 997010 - protein, 317 aa, Homo sapiens
  misc_feature (16)..(16): Xaa can be any naturally occurring amino acid
EAAYYGQTPGPGGPSXRRPRSRDSSQASGELPSLLTPPVLLPTHRHTVHSRAFRWRSAGITPSPGGVPLYACELVGRVAGGSRGMSPTATDQGKPFPGAPELRRRMVLLCAGLACVPCCCLCARDVLGHPLTTRRAVTSEAAGESGGRQTCADGGHLARAASTSLHNLATWEENVLSIVPFLCITFADFGTFNSFHFFKAHDLFSLCPSDCVAGWPVLWQRLVGTRGSAQAPCPPGSASHALALALCPGLACGSGRERSLPPFQSYLTGVVWLDPVSLWALSMSVVLRREASAPPETWAGSRKNRTGVRLPGLLLQV

SEQ ID NO: 997011 - protein, 144 aa, Homo sapiens
MSTYSDEIISVTRLPWKICASYHQSSVSAMAVIPLSESWMSHPRHTYHRIHLVPRGVCPWISPAAMPMFQSGPCCNGAVVPATALKLGNGINPSPDNMNRGKVTPYAMVPPCCGIRLQSCLLPGDSSVNDTPKRVGSRDNRVAI

SEQ ID NO: 997012 - protein, 240 aa, Homo sapiens
VCHLKILVSPWASAPPDSYRYCEEQEPVPIMSPSAEDVHCIAKRFLHYYDRGERAHNRLTVGWSFRLVANMVSDEYEQLSSEALERCPNLEPHKYMVKQLWQEMASSIRVRLHPFHVIRINKMLSCAGADRLQRRHARCLWKAPGTVAGFTIGKLSLSIRTKLQNKEACDLEACAGPKFKFPERQKIHFSKNVGLSPEFPCLLNFDRPWWVKRRSSQMAVRVQYIPQSLTSWDSWGALLP

SEQ ID NO: 997013 - protein, 116 aa, Homo sapiens
  misc_feature (4)..(4): Xaa can be any naturally occurring amino acid
  misc_feature (10)..(10): Xaa can be any naturally occurring amino acid
  misc_feature (22)..(23): Xaa can be any naturally occurring amino acid
  misc_feature (90)..(90): Xaa can be any naturally occurring amino acid
  misc_feature (98)..(98): Xaa can be any naturally occurring amino acid
  misc_feature (107)..(108): Xaa can be any naturally occurring amino acid
MRRXTEPPRXPTHNSRTRQLHXXRRTRRQRGHTARPTHTTNDSHPHASVNATHRSPPPSPSGSTTPEKSNARKCETYYKSELYTTPLTIXLYSIHLHXMIYYKSTTXXNCLSFPPP

SEQ ID NO: 997014 - protein, 360 aa, Homo sapiens
GSVGRSSALRPRKYPQEHPQEELEKASSPGSAVSTEEEPDASERRCRGPLGMGLAQHPTSFLGPPRSQRQDPGERSPRGTEATRQGQVAQSGAQSPEAGSQIAVPTVEGTSSGLEWLLWLHYLERLPEPGCPLTLPLSVADDLRLVPPYLRHVADGSGPMHACHSTEHWGHKLGLANLHGEARRTSQKDMRVGPLGFLALLRRVPNIQAMQNGRVPNTDIRIARKSPTNGTAFPWGENERLAGLVSNDVHVLCQVGCDTKHPYSPGSTRGKGTPGTPFTILASDQPLGGRPGETTLEGPHRVTRTPVSVRVSGPQEKTRESWKHGYGAGKRPTRERGRDQQRPKKALTGQDHPRDTKGRH

SEQ ID NO: 997015 - protein, 125 aa, Homo sapiens
CKYPRRGSLSTDGISKAVLIELLTTGGWSERWPHSGSFEGAELHLNHGLVRSSILRPSQKHKKCAPVYDGPGGIRELTGVAAQRWFGFSSTGRWYKLCIADMRAGRLEGSRCRHVVHGMTLILSG

SEQ ID NO: 997016 - protein, 148 aa, Homo sapiens
  misc_feature (147)..(147): Xaa can be any naturally occurring amino acid
MESHSVPRLECSGAILAHCNLCLPCSSNSRALACQVAGTVGEHYHTWVIFSRDRVSPCWPVWGILYTILLVVGRYLLGIFCFIKLKQKYSRKCCQAHHQTRIFVRQNAQHESYFWYALLLHVTAHCHSQLHHLFFLAAMTVKYHTYXL

SEQ ID NO: 997017 - protein, 216 aa, Homo sapiens
MYNEKRDKPQETVAYDTLLSWHKGEAWPTDTNHSSSRFPMPFNWSKRTYQVLSSPTWVQRKRLGLFPGTCDQLCCCPTLLLEHLAPLCMRNLGLVAPAPDYYLDFFLPCLEVTCASNTHPCGHPPTLVSTLGYFGSYPDFTLWGSPFIPKTVGFLPIGNRSIGVIAVLGTLALYTHISKHAEIVIGSHSRGHLWVRYPFFRKNVLLPLLCVCATWS

SEQ ID NO: 997018 - protein, 189 aa, Homo sapiens
EIVRLQKDLRTVEKGASAENWKNTKRREYDQEREEKIKQEQEDLELKHNSTLKQLMRESNTQLAKKEQELETDHKIETINNGPGRWRLRLVRKASQEDDKSGYVRERLVRKMSDLESESDKKNEEILDAREEEDDCKSNGSCRLNWRSSRRNSSNKLEQEENPGDDNVTIMELQKQKEQKTTFNQVIRN

SEQ ID NO: 997019 - protein, 118 aa, Homo sapiens
  misc_feature (93)..(93): Xaa can be any naturally occurring amino acid
  misc_feature (100)..(100): Xaa can be any naturally occurring amino acid
PANMGRVRNQKREEGGPGFIIEKYYTRLGNDFQTNKRVCDGSIGIIPQQEKLGNKIAGVMSRIWMKRIRERPSSEVSLIKLLEAGRAERDEDXLVISVRXSVPLVSWSTDRTYMILQQ

SEQ ID NO: 997020 - protein, 357 aa, Homo sapiens
RARLRQTHSGTQAAPCSWGRDGAQCGVDGALSSAGPALLKAHPEGFPCPVSQYRCSLGVLTRPCGPEESGLDYTVVHTPACNTIKADVVPCMPCKGSYTSVSPQPTSTGAASQGLMHARRDRAEGAGPSGGAGGIPFGLLQPVLTDTRRKRQGRAVNPWRLSVVKPSTLGCDCAPRHDLAGSRRQTGRPFLPNYDGRHRKMGTFDANSGTFPRKQQGVHLVPWEEQGPIFAKEGSMEGPKAVACLNGHSKVDLCGNSTPPWVPEEGYSEAPPWSTGGQQARGWELGLDTGELGVRPKPRMLEPPGAQEPWGQANGDTKSRHEHRTGRESKRPLHTTGNELTRSTIIAERSEGGHMDI

SEQ ID NO: 997021 - protein, 136 aa, Homo sapiens
MCFLVTNNAKYNARRWVWNTEPFATTPSTLIAVPHAPEIKAGKRTQLPGCVPIGVGPFAVDHTGVVAHSLLAYLVWKATTRRASGHIVTGDPARREYGHSERLTFSRLALAGGWAVYCTNRGTRAVWREDIMARPV

SEQ ID NO: 997022 - protein, 282 aa, Homo sapiens
  misc_feature (264)..(264): Xaa can be any naturally occurring amino acid
MSRVHSQECAGQRLRTRGPGDEHRQGSPEIRQHVILQQRGTAGLREGIDGLGIMGPGKHMGEANLLESHIDVHRWPPSVGTGTHTDCPHYYKNTRGKSPFVGTTTVGTFQMEDTWDDASFIPNVVQQWKPAPRRNTEATGGVNPRKGNLEKPNRVGGWEVERTTPWGNTPTIQHPDNEEVPPGGCNSPKVRKEQSARMSLIESPRPGRANHISPNVYIAQTAHPSGMRAGHWRYGRSTRAGSKRNPPVLGTRTVRRILNSDPPXYRCGTANHDGTGRRGVNN

SEQ ID NO: 997023 - protein, 100 aa, Homo sapiens
GSAAAIILAHTALWTPSPGTQLTALLHVCRSRANQEISGGLDAPQALVDLEGASATYVFCDMLQGLPHPHTWERHIDDWLVPPEIAQVSKTAADIVLAIH

SEQ ID NO: 997024 - protein, 274 aa, Homo sapiens
KSTLLRGFSKMFELYPEQRAEGESLLDGDNILTNSQDIALLRAKVGMVFQNRRRFRCPCGDNIAFGVRLFEKLSRADMDERVQWALTKAALWNETKDKLHQSGYSLSGGQQQRLCIARGIAIRPEVLLLDEPCSALDPISTGRIEELITELKQDYTVGDRHPQHAAGCALFHHTGVMYLGELIEFSNTDDLFTKPAKNQQKTTSPGRNGDSGWRLDMLIYKHISASHRELEVSDPVRPWADGGHHFLIITDSNQTGLGIRFSNNVIDEVDVISC

SEQ ID NO: 997025 - protein, 156 aa, Homo sapiens
MPTIGGLVARLGEQAAHSLDSSGKVAPLGTLWELNTNSWGLAPFGPLMRSTQHYGLQNVTLGCAKDSRVKSCRIASTVRRVRERGSRRPKSNFAVGHFETRADRAYRGRFVPGPYSQRATLRNSGLSRSGGYDFARFWFALGPHFVFGNGGYRGGR

SEQ ID NO: 997026 - protein, 429 aa, Homo sapiens
  misc_feature (141)..(141): Xaa can be any naturally occurring amino acid
  misc_feature (208)..(208): Xaa can be any naturally occurring amino acid
GLPLGRDPMGTVRRHESLKRDLDDGFVNCKKLFNDGTGQGPDVGVGLGVTDEAQRWLKEYPADRYGAAEALVAIEAAPGMRRQEPTKAWSLHECAGTQCRRLRRHANGCTRDSETAKGDRQRRRGHAVCQGQWQRPLNGLXRPFMNETLARGTDRGASVIVKFVSERVRGHQKIANERRKPGVKQIVSQEHEWTESVPLDRIGEFTSXIVQKIVPMQSRFANPRGNNAPDSEGNLYLTQGGGLRHWCPLDSERKQGRCDKITGGPQGATAVRNGLGNPGVAIRPRCCDRGHPCDLSLEEKERKGKLQPLHGGGHYLSELSPRGTLKRNRARSMLRGTPEPLVPGPPGFHCRWVIWETPLGGPITPLTFGRGFPNARGQSYPGGGDTRLLDPPKTGTKAASLDTNPREDLAYEHTHLNNGTIFHLPRPLR

SEQ ID NO: 997027 - protein, 331 aa, Homo sapiens
ETESDPSELREPRLCLIRRPSYTRRHAHHEDDDIAALVCRLTRSGNVKAGFAGEDATPRCRLRPPLVGLPQAAVGRDGGPWVSKDSYVGDGGPEAREAVLTRECTAIEHGSRCDQTEDDMENKSGTTAFLQLSMRCWHPREQSNPVCLNEPEVPTCNPQRPNRGESMTRRSVVGGTVQSSLQAQVLPDSDLIRKRLDAIVPLVRRIMRPERNWDNPAGIGSIPEVEQGEYQLRAAEVDAQYLRRTERVIGPVHHTQLTQFAFSRYLEEHPVTWGPEETPGTVGSLIPCPIVKGIPIRPPNVDRDTYQVAFHHEANQGPMSVRNNFDCTVEA

SEQ ID NO: 997028 - protein, 110 aa, Homo sapiens
WGAKSPFVPRVDSQGVAISGSTGEHWFSGSLASLRPPGYSRRFSCVLSLLDVRWGLRVLAPPRPGYILWCIFLVDKKTGGYTSGCVWRQESVGSHNLFRAPRENLAPHSL

SEQ ID NO: 997029 - protein, 122 aa, Homo sapiens
MPQEELGIHPCVLGPWLSPRLEAAHALHGVVDLPFPPGEGDERLVISERALFGHGDRYASASFLVACVGPASVGIDVVDAALWDGSRHIPRFWSASGGRGIPIPCHSPTFAAKGETRVRFHF

SEQ ID NO: 997030 - protein, 53 aa, Homo sapiens
  misc_feature (7)..(7): Xaa can be any naturally occurring amino acid
KKQKSLXTTRKKIARTDPTREAIRTKCRIVIHGVSCGINRTILKMQMNKSLVN

SEQ ID NO: 997031 - protein, 358 aa, Homo sapiens
RILPEVAQWSDLQERAPAPAPWTSPLLPPTPLSSPPLLTQSQTQVLGANLLALAAAGEALAGADFIREAVAGADTCVFGRGQWRLSVGNVLFGLALYLGLAPGPRRERTGSLRAARQLLDDEEQITCGKPLYMSHSSSYHAWVSFIKTWKRLTWLTTIVDQVWNLTWARYYGEAYCPETVAPAVRGSKPPVMQTYTFTTTWNWSDKQSAHSLESRVHPGQQKQSTILQALDTSSHCTVQGCRLNAGNENETKSKATHPNHGRPPPTDQNCTRELPSLTSHHKERYTCLGQPGTAVRHTGLTTTDKRTTPCHVKKAGDTRTPVTANSDRAEERQPPHALVAPIPRKLTVMSGTNQNPHS

SEQ ID NO: 997032 - protein, 239 aa, Homo sapiens
MAPSMSDSSTMVSQGDQYNTRLLRGTTKERTVPICPKGPFLTAKFKPKLNNILLPSRGANRNFGIIVPLHAWNGCQDHRSREEPREASTQVGAKAQTERYTTGRGNWKPIAFHTKSFHPPSYTFSILMTGVFEHPSTRVEEGWLADQKLEAESSSLKHKTAFETVAFSDNIQARAKWKTTTSVAKYTIPDIVTAWSQGRVCPRCRNWFLRTKDGLVGSAGSGTFGGYKPSKLGSASSYG

SEQ ID NO: 997033 - protein, 329 aa, Homo sapiens
GETVAKTGASQGPTTPVDRSVRDEIRPWKLNDQCTQNPERMRQPGVHEGCIFLLVGEWPSHARRHLHREVAEPSVQEIMQQGAPVSVRVVDPVCQSIGATRIAAQCTGTAETRTPNGSAKDSADGTYSCAIWGHLKERLCANFTGLGNALISRKDKLQDVDSVGPICAVPNEVDLWGPTIAEPLMKPEIYALVDIAGKGPNFQFALLSHNTELGNCRSSGRYLTAGTPKPMCKHVGDYDRIQGSRLTLASHVGPLNNVDPKVMLNLNLLMEISKVGPACVHMGRLGRPMRHGSPDLTWYRIGLRGATGRSRKRNPFGNTYRGHINFKEL

SEQ ID NO: 997034 - protein, 41 aa, Homo sapiens
MEVEFTWHAVMRALSTFLQRALRKSISLEKSSPFRRHLKPP

SEQ ID NO: 997035 - protein, 278 aa, Homo sapiens
ESPEEIANPLLDWCLSPSPEHSSPSVRLLPYSLQPDSSLTGHWPVLPECRCSQCHCHPGTPEKPGSWLCRPQDLHLAFLEPSGHWTSQHWCAKHLQEMETPCIHGTPGAPDPRDIGAAGGCPCWKHHYSELRRTNNYLTGNNNFAEIHELPFRRKRVMPRNIRDGPPHEQGGWESMTPNIGEITNAKPTPYMDHSITSTRGIPRNDKNQQNPRDTGAGATGHRDNRQRGKTLTDKGVKNPWAFLFTSKGPSHEKRTTRNEERPIILGPRQGRKDTTSD

SEQ ID NO: 997036 - protein, 53 aa, Homo sapiens
MRRLGFPLIARTRGLPVARERMAFVAQVTRKGGAWAGGKSPKIRDEMSPRSMD

SEQ ID NO: 997037 - protein, 295 aa, Homo sapiens
MAEFKGRPRPTARPEVKRLFRPTSTELNERLRLTLKCSSLTTDHALTHWYRLITQSFHQLPRSTLLDTTKIRLRIILIFDTHYAPIEHGTNCRSDLVSFGAGSFTVRDSTCALNSRHEPLAATEYACRQCLRPLPFFPAYPHMAPRLRSALRHAGALQQTQLQTFTDTPAGMPGLNVGHRTRPVPRSRPGALLVLSPLCPLLPLSGTFSVPLARCLPVLAGPLAFATGLNGPPGSGCFRPSVSGASPLVPSDPGFPWTPPSFASRSAACSLGARLIGYAERILAPSISSRRAPSR

SEQ ID NO: 997038 - protein, 216 aa, Homo sapiens
MTEPKLGSPRASMVFDPTTYGFGQARDERCAKDSAAHSLENWYSVEEGLTRRARAVEDTNLAWVAHLTVTFINETASGSLHYAEAKITYQEDKDTERRTARLTAQPGKCAGNHAGEALTTNWDKWLAHGHRRTAAQGRPTATWTTEPTSSAHAVGNHTTLMKENGQVHKYHRQERTPDAAADHDGDKNSTGYASQKRLPGMETSMTIDVRGIFTAA

SEQ ID NO: 997039 - protein, 363 aa, Homo sapiens
VPQYYTLGSPVCGWLPDSARPTMLIMAICTMSHSTRGPSERKGQMCIAPCVAAVFGSVASSHVFPLMSQTGPWIVLQANQWETEVRLSDRSMPHVTQDGLIPSQWACTPMGEGVLRVCMSKCPEAWWRERQTSDRCMVGALYTRDEDGGRGKHECRESVGDLMAVEVVLNRHSGLDRGRSVWIVGEACGPDRPRVDAQIPRSHPCRTNPSIWVGLGKNSVVEPLIRESSRAYQFRRPWLAWHHTGVNALSYPPHMNSEVASFLRFAKETSQRRKFVPGDRGTSFNSNVRPSPSWTLSEPLELGIFPIQSAKLRLRIGVRENHQLVWVNHIGSGDQKDSGLAHHCLGALAAAALLSFPTQWVRD

SEQ ID NO: 997040 - protein, 184 aa, Homo sapiens
MVVRKARKSGGRPGTVVGIRIPNWSSNNASTFNRPSLYLQRCCGAFVNHFHEVDRLVCKNDQKGERPFLGGINTPLSWGDLLYSFGQRQSVIHATVGQRYLIRTCYAYVASRRLSPCGKRCVLSHNGWPCGGPGQATFVVLPSEHLGSASSSGTTPRVHTVPNPRQGVLPTTRKLSVVHPMWFL

SEQ ID NO: 997041 - protein, 296 aa, Homo sapiens
AAASLCPLHPGLPHAVAGGCASGALNIQRDWQDCGGGGGGGLGRRGPDHEPLSRETPGHEPADPRSAPCAADTLQPGGRRQRTEPGPPWRRAGPGALRWRRYWPGARSRVPEGALSPGCLLSTPRAPSPLSSSPAMSPQNGQELGVQELNTFYGCTRKSCNCLWCQDTFKEDAPSSWWLPQTGDLDQNTIDNYAERYLCETQMWPITILPSQGPRLDKTQIYLQDHGYHNLIWTKTVADALSCYPSLKDVTPNAVYRLPDAHGTLHDHLAPGAWLLDPLEEQDLVGFAREGREIPL

SEQ ID NO: 997042 - protein, 203 aa, Homo sapiens
MSDVLVENFVPWEFTYQRDSGEYKHFSCDRLAVVVPRGHLVDTKFSRSVARATYLSDAWTDSDGHPVEGRKSANNLGRMTLSWGNANRRTLFLPLKYNKGQPLGPTFIPPMRFLARKFTSTGQQRNRRETQHRFPIARHVYSFACEPTMFEGSTTPGFKHDRDANNPLAALSSVLVNSFPPPGVIITHLWGKQQGQAGTQAVP

SEQ ID NO: 997043 - protein, 262 aa, Homo sapiens
MTLVFQGSDVPAAPHSVAPLPVKSRIPGRPGPRRHTKGLQTAQSAIRLIRGELTELGPQLGVTAAVSQGGFQLEEVGGNPGQLTDCMRRLPIIPGVQKLPSQFRYRRCSTRRAQHRGANPTDSGNAPQIVVPIRQRVEHERDWQPLYVALAHGPAIPLTSPKTNNLAHSSSRPHLVALPKLLSLHFNEAAISNQTLPNTRPCPERSASRTTSLMAKLPANKGQHFVLAHLAKGPLQAYARNPPEPCVGTEQRGIAPKDVPHI

SEQ ID NO: 997044 - protein, 166 aa, Homo sapiens
MVGGIEFKAVRDGQSGKITVECTMEPEQADSPGDDAVDLSINGSSVCGVVMKENCVCITIKGNDMRGLVGSCISASSELSNRLTQFSLREKIARGLRTKINALYSHVYIQLDLLHGEHASLISSETFTRVPSDLLPVWYMCQAQCIHGVMTLNHEVSSRYEKLTPS

SEQ ID NO: 997045 - protein, 361 aa, Homo sapiens
AAPARSPEPVRRVDCPESLRAWGAGEDAKPDMAYHSFHGGAHQLPRLEQGPDPDCHLHPTNHEVHIYEKSWCQMDQGARAQVSTTGQVTWHRHGPPRVTDIVTCGHRHATPTVCDCMKGRTMESPSLVHPDGSTGLPAALRWDPQRETRYAVGSGSRVISICILSSRRLTEWSFASTIKEDPIQTPRESSSLELGNTKKWCIARTGQGITGELTKSSRIIYKSYTSNGTGWRRHVDGKPKHPVEGLPREVPPNGEKTLTDTGKSSGRYSMTEWGKHVHYIIELSRTDDEAKSSLLGALWSITDQGTRGNPEAMPFGNGNCPRQDNRHGAGQGKDPWDVTCKDEKNKRAVERHGHLINQKYK

SEQ ID NO: 997046 - protein, 251 aa, Homo sapiens
MLPTLHHHGYKRRCTVDSGLVLQYRTDFAFSAIPRITSFHDTSGPSNGNPARPPQLTHAKITNSHTLPTQTVPNTPPSLTPRTLPVALSFPTCLAHEFPSTLNYTDALPAHAPSHTSTAPHLLSTTTPSHLYAPDLLATHHHTTLSHYYIITVILRRHTPTSLPIHPSPNRSSAPHAHLPPLSAYYSSPITHLIKYHPTTSPPASAPPLLEYAPALPPPPRHPHPILSPLLPPVTSSIHFYNLPPAIDATV

SEQ ID NO: 997047 - protein, 501 aa, Homo sapiens
MLYLIIMLVGERFSPGVGQVNAPDEIKREIIHQIEIITAYGSISAIGQSLITCTDAATRSTGMAEMYIASQFAHFQENRGFNQARRAMYATENPAHVPKEDTNVDSRIIHIYPGQQQNQGQKKAHTRKIDKRHKVEKQYSTIHNIRQIAHQKTCDPSKITAQKPHENENQYTRTQESNDIGFNSIQTGQITMRGTRTDNQGHKRRDTRIEANQDTQGGTYIDPYGIQERVPTEARREKTDGRGKRNRPSTTYGDRPGEQNETRRRNSEDDRHTTKYTREGTMEPNRWNRDTTMDKEPHRHVTATTHADPRTQANSIPQERRGHEQDLGHTQNTLQAPVGHSNHKSRTRPWGHSSGTRQDQEARPARYRTAQQIHKQETEDNLTEAQKREQPPSGQRNTILKHSGHCEHQHKPQNERSTHAPTPESTQTQTTEQNKTQRPNEQRQHHRHTQRQTTAKEQRRSTTPIEHHNRRCDKRGRHRQQRHNDKQPRINSNTGGNTNKT

SEQ ID NO: 997048 - protein, 69 aa, Homo sapiens
GGARCGWMLGLSCGYAVSAGHREKNIYTIREVVTDIRDKATTQAGSLSCPYEHAGSRSPLPGILCWLVT

SEQ ID NO: 997049 - protein, 102 aa, Homo sapiens
MITGSVQHALVDPSGLSLTSLAYCLHQTAVALDELREADGQCPVDRNLPEVEMVQVSVYDDEEIDSPLKPHPAGRKQVELEHTRLIRRSQPKLSLIKTSQQI

SEQ ID NO: 997050 - protein, 261 aa, Homo sapiens
  misc_feature (2)..(2): Xaa can be any naturally occurring amino acid
  misc_feature (4)..(4): Xaa can be any naturally occurring amino acid
  misc_feature (60)..(60): Xaa can be any naturally occurring amino acid
  misc_feature (85)..(85): Xaa can be any naturally occurring amino acid
  misc_feature (89)..(89): Xaa can be any naturally occurring amino acid
  misc_feature (113)..(113): Xaa can be any naturally occurring amino acid
  misc_feature (121)..(121): Xaa can be any naturally occurring amino acid
  misc_feature (207)..(207): Xaa can be any naturally occurring amino acid
MXSXREYTRPICHYTPTHLLQTPLRYIRHIVSPISFLVSAHLTAAATASGVSCSGGMRSXSLVPLVRRVSDAPQYRSRTESLRDXIASXEYDALHVVDTARAAMLTGRARVEXRARVVLAXAYAYRDTTPCCLARPPITTSHAQTGRIAVVIAYNRIYNRRASASPDSIRMNVAARTHVVEVYVATDARLITVLASLCAYTEVTVSXIAHCVATEYAHHVSHVRSMHTAYPVRLVQPCRRSDGVLATLTRSRRLIALRQPP

SEQ ID NO: 997051 - protein, 118 aa, Homo sapiens
LYNMPGNTLLKAPSAFTIMYNPKFQTLFQPCNLMGAMHEIEDFNTHANIDCSPHKTVQNTANEFALFAKASGLNPAHNQGFHELTPTSPPRSLKANNTHDTTLFTNADDNLPPIRLNN

SEQ ID NO: 997052 - protein, 149 aa, Homo sapiens
MEKVLAKMLDVLQELILSMLHEEKEVLKSRPSTMFGEPLDADVATVTGWADGEGGHYRKGTPHVRRWRYYNWRGFRGFLIRTFWPKFLGESQEAERISPLLRFPKDGQEGPVTKGIPLEGKAGNSLVAWNLGGMPKLQNARRDGSMDGE

SEQ ID NO: 997053 - protein, 252 aa, Homo sapiens
GALVSRERLGALNAALGPGGPVWSQGDAHPAHCVPDTFWHQNRALQARFDDGQVPEGGLHALACLQGPGVAPVLLLRADPRRVCLSNCSGPPIFDALSSCAVAAYATPASPASLGQRVYYTAQHCAAPPCALRLSHAAYGCSWPDHRGAEPLLRSRGLCGAALVAHAVRDPEHCLTLPCRYLRGGTGPLASRESFTHNDPEEPIALSQKLKPSANMTGRTTVPLGIRRTELGDLERELAENHKVARTSTETY

SEQ ID NO: 997054 - protein, 349 aa, Homo sapiens
  misc_feature (143)..(143): Xaa can be any naturally occurring amino acid
  misc_feature (156)..(156): Xaa can be any naturally occurring amino acid
  misc_feature (186)..(186): Xaa can be any naturally occurring amino acid
  misc_feature (209)..(209): Xaa can be any naturally occurring amino acid
  misc_feature (233)..(233): Xaa can be any naturally occurring amino acid
  misc_feature (307)..(307): Xaa can be any naturally occurring amino acid
  misc_feature (316)..(316): Xaa can be any naturally occurring amino acid
  misc_feature (321)..(321): Xaa can be any naturally occurring amino acid
MTVYASSYNAVLVSSNHTHEQAIYASPPCKRYVLVEHNIANTLTPTHSNHTISISSRKSRRTHTLPNHTWHPNNRRGQRRRITYLSAYTLRLAHAHPVVHNTYTAVHHTIHRCHNISTTRLLSTSSPILLTAHATFKSLSYDXTLTPTYTTTPHVXTSSHAPARHMITAEHRSTPVFSAPSPTCTXSPFTIISRSRSPTTQHPHSPHNXPTSPPLPYIIDQHTISLIQSHQSXRYDQHTTQYGSSPPSTNRVPPLQARTSTPVPLYSLILHAYHYPHAPQTITTSAHTETRNTLVRHYSTPLAAARXTRHRERYQXKSYAXSTTSLAYSSPKELTLTSADTSTLTSRRS

SEQ ID NO: 997055 - protein, 87 aa, Homo sapiens
GGSCVGSMGVVMAPTVMTDGEQRIPTACAAFAQQPAGGTSSAWLWEESAVPSAFGVTRGVAHWQVSWCLCLRTVPSSCAGGNSARGP

SEQ ID NO: 997056 - protein, 321 aa, Homo sapiens
  misc_feature (135)..(135): Xaa can be any naturally occurring amino acid
HNPPLPPHQKTTLTQTAPGSCLHSDLDESHTIGGSPEAHAEMFWILQTHSFHRDANSLTNCATATPGTHTHHLSNPPSRFPSDPSATPTLLPTLHPHLNARTSAPAPADTHRLILPHASRPTRTPLFSASYFRPXLIPNPISPHFPYLPAAYTPYHDTELSRPPNPTLHTTTDPPTAPSDDPSLFLIYQLLSHPPSPSHACTRYIRPRIHRHPTHRHRASYNPTSALSAISSYDFDTAHLNTSHTRHIHPHSPLDTRFIAFARANCSRRIEIHITPRSRSLNRTPFPPSRPTPSRTNTYTLIIATPRHRHFSPFHAPHPSS

SEQ ID NO: 997057 - protein, 242 aa, Homo sapiens
ISRFLPGGGASCRVLSPILRASLPSSVPRLQASCSVADHALGRALTLLVLLRGGRGRAGASSGGLCPVVRCEPCERVHWSSARLRRSVRGLVREPGCGGFLTFALSEGQPCGHLHRALWLRAFVCQPSPELGATLRGLLDGRGALRHASGVSGCAPTLLPAPPVQGHASESEEDRQAGRCGQPVRLQQRHGWLIQVHPSIQRIIINPRKGCLRKAGYKVIRVSKHRFQNFLRVQAETDIGPA

SEQ ID NO: 997058 - protein, 68 aa, Homo sapiens
VTILQLQVWRWSPDTGTFLPAGLQCNGKEKANAIMEEVMSLLQPLSITQDLSLDNGQTSTFESKLECL

SEQ ID NO: 997059 - protein, 190 aa, Homo sapiens
EPKTGVQRGERTYPRRPAGFNRPPSQAQDCVWSCFREKRLQEARARKATRGPGGARGGQLLVSSVCDPPAPSSTTPHGRTARVPHVLNCTALWAWGTRSSQSWHFWLLARGWDFRPTDQETHPPCKPCPLRLLSISEAEGTDPADSQAHDLGHRTGSHVRLTREWTRDKSQGHLDDSRKQGLHEETTLTT

SEQ ID NO: 997060 - protein, 120 aa, Homo sapiens
KDVRRRNLGGRSRSQLGMRLLKVLTVWPMMKPSWLSRTEFSKRLLVQKPIWCHERAGSSWGPHTTEYCCTDDQHTIIQTDQETSTKKYSIHPTRPVPDRQRVSIRGYSAFYHTWQALAWH

SEQ ID NO: 997061 - protein, 296 aa, Homo sapiens
MGTAPDLACNFSLSQNRGTGGRGALVEEYRLAGAGPASRACTGDIDVYKAGGGHESIGPKENLELILTQRVEKCLEITGLTLVSGEETSLTPENRRHFLKGHGARFIFAFPALNNQRRGLVLHTMRQPHFGVREPRNREKTLEDGLTEPKGTEIAGRQKWQASLAKRASIAHGNYYAAMEQKAQVEPNDGGMPWKSHVKTYGSATRATRLNVRDNVNKGEEWQSNDHQAIKHNTQGNAENREPYITKRARREDTNRGDSRAENGDHSGADRNIENKAAKQRDEEGATEAERQRRAT

SEQ ID NO: 997062 - protein, 147 aa, Homo sapiens
GSDPSIVRLLECDASSAIQFCIDRPLEQLREKAAGLSCRVEAFALRGGGMPAPYRYLRLLEAPRSWWQCCCGTALGQVGCWPCLPSSLIQATQIPSGLTTWRRVPFHGPTSQRSVREHARGSAVFFEFSRHARRIIGVRLREGRHCA

SEQ ID NO: 997063 - protein, 230 aa, Homo sapiens
MTDAALHTLPLSLCQELAYLPASSCSYQVSSTCRPEQKKELSDIAHRNRGYLAKGILGADEVHRGSIAKRVLSIGTENTEENRRFYRQLRGDMVTDRRGTPAIGECHSVFHDEHSIRRRMMGVLSAQGESNTIGGRSEEGSQRVGPKGVVTPWHGTRHGRRLTNPKALVIGACSGARLLAHDSPCSDRHAELRPKLTVGVALKDWGNRSPRSERSDQSSGTHGHWFWGTG

SEQ ID NO: 997064 - protein, 102 aa, Homo sapiens
MWTSAGILEETVAQTGGFVVTEFGLIGIGDVNPFLDAKHQSDPGNPRYKTSETQVKTMVTRDVTMMDSMDRRERRNERQGQEIRGMQNEDQHLESIQTTSQN

SEQ ID NO: 997065 - protein, 210 aa, Homo sapiens
MFVYNNYIFLSLRTCIAKPGATDVDHASCGYPERGEAVLLLPPKAHDTSIKHCLYCRANLNLRNAENKRSNNMRVIPWVKIIQRLASVGLTRWNYDAASLKRGKILDTALNNSNGHVCAVPPSGPRPLKGSNTCIPQNQGMTQRKNMYQNRKKRPETRIGPRPWPTLHGPGPLPSITKLELKATVSNPTGLLNTRRSPVKPLCRPQHQPA

SEQ ID NO: 997066 - protein, 270 aa, Homo sapiens
VNRWSREMGLGRGACTASQAHLPRTATSPRTVIGRAPGSNTRRRREKKQKTERKRKRKKINEQHNKRKKRNRTRKKTEENNKKNKNRKERKGEKRRERGRKDGEGNGTEEERARSEEARGGKNAERAKRHSEKGNTQRAASKRQQQRRQSTRSEGRGGEKEEEEKREKEEEEKKTKKKRGEEKGKDKNKKEEEKRAKKKQREEEHKERKRRRGEAKQTKRRRRRREKEEEKKPEKGDEDKKEKRKKSRKRRRQEKRRQRENGGEKRKEKR

SEQ ID NO: 997067 - protein, 102 aa, Homo sapiens
MCWCEKPPVGEACVLSAARLPAVPTEDVALVVTPAAACCLAVAPATRLPAAADSLLTPTSSASNLDLGEQLGALGDVPEAAEAYPPEGAAKLLLDTFEYQAW

SEQ ID NO: 997068 - protein, 103 aa, Homo sapiens
MALVAKSIYAVRNTLKMRNFILWHTGPGILSMAEMLEPTQMVPSFSSALPMTELVGWQACGVMANVKEGMTYCGRPWSAIGSRNGKTSKKITIADCGQTSNKL

SEQ ID NO: 997069 - protein, 76 aa, Homo sapiens
  misc_feature (25)..(25): Xaa can be any naturally occurring amino acid
  misc_feature (30)..(30): Xaa can be any naturally occurring amino acid
  misc_feature (55)..(55): Xaa can be any naturally occurring amino acid
  misc_feature (75)..(75): Xaa can be any naturally occurring amino acid
MTAEATRKERGQDLREGNKPERGKXRAYTXDGGENHATDQRTTDDKRTAQSAPAXNTRTAATERSSDDTRREPRXA

SEQ ID NO: 997070 - protein, 181 aa, Homo sapiens
PTATQGSLLPLLKLKTHERQAIHKAKEGSGFATECPQAYIHIEERSALSPLAFRRVRKTLQYSRENYTNVSSCNELLHQEEIDSLTTYAIIQVSADHCVCALQDNIRTTTSYTLCTLVDSIKAYTTHQIKAALLKKHLMTVECARKGLTSPEFVPDGVRSTWHHGSSWLLIDRCLCDVANQ

SEQ ID NO: 997071 - protein, 153 aa, Homo sapiens
MGQQTAGGRVITAIRAGPFKGLSPRGPTVNRPGRPKSLGARGSLRTRGAEFFGKYKPLDGLLSLKKRFVQGGPFLDGQWARVITLGTNHTGKNPRKKGTFKVVTASKRTLELSVCGREFRKAPLNTLVVLPTRGKSQVKSGTTVHSFMVQTIR

SEQ ID NO: 997072 - protein, 67 aa, Homo sapiens
SRGFCRFPQSLDTTVLHRVHHVCEPIVPLLVLSHYTSNAVAILVIPYSTHRGNILECLAHDYCKISS

SEQ ID NO: 997073 - protein, 339 aa, Homo sapiens
  misc_feature (17)..(17): Xaa can be any naturally occurring amino acid
  misc_feature (38)..(38): Xaa can be any naturally occurring amino acid
RRVRLPLPRRVRYLGKXVMYLETIFDCILQQHCGGSGXIGGERSFWIGLNDQVLLATGSGSVVNLLPSPMGEEGPLHAPSLERAVFWFIYKGEGKQKTVGEPNLIIMCVPEYSKYNRPYGGPFGNLSPINSEDVANMALYENKTGRMDWGNLCQQCARETGSSRRGLATLIYCLVLLLPDYYYELTPVASENAHPADISSDVLQLFMHLTPPARVFICRNVTWFVQPVKKPLYSAFVVPLGMGITQNGTCECLPPQTSGIEKVTHRVGSEDRNHTIRHWSAIARHFVHIVDSKNTGERSPCFGSATSHLALHRTPHYSCPASRLFYSGEGGTRKLTQIW

SEQ ID NO: 997074 - protein, 390 aa, Homo sapiens
MTSPGAHRFDDILLVSCPGGAVDLSTAGIPDGLCIYLTLYLGLLLVLQMSLLGGLLPSVTPVRWTCLESWCIEGILRRLYSGLNEVLGLLLYPLDKLLASFDSTEGTPDYLELAVIITFLISRHPLSIKNASRDHVPYPQPRKSLQLCTRHMYIIARAERSLGTCRTLFLNMFAQFRHRNNKGAENVELGCNSFGVCAFNSSTSQGVNYLCELYPHSMDARGEGTLIYNTWYGLNARLIHPRYVCHLPEVRQTSPCVARDGNPPSSTHPSYIHTMFDHTLPSHSTALIFLLPRQDVCKRTSGTTGLVAHEVLLAIARHLIGDLAAIALQVDRFAQHTPTPATAGVLGGGTVTQLLGTLSPLGLGPRSHSQAPRRWAISSVTRLGQDTLFT

SEQ ID NO: 997075 - protein, 99 aa, Homo sapiens
DKHQKHHKYHKHGKHSSFSSASSCILSLLVQALGAAKQVTTEANATTQSQKHQDATIDNRSEKKDKRKTQTNHNKTPNKQAQQHQNRKTAHRRRHQSKH

SEQ ID NO: 997076 - protein, 223 aa, Homo sapiens
SGGRTGECGLGREMSCGLCLGPWFCTYGSLCHIPCCLRESGLWVTTWNGSSGEMDPQPVEEEKSYLRAPVRIAIWIELLGKDQMQVVSLNGTQSSNLGPEYAVSEAEQPPRDRINVRTQGPYGPTVGGDLSCYHVDRAPVSHIYLALLLILALPTAQRHTNTGCSLMAMADPAAAEGPVKRKAASVVWWPQALRHLSLLVHCWEESHEMNIECQSLWAGGFGL

SEQ ID NO: 997077 - protein, 95 aa, Homo sapiens
ARRLHRPECGAAPDQPLDLNDSSIYSQASLDNTDDEQPKQPIKTGNGIENSAKHRCDCSIYSLQSLLRVSPFITSMIRVRHKEFLDHPENIDRQL

SEQ ID NO: 997078 - protein, 334 aa, Homo sapiens
PNPLTPNTKPPSGQTQCSCFYDRSRTPDRIAYYSSAAHPPGVQPQKSPYTGAHTQAGQIEGQMTNSTSYRPAMEHSSRKLHLSSLNRIGLSLLQPAYLSPRLRPDHLSTISSDIGQRPTTQSTRLLTSHGHTTRTRLVLIRHSKHHGEKLTTVKKLSPRHKLVIRYYIYSYCHLCTLNLCNCASHTILDDLIYYETRILHYILLQIHHLYSVDHPCHHASTPRRSRTDLENKVDFDMSGLKDVQCRKLIDRQLNGIIIITIMKPRDYLINAPINTRQTPNFITCYSHIHHEDKYDYAHPVHEEPPTIEQSLLHHPPTSCSLYGQETYCTHANFD

SEQ ID NO: 997079 - protein, 303 aa, Homo sapiens
  misc_feature (51)..(51): Xaa can be any naturally occurring amino acid
  misc_feature (88)..(88): Xaa can be any naturally occurring amino acid
  misc_feature (181)..(181): Xaa can be any naturally occurring amino acid
  misc_feature (197)..(197): Xaa can be any naturally occurring amino acid
  misc_feature (215)..(215): Xaa can be any naturally occurring amino acid
  misc_feature (234)..(234): Xaa can be any naturally occurring amino acid
  misc_feature (260)..(260): Xaa can be any naturally occurring amino acid
  misc_feature (278)..(278): Xaa can be any naturally occurring amino acid
MKRPRTPAPPLPTGVSQHTLHGTLTAHTHSFTLRLSQIASENVISPNFLEXGYLLLRAFLRIEKSTHRRGVPDIFTHPYTFSATWCVXHTCGYEQYIYKCDDVIPPRNRRFPSQAVSHLHLLRAYHSLNAYRLRLCNNWPRFCFSLSLLYSDLIVPPPSLKLARYSTYAHDEPTATFSQSXPHVYFHIRQCRSAVEXADVSHILRCVTGYVICDXRELSRYRQSSLRRSCFSVXTVTRIAERDPSTRSNISTVQCRTRSXTNENTADTCNSVAVSDIXDLLCSYDSRAADSWRCTHHVSRYDV

SEQ ID NO: 997080 - protein, 110 aa, Homo sapiens
MTELDKEISTLRSGLKALETELEYQKSQPPQTGDKFASVDSHFITLSTFIFSDDEDLLAEANDLFTKVPEILLGKRLPYLTPSEISGINDAINHTRDINPPGCPLSETKL

SEQ ID NO: 997081 - protein, 99 aa, Homo sapiens
MPSLVAVVHIVTKELHDTLLLGEERIKIYQSLSQTLNLLTKLSTLLVTIITAAQEPIESACSPSNLGTCIHGFNQQTEDIRDKSLKDGYYNYTIECDNS

SEQ ID NO: 997082 - protein, 257 aa, Homo sapiens
AHVTVSRTAAPARPQPLSGHLLASCVSLASSLCWFCKEWLQGPLSLRKPLLTRQRICLMRLRATGEDENILFSPLSIALAMAMMELAAQGSTQKEIPLSLRIIDSLENGIDSPFSNDISHIPPAQHTHPRHAPRLLLASRKLDPPGNEECAARCQEIRPPHPTVTRTSCPPGASSPPTHPRRARLPRPPTPVLPAVSSQVDIPQSTPHSPRHHPPPSHHRHITAPPRVRSLDDPHAPRFPPQPTRLSIEGPPAEQPP

SEQ ID NO: 997083 - protein, 106 aa, Homo sapiens
MSLEIIQQAVPVQVLTLILYPENTVGQKDEDRHVGDLGNVTADKDGVAEVSIEDSGISLQGNHCIIGLILVDHEKADDLGKGGNAEGTNTGNAASCMDCGDIPIPT

SEQ ID NO: 997084 - protein, 142 aa, Homo sapiens
MEFQTLNLTMNGDKVRKFIKAPPRNYSMIGMFTALQPQRQCSVCRQANEEYHILANSWSYSSAFWSRLFFSMVDYDEGTDVFQQVSMNSAPTFMHFPPRGRPTKADTSDLPKNWICSCATSIVDCCHNGWSYSGFLDHPTTV

SEQ ID NO: 997085 - protein, 279 aa, Homo sapiens
  misc_feature (18)..(18): Xaa can be any naturally occurring amino acid
PSTSRRAGGRGAYIPTLXAVREDQRKPYTREKHFLGLEKKLKQMEMRHAQREQELQQIIQQTHQVVETEQNRDVEKWKRLVQLKNGDLEKRRPARHLAPDGFRELRRYVCEAPLVYSLSAWGLGTASFTLSRHLERVCRVRLPVRHVGPLISPFADGCWCVVVVRLCDVRKVAVERVFVVWILVSIPACARASLLVITRTRSRDVSRLAPPHLDTECVRAADCVIRRAPGGLCVRRSVPCIRKRTLSAALGRQAGSARSRVLRSRLRPVRVVSPAVACR

SEQ ID NO: 997086 - protein, 32 aa, Homo sapiens
MSGRVRGGVGDNGSVEMAVCEMRCGGVDQVSR

SEQ ID NO: 997087 - protein, 76 aa, Homo sapiens
  misc_feature (16)..(17): Xaa can be any naturally occurring amino acid
YMITLTTTQANNKNTXXALTLFSTTEPLTCQEPGEDEGIRGSLPPGYLVVPSGAYILGRCTVANKLHDGGLHGCKL

SEQ ID NO: 997088 - protein, 109 aa, Homo sapiens
  misc_feature (1)..(1): Xaa can be any naturally occurring amino acid
XLRGDNSLDPNDQVAMVLQGLAIQKLRSKIHKKVDRKASEGRKLRFHVLSKLLSFMAPIDHTTMNDDASIYCTALFMASSTLPTKATGIDIAHLRHPLGALAGAADGPN

SEQ ID NO: 997089 - protein, 80 aa, Homo sapiens
VELSHSDLFVQYSHSPAYLLEEMWRSAASILHDQTPECFGIVPHCLDEGTVRSMVTDEFIGGDWEKAMKEHKTITNMSIE

SEQ ID NO: 997090 - protein, 201 aa, Homo sapiens
MRADRLQGTPLSIKNKCNKRFYLIKNMHLEERITLRRTDFNMMGLWRALDWDDGVSFPYDRCYITTRIAKTGLFLFDEVYGPVNRDHKDNAESWKGVSLRMLDCHRTFMTGDHWECVILFVGQPTGCGLIMKVNSGRRGRGSIVRVRRDRRAEGGEPRVRVGSCETQCDRDRLGKSEGRVEEMRRWSCCDERRCSSNETHG

SEQ ID NO: 997091 - protein, 229 aa, Homo sapiens
MNTTSERFQCLTRIRYHGRGRFGFMEKVYSYYFLKNRSIIIQQYQEHQSYTVSLFLICVLRRLMIRISIDGRLLVSSYASLFQSRSHPARKRRRTHSICEKSFLDARRAVANYAEMCYIVVNKATPNSDTPEHSTVPLIHYFTGLDFKFSPPPRTHLAPAADHHLRPSSSFLTHPYHADNNRRFTGRAVAPVPTSNVISTRPHDYRSASPSPVFLIITHLLTQHSLLIP

SEQ ID NO: 997092 - protein, 166 aa, Homo sapiens
  misc_feature (50)..(50): Xaa can be any naturally occurring amino acid
MCYGLRICMAKYGSVAIVVRREYDANLLCPTTSYNEICDVHNLTWLRHDXRGVRRSVEEYKQINTRSFRSEYPARRIDRETDSVVLQLWCNESVQVVMTRPIESLTGALRYRICHTQSHMTQCVFVEAGQGAGGIYNIARDVVKFPHRIYNVFGMETDDGVESMLP

SEQ ID NO: 997093 - protein, 111 aa, Homo sapiens
MPPSTSINTHVTRKGSYLPHTPLWPLNHHHLSPPSPLLPPPPSLSASHVMFFQFFPPLSLYYSSASTSQHSTTLTPPPPLLSLLSPRRSGDPVSPITADRRSHPHLSTSTL

SEQ ID NO: 997094 - protein, 103 aa, Homo sapiens
MSNHVSHRPRPGKPYSHPSYYNSAVERYPASARLRNIRTPTLFVGSTAPPRAPPLPRSFHARDRDAIFPYTSSARLSLSVAPPSHSHTPLHRPQGAETLTSHP

SEQ ID NO: 997095 - protein, 69 aa, Homo sapiens
  misc_feature (54)..(54): Xaa can be any naturally occurring amino acid
MPEYTQYRTRCSVCMHARDTIQNEEKVDGDVMDEHIKVVIPDRDVVFNEARLTXTSSGCYICMGQGVWR

SEQ ID NO: 997096 - protein, 74 aa, Homo sapiens
MYRILLYNHKSVVPSAVLAALTDSHGRCGVHGYVERDANARRQVFSLRTQRIVTPSLSRGSRRAPSDGGMGRPR

SEQ ID NO: 997097 - protein, 118 aa, Homo sapiens
  misc_feature (94)..(94): Xaa can be any naturally occurring amino acid
MKIGKVPSSPSMSRGSEPVLKLLDDNGNIAEELSILKWNTDECRRIPELIRRNAYKSWLNLCPILVGPYQVGDFSALQTPLVLPLFHSSFFYLXNLNLFSDDKKRQYGSLIYGGVCQG

SEQ ID NO: 997098 - protein, 149 aa, Homo sapiens
MTTEMMLWIIGPKEEEVVVLFFVADGALTSKNQVAVLTGLMTHTQGHGTCTHTRQHHTPPYDTQIIIQHYLQLNILSLVLFLYLTSTQCMSSVSLHLSITTHYKTITTPEYKQEIIIPVIQTPLNLYLDINASPFIRHYITKSHNITNN

SEQ ID NO: 997099 - protein, 192 aa, Homo sapiens
  misc_feature (41)..(41): Xaa can be any naturally occurring amino acid
  misc_feature (157)..(157): Xaa can be any naturally occurring amino acid
  misc_feature (169)..(169): Xaa can be any naturally occurring amino acid
MSRTGSLIRRRCLIVPRYASSTSTSSSFRRLSISSILRIRXVLIRVHRSPSFVYRFSRSPYDLSSFTFTSSASFIRFVPILSHSSLLSAVGSYCHCRILVRRRFVSYIGALLRLSLSSSVFCRWDVILITRHIVYAYRSRYSPPYAIIISRRWYRIXGPVSIHSYDLDXYVHMFSRDWAFHYVLILLSHGST

SEQ ID NO: 997100 - protein, 106 aa, Homo sapiens
MITPACSREKPDTTTLMVHIVPPLYSLAVHLWPSWRNEAVPMILIKYKTLQIMTNIYLLNLSSFRPAIPPHTFHSASTMSEGHNCVCAHGMCKLLFRVYTHTGLYR

SEQ ID NO: 997101 - protein, 178 aa, Homo sapiens
  misc_feature (5)..(5): Xaa can be any naturally occurring amino acid
SGTLXRGVSVFTLCTDLRMGLANLWRLHTRTCPCLKTNTCTVALFPSQTLYPRSRWTAPRHEEGILAIFATYKFCKIIDLLKRFLLIIPTLCNWKGHCDPRVSNKQMYLTPSESFSHSPWVRSARPRPRRPRPAIADRTWEQLLVPPTAPGITTTITPRPTLLPLDLSMWMVFSDSNA

SEQ ID NO: 997102 - protein, 211 aa, Homo sapiens
MKCQLDRTINLSIYLGPIPGSLFCFIDLFAWLGTSLVLYYLLYTEHADLNCMCWRIGPCLSARPNRCTVGTESSPSASSPSPIPSYPSPSPTSVDRPSHRNFLQPTPLPPSPVPASFHLSLSSPPTLVFFSFPPTSSPFSLHIAHRPLSTYIRPFWTRARTDRVCPPSFPPSHPTVQLTYPSARLSLTPGFFVPLDSLMLLSHSVTALPSR

SEQ ID NO: 997103 - protein, 111 aa, Homo sapiens
LMLRLEAMILDLPMMDRWGESSKLKNRTVVDDLLLQKPFHKENMEKVAHIKLQTELLHREDALYRWFHLISMDAYQRHTKVVNDYILYYGGKNEDFKRLVEYDKTDLHVIR

SEQ ID NO: 997104 - protein, 168 aa, Homo sapiens
  misc_feature (3)..(3): Xaa can be any naturally occurring amino acid
  misc_feature (5)..(5): Xaa can be any naturally occurring amino acid
LGXLXAAEIPVKREEREPAANPYDLQEAACAKPPSAGASYSSANRSTRHSPPSEGAGVCGAEWAKHALWGWHRQALKLRTCSPQRLPAALGPQVPGPAFVLRNKRPGSPRETSPDALSRNSRTLLSHQPASCGNPVLVPLIYHFVLFFCDSCGLHCAWDLANPSLILG

SEQ ID NO: 997105 - protein, 233 aa, Homo sapiens
  misc_feature (166)..(166): Xaa can be any naturally occurring amino acid
MLSLPLWLNLDLPGSAPHTLDLLKEDARQHHYQDHVPPPRPLPPNRPTTSATSPPHAAAPVSSQTVPPPPQSCQSPHPYSTLNPYPTAHTHAHLHRHAPPIPPCCPTSIQSRATYERYAPPSLFPPPLSSTAASISCQSGLRHIKSLYSPSLIHRPPHRSPPRPTXTSPTPYHFRRRYPTTLTDSFMLLHHIPYISHPLMFALPLPPHPHLLHPPFTNSPIDHKHVLTLYIPS

SEQ ID NO: 997106 - protein, 206 aa, Homo sapiens
MNTKRQKTKTKHVPRANPSSVCSLKQLIDITKESIRSNAKINPKNNRGTEGKEQRFQTLAQALRATRCHDAGGGARQGRSRTECEGQGPRWRKHRQDTREHDEEDATPTTTADDTATKRMNQTPILVPGQPSHDTSRARHHVMSEAPDERGGHTGWTATKNKANQTPPETTMDGRERIAELRKPPTTKRKRRNYHGKNGEEIRIEL

SEQ ID NO: 997107 - protein, 128 aa, Homo sapiens
MLYFTSYSEWKQLERLHHEHMSAVKRVLSSLQNCESNTPFLFMNGNENGQKSKGFISKPLTLKYKRPSLRLGERYYAPVFLCGRSNCQPTCLTPYTWGFLHADSDVISLKGWDHTCILYARRGITPRN

SEQ ID NO: 997108 - protein, 244 aa, Homo sapiens
MPVVSLRPGLPGARPLDPCICVIFQTVSEQFAYEECSADTRILPYHSIYLTLYGADARASISHGGCMIKPLDNVPSSNRLIAVMIQRSRGKLKGSIHEYNNTIRCVDTVCSTEHVPVDLSVESVSPSFSVSAPHCPTPIVPPTMYTLMSSRFTATLGGLDASRTDDDAGQGQRWITVVLFYTSGCVLASSVRCIAVPYHHYVGAAQCLHVQFLARFSLLRSTHPLSSPALYPYPPGSSAHRGMA

SEQ ID NO: 997109 - protein, 141 aa, Homo sapiens
  misc_feature (119)..(119): Xaa can be any naturally occurring amino acid
MRNFLLNRYVDVCAAPSPPRFLLSRSTDSPPTCRRYKSHSISIAPLSHLPPRTLSYYPYSSLYPRSAAFLICRHSLRSTSSIFYGVISRPDVISYLIPHRHRLSFPRTCARSPIVYREXSFTVPHIDHYLTHPSLTPIPIS

SEQ ID NO: 997110 - protein, 249 aa, Homo sapiens
MPGKILVHPSDYFISHRPDLKDSYTTETHIERFFLQMGTDSLRILQTPTDRLSLQVTNPPSYLKGPSPYSNYHTLGPKGPPHVLAIRCFTHTPPLPTTHLTPPITNNTRTLTHHPLSPDLNYPRTYIHPRRPTRHSALRNPTLSKTDFASQRLALHLPYNILITDQIRYAAPPTMDDSLPGLTSLLRPPPYYTYPHTVLTHPPLPPLRHPTHPPPLPLDSYSHYPRLISFPLTSPSPTRHLLLFYTSVP

SEQ ID NO: 997111 - protein, 250 aa, Homo sapiens
DVTTNCAPPGQTQEHLRVYSKFLESASPSEKQTNFMTKLGSISCKSLKGGNISYASPASSPLLPPLSHLLSLQSAPSITHLPISQDTEAADLDSLLGAELGKGQLTLPRTQDHTVWLQRETNPYQGLGHSKEYNPTFFRWQLDKPGAQYNSIENFIAPRLIIGRSLGAQVFLGSIHATRPPTWDTGPWITVTTRCYTTANLPESHKVLAIGYQQNQKGLPRWLRKLYQQYGNFRASELGSHVPAHTPDRT

SEQ ID NO: 997112 - protein, 116 aa, Homo sapiens
MHKIIIRILVASPALPPFRSREEVTSPLSPAWPMFSAPSSPMPTSSTSSDSSAVSTPFRKAKALYACKAERDSELSFTGGTAFDNAECPSAFTAIFTATPELQAPSPLTWALPLVV

SEQ ID NO: 997113 - protein, 248 aa, Homo sapiens
MFLSKLCSLAYAHSQQPMEQDHLHTGRMFGDRTRIPESNYPFYNPREQKSSLCYDAELKALRDIISTQRSASCLRTQAQIRMGSQICLEKIENNKVRLQLENRSSSSRRRAAPAADMSPDISNTATYPPRKHKLEPLPSYRAAAANTPLGTIDTNSVSQHGATASSIARARHVVALQRHTPPPLSRTTRSCQPRAHCCNYIPPHRQSRIWRWTPAQPPARLGPDLATLRPPRDSLCYINRQHACLDVY

SEQ ID NO: 997114 - protein, 123 aa, Homo sapiens
  misc_feature (5)..(5): Xaa can be any naturally occurring amino acid
  misc_feature (120)..(120): Xaa can be any naturally occurring amino acid
MPHDXPSTTYLSSSSVASMTQPARRRYQRVPHIFSQHVPSARPRISTLQDPSRIPATSQHATFPTCPRSLADSHLSHSDSSPAHRSPSFPTTPDRTETESRAHAIAHYDPLFPHSSYPVXPQS

SEQ ID NO: 997115 - protein, 69 aa, Homo sapiens
PISVIAITSPKKKSLSATTLLSTTRYRWNLTLSPKLESSGMIWADCNLHLPASTDSTTSAYIVAGSRGV

SEQ ID NO: 997116 - protein, 67 aa, Homo sapiens
MCPHSYSTKRPTALSAQRTPRIPSPPRSSLQPYRSHKDDPDPGNHEPETTTAQHQQAYPAETTPHSN

SEQ ID NO: 997117 - protein, 69 aa, Homo sapiens
YVIFDRRSDSSADSTSVLGQRPERIRYHGRGRFGIMEKAYCHYFVKLVEGPPPSPEPPRTAAAHAKEDI

SEQ ID NO: 997118 - protein, 228 aa, Homo sapiens
  misc_feature (50)..(50): Xaa can be any naturally occurring amino acid
  misc_feature (99)..(99): Xaa can be any naturally occurring amino acid
  misc_feature (104)..(104): Xaa can be any naturally occurring amino acid
PQHACFRTMFSMIRAPPGPTPVSWHVFCMQPTSFLAFMIFMCWVGDFFPXWPRLEPKQYPYNNLYLERGGDPSKEPERVVHYEDLRRLQGLRGSQTEDXLTPTXRGRAPPIIKLIACKLLKIPGRLWPHVGELYCPLPFSDRFNPCTLRYWLRCSSVYWPTARGPGITPRKLTLCITPLNGVSRRAPPIMIPGNSRVSPTLAMPPCRVYTPEPVIEPSPREERPTFRI

SEQ ID NO: 997119 - protein, 131 aa, Homo sapiens
MSYLLLFRGKESPPGALPPPDSMTSFSSISPNPPPTPSSPPTQPSPPPYHPAPPPGPPFHQVYLLTPSHVPWMFSRSLPAGSYPPPSRFSPFSPASRPRTSGSPLRILPLRSALLDFLLFSHSPLINPLRS

SEQ ID NO: 997120 - protein, 266 aa, Homo sapiens
MVDPLCLNICLYWPRLSTNKLIYDSPYYSKGSQKWPALSSPSVTLQILETWASSLKAEPGLHPNQISPPACIISRYWTIQTERGNVLGLFLNLMERITLLPCFPDLELSVPVSGPWPHKHGLAVNAIELGTTLDVSCHDLAMIPPSSSKRPESLLAALTAPPFVPACLTRRSINDSQTPAHAPHAPPIHPPRHLPPSPHSTPLTTYNIAIPINTPVTHTHFYISTPTTLSRLPNTSNVIPHSSPQYQIFSTHLTEILIPHPSPPHS

SEQ ID NO: 997121 - protein, 89 aa, Homo sapiens
GHSMKGRAGAPSAPGLTSCLSYLRVLDHPDGEGNALGVLRNLLWPDPTFYHASLTKNYGYVYSGHWRQEHGLALHAIEWEPPWMYLNRV

SEQ ID NO: 997122 - protein, 281 aa, Homo sapiens
GTLHTTIGSSYQLVDHWVIPAISAVGDGLMMGYTWERTEHLLTRHPQEEPALDTGQKKPLLTTSTDRSLASRALSVLRLRVSLATVETTQQPLPFTARQRASAPFHRSAARGGAPNRDAHGPQDPAFQESRCSPHSPLWPRCASALGSAINDHYRRYIQHVPQSPPTLQPTLPTLLNLPPPHSCYTYFSQTNRSRRSPTPTSFHGVPISVSAPAANTRRILSRLGPGNNPPHPPIKFVNNHYQLHHNPPPMPYPSHITNPGRNATPKKARDNVGQSLSRND

SEQ ID NO: 997123 - protein, 58 aa, Homo sapiens
MIYVYTSSTYTHAHRPSLPLPSHHLTHALRSCITYDRHERQSAHASPCSSVPPPPTHP

SEQ ID NO: 997124 - protein, 107 aa, Homo sapiens
MPPSYTTLFGPHPYQLLPSHATPTCSKPLLFPTVRAISPLGFYPYPTNNYTLSSHHTLVANPHALTPIPLPAPPDQTHSNTPHTHNQPPSSILTPLNHRLHPSDPLH

SEQ ID NO: 997125 - protein, 91 aa, Homo sapiens
SELPRYRSIMVDFEKLDDYTSAFQGHDVGFCRLSTTRGIAGAEGFARVDRDYVLKSAQLAKAGGCKHFNLLSYKGGDKSTTFFISTSYGRR

SEQ ID NO: 997126 - protein, 133 aa, Homo sapiens
SYKPHLPPPPPQTTTQFPQHCVRVLLLLCKKRWWVVLSTFWGEGGVMTTTDLTTLDQHEEYHKAGRHHPPHTQNPFYIPRPSCTETTITTLSYASFIARRGRSPSSHSPKNYNIPNKSSHSPSPRYSAPPSPT

SEQ ID NO: 997127 - protein, 126 aa, Homo sapiens
MKQDVTMWPCMDWHLLVQEIFLPQPSKYASDYEPLLVHLRLMKRERSSFDGRVLYYQQNAYDLGWQLKMAGSTVCTPTTLCYSGSNYEEAGAFFFFLVTEIDKMTPFVGPDTLTYTGLQEPIATIC

SEQ ID NO: 997128 - protein, 113 aa, Homo sapiens
  misc_feature (3)..(3): Xaa can be any naturally occurring amino acid
  misc_feature (7)..(7): Xaa can be any naturally occurring amino acid
KKXTPPXPHRKNTNHKTKILFSKSTPNCFQLHYEEHSWKSGLLFVGGYEEYNGNKPFFIKSIVEGTPPYNDGRIKCGDILLAVPGSTTSGTTHACSATLPKEPNGTPITPIHH

SEQ ID NO: 997129 - protein, 296 aa, Homo sapiens
MLPSPIALNNQTRSLGSHPPVLLLLHARTFYFVFFYPFPIFGILIITILLVQFKSRNSSKNSDGKNGVPLLWITEPHLNYYTTCLEPSVLIIHPLARLLTPMMPPPLEATAETSLFLPCAMEHPTAVKLLQPMPARISAYTAPPPSCGPSVTRTRPPPTIHPILVRSMLHAKLNVPTSPGGPIPIQYPPPNFPAIRNASRSGFEPTPYYSPVERSITYPYLTACQITYTSYSSHPQLAHLPNATIIIYIHLSVDPFDRPFHTLIPRARFPPYVPTCSPAAAATTPLTVSCVATQPA

SEQ ID NO: 997130 - protein, 371 aa, Homo sapiens
  misc_feature (198)..(199): Xaa can be any naturally occurring amino acid
PVATAYALLDWDWNGHHQKHHSYFCRDWKQGAYCPACQGSGQTGGRITYKGFRLWTERGLLRDFVDPLQLRAVPQTTPPPSVPTGGTDPPVHTTDLATIKHALHQHSRRAVTEDTRLCRVCLDLLREARDVVTLLLVRLSRALSDRPIPCRLLRLLLPPATLYPYSYIAPAHRARRPARLDLRHMRTPPRLRSRARRXXSLSTVASAIRQRSAEGERDNVEPLRVLCSGVTAAGRIRGVVRRLPQRRRLLHLPAAPRSRDHTSLALTLSVSSALSVTPLLSSRSVTGRLADVMRQFSSLLFLYLSVVINMLCECRRQTHGESSVRYRSVRFRRLVTNVPQLLYTLEDALLYYALCCPRACPPRHPTLPHFV

SEQ ID NO: 997131 - protein, 273 aa, Homo sapiens
  misc_feature (5)..(5): Xaa can be any naturally occurring amino acid
  misc_feature (106)..(106): Xaa can be any naturally occurring amino acid
  misc_feature (177)..(177): Xaa can be any naturally occurring amino acid
  misc_feature (189)..(189): Xaa can be any naturally occurring amino acid
NERRXGKGGEGRGRGRKEWSICFYLCFCPCGGFKGQTEIEVNCSTAVSDNKTVTGTLWLFILVRTRPHFIYHQVQTYKTHNESISFLYEINNILTSYMRPVTLFRXIDCQSALAHNKATHQGPPHTPPKTPWSTHHLTPPSHNTPPPPKSPAPLTPRHPTPPPSPPLHLLPYSSLGXKKKFQPNSSLIXTHPPPKFARPPHHPQPTPKFPTLQSPSSPPPSVALLAHQNPPTPESRTTTRRSTHATNAIIPLTPHHCLAPPIAVLFFLLNLLL

SEQ ID NO: 997132 - protein, 109 aa, Homo sapiens
MICDGHLGCHPTCSLCVVSVLANTSPSTHESYGGARLGTQIDGRYDCLRFCNPLLPRSVSPPHLHTPMHILYDHHHTFFQLVSHSTVRDSHRQSTPTLSPLCIVTTQPA

SEQ ID NO: 997133 - protein, 69 aa, Homo sapiens
MQVVTQRRRDGDTNRPDRRSEAGVVGDGDPEDLSASYTLYVRFEFILTEGQGRVGGYTPRRCPVEWREA

SEQ ID NO: 997134 - protein, 130 aa, Homo sapiens
  misc_feature (76)..(76): Xaa can be any naturally occurring amino acid
MDGDYVSFTSYRCKNRSYPQRRYLTLSSLVTCAQRVARILTLKAAETPARTLSPSLTRPPCMAFGRSSRGCRSDAXLTIAECVRRACHTVNSLSCREIRLTQDEQTAANLRHTFPPILHASLNHHLALEG

SEQ ID NO: 997135 - protein, 64 aa, Homo sapiens
MGSTPVSSSRGGALRAVRYRAWYSRGNGAHLRACGAARMQVRSAPRAARVVAVCVGPRASGARS

SEQ ID NO: 997136 - protein, 137 aa, Homo sapiens
GLEEQASESSPDTTAMDTGTKEAGKDGRENTTLLHSPGTLHAAAKTFSPRVRRATTSRTERIWPGGVIPYVIGGNFTGSQRAIFKQAMRHWEKHTCVTFIKRTDEESFIVFNLQNPVGKVNESRATFAEYSRMAHDC

SEQ ID NO: 997137 - protein, 179 aa, Homo sapiens
NQEVVDFEKLDDYGSLPFKVMMWDFCCLGTTRGKAGAEGFRSVLTRDYVLNSAELAKAERCKHFNLLSSGGADKSSNSLYLQVMGDVEAKDEELKFDRYSVFMPAVLICDRQESLPGEWLVRKFFGSLPDSRASGHSVPVETVARAMLNNVVRPIDKLMELLENMAIHDLWKAHGSLKP

SEQ ID NO: 997138 - protein, 234 aa, Homo sapiens
  misc_feature (85)..(85): Xaa can be any naturally occurring amino acid
  misc_feature (111)..(112): Xaa can be any naturally occurring amino acid
  misc_feature (152)..(152): Xaa can be any naturally occurring amino acid
  misc_feature (234)..(234): Xaa can be any naturally occurring amino acid
MNGAEPSKHSPPYHPYSQMRHTRPPYSPPPSPAHLWAVTQDTPHPIITRYAPPHPARHRYRARCLARPRPAVRDRARHAAPPLPXRPCVTIPAVLILPSTRGSMPRRPIHXXPSRYVPSAHRPHKTTRYSDTTPEKARRVRPLSPRVPPDYXPRAPDVYAHTSNTRGRGAGPEAGRASLRHRTVALTVRALYRMSPRDVPTHHRLADSPSLLTLLISPMTPPRRSTLSVDPPRX

SEQ ID NO: 997139 - protein, 166 aa, Homo sapiens
MWQHVAVMISHKITFMFILMKLPFKIVTETVKKSDLTTFILLLTSKLDFVNSSGLIVGRNSVYSFQFNTQHITDLSQNNPFLPESRLFLEDNTLLEKYNSGLGVPQLEMTHSDPPHWCCGSTLCQASITVRISAPCLGDPLTSQTVIRFSYCAPPELPMKTLSYSL

SEQ ID NO: 997140 - protein, 97 aa, Homo sapiens
PASAEINVCGGTRGGRLKDYPLLGFLQTLTPTFHFGLCLSQPLLEFLLEEEGLQSLLVVVNPVDKEVNVTLLWDELEELLRAGASHTSNWVPFDPKG

SEQ ID NO: 997141 - protein, 252 aa, Homo sapiens
YQVLTRSEREAPHLGHPQEDYEGNKQEKMLDEKMSPVEHRKDITKQDQVTILIYTYRTLCIQKLSIPQYTITRNQKEKNIIVAHAELTEYYTLPGGLITKSTGLNTTNTFKDHQNNSPIPTRKSHNRLPHHSNRSATAPADAPPYITNIVFATPPSRHRRTNNKPKKHALHTTRIHQKRYGGMENVLVTNTSRTSLHQSDTYTRPYASPNTQHCPHSSHKSKHHPYSPRAAITRSSLITPNLLPILHKSIIE

SEQ ID NO: 997142 - protein, 72 aa, Homo sapiens
NKPIRCIVGGSFESSVSSLKDHMMLVKSKMDAEVVKYLNDNKTSFEPDYDKMKDSMLDHMHEYSTTHSLGRS

SEQ ID NO: 997143 - protein, 103 aa, Homo sapiens
  misc_feature (4)..(4): Xaa can be any naturally occurring amino acid
  misc_feature (7)..(7): Xaa can be any naturally occurring amino acid
  misc_feature (11)..(11): Xaa can be any naturally occurring amino acid
KGRXRNXEKNXYLSQGNMPYDFEINKDNCTRGILTLGLQIYNELTIKLDEINKELFRLDKELDDYREESEEYMAAADEYNRMKQVKGSAYYKSKRKDCKQLNS

SEQ ID NO: 997144 - protein, 315 aa, Homo sapiens
  misc_feature (247)..(247): Xaa can be any naturally occurring amino acid
AIPHPSPHLQRTDEPRGPYLLLKREHRLTLKVSYREVQRHLESTDEAKRSLWNLYNTQRRGSAKQHPLNIEPRPFPIKKSHAPTTKNGPPFFSTRGPLQAHNLYSRATSTILHPLPTIHLRPTPPLLNAPPPLCAPALPHPPLPPPSPQTIMTRSQNRSPPNPPTTPPVMYCPRTTPPHPPSSATPEPTYTTLLQNPPSPPPHLPPLPPPHSPLATHPQSPRPQPPAPPRPSPLSLPLSSLTAHHTXPSPLTNHCARLSRSALAATHTTPLPHPPRPSTHISSPLTPAAPTRLTSSPLLHPLQYTAHPPPAPPHL

SEQ ID NO: 997145 - protein, 102 aa, Homo sapiens
MRCTTYSHFLEPLNDFTERIATQHILHAPRSPDLLETQLELAGGPWILEPFSEDYSLFLALYLIVGRNILTVMVQSLCGESKASRMPTAFLSKTLTLTPLKR

SEQ ID NO: 997146 - protein, 158 aa, Homo sapiens
MHPINYYIQVVLFIYNHLFKSKKAFQNKNTSFKSSASHKICNTLLYILPQTHAREVNERMMRKKGHLLARPDGRPPRIFCISTVLCLYSPRLTPAPHPSAYYSPHYSSSIQCSPSLFCIAYSSLRIPPPSPDRVRLQHCSSYLLTSTYSHLFIDAHVS

SEQ ID NO: 997147 - protein, 335 aa, Homo sapiens
  misc_feature (69)..(70): Xaa can be any naturally occurring amino acid
  misc_feature (314)..(314): Xaa can be any naturally occurring amino acid
PLSYLPLHNAHILNIAPISHKARNTATFLPSLPSCSTYLLTSTRHINHMNHSSIVSTPTSPTLNNTRYXXPPSHLHCYTTHRSPPPYHFSVANRSSGPPSPIHLRPPPRTLHHPLSIFPPVLLPHHTLLSSYAGHRPLRIPSTSHDTPYHTHSLTTYIISTILSTLLIPHISSPITITTPAPLHSHHLSLVYKQSLILPLTHLPTHPPPPNIPYHPLTSAYPPPLSLPPLPPFHYRPLPPPLYSHLLIPHPLPLTLLPSLTPTPYPSSLPPIPTPPSSPHSNISPAHFLFSLYNPPSLTSSLPPTPHQHTSPHXYISSTLTPPRSPPISSTDPSH

SEQ ID NO: 997148 - protein, 112 aa, Homo sapiens
  misc_feature (10)..(10): Xaa can be any naturally occurring amino acid
PIPTHTPQTXPPHYQPPWLEENSLGTRAVRSILPDHRGVETSLSHPPGQRPNSLTAGTSLPYPAGQQALPPTPLLPSPMITPAWERQLELGVSWIPPLQGLASNKGVAVEAV

SEQ ID NO: 997149 - protein, 264 aa, Homo sapiens
  misc_feature (261)..(261): Xaa can be any naturally occurring amino acid
MSKRTYSISNSKTYNSHLFILKILIIGYYPESVTERHSPPNYTHESRCGSDPSPWKHDIYNTPTPMAIVICSTLNSLCHYPELLRATGPGYQPIYEFILLSQPTMNIIDIEYNTLLHGHTTPPRPCHEPHSPTSHPPTPPPPQPPPPHPSLPSTLRPYCVADNVRHRAYHAASYSSLTFLSARHLTHTLTTLSYLLSYRPSPLNQRSTAVSRWVVPTSFTVLPSTMHDSSITMSDIYTSVNRVDRPTSRSWIVIISRIVTXYLV

SEQ ID NO: 997150 - protein, 56 aa, Homo sapiens
MASTALNRQNPTFFFFSARRTSMNHPHRLPPTTPIALAPPQQPRPPLHPKHSPQEY

SEQ ID NO: 997151 - protein, 219 aa, Homo sapiens
MFLLELLGIHNNYRTEKMGFNVLSYLRDLIYALKAVLCVGRIIGNFYHTNPCYKENKSHDYFSHAFTMLDQSSFCLYWNQAGQTRRVILERLSNLGRPPRSLGFGYNVVEEIQRGMPLRLTARIFPAIVFFWGLRIGIAYKDNSITTVALDRYMRWFLITMGQTYSQLGTMRGDKNLGSESMGTGLQILAERGSLIPRNLRVGIPFETYLFFCIIVGQK

SEQ ID NO: 997152 - protein, 107 aa, Homo sapiens
  misc_feature (20)..(20): Xaa can be any naturally occurring amino acid
  misc_feature (27)..(27): Xaa can be any naturally occurring amino acid
VVARCPAPRDPKPSPLEFYXAFVLEPXDLHRPPNWATKPASFSGGVGERHKTKVNFGMYLMHASLDLSSPCFLSVRSHVLPVLKENVEGHDLPASGGGSMLPPKKNF

SEQ ID NO: 997153 - protein, 81 aa, Homo sapiens
NFVDSGVWMDQQRALSPTGKIVRPASSTVRRRRYTMESRSGDQAGVQWCDLGSLQSLPPGERRSPLDFPGLVGTWRTFLAS

SEQ ID NO: 997154 - protein, 259 aa, Homo sapiens
  misc_feature (9)..(9): Xaa can be any naturally occurring amino acid
MKTSCCHSXCRKPCCCQSSCCVPVCCQSSCCKPCCCQSNCCVPVCCQRKILRLWTHTFTLLLFGERIYYGSLNHFFPHILPEAPKPAICFLSLLTTYLHGSHCFPALPPIFSLHTPPHPLRPPSTPPPPYFHPQPRLSINSRATHYHTLSQRIRPICKSPPPANLIKFFQTRNPHNISQKSPTQRHHRGRSRPRPPPPRTSSPPTPATRLQPPHKHPPKETPTTHLNHYNNISLTSNAYTISQDPDKTATYPDHLNANH

SEQ ID NO: 997155 - protein, 70 aa, Homo sapiens
  misc_feature (15)..(15): Xaa can be any naturally occurring amino acid
  misc_feature (20)..(20): Xaa can be any naturally occurring amino acid
  misc_feature (28)..(28): Xaa can be any naturally occurring amino acid
RSRITHPPHNPPDNXLLVDXPPCLEEEXRLKLLGSRDLPILASQRVRITGMSHCTWPPTSRKNETMILGL

SEQ ID NO: 997156 - protein, 364 aa, Homo sapiens
  misc_feature (1)..(1): Xaa can be any naturally occurring amino acid
  misc_feature (227)..(227): Xaa can be any naturally occurring amino acid
  misc_feature (314)..(315): Xaa can be any naturally occurring amino acid
  misc_feature (329)..(330): Xaa can be any naturally occurring amino acid
  misc_feature (337)..(337): Xaa can be any naturally occurring amino acid
  misc_feature (360)..(361): Xaa can be any naturally occurring amino acid
XQTNITDWVHENTWKGCSIHILLQIVRKDTPLRGMEKDMHIAQTNDHANRHTLSERTPTLSAYSGNIPRMTPPNHHKTGDILRQQDTRPPARHAPRRYYLTTHAQERPESIRENTIRKTQTTAGSQRSESADDTVTPLATRTSDPETSKDIAFTSHQARRCSAHPKYIGIPRGRIKDQNSTSRCIPSRTTRTRARPDKPRTQTLRRRENLTLTYPDRERIREEETQXTYNRRNPRRPAHDPTVTRLRARAWPSKRIVEARMQRRSGDRVIVRGHAHHSADRRARGHSLSSNTIRAEHYEDYDDRRACTRRIVRXXLTSRESSTICNATXXHTTARMXRHRHAVAHDLCIKCQRYVTAIHXXMKV

SEQ ID NO: 997157 - protein, 120 aa, Homo sapiens
SSDTHREGDGTPLRPSYRGEAGHPQPASPTPPEAQKVKPLLYFMATPPVHHDQRSHGDIRYVCNMPADTRNGRLDQLANDMTNVYWTGSECHSPLRYRMDTYPPYLSHANPQSGTPAKRT

SEQ ID NO: 997158 - protein, 97 aa, Homo sapiens
STSLTLFRDERRGVVFERYLRIGYCVCTFAVPAFRYLPSTRCGSGPTLTLRMQHEAQQRWRRSHYHTRRLECRAISPFDMNFPCTGGRAGNWRIIRL

SEQ ID NO: 997159 - protein, 267 aa, Homo sapiens
FNWKIIWPLSDNAQLGPSLTEKLCLELAHTSIRNLTLSNSQLSTTRNTTLLGLKWTNLTNLNLSYRHSHVDANHPFAWITQPHSHQLTHYHKPRSAPTITSSHPPPAPTPQPHPHHLHPTLFHSPSPHRRPSPPSSDDPQYRSRHTSRLKPITVGPHAFYIHTERQDNLPPPPLPLGSDPETKQLDPNAPAPDDVPPHFSSLPSPAPGFDRYTPGMQRAPPSLKVHTQHPATYIASAPATYVRAMSTLTQHIFYRTTLQLPPRLRAD

SEQ ID NO: 997160 - protein, 109 aa, Homo sapiens
MSGISKHKRFLNLSLSNSSAVHHQPYNSLATPAPPAHSPRAFLPPTYLWIVDVLPRPRLSSFSSSRFSPSTFPRAYRIYLPDPRGGPPGTNCVYHPPLRYLTPITLTPI

SEQ ID NO: 997161 - protein, 267 aa, Homo sapiens
  misc_feature (187)..(187): Xaa can be any naturally occurring amino acid
LLDTKLMASTQAFKDIINNTSLAELEKRLKETPSDPAKNEPKVYQVMTHPLNNSTRQATTPTSQALRFIVMDKDLMLTFEAITYYHEVNSTKARAPFFNAVSAATHTLPSTAASIWPSSIYSVATVDGDRHDRVVILIIYLRSPCRAGYIPPCHSHYTPGPRTRSPHRRSPTPHSTIAVSADLANVXEGVSIATFVRLPPATARLVLPRNDPGAFFEEKWNALDRCRPTRFCPRLAGSCSDIRKCASAAHEIRPHRALAPALQISSG

SEQ ID NO: 997162 - protein, 101 aa, Homo sapiens
IILMLQANWLLVPSMLATRFLELKLAIISHAVMTKVVLSKMLSTKPGALDKRLWLRALVIALLDINTGIKIRGIIPAIPFGWGTTHYSRQQQPCELHSYKT

SEQ ID NO: 997163 - protein, 131 aa, Homo sapiens
LDLHPHVALSVPITSPRHRPEDAAPRSTGSNGRSSATILTTTLSGQAVRSEWTSTGTLLDYIMNMTSDWLESSGRVFFVESEHECFSHFRRRCLNSAVVTFNSPVYHSTIFLAVPRHIRKDGIEVALLNAE

SEQ ID NO: 997164 - protein, 76 aa, Homo sapiens
DEDGLETIFLDRSIAHAWDYHGRLGQGPKGYIWSGTERIVRVHLARIGLATNGYNWPRTERVVLNALAASGFSTYM

SEQ ID NO: 997165 - protein, 281 aa, Homo sapiens
SLFFRSHTCDKGGGGFCWLEDYYFRPWTEKRKNIKRNAYTKSKFLLYGCKMSRLLQDHHGFQPCSDSGSLWRLFNTAAPSYPTNGRTHRWVLISKRPALRVATGSLTFNLSGDGQIGVIIPAHNGKNGYQTCCPPLRLFQRPTRPPSCSRPFPGSHPPPTHYRFAYKAADKFVLCRGRCVPTSSRAARLHPLVIAFAYWRQYPNQLTTALYVPVSRATAVDRPMSFAASPLPPSVLYIHSPHSHIPPLPFRARSVRIANSVSFSPLTTGRSIGSAIFSLIQ

SEQ ID NO: 997166 - protein, 68 aa, Homo sapiens
KGIDIFVIVYKKTTNFSTDAGGKVLIFDDSFEHEVWQDASSFRLIFIVDVLASGTDTTAETQPSSNLA

SEQ ID NO: 997167 - protein, 38 aa, Homo sapiens
MKEKEFYPCCAAYIYTSACEVDLVTTSMSDSINATAML

SEQ ID NO: 997168 - protein, 114 aa, Homo sapiens
  misc_feature (73)..(73): Xaa can be any naturally occurring amino acid
  misc_feature (89)..(89): Xaa can be any naturally occurring amino acid
LVEPKIQQGSKEVPPRWVLLRTGRHFLWLEVSGNRSSGSDELPGLRSIQVDRRPWEVPEAGATGQAWIIVKAXLGQQVYTLLHEKKVPXGRSEFCPRSLEEKPSGTEDSQQVYF

SEQ ID NO: 997169 - protein, 174 aa, Homo sapiens
  misc_feature (23)..(23): Xaa can be any naturally occurring amino acid
HAVSVLTLSNGHRWFCRPTSSSXRQPLDTNETPYFMKSIDCIRALREEAIKLSEEQRFITFLKALEEKVEINYYIIGGKPVDQDGITLITKREPLERLSYPEEATKSLAPTQRTRGNRRVDSNKAVSATTYCPDDPRTVAPYKKYTKCRCLLALPSHEDLASHSSTDHHTITRG

SEQ ID NO: 997170 - protein, 135 aa, Homo sapiens
MRFLGMIEGSGHINFGDSVRDKDPKLPNTVTPGTDLCPSPDEKTGPPDARITYDDLVYTTRHMQQLHNSGRQPITDLKPNTLVVIYLTEMPAILFTYIWVRHAITMLAIPTDPEERPCYQLLFAANEARRGDACH

SEQ ID NO: 997171 - protein, 225 aa, Homo sapiens
  misc_feature (13)..(13): Xaa can be any naturally occurring amino acid
  misc_feature (17)..(17): Xaa can be any naturally occurring amino acid
  misc_feature (21)..(21): Xaa can be any naturally occurring amino acid
ESGGEGRRPYEEXEKKXFMRXRPAPFIGRTWLTDFLSRPGKKLDSVCGKKRKNKWFWLILYLSTLVNILNCPNKHSNCSLRTHFPMFILLPHCFFGMYCTLFIMTVDTRMFYLLILQGEFISFMQSILEFGNFHRMKKYTLQFVIWGKGDIRLRRLFGSWKKELILLSLVTLHGKETQLGGKRRLPAVEVGKSRPELGSTNECEEGYGGVREGSVGQTPHICTSR

SEQ ID NO: 997172 - protein, 69 aa, Homo sapiens
GFCFDGGYEEYSGNKPLFIKYIGEGTPSYSDGRIRCGDIRLAVNGQKYIRNDTCLLCLDCCKNLKEEGL

SEQ ID NO: 997173 - protein, 107 aa, Homo sapiens
IELDEDVLYYMNCRSGFYNNETNQRLVKHLYIFLFIDQFLNAQKTGTSVRFNSGKGDWFSGSSDTTTDPSDNTVVQRRLLYVLCMLDSFLVNNTHIIAFNTQLHSSI

SEQ ID NO: 997174 - protein, 151 aa, Homo sapiens
MTTPSKTHLHAQSSPPPPSIPPPSSPLTRRPLYIPLHGVIPLSPNSDKTAMHAPGYVPIIPHHPLTHTQHLHLHQTTHFLHITHHAPLFTRHVSHLILLIHQSPPSPPRNDDLNAPANILFAPPPDSYPIYYLHISPSYLSAYHMFQVIYT

SEQ ID NO: 997175 - protein, 60 aa, Homo sapiens
MQRSCTGETPVMGTSTTPRGYAPRGEGLPGKHRQGAAPGGGHYSITSSGKKNTTRSSEIG

SEQ ID NO: 997176 - protein, 313 aa, Homo sapiens
GLAVYATTRSGSSIDWHYILERWSLNISQHTPRICILLCQLNHSLGSVTSVLRRLWNGAGSSHPQHTNAGSDNPALNVPTYQRDLTQQITWTYEGEQHTLGPVRCKDSPSKTPSCPLGLISVRYPPIPVANPASSARHYNYIQFIMPPAMSILYRCACQPYPRPPATDKVRSVRLTTPLYATTGRLPIRHYWPARHSVCHFTYRPSVSLYDIPPAPLCLLFLTSAFVLLDCSSPPCPPYLTRSNHLIPRCLSPRSPIPYIHSPIYLPLSYGCHRLALSSLPHFSLFPYSLSQQRLEPNPPLTRVLGMLAMSPH

SEQ ID NO: 997177 - protein, 154 aa, Homo sapiens
MSLTARGCIPHAYPSARLRQADYAILTACRYDSVVETTNTDKKKHLNITLIVTCVWSHQLYRCLGAVDASQRRLIDYFTIVYSSRFCVTVFYYSSILTHQTYHIDLNSRTHLPTDARMRVLYYVVQSYVLDASARRRPPSYLVYCYVVTTVLSI

SEQ ID NO: 997178 - protein, 168 aa, Homo sapiens
MTGYAEITIWMTVLYGSDLMAHLQEMLNTVTNQPANAQKLESEDYVSQALLEAVREDKPHVKPYFSKTIRDLKGVDGSAARFDCWIEGYPDPEADWLRDDQPIKEFRHLHIYYDEDRNCSLIIRDDRGDDDPKYTCKAGNSLGEATLHSKLIVETMEERECEGEEEEE

SEQ ID NO: 997179 - protein, 159 aa, Homo sapiens
  misc_feature (78)..(78): Xaa can be any naturally occurring amino acid
  misc_feature (100)..(100): Xaa can be any naturally occurring amino acid
MKLRLQQITDQKQKWALVKRQNEKRVGVVLLRGRRSCAPLSFAGGLVNDHRLDDLLCLLVSVAVRSASSLHRRSYGPXIEYGRHPLHPAPAPARRVPSPXRSARELRAPSASSAPAARGIPTRATLGRAVRDARGACGGRAVAPCGADPCRGAAVTARY

SEQ ID NO: 997180 - protein, 289 aa, Homo sapiens
PALLSVIILLSTNVGTSSKTSPVSVTCSAPGIQRPPVTLSLLQDHQAHTRVLETDVCLPHAHTYTDSFQPPNGPTLKRSMPKHHYYPNIMSYIKSHNSSTQHHAQHINHTYSHINVCLSPREEGSEAPYYPLINMHSSRLSVDLSIITIQAYHPIFAIATVRTPTFLYLLHIRSCNRSTIRKNAQGIARSRTTSKGGITQEYLRPARFVHYHSSTSTPAIVQTNIIAAHNRSAFHASRSLASLPSSPGRIMIHSLLADWIVIDPTLSFTYQPHTLTITIATVKYIDYFP

SEQ ID NO: 997181 - protein, 173 aa, Homo sapiens
  misc_feature (162)..(162): Xaa can be any naturally occurring amino acid
  misc_feature (164)..(164): Xaa can be any naturally occurring amino acid
SLLPEWLLLVLPAAFPALQPPGEDSNYVIRPHDTATALLQNRIDKQSSAHPPRHIIPDKGYMYLSSSLCESSKLRHLARKLTVNSSHKIGLNNRLDRLLLSSVCHPVVVDVRPSADHAYIYLWIHSRFLISSATHSIIPSPNPHKSCLVSTHTSVIHYEVVXLXYIHVVRLVC

SEQ ID NO: 997182 - protein, 164 aa, Homo sapiens
  misc_feature (8)..(9): Xaa can be any naturally occurring amino acid
  misc_feature (45)..(45): Xaa can be any naturally occurring amino acid
  misc_feature (48)..(48): Xaa can be any naturally occurring amino acid
  misc_feature (86)..(86): Xaa can be any naturally occurring amino acid
  misc_feature (94)..(94): Xaa can be any naturally occurring amino acid
DRGGLRGXXGCRIPFFGIHSEVTYFFSMPGDIIFYTGGGGLITTXQSXQILSPHLSASFSFVGTFHEAEWWPLKKSPQPLLQEMVXGAPGGGAXHKLNVVFTLWVKGNSPSAPIKTPPLSFQKGGNLAALVALPLWAIGHIFMHWEHQAGTLSPPIAYLAEGEF

SEQ ID NO: 997183 - protein, 45 aa, Homo sapiens
MVVSMHYNSDVTVYILWTEPIRSPNSVCRCFRAACLYTPHRRLIP

SEQ ID NO: 997184 - protein, 105 aa, Homo sapiens
LGDRIMRSEVVWARAEPKDYCTRESNAHCGSYVHSTYGNKCALCEAHEGKVSGKIRPKASLENALLKPMFLGDLPAFAAFFTHLCLYFSWWIPLIHKDIPTLPGS

SEQ ID NO: 997185 - protein, 102 aa, Homo sapiens
CEWSVILEDLDANNRNRQTLCSLLPKKSRSHNTDAALLPCISYPAFALDDEVLFSPTLDKVVRKLKGKYGFKRFLRDGYRTSLEDPNRCYYKPAEIKLFRWH

SEQ ID NO: 997186 - protein, 65 aa, Homo sapiens
MIDRYTIAVNERHLTDDTSQQDSTEPTELHRMYTTLPPRIVTHSMLDGFNAYRQSMDPRALMNYE

SEQ ID NO: 997187 - protein, 33 aa, Homo sapiens
MPSRTARTTLSDSQGILCTHGQRHSHILTTTSD

SEQ ID NO: 997188 - protein, 160 aa, Homo sapiens
MNVSWRDETKSFRTWITLLHGGGFEPKQSHIALSQNTKEKGGYGYVDHMFLARCKTPGILDGACYYRQRIADPGTTGLSTRNPPSYLKTLEIEAGQSHQQPAALLPPINNGTSRVVHRGILYEYHQIVYNKPPITLCPEVDTTHSDQKERKVIDTGEVGQ

SEQ ID NO: 997189 - protein, 183 aa, Homo sapiens
MILIKECMDEASISYITYLTVCLVIKYTQSCTSSAKTPQPPPRTNHAITPHASYFPHVRRLLPKDVIPPLTRVYLLIIIATITHRVKGLSSPPSSPPHHHLLPPPPPSPRYYTTSSYLLYSLTPTTQPDLPTIHTSTPPHIPTNHNIPHSYSPHILYPFPLCAFFGPFMRTQILHVAPPRQSK

SEQ ID NO: 997190 - protein, 48 aa, Homo sapiens
MLAETVSPALPGSVCADHRPGGVVASEAQLYAEHFDVGEPNTYDPPHA

SEQ ID NO: 997191 - protein, 114 aa, Homo sapiens
  misc_feature (14)..(14): Xaa can be any naturally occurring amino acid
  misc_feature (16)..(16): Xaa can be any naturally occurring amino acid
  misc_feature (20)..(20): Xaa can be any naturally occurring amino acid
SLPRYTKKKNLPKXDXQKSXREELCLRKRIHSSTLSSSPDFYYSKAAPEGEAEGAETTKRPAVCADALRTPRFEHQRHVPSFTLSYFFFLRLYLYRLDSNYRNNSLYHSTLMHN

SEQ ID NO: 997192 - protein, 76 aa, Homo sapiens
  misc_feature (20)..(20): Xaa can be any naturally occurring amino acid
  misc_feature (68)..(68): Xaa can be any naturally occurring amino acid
EEVGYPEEAPYDAMDVGATXPVVPQALIDQLKPGGRLILPVGPARGNQMLEHYDKLQDGSIKMKPSDXGDIRAFNK

SEQ ID NO: 997193 - protein, 107 aa, Homo sapiens
MDTTCLIKFHNAKALTDNYEQYKNNGLDQSSSLLNQFKFCSAIKVWDYVIIYIFAISKEHDKILMSLCEEYELGRKEIEVRKAEKKSSIFGQRIVINLPTKNTTLYY

SEQ ID NO: 997194 - protein, 181 aa, Homo sapiens
  misc_feature (180)..(180): Xaa can be any naturally occurring amino acid
MCVLLRCLLLGSPLTQCTLLSYESLFSSPPPLSFVSSHPPHSSTFPPPCFLILPPYAPAPPPFYILPSLPPPPPSSPPHPAPLLTSSATYPPLHTTSKSPTPLYTDFPSTPLHSSSSPPSISPLIFLYSLSSPTPPPTTYSASVIASYHVITSPHPSFPFYHQSPPSSPTLPHGSLPTTXL

SEQ ID NO: 997195 - protein, 194 aa, Homo sapiens
PGPHPDLFFCFFLYFCFLLSIVCNGLMERRKKVFCPCVGAGNSEKAYFKTYASARNKTPRIQHCYNRGKKCLIKLAFETPKNTRRLFLMASDSFKNALASRKKPFAFFKKGVFSNRNLQTSRDEENEIFEEVYAPCVCSFRPIVRKGGPFLFFAPCPPEKKRVIKTVLVFSGDKIFFLGTKVFFGGGRGGYPRF

SEQ ID NO: 997196 - protein, 79 aa, Homo sapiens
MRGHRDDAANNEQAQNPAAHDTGHRSQFLRPPLARRPRRSNAACRINRAAKDPKRANLSHPRIVRPHPPVDRPRPSQST

SEQ ID NO: 997197 - protein, 201 aa, Homo sapiens
SQRYPAVGKFVSELDDFVELNESYIGERTLHDRNHITNLMSRCWHLGCQDQWACGELRHEQLMLLMPNMFLLFPLTVERTFWSDMMDSAQSLITYSWTLYLQAEDGKIAIFQAKPDIQYAPHLEQEPTILGELSVSTMSYLHMRNSHAHRSLLEDGKSDGALRCLSLNCGRTQTRLLYSRRWYWCGFAGNLCYNRGATRAI

SEQ ID NO: 997198 - protein, 129 aa, Homo sapiens
  misc_feature (21)..(21): Xaa can be any naturally occurring amino acid
  misc_feature (42)..(42): Xaa can be any naturally occurring amino acid
NTRKQNSKGRQKKQRKLDGKXKVSSAWTGEAEPRIITISSRXSQPQTRGRTSKSRQQTGAGATTEQQTTTTTTTNRHRTPTRRPRRASRIVIILTSFGAWMPLWRLYNKIMNLMRKYQLKLDLSCVPPS

SEQ ID NO: 997199 - protein, 134 aa, Homo sapiens
MAVINLMVVHSVILLTVPISLTYPFGLPFCKYVSTMLNIHMYLTILILWRDPRARIKTKRTLQSAGPRGCQSWHVDPVDCTRGPPACFRVEEAALNSTERWFTHGRESRWDKWACHRTREYPWRSSLHPTLICH

SEQ ID NO: 997200 - protein, 70 aa, Homo sapiens
PLRRRCTHTPYFTTSLISLSHYLPPHITSGKLTDALPAKVEGWKEHNHKSAGEMDVGGVCFMYLQKKSCP

SEQ ID NO: 997201 - protein, 143 aa, Homo sapiens
SNNHRYRTIEAKFQCENAPFNCADEVIMEVTVIKDFLALSRAVNRDPSSRQTAQNLKICLSKASFKPQGSSVPGRGGAGKEETKKNVYDLKIWPKITHHAICFLRKGKTWCTFIQRAHHSCLNRDIWSCPALIWSLLLHLEHF

SEQ ID NO: 997202 - protein, 152 aa, Homo sapiens
  misc_feature (10)..(10): Xaa can be any naturally occurring amino acid
  misc_feature (12)..(12): Xaa can be any naturally occurring amino acid
  misc_feature (16)..(16): Xaa can be any naturally occurring amino acid
  misc_feature (20)..(20): Xaa can be any naturally occurring amino acid
MCAKTAKQQXKXLRGXLTNXLLGEETQLCGMGTEQGCWIPVSSDKGSCPQVMERSFHMPSYGTQTLEGGVEKPLLSYQLTHYGNKGPWTFLPNGADSVKTGIKRKVKKNELCRCTVSFLSKVEQTYRFLVPQSLRLITYLMPGDRCISVLFV

SEQ ID NO: 997203 - protein, 316 aa, Homo sapiens
  misc_feature (272)..(272): Xaa can be any naturally occurring amino acid
  misc_feature (293)..(293): Xaa can be any naturally occurring amino acid
MRAFYSAIIVTSTVMRTYLECDTQSQYTHQTFSILYYIVAFFEPLYNAPPPHELLVNNTTGRNRYTSRAHNQKLGHLSHQSILNTPINTLPHYSTHSQSCNLLTHPRSGEGYTIKPLSPSRPLFATLTIGLTHMSSSRSRHNQLSSSCATDKRTYRHPQPPYDRTRNAYTPLCSYYYSLSITNNPVHYTHGKSIMVNQPMCLLNIFTTFPDSHRPPRPAVAHVNSITRRPHRTLPAYDCPSHTHCTRAHPHSAIQQVSEQIVYDDAAESLTXQLLRRQYIDMRSGHRDSMTVXTRKDMATIHEYTVWRNIHSEPFT

SEQ ID NO: 997204 - protein, 168 aa, Homo sapiens
MAQVTDYNELRTQDWGGAGKPSLNRRQTLLSPPHPVSPHDSQRTPQGHFQAAHPEPGRDRPAAPYQRGACTSMCSRTPCRSRGTRELFGRHRTVTPAPFPGGSPGAHPHSKATPAPPMAPGAQPPRQGNSRHTHTAAPTGVGGEKGECDNKKGHGGGGQPPHINAPHH

SEQ ID NO: 997205 - protein, 136 aa, Homo sapiens
  misc_feature (24)..(24): Xaa can be any naturally occurring amino acid
  misc_feature (32)..(32): Xaa can be any naturally occurring amino acid
  misc_feature (34)..(35): Xaa can be any naturally occurring amino acid
  misc_feature (61)..(61): Xaa can be any naturally occurring amino acid
  misc_feature (99)..(99): Xaa can be any naturally occurring amino acid
  misc_feature (112)..(112): Xaa can be any naturally occurring amino acid
  misc_feature (129)..(129): Xaa can be any naturally occurring amino acid
AVTGSLTSSTPPIYLRSALTTSPXTDDINTDXLXXHTLSLSVTQPNNHSNVARDIPNITRXDGRWPAAPIANSDNVHGSIFRVITAHKYVNDTRHDLRXRRRAYCYPGYYCXFRRASSVIDPHDSCVYXSLFQRSA

SEQ ID NO: 997206 - protein, 85 aa, Homo sapiens
HIHFPRFLINLPSQNFRWICKRPQAANLQAVINEVCRHRPLNLGPFVVRAFLRSSTSEGLLLKIDPSVPKEVKNEESEQQDAYMR

SEQ ID NO: 997207 - protein, 67 aa, Homo sapiens
LGQLNHLLLVFHDCLQPERASCSSLFPHLTLSPYATAYLDPEDPGKKSWEEKTPSIALPSWNNLSQT

SEQ ID NO: 997208 - protein, 44 aa, Homo sapiens
  misc_feature (7)..(7): Xaa can be any naturally occurring amino acid
  misc_feature (33)..(33): Xaa can be any naturally occurring amino acid
MVVAVSXSVEKYGLTDTYTSVSYCDLSRSVAMXLVVSRVSQIRA

SEQ ID NO: 997209 - protein, 116 aa, Homo sapiens
VNALSEATAFHWITHNPPECTDYKIQARVLGNKSNIFRVGHLSTISCYQTMADASTELQQVILISRGTFSMLSVLAGGGVFLVLTYRGLIKYWFHTPPGMPLQIEEYLKDPAQPIL

SEQ ID NO: 997210 - protein, 83 aa, Homo sapiens
PPKRSTQDLITKKAGAHFLFFFKIVDSIHLLDLEQSSGIPSENPPLTFLYVLHASSVFFLPTVLLLVMSCSNTRWGRSLSLAK

SEQ ID NO: 997211 - protein, 302 aa, Homo sapiens
VGAQCELLLCGCAFTLADVLLGATLHRLKCLGLSKKYLGKMAAGQTCSASLRGYRDSFAFRKVLYDSHTTLLAARNPLCCTGGQEEISHQPCAPARLKESLRGMVCLRRARCTSSSAVREWRTGIWRAERYASKGTGIVRPTWYLAAERECSIQTYKKSTCADIACSFEVVCMDAYWCINFSLIREVAEVSRRSYVEVSSGAVANNLMIWAILNEYMFVEGRRDARKKIGERAGRVCGRAREIGSVSNAGAGGDYYAVAEAESAVMDGGTVLVDGLLRSAKYTPSARVLTVTINLLNKCKLN

SEQ ID NO: 997212 - protein, 226 aa, Homo sapiens
  misc_feature (2)..(2): Xaa can be any naturally occurring amino acid
LXCTTRTSQTPDQLAIKNAGKQDPKRHLEEHVDVLMTSNIEQCLAAMKDTDPFKKAEKNAINDAFTEYSSVDPMLIIKGPLKENLDKSKTFEIIRQIDTTKKSDVNLLILIYNMNSENSKATPDYLLSHTTLLTHPPHAKSHLTFSQAPLLGTLFSSLFHAIPDNTDTTHHDEVFNVITANSISQFMKLPSPYTHHLVSLIYRNRLTHYPVTPTDLVQYSYDLRSR

SEQ ID NO: 997213 - protein, 74 aa, Homo sapiens
  misc_feature (35)..(35): Xaa can be any naturally occurring amino acid
ATWLITFSKILWPTCPSSCAHKTQFIGGITQGAGXREEQKSRRTHQQTPADTDRPSTTGQRGSLAGEELEEPSR

SEQ ID NO: 997214 - protein, 117 aa, Homo sapiens
  misc_feature (29)..(29): Xaa can be any naturally occurring amino acid
  misc_feature (38)..(38): Xaa can be any naturally occurring amino acid
  misc_feature (84)..(84): Xaa can be any naturally occurring amino acid
VGLHICGSPVLESVKEKFSFEPKIPSPRXGGGNPPTPXSPFNFSPGDFWGRGASGSTANPQTPVEYPMETSGIKHIDLTGGGEXSGPLPIQQPNSGPYKKQAFPMISKRPEHLRMNL

SEQ ID NO: 997215 - protein, 32 aa, Homo sapiens
MSVGRHVISCSRSRVPRPSHSNAYDSHIDAHY

SEQ ID NO: 997216 - protein, 113 aa, Homo sapiens
MDIKSKFNQNFSTYPYSPHAHLRVPSSTTQAPDVERTPTNYAEHPPPPLDRILRCRVDHKVQLDDKELRVMFSLAIQTDYIGDIASSSSDSARPPRLCSVSVSYVMGDRVNSI

SEQ ID NO: 997217 - protein, 92 aa, Homo sapiens
PVDEPEACDQMYESLRRLHSNYYKHKYPRPRDTSFSGLTWEEDKMILWTDTLGELKEVDKGMGKKLGEKEDSWALRRSIRSELTSILDSSTV

SEQ ID NO: 997218 - protein, 193 aa, Homo sapiens
  misc_feature (8)..(8): Xaa can be any naturally occurring amino acid
  misc_feature (41)..(41): Xaa can be any naturally occurring amino acid
  misc_feature (46)..(46): Xaa can be any naturally occurring amino acid
  misc_feature (65)..(65): Xaa can be any naturally occurring amino acid
  misc_feature (74)..(74): Xaa can be any naturally occurring amino acid
  misc_feature (148)..(148): Xaa can be any naturally occurring amino acid
FKFHTLTXTTINKKTSFLTLHYLSLLNHPLPNFITTSPTFXHFPPXPSGYPWGFNTKKLPPNLLXPPTTLTPPXHTPNLTVPSHKLSSHPSYFIKPSFLPHSNTVLTLLTFPTHFFQLFLLQQTSSRLTYHLFSTDRRRRKNNKYKKXPIIPPFLFSLSTQHSPLLFSPHHSFLFPLQINPTNNQSQTHSQLP

SEQ ID NO: 997219 - protein, 166 aa, Homo sapiens
MSTTEDRTGRRGDPGRLESLSRTQTHGVLPPPRVQTLSWTSACNVDTPSIVCGGQRIFIHPQTFRSCAESVPQPVSLKNPRALSLLLLLSLGAHAVKLQLPYPSLKGDLLFFSSWPVALQAGGFRPPSLSSERLIASLMLRGGAVFFFGRSAYHLYNSGGEEMFFT

SEQ ID NO: 997220 - protein, 85 aa, Homo sapiens
GENVVNKYKEEKGLDGDRAYDVAARTYLHERRMKRFRVDEEFQTPFASQSRGYFLFRPGNGIKIIGVIKNGCQVMDDEKRGMRNN

SEQ ID NO: 997221 - protein, 74 aa, Homo sapiens
  misc_feature (9)..(9): Xaa can be any naturally occurring amino acid
PGGNSHLGXDDATEELMEQSEELLRCDGKHWQPLDTVASEIPAMMTQAKGQARLHDVREMRDSFLKIVKPLLEI

SEQ ID NO: 997222 - protein, 268 aa, Homo sapiens
RRFLVKMMSWYKRTSSNHEGALLQRKLEMDDYPTFMANRYAYFTVYRNRSLHKWHDYDQCCLLGKLAKGFGAFERSILTHIDHILMDKERLLRTTQTKLFDYRVLGKPEPASKTRPRQFAGEPNILTDAPANAHLKDLNEELFDDYDFYHQLLPELIERKTNSLDPNDHVVMGRPCLAIQKLRSTVHTKVHRKASKSGTLRLHVLNRLLTFMAPIDHTTMNDDARTELFRSLFGQLHTPDEATVIDNPHLLHPLGAQAGVADAPDGRN

SEQ ID NO: 997223 - protein, 242 aa, Homo sapiens
  misc_feature (233)..(233): Xaa can be any naturally occurring amino acid
MCGKTSGSSGKSKELQEGKAAYLKDETTFSIAEMRTDDERPTTHDDGSPATAPNETPPLTRPDTPPPKDEDGEQPSTSPNSHNPSSLPDTTPSTTTPPPNPPQPTPGALTNTLTTAPGKPDPYRLTQHPRHLNHLRPAPLREGNRHNTTKTKTPPPTLYLYPLPTRAPPHPNPPNTPRAPPSRRTPPATPAAPPPTPTTPTPPPIPSLPPQHTPSTSTFLIINPLIPTPSNCXDDTLYTQRQ

SEQ ID NO: 997224 - protein, 55 aa, Homo sapiens
  misc_feature (53)..(53): Xaa can be any naturally occurring amino acid
MGFGHPEGLYVLKIGARAFGDLLAASGWNVVVGWWLHRRGKELRELPRGGYTXGW

SEQ ID NO: 997225 - protein, 443 aa, Homo sapiens
  misc_feature (9)..(9): Xaa can be any naturally occurring amino acid
  misc_feature (23)..(23): Xaa can be any naturally occurring amino acid
  misc_feature (95)..(95): Xaa can be any naturally occurring amino acid
  misc_feature (173)..(173): Xaa can be any naturally occurring amino acid
  misc_feature (280)..(280): Xaa can be any naturally occurring amino acid
  misc_feature (329)..(329): Xaa can be any naturally occurring amino acid
  misc_feature (333)..(333): Xaa can be any naturally occurring amino acid
  misc_feature (347)..(347): Xaa can be any naturally occurring amino acid
  misc_feature (352)..(352): Xaa can be any naturally occurring amino acid
  misc_feature (380)..(381): Xaa can be any naturally occurring amino acid
  misc_feature (390)..(390): Xaa can be any naturally occurring amino acid
  misc_feature (397)..(397): Xaa can be any naturally occurring amino acid
MATARSQRXINITYTQIHLYAYXQFVLRYTRYTNVINTDMGRIALEYDAREAETSAVRSKSARRRRLAEIVSDSGCTAARHSTDYDMTYNSDVTXEIASYKVEEYVRAASRSRQTSRSVLRSARRSYRVLASAHHYVSTPIGKFGVVHVSCAGRSRPNTWTLARRDRRTRQNXKSESYSSHCSMPRIERRTHLARLPVVVMLGLVRASRRATYTEARFTRDIERPRHVKSLTLMDLASYSIVRTRSGDTEEVSTSSQRRTITEEMCNLLSLSQFASDYAXAHTTRTRIHHIRVRVLTACLAHVSAPCLSLLLCALVRERLDDDVLSVHXYSGXYSALLCPGVLYTCXGCKTXSLDYSTCSCLIAVNGEMSVMRHLDSVRXXGSHRHTAGXRLYMCLXSIDMYDMRDYTEYTSMRDEFGVYVYDVVHDGGADRSSSILLLLHND

SEQ ID NO: 997226 - protein, 81 aa, Homo sapiens
  misc_feature (8)..(8): Xaa can be any naturally occurring amino acid
KQKKTKKXTATDAGGRGCEKKSLFGNPQRPFFSGPPLEEYNAASSSTFHLWKSMTEIDKGTVEETAEEKFAPKGPEEDHKA

SEQ ID NO: 997227 - protein, 149 aa, Homo sapiens
ESLYVAQVGVQWHDLGSLQPPAPMCKPFSCLSLQSNYSSASSLAVGPADPLCGLRTQAARGGFIKKWPQLEDDFPGESFITNSETPCDPWPKEDLLFSGSIKKGLVDWMRTDIGNMPLPEHYYYIMKPLVNIHNQDLYWNQAWCLAFKR

SEQ ID NO: 997228 - protein, 107 aa, Homo sapiens
  misc_feature (6)..(6): Xaa can be any naturally occurring amino acid
  misc_feature (62)..(62): Xaa can be any naturally occurring amino acid
MIAGSXIYIADTYIVCAQSLTDHRKHSHQQLYSVENSIPSGLHHTMVLYLLNSSNIIHRAEXSLSSVVTICGNVLVDINATLSTYVRSVLADNQSYEFYTHAMVMRA

SEQ ID NO: 997229 - protein, 181 aa, Homo sapiens
PDFLAQHGIAMSPLSNNSLFLSYHRNPLPEYLSRGLMVYLSTDDPLQFHFTKVKSHCLGPNYTKEGPEGNDFLRTNVPDIRVGYRYETLCQELALITQAVQSEMLDTISEEAGINHEPKALMSLIHEMPTTLQHFYHVLSSDSAHAVWTMTDSIFHDSDCMFSTNVLFLGLHEKTSLGICY

SEQ ID NO: 997230 - protein, 152 aa, Homo sapiens
MLITPDEKYGLHLGIKGSMGWGIWGDPKKIYRKGIFLLWRFKNVLRPLKSPLEARGGFFCFKKKKKPRSLVFLRNGLAALWGGYIHWRQSRRSCRRPEGICGENIHCPAYKVGKQRDDALKRCRGRPRSGNTMLETRVLDNRRGNEKEVRKG

SEQ ID NO: 997231 - protein, 100 aa, Homo sapiens
KVIILLIVSELAQPKIQKQDNNCNYTRAIVVRENKTIHETEPLGRTLRLNAIHQTMKNKNQPRKLQKDKKSSGNAHEHKSGRTVLHLAGEHDNISLAGCL

SEQ ID NO: 997232 - protein, 72 aa, Homo sapiens
VTDAWAKEHQGEMGQLPKPSLRAWPSSVVPANNIQVTKTQRHIDATEKPAKTCQIQDGNKSDFWSSSLHIMC

SEQ ID NO: 997233 - protein, 165 aa, Homo sapiens
MFHYTSTLSPSTHHPFITFPHSPTYFNYKTTIPTPPLPYYPSSTPILHPIPLIHYHPPPSITSLPSLPLYSLSHHITSQHPHHHPFTYHPHPPPNYLHPNHSPLSPLLSSSFLPTHIYICLPTPPPVIHLISSHSSTTHTLTFFLSPTVFLFYTHISTPPFITST

SEQ ID NO: 997234 - protein, 45 aa, Homo sapiens
MLRLPNFVNCYMSAAPKRAIQTQWVPVMPVSLRREVNNITRSREL

SEQ ID NO: 997235 - protein, 115 aa, Homo sapiens
MTYPHTNIAAPPLTSHHFYFASPAHSRFVSTSPPIVFMAVQDYPPCACPPLVSSPPPTFPHALPVLHPIMFCFSLRHTLGFYPYLPPPLLTTPPASTTSDPQSVRAPSLLSPHLS

SEQ ID NO: 997236 - protein, 125 aa, Homo sapiens
AGSRFITSKPCGGGKQLIVSAHCRSQAGVVIALGGRALDSIACCSVEDDKDVPEVRLLGLCPAGCDKDVSAVRWLGHFSQGGVPMECFTPTRIWASFMLPSSGGPKQKHGAIPRRGHGGNKKQPQ

SEQ ID NO: 997237 - protein, 414 aa, Homo sapiens
  misc_feature (72)..(72): Xaa can be any naturally occurring amino acid
  misc_feature (230)..(230): Xaa can be any naturally occurring amino acid
  misc_feature (244)..(244): Xaa can be any naturally occurring amino acid
  misc_feature (255)..(255): Xaa can be any naturally occurring amino acid
  misc_feature (287)..(287): Xaa can be any naturally occurring amino acid
  misc_feature (290)..(290): Xaa can be any naturally occurring amino acid
HLDEADLGRPYPPPPPRRRPPSRRRRAVRLTVTLNPHSDSSGANFMCSHISPSVVHSHVSQHHRLGYTPSRXSTESTHRILYPVLIKRIRKYKHSIGKHCVATVTLARPTRSHRKRQQPRQATQGLTLARTPRRSSDCDAAHVGVALATSILGHSAPAASPELVPTARRRCARDSKPCTSPEQRPTPLSVRTLGTTATGYSPRTLLSPSPVTSRMPLLILHYALSCGAAXRRLLSPTSPACILXVSTRLFSLLPXTRPDAFPRCPIYSPHIRPASRVCAAPVLPGQXAAXSDPPIPTSAISAIPPHHIISVTPRRIPSRRIPMSYFLPSRRVRSRDRPTVSALPCSAILPSSLILYIQSPNCPHAVQCRYTLPAPHSAPRIPAVSALTYFPLALPPPKPPSHPSLPATQFHGDP

SEQ ID NO: 997238 - protein, 112 aa, Homo sapiens
TLLSSNSSRSNSHDNTPPNAFLALASLEAKQQDLYLRIMSKFLAKEKVRILAESSKVSKLQQSFTNPTLTKGATVADSLDEQDAAFESVFVETNKDPVAPDFIGNDGEKQDL

SEQ ID NO: 997239 - protein, 188 aa, Homo sapiens
  misc_feature (9)..(9): Xaa can be any naturally occurring amino acid
  misc_feature (13)..(13): Xaa can be any naturally occurring amino acid
  misc_feature (126)..(126): Xaa can be any naturally occurring amino acid
MAARSASGXASAXRASFWRVVCNPPPSRALRSPASCASRSPAAVSSPAPTPLSLTCLPRTLPSLPPLTPHPPPTPAALSVLVGCALPHAALAVGARPPRPALESPAPAPSPPRPRLYLPPPPPASXRPRLRGALRAFPPPHRSAPRRCGRLQRSPLSPALSPHPSSPPTRLAPTPAAPRPNPRPTRNT

SEQ ID NO: 997240 - protein, 67 aa, Homo sapiens
GGRPPRGGSVTNKVFQDEYLLQVAQLCLDWNFIRGGGGFRELSFNLYRFHMKWECKKAYIFLVDSIS

SEQ ID NO: 997241 - protein, 267 aa, Homo sapiens
APPPTNITSPSRHTRPYLGTTAQDRLHLLWQEILKNEKHLEEIKINSQDFYEKEKLLSKETSEELLPLPVQTQIKGHASAPYFGKEEPSVASSRPGKTFHARYWMPPDGTSHNEWMHYGQILHMPTDETILTPDKSYKRTTSSQTSAALSRRDHDSPPSSRRARSEPLYLHLLTPILANRRKRTTPLHVDPRILPHTLTPSTRTPLTLSELAGPYSSHAVLRAFSAKGHSLILSLQLPDRHTSVARHYYPQTPPYTFLVHQLISSLT

SEQ ID NO: 997242 - protein, 170 aa, Homo sapiens
MIPTPCVDQKRRINEADQHEHICFALLSPDDNAVVLHTLTTRQLDAEINNTEPHDSDNPQTIEPYRVQTRMPACGQEEHERTRTDPAEGAPRTTRATDCRYLTPTHPSAALSASIDARSSQAWSGPGISHVLPPRVAHKQITEDTASGGGSPRQDLAYGRSEKPGSTKRV

SEQ ID NO: 997243 - protein, 116 aa, Homo sapiens
  misc_feature (21)..(21): Xaa can be any naturally occurring amino acid
YLLLRSRCVVRASATPFTYRXVCACIHIEAQGEEKTTFVFLFGVWMEGQKEMTYLKENISHSRTPKDQTSLWIVYTLSKIVSGAIHFKWRRAYRGKRHGLRTPITKSLEEKNFLCS

SEQ ID NO: 997244 - protein, 164 aa, Homo sapiens
MKKGKLWHDLGAASFLESSAKENQTAVDVFRRIICGGMKKCDWGMLDKAWSVMLRGWMSAGEGLVGTWVCVCTLNEGVLRAGGLENEAVAGVVSTVDAPRLCSSRGVGSRRLRLGLCLLGVEQERRVICSAILQCRLGCCNCWCNADTTGYCHTGMLRLETPEW

SEQ ID NO: 997245 - protein, 83 aa, Homo sapiens
CAKLSYYCVFISVGYSPNTTHARDTLIAARLRLNGVVVWERTLGARCRVVVRLASSYHSPTRSNNITAVSRRLPRIQIVALPV

SEQ ID NO: 997246 - protein, 175 aa, Homo sapiens
PTIHIDHHKRHNTTTHTRNFHRSTWKDYCFQHDWQHQLMYLIESYFLSLTRLGKELGVVDISSPLPGELFIHMDGPARLLLCPITTTDDVDIILSIPMFLRLYMIATVMLLHTKLFTDASSQKHMELLNTTNFHSPSRYEDSHCLDDPQLILLHFHNLIIPTLNASSVPRSWHRS

SEQ ID NO: 997247 - protein, 265 aa, Homo sapiens
SLSYPFLHHADLKAKYKELLKHPFILIYEERTVEVACYVCKILDQMPATPSSPMYVDGYRCYIRLYKKGLRGSKTERIFIPYHSVFIVRPDTMCNKIGARSHHVCLLLSPPTRIFAIPTDHTVFVLDLETLYLHFHDVHTSAIVPSPPPPIYFRFSLYLINHPHSTSYPLFSFYRYSLSRPIPTRPVTATNILPLAPAPSPFFFYFAYTSLFPIPTIPFSSAPANHALPYPPLFISSFFPFTETHNLPIPHHHLLTYLPPPSIHP

SEQ ID NO: 997248 - protein, 379 aa, Homo sapiens
  misc_feature (47)..(47): Xaa can be any naturally occurring amino acid
  misc_feature (326)..(326): Xaa can be any naturally occurring amino acid
AAIPELPAPAVYAHRADVFREAQICSGLVDYVLWVQRLQLLAIRHAXNSSLIDKKHPAKSLQYSLISTDLAYLASTEHPSVITTCYQWYPRAALDRRLLSRASAAARHAAPPLHLHVCCRGASPRRMWALAPRRLRRCTFPALTPSATHVAVSLSVPSRSTSPVASPPPPAPVPPHAHRVTTSPYRIRGPHLTSLPPPPRSGPAYPPAAHRPRTHPLPWRSARVEPARPGSAACADPAPRRGGAEPRISSRVSAPAVALPTPSSLIPCRRAPGSPEYMRARREHRPTLSPRAAVRVVPAPRAPVRLPRHSAAIPQVTPPAHPAAFXTPRLSRPRARAARRVLPVGAGAGATVGGSLFLRQIRVRARAHTGRPTLAYARP

SEQ ID NO: 997249 - protein, 180 aa, Homo sapiens
  misc_feature (3)..(3): Xaa can be any naturally occurring amino acid
  misc_feature (6)..(6): Xaa can be any naturally occurring amino acid
  misc_feature (8)..(8): Xaa can be any naturally occurring amino acid
  misc_feature (10)..(10): Xaa can be any naturally occurring amino acid
  misc_feature (30)..(30): Xaa can be any naturally occurring amino acid
  misc_feature (34)..(34): Xaa can be any naturally occurring amino acid
LGXEPXSXLXGDTPTTQHNRRGTRFSTFTXPEDXCTGIKARTHQPFPPTVPSKAYDSTVLKTRGNPYRYELIDIPKVFFNKALTGPGQGVYYDFSRGVEKNKPVFYPKPPKTFATNTSLKDGTLIALPKKPSYTEILTAPHWLTSYTHDYTGLGPMDPLELHDYREKMAAQSTREIGSDP

SEQ ID NO: 997250 - protein, 141 aa, Homo sapiens
MSAPRPPPSTLPICHKHARRPLTSSTTRLAARISAPLVPPLRRYRRTYAPYSPPRPTPVELSLPAYGARMFPTPISFPPSAPLYSRPRLSPPLAPSPIHCYSPYLAQLVLAPTASRRQSHPTAPPARCASRRSLLSRVSLP

SEQ ID NO: 997251 - protein, 132 aa, Homo sapiens
PPSFLSLATPRILRSPLRLVQESMVWYRLHGNLHSWQKAKREEERLTWPQSCRYISNAGRCSSLFKLPYLMSLPVSKTYMDISSIPAPHSHSFLSLSLSPPSSISLFFSSSPRPPLLPFTSPFPSFTFFLFL

SEQ ID NO: 997252 - protein, 107 aa, Homo sapiens
MSENPHLFPTPDKNLLIERASAPRRAPPDPHTEVENGIPPNVATAPAQRERGRPTHLPCPLDPSADRPPDRDEFPSRARRPRLRITPRYQHRRHTHDAAVAHATRGT

SEQ ID NO: 997253 - protein, 165 aa, Homo sapiens
KHHNEKKKPQGYESRTLNMCYYLCICPSAWDTRNKESDQLSTVESTLPWSTRYPMYGKRLVSSSQITSIDHPARVLKEKHAQDKTTSAQHRFETSGRALVTTSRTATTRPVLARARGDNNPPTIANNAKAGPAPYPYDGKASKYTLETSHRRLRTRFRIHDKRPR

SEQ ID NO: 997254 - protein, 248 aa, Homo sapiens
  misc_feature (82)..(82): Xaa can be any naturally occurring amino acid
  misc_feature (143)..(143): Xaa can be any naturally occurring amino acid
IIFYLFNRYNLIVQFSYLCLLYPYLFYDTIITFSIEPTTLLIPKHHYRSLLFKHACSYIPLLVRTRMVTFVYLYIVILPNGXCNTFYVARGHNYTALLMYSVNLSLVLCLPVMGQLTYSPDRSTRLHGNHDHIGSDSSHILDXGFTSIDNVSEHNFPHQLLVYSCHVCVIPLLLFWYSTDHNIITLTLLRPPSAPTLLELYSSDQATHDRLLQIPDAISPFTVSSISVVLTYAILFILNPSLMSFIIA

SEQ ID NO: 997255 - protein, 349 aa, Homo sapiens
  misc_feature (282)..(282): Xaa can be any naturally occurring amino acid
PGRLRGRGDWQHTDNFGFAGLRMWDEHISIVFTLDQKQISLSAPHQIKYVEDITATENLAIISSASLQYSSVRMQGNRFSSDRRLIIYGTSRKEQICFERIRVRNARRVLVNSIVDWVPGRDESRCASGAAYRFDRRTSHQVHADPCSDRSPAVTRPCRVLHAASLEQRRPPTRPRYRGRIQYARPRYPQQIFPLPPARSRTMRTPIIVIPHPLHNTRLTDIRLPRRHRPPYGHAVRPRAGPFRSVLSCSTYAIALSRDRTFTTQMPAAPASSTDLCACRRXTITISTRRRRRDASWRRPAFPHVIRVKLIYSDLRDIYYTRRDNCCGVDSTRVVRRSCVIERLRPRRA

SEQ ID NO: 997256 - protein, 172 aa, Homo sapiens
FTSLTPPRPTPSNITALILRSKCQTDARMTCLQATMCAPIPVPPITRKQCHEVAVPVINHSTGYFSLSPRINRSSIMPIFSQVLDDFKFYLRTPFCVHCSRSLIYLPSLTQFYCHDSYPLPIRLTSYNIPSHLLPSFTCTPRSLPPFYSLLHSIHITPYTDFPYSIFFLPNI

SEQ ID NO: 997257 - protein, 159 aa, Homo sapiens
  misc_feature (25)..(25): Xaa can be any naturally occurring amino acid
TDTPPHPPPTPKPQHSFGVTNHTFXGEHTSSSTMSYRRDLEKYRDLHEDEILGALTEEELRTLQNELDELDPDNALLPARLPQKDQTTKALFVPFKTEELLDHLEKPAKALTDREDLPPHSGEKPTKGLGCQPLPPPPPARKPDPPATTLTPPLAPSPT

SEQ ID NO: 997258 - protein, 163 aa, Homo sapiens
ENWNAEKRSPTFHLGDAAHLQAEIHTGSHVPLRLFVDHCVATPTPDQNASPYHTIVDFHGCLVDGLTDASSAFKVPRPGPDTLQITVDVFHFANDFRSLVFLPCHLKVTLAEQDPDELNKGLFLHEAFTTACFPGEGSADICQCCNKWDWGTLNHFREASFMS

SEQ ID NO: 997259 - protein, 332 aa, Homo sapiens
  misc_feature (19)..(20): Xaa can be any naturally occurring amino acid
  misc_feature (77)..(77): Xaa can be any naturally occurring amino acid
  misc_feature (112)..(113): Xaa can be any naturally occurring amino acid
  misc_feature (124)..(124): Xaa can be any naturally occurring amino acid
  misc_feature (147)..(147): Xaa can be any naturally occurring amino acid
  misc_feature (210)..(210): Xaa can be any naturally occurring amino acid
  misc_feature (234)..(234): Xaa can be any naturally occurring amino acid
  misc_feature (258)..(258): Xaa can be any naturally occurring amino acid
  misc_feature (277)..(277): Xaa can be any naturally occurring amino acid
  misc_feature (283)..(284): Xaa can be any naturally occurring amino acid
  misc_feature (294)..(294): Xaa can be any naturally occurring amino acid
AGNKYLTLIPPLLHSALTXXCYLITATDSCEAPPPMREEHASLPQCLTMSSRALYRPRILLGRPTASQLARYSHSIXRGLLPTHPRRVVSVCNGPLNSTILPWLDRSTRCNXXAITGPLIVSLXITLSFIPLLASYFGHTILPPTYXTLCHLPRPKSPNGIFSGPLLSPSIAWSIIISLCPPSVSSMIPSVSVNGRTPIPCDLFPLTLSXPHQCYTVPTINPIDPLASSSFGHXYIMRPIHPTSCLTLLSMQRPRTLXIATRIYFTSYFPPFATTIXHPRGLXXLLYLCGPSHXHSSTPASSASTCSRTDRAAVAHIHLTPFHLLSLTTSSL

SEQ ID NO: 997260 - protein, 218 aa, Homo sapiens
YCTIHSTTMRRFWSDTVEKRKFPRSSGSEPFDLPYWTPPAVRIRVHYKKHISTTTLKLHSLPVCAGERWIKSCMATPGFHFETARVPSTMTDVTSGEQDRVASLFDRSSVAEQNGTCVFMTFFNFSGQSLTHIITNIIFSHLRLRDFTLCHILILHPLQKIFHLLHWAASNIRTCNACGFASRVNGTWEQEYHMIQCMVYCVAYWWWCCDQNDLVSSG

SEQ ID NO: 997261 - protein, 271 aa, Homo sapiens
MTFKTYTRHIPARRHRDEKQSTTFHGTGHTPSGDVTLPDGGVLSSRVNFHISISHTTNCSTRTLHAASNTPRPGNALYKDTVPPHARPSNPHTNELRTRQPAFQLFVTAARREMQKHRPFTYRLDTRTTYDDPPPIHTPTSLPSLLPLALNPCPATRPAPIPPPPPPLVPDSTLSPPPPLHPEHPQHPHHPDIAPPPPSLSPATPLAPPHFPQSPPPILRLQHSTALRLITAHPNPSMYIPPSHTAILPIPTPSPVSPSTIQPPLLHPILM

SEQ ID NO: 997262 - protein, 262 aa, Homo sapiens
MLLSLVEKLSEEIMEIMRNLSSIQAFGGQLESLKILLESPGAHISEKEKWRTPTNYDLNGDNQNWLTKKTGTFSPRHSALLAAAGTPQAHFKVGASTKKQHLLWAPKLVHVRLPISKGNKNPVAWGRGPRNQCGRVRVLAPRPTPHRPHRAHTSVLPPGAPDAHPRCAAMRPPRPPHRSSPPRATTRTGPPRQPPPPPPPPPPTPPPPARRPIPSPAVRPPVPCARPPCPLPPTHALPHLPPAPLLVHPFPTLRSRSLANPC

SEQ ID NO: 997263 - protein, 217 aa, Homo sapiens
MFYSLSKASTDAEGRSFIDRPSTYLRPILHYLRTGQVPTQHIPEVYREAQFYEIKPLVKLLEDMPQIFGEHVSRKHILLIAPGYSENLELMERLARAETRTVPINIALARLLESREHDAYHLDALFFFPTLDVSSFLTRCTRIAAPIINNPMPCLMTLMNAQCYSALLLCLLISSHSQSISFATCIPAYLFTAVLITGIARLWLALISRGSRNITLS

SEQ ID NO: 997264 - protein, 109 aa, Homo sapiens
  misc_feature (12)..(12): Xaa can be any naturally occurring amino acid
  misc_feature (52)..(52): Xaa can be any naturally occurring amino acid
  misc_feature (93)..(93): Xaa can be any naturally occurring amino acid
MSVSVACDWCLXPLYVTISIIPSSTSLPPPPPPPPQTPTSFHVYDTSFLHCXQLIPPLPATPSPPSTAHPDSPASEPTDPVVLPVPCLLVPTXPPPRASLSHLFLLHLI

SEQ ID NO: 997265 - protein, 110 aa, Homo sapiens
MTNLKTHLATERGCAHRGELREGLPSVCVTKMHEMDDETDYDTAEWGTAANNPEQRGSIVTELSNKGVKFYGAPPTQEDRDLPTSLYRSCMGNIQCRGEKEIQAKTRAIK

SEQ ID NO: 997266 - protein, 174 aa, Homo sapiens
  misc_feature (34)..(34): Xaa can be any naturally occurring amino acid
MYSSATYSDICRGTARRVMRVFSAYFIVGQNTAXSELCIAYSVTPVPRYIMKSLQYRIYIDTDIYNIAKSRLYENSKKKEIAEYCSDPPLYPDEEILMSICPRHDQIATFDGLEDCNHVFFIIIIIKRYPYQSRTPRTLPAALGAFNFIYQAPVHTLLNIRRYSELPSTPRDLI

SEQ ID NO: 997267 - protein, 186 aa, Homo sapiens
  misc_feature (95)..(95): Xaa can be any naturally occurring amino acid
  misc_feature (186)..(186): Xaa can be any naturally occurring amino acid
DKGHHGNSTTPADGSNRGRLYCISTASGRFSGSHPLHLMCSVHEPLSCCHRRTDVLRNDRKLLLNNCQTSLLYGVGAVLLPLSEVVPRLLSNEDXGYTGPSPRHTGALLRPLLIYRARCMAYSLAYQSGRFVGRVRLVLFGGPVMFPIPLLSTMSAYAKRPDLTKSLDARERERRVTCRKAEDFVX

SEQ ID NO: 997268 - protein, 126 aa, Homo sapiens
YLESAFESEREVSPDAKSLLLNLGKDSNNAGALLLQLLCFNRTTDDPNTIVRNRSDGGAWEHRKREAVFPLHPESVAEVRIILDQPNLTVKLPYGYKFKFPNRLNLEAINYMAGDGDLKIKCGAFD

SEQ ID NO: 997269 - protein, 168 aa, Homo sapiens
RTVKESSESISAIVVETSVKNAINIGELFQGISRQIPPLDPHENGNNGKFKLRSQPCMPDTGADDPRAVVHGTKKKPEPTSCALMKDPTLGGLSPHFEKSEHTGFASCNYLQGAGQEMYLKRILENSVKTHHTITEWPLGHEMLMEGMPSHFCYDKYHKASVTSDDDT

SEQ ID NO: 997270 - protein, 74 aa, Homo sapiens
GGMYVERHDAADSPYFDLTVKTHQGIGYQCDNCQICLHLLTSSGVDLKRVLLDPRLETNSNYLNLFIESVSELA

SEQ ID NO: 997271 - protein, 171 aa, Homo sapiens
MHLEAPQLFISQLFQPGRCPIDYVPQVCHQLTTTVSYVIQRYHTIKRCSRCSPHTHSNPVLAPCDPPRSTTQTLIPPCPHFCFTLPTYHATSYIRHNYPLSSPSAINLRPPYLLTHGPDQLPAIHSPLYPPLPLPLRPIPPPFLIILPIYKSTATRRNPTPNLPPYSTYRR

SEQ ID NO: 997272 - protein, 136 aa, Homo sapiens
QGSYKSYESEERHTLSNNLREMTQSAYSLLAHNDRDRYCTIQEHDNENKHQCTEMTSQCHTSRQHTHHNIAQNSPLMPAHQQHFVPRSPPPPTTPFPDPPPHPYNLHLPGPTTPLQLVPPPLHPHHPSLSRIHLFT

SEQ ID NO: 997273 - protein, 112 aa, Homo sapiens
SRATSLHLPGSSDSSASAFSCAAGITSAHHHAWLILVFLIETGFLHVGQARLKLLTSGDLPTSASRISGITGVSHCTQPKENIFSIKNTIVFRKESIKVMRNFKYINYKLQL

SEQ ID NO: 997274 - protein, 103 aa, Homo sapiens
IPSSPLTPVTKPYLAGDTALNFPNHAFGILNAGPSSDFIGHMGQPQLKGNARTAFTPRDSEITFRSHFRPSHRSMEQEIRTTGVLHTKKHRRDFAARFSKVTI

SEQ ID NO: 997275 - protein, 260 aa, Homo sapiens
MVLQVKCGVSEVKPRVTPTTRPAPSARDLCVPEHSNGWVCMVDDGAPATELWSPSDAGTPGEEPVGMVQVGHGEDRPGALNAPKMSKKRNAGAEPAGSSLPTEPGPQSASEVEKIALNLEGCALSQGSLSDGDPGSGGQDPGEAVQPCRQALRSQGWPDNGEGSGGKGAMRDACRTRMLAVGPVRCVTESHWPLCLGSHRGASRAAKRRRDSDPDGGRNGGFCTRSVTPGPRVRTAGPPNGKAEGTTGAQPHDRRDPPRR

SEQ ID NO: 997276 - protein, 86 aa, Homo sapiens
DSWSQNKLNSNILGTKFALMKPWTVAPLRGTDSPGLTVPEVSCGNGACDWRLRRNCVRAGPQLERKRALAGGPGLQNHCNWGVDIF

SEQ ID NO: 997277 - protein, 102 aa, Homo sapiens
ILYSSHDITFADRYYAYSNRCGSTHPVKFPSGHESLQAYPVLSILQTFADLRREPCRSARADATDAYWTSSTFDRPDAIVLLILCISIVVTRQDDPGGCWDK

SEQ ID NO: 997278 - protein, 302 aa, Homo sapiens
AESDAGRPCGPCVSWCGLNSSGWWLERGAQMVSSALCAADWTPGGASYSCCLSPSGQIGHNTVSSASGCAPARLMPTALPGHSCIFTCLSGLPVAAPSQRPWHAGDGITACHWGFHCSADVAILLPNDQCNNSVGAIQCPEQSVRMPCDFSTCCVMVDGSWVVLAHAPVLPAVKTGCTACPALVPSCDLGSQPAASHPQGTHPTGKEAPCTRGLTVAVALSSIGHVVRTHGPGCPDGSTAVNCQVDILVVHQCPKTLMIRYTGMVTPGHCVLPESEYKWLSRSTATPSISHKVTGTKGDVNS

SEQ ID NO: 997279 - protein, 423 aa, Homo sapiens
SPVGDRLSQGPLLVFEEAFFSFCSRQPPGVPGGPCVDRLLAGVPWTLLMVALEGSFLVPHSYSTHSPRRYYTPIYDLTLFSIYENFYKLVKIFQEHTPCIGCFRPPTDSEVGRRMRNDIGPRDKNHSWGRAHRSLAREVLAQGKDPGAKPTTQDHACRMDASVSQSTIYYQSEHILPCSTNLQRNQAQRYIYHRPGIQSRGLKHERTQHGEVRHKYDKIPSTHMAGKAGAITTTTKEGNQAITRPQEHSLESQTHQGGNTTNQDRNYAATHTKNNNGPTRKQIQTNPMAEKDEEDSDPENTMEASNIATSSRPAQHERAPSTNHRARRNNVKCTPYAWGRTTRKKKHRRQPGKQNTKTAKKRLTKKDKGNNEDVKHSRGTAGDGQQHTEDNTGDRTNYKQAPEIGDSRHTGERGSKASRRETS

SEQ ID NO: 997280 - protein, 278 aa, Homo sapiens
PPRKVERLWMRPTYAYSFKYLQNKPVKELRDDQFLKICLAEDEGLLTTDISIDLKGVEGYGNDQTYAIFIQQFYYRDAFSHQVQEWTRKRTMAIERALQQFLYVQMAKELKNKLAWLKPQDILSLKACSRKLYNLVERWHPTDQISQVERRRRLKWTRTKGRAYEIHGHRHKLLCTEHPPMTSCRTWLNRDTERDQHLNIRPDHIPQHNGQNTRHLDEEGKEAGAQTTGDQSTKTKGQTEKLAHQHETDRTQQRNTGPPATTDTHQRTTHHIEERQPT

SEQ ID NO: 997281 - protein, 79 aa, Homo sapiens
ANKDAPVPPTAVSHSEGFKRAILKAAVEQVSTAILQKKIRERHPPSGGRETLRLRRQPKVSSVNELRPRRNKLDHYAII

SEQ ID NO: 997282 - protein, 143 aa, Homo sapiens
GSAGRAPAAAESGSADESSLSTWSRAMAPDAGAPGIAVVLEAAEGRLARSALTFSTMPLRSSPALAQDQTSGGSLEAWCVVSVLALRKHRDGWCTSDGLLWQFHVEEAVRIPPSIVDCWGQTQDLQVDGCSMIVYHVFHLPDE

SEQ ID NO: 997283 - protein, 215 aa, Homo sapiens
MAGAHARAVRLSDPYLMAGWLSSGMGSLGCGSMWDLVWSVADGGSSERSGGLEPPLLRLCACGSGEPGSAGGDPLVGGLAPRKGLSRVPYPGGAVCWGMVGTDLLSSLWYLVGPSGQDSESSVALLTHVDLVSLGTGMLVPLMSLTYPFLSQLTGSVLAVMLPVVKCLEWPELACVLALVQGLLGPPRVPCRPHQRNPGPPIDFLEAFSRQDFFW

SEQ ID NO: 997284 - protein, 217 aa, Homo sapiens
  misc_feature (139)..(139): Xaa can be any naturally occurring amino acid
HRERQQLAAADKDAGREGPRAALHSVASSSPAADQGTSRAVHGQPGPVCGRPSCVAWGDESQAPGYEGMTGEDRQRPMLWILTVGSSSENSASDVKNPERESLVVPNGRGFRTGGGIPHQSEHLLSTERVSIICGMSSXEAEFSDNNTDCPHARQCYSIVHRRVIADVCDWSSLDLSPMCGKDDGRRLKYNRDVSRARALTDGKIANIYTRETKYDT

SEQ ID NO: 997285 - protein, 140 aa, Homo sapiens
MSARVCQRHTPVLRASVRRLYVVDLGEEDRCFDKVLSIVSPLPGVTPQGSRPENSRMLSINLGKLQRRYTLGDSMFEPNDNSLEHAEDLSRSPDWTFRGNSRWALGQFRWALGRFRWALRDFRWDQGNSGGDKGIPLDKG

SEQ ID NO: 997286 - protein, 224 aa, Homo sapiens
MAGLPRPKRSERGESSPVEKREGNLGGSSRSMGAQEAGRVLGIIPLLGSGETLGARFTRKRPIPIWEKISEQKIWGGGGDSPYAESGQSPMESCTENTMGAPQPQKGVGERSRGWKAPPLVREGALPTQKNIFVATHQYMSHKLIITRRQKSSQTRWTETPSVRNHTERTWERQVGAKKDNNHVGTIDYSNTRKKIGDKNKTTDVKEGTKANPNSIRQPTINTK

SEQ ID NO: 997287 - protein, 369 aa, Homo sapiens
MAQMVRILLLGEAHVGHMTSPDPVPGWASVRSPMRSLPARERDLPVPRGTVSPGKACPLTVSGTTQEYRKLGLDDGRCCGGDRINGTIDGCSVGVMNRFYLHASATRIVMKGVNSKLKCSEYTHYALEMAAATSTAMEALKGYAPIDHVAGDKRSSDDRGPVAAKRHHGEDSGDVILRRVQYQLVSPDVNGNKPVSVVELRYGTNLRPIGRNHIVEKLDSYQYDHKNGLGHWKSRQQEHYMSVNETHEMRPKVQVYQSAPRMTNRQDRQWRYANSFQKTSIKIMEPLGTPERRQDERIGSFNSNVARTRQGRALLSGEQTMRDAARDPSQRPRKERMEHRHLKASSKGRGEQSEEGPKAKEQKLDTLDT

SEQ ID NO: 997288 - protein, 237 aa, Homo sapiens
MDRRPRETHEILRVAYEGSDSEIEVGGCAPLGASLGGPRTGCNRLVNIRVHEEQQRMSPCAYQSGVTEHLSSDLTVSPSSRGYSWYQDAAVHMSALQPNERPCDRSGAMHRLRARGLTVDSILQTDDATLGKLIYPVGFWRSKVKYIKQTSAILQQHYGGDIPDSVAELVALPGVGPKMAHLAMAVAWGTVSGILQLDTHVHRIANRLRWTKKGTKSPEETRAGPGGVAARELWHEI

SEQ ID NO: 997289 - protein, 446 aa, Homo sapiens
  misc_feature (86)..(86): Xaa can be any naturally occurring amino acid
MEEEIAWPAGDVTRCASGHDAKAWIYAVRTVRSPRSTMVFHSDLVLGRLRATTPRGRRWLGVNGAREIGYSLTLERRRAAVDIVCXQSRHLLQVTSRCGTIVHICRAYTLGTDYGRTRIIGIPTILILQSERAADWAPREGSNRELVVALTGGAPLIPPIGASQQDDMYRTSYDLSLSDAPYQTSAQDAMYLLDRYSRERMALISILNGRSWSATPTESTLPLGYILRIIWAVYTLTIGDGPLIPNRKCAIPALILLRQRNYPCGVIEQPRALGAECNPCTQYLGTFNVQAILLQTSYDRKGLTTGFASGTPYGGSERLVQKSCRSSRINLRKRIEKHFVCVIRCRSQPCQLYREDHDEELGSINRPWKITFPFFNILGHTLRSALNESVAPDLEYTNGLIVTRFWGKFVRRGFPGAPQSKGPPWIGRVPVRLSSWEVLRKTLRVA

SEQ ID NO: 997290 - protein, 218 aa, Homo sapiens
MSTCPWRDVEGPEAEQSSRRALGGELKGIAEIALGPKLMGWQKPRCHRHLNHTVTKIPNSRPSALGQFVRKCKGDAPRRIQPFGERKGPLECRPTGARQHFMLLGKNRSVVQGRSGANSGYRGAKSLRTGASETTSSAGKRTHIVRTKLPLANAHRKREQQATRTRHHNSKRNLWAANPKDHDKSCKQLIRENLQQLGTTVGQEGAHSHAPTFSRTDK

SEQ ID NO: 997291 - protein, 67 aa, Homo sapiens
FSSALGGGLVPGIGFQSVEGEAAWTCGPGIQRPVARKPSALSELSYRARPRSSISDDPDRRAIERRQ

SEQ ID NO: 997292 - protein, 279 aa, Homo sapiens
MCQLLTPIKKSKAFPPKCDLIAPHCAIKYTLPRECEKISRRDKKRSTQTGIPRAHGPLTNRGQFVDTIPPRLIFSPPFRVSPLKTERTHVSPSFRKRDSVQHLKSVDHFFFSKKLHSNLGVDLKLVASSTYSFLTTAARVERNTPTRVYVDPLFMRRLTYNELSEYVAIPPQHYSLAYWAIRRPTKYPPKILFGAATTARGLNTVGNSHVERGLLGHQRTHSTSFIEPTSEPSKYTMNANTSYNAGCAVPTLMYRYLCTIIRTHENSCMLSSEDFAVPA

SEQ ID NO: 997293 - protein, 89 aa, Homo sapiens
MKHTRHSQGAKTNTHRSIIENMEVTRQGCGNMQHVQHHGENTRRGKSNPHYGHTWNTRTRPTRQEPTTGRAQKVPEIRHGPHNGNRHMA

SEQ ID NO: 997294 - protein, 84 aa, Homo sapiens
LLYMAVPDAGGPSDPESRMHTLSKLHNEEENEDARVYGSSCCIPRWDPDANTVLELWKVPMQRWKLQVQEQSEDMSSIGTRCSS

SEQ ID NO: 997295 - protein, 312 aa, Homo sapiens
MARTYLKSVTGAPTGARPETKSSLVDQYYQRWLTNKEPREVGSEYRMTEQKLSGDASSSRNVVELVPELEQLVVSGTERQASEPSPWFTRWGKRCLKVRISKGQKEVIRTTFGYYVHSWLEMLSWDLILWQHTRNASHALEVAHHPKTQRNDRAPRHRTVQGTDPIPFAAKHVGGRTPVVRYLATTLRTEGCKGGVAHGRVVIHAKGSFCGTGLEHLGNEITHLKPMGKRIRTAWPTKAAEKEIRGPSRGQQSQGPMRHAPSRRKTARQYSRPQRLESEEEGNGAAMAAHCAYRQSCRKNIKPTHQNNSGHN

SEQ ID NO: 997296 - protein, 364 aa, Homo sapiens
ARAGAQHPPLLEYPYAPLPFVPPGKPTSVGPQAAGRGLATRTLRHHVRRATYLDKDVEHVALAPCATTRTALNLAPQNYRTAPPTVPGLRTVYHVAARQLQRQRTWTDAQYPGAILSQEAYGAPLREDWNGYAPGGAEDARQRRGLTDLKLVGLPPDDRPWANSSTRKTTHHRTTHAEINPHRTTPDRRGPSMRILELTAKRIKAPALPWGPRRHQTRRTTQQRYTTEGQRRNHAAEVDMRKTRAANKHPQPGRPTVANTEGPEQDHTVYGRWLLTPGSPTRASNWEAQWYEQGRYRTIPRVAITIRASFREANTARENKCHDPEHCRAPHRRNARAQHTSVETRGTTAHQDRRHNGKHRHAHN

SEQ ID NO: 997297 - protein, 319 aa, Homo sapiens
AAWKDGVRKERYRLYCHLFQLHRACVSQGKGKRQRRLGRFSREASARKMALWIFRDNHIAIIKKKDKELNVVQGVLWGLACEKIGVVTLPAAFPYPQASQRMMLTVDEVRISRMEDRKRRPYADVNIGSSCTVGWYQSTYYGLIVHPGLLLDLSDYSYAAMAFEESVVLMNDPIMNWPRISLTKGIAAMTPKLMEVSTGRGIDPLESIDKNGRISALSTCTDASAACNQDNAHLINVLTVENSDTRSQLSAHNPCIAQAVGQAGKSLGGRNPNKLPNWTAWHETAARIIVQIHTHTLRNHYPNNSKPSQINLTKSTPPR

SEQ ID NO: 997298 - protein, 198 aa, Homo sapiens
MTEISEMNRIISRFLADIDGPREVHEGLPLEAALIAEDCRMQPWQRLGSIKVMPHAHKLVPDACDGPPVLCVRLNAMQYIGCVTRLHEMLRRDAGLNGQRLGSWNTRGIRPILGQCKLAVKSAARKESPWHRSCYSCALATYTYRTLSSIDLIGIIPSGGVMARRLDPRGLQSHVHEGVLLSRRRAPGFNSYALTTVA

SEQ ID NO: 997299 - protein, 84 aa, Homo sapiens
MLSTTTDRLQTNSTPANPRTYINYTYDDPPKETSLDGPSSQAHTKSGTDNHCAHTTRQQTTHHSEMYTHKSSTSPITIDTWLTH

SEQ ID NO: 997300 - protein, 128 aa, Homo sapiens
MESIGAKGPKYYKYPDVQELNVALTMRTAPRGVKDQSFKTDLGQTLVLIGKKPSDNGFDTVIARIGSDEHDACPALSLYLDLGARIHANNRAMKRETQDTGVTSTTTPQEPQREDLQNTLGLSPRQVI

SEQ ID NO: 997301 - protein, 243 aa, Homo sapiens
EVNPERWGACSWRQRMLCGWEWGLARRAHGAPRQGFLADLPSRSDGEQAGRGAPKGRRTVRPLAGARVETAPSGGPRNGGPRNEVHDGGIHLGSIQEDTQRSVFNPRTGADRRGALEVKKQRGRAFMRRGIWAPGSYYGWKTTWIRQPGHVHYMAAQRRTSSGLETNEQEGRQQAGDSVLQRGHIEENVSLGPLQKCGHDMGAIERGEITGETVEDVGTLEKGSRRTHCCATAAKNRVARPRM

SEQ ID NO: 997302 - protein, 93 aa, Homo sapiens
MRDCNIDAKEKQLLEMRAKADKLKRHEQHGLCRQRQTRKATEAAKGTQTEGYTHRAHKAHQYYGTPDSSQAGFSANSEKLERQTRTDASKATQ

SEQ ID NO: 997303 - protein, 74 aa, Homo sapiens
DCIRGLDLLTVERARKHSCIICPDAEYLLYTQRCNLQVVNELDSFLYADVFVVIASSGITHIILLTHPRWLSKH

SEQ ID NO: 997304 - protein, 244 aa, Homo sapiens
MHLFSSLLWGTAHECKNVLCCNYYPKWGLYNREVYYFRLCKSVSRQFTRFSTGYLRTYNVGKTYRSRSLEQYELHDTTTRVDIPPLSVLQITHCRDPTHALGTEIQPQKTPGRNLTQLHHEQRELPTKQRRQRAQTQRHIKENKQEDNHQNTPTRNPDPPNITQKRNPQKNRIQNKQTTTATTQTNTSTETTKPPTTQNTQTSQNTGKSNHTNGQHNEKNTKTDTTHQPKRQHTHKQENTTKPQ

SEQ ID NO: 997305 - protein, 345 aa, Homo sapiens
STLCTSAASDVRVALPVAMEDEIAVLDHGHMSSGMCKAWLYSMRDDISPIACYAYPSIMAPTENLEGLWMSACDQKSILQCGKPRVPESKGGGAFHGGLEDVTPRYRGHLAILSTRRLADEPLVRKGFYGHRMRRFLTTTGRTMASPIGRPPRRNGNNKHSNGMHIGHRISPTDDTQQPMRKAPPPKKDSKQRKHGRETAIVDHLPKETPQLGYKDRMQFVKKTKHPGDPKLGQREHGGPQSTQTGTTGTHTDSTTYTINMNTHSISESDRLNTQNRFVEPTNEAFTHMRAKRFPLGESDNNGSRELQQPARATRGKWAATKYSYTRQTGDDNTDTSAIRSTKQA

SEQ ID NO: 997306 - protein, 147 aa, Homo sapiens
MVTNTVRRRRHSRGGQWGQQPRNKHPRTATMETDGTARPRRTDKSDHQYGKDQAARRPRERGDRGKADTPGKRDMDECRRRQKKTKAGPTKRQAHANDASRNQSRYRRHTNKEREVRQTNGRIARNRVEGQTEGRDKKRDSRIKRHR

SEQ ID NO: 997307 - protein, 43 aa, Homo sapiens
MVDTHPCRAIHSGEKNPDLGKITQCRRYGCGTRDELLTDTKCQ

SEQ ID NO: 997308 - protein, 74 aa, Homo sapiens
ALNDPGVVAWAASRPVVTGIVRTKPYPKSRFSDGVPDAKIRIFDLGRYKAKVDEFAAFVADMDAQMKYEHAVHL

SEQ ID NO: 997309 - protein, 143 aa, Homo sapiens
LMQELYSTPASRLDSFVAQWLETHLGVEGRGARRCADRGGVSECRSISMGESVGWTSDVLLVLKVVKVGSLREWTRIYSETPETVAAGGVHELYTTDLQEASKHHKDVTEADMETHVDKDRTMLDLGTRGPEDGAESPQMLLN

SEQ ID NO: 997310 - protein, 314 aa, Homo sapiens
MPKHCINGAVMGLPCVSSYAVIYHIVHAESHYEGSGAWFRFASRPLACQSRGPIFTCLLVGPKGVHVTTIGALADIRSRFPWALLQQGDPGPSPWYSRPQGSRVNAISIHEVDAHDIVPYPVWMSCPCLNPCVGSEDAGPDPSHSNAAVAHMNLYYQTSGSIVTRILFSIFAQAKDCSLSRNAHGRSNGSKPSGGSNKGCVPTRMWTGEGQKGSFLGKPLPRFHGPFRALLQRKGTWVSKTDSIGGAHRLEDFRSLKAIPGRKSHRFWHGFPKGPHTIAAHDGGGGKERTTQGWPVGFSNLSMVQAMGSPSSKL

SEQ ID NO: 997311 - protein, 266 aa, Homo sapiens
PKEAMSVEPVRSSPCWLLKRHACLTGCRVSAGMISAPRALAAPVDFQLLTQQVIQVLPMTSANGCQAAVSPSPPGEKKAVTVSPTYAVTCIPRTSLAIGAGPLLRALSLPAPNKSHLGTKVALTLLANMFPWTSHGCTMGIATKHSLSEAQHLNGIVAQSSRERWPEQVDSVGLANRLIPIDHAVSPTVPSISKVRPVPVPHGRISRKGRPHNSGATPGHKRGHYKEFSNQGSPRSSHDALREEHRPISSATAVRGAAHIYEFTTK

SEQ ID NO: 997312 - protein, 257 aa, Homo sapiens
TIFRSVPLELDLGGGDGKSMVCVSGPRHWGKGGEGLRFPSSFSLLLGEGEAWANSHFLPFQCHNTPFLNPFRGGSGTWGFHSIGVPTFWRFQEHYLVPLPNPPIKVKRFPPLFKTPLVPALGSPHRGGGPHIGGGNTPLGEAVQPLSYPPLTIKGTVSSGQTGAGNPGPLTGAGGTQPKHGGRYSWGSRQRRVIRHVARSFTMGETPHYFGGGRKTSGDRRILFKQRFKCYPQQSVLALAAPHSTTAHASVCTPYRI

SEQ ID NO: 997313 - protein, 321 aa, Homo sapiens
MSLELPGSIMGALWEMPELLVWLPRGGSFQSLQCLWVLEVKLGALVLLLVLTLLCSLVPICVLLPGTGANHEGSASRQKALSLVSCFAGGWRLLWPLCLLDLLPDYLELRIDEAPGAACHVTHPGSQLPRRYILGTIGSIRSLRSWADRQQDSHLGLSKGRPWSRGTVQPFLGREHKVSLLVLSKPSVENWVGAQHTPIRGTCNWRCTMRVDRLTRVTTLGKWPTRQRLPTFKVAPYWQSMDPVAICLTHWGAIGLAYSPKVGDTPHHRKFSAGMRIYQCNEEVTISVPVVNYVADLWAQRAGKGKPMGSGRVHEEGAPKM

SEQ ID NO: 997314 - protein, 127 aa, Homo sapiens
HIGEQQSMVNPGCSSQSPPVTACSLSLVKSVQHACGGNHCRYLGLSCRLMSNGTRRNLDTRPGDSQRCLHDCTVVADVWRTSRSMVPVYTQIVGIDPFGMKLYYLFMVYFVNITSVAVASRVCREQI

SEQ ID NO: 997315 - protein, 83 aa, Homo sapiens
  misc_feature (12)..(12): Xaa can be any naturally occurring amino acid
IPSVSTHTYKEXRRRPYNEKRQHETVKLYDTLDRISQTLKITIHTPPAPLPVVRRSQTECTSKDYLGSCFNCPLADYVDSKFV

SEQ ID NO: 997316 - protein, 86 aa, Homo sapiens
LAGLLVIVPGTRRPTVTQDIVLCVPALPAAGKHAGSGAMGATLPVPELSKRAPYLSRNLTGGSVGAMQQAEREISARSGQLTNLLA

SEQ ID NO: 997317 - protein, 211 aa, Homo sapiens
DNPSSYMELRCVTDNSRERSPLARLIYVVADALFSAVVKNFDINHFAQDELETGCSTVLRWLRKLTHAGRGLRTRVGGAGEGVSVLMCPHSRVQLCHLYPALRLPALRERLRYSPLTKAPGVNGPRASAPIIWDRVYAGYCIVEHRLSKLSAGGAGRRRSCQDLRYLARASCRNGFDAANTRGSTTQEETLETVSSHLVHRIPMAKNAAQK

SEQ ID NO: 997318 - protein, 333 aa, Homo sapiens
VHCPYSAAGAPEDAKPSWSTTRFLVRGPSGGTPVNNGPGPRLPSAPTSHEVCIYYEKKRCQMDQGARVVKEHRRAGDECIDWAPESNRIVYLRLQTENAYMWTLKGLNIEDRTLVILTDQPGLPSMLCAVSPPRENKFACVAAGSRCDLHLLYSTHGEVHWWAPCKAHSEKAHPAQSVLSLASENLQAMSLARLPGSLCPSTVSGILLSPYIQVNVRGTGLVEHRPLVGSPNALPHQEGTLNVSTSRQVTLRVGLHWQQCNLTPAEMPGVGPGVNAPGHAPFCPWFDALRTQDAPAAALSGLLHPVALGWRCPSCQTPWLVATGPTWLPGPFP

SEQ ID NO: 997319 - protein, 298 aa, Homo sapiens
LGLGPPDGQLTPPPAPVGTPRLWPQSASRKTVGLCRRPPGVSLLGGDPTKDYRIPMNPYLNHTQPASRDSNLDRGKEARGWGERTGEAGDSSMRGTHPSIGSTSRHSWAAKKRKRRETRKRGKEEEAETPTRSKKTRGGTVTRGRAKGGESRRNRTAEKKNAGRHTARTERETKKDTDEDNNKTSRRTKSKSNKQQRKDRRAEETERPYTAEETSEEGQTEQNPRRTERETHAREGETEAAGEVGRRRKQRKPTEREERTARRRGGARRNRERREDNRKKISIDHGEQTPDEKRERYP

SEQ ID NO: 997320 - protein, 86 aa, Homo sapiens
MRTRQCVAEREQSLEHLGARYRVADNEAFVPARKKSGTARIVARWLAPYSSTRRRAATNAKCVAVDKSVSAEESDNRGGYPAELSV

SEQ ID NO: 997321 - protein, 84 aa, Homo sapiens
QAPGASEETGPEREGDLKVTDIILVELNKNPSLQSAGDERSFCCLYLLERHILRSLSDYPVEWKMPKVNKKSGIATPQSGWDVD

SEQ ID NO: 997322 - protein, 194 aa, Homo sapiens
EKVLWGLMDPSAPLQSMQDFPVVDSEEEAEEEFQKELSQCRISKKLTAPQKELSQVKVIDMTGREQKVYYSYSQISHKHNEPDDGLTLQYQQLPQSGKEDKDTGYSAARAGAQPAAAHRPHGARRSSRMTGSLQYERDMVVNLYHDLEKMTEVPGTRRAGHLEPQTTVLQMAEDCRAADCRPTCPTPHNQKRTI

SEQ ID NO: 997323 - protein, 433 aa, Homo sapiens
GGYAVQRGWALGCPGGPGMGNLRCASCGGFGSGILGPVVSGLWTVAWRPEAAGASRECKAEGEVVDAQSSNVGAGLCQGTVNDQGPCDGDLSRLSSPGPVSATLQEDQLNVISLGGALFFRGIDALSRDTNLLAQDATQNVMSPRVARSTQGPIQPRGLSRGAELQRIVAVKLRMRILKPLFGPQTRFLVNTLRDSIRTLVLPENGETGDSGSRAAVEQQDVTTGDCEREISQSSEITTFSKLRKRDLHVTPDYSEILDHRGLSLRSCMWRVIKPYGSALSEIIARGANFTVSAQEVCSTPRCTGIGQCPPLSCAKQVVVWADHRSWTRPALSACVRYHSLCRFRPRLCTHYNRLTPTVYRHAFTAPYCGRLDVAPHKSVGVVSAPTPLVVHDRTGLSGRVREFTIGSPDPALLDSARRALTRARTDAGPLSA

SEQ ID NO: 997324 - protein, 201 aa, Homo sapiens
MEGAKRPAQERIRQHFTEHRAEPLASPVSREGGPQSRPFAPSPSGSPGLDTPCHTGGARNAGAEEEPTPGAGLRPAEEYALGIKSRTSEMARLRDGRLIERRRVIDENYPIKDQNGTRKRRQYQHLYDHWTQKIRGKVHTLLAIMNLSTCGEPFDKKKAIDKFENGGLLSMGTRASLSSIAMSLGFHRQSTDAVNRWKYTN

SEQ ID NO: 997325 - protein, 157 aa, Homo sapiens
MVVYTGDRTVMATDIATLASRARQRRPRPPLLARTLNILSTSSRVLALCSWRVLVSLHSFLSSLQYTCGLHAVFFLIGIIVGQLCPEKAYAWPLFTGPCLSNVDLPRTCHRARHKKLALVGTQLSVQARWKNAMRGTNAPTPVCSLINIPVKRLDLQ

SEQ ID NO: 997326 - protein, 277 aa, Homo sapiens
MTVQSMWMQEMDVLAVLTHLRQLSFLEREFQRMVWRSRWQDDEGQDVVWRDHCDRGQKRGTGTETLANAGQSLAHDHMGEGGASSRVARIQYHETRTQTNLNEQTKTEGSITPVNIGEGRQAEGATCEEESCGQSSSRQESEGSQRPGDTTIAERTRGLGSKGLESINATRTNRGAKKALTFIRPGHNKTMGARTDYYTRAGKKIPKQQQLKGFATTGATGAQARMTWRGKDQGTTLGRTQRGPTRGSDGEPRLKTPVRKGTQETENGERRRKSTGG

SEQ ID NO: 997327 - protein, 97 aa, Homo sapiens
RGIEGSLTTDCCAGKETEAAVAQVIRGCSGGSRKMSGEDESTLEQHYQLERPGSVTEYNAWRGRGSPQPRDERCGYSCVLWKVDLSIRVCRLHESLM

SEQ ID NO: 997328 - protein, 139 aa, Homo sapiens
MRHVSGKFHMGWLQAVVARRVGGPNGRPSNALLSWKAALRYTCQCYASQSASDPGRATRDARAVDVERQMPGMPLEEDGHVEPCHMLKRGLDGWRPKHADARRRSALVPRAITMTTEEDSGPRRKGRNVGPIDSTNHAW

SEQ ID NO: 997329 - protein, 365 aa, Homo sapiens
AERGGKMAAQISNEEEVCRCSGIFRSWKLNWFLYSGVWLKMASSGVEVRGYDREPWTEIDYLSPSREQQNVLGGEGPAGFGNLTAGSFRRGWAFQKGSVDAFMLKRWATRGLCAIDPRQESRALQNLLGAAGLVASRGLTYGVLRFITGEWGRRLRGLWCSGRNSGGTAGAQLPFRVRWNGLNALHEWARSHGIELTYRCTTWLMPSTAVSSGRGRGSLGPYIRAAMNRIAGTLEGRPNIGVEEFGPVKQKAGENFGRSGRSNGVGKPRKHEWIGSLGTIQERHEDELGNNGTGKANTPVKFRELTNATKAKVRQGSKRTMGTFVGARDGDYQGKVQGEGERHQKRTHFLEDWSTIEEKSKQKET

SEQ ID NO: 997330 - protein, 271 aa, Homo sapiens
  misc_feature (130)..(130): Xaa can be any naturally occurring amino acid
PGIGLEPGPHFLLLPLTPVPIPAPRRSYLVADTGPWIMVPGVADRASLRAWSPTYGLGVPLTALREPHCWGQYLAPLDWRTWLLHLRKRTVCLISEMRDTTESGGSEEMDDSCASPESRLVHRGRMLARXATAATCNTAGYPTHWYVCYPLVPRSYGVGLVRIDATCELIAVRDVRRLRWHRRRLGIDPDYAEALRIRGSLTIGVQRPKDSKSGERRKSKRKRPPRNPIRRKRHSGPVRRALAYPPSHNGDVEASQMDTYIFPPDPVENPQ

SEQ ID NO: 997331 - protein, 225 aa, Homo sapiens
LLSLSLSLLSLSLLPLPLPTVSLSPRSPSPQVPSPQVSLSPGLLSLSYHGSTSDARANSLDCTAGPPRFRFGGRYNDAHTRSAPLFPGLGKKYDDPIYHALILEKPAGYLKGEPPQVFGTDPTGTKKGKYYGPHTRNYGGTQSVKKRVHMYWGPHTMMAIEYQGTPRKSQPQRVKTQKKSQCETHTPNDEGEAKKATHAYGRPDEYNHDQLPTTGIRRQGVFTEK

SEQ ID NO: 997332 - protein, 77 aa, Homo sapiens
ERLLAVAESASRCMLQSVMALTALAVRDVACGVWGREDHARSLWLRVSVIMFLMNVGSRGQRVLSTLREKLGCVAFR

SEQ ID NO: 997333 - protein, 230 aa, Homo sapiens
MRRERLAASKTLGTWSHLAALSVCAQELALQMGISRHCVHQSHSFTHVTVLLPNSVGTLVVICLPMPLHNLGIRESTPLIPVSHVRHESNMPLSLVPLCEQVLSRQSNHNPTNASLAHVSNPISTTRMTTNHFGLIPSESYDSRTPHCVLNAQNTPRSITSPLVYLAENPLGMGHRGKGLFSTFIHYIERAHPVHGESTCQLTRVCSWKNTLSQKRVTFYLHSADYHYNT

SEQ ID NO: 997334 - protein, 328 aa, Homo sapiens
VLVLTMDGHLGLVNEDDLQKLVALAQAVNARALPALQQINLYQDLIRKLCICGLLEDLSHPLISSFHLGAWHAPGSLCKACIQGSSCPIMQWHILLMPLRCLPEDKEVLTEDKCLQAPEPLMTGQVAVFGSDLPEKLGKQKYCLVGAVAIGLELLKNFAMIGLELTERVENIIGYVTWEHPLRDGQTSEIRQVSSFPGPWDCHQNDKGHDHGMLQAVAATIDIHISRGDKATKKPSWESIETGKLDISMNGNESVHNKSRRLEVDQNDHEKKRGNAPEIADNGKARTPKCRESLQYTPRKQVANMWHAELIHEEQSTLWGARPNRGKH

SEQ ID NO: 997335 - protein, 394 aa, Homo sapiens
  misc_feature (377)..(377): Xaa can be any naturally occurring amino acid
MIILNMLHLMSESDIMLGSKSRMQTRIRHVLFVGANGCGCCIGTDHLMYFAMPRSEVHLRNTTPVSGMKLLHSYSAAGMWAEVVHANDGASPETHEDNSSLGQVRYAIACQTRSLGCHIDPMLKAHLMAIGPRKQYETYGGPAGHEPSLFWPMAWYRFPHNTLQNSSKWRQHNWIRPLMLECLHAMTPPNLGTDPKRAEVHDRQRPTSIVCETIGSKLILPPPLSSTLGGIASIPGSGVTGQSGAGQILADPLARLPRNNPPGRGKPSLTIFFRVSLGKRDGPRGNCLPPGGYRVASAEFGRYPRKLDQEHSRVNRADIRNVQSQTGFTKTTGPMGTLYLVSKNGNLRGGLPTLATNKGVTGPLSGEHDIHYVHHFXVDRYERPPCDAIRSATP

SEQ ID NO: 997336 - protein, 153 aa, Homo sapiens
  misc_feature (2)..(2): Xaa can be any naturally occurring amino acid
  misc_feature (127)..(127): Xaa can be any naturally occurring amino acid
MXGNNRDKRTTLSVRKYVVLYRGRVALSVQGLDVNKGHMIEHVSMGSNPGVPLTMSGPWRASNDIRRTSMCTYQVRDMAEFPVEPEYGAGTRNHSVDNKNVLYVGLGRPGGHGTYGPEPELKIRDAXTEAISGEAKWADIVGSTRHKRAMRVS

SEQ ID NO: 997337 - protein, 273 aa, Homo sapiens
EVTEDVRRETQRQRRGRQPPSLGGALSSLRPGVPPLIRGRLLNAHQRTDRPGLPNGMPMLCSHGGMQVGGESRAEMPTVTPGGEPSDVRSPLSSIAATCHRNGDPSRLTTDRPRDNTRPSYSTKNTEFTRVTNHSKRPWHMPARAPPWNLGLRIGHCAATSDGKLPATALDQARSRHAHLRAPNNPRSTNHLARRYTLGPNKQRRPERRAGVGQAAHPLKLSGPEAANEDTKPTTRAHYPPPWKDPKPALPKAPTPHDQPHTFEGEHPPRAPT

SEQ ID NO: 997338 - protein, 203 aa, Homo sapiens
MPSPVSGSEAGPESSPVACAAEASAVPERDAAAPVPLSAGSLGRCHSASEEVLESLEGENGFSSDQIICSIGDLRQLSGDHPTIRKDELQQCPGPGAQPQSESNIVRAFFDNRNLRKGTQGLADEINFEDLPEPIMSYFRSQSTTTMDEELVELSRNGEAEISVPHVLHSDSDGRITLEEYDNVVEELLSGNPHYRRKESVSL

SEQ ID NO: 997339 - protein, 73 aa, Homo sapiens
MARIGKRRCNGIRDRFGEEFFYWTIQRWPMEVSEKFRKGNKKESNRLGGKGGGFGNRRGNRVGRIGGSREERD

SEQ ID NO: 997340 - protein, 426 aa, Homo sapiens
SPPESEHCEEEVRIEPRDDSIEPGAPVASRVRATYSSRRALSQSGQPTDEPNEGTEADRGMLRGASKTVAEDEATNSLTASCGCWSCVIGWLACAKWPRRLQGPNSYMGHLTHTNGTTNVYRPKGCTHRVEIYGSNWHWAKCALGLTKHACRPEEWVGIDSFITRNTMSSHNEEMHCKSGSLANAMAHWCIAASLASPSWNRRCFGTYHLECTSSYTVCLPVLSVVWSFKLRGRFLLLIRPKFSPRNDLVVRCLVTPILGWALGKGFFNKGTMPGAANVAELTTEGKDHLGFFPNCASGVFATQRLVVTNQWRNTIFGLPYSFFKVRVTQGMIHRLANHTLNADGPVLCSPGAFQHFGHNGLGAEFPPLRILGAFAKSHLSLPRVRLKLISRGEKLAPRTNCTLPDDGVLGRNPPPNVVHTQRAIC

SEQ ID NO: 997341 - protein, 102 aa, Homo sapiens
  misc_feature (102)..(102): Xaa can be any naturally occurring amino acid
MLRNAVAPPTSRETHTFEANRDNTQRGYTAGDHTVRPRVREPTTTSTHHNGRPTGRTHQTRTKAKHNTQQEEPPKTARRRNNRSSDTRDNTAKHTQTHKARX

SEQ ID NO: 997342 - protein, 175 aa, Homo sapiens
WSQSVRRLRLQNYRLRINCKNCFVRAAVASGLCVRAFPTGGRDLVSPKMAWVYHLSLAGKGIFHGSSNISILTKNLGIWLENCPLYFLERDARYYSVRALDIPLSDETSLHNKLVGPLSNSISRAEDLAISLAPRRYHWWVLDETVVPTARENKQQCGVTQVITLYTKAHKQTGG

SEQ ID NO: 997343 - protein, 357 aa, Homo sapiens
  misc_feature (112)..(112): Xaa can be any naturally occurring amino acid
  misc_feature (173)..(173): Xaa can be any naturally occurring amino acid
WTCLGCLTPDDPDDGDDLFVTKTTGSSAPGLVSLLGTALPWPAHSDAPNFIMAQLRKIHPDRHILLRQLARKCLGVNVMREEDRVVSCSWSLAGLVVDLYIWREVHLSYDSXKASDQPDAATEHVGNYTSSTAIGEDGMSAREASIVLSWEMDPWSRQPCVGLGGCTDETHTXCVPLLAHWKKVVRMQKGAFTRGTANGILGEYPELITACDQDVNGCHTVASRWERNEGRKRTEHANVSREPSGRPHASHGIRYEGRARGPELRSPEGPCKSAQFRIWAASLAFEAWTAWAFPIGPAHCLCDFGPHRSPLAVGPNRPLWRPPLTRLVFAVCLAGGVPQWDDFNLVSGKWGVLALPP

SEQ ID NO: 997344 - protein, 172 aa, Homo sapiens
MRHPNRGAIVVPSIFVRASKDSDVSKLKSQVRRHAHVCRDNCASSAPSGRSDSLQENGFRTSPGRPPTSGAPITARAITRCRMPYTWNIPHGQPLVTYNAAMRRFCRGAESRVRPREPTATNDNAVPHSKGTQSNPNITTRGQSTTTHHNKNKGAPSTNLGARPFNTGETPG

SEQ ID NO: 997345 - protein, 297 aa, Homo sapiens
MAGDAAFENAAVVPPRGEFQPSIAGGQFPPLVSSPATEPRFGLGDRSRVVSIRLIRAPMGASFLSQWPSPLSAPGSPSLYVIAGIFHGLHFKGGFNRNEDTHPRLYATEWIPHINSPPEGQRGGASTPKAPGTETLRCCATVVLGAIGSNPPIGKASTVGKTVYDQSKAKPFGVATPSRERAPTGKEVTICDHNIRPFEFVIAHRHYSHNQSGRPPQENLTLPMRGVVTLRDQGNSERRASVSPRIKGLRRVCAPVGVMCKTTKYAGLTTTRLGDTENYLVRTRSQGEYHTTDGFKG

SEQ ID NO: 997346 - protein, 45 aa, Homo sapiens
MIPYRKSNMCRLYSAISGAAPALDSSPKLHPIKPDVGVQPLPHLV

SEQ ID NO: 997347 - protein, 249 aa, Homo sapiens
MGGPLSGAISETYMSRRQGAICTNMRSQHSGTHTGRPLLRDSWNMRHTAQDLTKVSQAHANATYSMRHSMCDEKNPILLNVRNQVQCLQFKTHLHTYSESCDTHVSFRSSYWYIHKCDYGKVGLTMVYIAKSDGSQWGETCCTLLMHRYYYEGEQKLIHRRLQYARGKNVNIPKLHQPKIPISICGHVTPSELRWSDLVGGVELRNKGQIRNNLRLAYQTNARLVRMKQSIRLCQGKACAVVVICDWGQ

SEQ ID NO: 997348 - protein, 118 aa, Homo sapiens
MGYRMWIRKNVVGRVGSELHLAVSIPSKFASAWNSNADWALKGLMGISLLDGKFGVRVDQGARRAEFISVMHAEEELGGDESSNLAYWSTRSQINSRKNGCRNAIEESCIGAKEGNDW

SEQ ID NO: 997349 - protein, 189 aa, Homo sapiens
  misc_feature (102)..(102): Xaa can be any naturally occurring amino acid
RTSVVHAGTDTNGDIFVAWSVCALTRVVMRSNIGTVYERWWYEKLISMTYVSHDERCCACGVRTWLLQDPVSTKFYTKKCRELYYMCCTGQHGSALPPDSKXSQTRDLQIGVASSLCTDLNELVMGWTCSQVTLGRDQPLIHAAIRFAIGCVSQQLTTSATTMYRTASFRPAEELMLPWNFKEVVSHDM

SEQ ID NO: 997350 - protein, 143 aa, Homo sapiens
MRIYVGPQGAHLESDVQHFAQRQSTIGARSDVKSIRVQGTQSFPDFRTWRTTGEQIRNKPMCCEPNTLCNGRRLRRVPEICPKKFTPKTIWNSAQWGMVRTSVPLAAIWLKGAVGDKRVSNPGWTRGKFASTSENTETLEQAV

SEQ ID NO: 997351 - protein, 157 aa, Homo sapiens
MGQASSGKTRRKPPSQGQTSKAGQLCAEKCTPDIYGTEWKVSPGCGPIQWGAPTTESSSRERVRLPWETTTVEDHQTHTEAGIRKKREQRELELSQHRTSDWKKNPRESRNKGSGEQDPRDKSHQQTPYEAAGLRQTEEPHMRHHRTTGRPTATDET

SEQ ID NO: 997352 - protein, 77 aa, Homo sapiens
YTTEVLTPVYTNDKSKVRGIGQGPIAVPVDRILGQKTPQVWHRIGVLSRVPKGDAHSSATSRGQISHEDTKWLLQFK

SEQ ID NO: 997353 - protein, 380 aa, Homo sapiens
MPQRRNSDLPNGVWMMSDVIEDRNPFVPKEEAGGPCGVGVSAVLGACSSIGYNTLLDQRWRTRGSMIDGGGPSKILSDLCASRRTCTKESRTSHDRTHAKRRWGSFSASRTHSNRGTEAITGCARPTVSIRRDGEIYAIHETPGDDLREVPEEKVLSLGSKGNSDVERWKGSPGRSPGQPWDQGGPGSHHESFGRRRDGNQAVGGPRTVEFEGWPHKAPYVGAVRTVSRQASPILAIRKKNQKRTEGTTLWERPDSMVRGAPREQNVKATNAAREGQSWAATGASRSPPNNYAPALPSLGPWGHPGKAHARSDIGAPKRPRKLGWRPPGWTQTRAIEEGHGNPRGEPPEAGKHEHGSYIAGHGKRDTGAERLQGSHLRET

SEQ ID NO: 997354 - protein, 262 aa, Homo sapiens
MYADHVAEYGALRTPSLVQSDNSYTAISQHAYHISFSTKSLTQELLVCVCIESKVPEPPVQYETVWPDQVLRHASVPGCESTNRQSILQEGGTIAKLGRTSVEIDQVAPSVQTSCAVAMWTSPVAGTLLEGSQAERCPHSYSIGDFNILNKRKGSMVARKWHRTWAHVARTVGMGTEWSSPQLFANFREGDIDGICIGTERAYPCPSNASLHPIARSCQSGHEPYPLIRDYMPPGAATLPLIPHFTSAGEPVQGASIAEACT

SEQ ID NO: 997355 - protein, 100 aa, Homo sapiens
PKETSAAHTGGCSWLVNKLVAGAKGLTAPCSAGGFCASPWARVLLRRGVPGSRGAGHLGRTDDGLALAVTGDGRARRLRGAQRDAWMEPENARSSKRVAM

SEQ ID NO: 997356 - protein, 76 aa, Homo sapiens
GVKEMNDVARFLLGVSRALGVLAIRLYSWNRPSIASPLSKLAPTCAYESDHVGCRSQGWSRSSYMSTGTQSRITCV

SEQ ID NO: 997357 - protein, 323 aa, Homo sapiens
AVRASRIGSAAGRREDEAAAAAGGGVTDRAGGRRGTPPRCHLAPRTAPGCLAPRLLAHRIAAGFTLGAGAEAPGPELGRRSSPPAARPKQRDPPRMNLLPDWSAPCGLGCSPMLPDLGLDGLPGVDRGGKERCPPDPRGDPWASPGMTLETWNNAAGLACSHSILLFGGCRASILFISLAGTLRELDTPQAGCKELKVQTSGQWQAHQQTFHTRRVPGLVDLKGSPARRVVNSGIYSSGGPRMVAGNLGQAALTQAFKAPGLAERGKPQLFDRASRTRRLERQTWLIQRKIAQDRERTIPGGKEASGNAPFTILGRENPGNQL

SEQ ID NO: 997358 - protein, 358 aa, Homo sapiens
MPVPGAWMLRGGMSLWTFGAAPSPEPPCCCREVAELADAGCCWLSWPCCDDPCELAWHCLRDAPSDCRAGMTLAVCAKWHRCSAGPAEWCLILAVKSKMPEGLRAMVRRAGVHACMTHKLHKRRPLCVLPMFADHELQHQLALALSVVLDSLVNCLGVPKSFNTVRCRFLSRPKTMFTSSITNYTLRALQWEERHQQAPLIGDILSLVETTKIWLGDAKIDPVGEPDVEVDHPLSMVYWRPVCSVGAERRTAAHPGGPSIRTSRANDAEERDLGKHPRGNRSAMTGGNPPGDRATRGTHAHRKARTKRNKAKRCTDRRGTRHPYRKHKKTTAQNEKIDTHHTQANEDCTHDRQTKKRA

SEQ ID NO: 997359 - protein, 220 aa, Homo sapiens
QNTKWRMTPVQRGGPGVPWWPWDGEPAVASCGGFGSGILCGLGSRPWTGGRVAEAAGARRSARPDWITEWIALSPSWAALVKDMKINVPGGDLSLLPGPLRNQRSLIIFLGGLFSRMRFEDYASAEGRTGDRPVHQCSQAIKYATRGHYTWDKRTSLGLFNVASKWSVGLNPAILLGPSFLVAKGFFPIVPAVTTAWHTWGGNPRIGPRPHNNLSPYAMA

SEQ ID NO: 997360 - protein, 327 aa, Homo sapiens
LLPPVSPCADAAIMREHRALDSAESNVRVTKSVPRLLGWVISDDGTVYRSSTRSSYHEGTSDLAAGNASSCHLSDVGRAAGKYVPRAVLRGGSMEASASMDSSARRAAAYLGRVFTAGENFRSTGHEVVAREQTGATGHLTNEGSEMLVDPQVHGSVSEQRTACMSPVIVPVDGVSTYEHQLPCDGSGTGRSVVMCGNPSDGFRPKNPGGRTEYALGQVEFNALTTALTVMRCCTFDPRTACVRTKQVWVSPGTQYQLGHKTRTFHETQRNSGPIQHEILTTHTIQTRNVCSFEISTETVLLTLGVAIKGLAQEFLGKFRGTKASGC

SEQ ID NO: 997361 - protein, 328 aa, Homo sapiens
VDDLPALVLILFLVQAGGERDVCAGETGRAKGAGHVVSRLQDAFAATRAPSLSCVLREVERARGQLAGITFAASFGSRQRRAVVSAEDSGSNHTEELMFGEEASLGWRTGRALAMLAKTDGAGTKRRDSGRAQTKRAEPQWDETERTTTGDKRHRDVPRTNDGRSHYEKPGRGGTTPDGYHGEGATPVNREEQNTDPWQSQGTCDDAQRETMTQPKGNMTPGRRRELETGDTSYPQTCTHSPPKVKPTSAWHTATEDSRGRPHAASHNRTTTGAQQSSHHTHGKKRTPLKTWGDNVAYTHTRTPVTRADIGATYTMYTPKTLSGAENS

SEQ ID NO: 997362 - protein, 298 aa, Homo sapiens
MGFTPFYNHHTQHDTDPLDGRRHPPADEPPPTKQATHKRDTPRGATSPSTRDDRPSELRSTNTGAHTSRQMKGRHHVEDSQQPPLRRKKGVVYEKTLRGADLTSALYHGSHPHRGGATTPGGAPHNPTKTNTLAGRQRDSQTNRNPHPREHTTPRLQRSPTTCEEATTQAGQRDTKPTTRTTPGREGAPNTKKGDRQSTRGQQDDLAGTQLRSPSRQKRAPRVAWRHPKAVSQTAGQHTNAHPSRHYQNAGTQHNRQRKDSVTEQSARVITTPQPYNGTGAPPKSIHRLVLPHPAPPP

SEQ ID NO: 997363 - protein, 258 aa, Homo sapiens
  misc_feature (176)..(176): Xaa can be any naturally occurring amino acid
MGSNPARAGALGRLKAPAQPWESSTAKPASYTWPGPELRSCSLQSCGSAEARNRRKDFGSDIGLRLNASADGELTPPETAYIVSGHLYELASTFSFLADSVSLSPPPPTSKPFPMVSTNDPWNHTHRTHLFDKHLLSAYCVLDHRHEHGDEARPLAAVSLETEAWREKGPSRPAPXKPEEAENTPQLCISCVSDLSHHPNNVVGGVMIIFNFQMRKLRLRGSRPWVGHHAGCMSHALSWLHDGFRGDHVTQFRPASHQ

SEQ ID NO: 997364 - protein, 240 aa, Homo sapiens
ASSLVWPAPGSRFSHVSVQDPMTDSVVIVSFRVRAVRELSAPSDPDPRHAFMRTHQAERGDPQADPQPTSGPTLVRRGAMEKRVPRVITEAKGAPLWIRAQMLRDRCTMDRLEHRPAIQRSPHHHNMTPVKNLQKILPRYSEDNRGTPLMVRINQDSGRQFRPYTCELLANVCSIFTAAPDRRDKDPHSSLQDDMRTAETLNGEQLNAPVAHDISETRQSRGTPGTRTSAPGMPQAEAPC

SEQ ID NO: 997365 - protein, 178 aa, Homo sapiens
MAKKHKRQYGTMNTKRLDSTLKINYKEHTNLRPKASRVNYNGKYQCSRASFKSLRIAKNRFLYPNRTERRANGFEEARYYEASNTLNLHSAAVNHMGNVRPKLNGKTRVAHLEMESTTAENGKTNTQRKRADEKTNRPDWATLRRQGPETNRTAGKEVPNSKPRIAGLARHTPDDRKA

SEQ ID NO: 997366 - protein, 420 aa, Homo sapiens
  misc_feature (36)..(36): Xaa can be any naturally occurring amino acid
  misc_feature (52)..(52): Xaa can be any naturally occurring amino acid
  misc_feature (333)..(333): Xaa can be any naturally occurring amino acid
MARRCLGYHVFRDTSRGVAVTILGIERLGVHGQGRXGADSSVFPSTQTALAXILGSPVPSSPTVTTRTTCSVRSDLCLSKGCLAGSADGQCYSKTSGKKGMTFTGKMCTGVYVSSKGISGLGPRGNPPGPGGEFFLGLRKSPGAQTRGPGEKPNICVALTLCKAVSPPLILPVVRPIAVGFADRRSRLLCEELRHTINPTRFSPTKVACDMRHSFYPPACEEDEKMAVPVSCGSPTTAEKADKGVEAPRTRHSVGPVAEHLVAGQSHHCFHANTFLGRHTLPKQFGYDLHLWVTPLWVLSNSNAPPVGTHHGEKRRGSGNVKDSATSGEAGKXQRVPDNSISGFPPLLERGGKPAKKEGHKFFVAHIECPFLCYDAEHDVFPYDTAEDWTSSGTPPGYGPALNPRTDQRCRRDSKILRAT

SEQ ID NO: 997367 - protein, 364 aa, Homo sapiens
AVSGDVSAVHLSSLRIAVCLHFVIGNTWDHVHHADGGVVHWSVSRLPVTAETVVLLDGRPKGIPVTDELKNSGLTYDNSRAWRVSQLRSGYCCKYSYQAARIGRLGCNYPYDQLICTLGRSLTWPECVLVPFRVHDLVSYYARRISRVMRQTCETHSESAKVRTEGPKHMRFYTRTVNACIVPPIYATEFLLTGASEIDLISGVGTWPNVGGSCALKYLLVGHVGEVPFPPKREGSQISPSLLFCPLFVAARILAPHFRELETRVCLPNFNGNVSLYEITESTSEAFGDNVGEPMATYLREDTCRINNSWANSRVFSPPLDRMAVGAPFDLGVKTWDNTRSSVFGAAHVGMLAAVLNLVGRFTL

SEQ ID NO: 997368 - protein, 104 aa, Homo sapiens
MCAVTAKGASPLSCAIDKSPYSVGDKPIHSRQTPQEFSEARDNIETIMLPNMWGPFSPVSKFQTSTREGINKRGYSHVERPNFLLVSTQRVCYIYPRWCLWDNP

SEQ ID NO: 997369 - protein, 115 aa, Homo sapiens
MESQFWGRLLARCGATRGSISGTQSSVSPGQAQFRSHGGGVFTSGGFVHLGGSPYATSDLLVQFGVSCTPFGRYLCKSLSSPRLGPWSHHYWYDERPPVFSSNRKSFRTNIKFGA

SEQ ID NO: 997370 - protein, 216 aa, Homo sapiens
PNEVVEVAKRGGDNAALGSGVSQSAKALSAITMDFHASPRVVQDRVELWVRGLLLREQTVTAGSALPVQALALETIDINKDPYFMKNHLGSYECKTLPDTYTTTERELTWHIRRGKKHQTNLVPCEPAKEAKEALPKTEPEKVKGVEVKERRVNDSGRTGSNKVDDKTERLGRMGTSSTDSLFQTMTHPEITPEKGQSTSTLSSRRPVFLRLTRNK

SEQ ID NO: 997371 - protein, 118 aa, Homo sapiens
MNATYEDINGARDGRHRIREIGHDDPVQDSNQTFTQRYLQEKHGPWKRKRIRKRKENIGKKKRETVHSQDKMTRKANVNKSTKTRGTKRHQRTRRMTQRKQTDKPTQKKKAPALEAKT

SEQ ID NO: 997372 - protein, 41 aa, Homo sapiens
MALLAEHLPISKATGSLDDKRKTNGTLNPPRWGRTWLGNGV

SEQ ID NO: 997373 - protein, 141 aa, Homo sapiens
KKTAKDEEEDQTLVNLGHVYLGSAIFKRAKTCYGGQSRFLREVLPAFVSGAREYLRSDKGKESALRQDGNPESPNDIERLHRGPLRSSWGGLLHVFPSSSLGEDELRLTVYEWTRIVKATYKMASITTESGDQTIWGRNDG

SEQ ID NO: 997374 - protein, 179 aa, Homo sapiens
ALRGRVLLWLLMLQLQKSQYLHLGLGRGQYYGRVPAPNAETMHRGDGTTGPALPRPRFQILSVPGQHQPVTTLGEPMRAEWTAVYREAWPASDPHTARHPCQMDKARHGRPDSLHPLWQHQWVTVRSTANPRPGEPSHKALGRSTTGNPKVVLGTHPRDHLGKSQGKAMTLAPPTTGRP

SEQ ID NO: 997375 - protein, 89 aa, Homo sapiens
MDDLVGKLQIPEAGEGTKALCGHISKMDGQILKRYTRYTIPPEAPFRDPPGSLTHARPISTLILDTAYTQRGFGRQMTQGEVCGDINAI

SEQ ID NO: 997376 - protein, 152 aa, Homo sapiens
  misc_feature (45)..(45): Xaa can be any naturally occurring amino acid
DDILDYWIGRVGPSQVLSPPRRRCPLEQKGCWIHRRDSWTKSANXLPDTGRLIGKHVTSCGGLLAKGMVRNGGDADVSVSYVPKRGEHLSPDDSPCCVPEVHGKCACDRTRVMGTCSSMNNNILDIDMSIIEQHGDGNISRENGDAHLVRLE

SEQ ID NO: 997377 - protein, 217 aa, Homo sapiens
MDYNVEYQYSAPPAIAKPSPGGVPTCPQFHRPTPSTRVGVQDSAMLGPRCISFYYSLVGDRHADMLTVRAPWCRCPVVRLNAPCSRCPAAPVMRVRSHAFFRRRPLVRPETSTNDGSSAASPRSKLKRTSKWVCGTQCIPARTHRIADVSLHLAPKVILRGPRHDFEETMIGKQTTIVQGCERVQHQHLRIYIHGSAQTTNCTTQTKRNRQLAHSED

SEQ ID NO: 997378 - protein, 87 aa, Homo sapiens
  misc_feature (80)..(80): Xaa can be any naturally occurring amino acid
ALPAPPAAQQGKAKAKADRGDSAVKQVQIDGLVVFTDNHHIIKKKDKELKLVSRSAFWDLVCRRVGLERLPSVLSVSPQXALRGVTD

SEQ ID NO: 997379 - protein, 230 aa, Homo sapiens
RENYRVLNRLHQVQRKLARLQQERRFLMRVLDSYGDDYLGQTVHHCAEKDEGSRDTDAIHIQSNAEKNEPPEERDSVPGPEKDILKNHRNRKNQNPEVKGPRRADKEGRDAHEDETATEQGHELRSRRRATEDRVTGRRKEKTRIYGKEGGEEKPENITEEYERDNKRVTANKHMAEPLNAENSETRRPGHSEPRRHGHREALEHQPRQKKRKQGKKQRNTETKEGEKNE

SEQ ID NO: 997380 - protein, 291 aa, Homo sapiens
LSHSVLPPLRRRVSLPVSNGRRDRRLVIDNGSGIVQMLVLLGTTLTEPCFLPSVWVAPDMHGSHGGHVATKDRPTVVRLRSHEQAVAILYPERYPHVSDGYRSAELLDDDGSKIVATTTLLQASCAWPREEHPVLTDREAPALNRQGRNRRDRMTSGLCSEDLINTHRYTVTVVNPRRAACRLYSLLGSTSWHCHGPLETGVNTERCPIYEGLRPPPQAIHASWTLAWPGTLTQTTLMTESSPEQQSYQHSDNQRTEPGKFDAADINGRKLGATDRPWDIRGKEMGHRPHS

SEQ ID NO: 997381 - protein, 265 aa, Homo sapiens
MTLTVTGGRPTVLMDEHEYIFWACRGRQTLIHGNIAVKDCDFRVDRSRLVNDTGHVVGALAHSVACMMMRLIGTGGIILLNVTTYAYTIEEDVSSSLVIAVGLCLINWLVDVNHGRKGHIFLLYLVRQICGGTLWSRMRYGVTCLTTLVEQVSKMGNQMCFPVPLMAAIFKGRPKQYTDPLCWVKVSIQRKEVPIRRTERTSVYRVQRFTLEQQVYFGRPYLTTIDPTRWDEIGEHTGWTPIGNSHCPMWGNQKCRHISPIDREG

SEQ ID NO: 997382 - protein, 159 aa, Homo sapiens
MNKGTQEMTGAPIGHEDRRPKCDGANAHKSQGHEDGPVKVARNPWTFHTDVGYDRMATGTHATQFNGAKEGHKERRQVASGGKCRIKRERGWTLERTQRWGHIARSPFSDPWTGNLTREMRTEKSDAHERYDRPESYHTVKVNLWQPREHKWTKRERTM

SEQ ID NO: 997383 - protein, 157 aa, Homo sapiens
MPRGTIRSCYSAMYAGDRIEHERLAISSVNEEYTDRTIKHSHSTCQLPRFYNCFQLEVILMFYRLTSPKADQEVRCGSLSRSSRMFPSTGSRKRAGRNNLIIGMPHAWACPTRDPYPPVHSLTVGHAKTFVPVPTVIFWPVCKSRATTTVEVILHLV

SEQ ID NO: 997384 - protein, 59 aa, Homo sapiens
MAFLMLTERKILGYIQLRKGPNVEGPYGLLQDLQLDAIETLHQGALKPDRSTINLYINC

SEQ ID NO: 997385 - protein, 154 aa, Homo sapiens
MLTERKILGYIQLRKWPRTLEAPYGLLQNPFGCTPNKMSSHQGSPVITRHHRSRSPIILSSRTPYFSFFTSRSCLLIESPHPQYAQKRALVNRATLALLVYSSPHSKPKRVILKSLLIKRLSIRESSKNYGTLEFETTTCRRQDKDAREIKYFD

SEQ ID NO: 997386 - protein, 339 aa, Homo sapiens
PQPEQPCPGKELRTVNWLSYAPGVCWMLSVDCREWRAPHVFVARGESCAEFPVDTFYGVATPEESSISESCGKRYEDTCYARLAGQTMRLGKDFEHPEPSFSGPWRVPGVLLLHRSASLEHPGRTTLSTLALIIIRCAQGHFPVGGHSPSRALPPLASLHTQVGHSLISPEDDWFAHKESAHQFKIGGSRIGRNRALVTQREIARTGWTCSQAIYKEAMFGRESPGLVVPTRREKYNHHIEAVDRISPTGLMYSLIRRYIRPFWKRCTTHIGDVTMDTHVDTPPGRHPVIIIQVFTHKKRTLQRRGLKPHPPNKDDPVCDPCLVFRHHTRARQRIFHPI

SEQ ID NO: 997387 - protein, 74 aa, Homo sapiens
CLTHLSEDAVSDAMDARQRDLLTPETNYRTCTYQRWKSKSNRGRTASTELNKMCQLYPRRAQTDSKYHVGGFPG

SEQ ID NO: 997388 - protein, 39 aa, Homo sapiens
MPANGPGAGGKVVRALKAQCPGCWGVLHPRGRGPPEEPC

SEQ ID NO: 997389 - protein, 102 aa, Homo sapiens
DRSSEHVVTDAAGFPAWHAALPDIGNNIYIDSVQVVTKRIRAHNGLMTAPRTRCLLSLSEAFRFVDALHPEINVAALVDKRLSQEEKPREYVTPRPHLAYWT

SEQ ID NO: 997390 - protein, 72 aa, Homo sapiens
MSGQTWKYRGKLPLGGEHCSFCAQQAGRKTLRTLMPHPSSAQSPRTQSLRIQTELYTGGPNGPEQVPIQPGP

SEQ ID NO: 997391 - protein, 110 aa, Homo sapiens
MSNRKQAENRNNAMHCSLAILLGLYFTLLQASEYFESPMSISDGIYGSTLLVATGFHGLHVIIGLNFPHYLFHPATNISLYIQEITLASKPPPDTDIVVDVVGRISGMSP

SEQ ID NO: 997392 - protein, 151 aa, Homo sapiens
  misc_feature (58)..(58): Xaa can be any naturally occurring amino acid
LIGALLSRLSDMVCARPLISVYSANKGDSSGQKCDFAWLYFMAPIRADIVTCVCALAXLQQKPTGQGADCWCSVQYSERHAGLSGVSLGGTGQTLQARIPKMCRGGGDSALWHRGAFGNDGRLWMADMYVTQARNSGRPIRSIDRCESQDS

SEQ ID NO: 997393 - protein, 396 aa, Homo sapiens
  misc_feature (157)..(157): Xaa can be any naturally occurring amino acid
  misc_feature (177)..(177): Xaa can be any naturally occurring amino acid
  misc_feature (260)..(260): Xaa can be any naturally occurring amino acid
AIYELVVRLHMQAFAVPVELHPAKIDASDQQGTIASQAAQRMRRSKYRLWPDAEDPRTGNSEHVIKACSRYNRQCLKHRGYDTETSEGCGAKLYVVQAHAEGRASIDDSKITYEGRAVNELSVRIDSALHPRVYMLKHVHAWRSVRKKRPKYDQPKXYDVTNNARPCRAINSWKASXQESGLIEPRMTQGKFSTDPPTVVASKPPVRAVQTRLRSQSEKAMLDQEYQSTETHLACQDTVNSMHPGARMRVNIHSVLKAEXALGCQLDPHNNSGRIETFRNNASLRLDRNITLRIASQHNHWIARGYQKVKAAKDTSTVRRTFRGQEGVSTDRQVDTATWVLTMFPKHAEKKRTDETRLCKNVTEVRKSETMRRRKTLSKLGGGYKDSKQWTPGTPR

SEQ ID NO: 997394 - protein, 70 aa, Homo sapiens
MAQKGPPHAGWTAGKQRREATKQQGQALAPVGFPLKGREQIWGIDKFVGQQRLAASIGLTDTRMCAIGTA

SEQ ID NO: 997395 - protein, 116 aa, Homo sapiens
MGSPGGESPWGNYGTGALVRELYGVGKMTSILGRYMSSDRRAWSTRTEFSRSRAESGGPRHLWPEKYVLTIRVGLHIETEETFHLRKRGKNQVLPILNGTCIVRAHGWMASSNYTR

SEQ ID NO: 997396 - protein, 397 aa, Homo sapiens
ARALPARSCCRGLAAGEAQSWWGRLIGLGPLPSAMTPGNIPCHGPRDGGGLEPKGPDATASFPQYTLYTYHSPLISAIVGVISGHSQTCKWNTAPRDLEDPGAPEHIVIMEHLHSARRYTVIVDKEKKKKTKTRSKVGSERAFLEETHQRTRAGTQTQNAQEATVVEPAEHRGGRQEYRNRRTRKVTSRQKPWEDKSRAHEKITPHEGTDNPQRTTNHKDEGNEHPKLQKAQTGGEKEQETSRKRGATSKSRNKTPRQGEAQQRSNHDTRRSKRGGDNNSELITKSGTHSERENTTRAQRSAEGGKNPRKRDAEKANMTNTHTQQKPHATPGDKQNKTSDEPGQENTTRRRSAKQHQNKRRQPTTNHPPAQQDSGRRIPEVATDNHHTRMIDENNEP

SEQ ID NO: 997397 - protein, 144 aa, Homo sapiens
MLQYKKLLGKDARHQDPRRPKLHLMVSEGRVFRSESLLIRRMMKLHLGNIQSLITVGCSGVQKSCAVANRSMAVAVLPCDKHVFHGSKNWQTMIEAHVDCLDYRWLLAFDRVSVVGFTIQTQTIRVRKTSYAQYQAGPPKSGRR

SEQ ID NO: 997398 - protein, 496 aa, Homo sapiens
MVAQPEWHGLECPTSTRTGSGSVATWFNQHGPVRSSRRKARASQGAPASAPEAHQKIKEYPDHGNQSVRMTLPYEITSYQTIRTRDAASTETRQGLLQYPCGTERSYKEGLRPRDNIYTAESGTRDSDHPGNQLNLDANFIPVGVEDIPPEGEYLSTATKTETGCTDMAEQNPPHGTKWYRTAAVLTQGTRALHWTTGESYKRRVLPHKSINVIRNVTPISLNTTPTKSGANIGTPRTVSRRGHDPPRRQQTNKGSENTDNTKGLMPPWEHYRQQQEKQDSCDTRHIRWSATQTAHTKGTVGNQHARKTTEEAVHNMWPNPREYPTGDKQPRELSQFIFKTTHHSAERVHNRRGRNPRRKEFPNISHIRIVGISEGQNMGKKPNNAITKRVKWTPQNRTGEHTILVTRQRDYQENIRRSNGRDKIVGSTHPRGYEDPKDSEEPPPPETEHPTTTQEEAQQITTGSERPAHQNHKDKESPQQGSQKMAHAPKQRSKG

SEQ ID NO: 997399 - protein, 203 aa, Homo sapiens
AADTCVRPAAPGTGADAEPEAMFHEKSFLVSGDNYPPPNLDIRGGPGHTSATHYVRNTLHHVGRLHNEKKMINGMKRQGKNRENNKRTKKTEEKRRSKEKEKEEKRNTKTEEKRSTTTNTETEETAATETRKKRHQKDQTQTRDKKRASRREQKEHRQENEQEREMRESDRREEKERTEEEREEKRQREKNKEEKKRKKRKKK

SEQ ID NO: 997400 - protein, 129 aa, Homo sapiens
AAVAKYRLRSNCIDSVLCALLTVVFRAFLGGPDWSPDMLWVRLSFAAGNFHASNTHLQKTGTAECPLFLTERIIWMPDTLMLILKKLGVIIEVLGECVVARVHGLKEVFKREKTMVEVILSVLRNGYVR

SEQ ID NO: 997401 - protein, 122 aa, Homo sapiens
  misc_feature (106)..(106): Xaa can be any naturally occurring amino acid
WFQGLNQALFFKITLSLLLLKGFSLCFGPFLLFPTWAEIGLPGPRTLLAGLAPVYAIVIPTFAGVNAYVDSCGRHYSLFPRCEPRFKCLDNKYFLPVYKPWTYLLXQFVREPYSSVLQVNKP

SEQ ID NO: 997402 - protein, 227 aa, Homo sapiens
ACSTHAYLRSVIILHQSIALSSRRHIVESYGLASMRSNREEAYVVGKTCAAFRHVASVAEDHYYRSKISVKEVCADCWIRTVQSALAESGVTQGFYAQHKSTRSSLCRSLVLEPGSRLRTPQSMSPGMGGRTGNLTTGGRGLSIVKTVAYCVARHGSSGPEDPVPRKAFKDASRWVYGTDGLTRDNSWTYICKCAAGSLVTRGSCALVAYKPFGTTADWDPMGNQSR

SEQ ID NO: 997403 - protein, 125 aa, Homo sapiens
MNESSSRSHAVFKHHLHPEVAMTQRPISPRTKVSKISLVDLAGMLSGLTPREPRALRLNGVGPTINKSLTRPWGKRSSPVPGLQMDSGSQEGNTVKQNMYRGLRYRAAAKKSVLHMANREKDESG

SEQ ID NO: 997404 - protein, 147 aa, Homo sapiens
MHNENSAHDEWSNERNIDWTYLDALVLGTRLTMQTERTVIIGLIAKAALAHLVPEEYSNDVSLVDSPLMGCGLTSSGQGFVGLSLSYCPTLGVPFLHSDETQTLGWGFAIQAGHYNPRMALVSRVLGYQCRQGSKSSLRETRFVRRS

SEQ ID NO: 997405 - protein, 354 aa, Homo sapiens
WLFLPAVFGPWTWTEKLRMETIHGEEAPLMIRAPCTVPFGAYCGQGEMVAGHRWLQEMQGEKLRLIFEDGLTHRLLSVRTDADILQCHRRLIKDGRKWGTERGLDTGYRNSNNLKGSSSQIEKTRMSETVLTQTYRQFTVAGAWNGAAYQMASQMDSHPDSLIQIAFKSKPKEAKIKNPSYSGKHTGPLNAVLETISHTIPKAVTRTEFPKKIWKHVNKHPPLLPSRETGYTKGRFTVTNLWTFKLDTAENGRENFGIAKCWVREAKGTDMRTTKGQGIPELAPFTSPTTQESPKGVDKASIGSTINGGTPSVEHIRYDTPEKKRQQTDKQKEEEHRRKHNDAINQEKPKSKRT

SEQ ID NO: 997406 - protein, 241 aa, Homo sapiens
MMAEVDAEEDDRDFRKFAYRGVDLDQLLDMSYEQLMLLYSARHRRRHRNLVGSLTRRASPATSPHDMKVCLVAYGQERSESGRHCEKAREVVDRLICGDMINLYPTMVCGAMVVLVSRRVRELCSQRKVWTSHTRPKKCVRETTVTPRVRSFGPTPTRIKKHAGKNGHLGAGPLVTSGGVANARSLAGVSSPLLQYVIIASSMPYSENGLVDLLNLPKEIAWKGRIEVGAIPKKVGGAGEE

SEQ ID NO: 997407 - protein, 185 aa, Homo sapiens
APAWPSLTLIVGSYVGYTFSSSKLERRPRLIATSTQTGPGTVVTTDARSPPRSCPSVRGDVLLVSCRERALVDWTAGASAPYTVSRALCASKQGEALACCARTQVAALSPCVPSPDWLTIVQTQITGNEDQEVYVVPHPGSAPVQSSGSSRLELVQASPETHRTKSPELVGTSLDDPRDCPWDGS

SEQ ID NO: 997408 - protein, 107 aa, Homo sapiens
MPSQVANQPPYQPIRLHSLANQKNATLREQKSCIKAVLTSNPATRDKGYPRARECPIGDRKHTKKVEPFFCEYQPPIVVKLDTGPTYASSESTQTVVMRFPLIVPIA

SEQ ID NO: 997409 - protein, 270 aa, Homo sapiens
  misc_feature (267)..(267): Xaa can be any naturally occurring amino acid
MCETTNSVRRIYEYEVLRRLVRLWGVTEGLFYEGRCGANAVCSAGKGVHDGEYLGGTYPRGVVVSRRPHRKTRRENSPYYNKVCREKVLYGGGDAVVIRGEPPMWGADVYQEVNNEEDNPWGVVAAIILDTSRQDLIKRKGSSHNIRGGGTYYPMTRYTIDEAMVCCLLSEAPPALILFYTTVWATKLWVTQSYFSPHSWWVFLQQHSCYNLEIATTRCRVWRRHPASLLVYGSKPTRIDSTNQYDRRGPSPPDNVCSKEGRESTPXRRR

SEQ ID NO: 997410 - protein, 85 aa, Homo sapiens
MPPQANKDPSFALRRGRAYVTHLCTYKRQNPCGTHNCRECSWNAPNAMFTLDMAGAMHNRHGGPPRAPQKPKAKHHRDNSPAGTR

SEQ ID NO: 997411 - protein, 331 aa, Homo sapiens
FAAPESYEEREISVVSEDRWIEQLLVVAENSEVQPPESRSKEYRRRNIRKKTALAYLVGSTSAIWLQMTHQTVTGHLIELVVQRYIIVCLDVFLNLQVTLIKFVLRDAMHEMEDKLLRPKAGRHSPGLDVLSCSLKTSHVAAYFQTFSDFWHPVVTPALVCLSQLLTRVPHPVPPGRGEGGLVRVLPVSWMYVALSPEVYYLSYIQFSSWDSLEHRQRPNETLSRRFPRLVHPFRALGKNSELLVVSCVERMSGTWAAGGRLSLRCASQTEGPKFDKKGKSHSDLSCLGVGLALLKALGAHCTGPCHPSKAIHGGSRTLPPGSPGGLQHRR

SEQ ID NO: 997412 - protein, 206 aa, Homo sapiens
  misc_feature (98)..(99): Xaa can be any naturally occurring amino acid
  misc_feature (111)..(111): Xaa can be any naturally occurring amino acid
  misc_feature (137)..(137): Xaa can be any naturally occurring amino acid
  misc_feature (147)..(147): Xaa can be any naturally occurring amino acid
  misc_feature (164)..(164): Xaa can be any naturally occurring amino acid
  misc_feature (180)..(180): Xaa can be any naturally occurring amino acid
  misc_feature (205)..(205): Xaa can be any naturally occurring amino acid
METWRNRYSTREGKMKNYSSKHRYQQGTEPPHTCAVIRTFNIEHNLVTREERRELKDPPEDRNAGLPEMNQRKHRADTTVVWSAKNAAGARHSITVTXXRLTTLIADALGXIRLELRRASNHGHALRFETYLKMSGXQTREDHSRNXSPRVVKSVYSVLLGYAXTRGNARCPYWGADLGXTNDSRLGMTKEGYNTTLCKCRFPRXV

SEQ ID NO: 997413 - protein, 286 aa, Homo sapiens
EPRLPRAGRRAWERRRLARELRRESCAASLRLFFGTAQWIPGGLSCHCLPWVPWQIAEVERACQLRGTAFRVQLAISWDAVGHQHDLCPDPAMTYKGALDWAIHWQASRPLSRLLGTLGKEHRSALRRGNYCENHSQGTMQAETDVGGGALLLIPLNACPIPALRRPEGGLDTKSHSFAPDGYQPSEETLNPTAGMGSMGSGCDDWAPRLALPGRTRYDTLEGDIATETANVGTTLTAWSDRDITCHTLGMVLLGESNLKPPDPRMRHQAGPRDTGQIGTHEKRTS

SEQ ID NO: 997414 - protein, 141 aa, Homo sapiens
MTHPGAKRDNRGPEKLAQEEIDPTEQQEGVHTRQTKKANQTKAKTVMQHHNNRRSKHTRKNSPTTNKREDHTQQKKTYKQSNKKTKNNRTQPPQRKIKNDTTKTRKQTRNARYTKEKIESTKKQTQKQATSKKGTPHKTTK

SEQ ID NO: 997415 - protein, 230 aa, Homo sapiens
MEVARVISQERQVLERQVPMVRYRLEQPWRVVAGAVQGRAQRLSPGAPGAGAGDKKEGKGNRESGATEGNFNTEKDSNQGPVKTPKERKHETCGMDTLGKTPQAQWSANVQATGTKDHPVGGTNTGEEHIKAGSFSAWNAEKKLRGLQQIETEQHGFNSRAIPKGARPKGTWSVIPVREPTVDTSFKVRETPLRVYIPPHDERILAAAWNSEERPVVEEIVGKNTRANYY

SEQ ID NO: 997416 - protein, 182 aa, Homo sapiens
  misc_feature (89)..(89): Xaa can be any naturally occurring amino acid
REAGVEGSLQPEVKAHCPSFVSCCVPRIRALPGVASSVRNSILGFPLLCVNSSILVHRLVFHRMLAEEAQSRSRLPLLRPCTAQIMARXTSVEQVSSWTMERMTDGVRQTVVGGVLGARGLLPAKRCREGPRYVSTPACSGVALTVLLQARVAPGPSVYMVGPYAASSQKLSMQWSAITVSA

SEQ ID NO: 997417 - protein, 209 aa, Homo sapiens
  misc_feature (120)..(120): Xaa can be any naturally occurring amino acid
MIGGKKGAKKKVVDPFSNENDGYDVKAPAMCNIRNIGKDARSSGPKVTKIASDGLKGRVFRSESVLDSQNDEVAIVARIQADLLEDVQGQLDCTDLFPWHGSYPVDKNSSSMGSIYTIAXDENGVCDMAFKRVSEIVRKERDPGLGSTYVCPVWILVMRVCYIDKRRNNQHTVKMHLSALDTERGACISPRREMIGNHDPERCQTNDLK

SEQ ID NO: 997418 - protein, 450 aa, Homo sapiens
YSLYKVFLLVSKKRPLFGNKGKKFYEGSQIREVNNVQEHGGITDELASRDEKSISMTKYRVMSPKRERVVQSHTVQNHTQAHKCGDTKRHNSDREWRQRRAKREARQCDEQNRRRKTTVITAAETMKQSRKKQSNKARSNKNEEKRGGKRLPKKEQEPKKRGQKKEKTDAEGATSTNKRGRQSTRREKKKEGEKQREHKKTQPEQRATEKETTQGKSTTVKQERGDERRGREGGRERREEEGKRRRKREKTERARGRRKTEAELQDKKGERGQEDTHIKEKKKERERNEGSTAKRAKKTNQDTNKNERAKNMTEGNESSKRSTAKKRQATEHAQRRRARQTSGGDRSEQTADKRREEETHEKRQQVRDSRRVAEENQRRTNKEEQKNQTTNKKKRQDRHNTKNERTGKTRNTERERERTHEREPPKSSKQARTSQETTEHPATQTREPDH

SEQ ID NO: 997419 - protein, 237 aa, Homo sapiens
RLFKAQNAPSPGQSQADSSSLEQEKYLQAVVSSMPRYADASGRNTLSGFSSDPHGQSRKWGSVRTSGRSSGLGTRCGDSRTSWQRRTGHHTQDTTGAHHTKPGTFLTSADGDRPSISLGGQKHQRQGCAGQNRLQTRWELDAHRGNSRTRQVKARLQEAAERHVSQACPGCLRPKNQDSFLRLTGGLREDDPESTKLLQVSVHGGEAPESGSSEHMGHEDGLGTLTPKWDPWRRGSQ

SEQ ID NO: 997420 - protein, 36 aa, Homo sapiens
MRGFTFADTREQVLCLLVDKAVVPLFPRRFTVCRRL

SEQ ID NO: 997421 - protein, 128 aa, Homo sapiens
DEYVPRAIHGWIQNLGTMDSVTLSVRFLADDRLESMIKPFGTFGSGLVSSEQHGPKGRIHEKASESWVESLSMWMLDTERSGRAGCDCACQGFPGVDPGHMERVAQGLVEVRAASSIDSGERTREDMT

SEQ ID NO: 997422 - protein, 76 aa, Homo sapiens
MQSGRLRGVITRRANRDDLPFAQGSRHRSSLAWFQRRMTSKASGDGHWRTLTGLLCKMSPKHGRRVQGPLPTRMAH

SEQ ID NO: 997423 - protein, 410 aa, Homo sapiens
GTGAAGWSTLCAGDVGGSGGAERGRLGPHPSGRMLAGTLGPHLTTALAGPEMNCRERGPEGGPMPPLSLACRPIETPNCWRNLSHPATIHPAVRVPRQRDRTRDTSRNPTTEWAIKGIVSHKLREETVNRSTSKGSTQFGRGPPLTAGNTTELHRHWHTRSWYPRASLEQPYSRCLRLRTSEPNPLVGTFRHEAPKRWRIHRFPVESHKQSKDFRFTTTPRSKDPVLERWALHNLCDAKELLAWAGYTNAGVDLPNMHGAATHGANRRRYEVTHYGGAKVHRGTQSRVVPVGRWEDPNCHDAVDRLVALKFRRKDSDNNAPDVKALSWTEHYERRRGVQRKGESNRTHVAHTYVRTRNTYTQKREETQLDHSHTKAGTTPNQVERIQTNAKEISPQPEQQTSQPTEAAAR

SEQ ID NO: 997424 - protein, 152 aa, Homo sapiens
MWVSAGLELLTSGDPWASASQKCWDYRREPLGPAFPLSSPLLPRVDHACPGSCIWVIGSPACIMGDCEESSSPVGPWTSETWGLRPRSRLGLCQRSPKFQASSVRMVGFPDSAHAPLWTFQCRAHTDHTLSDMRETPGGTPKGPIGDNISQA

SEQ ID NO: 997425 - protein, 107 aa, Homo sapiens
MFCPGCRNALIVDEGQRCHRFACNIVPYVHNITRKGNQSEVPKKLKEVDDVIAWSSAWENGDSTAESCPNANILMLTSMQVQTRSADEPMTSFYKCCNAQCGHRWRD

SEQ ID NO: 997426 - protein, 158 aa, Homo sapiens
MIIRFRHRQAVRGKTWGRLLMAGGAFCSGPRRSGRLSVSDPRSRRTLRVARIGPAEPAVQSNCACQSDRYAMAQMYTKRSTIRVPRVKRSNPIHPEVCSFHVRFNPASRMTPLSHCISESPYNEVLYDERSRITPFELAGGGDVRRKFRVYQDNIVEP

SEQ ID NO: 997427 - protein, 422 aa, Homo sapiens
  misc_feature (306)..(306): Xaa can be any naturally occurring amino acid
ECENDPRIDQSPCAVHPASEHTSVPAAVCFSRHTVPKIGNGVQWRMLERRDKRLDRVNGRNPQQKDPEQALLLKPCSFHSTRARDALKEAPLATVQGTKRGNPEWVTETGREAECMDHGKGKVTRAETTGRCQEIMNHGYHVNVVDRLPEKNAKLKVSCTCKGVHVCTFLDDLVQVCDNYLVLFVSKGVLSTKYASKCVVNPTLYMLHFRLVYHIGPISYVCVDDKRTMTQRTLLQLSRCRLPWWSAHKKGEDQYVVSRHNFQHNVWSHSPNKDGLCRRTCGKPGFARSKTDKPPQFSAPLYSFKXSNRGECKDRAFYPRVSDGGAITSQEEINVETDGRHFPSPVSHTFVGAHITIARLVTANNTQCCWGPFYIYTHSALFWRSGTIMLRRTTSATHATVIVEEDGTLAKMVWHRDNYGQL

SEQ ID NO: 997428 - protein, 146 aa, Homo sapiens
VPLKILVSPWAAAAARCYRYCNEQALYPGESRSRDLEVVPACQKIRHFMTVGRKTGNKWMSCPLCGHMCVMMTMSSCPLKSLEAARICANNVHGKKLWQKMRFHNPGAAPTHSNVDPHQTSMSVLVLGADYGSNTGMLKVPFVKAT

SEQ ID NO: 997429 - protein, 109 aa, Homo sapiens
MAPSVKIFSKGCEKIFVRDPLPSSVREAVCLPVNPVGTAHLLLWCSPRVLHKVSLYITAGETPTVFPQALQFLLGGPQVPGPISNRLYGVLGCGKWRAQNFVSSAIEFG

SEQ ID NO: 997430 - protein, 274 aa, Homo sapiens
MTDNSAQESKDVGSDEEADEAGEGNRKNTNYASIKRMKYIDGAHKRTQEHRLFVIQNTLYVQSSRAGTYWRKFYEESVTSCTWGTRTTEGGQATLLIEGQLAHSRAIRECYLPSLGGHPRIDPFNEVSNERKNATYESRNYVMFAAAGGFIQWGSRDLVGMNVSNKPTIVNTSTLCLLPASVGLRYDLPWQGIFVLTLDLTFISRKNTLLPKEPVERETKSFMKKVHFPAYKKQFGIKSRRSDLWKGFPFPSLKRGATLRSHGEENSHQMTDVS

SEQ ID NO: 997431 - protein, 116 aa, Homo sapiens
MDARQRRVNLSPEELQERSNRYTLGAREYNGWLKGHKVLAPRIEHRVGHEFWRTANLAENSSQAWGGPSKGPAEEELNLGWYTYWRDTPVKGKEETLLTPYYKIDNKQGAVLHKGG

SEQ ID NO: 997432 - protein, 196 aa, Homo sapiens
MEGVGNKFTLQHNGPTRLTRNNTGTVGNGVARRVARTHYNDTLNTGAPSATAVITNLTGHNNCAPGPQLANAKRRTPPIQRGGNSAKTMSHSDASRYRAKTPREQIIHTPQSSPHKETPTRGTKYMATVERIKKQNDEAPKMATPDGHFACRDDRNTLRETYSRRAQPTWGRTRPSVEGTTKQRTGRPTLSYRTTI

SEQ ID NO: 997433 - protein, 370 aa, Homo sapiens
PVVSRLFGRKLYQEDVGDRSVKYVEPLIGDLRSEKMVKNIESQTRHVSIATHLTFSSVAEHHTHDRDVSLCGIWHCWFLHEDRWLSGACNGSNTTYRLSRLKSAQCRRLNEVEDDLVDAPSSSLRHHVVLYTKVGEFTVEHTYEHEKMLWVCTSGYTTIDKMEGLLTRRHEKHSVGIDWHPPIRRTEDPPLFLRGPRLDKFCFVSSWRKRKREVMGELKRLKVWVKKSTRYGAKDIGQRGENPRTCSERGTFPGDRWRIQRGNTHGRGLAGAPTGNTGQWASEAHQSGGTIPKVNTSSPGLKGEWTRGPLQGTVGTPETKTEVPRRQGKHTVWRKDTPTDGEPTRAFRQERPFCDNQRSGGEVETHAEEN

SEQ ID NO: 997434 - protein, 259 aa, Homo sapiens
MTSPRPRGGKEQSRGTSRGLQDNSDPPDPASRDPLTTVTRVTSTATYVSDLDDLLGYLGLFDIMAAHSLMRETTSRTGDRMWPPPVFPPKKRGADPKAGTPKKAFMDPPKGATPWSAFRQQRRTRAPGQSCNGKAGCQNGSVPFATRPREEGAPYTYLVRVPRAPRGHSSRTPTNGNPHSPPTKGVSQPKVHQRDRNPPLTVQRRKLPLIGLITVAPKGGYGLLKHAPNSPKKRVLCVTLKPLAIGHRFAHSNRPPHTF

SEQ ID NO: 997435 - protein, 149 aa, Homo sapiens
MACRSGPEREKWVRKTILQRESTEGAPKVHHRIASDLSFPDLMNMGLGADRSFARRRPSRLGPSLIVTSQSSRGKDVTNAFSRVVGGDLGALGSPLRGVTTGAPEIRSELDITFTTSVWGLSPQIGITREAPKKGGEYGTRGGTEGEFA

SEQ ID NO: 997436 - protein, 174 aa, Homo sapiens
LSADALCVEPLRADLEASCTPPGPPACRGYASLFVAIPMGHRKTDEEFDARWRNSSLQARLRLSHACGIAVIGINHHLLTYDMVPGAQESLHAVFCGPCYARVRDWLLLRYSSYPKGVRGQMHGPHKEIYPYVIQELRPTLTELGVSIRRNLGLDKRVHRHGMGFPKDFLTLRT

SEQ ID NO: 997437 - protein, 86 aa, Homo sapiens
LYWLLADLRSAPPLDCTRTQRDTVRDTVSMMDVMMVETEMGLSSTVILDDTAVCEHSCIACRNIQGSEYVAMSLDRERLLLSKLLD

SEQ ID NO: 997438 - protein, 205 aa, Homo sapiens
  misc_feature (205)..(205): Xaa can be any naturally occurring amino acid
MSHECETRARPAHPVFKAFVAIVGPTSGLTGSGRVSVNVLHWRVCTVIRVAIDPVPSSHIWPPLCAEATGGTRLGKPHTVPCKVTWPFVALVLVRLIPGPRGTGIVSAPVPKKLLMMAGNDDCYTSARGLHCHPGATFAQATFDAISKNYSYLDPRTLEGRLWFTKSPYQEFTDHSSRTTTESPAGGLKVPVWLHIGFYPQKVSX

SEQ ID NO: 997439 - protein, 264 aa, Homo sapiens
QRFPSPVAPRRSPSPFFMASLLCCGPKLAACRHRSISAWGYDHVDNARNDFSTIHSADVWIEVRSLSAEQRFLMNGARENDIAEPYSGDRVRRTELYISQCAATVLAVAPRDGFSLSCQGSGYKYKRQGTTLGVASVPRAALSPRSSSSPAMLTRLRAASCVTPRSLSRIPFARRRHLGAGLGFAQGCDDVNRRSRQYSGITDPVGRRAAGWGGLFQSRHNSMLRVIPGILNKRRIMHLVDNQNERKEDKNGTIREKHIREGKK

SEQ ID NO: 997440 - protein, 37 aa, Homo sapiens
MRSGYGGWGLSQAVEPAWCCLSLRAGGLFRCQAFCAH

SEQ ID NO: 997441 - protein, 94 aa, Homo sapiens
VEKPDTNREETRIQCKVDDLVCKVKKGNLKAKKPKKGKPRIASTQSGSDPLSASELGLGILADLLMYFQERSDDSKESNVRRDQLKSPKGCAET

SEQ ID NO: 997442 - protein, 260 aa, Homo sapiens
MGARRRAQSLEPWFICAPFAFFLSRLKRGLAEALNRPVGWLMGLEGLLVAGWQADTWTGFIWGGQIWPSLPDILTRTETILCPLNGCVRPGGTMTKAIHTYKHSLSPMAFTEGSSSFLGLQILCPSGHEKGVKHIFSVELIWGDYCGTHGGVRHYCTNIFLKDLSLGCHIIRLHWGTPNRGNNVGPIGATKEKTRIQGSCYKKTPNKKRTPFIPPRNGYEPTPPRLDERTEQYLHAMKDKRPPQDRNDTVEEQHHRQSVK

SEQ ID NO: 997443 - protein, 72 aa, Homo sapiens
TPRRLRSRCGLRLKLLGCAPCVSNMIERSVVEAQSRMQSVCDETIEQYQYHRSIDIPRLVYHHEKNQNFFLC

SEQ ID NO: 997444 - protein, 195 aa, Homo sapiens
MAVERSDYWRSEQNSKMCFQMYTYLYSWTTSFAGEISYMTVIGVRQLFDYRPFPVKTLDPLELEAPEIKACVYNAFGYMNVDRRVETPPVANNEHVSLSRINSTQQGNDPEQRKRPASNGLVPLMILSKSLGPVKSVHMRPTNACTRGVRNQAIKASRKEKINEKTVQTEDTKETTLVNNKNARNPIDARPEAYA

SEQ ID NO: 997445 - protein, 268 aa, Homo sapiens
SGYNVLLALHGANSILNCVQLGSHYMVAVPARMVYLTVRRFLPDLEGSGVIQIEYRGPVNTVHHMLQRMHDCYDARMNHCMCLCMCNRSNHRNATHDAWSPDASRGHVVSHEWKVCRSKMLRSHRNETMNSRWVRSVWRLAPPKQECDKVAVVVIDPVARWASMNVRPPSSGKQHLGIHGAVRMRISRSHVTLSLCSSAARSFRLVLGYTGVEGLVNDDGEYPPEGPTKHIIEIARWMYRSYPVNVTHGTAHVFLTRNTGPRIVTGKE

SEQ ID NO: 997446 - protein, 254 aa, Homo sapiens
  misc_feature (37)..(37): Xaa can be any naturally occurring amino acid
MWNDMQAGRDAERAKELLQITLVRWIGRDLVRRRWFXAGLSIVPVWIVTETTDWIALYACPALFLWLLASIRPVACLPVCQRKERPAYIAEPDSPSRARIYMGSGPMIVVPVCSIVYILEFITTCCENPLESHQVAPLALMNSTKYFAEQKSRPIEGVLDTRNGTGYRGAREVQGTWPTYLGIAWQTAEPHFRAVPLRSHVLPLARWPSLGNLVFYRKPSYPTRLEELTIGPNGHSHGPRGPSRNLDPFSPAKS

SEQ ID NO: 997447 - protein, 218 aa, Homo sapiens
ECVDLLVGPGAAQASIQEDPWNCYMCGHKGTLRADGWDERTGLPVQMSSTNNHDQELTSKGYPLSRHEKRKPIRVLSLFDGTRYQGSWCQKDLRHSGGPYISTRKVCEELPSQVGHGADTKEKDHVRVRGHVQKTSTQEAYPRGNEGPMRNLAWNMGGARYHLQIERFLPIQVKHHDTQKRAVLTDGAQDTDTTYQKYTNPDRPLPLSATRTHRKREE

SEQ ID NO: 997448 - protein, 99 aa, Homo sapiens
KWRMTPVQRGGLVGPGGPGMGNRGGFRGGFGSVHPGDRGQRTDGLSGLWAEGQGDSLEGKGRRHTELDALSPKLEPALVKVTIEDHDPLEGDISSTIIH

SEQ ID NO: 997449 - protein, 134 aa, Homo sapiens
GQPHLRDLQPRRPAEAPRAVGLIQSMATWTVRLPALRCLPPRVPSGGSVRFCMNDPRGASWLLHFAAISHFSLHLFRGSSRCSFSIRPGGMLPWGLSQGNVRVVPGPCEALDDYGVIQEKCTWRGHARGPEHQA

SEQ ID NO: 997450 - protein, 401 aa, Homo sapiens
YTHQHFRGMVLIHGKLYTLVLTRPAYAAHDKEGIPEIRWMNGESVYPSVVQTMKGSMTHLARWRLAPLFQHSLVRLPGPVLYTGELGAPTRVMVLAWILSEGQDERSAVNIVLDRSSQFPSSDTRARGEYQRVCADNLYMGWLVPSPLIITYVSSKGSAWAGPGHVDFTKSPVGLGDLELNDCPLNNLVNRPQDLLLVGIAQSASSTPPGSEPLYTMDRLGPGARPYTGANIVFPPASGVPFDGSSRGGATSDLMNLSPFAVPIIAVGAPPLLGCPCGGFEGPLCSPFVSRRHLVVTVCFRCGRGLAAFSSAPHFALFGPLESTPYLLLELPPCNPYQRFPGHFLSRTFCNPSGSLRWHFPKGLFLDLSVLPECLLRGAGGGHVVSRGRSSLWVRHSGGGG

SEQ ID NO: 997451 - protein, 180 aa, Homo sapiens
MASMVDPSAYGCKYVAPFPHHQDQDRKSRLMGLEALKSHSNGEQRLERNTMRTSLGPNGLDKMMVDKDGGCSTVNLTDEGRPISTHCIAIVDSLRIAKRDAMEHVPKLLSACVKLEMEHNTADAPAPGAWNALQKKQAQARRPNEPKNPSDQSHHKNEKYTPQDTHATKDDLSDERMDKD

SEQ ID NO: 997452 - protein, 96 aa, Homo sapiens
MGGYCTTLTGPRVAPILKFANIDDVYLRGLFTDTAIEAAKDILCSTARKFALLPVGAVWLLTRNMLLRFILHTFSEWSNTLHPVGNTHYQDISFST

SEQ ID NO: 997453 - protein, 186 aa, Homo sapiens
MNTAADIFNTVYEDYNDYGDIIKETMRKNKADRQQCSVLRPLYSVCNSFLYMNMIHDTMAYHIFREIILYNNSGHKQNYDYDERRIKTKEDIDSRKKNEENAHRHNAYTNRIGHQHTQAIITNKNALNIPDTRGEKHKSQPYTTKHETHNAFAITHMERWNITPKVQNIRLTEPKEQNRKPGTKHG

SEQ ID NO: 997454 - protein, 123 aa, Homo sapiens
ERELVSSFLGFFQAAGKNGGIQTERAYQKQPTIFQNKKKGSGVGENVASEKLPDGITHKNHSARGPSRTPKEGIFEGTIHLTTKVRHLSNVRKCEWSHIYRGAETPPLSVGSVDVEPNTSDKQ

SEQ ID NO: 997455 - protein, 226 aa, Homo sapiens
SPIICNFQTLFYLYLAVDACGLSTLRHGHPVVCVVHTGPVGARDIMQVWSPSCDDTMSCLITSMLASLTLIMQFSTTYISGYKEASWYINVDREDANIIHTDRNRGRVWDIRIEEQSLFELVASHLHSICEFHSAQHGIPPKVARTLRKKGRSFGHEIGNTTVGQRYPRLPEEARTNTNGETYLLRGPKDTRFRISHRNYRRCHRRNVNVEKEPYFDTPGNPWLRH

SEQ ID NO: 997456 - protein, 104 aa, Homo sapiens
AGDEREPDHASGFAAVRVAAGGRGRRCGSRDRRLPPRPPVDSERRCFYSDRPLHLGKRLQELPLAAPGPQLQGNRTQTCRRARDYSAKLRGPGSCPRCPEPLCE

SEQ ID NO: 997457 - protein, 411 aa, Homo sapiens
VSVAGSGGGARRSPGASTVGSASHGGRCSTMDDHRQTLSAGRCTSVSSRQDFLRITPRHAAAARSSCDAQCRAQQPAVRRRSAATVGTRLDTFTVVTTGTSLSQRITGMDPTLGTPLLAVDWRLVRLPAGWSRRTYPDWVTNQKWSDQSKFPPAVTHTTGYKSNRGHQVAPTPCACVTQSFLPEVSPELNFVIRKLHGHDRPRFMVPLVDTEHLGQYVAQWSTLHDSTAPNSRTCQVDSPHWNGDNRRHQTRGYGGTTRRPHNREWEITPRDTPGGTPERNKEAHRSSGANHRTPKQRAAMRGRRQIGNVQKRHQHRGKTNNEGLHTGYNQGDGDSTGAPSHHQKRDKQASRQNGGDQGKERDPQSATPEKGGHPGSWGENRAVGEIIEPPQSKAKRELGDNTNNTRATHR

SEQ ID NO: 997458 - protein, 125 aa, Homo sapiens
EPRVPLGRVDGPYSRRWRLESCAGRAVPRVFVSFLAPALVVSPWRLVRHRPAVYPARSRVWHSVAFACVGTSVSYVAVVSSPVHAVGIHLYLAHATVTTAGYYELGIHLAWFPGDTWSSALCGMM

SEQ ID NO: 997459 - protein, 111 aa, Homo sapiens
MKVGGGEPREEPSPEVDMSDRGISKHARMSTDLFTLCHITQLVLMRYARLTMVPAKHRRTEELGGAQTFLLTKIEELPTTDHVAFRNSNSLNLGMKQAEHFGTRLRLPASS

SEQ ID NO: 997460 - protein, 218 aa, Homo sapiens
MKCTHDCAIGAIEYPRSKNVLSCEWLPTFRHTIRLRRDTDQESDFLWLITIEAACDEDLYVTLRYSHEISEDTAQLNKLSVTHTGASMSQQVDDKMKKPDYDESLSRGNLGRLAGRGTKGNQCIVGPELFLVMCLGDVVKAASLSPLWDQVPEVPIVSRRVVMTGLPDVVMSELLGSGLTVSTELSIGTKPGTGWSTRLDRLVRPPSGERLIPFGQLD

SEQ ID NO: 997461 - protein, 121 aa, Homo sapiens
MNLENPKDSANRRIPKAYNATGNYWPQKAPQGTCKRKTGRTYAKQGALTPKTQKQAADNTHMHSADTMPQIPLYHSNHDIDRAINNKEHSRHTPPATHNKHHKRITTTATTQNPERNTRHP

SEQ ID NO: 997462 - protein, 38 aa, Homo sapiens
MEKGKFHADRGYDEYTRWNIPWWDHGPLGVGAHILLDW

SEQ ID NO: 997463 - protein, 341 aa, Homo sapiens
MAHPRELVNVLVTVRRRGRTNGLLPVVDSHMNDLQDTDRGMAFPREGGRETLLRHISRTGSGSLMSILDAQAGTWSSVLTGTFNGTTGSSCLGSYSPVSHGKQFDCIHHGSRKRNNARQFTKVVRQLELQKNPYQGAETNVANNKREDAKKVCYERFPPNGLPLNLQRRTAFYRAALSVCMTEKGGFSTIRGELDNAPEGTKDDENRYGVVIRIPVQRKTVVVTVLGERLQDAWTNFGQPRTAMMIGTSNYPKGDLVILARNGRVGTAPISLGRNEYPIARTCDSLHTDIIWIGQPYLGLGMNFKKGVDATDCYRVHYFEQGHALTKRYNPDKNDDVQVIT

SEQ ID NO: 997464 - protein, 145 aa, Homo sapiens
MGAQLHMTIAEWTPQGDWNQEDRGTMNGSPGLKLLWGGLEGAPQRHARQPSRQAKGKRSVNTRRMVNSQTGRANLGTPTGHHRPARWKSGRRDHELTGGEIGAPHNEGTTRAALSKTRKDGFKPRRRRAHEHDTTHKDHRPLEPP

SEQ ID NO: 997465 - protein, 278 aa, Homo sapiens
GEERDSAGPLNQLPRDDALHSRFTPIEQDGVLIAPKVILPACDVHYLECRATCIAECVSHQIHAWDPRWDGNTGLIVNMVEQCHIADRLSEMHVGPTNSGHAFCDGCAIRDQPDKTFGETISLDIPKGEPEWVALCIANQTFVVDTLLGLRTHGSPRTSHGLDIAFIVGREKGIRYAPTENPFDSDALYTQANRARNSPSLGAMFGDPTGFRNIEEDSALVKLSSRIDRRQNYKPGRALPQTRKRPKLGETQRGDPLEPAFLESSRKGMKSFPSAEQS

SEQ ID NO: 997466 - protein, 76 aa, Homo sapiens
SASVVQRHGALQEVLRWWKLEDERDGSMSLGDVSSAFLKTRDQRLPGLINTAVRCVVAAAHNQAYDSDCSATRQER

SEQ ID NO: 997467 - protein, 290 aa, Homo sapiens
ASRSRWAPLALPEAGPSVGDPGRVQFGISEGMPRNGRAEPGRVVAHILVRNPVPGVADGCPRGRQKDSQHFSVERYHRDPGCSPSSVFHPLPQLGHTRINLVTELNEPRLHMKIEISSLWHYKTVRWCQAIFHGGVISRHETQKTMADGNENEIWRKFNAYREKDLRTEPGDQYCTCMSMIILIDKVPRITDTAPSIIQVLDDAHGCYYTLEHLTGVDYLHSTHYAPRQLSTPWHTHSKQPKHGDNHTAPTTQTCTYQKDQHHKAKLEHKTSSTDNPQRQSPNPEHENPE

SEQ ID NO: 997468 - protein, 175 aa, Homo sapiens
MCLETLAWESVRSSLCLGYTRDTVVFASYERRSNRQDNSWMLLLLCDDLAPGLSEGIDRQSSMASYEWMNVGCMEPFVGKQWTTQVYSSPYEAKFDLLMELAPAGTKVPAPAGICNDETHFDSKLGHCVRSCTAILIGWDEEAFRCKFTVGSMPWSGSRYCNGHRLRVGPLVSIG

SEQ ID NO: 997469 - protein, 261 aa, Homo sapiens
AVSLLSLVLLSQSEPQRWVPGVVSGGCGGCCLTDGVRAVQLPVMVTWIRSAPLPVPLDDPALRNTEWPVPSERRSGRVPFLAQQGRARLLVNRRTTMAFRLSWTATPPVLKTAREKRRRGPECWLGSVVNESGVIMWADRNHVHGLLIIDEASQPLIVPTEGGGIRIRCVMETVSHTNIPGSEGVTAHEPDVKLLCCMSPSGIITLLPAKTITLEEHSQVTGNKNRLAEPCRDALVGITTCIVNLIDDKSRTPRGKLSGRT

SEQ ID NO: 997470 - protein, 115 aa, Homo sapiens
  misc_feature (115)..(115): Xaa can be any naturally occurring amino acid
ISSLKNLWVLGKRKANFASRSNSPKPSLFSRVPLEWERFTDTLKGEMRQRKGRFRAVAPGRMKRAHNIIARKQGRTAFQDRPRGLRDTSSGTPGEDQVSQDEVVDSIKAKRRTPX

SEQ ID NO: 997471 - protein, 247 aa, Homo sapiens
MDLYDLAQAAGGAIDPDVFNILVDLLNLNVPPLACLTVCSMFCVCRAEASERSPKTLRSVSLPTVEPCPRPEGETKAALPSGEHWPWRNAAGEKDPAEDARQPSANRLPKGGGSGKSPRGAASRMGQRLVVSFVPSKGYVFPPSSDNTLFVRCKRVQCQKKTYRQPHLRTQNTRGRHFMRGASKTASYNGATGSHYWIQRPHLFLKGSTHRGDPKIEGVLHSTHRASRLAFNKRNAAHYHQAGGLPM

SEQ ID NO: 997472 - protein, 197 aa, Homo sapiens
MPHMWVLALGKAGPLTLGLMLEKPKNKRLHLCLDLPAAPRGFRQGTHPSKCALCKGAVVCKSLQPSPLVDARKGKMAFSPKRCCSQRGARNGGQLPTTHEAKWPENPWGCSPFVGAQNAALTPADPQRQSWGRTQTPPCEEHSGYSVPQIHREADFPLSLWQGGPDKKAKGRVRRVVPEDQRDPENDLVEILPMDEH

SEQ ID NO: 997473 - protein, 197 aa, Homo sapiens
  misc_feature (85)..(85): Xaa can be any naturally occurring amino acid
AVSGPCWTVDPGSGVRGGSATEAFYSPVLLSGCGLAFSLWIPVVNTLGHCELSFYHQWNLVRSGAPSRDLLRRSYPLSVKKLSRXPREARVACREDWIRAVDTNTIDPKDTENSRCKTLIRVANATARMDASSHLWQTIDLVRTPGAMCATFVVRCGPTSQACVPLRILDDSNVHTEFWMCTKPLIAVSPKAHWSTL

SEQ ID NO: 997474 - protein, 241 aa, Homo sapiens
LRAEERGTCVTADAFERGRGPERLLAARVLTPARLPSGLCRRAGELRETAVDLVEDVSARQRMRGIWMSCTTQDKDSDCAEDQRDSKCKWSNGPMRKTEQTEMDLDEDKFWKRQGLEVPGTDAEFPNTELDTAMPSTRVAESYMKSKTYVKEAMGTKKRKTKKKVIRSMRIHDSIGTKKQRENMSCTKTALKGARDGENRKMHRRTPAEGNRTNLKHREGWKKELGVRTQKRTRRTTKYIH

SEQ ID NO: 997475 - protein, 325 aa, Homo sapiens
GKPSSSWFWKPRYKCVNLSDSIQSPQCTVYSLSVDPNTWQTLLHERHLRACLEHKVLQQLRSRGDNVYVVTEVLQNQKEVEVTRTHKREGSWPVFPARSHCACEGDGPGPSEPRRTTDHASPQGRTTRHFQGGPGWLLTLIETSFSSRIRSTRTFQTARDKDTKRSTSERRLATVDPLASPLMRCSTLPDQIGVPDGGGGYTERLSRAYGQRWRPSPRNLELIGTREAVPAACWRALDAGCLRDPDGPGALDEALDAGPEPLGGGGPGRSSTRDGTMNALVVRPPGHAGAGTSLINGGYMVGDTTMLTYTQNKCYRKHWTATRGA

SEQ ID NO: 997476 - protein, 249 aa, Homo sapiens
HRAMSWKVHEMLKKWVEMLKVLPSEASRFRPCHVQHLPGGCAVFMTQKERKPSPVGRQSLILGCPFLDPMHSRELLDYVITLAILSFKGEPEPFHTMTIDNLQHCSSRRCGARHAYVRWPLWTDYMSERCTKCRQRISQQIGITCLCLHSEHRQLQADMSLYSPDSTSLLKYETAITVLHVLMGKDVDVEQMDSYRRKLAKIKSKVSMKGIWLTCQSKCGKGTGNIAPDAIMEGDDITGGRHIPFGHHI

SEQ ID NO: 997477 - protein, 244 aa, Homo sapiens
GTLPSCASAGATAARRRKPKPSPGPSLRGPILPWCTLGSRSASAAGAQSCAHEPCAVEGVGVAPKGPWVFDASAGGFLPPCQLDPWAGAGPAPARELAHRHWACCCFYTGGTFVPAPAGDQLSPLLGGPGSFHGRLVAPRSYRASTQLVVRTWLRDGIWTSWAHAPLCLLLYFRFYLLHLSPISAEGEILQAGGRTPPRELDATCGGPITTAYGAQPRETRDGTQLFPSWEAYIGNNEDIPVAC

SEQ ID NO: 997478 - protein, 155 aa, Homo sapiens
DALSAPAQQAAARSADSSCCARSCLPNCIEAVVVADSVPTVQASVGCVHAGPQVRQHGTTLFTVTANAQGLAQHATDCQVEKSQSCRTQAPRDWPTEDNFLHEWPEEGVDRRKATHLSEGIRLTRHSDTGEGAGDPKYLRKRTSTQQGTPCHERV

SEQ ID NO: 997479 - protein, 717 aa, Homo sapiens
MPSDVLEVTKKYIAGPHIGFLIKTRNTLDPWTRYPPRSTLNRANRDGTWTQHGPHIPADIATATPIDPLTTGQVQSYHHTPTRWTGDGTYGPSTQKRTAEPIASSRHIQTLRIFPDTQCPLEHNNNMRHPTTTQGTNQPRTGLNFDLSTQRTQDSNPRSPIRSNPEETTQHRITNNHHNTTPPHHSTHKHPIDNQHEVENQGDNGQRQIDNSAIGAKNDTDRTKNDTSTSPYKISHKPINIWKAPNMPEPTTRNRTTKRATSTTRQFTHTHVDQRLNRRDAVRGTNTHERARKASQTPGGPIKNATATTTRGHTTTQEGTTPTLERPQQQRPTTTDPTNHREKSNKHTERTKSEDKKRSDTHVQHTPQQARTKHNNDHHTRNTTAGQTDQQHTPKPTTQSTQQQQPHNTQSHINHCKQLTHTRNIAQETRPTAIPPHANTYNSETAHNTSSYTSKTTYAIHTTITTTINPHKHINQTSINLTHTRHKTIHPDSYPKHRTTIWEKQRMESEYTHDNYCDDITTSIVSKEEQRTEPHTNKHEHTTQQTTHTQGKHTHKTRGRERKPKKHTQTHTMRDSIHGQIVQHRKEKQVTKNNRDIRPRRTTDHNNTRDTPAQQYAETHRTKSDDETSYSISTEKQEGDNATASDGDRHTETTQQHTKTNEAYTNNRGTRRTPETALSRDAECTPRTQADTKSRAGETRSHQNRHSRSNQHKIREN

SEQ ID NO: 997480 - protein, 485 aa, Homo sapiens
LPPVGSLLGRCRGMGEAECVCCAWVRRRRQGPGGECCATSPGRSETVVWSPEVECGLFHAMLGHKPVGVNRHFHMICIRDKFSQNIGRQVPSKVIWDHLSTMYDMAGAALSLRFLPFPNPGEELRPSRRRSFREVREGQHVTDQNEAQMTTQADWEGRQGGPPENRGPDQMPAPHTFERSCGRRAVRTRSSRAASQRAAQPPVQGARERLTKTSGRHADRGGATRHGRGIHAGEKRAEGTAPRRRREHAKCQERPQRGTAATARSTATAQARAGPSGRARGMLGPPLSRKEHALRPGNGVTHEAGIPSLREAWVDIEAVGRSHKKGCTERRPERRQQHMKSFTLRAPRSAGKVSMSGTQTDEPDSSYSTVGNDTAAMQTQVEHRDTGERDEHSTDEGRPPAGGDSHEGERTRTPEDEDSPRKREATPERERRARHERSRSTPDTGDPAETTRRHRRAERRATPGRAARVSEPTHRRASGGKATVG

SEQ ID NO: 997481 - protein, 139 aa, Homo sapiens
ARKPDDPESNEEEGDSSGGEDTEESDSPDSHIVTWNPSVESEEGKRECQHEMMQDGMTPGERWFDKRQGKTLVKLPETELPYHCFGSPCNPMRKLMISVVSDTNRLGKGSHAFLVLELEAGSFIECCETKPAGLRTRKA

SEQ ID NO: 997482 - protein, 81 aa, Homo sapiens
AQISDLWVLRGYVQKVGANCTDQHIRDSLASSDLRYENMSDYRSMHSLTLLSYQTLRLHSSSVLLWEGGQLWTVEDSYHHA

SEQ ID NO: 997483 - protein, 363 aa, Homo sapiens
GSTTLRAELSGAAAVWAAVCGLCCVCAWRWLAVPGRKTNSCVLGGPQPSWAPVRNPAWMLAVHGRLFSTADLLRTIEEPLHSIITQHMRCCAVVPTIPRHEFQAWTQEAFGHCMPGSLYSAKRRCLNTGTLISNASDALEQTCVTTMLVSDGQARARTVDDSLAGRNARETAPSPFQDTGIGMTTGNELVSNLGTDCPDRGHTAFLDALHYPGWGPASTIIGPAHWQWVSLLSLSPLRWLDKQGGSVLIAAHSAQDAGRQDLGLPTLPFQAWIAGRTVTAESRLKTRHRGKVYDTRAEAAHSTSSITQPCTSSDLCTVRTFAQAVVDPGAARRLVCIQQANTATLASQVYAIERFAMIATNER

SEQ ID NO: 997484 - protein, 221 aa, Homo sapiens
GDGRARASRAEGVRRLPGTGAGDPAEVHPDPRVARVTPSTVSVHGGDGAIVSSGKLELASKKARLLRCQEEPVADCDYWTEVGVLALQVCGTTSTMLGRRSGTVQGANTLWALRIWLLNGRLGSTLNSYSLSCANVALDNASGQRLNAVVGESRLRAHLKIETSWHRRIPLELLAFPSLSVFHLDGIVGPYCHANFQRWQTLCASGYWVGGDRALQATQSD

SEQ ID NO: 997485 - protein, 412 aa, Homo sapiens
  misc_feature (400)..(400): Xaa can be any naturally occurring amino acid
MRLCAPSSALQSSSGPSFCNDRTSVDMSRSDNAASDRHLNAWRSKVIVEAVLIGPRLWFLATLGPCGQSVQTGNGDGLQYFGKPVVRRPWLGPDSLPKTATEELALASSERCDGVTKPPPFSSIWRYGVWGHPLSVRMAHWTPRHEWLGERATVTEQTGQGKIPLEMQDRFHRTSDFCNPVEGRPFQGADHIHSEDTVQNNDVSFDSEYTATLGFDQEDTSNQRAFGNTVSLAEQQNKERNEAQGNITTSRTNEGAKSDTKRTAPDGSAKPRERHTTTHDRVRLEARAQKQERARPKKVGGHNRGNEDVSQDREEDTHSEKHYQIVTNTNKKAGVEDNDNTGAAPTKTRPPANNRGRREKEVSGQKTEEKKETAQTETKWRPPGEEYETATERAGTRRVXPRVTNKRRAETR

SEQ ID NO: 997486 - protein, 171 aa, Homo sapiens
KDQCTRNLGWLGPSRRTSAYVGSVVFGSRMTCRYSLHISLMASHQHSFMTTGILLEDSSLSLSNGDSWMSNHSGKSNLDPVMEVSQLIKSRVLVYGSPYVRGMWLVERVRSRSPHERCVAGGSQAKIAKVWIIHVAALHREEDSSELELNCLLCTLDQSSDEGGQYLRCAW

SEQ ID NO: 997487 - protein, 179 aa, Homo sapiens
VRNRKVVITHSFRNLMMQMKMMEEIRALPLREFDHLPEKLKNKRRSGKNAQDDSEDSEDKDVKTKKDDLTQQRIVKMKQTDHENVRQQRQAASGSNVFKRREMLMEDVGSEEEQEEEDEAAIPGERFRRAMHDSYVEDDDDGDYGSSKKDKHNNDWLSTVHPLSTNRYKHLSHPLWGVV

SEQ ID NO: 997488 - protein, 85 aa, Homo sapiens
LVLNSEVELPVEEAGSDTAKMRRPYGSFNSSECKTSTLSKTQRWSIEHTKPAIRIISELGGDLVSRSRESPESNVQCLMYFDLGR

SEQ ID NO: 997489 - protein, 109 aa, Homo sapiens
  misc_feature (83)..(83): Xaa can be any naturally occurring amino acid
MAFLYAYRAIKFYAIYNYAEALNVVGPYGLLQPFADAYINSCTKEPRNKPADIYHHPSDITRPRDRIKLSTYSVFLLVILFDXLRPRARRYSNSKNPFHGFQSPFLNRV

SEQ ID NO: 997490 - protein, 171 aa, Homo sapiens
SINSAYTTKILPPENGRRPPTPGGPLRRMCALLGFVLDLKRDFLAACASMIPVRQCFTNVYTFNSVRKSMSTVIRMPEGGFRLFSNGGPHEILLEKVQPTVLKQHTGELRWLSELGTGDDMCEDRSLESEWLAMAVTIRICSQAFTVAPFVMQGHGSPDLVSNAELMDRMA

SEQ ID NO: 997491 - protein, 110 aa, Homo sapiens
MTPVRTWVARGALRGPGMGYRSGFRVSLTAIGSTGARGYARAMEPEVHVATRPSETCDESECDAMRVKSVVLSDMQRRAALVNCTLHCMQRFHWRGKFYVLRYSPDAIYH

SEQ ID NO: 997492 - protein, 109 aa, Homo sapiens
  misc_feature (51)..(51): Xaa can be any naturally occurring amino acid
VRRLPGTGAGNPAEVQPEPKSQSDPVDHVSAWGRWSQPAISVSGSTLKTAXLQYARESLVLTFTLARVWLSGPSRWLGRVPRVQTLAVPLSGTLWPDIYLPCYWVHCIL

SEQ ID NO: 997493 - protein, 378 aa, Homo sapiens
LGERGSSDAVSVWARAELAADTWCADEPSSRRSPEHGSVRDGGALSWRRCCTMFSGIRAAVQSAAWRSSSTTPADSSTEILQATAKMLNYQGHFTLVMTQCCKTNKRILYKNWPPTTKTSTDSVISRYGKAIDKNVDSDISSVGIDGMLAGRQPNGFSMKVRGWSTSFRPGIARMWHDGASDQELWIYTVRAQDQKDTIMMELTTRILDGIQSVQSHEETMTTERRPASRSKHHAETSDLIAPPSKAEHPYGNTPGQPPERENKNDGKRTKRTSRTAATTTRQQTATLHKKQMRQEKDERRDEQRTKNNTILTRHAHYKRGVGDSAATTRGKYPCEKQTETIRPHSINATKMGYNQTHIGTDHHPQEARNQIPRQDHT

SEQ ID NO: 997494 - protein, 117 aa, Homo sapiens
  misc_feature (47)..(48): Xaa can be any naturally occurring amino acid
WKHSLCHPRPECRGVISAHCNLCLPGSSDSVCLSLFRSCAWDYELHXXQPPVLNFFLFFFGRRGVPHNLLCPEAVEVLPRGVLNSSGLSTVQHPSVPSLEVLKKNLLACAYKHLPEV

SEQ ID NO: 997495 - protein, 211 aa, Homo sapiens
MATGPHTRWWRRGRRTEKVNAQAGARYTTLSHRGPDRRRAPRGGKGIATGKEGSTRDANGRYIERTRRAFEDDDPKRERGKNGRGNPVTSMESAPSAECGRRESRYATGEHRGVEQPHKYKRGRAAGARERQRTREVVDRRRGVMRAGNTEARGNATEKLAPKRTERLLSQWVNTGEVERRKVPTPSEADPKRGQTHTSPEPGRKNTYIGT

SEQ ID NO: 997496 - protein, 180 aa, Homo sapiens
VEVTSSLTPACQSLMHRRDAQVRQVDLEANYFLKIMQLLDDYPEMSHLWEQTHVGSKQMRRSGMSLRGKASGADGQGTTMMRQGPSEGTWKTTQLWRNCCLIIRRNVGLRSPEEDPLAEIREHCCWPIRCHTVCPSAVCHLAHVNVSLCQPRTLVSGPEKTSFIPGFRVSTLKSPGDHHL

SEQ ID NO: 997497 - protein, 179 aa, Homo sapiens
GSEVPYHLDWPGAKLVAVCAENELSWTAIWTLCLDQCPPPPPTETPYYPQSSYQIQDSDEDVRSRVRHYIRRMIKSGGRALQHEPWKKLIVMMTLKRLHKKPCPERHQKIGSKRRQVGPQQPVAPASRKDTPKKRASPAQGGDTAAEEGRARHGKRRKSERGKERCEKEEESQGEEEAG

SEQ ID NO: 997498 - protein, 156 aa, Homo sapiens
TSAFEGAAPVLLRAPLPCPDVTHPRSGSADILMLKEQNRLLTQEVTEKSERITHAGAGRSQGSSLKQRVNECPPALSQQDGETSWIPHFIKSLVDRSEDHQGQPGTQPFEEWAPQSEPHHSPGLETTAAGDRATVPASGAAFPCTTLAQNRATTKG

SEQ ID NO: 997499 - protein, 147 aa, Homo sapiens
  misc_feature (125)..(125): Xaa can be any naturally occurring amino acid
ILDELESMPLKMANSMLDFEHKDTAAIRELIVSHCMAQYDLVLAASRCIGEGGSGQCLRIGSDPIAFNYRNSSKVDATGAAQEGILVVESEYLSNRLYMVNDITEGVTLPGARSLMFGLSLNHLXKRKGELFRGIEFWQSMEFAYTQ

SEQ ID NO: 997500 - protein, 195 aa, Homo sapiens
MVGGNPETHQPQNTAAHRGDHKRKTNIPSKSVKKHHVQQHHYTLDGKHTSPRTHAGQERLTQRGSIYHEERRRHNQRKQQYGAERITKLHIIKSERKKGAQRELCATKQQRTTTPHEKGAQTPLSEKHTRSEKHKEEYGRQTTNALSHRDTQHATPTQLIPDPTRLATDRTHQENTQQTARGTPEEKRSTPPPRH

SEQ ID NO: 997501 - protein, 312 aa, Homo sapiens
AQSRCVLLWGLLVHEVMLTPGCPVSCTKDAQTLGVVNDRLEATSASDRAGRCLLQPMEMPVVKRPASRISRLDAVLSLTYDVATTSTVRSSQPKKAETARSGANDSEIGALGRPEIIGFLGTDWSDRTSISRHDERVRQRSLNSSRIKPLGTQSDVKGYPMTGKAKRRNAGITTHRKPARIGNPKSNPQRPQPRGTPQTGPETGCVEALAHNAVSNNIGNHNVRSTLSLIPDPSKFMEHKTLLSHGHQEGKGLWDPFRCAFEATQFEEEIIRGKQPTLGNKPMSWAQCDNPNKFNTWERTYTWGPEAKRYPS

SEQ ID NO: 997502 - protein, 239 aa, Homo sapiens
AFEVKQTLVVAMGIAGSDVSKKLLSMILLDDNLASIVTWSESEGRLMFDNLKKSYCLYQLTSNMPEDHPSSVIFHLLQTFHYHLGTVTILCIDLGTVHGFLADHPVAYEQAESDIMKRQARNPKTDTTLNERLISMAYGQIENDPGPVEASYTYFVILAENGFLPIHLIGPPEMDWDDRWINLMWKHSYGQTRGTYEQSDIVEFTCHTAFFRQYRGAVQLSRLATSVRPGGTPDVPATR

SEQ ID NO: 997503 - protein, 267 aa, Homo sapiens
RRPEKWRTFKLTLPTKRQAGPFFKTRERGVLAGEEIGQGKKSPEGHYKELRSLGSYKDNPKEALMWRATYTIVKQRKMCPFTAWYKVVSHNLGGAESPLFCGAVVCNTKEYEKKFCPKKREPMCVLDTPRAREENIISVEHTYRFRSAEKVLHQQRRDILREEKKSGTHNKRKTADVVLSSGAYKHTPVVFSPPPADDATSYGGGGQAELLRKKNLREWLNTQILAGANNQEDGWRQTPEKRCGTAGRATYFLLEASARKRTQQKDV

SEQ ID NO: 997504 - protein, 144 aa, Homo sapiens
MLQRGPGLRVTDIDELDMLAPVERSDDLSPRRPCFLGRGAWFPRVERLGNQTRSMLKQQAPWSTLHNLLAMGNIANSQQRTWDLKTKACRGLPKGLLIAKMAFASAPVPCGLVASLDSPLLLDVVGKTRSAPLKSQEIPRRVYT

SEQ ID NO: 997505 - protein, 214 aa, Homo sapiens
LSICAPRSKVAITVPAPQFGHHRHPRVWRVGASSDEESGGINLSTIQTFQTRTNVSRTSEQSILHPPAVDPLAKWSSGSGVPVMGSEMPVEPTQLTQRVPIQGHPLAPSAPIKQTQHFILVRTCAMLGIDRSIARVDSKNGQSTLKAKSVHFGALGVVCHWQRNQDGIPRQGTTHDKHVKVPPPRSKMDLGTYRTGPRIKITTEDQKITEEESK

SEQ ID NO: 997506 - protein, 123 aa, Homo sapiens
MAEPSGASSDPIPSPRRPSEPSRPGPSERQGCPESPDPDTVRRPKSVLQGSILVAGNNESETISGEDVNEDWVIVFGDTPTGIMHALSHGLASQADQSRDRINMKRSIHGSPYRQIVVNQINA

SEQ ID NO: 997507 - protein, 205 aa, Homo sapiens
PRENRARCIRLGVARGDGRFLGRAGPSVPLDFVELILGSGDTLRVHEDRAAAMRVTIIGRRWPWIAAPHPKPLDTPDCQGSTLDLCLTGPESVILSALADRREGPENYSSRTWDGRSEFGRYLEGTGGGRIACCLASDLARRSHWSKSTCMKRAGRLPRISLVIRPKAGTLGFMLVPCHKRGGQAPGGKQWIALGIAHPRGMCKD

SEQ ID NO: 997508 - protein, 184 aa, Homo sapiens
MPGVLACGPGELPIGAGTKARPPGASSAALSLGRTAGAQHRATPTAIDMMFPQSRHSGLLDTYPSNSNSPPRTPAIALKDEFPATAMLSTTASSSNVTSWPVQHSQRLQRHLCSTLYLRACPTGFEHRRCTNRLKIRQNGLNRGIWMPKGPSLNLLPRRHQQQSLEETHGRGPKYKGNTIPPKL

SEQ ID NO: 997509 - protein, 254 aa, Homo sapiens
MDLPGDSSPSVPAASVPPASDSSIYGEPWSPKRPRLCSSRGSHSSRWSKASRRVLAVVLERCHGVYTLVPVVPSHAGPPYHRHQRYHQDPVHRQATASPPRQGRVVLAGQVSMAGWGYSRRAQVSHLNLPVNIARASRTSVKCQRALEAESSGPSSTLRRGTRTTLGQKEGPFTKGGPGATQIQPWVVMLGRHRQVHRTPSSVEAFIGVANPAKFTSIARYTEVEAHERIYEAQNNCIQHGRPYGTTIQAKFAS

SEQ ID NO: 997510 - protein, 112 aa, Homo sapiens
  misc_feature (63)..(63): Xaa can be any naturally occurring amino acid
HIDLPCTVTAGTDLEGTAVWATYTHDIWGVSSRAERAQYPTFDTQGLREARRTIVRITRDHCXEDNARVTTRHRLNKSYRPSELLVSLVHRGFSVPCRPKHIVSARQSLHLR

SEQ ID NO: 997511 - protein, 103 aa, Homo sapiens
MGALLTSNRALGETLGISKAQERQRRPLEVPRRGGTERAPKGKCRGADVTIPHRVEPGRHARGKSYIRHKIRSWNPQLGQTLKGGKVITSPKKTQQNTTRRRE

SEQ ID NO: 997512 - protein, 133 aa, Homo sapiens
GPYVPVGWPGWPDDVIWERRLAAAAAVCLQLAANRDGVLALWTACAGSRRTESDVCACSKTPAGDHVRAHALRSGPVWSKDGEEEQAQPPVKTTMPHRESTSEPTREVDTWTETHSTERDTQETGHHQETSDH

SEQ ID NO: 997513 - protein, 133 aa, Homo sapiens
  misc_feature (17)..(17): Xaa can be any naturally occurring amino acid
LACAETQSLEQLRQAPXFADCSSVCAAACISAVRSQCEIVVSYRAGRQCSVSVAAAKTSKHDPARLEIEAENHYWLSMPYMTREQELRLRRLVLQEGGLRGLTQACAHFQVPPVIDSLAGRSSSISNVTMKWS

SEQ ID NO: 997514 - protein, 103 aa, Homo sapiens
MSKLVNMQLAGNRGECCDLGRSATGQDMGPRPYSAGGRITDMIAVTTGLAHGASAEPTYGLLHVVGSPFAAWRPIREFHDVTPRACLVGYLLTESMHGPLVNF

SEQ ID NO: 997515 - protein, 238 aa, Homo sapiens
EYFSDEQMRFRAPQLYEQYIGQYLIQEELSAPPQNPPDQPSHGSHRRRPCVAQHHQTLTSTAVPYRRKPRETTQHTRLCCRDTHTGQARAGTEPCLSDSAHDGQHSASEATTRSNPPTRRHPTQSDNRHDTNPQQRRHIADTTPRRIQRKGENRNNDRQHSVKDMNAATEKTRNEESTQDTAEHTHQQGPTQTHSKEPTEPDSSRRRPQRPNTPQARGTGTPRKGQTQRTETTQRTRT

SEQ ID NO: 997516 - protein, 154 aa, Homo sapiens
MAVLTREQTCVAMGQQNCAEQMIELLTVDFLELHDGVLVFDRVSVVWILTNKMADTSGYRTDSLIASVTKQGTAQKSRNERMMRNHDDREVQTECTCNEVVHEIELPVQQLEQDIRKRLVRSIYPLHDVFVENKYYLLQEAPSLNSERRSMELH

SEQ ID NO: 997517 - protein, 349 aa, Homo sapiens
MSKGPAVGIDLGNTYSCVGVSSTEKSTDHCHMIRETDTSPSYVPFTDTERLIGDAATGIKVASEPQQHTVYDANKSDWTPAFRCMHEVQICICNNIGPVMVVHMHGWPGTDGPQVSNTTGEEDPKSVHHPRRQDVIAVHGVTVDTHRTDRGQTTHREDPNTLGNRTWCNPSAKWVPQEGPAVNHERCNSSSRSGDITQSRMPGNTVIQHRGNSQRGYTIQGTIEAEDRKEHKTRRWQMPIKGNKLTGDKGQTKTTEDKGKSQETKANTRVDDHNQLRTPQHNDEGTNTQTRQWNEHHTNTVHQRKERRSHGENEPNKERGHPRATHQGQGNETNNTTPLGTTKQTRSNT

SEQ ID NO: 997518 - protein, 91 aa, Homo sapiens
MGSRRTKNQLLDKRSAQKTTQAELDTKDQPPNHRTKPPRNGEKPPQTQKKRHTKKKTDQPTRGSRSTHNTEPTHTQKQKRSNTDEETMKNK

SEQ ID NO: 997519 - protein, 317 aa, Homo sapiens
MREIRALQAGQCGNRIGTPSFGEVIMTMSTVRSDPTGTYHGDMELASWNRINVYYNECHQRGKYVAPCRASWNLEPGSHGHPVRSGPYRADLPGRTHFVYGQSGAGEQSGPRVTTTEGAQLVDSVLDVVTKGVLRAVNCLRGFASVTQYPAVGGTGSAMGTLPHTERSERSTQSRIMSNVNVWVPTAHKCQTQWWSPTMAALLESDQLVARHKTKTLLELMTKSLRALLQKPKGEQDQPMVTCTTWCSCYHEWGTTCCASRHFNADLVESWLETWPVSPDGLRIARVCPINYAGKTADGGYRPRSPEIVCKNCGSEP

SEQ ID NO: 997520 - protein, 180 aa, Homo sapiens
MSIRKHPEIPVAHGYGRDWFAWLLSDTCLNDSDSVGGANAEGFTHGATARNEKGIHILMSWPNRASPQVGVCLPLVDAAPWYHTTRGMKSSKNARHRDKAQTKIQREKKAQNEKTKSSSHQQDTQERRRRRERDMGRPHRKRPRGPPQEDRRKTLRELPTRNRADDDKTMTGSTDRESPK

SEQ ID NO: 997521 - protein, 101 aa, Homo sapiens
SKASRAGGSLAADRTSCSQRACALARRSQLLALACCPSLACRAFARLSSRIEGKSDQRSVAREGENRRAAWDQVKRGCSGGSRKMSARTSNRSKVSLRTWS

SEQ ID NO: 997522 - protein, 222 aa, Homo sapiens
MAAETLYTYPENWRAFKLLIAAQYSGAQVRVLSEPPTIHFGKPSRTLNLSQIACRKVPALEGDDGFCVFDEQRHCLLCEQCSELRGSTPEAADPRWCSAVSFADSDIVPPAQYTGGCSPHLGIMQPNKQATENAKDGSERGILRCCWQCITLKEQRDLDLVGRHRDDICGWTTPQACFDTPMLGEPRIKARVTYERHLLTQELAVPQYQRRWYHSTMTYNRA

SEQ ID NO: 997523 - protein, 224 aa, Homo sapiens
MESYHKPDQQKLQALTGHRSNRLRTHAPSKANTCGWASGHHHDHACSAARIIGCPSFSNTMRYKSQRPRNPHNDRICASPRAMQLPSSTRSGLKREFPGRSADACLNPCRHRFRFLTLEPWHPVSRKQAFHQTLGTGSLGPGPRGRIVAMAYTGKYFDKDSYRVYCLLRHRTAVRGLLYCGGHCAFDQHLSRWTNLVAHTYDTFNPPLCEPHRTGGNPRGPPTP

SEQ ID NO: 997524 - protein, 117 aa, Homo sapiens
MYVRQEDSLRHVYTLADLALKSLDCWPEWRGMVMAVKYVPGTPGTGLHLDLSHTMVLEEAQSHTTVDVIACQDKESLSPRHALGMGMKPPVPNGRTSYPSTIGDQMDPIHIPRKRMT

SEQ ID NO: 997525 - protein, 264 aa, Homo sapiens
MEFYEDFTEHNEGIPTTEIKYQPKNGMRTQQATLRGQHKRPRGPRKTKRRSKTRENNAQLQGSEDVEQRPPNRETRGNKKHSKKEEKHPDGGYYRNTTAQRNIKGDTQKLARKKLRTPNRRQHPRERTPTSNEWQTQREHGETTKAKQQKQPNGNNYTTHRNYENTIPRREQNTERERPTQDQQPNLEEPATHSTEGSTQERDRGESIETTSKTEEGIDTHRETATPNRTTDTHKEDESATTNSIQPPAESHRRYKKCVNIEDE

SEQ ID NO: 997526 - protein, 113 aa, Homo sapiens
MKHKVAGRYKYHIPFPTRDCEYGINVLAITKVVYSPITNILHQFLSRDLGMLTYCIESFNFILTRHVIENALPSQEMVHRAGPGCMWLPRRVNPEHVLGTGRGNVDHVEVTEF

SEQ ID NO: 997527 - protein, 375 aa, Homo sapiens
  misc_feature (180)..(180): Xaa can be any naturally occurring amino acid
MVIGGAVELSSHEGGELASRLGNGINGSGFRVLRKSEDTGRLDGVEAVSKVKPGSEREAGIADDWRSSESLQDSGLGLESPEAKATKFGLWESNLLDEKHGRSPLFRKSGKLSHKVWAWDSIWGDNSIAGTRGLDVKEADDYSDLDGTWVETKVREGGTQEKSLVEAGTPKAKGEAHSQXEDRSFVQTQREEEDTMDLNASDFKLVGAILPQEVFGLWLAKQEELMARVYPSHGTKLRKRGRSVCHIGQEKRLKKRAWLLAILSGGLQRYVTHNPGSDFPQGLHPIQHWTTGIRCADAGLPSPMRTLVRDLPQWMLQVCHSHMWAPNVARHVVQPLYREAKKGSPRGSRFHKCVGGSRWKGRELCSKREHHEGPL

SEQ ID NO: 997528 - protein, 117 aa, Homo sapiens
  misc_feature (1)..(1): Xaa can be any naturally occurring amino acid
XVQSTAAAHDRTYRRFLLSSLSEVRGPSGIKSLPITQCSQLEFLLTITGLLLDSGCRSEVRITKLRPCNVWSLQLDTCPWIMEEQPPGILSLAIDPGPIAIGAKLTTEYSQVLYDMP

SEQ ID NO: 997529 - protein, 135 aa, Homo sapiens
  misc_feature (96)..(96): Xaa can be any naturally occurring amino acid
SLFTPAGPCLSQSLLTEPDQVRKLFIGGLSFETAECRSLKDDHFDQVGEQLIGRRAGHVEIRNDRIASQGLMGVCAAQVMRTRGRQVRCELMDIVXRPTTQVGWQRDMCESQMEKLSPKQEEYLQEIQGALTCNV

SEQ ID NO: 997530 - protein, 128 aa, Homo sapiens
ENDARSELLGQYSACWVGRLYRRATEFPRLLGGAPPILSVLHGTGPSFFYLTAPVFCRLLSLSRWADSRPSSSWLPIEGSRNECFRLFRDEPDYDASLSQKKCVSIAFKELDYIILSSLIVLALTIRA

SEQ ID NO: 997531 - protein, 115 aa, Homo sapiens
MRIKGIRLCLKFAGAFSLGKSVLDSRLGTALATKSEGPKAQTGPVCLALFEGTLDASSRLLAQVHPSRTRIVCQSPGTPVHGDITARLNLLDPLYSVQGLPSVALYKLGSEGIES

SEQ ID NO: 997532 - protein, 448 aa, Homo sapiens
PLEPPRGLYLKGCQKPPSQNRPKGGRPEGSRTIYSSPYPSGGKKEGCRGTVRGACRGGRERGSQTTMAQWSEASGKKRAKAVGASSREIHVEGGRTDSHTVKRGENKTPLLHDATTAEAAWELYDTDTQQHHMHAMTDTLMGDNRGGSPPGEHNKHTQLERQTLPCANRLRPGHTQNHREEAPKCETRASSIENQASPEKRGHNKLPPRIPYHEKWLERPPHTTCEREEHAKTKGGKLPTDEHTLATTRQRGGPPTPKFVPSVRGQKGDKRDIKHHSEKGPNPKKWTTTKGATTQTAPTPEKRREKTATQQDQHRRHHEARSEPQTGNKYMINGTTKNNLMTPHDQKSGGDTNQTMGEEGHKKDSTQEWPTGQNTPPPPQEQRRQVNNKQTPRTTDATTPHEARQKKTTYHHKTAHPMKNNKLQGQPTTQKERRHNHSDPPPTTQQPQ

SEQ ID NO: 997533 - protein, 147 aa, Homo sapiens
MIQGITVTDSKTSVDRLSVHLKRDDSRDCLQYDIKIADVTSIEHRFFDANTSELDRTSSSDCCLLQLLILKHIEPVYWLSDTDYWTVPQRIHTVEVPRREEPKKPSVSERQDDHSIGFVTKRMKDHIRRHAIPMGNDMYTKVLMDQQ

SEQ ID NO: 997534 - protein, 91 aa, Homo sapiens
ANNSPALTGNSQPVAPGGMQLRLSNSSSACGVLALPSLCGLRVKHGQCAPALVATEKTMNLNPMILFKILSSPYFKSYSVYELKTYHEVVD

SEQ ID NO: 997535 - protein, 254 aa, Homo sapiens
MSSNVPPITIVRTSTQDSFSDVLAAMLRKHGALVTSRTGGLAGPLWWVGRLFLMGKTGVVPGPGCGHVAPYVKTRSLDALRFLAALVRNRASQFMQSIDARRCRSETRARMSKGRCPRNRGSQFKGGRSPRATHKGPRLRTFAYGDPFVCRERGSNGRPSRLTPSAELYDIRQEAHLVPLEWGYIGPQITFALVEAAREHPFIEWGKVAPCFGHPLVRPLEVPAILERCELPEFHNRQGEVLVPAPTLVLNRGE

SEQ ID NO: 997536 - protein, 103 aa, Homo sapiens
MQIKQLHLDHKRDHLPTPYKHTQPYHHSHDLHHHQNTTAHKHNNKYNHTPHHNKTQQDLDPNTKRYTHTHKHHNDTNVTKHKSKSTHYQNNTTNLTHHNIDTS

SEQ ID NO: 997537 - protein, 102 aa, Homo sapiens
MGFAARDDRQGFPCVSVHAEGPLKDPVVPGAETPDVEMPARVTLYPPRNSGRPTEGALGTYGISFAVSFSLIIQGWREFYITDYMSILKKSYKTWGVYTHSS

SEQ ID NO: 997538 - protein, 233 aa, Homo sapiens
MCMADVAGNGSSCVTASEFYQLTYRGGPAMVPQTIRKTVPVSLVRREFHAGMYVSTGAHVVGGCMTRCGEHEQTKVLRPSAFSHSGIPGIASVLQGLNCEGSGSKRGLTQSSADCTERRRQCCTVLTWRLHPRSSQVQRRNDVDYLLGLEADGTMVASTTPSIRADHLAVIQPQNSIRPLLVHACGKERPYERVLARWVTEDQPESRGNLKPKSRDISILHRGCGSPSASRMW

SEQ ID NO: 997539 - protein, 250 aa, Homo sapiens
  misc_feature (119)..(119): Xaa can be any naturally occurring amino acid
MAKKSAENGIYSVSGDEKKGPLICCPGPCLGPLANGADWPLCGLGDTLAACLACALLRETLDAARWTSSLSCCGASAVRLRATVVAPSPYPCAYKNRAEGVGSYIPYVPGSPWFGGIPXFLLRRSRLGPVHRRPCSIKCLGTSCPLFKGLGYASQMVIVFYCNTYYIMVLAWGFYYLVKSFNSTLPWATIVATPGTIPECVGDPSSHERLVANCHALGQTFTVLTSFVDRGSLVIAILAAHKAEGLPGEL

SEQ ID NO: 997540 - protein, 197 aa, Homo sapiens
GDLVLVLMHVLNGSLIVDEIMHQFLTSWFMMLWLGESREYEMCLYEESIERKRRGLVEETGVVVEMACWLWTSQDKHTSQQSSAISARHIPTRQQDRNALPHCEMANGAGDLRRRIEQNGSKGATTQKTYQRGEEQRLTQGEPNPLMKHSEVRRHCWKQGEQEPHTPKADEPKSASQHAKPTQKRKTRQETKRRTTL

SEQ ID NO: 997541 - protein, 104 aa, Homo sapiens
ESGCAALVAPQSGIGPCRWISTPRYRPRVQAHEVEGRNLRNGELTIRSSASQRSNIRSFSGHDAKRGQGPSTVCRHDDTLSRGPGHMARLSNCWEGGRTRNGEL

SEQ ID NO: 997542 - protein, 63 aa, Homo sapiens
MQASSVSGTVLEPSLISDADHKRPTLMDTDPVAQHALARTLWNLSSRPLDRPGGTWVHGTKLL

SEQ ID NO: 997543 - protein, 115 aa, Homo sapiens
MANRAFKAEFRPFGFILYSLLRRSPRVSFATLRWQRPLTKSLTDARPLDVAAGAKLYPHLAISFRDDYQVQGQGRDQNYGLRRLFNPLKAPTSEDAPLGCQQPIEKPPNFQLGPR

SEQ ID NO: 997544 - protein, 72 aa, Homo sapiens
WDRGNRASPMSGQRGLRCSALRPSTTSDTPQGGSQLGHCISENEGGAHGYVNTLAVAFRIEGEGHGSIASRG

SEQ ID NO: 997545 - protein, 345 aa, Homo sapiens
  misc_feature (169)..(169): Xaa can be any naturally occurring amino acid
PEHVDAPTHQRDVLMERGNIMADVAVHFSREEWQCLDPGPVGPLYEWTRECLGATHRVTLMARNLDYDVLRVYCKACMSRVYCEHVQQRENQPMWDPRTCKRQHDGGPGARAKGTHPKNRFLTIYGPLQDLTSRAVLAGHWTILKHSESICATRRVTKFSPTEDLFASXKSRALLRDRPSCPRVLDSVLRFMTNGQSWVQGSPVDVEKVDQGPFLHVLQEQLQTWLGHHGRGSTMEWAIPKWNPFSNRHGNTSHTPQVGNSYMGTALRAQTAIRAPHGEHSGSRRLLLVGHLGSKRSCSECASDEDETQCVSQTLRLIATRQVSVTHQVTHYSIAVASISTSGLA

SEQ ID NO: 997546 - protein, 501 aa, Homo sapiens
  misc_feature (66)..(66): Xaa can be any naturally occurring amino acid
GFESDRLVCDQGFVTTQVTSKAYARSDEIPQVIPASFRQSNGYVVLNRTDDESTTLKRVLIVDVNXPFRSCISTINHGACTQYGSGPLPGTTHDLACLYFRRVFVHPCVRYAKSSLACTLFCAGDPICEPPQDVLFGLLSEEGLASVVAPLAFVQSFDPLRTHPGTRIGYEVALGEAKRISEAPVSCKIAYLFVNASFRARRWRDGDEARKGSPLSKGPALRKAYWGTPFHIAWAPPADRKPQGGYDHCPLTRERNLLYCMSICLAQKGWVRLPPVIPDLLYVTHCPFPIALALAVASPGFFPHCLALPTRPHGGISDGDGSGSLGLTTPFPIADCPLASCDRTKFAPYKRCPPRGARLRTLEMHTGRRLGGSAEEAKRRCQGFGVGANHRPCAKAALNATCCTTAIGARAIFFLPQHGVDPLESLLGPHHRTFLGPIRRLVFDTPTSHFGVGGIPEGKDWPRASILHRGSCAVDACVPGEQRASYIAGADTLRVRCAQAQ

SEQ ID NO: 997547 - protein, 75 aa, Homo sapiens
MCSLGCAQILVNLFYTPGREIVLPGIQPGYSWERIWEEAPRGRGRQKSQGACAEGGSRGGPARLRGIGGPPGNSA

SEQ ID NO: 997548 - protein, 249 aa, Homo sapiens
MATSRYEPVAEIGVGAYGTVYKARDPHSGHFGGPQELLKVPQVEEQEVEEAFPFSTVSVRVAYTCGDVEALEHPKCLLRLNGRLVPNSRTDRENSGVTRGCLSLLDQDLGTFSGQGTPTRFASRNDQGSDAPVSKRPRFPSCQFALVHRDLKPRELSGDKVVDQSSWLTLGLARIYSYQLALTPRGCTHSGYQRSRSSSGVHFLHPCGHCAVSAVSWRRCFVEGPLFCGTSEPTSGANLDLIGCSEDHA

SEQ ID NO: 997549 - protein, 282 aa, Homo sapiens
LVFSNSDHLAAEECYERSTARIEPDGPPAQVPLIAWNMGAVAPVVQTGPGSSMDAVDADSCARGEGRVHGRNGLRTTRVIVCVVRVIVGCSLSCFFLRTRRPLTTRKLVTSSVPWRAPDEACCRDEYILLTWVDRPSYAVSWYIAVPWHAQESLGRLSDRVTVIVLTCRTTVHGVVNRGHLQWSPIIAAQGMRGPEQETTEQSGKPIMSSADALLDLIRNMFPGQPSRSQIQTSTEARTIPVVKSAQWWHHEEAPSIVRDPQIYVGPVRRHGSHVQNFDLEL

SEQ ID NO: 997550 - protein, 66 aa, Homo sapiens
QISTLLEYSFNHTISLQYRMGVLDSCTCAMETYQYTVMLRCMVRCAIIFDGDPQIGRRRAIRRVIA

SEQ ID NO: 997551 - protein, 254 aa, Homo sapiens
SKPKLSATESRDHPVRVVIKQNDSEILQSTSAQNGSDSAAQMELLQLHGFSIDSGKNNQGTVGRPCRASRTISSISLYALRNTKPGEARMKAKRCEEKVAMDVESNEGCNGNTPCVIRKIRTNQSEQDTSTHNYSTGTAEVKQTPMTKNQHGTKKQRGDINPVIQGKNYTEPSCIGSEECAKTWQLHNVKFANPKRSENSTSKEDNLEIAHERITETAGTPLENGEANGTRRNKREAKEDEDWAPEGHTPETDD

SEQ ID NO: 997552 - protein, 124 aa, Homo sapiens
MCGGCAQPPSDVGPVGRAPFRESCLTRVSPRTRVCEVRVCSHSPRGSQRVPLSFLIPIFPSASHSVVGTYVGGTPSVSRVLCGSLVAPTRLGGTSLTGAFPAILWGSLWSGPPLVWVPVYLGVT

SEQ ID NO: 997553 - protein, 479 aa, Homo sapiens
KRFHCDVGPYRPLIDIRRSVSLRSQASSTHGHQPVAPNVLTLGYGQRELVLTRWSRVRRYRVGGLVGQLQKAHFQYGPLATWSIRNLRCMKTAHESERSWSCQDHIMFCSSCLVDRGTSYMDGFTSGFRPVGSLFCIGEVSGAVGSRFIDLICAPKPWFLIESSWKELGSPSEVIVRPREGPCVSQCDGAVIELWYAREGNYSYQDTMEDVTLNGIKATNGEAYLIKEPPLCYCIMAELDGIAHQLGPICNKPAKYTYLFPARLLDWHVHQLIIIMCILSGQYFHRDTRQTLIYERVISTSLEWNRTKFIEEDRGLLYSVSQFTKETPKVDATLNRRPSIGTGTMNQSNQKVTDISFNSTVSFMGRTSPFEICEILHGILRSPWKKTSQFEPATFLKLGRWKTPNKLVPETTLTARKWGTKPSVPITKGERIPYGKSGTQSFSKGNILWRVDTYKLCINIPGVSVLTESSEETVTRHSA

SEQ ID NO: 997554 - protein, 121 aa, Homo sapiens
  misc_feature (27)..(27): Xaa can be any naturally occurring amino acid
MQGGPPPRDIQEEKRLLVEHLVCPTKXYSDVGENHPLIVGFSPKRGGNPPSLEEKFYQPPDVWLSYKGVGFVGSSYRGRQNSQAARWFASSLARRAANYNEYHTRREEQGGVMISLLTYQS

SEQ ID NO: 997555 - protein, 104 aa, Homo sapiens
MVAEVYDVDGDISYERSTANRRYYSYNKRECAHYRCVIHETDNCDSSSNEESKPMHVWLCIRMVHTEQSLGGSRFFDRRSDYLLLYGIAHLKHLPIDALRIAFP

SEQ ID NO: 997556 - protein, 274 aa, Homo sapiens
ALALLYFRRSDVAFLCLVCNVKKRSPLLVIEQWLRAMCKAWFCWGLTLPEPWYPFHRRAPQNIDGRHVWACGQKDSYVGEEASEHAWHPDLLKYPIEHGHSSPNMGLTWRKIWHSLLFYYSRRCRSVPLGRELAQVLRDTMAPVNPKGQQREDDSDYCSETIQHPVHVRGHPGRAVPLAPLGSDHWHLSWHSWRRGHPHWCPSTRDYAHPPSHPASGPVLGGDLSRLPSCKILTETRLTASPPRPRREIVRDIEEKLCYVDLDFRAGDGQRRIL

SEQ ID NO: 997557 - protein, 569 aa, Homo sapiens
AVARPMAANLQFWRRLYDARHIGLICEAGQRASRSADCALISRMTGHQSLNYSAVAVQPWRRGGACHVEQWLDVASDRAVHSVDWYAFCCRAVRMPYSETCLRSVSSRQVISCEQVAQGPLESCTVAGDVGAACWSHGATGSGPALSRAPWLFRLHEGVGVTLVVAPRVHTGPRVPLTVERSSARDRALECLSLVQIVARKRGWSAISCPFPGTLAPGPLSEGLSQNDRETPLLERLSYRELGISLGGKSASKRVTRNLGEGNLPVELSFPDGKKLPLGIVAVMDAFVMALFNNTGGSGATHGHRGRFSLGVSQNKAKERTKRIRRTRQVSPQLPVRYETGETKSPVPYVGTEKSDSVAHSPRTKDVYRQADDEVHVPGGDRPVRRPLRRFRRWRFAAVSRGYTPLKGYSLHGGRARRDVGKKEAQVHSTRICSRATCLCATPCHTTQSNIVGAYFQQAVNNPRIKHFAQASVASVLICAPDVNIPSEKVAGTHSVLSQQMGTRYNAGNDDVLVAINEFSDNARVDVVPELHSRRIRISTRPSVATCDFDYGQDAPMFTLSTASAHDSE

SEQ ID NO: 997558 - protein, 112 aa, Homo sapiens
MALLQWWPVVCRVMEGVCAAEYCGHHRERNLDLRRPGGGRPSGGALVGFGSGSKRTLRESFASYTHTGCFTLADSETFISLEECRGHYESRVNTTLGWKRHLPLGEAIAQRQ

SEQ ID NO: 997559 - protein, 370 aa, Homo sapiens
MKKRTRHKTRAQHTTESYDKQQSSSTNTPRGDNCYSNRAKTEHARPDRETNGSRGQQQSSHRRDESASRTQDSSPKNKSRQHTTKPDRERNTPNTRSTAERPRTRTRRRHDRTNRKRSEESAGGHERQNDESRGPTETARRMLEAKEQQNGQQRREAGHDKKTQREKVGYTETDRRKNREQQQRREGGDAGQETQQKKRPGEERTANNADEHERRQQNGRTEADSTEHREQEARKKDERQNRKQQTRGHSGPTGETKKRNGNAKTMRTNETARRTASRTSTRRERERESTKTERGESGQESNERRRSEERGAYERGRRETKRAEEREGGAAKKQSVHEGRARESSAEQASSQTKGTHAHNREQDRGAGKR

SEQ ID NO: 997560 - protein, 112 aa, Homo sapiens
SPKGEASGWEKSDGSSDQSQCFWNHRCAEGSQEALNGLNVPCSDFKGSHSLYGPAVASKDSVGLLECPESLALPEINYNARRGKARRRAAKPPDHPKSLKHHQRRDCGPYAR

SEQ ID NO: 997561 - protein, 392 aa, Homo sapiens
TEEGLLMVGGVWNCEEGQQRRGCATPASVAVLGLGCGRHSARDFPFSLGSIPWGSRHSPRKISAFKPRGSVENLSVIRHHRGYNIPFIFTRVRASPIQASSRVPDTASWAFFQYNVTERAHAVPKPASCPPVSVTRRAPTVCPREDKAVCLAKARHSAWHSTDRATFRGKSRPAERPWVTPPVHRGHSPGYAAAETSRKPLRGPKNRSKGVLEGGEEPYMAEPYLWGDPLRSAQQTHTRGAPSRGPHGKPRGEAQHHKYSLPQRSSGAEKNAPRGVVRPALHRTLATPMGMGKLHARGPTTHTVDTTTVYLHTTEALDWKEPTDNDVTRATHFGGMPRLPNYHVGPPTKQEYALGALTHGTCRSNSGTTTCLNKLSPHQSHMRNPPKRLPPK

SEQ ID NO: 997562 - protein, 150 aa, Homo sapiens
SWWRGTLGRRKAAKRKWAAVLVRHLGYKPEEYKMGRTKIFIRFPKSLFATEDALRGRRQSLVHKRVQCCLDGAYHWRTEIPPGEEISHLHPDVLIRGFILTQRTPAAPENAFFLEPCAHLILFAKSLRRQLPRNVLDTSMALRAPKTALR

SEQ ID NO: 997563 - protein, 197 aa, Homo sapiens
LLTAEANGRRRSGGCRTAARGLTRLWSCSNPPRPIPSSQRKHHLLTADMHSQAVFPAVRRPSGEAQELAGCKGRLPGDLTRSDGPGLDPPRPIPSQPQVSFLTPFERLPLYGLASPEDSMSCAIGYLIDGARRRLFEVYRWTSWSLCSFLFCGFSEIHVGSTEGRAISEAAAHGGGLFAGRLVRLPPLTPKKSSLKP

SEQ ID NO: 997564 - protein, 284 aa, Homo sapiens
EKKPCITYGLRCICYFYIEVECRQLKTSFWGVQGALVHEAMTDLISADGLFMVDKRGNILIPGIERESWTTSQEEEHKLYDDNRQFDIEEFAKDVEGADPPDSSTMKDILMHRWRYPSLSLHGIEGAYLLGSGAKTVIPRKVVGKFYHQALCRNMNPEVVGRAGHKLPNYRSLHELQQTPSEFKVYMGHGWEALGLRLQITLITMAGRRASEDKILEVEPDLTRGRAADIPVDLDFSGVPRARTVMLDACGGSSGLTEAHSTEMKRLNRYNYIEGTKDAGEVPV

SEQ ID NO: 997565 - protein, 274 aa, Homo sapiens
MAHRESESETVNVSDTTVRLCCDPMMRSTMRPLVVKGEFGPRCGGGELFDKHIERWCSSHDQEAETRVDLFQDFNAVCGRDVTKSGLQSLWIVEKPYGGTPLDYGTVGLEGQNCECRTTESKRAITPKSYVLLGLWARGHNGCKNITLDKRPKRGRGYCKLSVRNNAGCGKCNRWAHKVKPSGRQEKDTPNDRPTRQQSETQRVVAPPRIGKVANPTTPSGMGPFEDHTCNPWGQGSERHPLKERNSGKGVVYRNPAGWDYPQRFDITLHTNMT

SEQ ID NO: 997566 - protein, 148 aa, Homo sapiens
MWSLPKCLADTLHLLMTWPMCTRGRPESEAGCDSLLGTPSLTRDALVALASIHAAYLSIMQEGIIVVHSKASGLSSFIVVGPTRVVNCTCADFRLAKWREELWDLTHNGYDLATGEREHVLVVPQGFAAWVTFGGTPMLPSVEGAAIS

SEQ ID NO: 997567 - protein, 120 aa, Homo sapiens
MWDAIHTVRRHDPTIQPKSSIVSEDPDIISIARTWTAQRRSHSALQNEGLTQVHKNRFAPRSTELFSRVPERPVSEAFLDRRHRIYASYSSFQQSSTQRKGEGQAESIPKVPYGYMGDSS

SEQ ID NO: 997568 - protein, 267 aa, Homo sapiens
MDKIGCHKYFIYRERGDLNKSKILYSCTEAQRGSVLSRRVVYQGYPSEKGSLRDAACRKKHRTTGPLFRGSLPRGLVDKVVAVEVNASVPVKCASVDSLNLCAKLVIVGLSSGRVSSTVASLSKKPFVQYSIRAVNSDGKLCVKAHLVATWGPLKTHSGPPNLWVPEKKPPEPAKEGGSRVRHGVEDKTSQGLWSRETLSPKETGIAGRANKRQRYPRDVVYYTEGPNGPWVNPGLHSPLGKRAPKNAFGQGNTIGGNAADGVWGRR

SEQ ID NO: 997569 - protein, 216 aa, Homo sapiens
  misc_feature (12)..(12): Xaa can be any naturally occurring amino acid
MRYNTRRDSTSXQGDSAQNMRETANKNHAEQQTPLVAHTSAQYNTTSGTTTTDPTQQNNKALLGQQNNNNGTRTRTQQRREGERKKRHKHTANTNHSRHERTQHETRKNTERETRAHKNSTTRLRDRNEAQQNANVNRKTVDDNDGGGRTTEQDKKREQKDAAGRRERGSSDERNGQQTRQEEGGREGAGGRTQMPGGRDAAGERDRSKEQKGSSE

SEQ ID NO: 997570 - protein, 185 aa, Homo sapiens
MACTTLTVLAANRQRKLRPPQTSTGTRTLTHKRFTRHKPSNPAQPLQHDNATHTTPQPRPHAHRQPAAPPTPRANRHATPRTPQQPPTTQRAHDTARAKHRSGRTATTNTAPGTVTHHYDHPTRHTPPARHLRTANTAPTPRRPPIGPSPRRPRPAPPGDQPLHAPQDQATHVQLTPSVARSRPH

SEQ ID NO: 997571 - protein, 177 aa, Homo sapiens
LRSPPSEARALAMSRPPPPSWSALACWAPCAVWGAALDSALPSARGLCAACSGARTYLNCDSCLHVHATWPVRDHPGRPGARAVCVADCRVKIVTQGPYALGLERITEKAVTVSGPRLGELSLNDVLHLSPMWTSSSYTQHEVTGPRMEETSACSAKRAATRRAEYVGCLGLFQHIA

SEQ ID NO: 997572 - protein, 68 aa, Homo sapiens
TESNPFLCSHQHDSTQQLSVQVLVVGAFAKRSMHIMLISYSLGIFREEEPQDIGPTSIQVSVLHRYMP

SEQ ID NO: 997573 - protein, 109 aa, Homo sapiens
MVANVVGKTPFSFAKLTCTNVCGRRTSRNDLVSITLVYVNHIVAKRDDIISSATYASATLQACNPLGTNFGARQENTPYVEESQQVHKIYCQTNPRDIAGGNVRAKHQA

SEQ ID NO: 997574 - protein, 127 aa, Homo sapiens
VLYWPAWHSRDASRVMPREDRRPGIPTIRSSKIIQSIIGMYYSEDCLDLSRQTEYDNCECIRRQCIASEEFSAMMHVQQGKCMWVSDWDKDIRPMMLQGPIADEGLPEKSDSPVFWRIDCMCSLSRW

SEQ ID NO: 997575 - protein, 373 aa, Homo sapiens
  misc_feature (280)..(280): Xaa can be any naturally occurring amino acid
MSWARCKSVLRPPPSFWDTSWSKERLGSTNPPPSFPIGCGSHADQTLASNPSGVTTPQRPGGRGPGKRARGQPGPFVSMRERVQISERLAPYTRRFHHFVSQTGPGCGHESGETFGPSPQPLDPKYLRIRQRFPPYTSGRHRVGRRNGIGLPRRKPHCAADTGHNVRGVGQLLFHSECVQQGGHISRHATTKQAALIAPGRYDRHKCDRCELHKVGELPPKRRGDISNSWGKFGPPARRTGGSIPVHTERHRNEGTNTVRCPSPQLAEAGNPITSANRPXYTDMRRALPTTPRDIGGSTHTQNEAVRGPQTHNDLAAQTHALSHQQHTQGTTETTLVAQQRRLRRSSGRPSATRGEHPPPPSGELTTRWRQHR

SEQ ID NO: 997576 - protein, 214 aa, Homo sapiens
MGSSYTKVVGPVAKGWFDGTHIARGRVGMHITSRGTDAMSALGRHEGYTNNTCKAIGQSKGKDTIIWRKKDVAHHYMGGGGGMKTGREYEAVSRREFPLGKNNNIGKEETIVKGSWHCNRHYGDNRRTKAYGLKEGHTRGENKYEEIADTCRRDATTKIQHTRDPAENSNMEPEEHSTKEDDRKCNPQGRVKRYDTNNTHSGKTRENRTREKKK

SEQ ID NO: 997577 - protein, 120 aa, Homo sapiens
MLQVCARPYLGAWCSKRCSPGGSWLSLVRAFPFVCASPVPSHRSCASWEGSPTSASSVVLARMSSWSLPLESWSSRRCSLIIGVLWLCAQGKGMWCACGCCWRCVISESGIPGYSPIKIV

SEQ ID NO: 997578 - protein, 113 aa, Homo sapiens
ALKDRQQKGKGSKPLMHYLRHILRLLAEFGEVLMIGIATLSGTTYGYTVGQSETDLKKDCQLVLAFWFMDQLVHRYPECRRRWTRTCACARLVHSTSLAACKGSWHRCPVLDH

SEQ ID NO: 997579 - protein, 265 aa, Homo sapiens
GAAAPSSASASAFGSGPLLVPTDLEPPDDRASAGALAPSIRIGPQTGRVLASGRRRAVGPEWCRRCRKPFAPSVARVTWVLLSLLAFPLAAVVVTEFAEYDREGIAALWYESCDSHVEMFPYMEKGSASIDIWDFKYQVCVSVGNLTGVLGRMVLSLIAQSDCKVTGMFHMRNSLSVTTRSHDTHGITDVVRSSSNRLLGRLIRKPQVSNFRYLVTQMRNSLVCARQPGCGQIVGSPSDWPVPRTPTGGPRTISLDRPQPLRQEL

SEQ ID NO: 997580 - protein, 142 aa, Homo sapiens
MEHELARSYATENATLCTEHSVNMAGPHPRKPSQQTHQGDILLTLRHRRHHELVHTEYFNEHCHWFGDNHQHWTFQHFVLRRGHLRTEDMRRHDENIPTLQTPIDRRRSTTQHRPDIHTYVNPPKYAPADQIKRQKTYEGIH

SEQ ID NO: 997581 - protein, 175 aa, Homo sapiens
MEKTHISIVVIGHVDSGKSTNTGHPDLEMRVASTKRTIEEIREGGVLRWERAPSSYAWSLWYQGCKAGCVKRWVSRNVNISSVHSHEDADKYICDQSLDAPRTPENCIYKTMTYRGHRQGLELVRRSVNESAAGLSSESLSNAWISYATEIGPGSLSTKHLPVRRPLTTTVEVDE

SEQ ID NO: 997582 - protein, 66 aa, Homo sapiens
MTLHHRKLMAKETTSVEKLIPIEHQGLSRPFLLLCVDSLTPPSVLHPRKLRDALNAAFNRERSRTS

SEQ ID NO: 997583 - protein, 67 aa, Homo sapiens
VAATPLDYVYRIPKKSLIPERRTICILQTVIGIDPFEIVSPVRYNHNEGSMSESTLIVRTSNHGVGY

SEQ ID NO: 997584 - protein, 251 aa, Homo sapiens
RSMEGGGGAGGGGSGGCAGSAGGERLARLQPGLAPGRESRAARLWATDYGRIALTTGEGPRLRNHGAKHSAVLGEEDGADDFYQLRILTLEERGDQGHREPGRAAGQDAAGETEYSLCLSCHTQDGVVHHHGSSRTAPVKIVEDTRIPARVVPEDERRRILPRPGLASCASSRSAIKTAEPHPTLQQLRSSRDDRGPERHETTGGKSLAKRESAWEEALGPEGSYSWSDEDRGSWSNMVPHTGGQRRKHIA

SEQ ID NO: 997585 - protein, 135 aa, Homo sapiens
GCLVCMCGESNIARLIRNCTTMATHTSIQLGHCALRQNLFRLRNPHEDVLSAAAMIPLTRWLKKLQGTPRSFITGFSFKQHKLSSNPPLSLPFWSVVIETTVFARTRVLSHCAICPLDPRRVCRKHWAIRTYLMP

SEQ ID NO: 997586 - protein, 62 aa, Homo sapiens
MTNAKCGDLFLRSHSGGLTGPSQRAIDTCTNDHEGTQRARNEHVKPQTMAKSPVQHIEVDTV

SEQ ID NO: 997587 - protein, 335 aa, Homo sapiens
GDYSGTSPSPAHAPRSAPCSHARVVEDPDSPGKASECWCALGWALDWAGSRGGAWRQGAGPQRKGAEHTRQPESAEKSGARLERQVVARRSIARSQEPKPRPGQSCSVASRGGPINPLLVPFRQKGAETEQDIERTPVGLEVPLPPLGKKPGEMIPQDGRQRTCGHIGTENSFPEIKGAALPRKEGPQKQKRYDGATRKVICAATTEDITDTTHNWEGTPLAALRVAEEATIAGESQRERAQRESNYKETPWHRTQRRPTLPTAMERQKTRQQQAASTGPIITSRRYDRDRKNTRKQTNPGSTERGLEQNYTTNTDQHAGSREQLQSQKETSQRG

SEQ ID NO: 997588 - protein, 138 aa, Homo sapiens
MIKPRDKGENTDADKTNEEHKQSQHKKERDKKTNKHDTGTKNPTQEQKQRRRDRTSHKDYTRRHTAPDKPKRQNSKKRTKTTKSEDKPKQTDNHKTTNRTHKPRHTKGASTQPIKKGHEPGAEKKNSKSRERKNSHQK

SEQ ID NO: 997589 - protein, 373 aa, Homo sapiens
ERLTKGGKKGAKKKRGLDPFSKKDWYDVKDTCNVQYNEHYWAKTLAHQDPRKPKLASDGLKVSCVVNVVSADYAELTEVAFRNLSSLSNWKNVHGIKDCHDVTSMSMDLTRDNNMCSMVKQMARQMIDSSVDVEDYRWYKLGFQTGTDVMAIYSKTIEQGNIERYGNDPSLLLKNHKQGSLTTLPGQTRMTGKFHDPREGLHRDPNWQRSNEKSREIHIKNLQVARYQAILAKHRPTRHTKRPWPSIDYNTYLHPTCIGRDRVTGTKVNNMHRTRKHPTDLGHVGAQKARHMEPDQPTGEARGHGHEAHHENKDHKGEPDDQRCLKEEKNTTPDMRNSDPQAEYTRKTRPKEAQTRTEQSAHDRTTAEQDNTT

SEQ ID NO: 997590 - protein, 151 aa, Homo sapiens
ALNPAWQSLTHRRDAQVRQGDLEVQHSFLKIIQTLDDYPKCFIVGADNVGSKQMQQIRMSLRGKAVVLMGKNRMMRKGIRGHLENKPALRERLAWPSLFREADVVLWMFHRSEEPHLRSGTCCWPSKVPAAARAGAIAHVKSLCQPRTVVS

SEQ ID NO: 997591 - protein, 517 aa, Homo sapiens
GQLDPVSQAGVQGCDCNSLHSSLGDRVYAVTRADIRHRGRIATIKEPILVTGHVVKRERETNIRETQRRAHSTGTRGGATTTRERRDEKREKTGRRRRQRRERAEAQEGQQTRRPKTTPKNRRTKQGTHTQTSTEESTHTEETASKKGETDTKPRDKKNKEGRQTGEQADTQAEQQATRRGERRKRTGERDEKAKTEKERESRRRGDKRMERDEQGTGTRRTAEGDQQTHSPRSDTKGDTGRSERREAAAGDTAEGTEERDRQAERERDRQGRRETERQEGARGGGDGQRATEKPSGKRRRGGGQGSKSSDTEGEERRTEPAEEQREEDRREGKTRAEAREEREESGGDEAEHARAASEKEKERHGAETRDNSGRRSERTTRGACRRTTEAQARRRSGGGEGSTEQGGQERKRARRTHDQDKRRTPEEREGRRGQEPPRPAPEQGTQRQTGSRTDDGGAQGQKREASKQSRERDDAPASKKKQTLEESNGGESSEESKRQGGSSGDAEQHDGEERSS

SEQ ID NO: 997592 - protein, 516 aa, Homo sapiens
RARTLVCKGAVPKPERGRRRAGNPLSDPPRAAGLKTHDHGPELDTDLGRETEHAPARGTPRGDNESNENQGTGMAMHEGDRRKTTSGPITGTGWPAGTIVDRNNKPEGPQGTGDHPGKTQRTNNIDHTLRENQKKRKHAPRPQEGKQTRKDRRWGNTRKRRCEEETNTDGPREEKMRPRTESENSDKGEKRATTKTAKSEINMGNDNVYHGEGAPHRRHAPTFTGQSTRKTVSELRAIFTPRTGYTAKEGADINTTKDSEHTPQITPTRHTLGGWANNVTYRISTHRWGTRKKRSRGDRKRRHQYQEKQQHDDKTSGGPIPPKANTGPQKRHPRTKRGTKQLGQQQQPKSKTEQPRKSDAERDLVRERDVNAQDKGGHNTREKASEAQRDHPGTRPQDEGQPTNTMTQRGLTAHPQKDTRTGVGSKQETTRKRHNHGQEHRTTPVTRQQKTKIRNSIPTEASAKENREQGPPARQEGSRHSPQRERKIRERIRASNDGRGNEPQGNRTEHSKQGGK

SEQ ID NO: 997593 - protein, 331 aa, Homo sapiens
PDTTVASRAGSARGPRANRGCVVGAFAGRCRAVCLCVDVPVMEPLRMWTGRLQWSELAWLLRLSCVDPDCLLWAAGGGSEAVRVANGSPPVGFANQHSRSGPLRSSSPSSNRIGQGARIGDGHTEGHIDKAHKGGWCAIQESSDLGREAEAGRSEAHPGRRFTVYPTRSDDDKTPVHSALLTSWVRTRTTGATQSLLGFNSLGGYRRGMAVLQRTLWTLLYNAEGPPLAAKNHTHLVRPESLGEEGYLDMGHGIPLLGDDPGDGHKALRDPGSDPLPRQDLATTRWANQSFGQAPRGIDGWKRPGPGDRCLEGYRPGGARIPAGTDAERLP

SEQ ID NO: 997594 - protein, 324 aa, Homo sapiens
MRHIVDTRQRTKTGPISIRADKKKMHTSSERKQRKAKTLHRKVNPWWSTQGTGKTQGDRTKRRKPTKESHKRQEHAATATREQDENTDHGTQAEGPKRISHHITRGNATEAIEDDDNARGKKRKTPRTRTPTIEGKIQPETRHGQESARQSQREGERKTTNRQKTNRTNASKGTMEGKTKTKTTTTIQAKHNNRTHRTPNNHRKRQAYPWKEYHPRKKKERDMQASKIPGHSSKTNTKAVTPRDHTTKRTEDGHTYMRGQNDMKHRTQDRRANKTAEKTKNNTTTRRGKKARRRHTGKVKPNTQSRTAPQRKRKSTVEERNKTQ

SEQ ID NO: 997595 - protein, 254 aa, Homo sapiens
MRHRKSAQHNKKTRPNSERIRRNKGRPERNRMATNNKIPRQEKREHTNTQRRQGNTIGEEPRREKKVHTTTMRSSNTRDKTATQHRKETDRTRSTQQKEDTYTETEQPTGTHTTREAEKRPKRERKHHTQHKGKPQDSRGTQAEVKRKTRRTNHHEPGNEEAPRGPHQRQKHPPSKEEHLGATLKEEDKPRQGKETEHEASRTPKQTTTRKRGTEKEATPKMMTRAYSGENQHDNNREAEKERDEQHTTTGDKQ

SEQ ID NO: 997596 - protein, 169 aa, Homo sapiens
PKSGARSTEARAASAARPTSAAAPAPFDPPRPPRERAPAAATTSRANLPDQPPPRRLSREHEEGGGMSDGGRGHNQTPTTHPSHDKGLRPARGHATAASTQREPPQAPKEATSVGSKAALQAAQVPEGTPGQPQDDTNHSQLDNPTRVGEPADPPARPQQRNRRPADTR

SEQ ID NO: 997597 - protein, 113 aa, Homo sapiens
  misc_feature (82)..(82): Xaa can be any naturally occurring amino acid
MTCLRRVGYGPIDYNTELAALRTVGLPSGAGQYVIGTSVFYWVTVSINDIGTVYALVRPYNIDGFVRGSHQRLFATCYQMGXDTDRRTLLHAFVKRPWVVSEAPKSTPCRRNR

SEQ ID NO: 997598 - protein, 66 aa, Homo sapiens
MRECISIHVGPGCVSEIGNACWELYCLGTRPIQTRMDRCQCDKTIGGGDESFKTFFSGGRALAKHV

SEQ ID NO: 997599 - protein, 169 aa, Homo sapiens
GELRRSRRIYCSPSDGLQQPPIPLLGELEPLAKSSPMSYSLRSDANGEIYCILRGKSATWWRLHSHSIYKKVIIQADLHVAPSSVLQTWSYYEEPLRKLRGSDDNDLDYIVVNGVVLRHGLVRSPSNTYIKLIRRPAPGLQSEEYWITYIDIANDEETLNEILNGVQTK

SEQ ID NO: 997600 - protein, 270 aa, Homo sapiens
TSGLPAPSVFLWGKSTALPPLPRWDDATPSCATPVALCAAHLCPWSTAGWPINHTSPGAGTAQGSDVEFSTHATPPAAEGQATALSCSTVLSDEEGPVVLPGPQGLHRVDLGHPVHTYSGKASCVTGIAYQLTYNLTLQGHWDLDDRRGHLGETSSAWHNAVHLLVHLLAPQHPQEPRGPSRGNHEAKGNMTETREPQLHMGPHGTKEPNVTGSSAKTIDNEEHRTMTESPQRGGPPQRTDGRPGTHRSKGERATAATEKEQRIEPGRPY

SEQ ID NO: 997601 - protein, 577 aa, Homo sapiens
IDVSFHFHSRGSRRAVTCAWTRSRARLDETTPDDQLLYHLLLHVPDDSFYMSWVLELLVLMLRTFVGFDETTHRAQFRVRMRLVDPRTLEKPTGAPVGTSMRKLSDLATLEYHRYVTSRCRCCITEVPECEVVTEIAGIGSEGPGQNVESGQVQPGFLFLGPLAKVKAQRQVNFKPDGSIEDKHTDFCPNKETPAERNKFDPARNSGTAQAALIRLQRGHPIREYQILAALASVVTITSVRLGYHEASGYHIGKTVVWSQRTLIPNDRNSEEANGRPPSLLGQGTITVNPRLKRNCVMHPQLYRYRLGSATLAHNKQFMAKAYPDFPPVACRPMLAIKAPCDDVSTNIQDHRNALTKAPFTWHARTAIGTFCPANFAVEPLRMAGFPVVPQEGGYTLHNAKHSHSPQGSSNLTHHHLNPTSDVTTYGTHNEQQASHSTVRQVKKRPHVQTQIAESSGHTDIFTRTYKTTTRTTTQPTQKATPNICLHTTHPKGNPARKATQYDTQRDNTLRRSTNTKRSHHASATAHPLNLRRTESRSQHHYYAQRTTTHQKEKQNAPPQTHITSKQLRHTAITPAT

SEQ ID NO: 997602 - protein, 151 aa, Homo sapiens
MRTGNQEEATILTEYQGTENNAKNTQKDTKHREQATQQYKTANGEQGSQEDEELRRLHSPLDASHEKLEGLSAIRTTRETPSTEEETPQPGRKQKRKGSTLIKTRRTRTAHTGDDRKKEERPRSNQETNIRAKHRGKKQRCEKESTKDRST

SEQ ID NO: 997603 - protein, 331 aa, Homo sapiens
MCTVAVQCCAPGCDCRWTLAWHRHPLNGNGATAFLIRKEAPEQENSRTMWTKGAASFNYIPVDAEHCHPIEHFSTSRPPQSGGSEYDGESRYESKGFSGPRGSAHFREDNITLTNLYEKPPGRRGGITERMKFLVLAAERLGLEDLQEASQVTESQVARELMYQIAGQGIQGTAGDSKLWQQPGEFEHASDRLGEHGTPGCQYAIFVSKWQEPDVGPWRVAAYARDDEATVVKKSLLYHMNAWNGNLEPKKRVRPWTVVIVTEKRFAPESKVQRGSDISKRTWRLGPRGEETGPEDDGHDEKHDEVRRRIEETYEQDDQGNGRASRRKMSG

SEQ ID NO: 997604 - protein, 98 aa, Homo sapiens
MAGEVQRPPKVWTEASTGRGIGSIRFKIAAGNTIGLGTRAVSLGSTLKNLLGFTKVRTAGNYTLGWGTGQQCGWTYVPRATSEHCDPVTQYRYIQAVT

SEQ ID NO: 997605 - protein, 201 aa, Homo sapiens
MLEIPSKKVMPRATLSPRGQYNDRTTSGAVTRNKNDRDGHDCKNRSHPPGPTTEEERVWQRRQPQRRRPREGNEPKHYRVDQQNLHGTLPSGLCGDKPLSNNCGNTTSCSTLPQVEAYYTTQHQAGVPAQHKKPTGHTTGTSHKGPRKEKRRDNNNPQEETSNKRPTWEPTEGRGHNQANERDSETKTITRGNTTNTRRSD

SEQ ID NO: 997606 - protein, 275 aa, Homo sapiens
AGPESGAGVQGPQDRAGVFPGPGEFGPVPPGGVQSPNKGFLGAATTSRDFPCPWIQAPTSASVARHPGALHLRGYHQFAGTAHLGRPGCYSPSRHASSVPRSSATEAGHVRTGPQSSTGSRAGGSREGRKKASRGQTMEEHKIDDWSKPRSQAAQVFPRRGSRNKGRSTQREGSRMKGKRGQGPKGATKGEERIVNRMGPKGQPDTGDTSAGQSMEDEHERKSKIPGTAPDRENVTHAPGRITKKCLRGQKRKKKEEATGEKGTRKPGKEGREEQ

SEQ ID NO: 997607 - protein, 238 aa, Homo sapiens
VTPDEPPAGAQSPETWLPTLPPRRCLVPVTMKTVLRRVSVYGGRGTVGSYPAWCLERNLAHLATRMARPWEAMVAASRPPMGRPKSNDGGGPVRLHQRGSEVLTADSQEAIDGPLPCHTISYTCRLVAACMVLSGAAAAGTEAGPQDHGQPPLQDALPRILRRRTPSSSPRPLARPSPTDYKPVPTGKQVLTPSQVGVHPRPRRLPLHNGDLDHFSNSDNCREVHLEKTARGGPGRGP

SEQ ID NO: 997608 - protein, 57 aa, Homo sapiens
MKGASKEILSTISSLVDDRIGSQRIGNLGQNVSKLAHGHYACMEDEAEKQRYKVMKN

SEQ ID NO: 997609 - protein, 119 aa, Homo sapiens
MVMANNVVQQLWGANAAEPYPVQPAVGLEEPVTQEKAKSIDKIEALSQEAMIYIKGCGEKTQNYLAENRTMTMELLMLRNALANQSDWCPASDPRRIPCKLSTEYQEAHGPYSIRPKKD

SEQ ID NO: 997610 - protein, 274 aa, Homo sapiens
MRRRDDYGQPMVKLHDHQHRGGPTAAPGGHPRKVSKRGQREPQSHESTRNADLGPHPGRSKGTDTTRACISVPRPQGKRAPFQLSGTIAELDGHSSRRKAPRTVEYKDQPPTTDRTPSQAKGTGKGEHRPGGAARSAGARRARAPRPRPQRRHERQTQTANNTTTGSSTPKTAASGGANKQTTTHERTSASDSTTAQAAPKRPRTQETKTRGEKPHRREDASGKGGGGAREARARKAGGTRGGTTRTREGETDGARDGEATPTEPDEKSGREGN

SEQ ID NO: 997611 - protein, 86 aa, Homo sapiens
GRRYHQAQRSWSCEEIRAVPPCLPCVPDTGRFCPREPFQQSRKTVVEFYEGSRRAETMPQPRIFNEAYRKLATEDGDPRIKKSWRY

SEQ ID NO: 997612 - protein, 114 aa, Homo sapiens
MVPRMERCQPPDWDTAKQGSAPDEDTAEMDGLIRGGLGSLDSDDHLRHGDSDRRDLDGLDCPKWWTQPCWVIEELYQKVWNLAVEDVDNVSSVEKPSFRQNGLGEGMSMRQCKG

SEQ ID NO: 997613 - protein, 280 aa, Homo sapiens
  misc_feature (73)..(73): Xaa can be any naturally occurring amino acid
MTLLAPKGAPSIHPAHHLPIYRYYDHRIRSSCSTSRYCQLSYIVVTPTTNFNQTHMRGEHASVVPSRYLVMSXRRQHVREAHYSQFFTFELRYVGVQRVSYAIRNHPGIWLLVPTSAGKLALGARPRGPSRSEGVALRVSADQSPIGLVEIPLLTLKASFLLLCRTFGLWAPMYLSRGSYEGSEPISSQYNLACLNPPGNRGEKRFIDGYVTRFRQSLSSSKQHKLELAPRVPYPYGARIRAAESFADRLEGGVPRCPLPKPFTGESPNAERAPPFPKRY

SEQ ID NO: 997614 - protein, 146 aa, Homo sapiens
AGARRFRERGVDDSLRSESRPWGPAMTWVEAECLDLSTVRSMNVSAGLMECIMGFIDRTDAYPDIYVLAVSPERTSYQSFRESVCESVYAQLPAMESIMRGLRLPYFQRTMVGLQTDPRIIRMYFYHPKHKESDRYAPYLDLRSVT

SEQ ID NO: 997615 - protein, 132 aa, Homo sapiens
MREGYRASPEDAKPCVADRVISSRYINEASCRDEWGRSPDAMKSCHGACEKKLNHGPFGVVHAPWVHAREQVAPISCDFLETHFLVGGSEVLVKKMGDHLTKPSYRLGWPRRLGWAEYLFERLTLEARVRAF

SEQ ID NO: 997616 - protein, 261 aa, Homo sapiens
GPLRPRPQRPRCDFLFALCPRRSSSFHLTQESSNCSVSDQRLGVGRTLGRPVVCAAMRVGSLRLRGGWLAVQPVWGPSRPTTPPGHSWTQRPGLCVVCLGGGAAASERLWLRSMRPMFTTAVISGRLGTSHVPELFSVREVSLLVEIFNLMVLLYVLSLFDRELTGVVKRWNMQKTLQTVGLDAWRVRNEPSVSRYIHPLPWARVAVKPPRYESVNPSVSSLMAVKPTLPENNQTVANPGFQPKYHVANPQLNEGEQRENP

SEQ ID NO: 997617 - protein, 83 aa, Homo sapiens
  misc_feature (4)..(4): Xaa can be any naturally occurring amino acid
GLPXTAGPWWGFALGTPNPGAGCQDGDADEFRELGTVEEKLSLVAICAKTEVKLPNSKASYLTVWFGRLVTLVLCVTYPLGLA

SEQ ID NO: 997618 - protein, 143 aa, Homo sapiens
AQAWPLFRRGRTAGAWRWRRDASYSGRRMETLPPDSRVSWTAEEDEADSGEPWENPIIRHITTRIDRETNSHEKSWHVGDGNDKNDDNREQMNEINQRTENTYPNSAIIHHTHIIFATYRIIPERHHGAESIPLEKYHHSLKG

SEQ ID NO: 997619 - protein, 166 aa, Homo sapiens
LKGPALYLAKPPSPGSGEAWDYEDEIRPHTPRCRVSRTTPKTRLCPKGTRLGGRGGGGGETSPRGVSAQPPTPRARGRGQDQPRDQRLYHYRRRSPGDLMIYRPAEVLTEAYPRETPERPEKPARDRHSSQTNMGLQGQRSQSAPLPNNVRTLDFSTGRRPRTQLW

SEQ ID NO: 997620 - protein, 178 aa, Homo sapiens
GGVWAAAVVGVPSRWRPRYFRSESGVPGRACTEGPGSCAHPAVRQGPSPQLPFPLSAGSTRAMLAVVLTRAARPYPGPASWHHGGPEACARNSRGLKGSEMQAVEAAEGVPVALSPDAMTGAPSAFPGNGRLQCSLKSEATQKNVPPCTDSFTHGTAHRTGRFQNLRKIDTLAQRADT

SEQ ID NO: 997621 - protein, 222 aa, Homo sapiens
APLASAFTIDIHKLVLSPSLVFHSGVYEPGLYVGDSVYAVRVLLKIEKKTPSSGHKQSGTGVTPSMSGHTLLCQYSEPNQMGPSSLLIPGSEFSLLIPWFSVSHCGYGLGSAVHDDPELMMAPALEYCPWVEASRLIHALSSLSLCPPQVVAQLSRQVSIKGTACVCACDAQHPGMCLACRRGRGHRSVPCWPMCTLYVPYCRACGRLQVRILPGVNTWMLW

SEQ ID NO: 997622 - protein, 274 aa, Homo sapiens
APDAKAAAVLVNLTVMGLPEERVLERQRGAGARRKLEPGVPGRWQLVSCLPEVSRSAHVPSLQLLPRAAPGAPVEEPREFWGRHLPRNLTWKTPLPWPIPSVQPFDVTNGKHSSSTWMKGATTNICYNVTGSNVHEKKLGDEVANTWEGNEPGETTQITYHQASGPSVSRISKCLRKQRIQNGDRSGIYMPMIPELVAAMLACARHQGRFAPQYVYAELLFRSLYVNGIFGFPASAFSFTTDCLLPVAESLGTLKELPDEGLPQVSRKRLPQYD

SEQ ID NO: 997623 - protein, 347 aa, Homo sapiens
GSLYSRRTTAVCPTPRPGVLLGGSHNPRGRGTSLLTIVPCHEEHVSKTRKSSRGSPRISRQDREVGVMNGLAYVWMRTQCAPDSVVVKGVAPTICDEEAIEIARAQGKAKVRARMRRQTHLALTRGQLYRALKGRSPEWSFGPKVLATVALNTVPGAMPIRRHGVGSAHDCVANILAYLVAKETEKLTCTGMFAQCQLAASVTETDRIGKRLWFSGRILWDRDMCFDERHRRTYFESCPKGRPGAEKDTLVDRGIVRSYSKGVALDRRLKKPTAFWDTSDEWSEHISDRFTHFPICNFPNAQETLKYHAFSLGIRDIETGNDGAENRAHFHSGDQKYEVVQPKENSR

SEQ ID NO: 997624 - protein, 69 aa, Homo sapiens
ARVGAQTVRRYVSVTAEYPRRTQPGSDQVRPSADSGYNGGIGASSLALDATQRQPLSLIPYVKMQRDTA

SEQ ID NO: 997625 - protein, 353 aa, Homo sapiens
DHPQPAPVTTHLWSRVGPRRCPEEAGAGSGGRGRLTEEEEAEPGQSVDLAGPGLTLALTPALAAGCLPMPAVEDSEATETSDEAGSALGPCSATILLEHNYALAVKPKPPWAQTLEEPRSQCPAAYGATQLSLNRLTILYDIFGNSGLELRGHRVTVGLTGTKRLLQQDQAGAWTGSDEDSLGTITQYNQAEPGRKNRIGVWAPRDWGPREQPDERSAAQQGLLSPNEGTTGRKDKYMDVCAVVGPGQLGRRVWNTFRGTKPGVACTRAPAARSHRGGLLKHAIRVHAGKVDWQKDERWLKSSKPRPPVTREGKEGREIWARDRESNEVGAPCMAIVIPHCVAGGKLGQMAIT

SEQ ID NO: 997626 - protein, 431 aa, Homo sapiens
DPAARVVRALWPGGVRLGLEAEEAAPAAATHAEPGRWLRWGCGGLAEPLWLQLVLVGCPRVLVMLPAAGPVGEPWGCTTLVRWHLRAHGPPRRALSRRRIIPCRRAALQGLSLLYHVQGLLSLLAAKVRERFTYEVPIAPLRLYTRLVEVEPLCRKGALRIDRYLLPRREGCPQSLCGPGTGKQRLARNEIDSLCHHQAALKGPSLGSRGARPLGKENHSAYLPKPNGMAVEATQGATGRLTRGSGNKVRGFIAQGRTEGPDTVGNWGWRPGEGAPKGPGDGDEYAKDGPDNKCAGQGTLGAWGGRTLRFYPPTRSDGTRETATRPERHRGRVPFIAHNHMSPGEGDKLREARAEGARGRTKKHLAAQGSTASAKVEQQRAAQKRGGRRTPRGTERWRKGTRIGRDATDDETRELRRTAMGKGGPLYRERR

SEQ ID NO: 997627 - protein, 131 aa, Homo sapiens
MAGPGRPTCVTVGTGKHCPGTKMCHCRTPGRSTGPTHAASQLRQSKSGYTDKGPIALELLDSGVAFNIRALKFVANAHRARRSFVYTYARFRIHRNMTGEQIVDHLPYDRPGEADAWACKWNVRHTLGGPV

SEQ ID NO: 997628 - protein, 311 aa, Homo sapiens
MTSSGPGPRFLLLWPLLLPPVASALRHVPAGPEGPGQPKKNAASDRHTWWPQVRNQRVYLAVNLQLMGKVLTITICAETPGEPLGQTREMSATGLDVATVGLQKPVVRANETQDEVSPEEGHNKETRHTGTNNNSKHAGTRKIMTTKHQRTSERQTNDQTHRRPNPGATEQEPPKKERDSDADKQEARRQAGRDNPQTQSANTTDGQEKNTNQRRTTRKRGERKPQKQARTTEETDEQHARKESKPTNKSGGGNNTEDKKGQHNKRPTKVVAANNDTVTQESQTASQTTKTAFTNPRSHNMDTTRNIGREN

SEQ ID NO: 997629 - protein, 106 aa, Homo sapiens
MAVAEAVLAAECGWVAGLDGWLAAFVQLKHEKGLYIAMARMLLAGCVADTAMHESLLILYPVSIKGDEGDWAWPYTMRARRKASSRPQSVDHQIRRNTTHEQRSIN

SEQ ID NO: 997630 - protein, 225 aa, Homo sapiens
ERTVSFFSLVCKSEFIFIKDTMNGGDHQKRDFGSGCNETTRIQSTQDRSRKTPCDSVDFRMYTTVSGALDETRRVESVLGSCLAATQGRGPGGAPTPIGGSLRGRDKILTGSDVERRASREKGMKTARMGARSLCRENASQVHVDTPLESVCERRTLFPLRKSFHSSPKRGLLQGRTRSSRTGPWACMGVPYSGAQSAQWRVNQHLRERKSSPPVVTSAFPSRKA

SEQ ID NO: 997631 - protein, 108 aa, Homo sapiens
GGPGLPPRPVRRDEIPMTVFMLGVRSGLVPSVSDIRPHQGYTRLSDRRSMLHGRSVAMEKKEKIIERTQTIRVLRATIEKELGKQKLYAQAVHIIWVEDLEYKEKVHC

SEQ ID NO: 997632 - protein, 91 aa, Homo sapiens
  misc_feature (54)..(54): Xaa can be any naturally occurring amino acid
MGKVKVGVKRIGVVYERLVTRDCYLSSGNSGYWLASQWTPFIDHQSTWFYMIPXYRFRARDGQYSYWRLVQGMRIRVSVVITVDKSPYTRS

SEQ ID NO: 997633 - protein, 176 aa, Homo sapiens
AEVAAISLLDISGRPQTPCEVPRSCRKENRKKLHPGTRSDRYVKMKRNKAESLRRHRADRVRLNDLKGHDHVMPSSWLWNAHHKDIQESISACPCWTLPGIVPGSNEPSSELVKCLHDVHTRSLRVAEGYVVIEMYFAYLSYSRRHRSDTLVERTLTQPRTIEECTKPSIAEGCRQ

SEQ ID NO: 997634 - protein, 152 aa, Homo sapiens
  misc_feature (24)..(24): Xaa can be any naturally occurring amino acid
MSQVMNLCVEPEELTPRRRRGWEXSGLKDIPDPQMCGNGGYYRRGDTVHWFPIVWKISAPPQGCTLQLQERHESRVLAGQSLNRTATREPALERERPLGVNQERRGIPGSHNLVCAYAVPQPYDVGVGPPRPQKTPFWRATGPFGEDSFTNP

SEQ ID NO: 997635 - protein, 435 aa, Homo sapiens
GSLSSAAAQRAGPAAGAAGGSESPAAPGSIAERTGRDASRALWLLLSWFPCSMDGIGGCDVGMTHLDTDVVPSSKRAQKVGPSPKNWHRTLCVICAPCMARGIACSRECAVKLLGVTQLRYPVYGAPYCPPWEVPEEGGRGLSRAPWALATLSRGDCSVYPVEEAVYSPESRGQALGTRIVLPRHHVIACGPGPPGHRKHNGGLRDPNLKGPPGGFVGTHKAFPSINWPIALPDFVGTPNVAENPLGQQEGRRGMAEKRTAQPRKFALEWRLEGGFAPVPVLFQANEVGPHPGALVGGHFVEPRSNRALGFPIGRLEFLLKGFGYPGIGGRFRRCTLVDDGEDTALVCWERTPLGSAERPLDELPGTLGGPIKGNLRRVWGNKSGTRVGPQGPHRMGGKPCRNTCGSHGAFKYSGDKGYPGCSWEDLGRLRRSST

SEQ ID NO: 997636 - protein, 160 aa, Homo sapiens
  misc_feature (70)..(70): Xaa can be any naturally occurring amino acid
  misc_feature (149)..(149): Xaa can be any naturally occurring amino acid
MWGVGPVQGLGADRVISITPPPVEFLSLKDYAGYTFPKLGEFFIPGARVTSVKRGRMALISLHIRDTALXYKICVSPSKSRNPVSTYQCDEISWSHSNFLTWGTPHTVCLDYAQRAPVWFVPPNNAVACALLWAPPPASCTEYKGCLEXKLPLKGTSVSI

SEQ ID NO: 997637 - protein, 361 aa, Homo sapiens
MPAGGCQYNETKSGGMEADEFWPFSQVLELALSRSGGWITPASWLKPGLVGCSTNNFPQFLVGHQWIYKFAIGNPWLTSSTGGRNRDRWIFGTHGPNINAPGAVLAYLFVAGIIGGDNFLENAILAQGTIHGAPPIVWRERRGRKETRGLGASASPPVETIAGSQSGGRLARLDPQDIKRRRDSREGGPQRCLKAREGEVMSPGGKPTHSTQGGRLCCGAPTQEKAPQIRGQPPGVFSSAGPLQTPEKNTSYTRSVASPEKKEGGVEKRPRNDKGIFGDGGAVLDTTKLFPKKNILWSQHQKGGKTHKWAALPLVVFRAQGRKHHHLVAPIWEGCNSLSANFFPQCPFCFSIGTPEKFGAP

SEQ ID NO: 997638 - protein, 230 aa, Homo sapiens
MGTVQNVCACREHSSMGSLIVAETGGQLHIARAQSAACRCIEHDKEGYFPAEVGHRARTTQGLINPGPLFQRFAPNSSGCPRTPLLKKPVGSAEDGFPRTKSGSHSQACKRNNPNRLGPSSPIPTEGFHCRDSLGVGTSPRTGLGTWGDQKAPSGRSSSAHTQKEPLMLLHTHSLTNLGRIGPDGPFGSDLGARWFPLATQERTSLYGGNRARTNLSFALQPYASTWEPL

SEQ ID NO: 997639 - protein, 285 aa, Homo sapiens
  misc_feature (110)..(110): Xaa can be any naturally occurring amino acid
EQPEEFCTMNLCGTLVNNSAKGLSSCCPENDLGHHGDDVQAGLLQMWHAQHTSSSLASGGWNSEMSSRPLQIFISVATSYNTVFIRHRARNDSRMASGRVSVSWLRLLVXLPVIQGDCFQRAYSLGVWAEYEGAMRLYGHVSTLGWQAVRVVEFLQVAVGSDVLRTTFLVGSILDVTHRDYGVRIHERAILGDASVVPEPGEDVCSSECPLHNPKQSIDFLRVATARQLTPGKGLGLCVSQIHCGGGENGDAKAVSQPRASWLEKGPAQELCVGASLGVPPVQVN

SEQ ID NO: 997640 - protein, 135 aa, Homo sapiens
MARPLTILRKTIPARTVYPAPGRGPLSKRSLFSSSSLARISRKVMKRKVPPASAPERQHGRHVCPVAPWALYICPGPRPDAQGESWGFGDRRGLAASRRGHVTLRAMLDRPGPTATSVFVDGHPQIKGSPLSPIR

SEQ ID NO: 997641 - protein, 152 aa, Homo sapiens
MPQKYMSVRRRAKEEHTRGGAHRHIRQNDGKMRHTTTGTTLTRKTGPRSTRQSLDTNGQIKDMEETYKSTPYRTSHIRRANRKGHTNRTRKKQRSYTTTIRRSTKEGQQKTATRLGHRGKDNRGKTTAPTKRPKKIWERQGVYSRASSTRNR

SEQ ID NO: 997642 - protein, 240 aa, Homo sapiens
GASWAGGVVQRARRVQTGVQGPRGRLAAVLVSPALTRNLHREGKSAPDGWLSTAGDSPYRGLPSGVEREGVRVGEKHGKGGFRRWAVVEGGGGRADLAMTVEHGMSRAKKPFIGKNSIANYKMAEGHQDKSKVFATPVDKYPIHIPYGTWTPIVVTASGGPNWQSKDEKPKPEGEVGNPEVNGHGLGLKLTNAVKDSSLDRGVRQGTQKGAKFHNFNWQQDLLPSNWDMGLIQRRTQHTA

SEQ ID NO: 997643 - protein, 74 aa, Homo sapiens
AAPAEFSCPALTAAAPAVPVPRVPRVPREREWDPALGRTQCAAARDATQEMSHSRHTVPFQTHRCPVSSPVAKI

SEQ ID NO: 997644 - protein, 402 aa, Homo sapiens
MKPILAASRGISANGEGVLANVLVVATSQKDAPKDHMATPRILVGHESLLFGHYYLVVYRPWPCLSKDGCLVNFGQPSQANTHTTNKASSRSIERRINPSCERPEKRKVSQHGELITVGTSKGIAERTIHRGEQEDTTVICPRRPHIVPQGGIPSQRDYFMLRSPRAQAQPERCGELLPTRGHNVVWPPTHEGGKPQQHVVPPKLCCRTTCGGHQSTVVAPNEVLPQPINSEDAPPTVWLTTNVSANMQEDGSHNMSTPHKVSHQTHPATPYDKTPANMNRGRTSPAGKKETPTPLSRRHKTIAVDTPQHRRVRRTLAEKYHASGETEDSLRPHDETKKRTPPSRRKSVITPTEADARGNPRTREKNNHKKGEQTNTREPHRNNDDHHLNKRRRANPYTTAV

SEQ ID NO: 997645 - protein, 181 aa, Homo sapiens
GQCKPSGRWHRGLTMDAEYDVIVLGTGLTECILSGIMSVNGHEGAAHGPGTPTTVGESSSITRPWMELYKRLTVAGGAPLSRWAEEENLECRPDSQNSSWLNCGSMCTGCYLYHRGETSHNMDFNVLVRVGKLLSYKGGRKHLTNVAVPLTTEAYGFQICMVHVMRNWRYPEKYPGSNVAN

SEQ ID NO: 997646 - protein, 45 aa, Homo sapiens
MLVEEGRKKGEGSKRKRGGRHPPSIEENKQGREKTSTQRGHQHTR

SEQ ID NO: 997647 - protein, 335 aa, Homo sapiens
GSVSLRVLLVAGAGGVCGLRGEPSEDAPVLQEAEVRAPARCGPAPDRGHGVTNCPCMFRLLAGARGSGSCMNPADHRSTGDRRRGQLHITSYATKIHFSYVRAGTVWLECFDTPASGGALRIKRDHAEGLNEAGTYVSVRTEVYWTPKCILHGSIGRVKCHETDTYTAMETSGRTGEGNEPWHFGASEGQRHLVQGMKVRWKKGPEQERLSSAIARPKQGPGVPGQAPKETQVGPGATAERQDMPERRKCQFDIESRGRTFDVRPAPEDVTAKVTWSAISPQLTKRGIAGRLCFRRRKTIHPGEEFSGRADTRKDTDRSVENPGWRQPRSLVINH

SEQ ID NO: 997648 - protein, 265 aa, Homo sapiens
MSYSQDPDAREIVVTLAENPRLFEVDLFTSEGLFRCCLCSRCVLHTGIYEGPEKLRDTDKTRYMGKGVSQGVYEHIKIKLLAAMTWLRHTKTESSSEPREDGRKLTDRQHWTVNQSTLQSKVMAANAILGRCTLAVLTKLVPFEKGVPHVPDKHRCLGMTTSEVHPASPWLSHVINGRFSCWQQRWPCTEFMILPDRMQAKLHGKPCAEEQRYNIQLAAMSIKGENTLAKDAHQEAEGRTARCAPKHSWRINDGCNHVKPTLAQH

SEQ ID NO: 997649 - protein, 154 aa, Homo sapiens
MDVNWLELTRAKGPFTGNQKGTSGWPAVYKWQEATGMAIVKTGIMGTGIDMLNMYITITAKNQTIVPYVPWLKLGEKAQKGNPGMTVTGTDGELTTEEEPGLTKEQTTGKIHTTATQEQTSTSDREWRDKDWGANRTGHEQKMTTSEHGTETYK

SEQ ID NO: 997650 - protein, 233 aa, Homo sapiens
VRGAVHQSIGAVRPSLSPRRPGPLCACVSAPAPARACCKGRRAAASGGSLFPQKLLNAENLSKWYLRMTLKKHPWTGLMISKSLIMVPRGKSRTLQEMQTGGPVELTRTDGKDHLGNTGSWASPSIPARGIYSSESSRYKRINGGALGFTAWKGKQMEFPRIGVENRAYGRPGNFTRSLIKPLCRPNQEAPKRIPRTQKNSKVTGRKDLDDTEATPRYPYMNTHDGYGATIWE

SEQ ID NO: 997651 - protein, 230 aa, Homo sapiens
ETTSWARWSVPLSHLPTEDPTMERPYTFKEFLLRPRSHKSRVKGFLRLENGLYAKKMEVTDEEHTVTRGTDMEHGWEVVDSNDSASQHQEELSYLPPTASRVGQTQVGQLTPNYTIVNHNNRTTQWHRPSLMDVSSRVGQLTSDRLNQEAAHRRTSLPTGTSAKTPEARSPREGAGMSPSLWETISEEVNIKMEELFSGLDLAHTTGNSQDSQTMPQEAVTGTEPQGIRL

SEQ ID NO: 997652 - protein, 175 aa, Homo sapiens
RERTSLEFRYIFLFKFTKFFFKNQIQGLKKSLHFQPCLGVWVGELRIKLSKRVPYLPSPCKGDTAELKSAGPLPFSCPVPSLLQDSFKLRCIEKIINMSGQEIDVFARSVVKRREKAVRYIFRQYQDEREIFQKTVGCLMSPLLRKEYTSVKEPHQPICGRNPPPKGDVGRTGAH

SEQ ID NO: 997653 - protein, 53 aa, Homo sapiens
LPSLFGARPYSTSERMSNGPADGIDLGNTLLLCGCDPARTQVEIMANDQGTRT

SEQ ID NO: 997654 - protein, 253 aa, Homo sapiens
MISMGSKGLFFFVKYFPGLKFLFFFFVLSFEEHQTLVRIYSPPGRESCKGGTKIFVPHMGRHIALPGIHRHFSCLQSTSTESRWRIQQGTQCPPNSTGAKFSINRANQQSTNTERGVTTRGLQHTETGVLRRISIDTLERQPPRPTGTTPQRAVGELHRADGSQMPPRGIWWACDKVPPLQERHTPPPRLPVSDTTYTKEKGENWSEQQVKQINQLIISPRQQRQSRTRADRRKNNTATDPTSRRGQQQTSNT

SEQ ID NO: 997655 - protein, 106 aa, Homo sapiens
AECRVRVVSRAASTARFALRRPRPAALAMSRPPPPRVASVLGTMADGVRLHGLRPASAAGLCCAVSWSACTHPNLDTGLHVHATGHVLRPSWAGMGLGLCAVATAE

SEQ ID NO: 997656 - protein, 274 aa, Homo sapiens
MVRYSLDPEKHTKSCRINEVPISCVFTLKNTRENCCSAIKGMHILKSHEVSEKMSLYRNSVYHSDVTMVELAGVRRPGNGAGHTVGGSWNRVLNLCCTCLHETRESTAELKGLDVDPLVIEHIQVKQSQLRCDRPDLQSSWSDEPIHELSLTLEDDPYVKRNRLFLKSEEEVAQKKKIVPEETEETKDLIGTGEFKFQAIKQVTMVNQRQKDKKNKNKKKSATGQYIIVDRKSENKKKMIKTQVKQMKNKTESQHQNPAPGLCKNQTSKTREEN

SEQ ID NO: 997657 - protein, 495 aa, Homo sapiens
MHSTPMSQITDRLPVQWLGSNRATAMSNPNENIPHSHPILSTEKPKPYPFPTQIQQVAWLGIALEQPLQAHRYRLGEVPPPWELIRKQTPNPISDKQTRLSAEPTQSTAHEEERRKEHLKKYIMKVTSNHIDVTKESTPTKTLEDLEHWNTTHPNWMNARTHKTFKSTILSLVHNTTPTLTHRQNNTYKLLTHHKTPQETTHIHKSSQHSNTTPNIHQHHLLPPISPHFRNHTNHKNTPKQNSIIRTLYNKHTTQPITPPNIVRTQPINQDRYIPTLYTNTKYRKTKQTTDLIKIKYDHQQYHQSHLGSTNYLGWRQYDGVTPRRICDTTSRSTILTKSVGSAAAQTSWMHPPKHNYATPTLWEYRTPTDSILHNIKWTKQRSKRRLMRTTKANNNYTEETHTTAQIITPELTSKQKEVTKPQFGKIKSAESGQLVAQTIIEREDNQPARYYDLDTMHTTRIITPRYSTTPNRPTNKIQKDKILHNKIKSTLPNI

SEQ ID NO: 997658 - protein, 100 aa, Homo sapiens
MQKDEERTTQNGKEQSNAPEGGTPRRERSGSTARATDPGGKRGAKKEEEQPEEDEHSIVKNTKKGGQKMHAGGTARTYGSSTDYKKVHREPDEGAHMGHK

SEQ ID NO: 997659 - protein, 211 aa, Homo sapiens
PRQCLAPASEAARPRLRRHYRRGAALRRSPKLDGRRGPVASALEKKTKMQGGPTSLLLCAPMEFKNGYNLRRHEAIHTGAKAGRVPSGAMKMPTMVPLSLLSVPRAERSRRGSGERMAAVPGRLALPEFGLPVAVVDHDLPRGSGIRKETMPARCVARPSATSTTLNRHKLSHSDEKPYQCPVCQHALQRARTAMSYHVPLTIDRRLCTKP

SEQ ID NO: 997660 - protein, 133 aa, Homo sapiens
MGAPRSRIAQKPGGWVFMGACERHAGGPFWLRRNRSFWRLHPGFCSSGREGHPSGRRGPGRVWHLKGGGAWGPFARVAFLLRWWPPTPSSSGPGLAKSREHSSLSPLVVLWGIRETFEGTYRKKRSREKKQRH

SEQ ID NO: 997661 - protein, 381 aa, Homo sapiens
AALWTGEGKYSLRYVFISSVKTDYYSKLVPAEWGIAEKITENVEATLALGNRQRLEQFEELTEEDRKMWESLELPRDLLNAFDQNADSDMDNNNAELRWSQMDHEELSGTLEYKVILATVLSKKDKRHIYHLPLETQCNLLSNRMILAVPRSTHVSKPANAFTEVAVGYCSQGHSSIQQRRNTDAIITSFRTKLDVTLAPAAREHNPYVHAMSQTQSTSSVARSRLPCNKEANQGIKNRGAPHAFTQTFHEKQPCWYAPQTIMDKNEGSINTKHRHYHGGQHNSTGEVLSEREPGPIEEVKNVQNGCQNTAKGNKVGGKKVCLEDLCKKSFRKAERSSGINRVPGGFQSKVEKQDIIGARAHHVSDVMRIRPLLTRVHRSA

SEQ ID NO: 997662 - protein, 104 aa, Homo sapiens
DTLLQSAISHSPTPQRRPGVSIHPALLAPAVRGPHPWPLSILYRGHSCGPSRENPKSRTRAGEHRGVVRLKQGDTTYPGPASGMPLLREQRYGFKPRIAVSTRR

SEQ ID NO: 997663 - protein, 142 aa, Homo sapiens
  misc_feature (43)..(43): Xaa can be any naturally occurring amino acid
  misc_feature (95)..(95): Xaa can be any naturally occurring amino acid
MDTRRHSCTHATQKVYEKVLSAQARAANGGRSQSVDVHMALSXSPGLPLIPQRRGAHKECPQCAVSAPSGKIAGPSGTAICARMSKPIWNPGSFXCPRAESRPHITSTSKKLLGVVHSRRSSTGHLRSVPPFYHSLLSARFI

SEQ ID NO: 997664 - protein, 67 aa, Homo sapiens
MADFANLEKETGRSQVKQDGELFTTGGPYQERRHVNCAQGSMGVLPPERDKCIDVDPHLNDSYNGNA

SEQ ID NO: 997665 - protein, 191 aa, Homo sapiens
MSSEENKCVEQPSHQQRKVCEEGTRNTEGGAERQDRRRPLGPGPSSEWRLNRLDKGRRPEAEDNNPGRARSEHSEGRNKRDEGRRRSQEAEKTQERGSGGDSWTNGKWGPVDNLQNARGKKGGKRKRRNQQPNKTQNAGYAQVDEQSVESESTQQDEEEKDEEKSTRSDRRDIGERDGREGQQAEERAKEN

SEQ ID NO: 997666 - protein, 341 aa, Homo sapiens
TDIREELTMCTIGTSYAHRKDQLHQSLGIGDSMLCDSPLHGPSMAVVKTRARAKGVYAQMSSGPKVITSPRSRRPCNIDVQTNAMVGEERLKPARLREPALYVIYFEKQQGADVELQANRSCSRGVIVRFGIRKRFGLALYQWFPFGIDTLAAQMEHRGAQQSSSPVTNVAVEKSKPSRSYKETNAAHGLAGATGHTRPKIATRYGVSLYMAQTLSLKKRRSTPKYCNSQFWYAPVVTHRVTRLSRGYHRWWCAGCNGRSEEQTQRLCLLWNGGRALSTLGEPPPPETKELSVYGVLGRPEVHFLGGKLPSSLQFFTSSSCSVLLVTLQNEATSRDSVAIT

SEQ ID NO: 997667 - protein, 118 aa, Homo sapiens
MRLKETAIEDLQSSRTTVQELAEQFTHTEPMSARIYKTDPQVQNGTVFNKWYRNTNPHEKDVDTPPWGINSLVQDISTYLLAGHRPAHDTIRPHTLHNHYTADPNAAYSLHNDTTHIH

SEQ ID NO: 997668 - protein, 177 aa, Homo sapiens
VWPGSGVVRFSVVGPVATWVPFISLLPSLWHSSPHGDRGGCWIVERMAIRIYKISSVYPAGLMVQCTGMWPSVRSWPGYTAQSPSWLLSRFQKPVLGLGHLPMRALELLASRGLSHVPASVPKAGCRGSTARSTKGRGKNLSHVGHMTTSRGHQLTGPLVEDLLVSFHRSIDWDGTP

SEQ ID NO: 997669 - protein, 270 aa, Homo sapiens
SRRVTMMAAPSCGELADSLLVLDRHPSTPSADSVAGARRVRKHGGPSFAAESAEDRGVQRRGPGHGLGERARSAWATCDKARKRTKTRHIPHSTQPPKDAAVDENRGGTPRRSDQNGTQEPQKGHSAPVDARSTRAKAGSAEQRDKGQPHETRKDATKRSPEQRKQETRKGKTGRRGAHTEGADPEKNSSKPGNQRSTRTQEKTKQDDRGSKPTERTDPAGRAETEENTRDTAQTDGGENRGQAKHVAHARQRGHTAQNKQENSEREDNQ

SEQ ID NO: 997670 - protein, 101 aa, Homo sapiens
HYKGNPFPPSLLASIAFPQAPDPEFQNPSDHILLCSGGQNNCSLSLCPARHGPEDPHLRTTSSRACKLWPWTHPQSEGTDGPDHTNSTIICDQTFISMSIA

SEQ ID NO: 997671 - protein, 57 aa, Homo sapiens
MGRLPGTKWPRDPTTQPPSITYPNSNTKGTLEAPSRKSTHTGPPRGYPTAYGTLQGH

SEQ ID NO: 997672 - protein, 191 aa, Homo sapiens
ADTRAGGGRGRQGEDGGLERGGITMRMVMDDAHDEEAPQGSTTVRSLSAGRTIEARGGNRMEASYRVEAERRTTRDTGDLDQRSDTVAMDVLVRCHEESVIGAWRWPEGRATGREPCEDALCSAAGMASDEHGTPVSEAGKAGKAVSAWEGRDVAGMKDTADKNALTRVVQRVVHPGAYNANNRNGGICKD

SEQ ID NO: 997673 - protein, 137 aa, Homo sapiens
MGETWVLSPGQKKTRILSPISGHPGPLVGKCVRALEGAVTVLFHLIVVVPYLNKREPRPPFPKPKTQRTKHNPPQTPPARLYPGGRAQKQRPNATAQEETTVLHTGRRTRGHKRAIPRRPPHIDGPLYNGTPARHRT

SEQ ID NO: 997674 - protein, 322 aa, Homo sapiens
DLRVVETGFHLVLAGLVWDSWPIRQSTWPRALRQEVAGYLVVALRPPCNRGQKLYLYVFVLITATQHSTGWKRIGCSVSTCGCLSRKDVVLHRQFAPQHVESLVHAHYPFINLLFHRESTRQPVVYVTCNSSKNAWRHKTPAIKTLVTYLGRSLASPVSGAPGPETGDTKPGGRRGGQTKREALRGAPRESQCRKRIDDKGRSSYKQSRAGESDPAQYDRPAKKTGCAVTKDNVVSALCVATRVPVTICALQFDDYTSQPRHDVCAAQVFSAPGDLPYLASVGYIWMEKERSPGSAFVVCNAACQRNIRVGPNLSREILHAR

SEQ ID NO: 997675 - protein, 450 aa, Homo sapiens
GGNLPQWGTPGFWGTQWEKSGVWTVANRPTAVVTIILKGALRESQTRRPWRHAHRREPTIMHRQPHDKGHTSVPGHSRPSETRRVNKKNTQSRPVVHPTRCHRGGTNHPTRHVHRTLTSTARSRPQRGDGESSTPGETPMCSEETGRYTPGTVHRQRAHYSPRGAKPRRLQSTSLETAHRPYAHNGPQNPLGAFPAPDIEDEGATVNTHNRWEPPTVDGGRPHNQKEGNTHRAHTTTRGDNRSTRDQENIPRPPCTTVTASGKEQTCDGRTNLLTTHKQRGPQMNNNPRDKGKPNVHNGRTLETQTTLRGGPPQQFHHKKKSQLRHKTLKEETSHIDQPPRALGESASGRITHPTRRGEQAPWAQTTRHDAHEERELTSVTTDRVRRRTNACGAPAEGLTRRAIRPTRRRRCNRRYNRRGDLTMYRPNRSGDADPTKMEDEAATRDSRHN

SEQ ID NO: 997676 - protein, 279 aa, Homo sapiens
GDLAGLTCNSDVRSIPRYPLLVSTEIATWLEVHHVYCSQIHAREIFDSRRDPNVEVASRCSLKIGLLQSRAVPSWVHSTGIYGGPEELRDNDKTRLYGEGCLKTAVDVINQEESYWRLPWVRKKLNRQRKQEKDRANLMTSMMDWNHENYTLSYGSERAYLGGSPFARLHKLVPSEKGVTPVPSIADLGWATLNVILAKSRPYKVIKLRVCLNAARTTAGPLPGRYHDPYPGRVAAMTSAERTHCRHWEATGYTHKTCKTLFSPRDEPMGKGWQPMCRD

SEQ ID NO: 997677 - protein, 459 aa, Homo sapiens
FTSRSTFSTNYRVPGLLSMSGPVYGARVRARVTLRPASIQALGCSEFPRVSVSRIHQAISGAGIGVSRAWPVATGNTPGVCPDWEGTPRQSRIGRLTVKALRRPAHGPSYPVVHELMRCLADLENAEKAVEDAIESSWVPTLLRIGHGYPPVFHADLRRQFTFKRTQSEGNPERPPGVFLPPLPGANNCPCIRFPATNLTNCPQILCLALSQHLFTETSTVNFTHHRMPSAFGAQVTFVSERHTDPFPIEDSPAKHGSNSIRPPPQLFPPADVGLALRTETRMHFGRGLPSNGEETCHSFLSADKLNTKQRNDTRQCNRLQQQGPFTRGPHRNFGPMTFLGGFCIRGWARAEEMVPPREFHPLRNPSDAKGIPLGATSNSRRAPKSIGLRRPWVFRLKRHHPGRHGKAVREPHRYSWGFFHSRASLDGSKHTQDSVGSPPQHRSLARRVWQGPGSQTTT

SEQ ID NO: 997678 - protein, 389 aa, Homo sapiens
ERTSLEFLNGLFSYVRKVQIKPRVRASSSNRGAPYPPRVVGLSQVCPAGLGRVGRRRCRGRTGELTLVAHECPIAMPSVVKHDICAKGKGPQHNGCSDQNGSMKNRIWMKTTRARIELYTQKAPRHMNETKYRRRRGRPRDSGVYNPGKRHGTSGQPRTKSPQNGNRTAPIYIKPRFPQSDAIVLEGRQLEYCTANGGTNKFAEIMGTMETQSIHTARIYTFTRTESVHPKKRRVEPHQQQFEASNNVEQRYAGTVVDKKVTYRNTETSRRKLDPQAKKTTPEKNSSNRKKTPHTAQRIHHTTKSERTSRHKTQAPPKGNNHSENTTTPSWNTARLRGTKTDHTTPTQTSHYINPPTQLGTLPCQPNNTAHATGDESASLSNHIDRDDN

SEQ ID NO: 997679 - protein, 231 aa, Homo sapiens
TSCALWDIETGQQTVGFAGHSGDVMSLSLAPDGQSRLMSGACDASIKLWDVRDSDVPTEHSSAMNPTSMQWAFFPNGYAFTTGSDDATCRLFDLRAESGAPQCTPDDKDHRVAITYVAFSRSGRLLLAGYDDFRRANIWDAMKGDRCSESSLAYDKRVSCLGGHRRVAWLVSHGIPGNSFPQDLELTGPSPHGSQARRRPWPNAAQVQGQGTCGACAQVPAPFPGPRRPIG

SEQ ID NO: 997680 - protein, 183 aa, Homo sapiens
MARQSYYQRLGPRGSGTFISGQTSELGEFRFTAFATNQVQEDTAPKYGRYNVFWSSNPGHALDDRDGKESPKYLVSAIEPQGPPLNASSAGQGSLQVGRTEVQVGKGMGRFLDTAGDPEQFPFPETLGEESGSDQAGGNSSPDKTGRQSTVPRALEKPWLEGYKKSGYGEQTLSSVKGGRGHE

SEQ ID NO: 997681 - protein, 149 aa, Homo sapiens
PAHRAMPFRCASEVDEDLLLDLESGVPSDHVSMPQRLGGPSEVVRVRTLGEAVQCRMTVNPCVEPSGGQYKGEVSGGRWMNVVRRGRDACCVGLGGGAQTICAPICRVPLSSHSRSRPHMAEEQQLRKLGALRDGTNYNTVSRHQGWRP

SEQ ID NO: 997682 - protein, 114 aa, Homo sapiens
  misc_feature (62)..(62): Xaa can be any naturally occurring amino acid
ERTSLEFFMFLKGLLLMKQIQKMYSQAQFVQFTSCGGNRQNDSVQDSSELTQERGLDFAARXNSLSWSGTGAGATGLGTGAAGTGYSSLLPQVAWARSVLHIFHRIITFLPFKF

SEQ ID NO: 997683 - protein, 90 aa, Homo sapiens
GQHGPVRTRSVKKADRSLTQQQEWLATRLGNDFHTRQGAVCEEIAMDPPAKELRNKKTGYVTLVMHDSEFHVEGTANQVSPSMPARQERR

SEQ ID NO: 997684 - protein, 277 aa, Homo sapiens
GLEQSLEHAAVLPGPEPGLFSTQVFRAPRSAMSSGHPCCCWMIGRLTKVHFGLAICARSWCRLVLERVTAGAHGRRDCDRVVPGLRRTMSSMHGWRACAQRFHQTEYICRSARMHPQPCAELPDDTGCTGGLYVLVNNAGIAFKACVILTSLVIFKLEVTIKQNFFGYPRMCAQNYSLYSIETPRGGECVNVTLAIDDASDPLKAAGQSLQREGSCSEYHLLSEELVGLMNNVCWMDTIEAECNLKGRAGPSSRITGLTKIGVHRSVPGSSAKENLS

SEQ ID NO: 997685 - protein, 206 aa, Homo sapiens
MSAAAAARGLVPALLPPLGDRAAPSLSWPPRLCSRRPGLGQPGQPPQQTPRLRWQYSPSPSLDRRPPTRGRALPPHGVPGQEPEGEDMARRNCTVDADRAASQPWAAFTGEDQHGPHEPDGPLYQMHPTLERHGIESPQSSKGAQVHGICHDLVAVHLNTSCNFRASTCDLHCPSMKFHKEQRHYSNDGIAEAAESRAPNLGPIAS

SEQ ID NO: 997686 - protein, 369 aa, Homo sapiens
HRIFQRTTVTCTVWAVFLLLHLREHIHDTEIILRWTRTLTDISFQSNVLFAEGEGQTSRTAALRASIGGPVWNERWGALTRRSHTAGLPLNSVSEASRLEPAVPRAGGRCRGANLSGLQMLGGVHGETVRILPPAAQVAWLVARLLIRLWLKTRDSPVCQQVHRNGCSCMTLRLDRLPSQLRENPVPWLPLLNAKAVLLAVLSRVTPSSSTERLGANMADGWIPPTGLPGKALAEECSISMRTSEVAIGRYHEKGHKPSFWLPGNLQDADNCGKEPLVFTYCLSNKETRVRGKGSLDQALGRAFNPKASVKPSNGRLMTRGQTSAFRTGKVGNALVSSWIGGSCASCFDIGPMKPGWYESENELLFPEH

SEQ ID NO: 997687 - protein, 308 aa, Homo sapiens
MPDVLPNLPLIAIHPRIRLFPTLYQDYRGECNNECWLSLAEKCKFVYAQPYVGVLSKREMTSNESDVVEMPEMKVYHIVGRLPRSMRCSDLVVTSLRMIVMWTQKSPYQQTAGGGARWTPEAENKHKPLQEVKAGQKGGGGRAERRQPAEVGMEPTPELPAEVLMVEVEKRVHDGLPGHRSEGESPDCRDQCKTIRDIIGLNPSLQGVTCLQMMQAVQRVVGQPPLYLSDMGARAHRDWVPVKLQGVLEETNIPKAADTGLSLVKQGIGADAAAQRLGRMSSKIQETTVIPMRKEAHRRDCGKGKEPK

SEQ ID NO: 997688 - protein, 145 aa, Homo sapiens
LPWFTSFPARCRHREIYLHIMVPRPESESPVTPDLHTHLKYRQSMLRVANHGQSGCSSLAILMSNNHVLGDLSGTDGDNAYACYGVPGLVTEAMDVGGADCLLMRTPEVGPDPWSPDSSIYGNQLKREKAHETAYYVLVRNRGAQ

SEQ ID NO: 997689 - protein, 391 aa, Homo sapiens
ARSLTRCQVLVFMSARCANEAGHQPAVHEKTLQSVCRLSCPRASRRRMYRCLARWQCDRLAQQSDRKGADTADFWLGDKDVGMVTSWLTALIEWTAVTAVEIRRSLKVRSLTSELSVKREEVIDGGIPVERIVLYLVLVHRSGAVAGTPVFVAPLPFLAVCFYQGPPATRPLNYQAGEGFHELAEGAGAHGKDISVWSRETRTNCLYLWGLGQLDDLVCFSALWDGKPSMVRRRALKPTTGSLRGGPYVEVLDWRLAFVAPIRTCEYDVPKGTRMVYTPNGKPLGQTSDTNIPSGSIAGKLRPRGSFWLTIRGQFHRWNRFVGKMRLGGHRCRPYLKFHTQNRFPWNGSLYTMHAAFLAVPILVNLLRDKFEWGTPCLIITIRLYRERRTK

SEQ ID NO: 997690 - protein, 120 aa, Homo sapiens
PIQDLVGPARRSRSSLSRERRGTEKQHPGLSSQRSSGYSYNDKSLSALLSIGLTETPSQVVKPGFQFCSIITECFTVSSQCLHRSVLVNLAIHIQRNFGMTIRLVACPNLSITYWLVRRD

SEQ ID NO: 997691 - protein, 362 aa, Homo sapiens
GLTPVIKCQKPLVPSPEGYQVTYSTAYVLVEEKAGVLGKKSQILVGFGAPSQTPHDKTTGLQTLCVQSAQGLGLFKCLVRVDGFHVSLQRCPAGCMGNRQSSLLARKGDVQTNDARLLTAHEEKWDGSQALGLRVPEHEIEGGCLSRDEDVARCKQVDVAKTKPMEVSISGESTRRGVGASDIAQTMEIARVKGYKEGSYSRRPREKYTDSSFGSNVMEDAQAHKGLKGTPVIRYKGFHTGIGERNALARDQSLESLKDKRSDPPLGIATERPLNGSPITDVGTTPLDCGRQLGKQGFGMNIRKPQGIDKCRSPRTGAKTRDIGVTQQSDTSIGRNRTPRKRRRKKRNKEGLVKYHDIADQR

SEQ ID NO: 997692 - protein, 117 aa, Homo sapiens
MLSRIHKNREVTSRGLGDTKYVVSESQGTSASYVVPRKIVVVRVSYIHNCKGYTEIMNEIGRKGPDGVYDVAPRDEYGLPHRKGTKGDPAGPMKHVDINITIKGQENNEWQEEHQSV

SEQ ID NO: 997693 - protein, 85 aa, Homo sapiens
LTSTMAVWQEQVALRPGGKKWSQERKWLIHLSKKDWYDVKAPAMFKYKKYGKTLAHHETQGKQYIASVWSQAVCRWNVSLADLHE

SEQ ID NO: 997694 - protein, 84 aa, Homo sapiens
ICTEQECRMCVHAEDRRSDQAMQIGPCSLCEEKRRPNDHMGPAISDIAGAMSLVYQISEWKQCWERTLGHEIGSGAWFTLHQRH

SEQ ID NO: 997695 - protein, 293 aa, Homo sapiens
  misc_feature (184)..(184): Xaa can be any naturally occurring amino acid
TYRRYGFLQAASAYSSRRVACSRHVTGHPAALTIQALTRGIAKVIGKSDPLLMSYPETAKGSDWVPTGCRGEGQGSFYQDDPTLASNCRWNPASHRRDRRTNDGGSSCSTTATVRGSQGQSINRAEPSPRKGRGVPCDMHLHVCRICAPCAKNGVAQSVATWLFRSHYLLRGRACLMERCTMAXQHLPTSVTAVPFGPAIYALLQLRRSAVEGFGPLPVYSSCRHGVAPSLTFPGTSGTLAELSPEASTPCARFARRVAFLRALPKRAPRAPRGPKVRPAAWVLLFECTARSS

SEQ ID NO: 997696 - protein, 71 aa, Homo sapiens
SLLGRMAFRLQGCTGCYVPSSVAASTDNFDPAKAHAKAARDIQGVRRVRIRTCALSVYYEEDDSGHFHQIQ

SEQ ID NO: 997697 - protein, 280 aa, Homo sapiens
MGTNIECLILGYNSCSMNVQDLCFPLVPPRLCGQLKVSGSVFISSLISGAGPETLATSPMLCIHDLFWTIKGSIDANQRGTTRRETQRITPGSGHFRAVGGVRITQRLDHRESRLGSGDTQIFPTGSTDERLGHPKRRVPCVRRVHLEKGEEDKKTGTKTSEEDTERPDEVKGTEKSHGRQLKERRPREGAEDKKQTTDRKKEYEQEPTEENITARERNDHNKWDTNRRPLVTQLNERKGDTNDWDTKNNAQYEHEETPSNDPSKRERGQEPKLRVEEPT

SEQ ID NO: 997698 - protein, 390 aa, Homo sapiens
MAASGVLGRIAPRLLPSGSPEAGAQVRGHWWEKHNLHISQEEALIMAGSYGSTHSLSKLGGSGAASYIGEMSAHPLSGGLPAEKAEPWACWGPQMSGGVDKQVPGKRKPQSTRGPSAKALCKQTSSRVPLGPTVQIPEENMGGLLPRKRAEGCPPSSVLETQLSPTLFEEARFTMGGLERPKTLQGPARGRPTKIARGLLSQLQKMVQNGEAQWWAHVRKRGQCAPGGQEGPPPREHKQRDQSTQTHKGSRQHQTTRTAGGISKDYKQKKKHHTPHKREVESNTNAKRHPSPQNRGKEGQQRARKKTWEKKEERQLNEDERQKEGNQKRRSRRGKHGTGAKRTQPQSSRSKIETQQEEKNNQINKEGQNITVPPHREKLTNINRNAYPPT

SEQ ID NO: 997699 - protein, 262 aa, Homo sapiens
SPRVAERRLCERQVLLSWARGGGWSVSGLSLQPALSCLLPGARSVTTASTVRATYLALCTRWSVTQQGTCELHGRTFDSCLKYLGVPCTGALQMCWFAVNCEEQKGVDDPGGETGLDASESTFRTPVNKAVLRNGWRHGDLGNETRKIPEEGLETTDPGQLTELQPDVRRLEGTQMGHDIMHDDMLLAAMSWVRYIGGHKYVEWLGEKQEQRPKDLEILSFQEPKAWNVRSPGLTETRPGWKKTRTKPIKGESEGYNEEWGK

SEQ ID NO: 997700 - protein, 183 aa, Homo sapiens
LRAKADIRTTSCREELPTVGFVSAEELNTHVGRPAYGNQVFISGSPTELFCRSVKVFFCLLALHWSALPHSSWTQDKNLGLAGSGGANIAVTETGLKACPLLANIAVMSNEGGKKGEKICDPYTVKPDFRKIGDGKTVTALSGALWFLASPSFWAPYGLPRCQSVKTVVAESCLVNRGWSTVA

SEQ ID NO: 997701 - protein, 396 aa, Homo sapiens
MKPYNYCKGPSESRWAQKALKYVAMNSEPYRRDTRPSPAYAGPTQTVCGGLAPGVVHTQSLVDIKLSHIYLNTEEECAVTTTGEAPREENGGDSRLTVTQIKPRVANWKVTSKRGGPVDYKDFLYTSRGGPNCAQTINKWHDHGRVYKTPKLSNFFSGCGTFTGGQGHVGEKKWRAQHNGVGLSDEHIQRGSTAYEKPHREQHRLRPQMTRGQKKGGLHRPIHEKTQVSTREGAETIGEPKKEKGSVKENEPMQGYHNLGPKGHRNEPRLPPPHGCRTRTYNVRGRETPWGDSTKGKRACSTESERVNTTQIKNRVYVRRVPPRQRRGEHVARKQRNVSHGEEYWTTARTRRTNYGEGDGQPESAPANKQTSPADILFPVRTNRVRVHDQEDSETR

SEQ ID NO: 997702 - protein, 316 aa, Homo sapiens
GERTSLEFVGSIFSVDRKRINGGVLKGGQQHVEALMSAGPAIVSKGPRTGDVLDPKAIWDEPAFQPPVSSNSSALNWVKPHFLRAVWIFWAARKLELGPWAGPSITCASCVCSLVRMDMNNCGQVVTPVATDARGSFPKAHSQCLIGEPDQPQTQDNICGDADDVEGAGAEPRNMEAICGPQSFLTPVYRYGHQNSGRDLQGLSNEDSVLKIHLTPWWPKKRKMITSLRLFRGTEGPKCAKSGHSGTPRQKPQTLWKYGMVLTESPVKQRRRGGRAPGAKPATESEMTAPAGAVAREWPSAHRTPKAAKRAGKRRR

SEQ ID NO: 997703 - protein, 195 aa, Homo sapiens
WRSLFVACGWEGGSHVSPGAIESRPVLQRVSWWSASAVLESRLIVRQFPSKTPHRAAPRMHRQWSGCLGVTGGCDGVSPTVWASESSSGPRGQSRTLRLEINTDTVALIKFKHKSTKMEQPDSIWLQTGRTRRTLRVTCDLSTKGKDLATDYRNSGDGCAAQPAMSQSQRLKATDGAAGQQDHEALVKHFSKAKS

SEQ ID NO: 997704 - protein, 268 aa, Homo sapiens
MKLELDALLLQCTRRCRPSTRTVARRPRVRQAPGAPLSRVTWGPSSQCKVCRHQRHHNSKVQDWMPDDRDARLHQSGSSAAAHLEHSGRILAAPVPLIIHIYFIVSLTIVVSHHPIIVIPLPKVTNTWYPQGVVPGLTPPICILRSLDRSDDDDYAMLGDSGHKDNRDSDRPDCDRSEHPKTPPMPRSTHAEPKSQLARKRHDTQQRTRSRHSRSETQRPKRRRRLTHRTIQIMHTSENPTRVNNTQEETLNHRLASQSGKIKSWQQC

SEQ ID NO: 997705 - protein, 230 aa, Homo sapiens
QQAATYGGEQRSRRQEQRERRGEVGAGVLQQQVIAGFTAFGRNSEAWQSKAAELEMAVECDTALVIDTLDREGPMKLEVATALVGSDVAGGSEPVKAGAAPALENNHRSTTTTHRSFETTDTDRLQGKGQHMNQIDIPWTHAQPFGLQWDERMTKPKDEPQAKTSDTWAWVLRPSSSLDDAMGRSLKGTQMAPFGVIIVHNPLTLPRVLTFDFHHNMVHSNPISFVPHCV

SEQ ID NO: 997706 - protein, 95 aa, Homo sapiens
MGPRKKLNPGEIPCIERPKFNWAIPEDRDNESNIVGLGQYTIQDVGSPTSYILQRVVTQRQEDNYSNGLKFDQGETNVTHEVASATAECEPWGLL

SEQ ID NO: 997707 - protein, 213 aa, Homo sapiens
GLADGFQVPRRALFFLLQHPVRGHSWALLARMPEKPGRGHGAIRETSEGLGNSSLPQGIDSSFLLLIDVPDGHDRVLVSWVASFMFFSKTWSPFWGAEGSLGEEDRVWRAGTHSADELWACRDSVDLSSLLRIHRNGRGSGTHFLGECRTTLSSSRLKPKAGADTLRGGTEPWGSAQRGRDGTQSGAPGRKCGRANGIDRAYNVKRDLTGRNR

SEQ ID NO: 997708 - protein, 179 aa, Homo sapiens
MACARPTRYSVYSEKGAVHLGQHTVSDVYAVTGHIHTASVNSAHQQSVVASYCSTPTLAAQTDTSTSPMLSVHISRSSDSVLESMGYWTELVDRITQSSRWWDYTATRTRVLYGNMCRRRPNVKHQPKPGADGIRRVNTNQKRYAICSALAASDLPALVMSQQVIVLRKYLNFLLVVDG

SEQ ID NO: 997709 - protein, 265 aa, Homo sapiens
MPKALRGSHSGEREVTTRALKESRAAENCLMLSESVHLCLISTAGAPLGARSVIITPRETPRRDRTKSECESTEGAQYQQKRVRSLPSQLAKRDNSREEERHSEQRGGPRTHNPTHEGGKKQTPIHDPTRGEEHPQRKKAVHTPRRESRRTQKQKRRSTKQHPGSTDQQRENKHKQREGAPPMEQTRGEYHHPAGEANTPPQAANTRTYIAPPTTGGDIHSTPTNDRGYTPTAQTRPTHPHHRAEKLKTNTEQQQPHLIKDKRGA

SEQ ID NO: 997710 - protein, 119 aa, Homo sapiens
MARERRSVNLNELDDTAPLNTGPIHTIMMGPGNPLCLHGIQTTVAMKALGSEHGAAKQWLTKSAIPGTRPPLERRNDIKEDQRYGYTPRKRHGMEATRPVRGSPRETNGMAAHGEDYLK

SEQ ID NO: 997711 - protein, 165 aa, Homo sapiens
MWSSERAFEQIRTSGLQYCKTDQSCFVAPEALRHLRSSAGQSEGFLISEARCGLGKPDAQPIFRFQKLTHGHSAFGLSPTRLGISETLRTVHGQWNEEGKVPMASEQEQVKHNRKQEQTEKRGWYPTQNNTVLTHKGANMRHHPYIPTDRRTGTPMMEPDRDPTQ

SEQ ID NO: 997712 - protein, 396 aa, Homo sapiens
GVMSPEQFSDSHDMWSLVLPDLVKLQHACASVVDSVNDAFHYRHDPTPMPVIQPSPLPYPCDYHTALGMNITTLLPWTCSTTVPAGLPNWIDTTSNSAALGSGMCIACTLILLQPSQPTHAQIVLAVWLVRPLSGSGGLNMAERTKSHTHFLELETPYPGDTRQFITTWETQLPSIHHRAHYGLALDTTFQRGLRNYRQHHTFAPVHPVEQAEEPTGQFMTPPIKSFSQTPATQRLVGAGPAILTEITYVPFNAPRPHTEAKPRWMATPIYILHNHPEINLGAIPPALSGAQRPGDQHTTRVWGRVPHHTGAENTHWTDHAHAHDLLRGATSTTPRDQQRCPHKLTPPLAAQHPAQIHSVQSKRHVTCDTNYPHTRRHDNIAHHSTGTPTRAHITH

SEQ ID NO: 997713 - protein, 140 aa, Homo sapiens
SWVIRRGARVLSFLSRPRRPRLLCDYHVFVAPSLGFSFVRSGLALSPLISPRSRIRSLAPSLFVERPRCSRYTAVQVVLCEHSTIRPVWERAASISVHIDPLIGTKLNTVGLWTDLPRKLTSDIKHSKKPSYFSIIRYSV

SEQ ID NO: 997714 - protein, 234 aa, Homo sapiens
MTMRSVVPMVWTETIETWAFYSSYFTRWASCDCCPSNHDSALLIRLVYVRVNVGSQQRGSPGMYEYTIGERSMAIIDSTYVISYPIAYFAFGFLGDIAFSLGECRIAHVIQRKASYAHWLSARYRTYTLDRLATNVLLEWNEFELDGPIRLSRHDSRLATYTFVGARRAYIARGYKGVTRTICPSWTQIGKRCPDSYGQPYGNTKGGKWFDSPQDGLHVIPVDPLVRALVDAES

SEQ ID NO: 997715 - protein, 117 aa, Homo sapiens
MPTKNRIDARAPTLTRTRTGPLDETHSPPTTAFQEQAQPRKPPRDPQQIPGKSPTNENNNHDPQPAGPSSPGRNLNRPPKRNDPQYHKGTTENKTNNVRIATTTREPKDTSHPCCQY

SEQ ID NO: 997716 - protein, 195 aa, Homo sapiens
MTLYRGQCYGMAQLTTGGQPMEPPSGLKTLSDNWRRDHREAPGLKPFGHIHGLDGKGTPKQGIRGHHPNPSDDSWNTKRTPRTPQNALTQNYLGRAATTAPRTTPPGADTQDGPRPATLDRGSQNSNRRTSPSTHPQRPPAPPTNATAAKRKARAPLTSPPHCSHDNTTAGTSIAHEGHAPPTAPAHRPTRTQPR

SEQ ID NO: 997717 - protein, 144 aa, Homo sapiens
AGLQLCGWFGGASAERAGAGPGCNGQGWPSCAARGGRGGAERLACLGDAQGAGSRGPGRRLCGGGAVGSPGGPAGAPDAELAWAKATAAAGLGPTTLDSGLLAHGPMQTPAWGRKEGLAVAPSFPGKERESTERGTEGEAGRGD

SEQ ID NO: 997718 - protein, 77 aa, Homo sapiens
MVEHGPHAGLMCLVTPYIPFDNPRGTTWAFNYQQLVPYGTLLNDGLAMDELLPPSGTEGLHLPPLGKLSAKGHLWMP

SEQ ID NO: 997719 - protein, 152 aa, Homo sapiens
MQPKVKRGKNGSQSTGPGGKTLNRSTCIATCVLDLTLHPIGIIGAVGRKGLIERANPRMQLFVDTQKLFAKEEKETVANSNMWGTKTQDCDTIKVVRVRKEGNSAAERRTVDLASWRPVYGLDAWNIPEKGVHNPNNFVVDDSVESISEEKD

SEQ ID NO: 997720 - protein, 118 aa, Homo sapiens
MPHPPSCLCHSYSILHPGKEPLRLPASRHPEITIYRQTMISEAETHQPPRLTHLRTGFTVRHETPSGVRNDGHQRFRRVTRRAVVAASGLSFGVLTAVRGPCWFLRPREEPGRKHDKR

SEQ ID NO: 997721 - protein, 142 aa, Homo sapiens
MRSLYLAVVNAMPHRYRPGTVALRVDSSFIRQSIQMLLHSVKLPFQRLVTGDRAGFQIRPEVSGALASVRCRRLSRSVPGGSVRRYLTCVPSYAIAESTIYAQRHPVGSPDTGRESLSDRQSFMRAFVDKVLLTHTFGLQLP

SEQ ID NO: 997722 - protein, 399 aa, Homo sapiens
MESPRRKCKGAISTSLQSSPPGFKRFSHLSLLSSWDYRHLPSRSANFGIWSRDGVSPCWPGDLHSHSPHISQSAGITGISHKPPHPANMLHLNSGISFTAGLGGGEINTLQMHNLGDPCESIILIHNCGSKSLLSLSRVIPSILFRREVNSGVTVVCNTLNIFYTVLQGYAWDIKVAIQRRDWHYQLTEEGGFQGKLIDLKTHKSSVTDPAYRHKERPLPLNHSAGNFITADTYQVSIPYRIGGDIERHTVHTRVNIGRKNTQPFLKLSKQLLEREEHKQDNRYTQMNYTLENRKRDSTATRHQGVKNMERGPRTPVERHSDGTHATPRGAQRAQLARATKRCSAEKRGYESHARGANTNHEMTEKASRRIKTEHNEEQPNTTSDAGEVYTTPRTGKNT

SEQ ID NO: 997723 - protein, 260 aa, Homo sapiens
KKPKEPRVRMESAADGDSSAPVLVVGTYDSSNASDSEFSDFETSRDKSRQGPRRGKKVRKDARQLTWACKFLGSDLESEDDEELVEAFLRRRGECSPCSACLHRRRVDLPVPMFEDNLGPQSVQSGQVAGSMSARCPGGMLEAARVKGRDAEGECPGWARPGWLQREWRAQGYHRRPEGTSPGDRVGKRGRCKCAPGIPLGDGGPRSTWAPFGSRSEEQTEPTGQGADIEADQEGEVATYQKGEAIADQGKGLQVNQRAG

SEQ ID NO: 997724 - protein, 217 aa, Homo sapiens
MQFFTRVCGTEPARILRCFVNNIDDPCLHEYKTLSPRRNSPVSNLQGTVFLVTSPNTDCVNAAGANHWCWQLGAPTHTSATCGRAYSCPRILCGSYVPFVPRNAHQIRPPKLGRVRTKTVKNGGPGHHEKSLYRRLGKGSSTGNKRVCEEDRHISPEKSSGTRIAGYRTGILIKRHSRRGPVTEVSPLKLTERGERKGDDHYGPESTNYDPEILRET

SEQ ID NO: 997725 - protein, 52 aa, Homo sapiens
MPNTPYFGVPCVDAMGPNFGAWSLPLAPKHNNFEPGHSFPKVSPKGQRPFLS

SEQ ID NO: 997726 - protein, 184 aa, Homo sapiens
AEWVSGRLRNGGDARAAGATPDPSRTHLTPQQQHKEEMAADGWGSQWLSHHGRLGLVSLDSALLCPVHGTEQNGLIEIRCLQNDGPNPWIQIIYSDKFRDVYDYFRAVLQRDERSERAFKLTRDAIEFTLQPIIQSGQYPESSLEVTFTKDLHEELTYITAIIEEQPKNYPRIGIIGRVFSGNG

SEQ ID NO: 997727 - protein, 152 aa, Homo sapiens
MLAHLRSSNIVQLHWCYTYLSVHCNMQVTRGATGRLGMIRSGVVMRDYENGLVAGTIQDRCAYRIARSATQLDRRRCRGEYRIVQPERPVAFERFRAPLEQEYAMNALGRSTDLVFGLCVVTTRTVKAGECDATPVRSGPRVEALGRCTHWL

SEQ ID NO: 997728 - protein, 222 aa, Homo sapiens
  misc_feature (74)..(74): Xaa can be any naturally occurring amino acid
MKGGRWVIIVPRSSLTSARGSRDLATRGNQRCAQDDLSEFITPIQNTASSYEIGSVLSSDSLHDRRHIIEHEWXQVEDGLSRPVKAVVLRCRSRGGRAKYECCARSMGSLQGALCTSRGKHSKLSNLVGSARGTHVDMPVENSSWTKPSFSCKLLPGDKDFLGTQKEHLPRVCNPAKFHEQRCIAVELGIRLLLWHIGHFREEDGPFVWIEHPFGFPLGQPL

SEQ ID NO: 997729 - protein, 233 aa, Homo sapiens
AKLKVYFALSTMGPEGQTLARADEDKFYHLATETGSRSRSAFIAVIHASSRTIFRFLREMPVGLGWTCVLRQGDVLLWELSKVYACIQPYCVEWHLWFQVKSSPQVWCLSSEEHHKENVVGRPVRKELKPGKVDVVLNDGAPNSCGLAGSMMLSSQAPVLTLSGSTVWLVTFLARGGSFITKVNRSRDYQLCYGSFSSCSRVSRPPSPIALALESEEIYGVLQGFLALTRVDE

SEQ ID NO: 997730 - protein, 363 aa, Homo sapiens
MPQNFFATRGLGKKQSSPCLFFSRAGRPEAGGWNTFFRGSRLKLYLPKETVPLSPSVLAGFECAPEEPETSQAWCRKEEPFSEKATFLHQGTGAAAKWSECESVRKLGQGRKLYRLVAHSTGANLSDRCMGGDTRISKGSISTAERQLLYTSSRACSDQEGRKDRRKTKARGPYIKEASHVEQAGENAQSAWNAKNATQTQANLNKAPVILRTREEPPCDEPGEYTKESTENVVENPATPKIMEETRGRGQNLAPLEDLAQIDHPLLRGAPEDGPPDRREEYHELAPTNVAITSGPNAVPRGPRSVGRKRVGRITPRGRKKHSSHSKHMWKHTGDNKQRHPCQHHTRRVGNPINNRCYRTHLG

SEQ ID NO: 997731 - protein, 102 aa, Homo sapiens
  misc_feature (49)..(49): Xaa can be any naturally occurring amino acid
MLTLQRDVWKVKHWSSVPHEYHICFANAIEHIGRRHHARAVVNGKASNXKLIAKLVPKRHQPLSQEIHCGIALREGIELVVRMCTLRQSQLGPVMSSNTGVP

SEQ ID NO: 997732 - protein, 134 aa, Homo sapiens
SPGASPVFLGAPPGKKAPVPHKKGVWRALCGGETGGNRAQLTAAGTRGGKGNLTWERGELVCKHARRAGGQLVRGAGKIFSLHLFIVTLVEEWRVGFRGRGARGTTPVFSRHTTWGVNNTTVGGSRGLPVYSPA

SEQ ID NO: 997733 - protein, 137 aa, Homo sapiens
GLFGKTQEKPPKELVNEVVIEDKKRKMNTLLTRQHNGTTPTENERNNVTTDSVKDCCQERARQDVCIGSGQGDCSGQRKAVTQRCMHPKHTCNSVLMGMKNQLADLASGWFPDKKSNKEVMKAMQSLVKDSRDSGTP

SEQ ID NO: 997734 - protein, 302 aa, Homo sapiens
  misc_feature (102)..(102): Xaa can be any naturally occurring amino acid
MDLSHLLGTLVVMKREAESDETNEPKVCERVDANASNRLLGTKSSELGMMARERHSFKHWCGRRWRHGSPIFESGWSWTFPLSDTMSLSSRGGRCMDCREEXLDFNPEAGSSAGSLFGLQRVGTWGGKRKAPEGSITTKGNGPKTPFTSTEWALTDPFGAQCSSGVQVPVMRGAPIKISTGPKGPTERSPLKVAVLCTTTGGFTQKCVHVSWNVLTGKRFRSNGIAPFTSRSDPNPGLRRSSAPWNVYHQQKRGKSIPLYTPLQKTGVTNDARWEPPVKKSPVENSTGNTTRLPFQGGPKSP

SEQ ID NO: 997735 - protein, 151 aa, Homo sapiens
MGGLLDTWAGGSGFPGHLRQTRVSGTVQIQIHRVSRELPPGHVKEGQQARNGSRDIYKQIGAAEPGIPKSHLTLPYGIPIQEESQATPWGNPREVNNRRSEWAVDRLGDEGRQRWGTCQYSQTLASAPEAQGVPSTVPRETQRADEKGKVA

SEQ ID NO: 997736 - protein, 225 aa, Homo sapiens
AGTAVALPARGGCCCCALVLGLNAGAVMDVATEEGKEVWDYVSGSAKDAYSVLGGSIDASNSLQELLRTAPGRVASGRSRRFYALDIGNFEEELGPLTRDLKTRKTSWLQAVSSYIVDNPVGTGLQLCEWYVRAFMGTAACAIARAFVTMIAFSRAQTVAVQLAHTRVPITTFRLLHLTRPVLSCRDQHEYARASGSSSVFIDGQSSRRRPIQGSNYYAGVWYAL

SEQ ID NO: 997737 - protein, 300 aa, Homo sapiens
MIAVYGGLAVDFVSVPVATLVGSPQRPTSSCSAFSLQAPQCCAQCALLRKGPFYSAVPQKEFARNSVRAHGTCGTEARVGDYEGQPVHPLTCVCVNAPTARTGEARGCVSTKSLPVLLLSVRPLFGDALPLCEQRSKSSPSVLVRAHLRQTRSGLSLVSEDTKPLNSALHSAELIQHHFIQRREDNDQEVDTNGNLLATRMRRRSFSIDGRPARNCLELTNSATRPQYIPQAVESWRSDKRRAPRQPPTESKTSDWQQPGSYVATAHNWGGSDTKTQLKKQRDPARIFIHSLNNQHVCAA

SEQ ID NO: 997738 - protein, 130 aa, Homo sapiens
MKHEPEAESEKPMHTKRKAKGRLPILPTAHYKGPLSFPREIFPVGGVKHPSVYTERRIHRLDYSQGRVRQHLASLLGMRNREVLMGDRPKTDRKPQFRSHKVSVSSDLLGLFGPQPEGQSALVKREVFAT

SEQ ID NO: 997739 - protein, 164 aa, Homo sapiens
MRRHHKNDRCMTTGALIREPHRSSSHIQQRDQQVHEPHTQGRTGLTGESTDGSQRPSRVHTGLYHYKKEPETRARTGGGWPHITPVPLTEAGRKSPRGGAKDTICAPGPSIHQQGDANAPPPGNNEGETNGRGDAHKRRPPRVSPRVEEQGHPKRKNIGKPTSC

SEQ ID NO: 997740 - protein, 313 aa, Homo sapiens
SGEKKFFWNPPNGKIFPGLNPFFLLEIGFFYGGPQVVVFSSPPLVFRGSRPVAHYLGGGVPYRTLSVPSFLRRHPARLRSSPRQEDLFAWVVHTTPLFWCPPHTNQLLPVMNNDSWVAPLSTLLGVRPTRPPQEVMSDVLSCVIQISAAHHAPWGEGAICVLYGSHDVRPAPRRKGCNPLCAHLFFITPFFSVCELPQCGGQEYEVTSFSGARGEWCPQERRRLPRNHDNVSVRPPYVTGGPPCVRDDGPCEGRSSLWRGGSPFFVSVVLPPQLCGGTPPFLLVRLLWPLCGSPHPVVVDLFSTIVVILPLCS

SEQ ID NO: 997741 - protein, 249 aa, Homo sapiens
EGVPYQRTGLEQKRGLWLKELSGLPSGPSAGSGPPPPCQQGPHPSAQAHTSVRCIKNDDHDYPASVTWCAAEYNHGERSINTMHHAEDVICSERMKETCSRRRIHMDELERGSREVVYHKTTAKVGLHDKRTQYILGERVKKALTKSKARTHPIRAPQRSRRIHDEQITEQQEGQDTDEDVDVTPVSGNHALWADREETQHAQTDVARKSNSTGAEQTQRIRHRAATNNMRLDRPPSTTPALGTTAKHD

SEQ ID NO: 997742 - protein, 312 aa, Homo sapiens
TNRLYYGQCVLADIDEDTEVTLSDSDSVCLRIEERCLLSMTVVPTFWMEARWAPFTKVRLQSWNGDVTREETEVPERADLPSSLPMFNTQRVTRDETTRQRERCPRAHGEARPRLERDSDSPVPAMNSQVREQRRKRKNPRALMHIDMMVRELGFEMKAQPSNRMTDGRQNWAQGKSSEHLRKDCSACRGRHATKCLGTSDAGIDTCYGNRPHHMYKPRLCSYTVTAPSREMKLQLIPQKHLDPPPTHSTLQTGTAQWIKQRTKPATNERHDTTMHKRANAPTYTHPRQPSQHRTTPASSLNPAPLHPTPQP

SEQ ID NO: 997743 - protein, 316 aa, Homo sapiens
VVAVRNDSGRHPASPAYRTGRFCPRTHSNQSRKTWWITMTVLGVQRHASPEAYYITGIIGQLGTAMLASHDREYPVEKKNEADEETFPARYAVGSTIEVLLVMLMKRDFYAPESGKEGIKMVEGGRWSCPYLTSPFENLCLRRFPVNPHDCIVCPRGIALGWAYEARPIASCVGRIRLWIRPPCCRGTCLLSELSRGGYPRGGDARKRPNVGPGVPVYWLMQSPSERFVPGSSLAHMSRFASFLSLGLPAIFTFPILRSILVRSTSDCAPSSVSNFTSFAHALRIVRGRASSTWHTPGLNGFQKFPELIRKALPER

SEQ ID NO: 997744 - protein, 272 aa, Homo sapiens
GVTFPRAGTWARALPRSRPAVTWRPILVGPWCRGPVGLGLTVPGVRVPCVARPVGGAWWAVPRLAPPLSAGAQSPFGLGELIVGSIDRLMCPDPIHLSHGTLQEDRPERDDAQGWLLLLVSLPPLEAMSSPGSTGNSSSFKAFPNCPCLRDDTLSKRPVPASGKAGEILSIQRARDFGAIEVMGTQDPGNMGNRSPGLGADKLVPKEDPQVYLPLKRLGGPMDCCRLQTCKSSRKTSRAPKGDGLACNPGGLLGSLSGILLRVTLWGTKVPS

SEQ ID NO: 997745 - protein, 283 aa, Homo sapiens
HTQQEYSGDEKPVDVVAPTFRTSCDYSKTIASGYLKDRGVLTSHLISVIDRLALAELVSRKASPSYSSYIVIVSLTPEIENGIVLVPFLMNCIHVCASFIALVLLIRSGELARFILVTTGSTKLDLAQHVTARYCVPNRTRVTVDSTFKRRNVEQVSDAALKGGTIANIRIVRKGGSLEKVTHYLPTVHPLAFSRPPPVIAQHNTVGKTPYQERIVEEGVVDTQGNPPSPKGSVLKFSATGKGPHCVLELAPSAKEPGGKPRIAPDDREVTQIVPRVPWNWVA

SEQ ID NO: 997746 - protein, 128 aa, Homo sapiens
KRCFFYNETNPKNCTVRLNLCSFTSLEETDRTTAFQDSSELNPKRGLDFAARGITLWMALGPGPPGWAQAQKATGFLFHLVPQAVPWQVRGAPHFLSELSPFFPFRILRKSPEALLSKGVPSLRAATK

SEQ ID NO: 997747 - protein, 236 aa, Homo sapiens
LRAAVLAYVAPCFPERRRRHHDGSRARVQALSSAGNLNHAPLVGESDHPDDSRQSDRSRGHSTKGGQSELQAWNRINSVLLIEATLDASTVPPMTVLVASGVRTPMCFPDLRVRGLLSGQDSFSSSGTIVQINSCQEVVLGRTYYVSQVELPTNTNVPRTRWVGPSGWHVILLCASAKKAPWHVNHVWDGTFEGIATDGPITKIGGKTPNSCHRGNSGEFSMCVYVDTKVRKRTLT

SEQ ID NO: 997748 - protein, 200 aa, Homo sapiens
MRPTTGSRENCDTRGTTQTTSGADTATETAGPNTTLGGTLNNIIRTQRGALTTPRRTTKPITSRREATHRRHQGKSSANGHQPPVGLSPTQNTIPVGGAAHQHSDASDRKGKQNTPKPPSDQQHHSGRTKPRSEGDTKTTHTVHAGHTATDGQTSNDNKDEDRAEERNRTRNTARPQTGNLSRKPASSIRAINARQIGRH

SEQ ID NO: 997749 - protein, 122 aa, Homo sapiens
AATLYMAMLGIGFLSLTSVPSEFDALGSSPPKGSGNIKQRYRLPESFSALQTSSTGFMCSNTSRTENRVWWQILLFLHYLALNGEENRNGAGPRCGVGMPIFTWGTRNTVMEQEGHRAGLTM

SEQ ID NO: 997750 - protein, 198 aa, Homo sapiens
MPEIAQAVDEMAGSSQLISRLNLPIDLTEEVMYLWLQKQASGNNWCFSSIPVIRASVYENSAKQRTRKANNRQQHTQFNNWCFQCCNKWQMNPYATAGICILATLGSSMVFSGPKPADSHKAMAHGCNAANVHGIPMHTGHTPLLMQDQSLNQVHHTAINWTEDIRGCESEPTEQRTIYTGTTYEITHDQRLPGHERT

SEQ ID NO: 997751 - protein, 280 aa, Homo sapiens
MSEARRDSTSSLQRKKPPWLKLDIYPSAVPLTAEEPSFLQPLRRQAFLRSVSMPARDKPHLFSTHMRLRTAGAATPDVITQTHPQGDRRLVRSEARTVTSTTEMAGKSIRHLQPAHTGKLKPQDSRELDLPRQDKRVSDRTESKPHSYVGPCQAGHAEDHRTTLDRVDCAIPMWQNDTCGRTECPKRAPSKDQGRCIPSLDTYIKTHRYRVSTPGSRAERQPKRRRFGEGPRELEAFPGAGYRPDSQRLNKGPIQVIGDIGTRYTTEEKGRYEQLKLPSI

SEQ ID NO: 997752 - protein, 194 aa, Homo sapiens
MPAGPELGLSQNLMLSPDGSTLTSKSRLDQELKADRRGMRLREQTLMVWRVKLQPGQDPHMAGRELLTLDEKDHGVLSKAHALVRRLVRIGGAVDAGTDEAWIHVLGLKQQRIAGERRLAEAMVFKAGLGQSPSTTAPRADPARDHIRVRKQVVNIPVLCIVPDWHTPRRHIDLSYSWQLITYTGRWPDPRPGG

SEQ ID NO: 997753 - protein, 154 aa, Homo sapiens
EEEGEEAELDGDLLEEEELEEAEEEDRSSLLLLSPPADTCLSDPCMIPVRVPGVCAAASLHGSDALGGWRLGWRLGGVLYVEGTMPSGMMAAMLSHALRTRTVVEAADVTPESGGAVQDLNPGERASNTHTSDVPVHTSFRDNVSTRSYGRQGL

SEQ ID NO: 997754 - protein, 126 aa, Homo sapiens
MWPHTYLGNNPKTYPPNTHPKGVASPPAAEPLTLCRPRQHPKQRRQNTPQVAQKPPKKNPPILGEKQTSHRTRVTRRDPPTQQPGQEEDIRQTENPGRDPEPDKQTHHPQSSRNQLCAPHTPPPAT

SEQ ID NO: 997755 - protein, 226 aa, Homo sapiens
WRRLAYMVLFERIRRMYPGPMGPSRLMGAALLVDCCLVLRSSSTATLVPGYVCENEPHIQLALHYVRGYLGRLWSSSPQRILKSYDGTRRVVKGDNDRIESIGQSGASRDAVHCGYQEHYQESRAPIHEETPDTYSSSLGGPSIRTDQRDNQTNNNTSDCEDKGLLERRTYADAPGTTLHIDNKSTRLETNRKRRGQERRNDHIQVQDIKRHEAKKRLLTGWTTES

SEQ ID NO: 997756 - protein, 206 aa, Homo sapiens
PAVPPHFCYLSQCSGRLNPNLYYCVDRCVSLLGTLRFGTRADHETVHNAQSSHFSTRAHLQSHPSRSMVTMNHTTIGSPELPHTVDLRALPPERASCNKQIRLIYNNAQLGRIRSRAASQLQMTLKHGCRAENPPTEAPTQTTRSQNCRDKRNLLRQPSPCALRRLLELTPTHNSQRFACTLSNNPQCTTCLAETTDPRANLPQTR

SEQ ID NO: 997757 - protein, 314 aa, Homo sapiens
WLPVNERDPLLRLQGHGAWRRQAALQGKNNLYICTFFWGPQVVGVHHTSLLRQLTATRVKASYSHLRQIICVARGYSWASWRDKKASILPPRQAQHQVPGLDSYLACCSLNTVAAILQLFARQYYQNACLVHGWDITPPLDPLKHLRGLSHYFLHSGAPLELSDTSTGAAWLLSPVERESFHHKNIVLVFVQLRQRPRAHQSRAPWVCALAIGRYSVCSIYRRLVFRPHLPGSPFRAAFPPGDPGLSCARCDPGTSSEQAARIFVNPREGTPKKQSGSRNLCGKTGSLRWNFRTKRFPVDRMITNKSCCPLQVI

SEQ ID NO: 997758 - protein, 298 aa, Homo sapiens
MEAAAQISSSIARTWSTDPEAIEAQYECRTTRVYREGGVLKVHPMSTRFTFRSGRQVPRSRGHACSAWGWEQRLHTHRRGAGQSTAFVLSTTAVSGRKEAKYRVSMDSGGAAVSLGLDAEGQVGVRTLQRLVLAMVAPNALVFDGWDISSLNLAEAMRRAKVLDWGLQEQLWPHIGGPAAPGLHGVHPRIHRGQPERSAGGQTSSRAPSCRTQPGSKNPAVNIPRTSGVHKPQGAWTHKSHTVAGRHGRKQPGKRTYMAAKSEIPRGTTTGTLGRKKHLACQTTQWKTTDTGQVCKAL

SEQ ID NO: 997759 - protein, 214 aa, Homo sapiens
MSRSLWRKVGSLVRPLWSGWPYAWRSWVGSVFGASCEGAGGRGRLHPTRCFHSGAPPGVREGPHHGLARRIVVLLFMFVGHLTRRVVQLFWCRVVPLQQCAGYRGCLNAPRSRIWCILRQLGLPLRRVRATMRVFVAIWAALHPVITLPRFGQRAVITRGEGDTNLSQQVRQQLFKPMRLDRLITGPQLHGRHRGHMPSLQPLLCRSYLSDHRH

SEQ ID NO: 997760 - protein, 169 aa, Homo sapiens
PGACDVVRSERGTASRWCECLAVDWARNEPGEIPSHEAPVPAHCEVPPFPPTEVAAAALSLEQRPWRRCPGGEAAHCVHRMYPPERRLERLHESLPWVGTGYSAAFVLDCKEAQYFAGHAVAEPVCYGESVLSLEPTKDDVPRTPFPSQIASQQMELSVCINQQCIPDA

SEQ ID NO: 997761 - protein, 286 aa, Homo sapiens
LEVKVWPGSLPQVSSNDRCRECTHAAGHSAAGSQSILVPVSSGSCQEQVLSLYVWSNGEIAGVSPLQPCREDNRELPESMPGSLSWQRIIKPGSYQARNRGALLAPCRVATPWVALNMVLMRALVFNGQRQGISPSCSMVQSQKRAAFLLNGSGGSRNALGPVSRRTPRAVGVGPHGDPRRRPCDGALSWALGASSPRATGDLRCGTPIRFLAIFDVFNDNQHGPSHNLTLGLATPTTLVPPLMRRHVATQGELETNAYTFRPRTCALSYHLLAPALSKCPSNFCP

SEQ ID NO: 997762 - protein, 162 aa, Homo sapiens
  misc_feature (98)..(98): Xaa can be any naturally occurring amino acid
GNRYSHNQESRTIRDVTRIERFVCPLPNSGTGAVTMPCDASAVLREAWLGPLGGLRRAGLACVAGDLIRGQGDCFAGRAVLIAGQVLGCEGQDWSSAXGVMAARLLERAVLSPVHRVQSPVACENLVPWQDVANERRRLYAQALLGRYPFVSFDMQGVQDRT

SEQ ID NO: 997763 - protein, 94 aa, Homo sapiens
ALMELMDKETKLVRLPHPCSKSPAPCKPQPYSGTQSPLNVRRWCRCCGGQWSGDRGDGVWRQAEGHWEGSMDRRPSSGVGYQEACGMSSDGLCS

SEQ ID NO: 997764 - protein, 113 aa, Homo sapiens
GPGCGGRRSAGSLRVSQAPRSAEFPHAAEPGRIGTEISRKIRYWRCKGKLQELGAYVDEELSDYIMVMVAQEGKVRSKGQRILCLISREQHNSDSAVMDYQWCIQIELALCYN

SEQ ID NO: 997765 - protein, 227 aa, Homo sapiens
KRHLLGEPPLVSSRVCADAALNVMAVGQFTAACGSPYIVSPVKETRAIEDRVFTVSYREGNATLVGLGSKSILVRVKEDTSYREIYMDYHVLWALQGRNIGSSLQHVADFDKTRTVVNWIKIGHECVKKKKKRNSGVHEKNKNPTVERQATPCSRLDDKHSIENSYCQHLYEKKTLNMAVGTTHTQRGDYIGKRTSPKEINTKRQKLTGHSKERQLVMLIMVVATLI

SEQ ID NO: 997766 - protein, 486 aa, Homo sapiens
TNGSKKTLITFNDGPLCFLAKCLGTRCFRGGTLLGPFWSFGEQALDFLGLGDFLGQKPSGVWDAFKLRGGRSYYGLRTYSSMQQHASSEQSKREASRERIPFRSRGVPLLGKKALLRRSVPFVKAFINSQYRRINTCTLNNFYGPYEEIYKEADSKHSGCTLMGTITPIISRDIYKLLCVGAPNSCGVTVAPNVVANEEVLTVDHHLAPKRHSSEQQLTISGQRAPLEAPETNTLCQRDVQTPRRGHRRDPVAPRWGNKGTKRDSGVSPPLHTLMKTEQRGPHTQQPQEKPPPEDDQGTTKKSHYTKQEVGAATHKVLIPAGAYVEGGPTQRETGNPYDGGHHTPRGRNNLHCTHNGEKGRPDETTNPLMGDGGPPKRQVVVPQQNAGVEDYPNRNTQRIRTPVERGDKLVTTKMVTGGSPRRRCYPRQKHEQGKRQRVGHTTADTPLRTKKRQTPNIMVGGCHPQRRWSIITEDVETNETTSITN

SEQ ID NO: 997767 - protein, 234 aa, Homo sapiens
DVKFFYFKNENGFIKGKKKSFLPGSLYASSTSNTSRKSRPVAGGDVCGKPGSGRRGTGAPARTVATGGHEGDTKWGEKAQSLRPGPASSGAQLSAQGPVSLKMVYWFTEILVTSSAWEGDTLYTPKGLYGSVKAYPNLECLSGDAWNYRTRAIREPKVLDEVTMVTLLDQPEQWQQETGSSAFSAYQKRDQTGHLASSQLTVSLNLGPPGKTVDKGGLMGKHTGGTDKDGSWEH

SEQ ID NO: 997768 - protein, 100 aa, Homo sapiens
MTTKEGVVYEDTLFGTPWERGMALGTLRVEPQGASEFPLIADNAWQEPIEFWATTPGGKDRLRANGLHSTGRHVENDILLIPLSLEGSDRKQTEHFIRGK

SEQ ID NO: 997769 - protein, 133 aa, Homo sapiens
MAIRGSRDVGTPNEAIGFPLVVRNVVGNIERPGHWPGDFLWLTVVSSPVTLPKYARFCEPHQRVGPNLGGARFRCVIARCGTAFVWPIEREETLCLTNGEVERHERLHTRNVESWAVKQDAFPKLALVCDTLR

SEQ ID NO: 997770 - protein, 207 aa, Homo sapiens
AAGSRVLPAMNAEGSRVDGVDPLRPHQPEGSQYLDGRERPGSEGETRPRKHALKNEITICDGWEQAPCTAGGAELSVRVPRLEHTMRYSLHMCRSAQRSTGEPMNAWRTPSGGVAPRVAANVSGYIHRVDGRHRTDRDQHWIRIGRIPSRGASAGLPSGIVSVAHRKGSAALGCSLVRSAPIRGATTAQSRRKGIGNTFRLATGCDS

SEQ ID NO: 997771 - protein, 131 aa, Homo sapiens
MKRAGMEAIAAQGITSGWHSIRQSQIFCAFPFPLLVYHFFATTHLDHCMHSTSVQGTSETWSNKGNSFQQAMSHPFVKLAPRGFGTKRPEGKHQGSARKRGLSQSLQGLRRAPFPFFVRVLHNRWGSSRPP

SEQ ID NO: 997772 - protein, 106 aa, Homo sapiens
  misc_feature (7)..(7): Xaa can be any naturally occurring amino acid
MALKELXAPGPSWRSINYQYPRGEPKGSKRRPSGIPQGRERAPEYSPRWGTCPNMEMYTINNTRGDNHPIWVRPQKEKVHTYPRKVGTQIKYDLERAGSNPHETPK

SEQ ID NO: 997773 - protein, 83 aa, Homo sapiens
MRCQGSTNEDRRPSRARRRTKEKVLYAKLRRTHRKLRAERELAEKYRDRAKERRDGVRHNVIMNDTPSLSVTQTNLYGAVGPT

SEQ ID NO: 997774 - protein, 374 aa, Homo sapiens
LKQALLGSARPSAIREEETRRRSHHHAWGILTGKASDAVVTIPIRAMLFDRTDSRDPFRGADRHAEKQGKERTSGGKRRLCGPWGPCMRTCQAVGAGPNFLDCALGLETFSSQGTSQDTERKIPGDRPAVWCWFDRRIEETASAAPWRLSNRKRIKTDVWNRMTRGLIQILQWLTFGRPLPLDYERIRSKGERSPPVVDQIAISRGSHTCACTKGLYTAGCNTVRAGYRNYVPRHIHLEHGPHKILAQTLSARVASVSLNGSRHRGEGPVGKPACCKKGDPDSEQAIVFFPHFIPCRTRKRMNTWRNKCTSRCNTLGIEDTLPTFENQRYRYHYQVWGMETRRRRFLAISTYELRQRLGTLNLPVTLPVGTFGV

SEQ ID NO: 997775 - protein, 99 aa, Homo sapiens
VCRQNTGVVKTIPLNSPKLVKDTDLTIQAYVVIGHDRCRRQGPPSTGRNRDSIRVARVHSTIERNPIARRVSQERRAVVTDGATAAPFKYGRGLYETKS

SEQ ID NO: 997776 - protein, 459 aa, Homo sapiens
GALARKLEDNPKSLKSGDAASWRLCLGKPMCVDELLPVPASRAASACARHEADWWPVVRHQELWNDRRAGCAPARSPMSAQKCAELLGNVKRWAPCVADLPVGGRPWASETPGGAGNGEQGGRGEKEREEERGKRRERGKEREKEKSGERRKKKEKEEETKEEQDEEERQNRKKQSASWEEERRESNKQKEKTWEREGGRGEEQQKELSKTNSSKRGRRERDNERKQRREAGREGRGGGGRRGRTEKTEEDKRERKKRRREETREEKATHGKRKEGTREERRRERERGKTGAEGGRGDERRKTKGREGTTGRRRRQQKKKKRGARNTRKTKEREGESRGAEGGTKQRQERAKDKKEGRKDKRGQGKKRKGGQEEKRGTKRGERGEEKRRGGQEQAERERERERKRARTGERRTRGRGTREERERRKGRKKRGGRGEKRRGEKERERKGGRGSGRRRRGE

SEQ ID NO: 997777 - protein, 148 aa, Homo sapiens
MSEGLAALGARGEPSFNDSYIGTQLFARVTVIMAPWSGLHLAVGNPYRFRRSQGADSLCVPNMGHADYRWLNVAKVLPIRLLTQTFGRTTVHTALCDSEVYRIGPSVLTGQHGAHPLGLQQAGQSVAVSHVANSALARERTMMTRGEH

SEQ ID NO: 997778 - protein, 107 aa, Homo sapiens
GPVRCRRHAGEGAGRADSGRWSPARALRRCRGCPLEWAEWEINENRRSSRIPQLPSTAALCVAGAWDCGLQVVSAWHCVTGAGQARHGELVLHYKSHCGPAGLCGEH

SEQ ID NO: 997779 - protein, 345 aa, Homo sapiens
AILSPMMGANRGAWHWKVYYQDKLSEPAGELRFEIGEGDEPVICRYGLGERPLRAHVHDQDEQFHRDTSSPRLCLWAVSGTRKVRKDSRTKDVLDGWNSMTLHRIKEFCDQSGAEREGPMGAELDTFDVTSREGVRKHVDTAMMLATQDDRGCDLGVTYRQVHRVQVQKSQACIHHESNKVTDSDESSENGKLLEILSLFLQHKWDVTKATQVNTPSTVSPVCGKLGGLSFNIVDTDMGAKVGWSTSLGKNALTKGALSIPWPGATLGKTAVAYHTDICCPNKYNPGKTNGGCNIPVMQERGAPIQYPWRQGCELKEAPRMSLKNRVPNVEPFLENPLATRGTRC

SEQ ID NO: 997780 - protein, 110 aa, Homo sapiens
MRVGFTTCNCVESRRMRLMVARLIFKSVRIVHTMYKAPTACICMFIKIAESSRLPRARVFVSSVAKILPSPCYRTHGAQDDKLDGPTVSAIDGPSPLGSTDIHRQTYRLV

SEQ ID NO: 997781 - protein, 227 aa, Homo sapiens
MSCPRNIGLNTDRCNFPGRLKTKANFHPSYTTRGYTTGQCSEICGAKPQFHAPSVPRIEFPPKQIFEIRARIYPIAPPSNPLKRPRNIRHHIKAGLESSPSKALRGPLETQSPGEPSLYHIVSINGNPAPSICRCLKEIGGPPAGENPRRRSHTRGTWGKGPGKSYLATEDARCTTQPPSSQTGHNAMVDCTHTQMFTNIDSMYTRGNNPSHTRPTVATIAELSHNP

SEQ ID NO: 997782 - protein, 221 aa, Homo sapiens
  misc_feature (18)..(18): Xaa can be any naturally occurring amino acid
MLPEHNNQCQEDGGTTRXSKGRLPESTLNCDDAIVDPGCPLLRHRPTQWRQAQHHDDQYETPRDIEQEHRVHTDRYRSPRICITQLHSMNRRYNNTNPQRQAKQTNKNEERSQQQRRATLNGMRNWVEISTRKDYVQLWKRPPENNNHIYRHYTIKRKQKQSYQARAKMIPGPPLNTRESRRQNTESSTRRPTPSQCAVAPPCSYSNQPVKSESIDTNNTR

SEQ ID NO: 997783 - protein, 374 aa, Homo sapiens
  misc_feature (96)..(96): Xaa can be any naturally occurring amino acid
  misc_feature (152)..(153): Xaa can be any naturally occurring amino acid
DERIKSRVCLHASEYEIPDIALSSFTQATDDSGICLCSAHQVATGQSSMQVDVDAVIVCLRCLRVRCVPYHTEYMRCTFPAFETPCYEERPWDEEXTLRKSALTSAYHVKRASRSWHAYRRRMVCQKNCTNSAVHISQSSRGKQDAGLVRFXXPWRRGRCRARPCGEGGTYRPVRWGVRGQEVTGNPTCWAPYVHGVPRTGPTKDPEDAHSNFSEDSDPNGDRLEAAIHSMLCVHEMTCMVNNISALHVAVSLSPRIVDTKLYLSAPYCLLLIKPRYRCPWNRCENCISGNKETGNWPRMGKPHGCLYCAKENPRNGVATVACPYARGTVVPIVVVRNQHEDFISGQQKKLAEGMEEANDNEITAGRSVYLGQG

SEQ ID NO: 997784 - protein, 283 aa, Homo sapiens
  misc_feature (228)..(228): Xaa can be any naturally occurring amino acid
GNFKIPQKRFIIQVSLESRGAYRQDFWVASAGTRASKLLGLAATRVSYQQGPVIRDEDVFDLLLGSLIHIFLGNEATGAWESGLTDSINRGPRDHHPFTRTRLFTPANRLLAEKQNVASSSLYWYAWRGLNHLRGPPVHLDETLAAFGSGATVCRWSSGVRRPAQTAGGPCDGLVSERGLAGAPEGDWGAPGSCLLGCEESPLPPLPVLHEEDARRSVSRVLSGRFLXSRKARVRGKHPVNLAKDAHLDHDECVTFTVVEKRPPVTKGLHGEEGPKPTVIRSY

SEQ ID NO: 997785 - protein, 73 aa, Homo sapiens
LDLNRRRSNSEDAGLIRSNQPERRGIYNIQTTDQQSKSTCERRCDGSDVLTADMCGFTVGRRDHRPLTFQIGN

SEQ ID NO: 997786 - protein, 100 aa, Homo sapiens
MSLRSLAVEALPTLRACVPVLVAPAWRRHAAHASHPPSPHLGRHAAIIPRTPVEGFLSRALRSPAVSLVDRAQSCALAPCCCGSLTYTAGAYRPFSVVFP

SEQ ID NO: 997787 - protein, 237 aa, Homo sapiens
  misc_feature (118)..(118): Xaa can be any naturally occurring amino acid
MLGSELPELGEGRVRPRAHSRRPVTRAQDWRGGPGPLRQALCQGWLSHFTHTSHQKLQGPSSNNFQPGANVHFSVQNLILEKRDTRGNTRESRVEGFCELLSREDKEEQARETELSQXTPKEKTQRSVMRNNREEKQTETVRVRRDPGCHNPRVLGTRSSQGLSGENRPVWSEAWEWSTKNRVIHTATDQRRSSVVAPPWLTEDQLGAILLAQRVCHEEGSREDVAPGEGGAPIAVV

SEQ ID NO: 997788 - protein, 46 aa, Homo sapiens
MRDQVDIIVFYSTHDILCTMVDTCGGPPQMKGPIKFCNPPEIPGYK

SEQ ID NO: 997789 - protein, 186 aa, Homo sapiens
REKVLYSGICVTRLAGVLDWEGDSKEQDQEGPQGQPMPPGTRPYDRRGCGRIDVLDGSRKCVVPVGPRVSGSVCIFLSLSSGIVQDQSLTACVRVALRVAVSARWVLRLLCQSWPESLGWSVWVHCANVSLYCGELLSYVPGVHLGYDVLFTHTRPSITMCGSNNVVTPQSIDSVAGDPHRQQGSP

SEQ ID NO: 997790 - protein, 66 aa, Homo sapiens
VRLLDEAAVSAAILRASAMPPKDDKKKKDAGKFGQEKTKTQVNKSPGAGPKRRSVAPRGKVRDKPQ

SEQ ID NO: 997791 - protein, 250 aa, Homo sapiens
PGGGFPGVGFGFFQIRKNLLGPLGVPPPPGPFSPNPLAFLLPNEQIPYFEGNHYLFKNDIRVVEASHTYPRDRNYKSTCLHIVLVGGWELPFDFVDPRCPLHTTLVNAGHFISRGRSPNIKTPFSMCGASSPASPSPLFVPILPHISAPRCRYEGIWSGSCFPHKGGEEPPGVKRWGRPGGAPVVAPRGMARHRGGDLRREGSIGERSAPRGAGGLPAAPANTWAAGHQRSTEATPQEKRRAPERLRGGR

SEQ ID NO: 997792 - protein, 251 aa, Homo sapiens
  misc_feature (180)..(180): Xaa can be any naturally occurring amino acid
GTLNLFYWAWLLPKGSPGFWLGLMASRTWCVIVSQTPFCHPLSGGWWVFGIVFRMEVAAGPRLHQGLKVLAILSSRAAVGGRSQPSSFDLDCSAGPHYSGAWRVYLLPGSVPARDSGVQQDSRGAASILLGRRGPPPSLRRVPPSVAFRFSSVELQVDLQGPGLYVYSSVSVVYRSLQPXETVWCPRGCSPQSVETSTGLAPLGSSRASSSYGGPGLSAMICGKVLRLGGHLPPRVTQELANLGLKAFNFL

SEQ ID NO: 997793 - protein, 131 aa, Homo sapiens
MGSQRRQQLCAGERQGPVRNPSYTRFVCNAVSCLEPTRKRDVKDQIDESIRDRYNLCMMSHGRHQEIQLARSCHTLRGHGGWPAPWETRRPIVVLSCPVVFDETAVPFPWDVHDSCRSEKPGDRLDLQRSY

SEQ ID NO: 997794 - protein, 128 aa, Homo sapiens
GERELVSSFVFFFILTNEKSVIGGGLLRQQRWSPEKNAALAVREGFRWKLQAATLDTSSEVVAVGCSRYQRRGEAEDTWVKLPHLLPMPIPLDFAFSISQEISGKLDYNNMAFIGVTQIDRDYQKQPS

SEQ ID NO: 997795 - protein, 285 aa, Homo sapiens
MERAGLSGHELPVRLAMKSHGIMKQMELDYGWRVRRLDERDTSKLGDRLWSDFFPSPPWSRRPGSAPSEALTRVQLLGFEYLETLRQTRGFPLVRRSHTNVRMNTHRFGTKSEVVQPKPYYSLQDAACSPMGHGPSSGPADNPQASIPGNAREPAFNGASTGNSEDRSLRYLSVERSVGPSPEWSGRWASLSPFRARDCACPPGEVTRRTNSARIRDTSQSGITKPQYVLCPEHCPLGIRPRSDITYHRCEGTQCVKRRERKTYYALQYISKASLSCACEDPEPT

SEQ ID NO: 997796 - protein, 118 aa, Homo sapiens
VLRRESSGFPASTVLGAEPGVSFLHPGRASIVRPSVTSSAAALGLPPRPRAGQHPGAARGNAPTSAPHHLVASMTTSRPTIGGAARTTIEDSEAADQPPDTTWSSNASYVYLSMSYYL

SEQ ID NO: 997797 - protein, 139 aa, Homo sapiens
MAWTFGHVYTAAGNLEEPQGMSIAFPKRKYRLGERRPPCVSQPKDLSETIRLRSHICNSWTLNVSTGPVETTMGYEHGPACATTRPVPPGEYWQSGVVRCDQGGTPIHIQPLWCNHPAGTPRAVRRELAWPYLVKTAAC

SEQ ID NO: 997798 - protein, 303 aa, Homo sapiens
ERFLNFMEKANDNQLPKNRNAKSHLISSASALFLKRSRALDLSTSTVSQESPCWVLPVCCPRGSTLKAGSGGTSPGQALLYAESTEAAGRHGKTPALWDDRELLKEDWRKPGENRWEKMVPPHCWWDKARVSSITSGHCRGMGAHKGLERIFPIKLEAGLALGSTFSAMGRSSEKKVEVGPCRTQYESRCGFTSHSHCGGVGVARADVTGTAGATAGYGMVYGQSSRGFPLRSRGQRTQVTAENYPPIKVNETTHTWNLPEPIQNLRMMKISGHSLEPGRIFKLARGYPSLGYHKRLTAFKAA

SEQ ID NO: 997799 - protein, 108 aa, Homo sapiens
MVLPRANYTLWEDAPKNGATPQHEQRRWFAPQKGLPPRAFTPPTPNQSPNGTAVKTPHDPRGPTTSAPPRNHAPIEPARIRARVETPHTYQAPPTGRRDTCLQTRAHT

SEQ ID NO: 997800 - protein, 96 aa, Homo sapiens
GGSDQNMGPRNWGSFPRAFGPAFQSSIGHLVANYDRPEDLVLRSTRVSNLVTSPKCTEGSGYPDPEVGLRTLPTWVQTRAQQQYWVQAMRALMGIH

SEQ ID NO: 997801 - protein, 113 aa, Homo sapiens
GSLGGMAVCARLCGVGPLARMSAPSQHAAVGTVLMTCGGRLPIPELRALRRMRIRGLCAGVRGAVLCLRAPRPRPRADRCWSWRSDACWWRSSSSACRGTGPYSNALAAGSCN

SEQ ID NO: 997802 - protein, 271 aa, Homo sapiens
RIGELRLPGVGPGGSPTVPGCGEAAPGPVLWQPANPGALRSPLRGSACQACLRWTRALKSEPLRRSQPKSCRPCPGRGGGRTEAGDWQQGAGRRKERRWIPGSMGDLDERETQVHWHGILKHERGDDLRLDGLLVHEKIRGRVSWVETQTGAKRGMSLGEGIAIWQKAVRKSSKAPNWEGDGGVRDGQASSVGNAPDNASDRDFAMGGHKHVCLPLTRANGEPVSPWTRRTPDCLERHDKAVQSSTIRAGHGGLLAIDATSGGVIGRLEPR

SEQ ID NO: 997803 - protein, 74 aa, Homo sapiens
EHVSHHPPDAANMLLSKKWLDMRPEIKITSKLRGKYLSIMPRSVPVHCNSMQLGTTTLGRTYHNCTQHYVGKCG

SEQ ID NO: 997804 - protein, 166 aa, Homo sapiens
MWFPCGHYSHQGVVLVLAQLIQELVANQSDSGQVKVHVGVVLPMLRGYVIDFLLQMSLIPRDLSPLYKISRESCGVRWGLVWLHDESSVAGKRAECTRGCLSDVPHLLAVYKEGVLCPYRVMEYSPYKRVVAWPDPVGLSENSAAEGDLTTRGEETFSSTRGISKR

SEQ ID NO: 997805 - protein, 228 aa, Homo sapiens
MSVPLCRLNLTPRSSPITHTRCPRVLDYAYLTEMLRRPHPLAASEDVSWESEASCLSLSEPMEMIRGLAMRHWKVGFRRSSGEKVWRGEEDRGKGRKGRQSIGPYTSGFPSSRDVSTDDSVEIGKQELHLRQVDPWEGSSSSHRLLDSRRRSVMRFLDRDVIVACYVASIEELASWGLSLLAIATSHVHSGKPMNKYERPGATESPEETSSGIPGVKLREYANTRQRS

SEQ ID NO: 997806 - protein, 450 aa, Homo sapiens
  misc_feature (72)..(72): Xaa can be any naturally occurring amino acid
  misc_feature (99)..(99): Xaa can be any naturally occurring amino acid
RLVVTCVRLWLLPERLLSGISERPFVAGASARIVIPAWIKAAGTGRDAGEQLAREAQAIPNRDLTTAHTLLXHGLSTTGGESLDLDLERPSSECIRPLXQCFFRLGRTEWRSIRLECRWWPEAPRKDQIAEVSLPRSKEVAREATATALAIEEVKCHSDWDVHPRPKNVGPDHAVGDLTRSRDAQTGRETYKAAYSCGMGSTLSGPGRPPPTDHRLRNGRRATRQRCDQYASPRGRLLPQDCIRPEGPTLSGDRNWRCGGYLNARKVPGFGMPRRGLAFELGTYALGRRPPAELVSLRPCRASESRLNGPGVPAGVGPLSPGPRVLPGLGQERPSAGGPEEHFAGPATLVSRFSLLCPWGPLAAGSWEKGTPKRGQRPLDKPEGLIGRNPRAYPPGVAFPTGRVRLEGPDGFLLAPWEAGCMNLGVSTGPTLAWPNWPDWVYFWALKTVI

SEQ ID NO: 997807 - protein, 393 aa, Homo sapiens
  misc_feature (359)..(359): Xaa can be any naturally occurring amino acid
MCRSRETLYGKMGARIIYVSTAGSGVDASTHFVYLPHRGRTRKGETHPNKTDFATVQLVLFPVVWGPKYTEPTLAVLCLNTRHANAHADSKFMFGHRAGKESVTETRCAQRTSSMCECPVGSLHKRALLCCHSVESSIESLGHQGGPPRHNVTFYKEDSKSTECNSKVLTEKSFVLLPPNNKLCRRTQLFAPHRQGVDGENIYGLVRVCARVYQPRIRPVNTNYINQPARGTTCETFSLCRCNKTAVGGTTPFIKYNHTKNVGSFCTINPTKVWLSENRARPLHTNDISDMGRSGSVMRAEPTPLVVSLRQRHTRAVTNRQEKQQAGGASKGRRLAWLRPLDTRDNNFVPHITTHTRVXVAGVLQHHRFGVHHIVSGHTPWGFMPPIKCGCWC

SEQ ID NO: 997808 - protein, 38 aa, Homo sapiens
MTRPPPPFVYNSEGERSQIIAQPHGGEHLPLNAQNRDI

SEQ ID NO: 997809 - protein, 179 aa, Homo sapiens
DSTQSTWRGSSVLRQGHICRLRGLWCPQYTLILWTRPAVGRAQLDAISEKVDVIAKRVLGLLDKIWYDFTSGYAEMDELRERYHDTVWKATKYRNVRNILRMVLSGQQQGPPVAEMMSALGPIGGYGKRIQNGGFQLGEDVSGMCDDRQFDPCEHVETDCTRGSEGGLGTDRERLLNGN

SEQ ID NO: 997810 - protein, 100 aa, Homo sapiens
GGARRHGKPVFLLNKLACQNAHPEELGTWNCPLKRDVNEAIRGWAIERPEIPTIIAAVARNVVPDMINVGGWVDQSHRIIVSRDARVGFVHVRLMEPRFI

SEQ ID NO: 997811 - protein, 389 aa, Homo sapiens
  misc_feature (57)..(57): Xaa can be any naturally occurring amino acid
  misc_feature (75)..(75): Xaa can be any naturally occurring amino acid
MPSGTWHGDPVGQMPMYPDFHMPSCAISGLSWLSAPRRRTYLGHVWASQSCVALNGXQCTYVRWTCAVSREFAVXFRLQAGSREWSECTIGPWRRAARSYYPRARFRARVHSLRPSRGNEAGRRTVPTALHTEPALRATFNAWKPMRLKRHAGVEPNEITRVRVLRGQANESSCGDSATSGRQTWTRREAPHKVGCPGTEPIEGGPKCTRDCKSCNYQIVKLRIALDKRGVLPRRSWLCLAGAHIYTHLSDWREANKLCPTVGTCSVLHVGFLHKFVNTPPLWGARGFSIVGYIVGVGIVGSQFDTVNAFPPWVISERRAEEKRSVARLPPFAPRPNASLLASQQWNIPVIRLQRISRVALSTRVIHVWRANTSLDSVGIVRNKIDVST

SEQ ID NO: 997812 - protein, 211 aa, Homo sapiens
MARGAGGSGALWGGGVRFLFTITGFWLPRSGAGPGEWAAIAQVGGGLGSGRIRVSELLLSVAQSILCEWGLRTLGGVQSFRVARDLPLNVTTQEHSCGRSVCRLQRPQSLAGESGPVVRGEELGGPSELLGLKLLIESAYSSVISETVSSSDSDASIGEMLQNSGGELPSTGGDREPSEACGSQGQGGRSREVLPWGGTLGTMTRGGSKSL

SEQ ID NO: 997813 - protein, 205 aa, Homo sapiens
GPVSASTVWNLLTPCSTAAWLLQHHLLRTREPLTFSARPHREPFWGHHLRLCPPPGPVPQTRGPWAQLGTDMVRGTGGGSGAEGAISPDRVSQVLGAERVKRRTGRGRGQKASPATSEVMEPGNRSLNPHKTKHHMECRVTGRAEVTASREGRGACAWDCGSSRGPWGLLRYTYAPVTGLKALGLPTQGLTKPEAKVPTPVTPTS

SEQ ID NO: 997814 - protein, 310 aa, Homo sapiens
MAVFIERLCSCIYEPTSTKTGWASSVTEDSLACLSKKSGNVILGSRPSPDSEPSMTGRLQWTREDTGPLHEGHSKILHAGERGRGCRGNATCNTSSMTNLRAEASCPSERGEESWPLIKKAQKEETLWDPEVQRLNRNTADALRRLVATHSDEGAERDVEEHSQGRDRYRVSMATRGMDEPGEPWKQTRKGETPVNPFSEKNWPVLTVENGPIWGTYTCGQLVGQTLEELLRSKGERTVRWGDHPRNQKGRRADEFLDHKLGERMGNLGESRDEIPIPARNTGHSGRGQRAKRKRVAVDSQKRPKRGPQG

SEQ ID NO: 997815 - protein, 141 aa, Homo sapiens
DKTSLAVMIRRHKTSSSRHANESTHGVELPAPRRGHPHSGLLREAAAVQWMTNSWIDEVLKTLGRCVASPVKQDGHRPQHSGGWLPGMMISFEALCIEPVSSLWQSCRCDDMRPMDVREARVQLNKAWRVEIPKKAPFCRK

SEQ ID NO: 997816 - protein, 169 aa, Homo sapiens
GIAGSEGPLSRHARELALPSRLSVGGVAGLESRGAESEPRASDLGAPRTCYSGAAAGAPDILSAHIPRAQTQRDHPRKKPGWTESHRVTACLKKPCATQSLSYLGGPPRLQTLSDARRPVAGKTPVKGGPCVRGPQSEANRRRTTSKHVEELGDWGPGPVDQDASPVTR

SEQ ID NO: 997817 - protein, 39 aa, Homo sapiens
MCAKKTSKNGPTKAKGATREGTHGKAPGARERRENPEDH

SEQ ID NO: 997818 - protein, 304 aa, Homo sapiens
VETLSRHQDYQLQRGATRLWASVSAEICNTHWDALPYGNQLVHSGSPRELWLSLTGKGLSSCCTRPPSIWYLPLPTFILVHEDKRLVDCAGYWMERKDYGMLDSKTGVGKHCAPLTRRTIDEMTKRGAAIGKGEQASAIACAARTPGRKEKIRSTSQGPVERPILVGASVGLSLGCLQRRTGAMLASIPPGKSKCRWKVVLCCQDVIGLSDPPQGSGMLARVTDEVSSLIAEKRSCRFIKGYQRLKFLGSCSLPKPFLVISECLRGKFPPNDVSCTATVSRLEFAPRTPIGTKSTLVWDHFAIH

SEQ ID NO: 997819 - protein, 75 aa, Homo sapiens
MGAKCNTQGGPQAYYDAFTANGKDIWRSTAMWPRFESGKRVHRINPVWVHIRGGRLYQPILRAKELNPWQCNRGT

SEQ ID NO: 997820 - protein, 202 aa, Homo sapiens
KLTLAIVIQRERGGPKSRNSWESLVYRSERNMRPPRRMSRGLHGQRGKITEDWIAHIDDRVTLVVEYGATHYYLPNNAYSLALYRVVTVHNSQGVVQRSVDVGTSYELVVPTVIPFHIGVSQRHCDPTIDVDELLEADPDGAIRETLILDANRTDSKLLAPIRKHSGPMATWFQKAIQNLGRHANRRRGGRHWSRALCKFGG

SEQ ID NO: 997821 - protein, 259 aa, Homo sapiens
SQIVTQMYDLIRAFLAKLCLWETHLTRNNLAHFPTLKLVSRNESDGLNYIPKIAELKTEFQKRLSDFKLYESELTLFSSPFSTKIDSVHRGAPEEVIDLQCNTVLKTKYDKVGIPEFYKYLWGSYPKYKHHCAKILSMFGSTYICEQLFSIMKLSNTQKYCSQFTGFPVGILYSTISNVMERQTPGRALWWRPAGALLDPNGHGARMTTLQLPRLASSGHGRSWLCSPHGWPLQPPLTLGFTGTSRSLGPNRLSWPPAS

SEQ ID NO: 997822 - protein, 196 aa, Homo sapiens
MCRRPRSGASDRCRFPALPLIDRLRPCPIIVAVYGKHKGPETLCIMDFPIAKGERQSPVDIDTHTAKYDPSLKPLSVSLMINASFPEDPQAMVMLSTWQLDDSQDKAVLKGVTPGWHLQICFTFHFHWGFTLMDYGSRAYSCATHTDTYSLHRNFTLVHLEHPKVMGAIMGDRLCMQPDETGAPYALLHSERLAVA

SEQ ID NO: 997823 - protein, 142 aa, Homo sapiens
MGGNSDLRLSLSNRLVVNVYGPISYVNTSWLWTQQLARHPAYSESLRDTRIPPKGLVPAAATLVRKRHSLMTHLWKEAALYREWNKPITYGPGLRALTRFLDLEPWSVAMITNVHLTSSCPFIRQHQLPKNPQSLHSHQCIP

SEQ ID NO: 997824 - protein, 107 aa, Homo sapiens
MASGDFCSPGEGMELLQQVCSKQLPPCNLSQEDLLQNPYLQQASPESLTALWMRRGLSLNPSKGARLRPWHSDVLTADSSTTIGLQRLQHSHHSSQFKHSLCGTHFM

SEQ ID NO: 997825 - protein, 177 aa, Homo sapiens
GSSAVPRVCRLVVQTVLGRTQIRGLYFQPSDRPPDLPLRLQASVAPVFSAISCFWDLPSSRCLWLASFLPTQSMSSQYSSRIIPLDVEAAVIAAWFKFVPAGLLHLPLSGLSIPTAMMCALEGVSQFYPLNLADGRSCEGYRDVLLEPIVENTALTCRAFSFHGHSIKPRLERMSGV

SEQ ID NO: 997826 - protein, 189 aa, Homo sapiens
MYFAESRLGLSCFNSAWTGTRRYVPPPLAGRPKTMALRSPLHRTLVTAPSVSRRRFQRTEQNSDDTPPPPHLVAQRMTTRVNPRSAAHRTYQPGHQEGCQDKPPEYKAREAYKRTSTKSTPDPNVVDIPRGDGGVKGRAQARKHTPQQNKTNNQQPQCREDGEPRPEENKNESRQKATKNGPKTTHTET

SEQ ID NO: 997827 - protein, 148 aa, Homo sapiens
LSPSSTVSASLQAAHPSHGAHPRLRGAPTTAGACECESVSDNCPQPDKHYQDTPPSITIAHAPSIHTNNDIIHRYNKITTSRNIINITLTPPNYYSYTTNHYLSEQPITIEQTDKSKRITILHTTTTTYDNSHSTTHTHQYATHVLRR

SEQ ID NO: 997828 - protein, 105 aa, Homo sapiens
MNLRECAKVPFQTVLVRKKLLQDIYNARSATYLEIARIMRWHLPGSVNVMDVSCGRAMLGYALADPSVGYSNKTKNVVAKCDAQRDHPMHMTPARQIDAGSKRMT

SEQ ID NO: 997829 - protein, 263 aa, Homo sapiens
  misc_feature (129)..(129): Xaa can be any naturally occurring amino acid
MISNVIDKPKEDKREHKTSNNKTDKHTKQTTNDKQDRPQTNDAPHPNQAHTTHRHQSTPHENSTTQRRQKHKTSETTPNAIEKTNDKTAKHDNTNTNQMTHSSHRYSKQNRSTRHNQNEKHRPEQTHAXHDKEQIIKQEDTYTDSHAEQRRIDRTNKTETKQEARDTYSRDTHEDRTNKHNTTSTTQYRYEGKRPEKENKNRNITTKRQRHRTHNKPKHTRHRHTKSINQRHTRRNDRQQQQEHTITPETTEHKQQHSPRKET

SEQ ID NO: 997830 - protein, 253 aa, Homo sapiens
CTELDTAVELCSLPVVLIAGSVFSPAAVWDLLRADEKTEGAQSRPSRCIGTYELEMKDVRPGDLLVSLVNRLYQKQWINFVALATGDKGFGYKNSKFRSVESNDFMIQGGDFTRADGTGPAQSIYGELLPLMRTSNVKHYGPGWVSMANAGKDTNWSQFFITTVKTAWLDGKHVVYGKVLEGMEVVRNGGRAPKDKTAENKPLNTHCDHSQNLRQDSECTQSPLPSQRSMAKGHHIYRGDRLCTDLVNPAHGL

SEQ ID NO: 997831 - protein, 171 aa, Homo sapiens
MNLTNRRARYPRGKAEAMPILEFHIDNRVNDLDVGSGHPEWCMPLLKVRLSQRLERSLRDSEIQTRDVIQDTVSYSHFKIPSPCYRNRGPTQDTFNGDPNRFEPQKACPFAPPRYHVASNSETLDTLITPTQRTTTSEIQRREKNQHKGNECDHNVEERETNKGEKEEKQK

SEQ ID NO: 997832 - protein, 83 aa, Homo sapiens
ARSQFTCSFRPPELKGSHIASVRQVAGTYRHYAAHAWLVCGIFVETGFWHVSQVTLELLDSNNLRTLASQGAGDCRHEPAGLA

SEQ ID NO: 997833 - protein, 116 aa, Homo sapiens
MTDFRVYTAQRQNSKPDRTELNYIQAILQDDLDGLYTREKLLNANHLYARLMLVLSAYHTARVRITRNILPCVTYTCHGRYECYTIAPIQCCQNGLVGDANEELWAPFTASNLVAP

SEQ ID NO: 997834 - protein, 258 aa, Homo sapiens
GNGVWLFWPRLDCKGIGLQLVETSTSGVQGNSLASASQVAVIYRACPTQAGATFGYFAGYDRGIPTVCAPGRVLKFLDLKSSGLAWASQGVAGLTGCDAIGTGAWHQVLYGPWSISGFLALGNPNCVRCLMLTSFETLLSTFFPTYVFHTCPAAKTWAPFAADTACPVSNLLRAQNVLIYTVDPSHLRLLRIFVDTPIPYWVNVLGFTFTFTFRGGIQPCKLPTALAALFVFDHTLLLEPVPPFGDWRYFRQQAPFWA

SEQ ID NO: 997835 - protein, 111 aa, Homo sapiens
TTVREVSRALSLSCATWRLLSEKLIAPVADTKRQEFQTIQDHCMWVLDKLRMACAISILGKSLADELALDWHVWEEIELKGEMIGLCQHGVAYFSSVAPIALCCRYNDYLV

SEQ ID NO: 997836 - protein, 423 aa, Homo sapiens
ETQDGGCGAGGRQRLQRGSRVLGGCSLADCYETSCRYRRFSSSRVCLVPNIPPIVFRPVTPGCTSSRVCCANRLHGTAEHTVVDNPECTPTYWHLSGDIRRWLVLTKYRFGEHALSYQAERNSLFKFMDSTISERRTVAFRWDIVASHVYMRHKIRRVSTFLPRPLICASKRERVLATFPLHFSAVCGRNGSAGGSNSLLEHCLSDNAKVGTQLEPPLVLLLLGGCVVRGITPVEHGSLVGQAAGELRFLWHYNLLRGLWTMPWGFVPGQRESHPWVCKSEGKYEQEAAALVDTHFGTRPGDKLETGRYTKEYSGQGPWAIRGNALVTNRRDRRGVRPLGNSHAMQGAQYSIDQFATDRKGKLDKFIHLVNYSLGSDITKVGLTGTIEPQGVVDGCLSPTPVGMNIGSPPTLRDNMSGINEHT

SEQ ID NO: 997837 - protein, 226 aa, Homo sapiens
KLQTLAGSCLCSATCNTIVSKLSNHVEPVKQKKNVGWDYRDERMTVTGPTVLRPLERVIQYFSVEQEIQSQRAIVVCECAHSSCVQLLLLVNAIAGAWWFAGKMHNSSICTSSNLTHNLFPDSMTATQLLVPSRRCKEDIVPYVYSVNCFSVRTSSLSLSLNLDTRINEARIYGHLYAISCYLEKINTVNRNAVCSFSLNSTSHCIQNCSLVLPFKMFRVDTLIEL

SEQ ID NO: 997838 - protein, 128 aa, Homo sapiens
GCPDAERKAEKVGNTIRFHPSRKPCRTRCRYVDDSRGSVGVPGEAVAEQAERLRRNVGGAQVKKVPRDGMCDLQQLKKETSYLCAYKNVMGAEKSLRGEIISSFDQKRRNQREEKTTLKMIREYRQNG

SEQ ID NO: 997839 - protein, 178 aa, Homo sapiens
MARQTILYPLCSRLAFPIPRSFPPVPVAHNLFPASTLRPKLRHALAPPSRPAPHPGAVTTPTEYLTRPSLPHIAEHRAIREARKQAQTVTRVVHTLLYLNSPKGALHELGAHTTATRTRVTGMSSNNEAGKPREPPPGSSPLDTTSNPQNGGHTTHGEQHNAHREAQRTTNQRWAYAN

SEQ ID NO: 997840 - protein, 363 aa, Homo sapiens
WNLAVRAVALRQTLPAPSWSLRNLAPDREPELEPGPAGLLSARAAVMLHALERLMPVLPMSRECCLPASALPCVCPAAPWRSMWAVALCVAAGRRAALDGACRFRRCSLLSPPARFAMTSGCAVWLLPQDPWNPMWMQPSPDVYPHNLHNWNGLYKGRGDIEGPWEAVIARHAGHSQCPGARPSTRHEHPGWKQLRGHHGTLPKPLGPRSHQAQKTPRARRPGFGGTPARDDDERSEHWSKPEACPVTDTGTAAGKGEKTPERERPPKEDQRRVRGGADAAALPRGSGENGKSRDQEIKREAGRRWETPIEGRFQTKGPGEAWQEADEWPPGTREVNAGNSPGERRHVKRKRETSSMREAEGV

SEQ ID NO: 997841 - protein, 508 aa, Homo sapiens
  misc_feature (95)..(95): Xaa can be any naturally occurring amino acid
SAGYELCARLTDRSLSVVVHVETIRRVKLEFTLMEDPRANGIDRLSECVNQDQIIEHKSREESEVLRASKYISDFDCNQRSAPNRERPQIKIQEXTRTPPERLEENSTPRNQRTGPPGDDKQQAHHNNNTTAPPKPQRENRAKHQRQHDKKNKEGTTHERKDAKRENRRDPRADKRTNTRRPTDTTNAETTGHDNEAKDTDSDRRTHERLHSKHTDGADREQNSKTERGGARAERRRPEARRTTPNAARPGDTEARGDEGRSRGAHESTQRHQLQPEGDEVRERNHGGRKRAKRRDAKHTAGTGRDDTASTVRRGCQSVTAGKVLSRDQQEREPESGTSKRTRERYKRTDESEAVRNAAGNECTTDGRGGPRDEDSVAGYSASGREQDTRTGECDQEAKIRPRRREKARQRRRHERRSEREEDESLAQQRQEQNRRAREEPTDKKAEQHVGKYGRQAEEADRNGRQQGAQERYKRDQATRQARVGEKQESDDAEERAGQNTRRTQRAR

SEQ ID NO: 997842 - protein, 75 aa, Homo sapiens
AVEGRWLCYRHLREQMCSLTVGQLERGKRFEYSHILKLVHDGLGEPAPAESSQGPLVLSGEVPRNLGVQSQCGVR

SEQ ID NO: 997843 - protein, 244 aa, Homo sapiens
MASCAVLCPDSPSSFCATMSPLPLHVGHADLESATCGTSTCVAMNGSGAHYEFETINLNPMCLGSVEILLIARSPDERLRAVVKPLPINPDDLWCQGAWNALLLQWNNDVQRLGFMGSAWMRVRFVENHVGRNNGEWNRQPVSSGPNNIRREGTCNQAQSASRDPRRPLLDSFGPRDATLTTEPRRREAKLRAANSTSPANAKQKGRERISGRKARSPTLPIDAHYNPQGPKDPAASGEHTQKN

SEQ ID NO: 997844 - protein, 436 aa, Homo sapiens
  misc_feature (109)..(109): Xaa can be any naturally occurring amino acid
  misc_feature (150)..(150): Xaa can be any naturally occurring amino acid
  misc_feature (297)..(297): Xaa can be any naturally occurring amino acid
  misc_feature (343)..(343): Xaa can be any naturally occurring amino acid
MGKRGFHHRVSKKPRVANSAPFLTFHVLVKIGLSKTQDYRGVEVSLIMWTSIVLLRTFFQSLFVLQLCRLTRNVIRHRAQREKRLRGQHHNQKNAPCSEPFHKNISAWXGLPFQSAVDAGHGSFEKPFIFLSVVRIRRFAIVCAFFSSVXYIPVVGDTHHSRGGYSFLKARENFLDTRMGERHTLFSVAYTQPRNFFSQPEARVIFGQKFLGRGSPMLPLATRAFSHPSRLLAHGGKKPLSVVFCGGHRQRFLIRGGWKRRPPMRGKPPRGPESKVLRVRPPVGGGGKARQEALSSXREGHTPQIRTYIVEEQLRAHSVVASDNPWSCENTKRGGAPLISPQXRRPFRGALFPVYRNKADQERAGDTFIHSSVATPPSHERGVSPRGFKGAKMQKGARRSIWPPIIGAATKRNIYHYRGKRSPVFGPNSGKNKQYE

SEQ ID NO: 997845 - protein, 115 aa, Homo sapiens
SQAWNYLFIYLVRWSLALLPGLRCGGAVSAHCSPCLPGSGDSPASASQVAGTAGAHHHTRLIVVFFWYFYVETGFHCVGRGGLGILTSGGPPALASQSAGIAGVSRHAQPLFYSL

SEQ ID NO: 997846 - protein, 258 aa, Homo sapiens
PPMAETKLQLFVKASEDGESVGHCPSCPAALLWSCSSNGRTFHPHPRLDTRRSPDVLKDFAPGLQLPILLYDIATAKTDTLQIEDFLEETLGPSDFPMAGVLCYRESISTVGNRRFPQCSPRFIKNPVARARTKPCTSRLLRALARLDSVPARAPGARAGRGSLQLRESRRRFLDVRLVLTLADCSLPALSLHYQSDYGVLRTSCRLPIPRSCCGVRRNLDSAMQEKEFKYTCPHSAEIWGLRSACTPLQSPPRVCRQ

SEQ ID NO: 997847 - protein, 683 aa, Homo sapiens
RPLPTTYKRHLTPTTPLHVCALQLLVRYTPALYCLYATTNAPKTPPRPQQLKHHAHGLTNHTRNVLTTLRASNRYAGTLPPPYHPTRNLTPLTPPSTAHTTHTLLTCLQLRKTTPPTPRQPLGPQFIILLSWAPSPETKLPSTPPQHLNRHSTLLAPPWPCNRPSPTGTDTPWRPTTTIPFNIHPPSLPTLANNPYRAPRPPPPFPKRRKTLHSLTLPAPPLSLGTHTRANVFPHSLRSPDPPRYRATHLHAPPPPSLSVPPAPHLAPAPRSPASATSPAPPPSVWASPPPPPPPCPASGRAPLAWPAPSDPTWPPHLETETQHHPAAPHNYNPPPTRSTAERAPHDTNNPTPPGHRPRHANQRPTATDAPTPIYPPHTKQQRASPTNKTHPSPPTAKRHSCSPDDDTTTQRRGRHLPSSHHSKTADPPRRPPRPPAPASRARHLTTTHPTPPTASTTGNPTPLSPLHQQDQPPRADPPQKRIDAVDITPPPPTHTLVRTAYITLLLELTPAAPPPHIIDSLLSSSPNKSTQQLLRTKSTMVEAHITNYTSYTPYLSLPLSANHNHYIANYVNTYINPLTLHILCRNRTQHERRSPSLNPTTSPAHTHRAAARRRDEIHNSQHPRAETLNRDRKASSHRPPHPPPTHRGRPARTREHHLSLTPDLRQRHTAITPVAYLSHATS

SEQ ID NO: 997848 - protein, 317 aa, Homo sapiens
MPSGIGSEIHVDQVPCSPDLHMPLAAILVLAAWSLAETDRLVQPASQSAGLKDDIITVKPGQESVCFSEAVITWMSEARSGTVRRRDGPSSHRLLPAHIPSAPGEEAGMSRNPAEDPQCSESQALVRCTLTSLLMSMTLTQELSDWIHGSPDHRSTVYSCHHVNQVERGLITHARYRVDLAEENYKPWVPTGGLPMGSESCRTIQAKNGPLSHSVQFYPREAPPAHGYTPLPVGPNAKPIPYRFPRVTQGLHLGARTHGAKYTYGTLGSSCFHTVRIHREESLGHRLGLAGTQGDPVGSLGTAWNLHAKGTFKEQDF

SEQ ID NO: 997849 - protein, 245 aa, Homo sapiens
QNSPRHPAAPSRPGTGPPRRRPSRTLRGTMPALDTPVAAHRCARADGHWLAAVAAALAWAGSGSAGLLWAAACGLAAWGLRVVGPGGWSAGRSRCALVGGRGAVGAGALCGARHGWRPGGPGWLALPGSWSVAPVGGLVGCGGSVPVRCSRLRCVCAAVCVWSCVNARAVLLGYAHTRGLRGGMHMVGSRIVDAVAPYVVATVSNLVNVADRAATSHVRACVNRLPWQPVRHGRVKQESALLTAR

SEQ ID NO: 997850 - protein, 249 aa, Homo sapiens
  misc_feature (2)..(2): Xaa can be any naturally occurring amino acid
MXRSNDERDGRAALPRSADSSRGGPSMLHSELHHSIKRMIRHSSMTWADGMRSQAYADYIGFILTLNEGVKGKKLTFEYQSLLRPLRTLVALLNTLDRWIDETPPVDQPSRFGNKAYRTWYAKLDEEAENLVATVVPTHLAAAVPEVAVYLKESVGNSTRIDYGTGHEAASLLPLWSLQDWGAPGGLTKIAIVFKVFNSGTLKVMRETPGKASRMEAGGQPGVWGLGIDSKFLALHLGQVRECIDHQEL

SEQ ID NO: 997851 - protein, 105 aa, Homo sapiens
MVGFTMYSNVTVMHQGETGTSWNVLTYFPSSIIHLIGNDGVRGGVMSLWRSTTDGGVVRKTGCKTVIQQWCPVAGEGLLCALAWATVATPLMAAEGPYQGGTPWG

SEQ ID NO: 997852 - protein, 187 aa, Homo sapiens
ESQRARTRPMRGRPRDPSRPWRGARSLGRCRLGVPSRGGPRHLRPESRSAGSRLLRGSRYPVPSRAGRLGDRSRKVPLSAQCRVLAAHAGPTGDPRSPDRVPGRRSRTPVVARECLCSNSSGDYKGSECMAEGREGPGPEPRAMAGDIASRMSFISLTRRQAKDVHREDRHQMDAEMEFNCEMKWKG

SEQ ID NO: 997853 - protein, 254 aa, Homo sapiens
GGRSGDWRRRRERLNVGSVIERSGAPELASRGAPSSPSAASQPPVSWPRSPRGRAGRERPSAGRRRCLASRGTWPAGSRGRAAQNVKPKPSCKTGPSGPAAQSSSSPLTSPQGRTVTKGEHRARLRRSHGTQGYYRERRTAGESDIVSARRAREEKRAGNARKATGGGDTAMGRAGRARADEALSTLRAGAAQERDTHHVTRKDSGGSDPGSGPTGSAQGPPRRTNKAGGDSPQPPGGEGPGATEYGGPTTATW

SEQ ID NO: 997854 - protein, 114 aa, Homo sapiens
HERKTSGLVPPVMLSRRATSGEVLVCLCVAETTGAHVDCVLRGYAAFIAQTLSAWVPSAELLTRTAVYAVLCDPRVRRRTRVRTMSLEGLLKRTGGPYITVSLSGPGHRTCVSR

SEQ ID NO: 997855 - protein, 71 aa, Homo sapiens
  misc_feature (51)..(51): Xaa can be any naturally occurring amino acid
SIDVDHSSCTRAHRGTLGSATCRVEESSVVLEQSNHVKKSMDYNRNILLAXYCFFTPVKQKFGPCSVTSYC

SEQ ID NO: 997856 - protein, 124 aa, Homo sapiens
MAYPPVRKTLVRTMWSMIHCDNIALGIFTKMDYQTRMLHRGCVRDMYREKPGKIWVVFHVGVEEYMSGGHKTKRCDGLAVRRTGVTEKLCDKSLSSRAYTVATFSKQLDQLLCIDCYDQLIESR

SEQ ID NO: 997857 - protein, 364 aa, Homo sapiens
GVMSHRKLVRLPRRWVPRASCLVKRSSSAIRGDRRMSCTHRGTTQSRDRFQPSKAVFLRTTRAWTCTHNRCRGKLEQRRGIRRLNQEEESGETAGWNTCVTIDSASSQVRSGYSWVTMLGAHSSRINAHSVGGFPVYPFRYELDSVWAQNASEFMFDLNIANKDSDLLPVHNMHTHSATRTTPASQGNCKRDALCYSATCAHISLRPKGTPNAGQRHVAQSTVAGHRDPAPGRRAEGQKGEPDSRGTEGHTGTLGTRCHDLREPKEYVAHDYRRLRECNVIGSDGNARCSEREHGPSAEETYIPLAVDSDPRGKQAQKVAPHHPRYRWAQRNIRPEGVKHAVLRAHNRGREAPEQNRVLGGNRR

SEQ ID NO: 997858 - protein, 268 aa, Homo sapiens
AEKGCDAGVWLEEAAMDDEEETVPGSGKSDKTIMQLCHDRGISGEPGQSLTITLEEYKAQIGDKPEMRRRPRRTDRHTMTGGPTNDDPTEQDVAMLYPKRSTKVEHQKTIKDDTLTAACEEENNQHGLLTPMVQTGPSTTPTDNASPMSRNTGHHKVASLGTQDTVKDRTHASSQPVHREESRRHSTSEATKQVKEPEEGRDDRKTWRDARTSSRGVTEEGKPRHRTPRGTTQGPRVSEHPIRWAGGRQQPDLGAGDKTGKLSAATES

SEQ ID NO: 997859 - protein, 138 aa, Homo sapiens
MTQGGKTARLLTLKRLREEVVKVRKVDITVYLFQNDAWRNSEVTSDDQYLSPPVPVTTHLKKLKESYCQRQGVPMNSLRFLFEGQRIADNHTPKELGLEEQKMCIRQFIRNKRGVIQQFRYSFYFFSFSLNPFSISNK

SEQ ID NO: 997860 - protein, 253 aa, Homo sapiens
SIQSTQMTKDIYTYSGGIRGLDGVGSENEENNASQHDYKCVTLSIKVEGTGEVAKARPLPRALPFKRYAETKQLAIHKVTATPGTSTANAVGAQQHAARNTMPAAHLQRKQDHIGNEEGSVHKHTRRETARTNAPVGNERPDRQNTNLRTISTDKPANACEAPIYTSHTQPDDPRTTPTSRGIPQPTADAQQAGAATNRNREEPRTRQSEQQSQTPDLEQGQRHPGEQEASNDTQHRVGRKRHGHTSDTYKIA

SEQ ID NO: 997861 - protein, 57 aa, Homo sapiens
MSNRNSRARPSGYYHCTLTSWRHPINNRYHARRRHYFLIISPATDNTQPPLLIQANL

SEQ ID NO: 997862 - protein, 148 aa, Homo sapiens
MRAHENDRDNSGPHNNRSIHNGQKCLDLSRAGPFLASLTSSNELPKPADKKEMKTSLNTQARIRTSSLWEKCFENKREAIGPNPPVVTPSLAGTTDPDRNSTDLVKVVPISLAPIPHLAPPRVPIGARPHVALPGAQTRKDGTLAPTL

SEQ ID NO: 997863 - protein, 256 aa, Homo sapiens
VRGRPGASAGGRGLRPGRDPEREPAAGSWDSERDPERDPGARRGAMARRGPGWRRFCSLVLLAGAAQGLDSTSRRGQDLHTWPLRGRTGWLRWGRKNIPPDLNEYLYTSGSCQELGPGTHMSDGVVNVMTGINPGTAATVPPNNSRPPCWGPRPMHPSRLLAGIRIQRVKRNGKPVGPSTAPSRWSRGQGQPYNPELEEENGIGIPSCEHGRATVDHRTRREGKKEQATKSHGESHLDGGTMAAGRNKRPRSQGEK

SEQ ID NO: 997864 - protein, 248 aa, Homo sapiens
GRADRSVAVSYSPTMDVCSPTDIGVLRKRGSRSKATNVTISLLYSRLLFDQIIVNICSHQLAAKNNRQPYAVSELLQVIRLVLSLWAYWQQRSGSNSQSSRWCDSPCLARVLYGNMCRGGRMFAPIQNLAAVSRIVHVNTSQKRYAICTGLTSLRPYPALGHVYKVMVLQEVPELSFGMLNDHRLHTATSNDQGKLVYASLHKLTSLELISQNGLLPFSCELTHPGQTRQHHRENRNAVIQAPGAPWH

SEQ ID NO: 997865 - protein, 162 aa, Homo sapiens
LKRRVTRLAGGLSLNVPRRQKTLKESEKRGSPPWQSSRRSPSYGKVRKRNTATLPHVVPASWTGGDLSPRGQKERGRMKERRRGHINVTRCRVVPSMANQTNHGDVHVRHTKCVPTEGGPPRSPVCLTDMMLCVGVTERKHLGHSGSVSKTVGETLAFNSAR

SEQ ID NO: 997866 - protein, 45 aa, Homo sapiens
  misc_feature (21)..(21): Xaa can be any naturally occurring amino acid
  misc_feature (33)..(33): Xaa can be any naturally occurring amino acid
MGCQPDWRQRTLPGDEWRNHXSSYWFQVQGPGXATGERKSKTDRQ

SEQ ID NO: 997867 - protein, 96 aa, Homo sapiens
GEESIAPAARWMWAAKKVHDGEPSLDYVQTASQLVDRIWQFHCMPQMHTENAMSYRWWVSGRSINQICGLISRRDHVLIGVIQHRSQANSNGRMGY

SEQ ID NO: 997868 - protein, 169 aa, Homo sapiens
DKQFSGNLINRSRTSQRIVSLTVGAVSDWARGPVPRPIVAVSCLRKSWHSHTPIHSHDSIIQEERFCHSLYYILCSGTDKQDAEEYLKYAKHVIECSTYTSCHRAYTYLHTTVESLVDPITKSNCSQCKNPLIDGEIEPLKVSRSRCHRGTCCLRVLLRSAGYEGKCSD

SEQ ID NO: 997869 - protein, 96 aa, Homo sapiens
TSGYLIERKTLGARVQLMVSGHGHSMYPKRSWCLTYVPIGIYIDQVHVIVPRRVIRIRDIDANFSRYAVSREYLYVIYHKESTMRLVYSKLRPVYM

SEQ ID NO: 997870 - protein, 69 aa, Homo sapiens
EKAGGRHSDRRSGVYSERWLSARAFRGVGVYGGFPTVGVWTCFSRRCVSGLRANLSCGWLRHDRVYEHE

SEQ ID NO: 997871 - protein, 158 aa, Homo sapiens
MLVSPHGLLSSILMNLGRTQQNGRVHTIAIVWRGVQVAEGREGPVSCEGQTPSDPSFEDPETDHICVSSCSPSRSLPYSFAHSMSSMCPSALSWSRDVTGLFRDKEFCRETRCTGNSRNLYIHLAGEECSLGPVIGFVTIWFHARCTAKPNAWSHVVS

SEQ ID NO: 997872 - protein, 419 aa, Homo sapiens
GAARDEWRLGSTKGCKRKHLWSPWLLNACTNRGTSGSITRRLSRPEELPSCTGHENPLVHFRTTTTVTHRLHLSYRSTGFLPLRSNAWRAPTTRYICCELPPAPTFCGHHLTQALPPALTPTPACSPYTVRPYHVRCVLHSENLRSWHLPASTGGPKLGLALLSTLPECSSAQHLRADSTLTRSHASLCLAAPSPHGVSLGSLARASTPLLTSPLFGPSAPLSHCAPTRLPAAAAVAHHLSALRALARRSVTLRPSFRQRCRLVGERFPRLARLAATQPRRALPRDRFRLSARERGPTAFLSPHAYLDAHVSARTAVRLFSPVAWALSFRPPFLCLLILVMDPAELGAARAPGAFAERAHRGVPPLFGYVYRTLGGFARALGSIVGPVWALRRSMRHRLALVYAASPSSCAPQPPGVSA

SEQ ID NO: 997873 - protein, 73 aa, Homo sapiens
HGGSCLQSQHFGRPRRADHKVKIKTILAMDNVVKPCLYQKYKNYWVWWHAPVVPATREAAAGESFEPRKWRLQ

SEQ ID NO: 997874 - protein, 178 aa, Homo sapiens
GSLVGLESGEDRQLLGDVAAGHHQEGETGHWEGGPGVHVLQQGGLHGARYCWGAGPDEARAGPRDLVAVGVVPQVDIGCRVCVPLGASRPPEGRGFGLEPGYQRISRETVTSGQLEVGRTQGLEGRKGCGCVGRGSWTLEGHLAGTWEGGIGGARGKEAWKARASQFRAPRNAIAVVL

SEQ ID NO: 997875 - protein, 40 aa, Homo sapiens
MVLRVQEMRHAQTIGRNSDNLAKNGTTAAMGKKANQDTEK

SEQ ID NO: 997876 - protein, 30 aa, Homo sapiens
MERAYAHVSLLKHWLRGSRLRIGTFTTAQL

SEQ ID NO: 997877 - protein, 227 aa, Homo sapiens
GGGCGKRWRCRTIPGLIRVLSNVTSDHYCNSHICVITEHNLRQHSVMTLMPHGKGGRTSDQWGLLDHCVLRAHRDFPGAIMLVKQTMGQQWGHKSNHTLIGVDKTMTSMQPTDTTEREPRDRLFTKHGKNGGTATMTQSTRCRKSRTETKGEQATHDKWQGTNSEEHTLREPQVNVGATNSNMKQPMWPFVSKREWCSTALHNALSPPMDNMGLSTTLSHRNRNKTW

SEQ ID NO: 997878 - protein, 162 aa, Homo sapiens
ETFFAESRRGFLLQQCLDGTRRSFPTPAGTPIASPPSPLQRNPRTDPKDTRTHASRRPTQRTRRRTTNSPISRRAWRPLSTSQVRQNYHQDSEAAIKRQINLELYASYVYLSMSYYLDRDDVAYEETGQIPFFTNLHEERENAEKLMKMQKQRGGRTLTFRI

SEQ ID NO: 997879 - protein, 137 aa, Homo sapiens
GTRKWRPGLAGGCRGDGGSRSMEPELDGGDGRRGSRLELADPPTAHQSNILRTTHRTCGSDPRPLQDAHLAGSWGAWGVLGEQTGHLNQPGGHHIYTEGNNVEAEADRTASSRTVPHLTSNSEMLHSVPVMASHDAG

SEQ ID NO: 997880 - protein, 342 aa, Homo sapiens
ADKGAEEQSQLLSEEAGVAEMAKHAYGVFFNMIIYSNKSTHISICSTVNKQKLQQGGIQCQCINTKRQPELVAQEIFLYSLYPTELIVLCRMISQTHKPRVDNCTTPYADLAYKASKLSVIHTSQTTAMVLRLDCMHGARYNSLRRCSWHTRRFRHIRRLFRILIHLLRVIDHTLPIYQSYPTQQPQGRDLGDSNTEGSVGYTLTSPIKAKQKPPTTRPPQAPPTALPRTQSNMRTAQSPRDQARTQHPATTPTQAPIPTRQPVTTTAPSPKSNHHQAQDTTTGPTHQLHANSAAPTHHNPPTRHSPPLTNHGHTHTTWPPNTPHHNPRNRLPHNNTSSTRS

SEQ ID NO: 997881 - protein, 114 aa, Homo sapiens
KEVKRDEEPFAFLGSPGRVLLRHVHVRTPKKMKRIVLVDNNVMCARITSRYHPYLSEDPTEDSVERNIRIIVPLNSRENISDPISPFENQIRVTICLTSVKHVILQNVELDTSR

SEQ ID NO: 997882 - protein, 212 aa, Homo sapiens
MGMDPFRQFVCETLLELRDKAHIGDVPLLNFYAIRHFQQKLRAITVLVLYPFTLFSQTLKEFSECQRGEIRGFNYQLSVGTVTKDNQTVSNKYGHADLRHLVIYLQAKRGKAVTFHHEYGQQWRGSRKNELTDTTPMCSNRAKWGAKQQSNIIRQAPTEYTTTSGTSLGPSERHKDATEEKTIIDSTRPTWRDRGTTGRKLATTKRYRRGAQ

SEQ ID NO: 997883 - protein, 78 aa, Homo sapiens
DGHRSPVRTVPWLLLENVAFTQQQGHMGHTGPQGKPFHAFPFLFLPFKNDAKPGGLIPLVSLLFYSQNVVAFWGSGQF

SEQ ID NO: 997884 - protein, 305 aa, Homo sapiens
RYPSRRPGFLRRFSRCSPRTGLQITGFVSECASRGAGIHGAEEAGLGFRCTEQWVISGRELVIVGDGACGKTCQFIVFSKGPVSQRVYVSTSCLKTYVADIEVDGKQVEWALWDTSWCMNSIDGSPECRLSYPSILDVEYVMCQTSLTATDRYRHDIPENSGTAMNVELVEFARVCPFILVWGDQARIFEKWNESAQWGSVANDEIGKPVKTGRMAETCANTNRGIGGHGRVQLTPERIGGDEKALYATWATEDAGPATAYKLGHSSKGSGDALGLAKNHCLIGSKALNAGKYGKVPVISILRCL

SEQ ID NO: 997885 - protein, 93 aa, Homo sapiens
ALKVNDIAIFSFPRQEWVLLSSGHTEPGEGDTCRLLKVMPTSVVMRAKKIAQYRLPWSKSCTSMVSTQRLLTPGVILQAAGALVACSEPRDES

SEQ ID NO: 997886 - protein, 135 aa, Homo sapiens
GTGSFYFFLQDPFVDLAMWPSYLCLLTSKVTEAENVKKLTGTIEQRRMHAACRLDSCTMCSPGDTAKTPLKIIVPRHGLVTEKLHSTTKMPHGTLQAGICEYMSECIEYLRNTQWRDGLLRFEDGDRERLRAYAQ

SEQ ID NO: 997887 - protein, 132 aa, Homo sapiens
MVRRRRNRDTLAQKGPFVRVSLYRTNAQYVRTAQQYVAFQSNRAHNTPKSGGGVQIELTLYEKATIGDFARLRQSPLVRAATLAKSGEGAHPRSGLQGCDRRRMAKENSLAKSTLVKKRVPHQLCPNLVLGG

SEQ ID NO: 997888 - protein, 226 aa, Homo sapiens
  misc_feature (31)..(31): Xaa can be any naturally occurring amino acid
  misc_feature (60)..(60): Xaa can be any naturally occurring amino acid
  misc_feature (64)..(64): Xaa can be any naturally occurring amino acid
  misc_feature (77)..(77): Xaa can be any naturally occurring amino acid
  misc_feature (100)..(100): Xaa can be any naturally occurring amino acid
MRLESLKNTLVELSTKSYREEGRLKVVTSPXILLVHNIRSGTCMLLRLRRADQNSLPVGXGLYXAWDCSHSMRTVSXLHTCSRVLAPTRNSVTENARLLXNLNYLSSQSSSAHDAPYASDVATYTYLLVRRRRQYTQFYATAFSMGPKNIWPSSICTDNGVVTASMQRTYRTKNSANRYKLQLHHHSKSGPYLVTHIRQNYMLTYKLTHAITYSCGIKPALTFKHD

SEQ ID NO: 997889 - protein, 205 aa, Homo sapiens
MVARGGAPVREAARARAGAGWGSAVQCQRSARPGPALRPVAVLGLASPIPPAVAADMELLCCEGTRHARRAGPDPRLLGTSVVLQSLVRLEERYVPRASYFQCVQRESSRNMQKMLAYWMLEGCEEQRCEEEVFAPDMNYLDTLPVLRPPPGKGHVDKGPEVRVLDWLLGYQCWSEEPRPLDQAEKVCTSKTGPGLSTPRKVGGD

SEQ ID NO: 997890 - protein, 104 aa, Homo sapiens
MFPLWQIPNACWLIKASLKSCREKALFNTKCNNFQMYLTPMNSCRHNLFHKTHLVCGSAVGTSDTVFNGSVVLPVCHAVPIPLCQHESMHVESTQMCPKPAGTS

SEQ ID NO: 997891 - protein, 171 aa, Homo sapiens
  misc_feature (134)..(134): Xaa can be any naturally occurring amino acid
MAAMGSSQAEIERVLCWGIPGYNSRKVTILELFYTSPKIELLEGDASLHSEGMRCEDIHARHYFSQELKKAHGGGATVPARVQLEVNRDASYGVSIGAFAGCSEPTSYKEGTQEEGTIKDMMTNTFVSPTQLHXILRTRPSQVAEIGQRANRQAVTLRGKWGLWAGGDHKQ

SEQ ID NO: 997892 - protein, 117 aa, Homo sapiens
PPPPPSLLLRSAGPFSDCRGPLRAAAKTSHDTMRSRHHNAPAADGAHINHDKETEQSTHEKKRERQTTQEHKEDNRQPPIEQKQNREKHKTEENNSRGRRKKTKNNKTTKKEKKKEH

SEQ ID NO: 997893 - protein, 31 aa, Homo sapiens
MNRWDYRFQGYDQSHVCRDRGDDTCRPEDVF

SEQ ID NO: 997894 - protein, 105 aa, Homo sapiens
GKALILLNWEGKQNNPEAQEGQVDLNPPPRGFQPQPHTVALSWEFHSSFTRPGRRNTPDREKRKRRSQMCSLETPGGQLKRRDVSPPCLRTLDIGARERYRQDKQ

SEQ ID NO: 997895 - protein, 72 aa, Homo sapiens
CKLRMTAVCSVGGALECPGVPCGWGTCGGFLLLRFLADGILVAWGSLDDGLWARGACCCQLRDSAECKVPEG

SEQ ID NO: 997896 - protein, 126 aa, Homo sapiens
PDHAVLEMKANFTLPDVVETSWMRFCSFELQAGGSGQASEAVHTRKGRKAGPPPMKSAFDNTMVDGCAIPGDQREGWLRRASQEPNEKARTPMERAKHDETGIPIPAHKVTLPPHEGGPITFTHFP

SEQ ID NO: 997897 - protein, 163 aa, Homo sapiens
MQRLVCLVTQHVSPCRLPPAMPFKSMASGQSIYYLKCRTRYVLAAYRQATAVPTPSKAPPGRDHHPEALTHHTRTGRDSGPKRRHERSQTGRSPRSITNSFALNRIALWEGPNLRPPAPSRALTRVGTRASSGHTLAQHPNLLEGTANRYASCHITPTHKPLL

SEQ ID NO: 997898 - protein, 143 aa, Homo sapiens
MKAETKQAKVPRVKPTRATHSGQNPYSQRTQTHPWQTKGGPQVQPQNKGRRNNGTQATHGNTPTHTHPQQRRNEAKAAHTRTPQTHPNTHTIASSDPQTTHTHHNTPNPVYSANNTQHHPGPAHTHHRQRPHQRTTSSPHDRP

SEQ ID NO: 997899 - protein, 37 aa, Homo sapiens
MHTRRIYPQVGGPPDGADEKSKTSPTMRRGDTHTLGA

SEQ ID NO: 997900 - protein, 189 aa, Homo sapiens
AAWRGSRKRPEPQCAAWSGDSGTVSQSHSSCLGAVGRTRCAVRTVRAGPRPACCFACCLLRATACLPVCPVAGALGPRSDGPGLRCLGGPAYPEWTSSWACWTCFAATRPTVVSEGVPCIPRRRPPTIAAHLQQDRPAGGLREDGGGAAVARMAGAAVTKAEDRAWGTFLPGAFKKLLHNDETVPIGIF

SEQ ID NO: 997901 - protein, 105 aa, Homo sapiens
MWSPPRGFGLSKRCACTGKIAVMDASHGPREDEQGPAVYLDQLESTTACILEYKQSGESIDIITRVPWLCPGPHLAAPQRPALLASLIPECRMIGLRLYDGLFNG

SEQ ID NO: 997902 - protein, 87 aa, Homo sapiens
SGPSNPAGEPAQAPNFLETVDLQITLKNLLIPRKDKRFSGTVRLKSTPRPKFSVFVSWGTSSICDEAKAVVYPPLWTIEALKKLNKI

SEQ ID NO: 997903 - protein, 343 aa, Homo sapiens
ANAQPDAPSVTSLRASARTQEGGGRGTPLGVGGPGLTELWAPTQYVGRGEVDAVTVRRPEAQDDGPRKNGTLFTIAGAQWPSAFGVRQVPELGQGTKGAWPGPLHHGHSRPRQRVADRLVAFAREPNAPGALLAITIVETCVEVAGLERPDAPRHNITRQQWVPSLFKALEAVRLYRRALRPRYAPCVSIRGFTYSRLRLDSVSSGALASSLRVLLAFEKSFSLAAIGGACFGAHRRFPRAHRAALRHPLVAERAIPNAKLPPLPFDPQCRGGPLCQNPFPPYGPAGDGPNWAQGSPGVVTTLRSKPMPVAAIARAGERPLSRFCKGPWFPWSPAGLARGNPF

SEQ ID NO: 997904 - protein, 459 aa, Homo sapiens
CCESGCVVLAPCDVPERGSLMRRHCGAVAALGQTAGGVAAQCLVPEFCGCCTVPCALRCFGGPRTVTWVPASCTMLEHECFSDAWRNAVLAITCKLGTEGYTRRARDGTERTPRARAAAARQPRPSSVVPPRSCCYKGSISYSHVDDGRGIQGQPLNPHNHAILFPSILNSRSLGNWLPRSLRKHCPLRNVQLPWRASNESAPPGGLAPLADPLALFVALQSALGTSLDQPSREAFPPAVACKAIVTSEGFIDVMVVFGWRPPLLTFVRLAVNGRERPTFGSGRNTRLSTTHTRYSRNSPPLNHDERSLRCPHRNYPCGGRHPSCAPSTPCATCKGRDFGAHWRPSRFGRLTLTLSTLGDNSVLQRSTDELNHQHQYSTLYLNIYQLPGHLASNIITDTHSLPPIILTTTIQMLTNHPPTIIHFSPFIPYFRRPDPHITHHCNTTVSTCITNTLHHAHH

SEQ ID NO: 997905 - protein, 327 aa, Homo sapiens
MGRIARGSAGLAEARAESRYPARTHSPPQLPREEPQPCEHQVLCCDSGNHPPQRTLDVHPSSELTVDACGPMLERREETCAALRVFYFQNVLRKEVLPSMRKIVATWMLDGLLRNQKCEEEVFPLAMNYPGPLPVAGARDKEPLLQLLGATCMFVASKMKETIPLYGREACLSTPINSIRPEELLLNGSAPGEQASRGHLACNGPARFHLQALSLSDNAQRGGELNGIIRKHAQTFVCLCATECEGSFPKSGLHWLQASDACGCPHLQGPETLRDAPIKLSLFVINRVQTAFLLTELSQLYPGLPPGTGRCRMKAVWGQAWQARDMD

SEQ ID NO: 997906 - protein, 98 aa, Homo sapiens
GTNKTCLFDKNVSGKGGDNKGGRAKGCSVGRWDAGVYIAGTGPGGVRRLIRARMEPRGQNSRRWAVLGKTRSLVFPGVDKEEPQRPDVEIGGQLSSDI

SEQ ID NO: 997907 - protein, 390 aa, Homo sapiens
GPANGSCAQGAAGRRRALRQASPRVALASSMGPDVSSLGEAWLDTRSCRPDDRMRSLRLGLAESRGHSLGISESGYAAAREGKGSPVNGPGRAREEDIGDWQNERRTGESKHVREDIGTKAVAHVKDTPGKTGKSTDKQGANEHTHEGIGVAYTFTEGMRMSDTGVEQSRCSKRNLGSRPHDNASFDNHNGPTVPPSTNTHRASGHRPNSRWAYGLHVTDSAEENPRRANKRAGATAGEEAHKLWDRRQGRNGVGPPFQEEYSDMVTHFTTTTNVTKRATQVGHGHWASPGTRQLATRSRERCTPEQVIARGITHYLHKKNRRNTGGSPEKERSIQREGQQAFNKATCGKKGDTEQQEGYTHTRLSRQWNYEERETRHTHGNIRSCAQTG

SEQ ID NO: 997908 - protein, 212 aa, Homo sapiens
ETWRSRSPVCSCVRVGAETSPGQGSYQDGLRRPGFAEGPPAGRNPRRKKPQTDRRGGSAGSQPQACADGVRVSLPKSGALVMSRTGLPVCPWAAVSPVARSRGDQNPAASGAAWGLGVTCCMSVSIMGVCVCVCLCVCVCVRARACVRVCVPTTVSLLSLSLSLSLSLPSRSFRRPLSLSLSVCVCVRLGTRVPCAPDAEFRARRPLFWSAS

SEQ ID NO: 997909 - protein, 141 aa, Homo sapiens
MSLVSFAFRWLSVTSRVVNIVREDEFRALAKGYIMQGAEIEFRYSPMLSLYIDTLRTIASLHIARKYLNLIGIEVECLDYAFLRPGATHWNLASQRLGKERRKMREAKYGVACNNHGTLGNSNVYNSRKQRQLILWDVRVG

SEQ ID NO: 997910 - protein, 112 aa, Homo sapiens
MCAGDPPNSLYRFHVNFCVRHCEKASGFPLAHTGNCVLRAHATISYAVDKPASIISHPRNAHISRGGYSAYPVNALYNQVFWYLETSERPHPVQHAAQFNVMSYYVRAPKSR

SEQ ID NO: 997911 - protein, 150 aa, Homo sapiens
DQADLIDIYRTLQPKSTEYTFFSAPHCTYSKIDSIIGSKTLLSKCERTEIITDCLSDHSAIKLELRIRKLAQNCTTTWKLNNLLLNDYWVNNEMKAEIKMFFETNENKDITYQNLRDTFEAVCRGKFISLNAYKRKQERSKIDTLTSQKN

SEQ ID NO: 997912 - protein, 298 aa, Homo sapiens
MESTTMSHVGITQDELNMLASYFHSFHASVRFHEGWMQHTRVLPPPDDLAQDIRSSTTAISENYVCSNTLGVEKPGIVKTHYKESRFYKPLITCRQLHNSYTLQGGLLNLLACGYCNRSLEWANSRKTFTPSIPGLYLHIPHAIANCATRVSPGNSDLHTGFLALPLTTVPPSPPRPTWEEPNLGTKYPRAKLILVPGACNHYQGTRGNDFPNEFPHFTRSPTLGKRAIFCLSFGDKFGNPVRYTLTLTAFRSATTTALARTGYDSHCAKHKTNACGAQHCFALTTPHSHERFIHPTT

SEQ ID NO: 997913 - protein, 58 aa, Homo sapiens
METSVAEGQDQQCKHGAFQEEPYRLLASQDEASAKIAGLGKRPCGEPHPKEHELSLVI

SEQ ID NO: 997914 - protein, 106 aa, Homo sapiens
TVWLEGYCGNRCYLKMISMKVWTYLVLGTLLLVRYSVQTCIISMSYTRISVYNDRARCRVGGSRLVPPIPIIVERVLEFPVSKWRRVTLTVLKVIDSSIGESQART

SEQ ID NO: 997915 - protein, 101 aa, Homo sapiens
IPEADSIRAEMSRSVALAVLALISLSGLESFHAATPKYFRFTQRSSRTSRGTCEYAQNILRGMRVVVVMRVSHATPGASVRSVSLIVDTNVRSTNATYTSA

SEQ ID NO: 997916 - protein, 156 aa, Homo sapiens
MKPGKFQKEERVQGYDKLPFGKHYHPGVINITFFKSAIGAPYEKDTLLERCRLGNTTENTVAPRGIDLPTLPGVTGKTDSGADTRQTGGSNQKRPSVTGTDSEERTQAGVLSLAGVPVLRKCWSHTGGVSRQGLKNLTLGFRAHQAVWHAKACLKH

SEQ ID NO: 997917 - protein, 123 aa, Homo sapiens
MPLHSSLGEQSEIPSQLRNEDIYGYLTIVDVFILPGSTYCVSLYCVCPQGVVARKCPGPQSNALLTSRPPKVARNYMGKILSTAGPFGPCKSMLDIEPVRANWTYVYQFPGYFREAKEERGYT

SEQ ID NO: 997918 - protein, 111 aa, Homo sapiens
MTTGVGLIASGQCDVIVARWGEFDVQMSLFVNSRKLTQWMLDLHKARSMGQRLSFTLQIPEEFQAPELPTEHWSTPPVRHRPHQKTRRARNTRNRPRQDSKSTRPNRLDTQ

SEQ ID NO: 997919 - protein, 197 aa, Homo sapiens
MSERWQAVCDLSDSWHDGIDLHRTKMGTVHLLCTRKLYSQSDELQCLPSVDARIELPFAELRLRSKVMSLMPENARYSVRSNSGEVIRGVTMMDSVQSFINLFMDFVIFKADDGKIVYASLSQKSSMHHMWEQEPTDGENHLLSNNVLRICTLDNIHKAAQGIVLKHGQQWMSFKEWLSLNPGGFITSLASPGGMLA

SEQ ID NO: 997920 - protein, 340 aa, Homo sapiens
MAWLANAPDISRTYSKSVTLKPSAQTTSTTHAQHGNFSLLEQLQFARGLIHNGIDQSPHNDRTAEGNQPNDRTSNFPTSVYRILESFSSGRRTGQPACTSWETDDTGNSTFVMPSLKARPFPHNVDPNSRGLPVTTQHGLVDDTCKTRECGKSDHAATTVLRNTPQLGVAIRQRQHVVDFPHLPLGHFLFTLAVFLSRRATLTNLSGTGTYQPSRTMHQRETRVSYNQKCGQRMAYGKHPVTYEWDNNGPGGTFRRTRHDGKLRNLPTALSGTDRLLDGRQQTSHGPAAGATTGRTNSGAPDRGYEDPDTQADSQASRNTETPTWQRTNCIDPHNTFGHR

SEQ ID NO: 997921 - protein, 194 aa, Homo sapiens
ELGGGHLRRPDCRSYVVRLAVGFSSDEHVVNRTANNGSEDRENFDKGSKLIRKTEHDDRRGISIWPFQKYTEYERRRKVKDSGETRYTVGPSDARSNYATATFPSISIAPFVYFFYLSSIQTACYTVLFNDCTPGAVWTSNSFTEMIMVAFGTGISAFPESGNLKSDKSGMRSRLPRGPLVRISLVPTLIASGL

SEQ ID NO: 997922 - protein, 194 aa, Homo sapiens
HISEQLIIKAADGVLTIVHVELRSISMIGLRMISRVYSYLMCSRSFRTIVIEWAQVDQTKKRTWKRLSRVCACMLDVLYSSSCNSLLRGRVGTYTSVGLLHYCKNEPSPQLPLSMHTVLHRWEQFPAKATLVTCSNQPVAWSWTRQHKPKLFITRGTILTLASRGLASAHRGRQFNLVAPGVEAPMRNILGMKF

SEQ ID NO: 997923 - protein, 305 aa, Homo sapiens
MITTTALQPGMHRTKNPVSFAQNFFSTSSTIFYTFRVHVFIVPKRARPMSSKNENQSKKTHQKASQCHRSALEAIVDSEGLSHAKEMRKPDGQSYTIILYAVLLLLLGAAILYNAAAAADDYTIIADYCCCSYTYYLREIMIPPPLQKRTRRETITNTQHAHPGQYNMQATTIGNSTYSERYAQHTIPAMRPDRRPGERMHPEEEEDAHKYLGYHQGIPSRRQPPTTNRRDSTTKAHEHSTHGTQHSPSAQHNGNTRDEVRESTDSSRTSTPTTGEDSNKRRTRKRTPVKRRQHDAPRHSNGIAH

SEQ ID NO: 997924 - protein, 81 aa, Homo sapiens
MVGYEPASPSYSATAEATGIAGPWEADGSQVSRDRTTATSSQDNTSNDIPISNHTTPPQPQHAPTTHHTQATPQNTQQQQN

SEQ ID NO: 997925 - protein, 369 aa, Homo sapiens
DVLRRESSEDTMLQQCYGLEPGARIPSPGRPPIARPPITSSRAPADCPKAPAAASSASARTRRQRTTLPELAGMTDASTVAGAPGRYQPGHQRPAINAPDQPGRPLRPSLRYTGSHVLKRTPRPATDVVLRTATSAQHSFSITNVNEVRRAHHDCRTTRTATGLGRRKPQTPRGQPHTHHHRDTTKRNRSPGKQTTGPGQDMTPAPQRSAHALANWPTGARRLAPSKTHLRTQNTNWARDSQGSNTNPGTPLGPHTTAGPNRQHQYTRPEPPPQATGQHRHPSEAQAGNTSHPTTPGHNLQANPAQRNDDATTSPENQTDAENTTTRQNPSNSTGQHNCGNRDTRNVLGLGAARHTTIESRETMPATHP

SEQ ID NO: 997926 - protein, 92 aa, Homo sapiens
MDRMPDDCGSPRFYNSYNDTDSVWLNFEQVTTGLQGYVHKMLAGSFTESEEMMSHRADINYTGGQDQKNKIKGWSLNRVKYTEAICEAGDEG

SEQ ID NO: 997927 - protein, 146 aa, Homo sapiens
MTQDALVIICGLLALMYLGIYSLHYFQDVPDLYLQEQSIREPTRLTNESSIYHSNKSSNLRVGLDIRYDSYKLRSGNLNDIWEIAIQFAKKTDRGINIDNNLITIGYINYCIENLQLGSHKVISIPKDYKIDSKWLVVLFVGLLNN

SEQ ID NO: 997928 - protein, 259 aa, Homo sapiens
MRRVLQEAHNGGLCTCVWGHDWFLLILCEALQFFVALPAEFQGGWRVLTWLLNLTRRLLCKNAALLHRGCRGMRCIGVENTWDSGAPNLSSIGSLALCCNPTFYMSCGWSEKFREKALDSGKWPKDGHPTGLARTHHTRSRTANISRPSCAGATAEGATYVRPPQKISEIHRKSQIAQFFPPGGLIHLITSLCFENAQDLGDYASGTQGGIPGYLWAIVAEEAISFALKAHHGVGKTSRESPRGEPCFFGKPEPFKTLQ

SEQ ID NO: 997929 - protein, 212 aa, Homo sapiens
  misc_feature (18)..(18): Xaa can be any naturally occurring amino acid
MLVCCWLLEQFLGILDLXKCPARGLVAHVPPEKLLDGSRPWLEGLVCFPGRARMLLCSPAGLISLMSYDGVSERQHVIHLLLPGELASPMHALVSWVRVPVDRSADCGECPSVAWHPLLVLRWGVGPMSVVGDEVQTWEPGPSGSSMVHAIVRDFPPVVSRDCSTLCTQIKSSEIIADSSILNHKIGEENIHSIKENRNLPKPRIMNALKVK

SEQ ID NO: 997930 - protein, 113 aa, Homo sapiens
VQLTDFENSAYVVFVVLLTRVILSYKLDFLIPLSKVDENMKVVTGKRCCLAGNVLFQERYLQRWQLRRAWHALWQGPEHALELAAIGVHPHDAIYYHHHMGQEGVLSWTDPKF

SEQ ID NO: 997931 - protein, 130 aa, Homo sapiens
MEQILPLAQSDRTGGQRVTGRGQSLEACKSSTGPLPTEWTTLAIRPHESTGPGQSLVGEKDQNLISCQIKHPEGCGQRMLGDIAVAFSKEINPFTCFNLANFFSWQATFPTDMGVESPEDLNSPIDGARR

SEQ ID NO: 997932 - protein, 82 aa, Homo sapiens
APVAGVWGKWLRLRGGEKEKERLGGGQGVGWWYQRQREVGSVLDLWDHGRSLIIGHFIEDAGDCRGNHRVVNRLERKTRSGS

SEQ ID NO: 997933 - protein, 95 aa, Homo sapiens
VVAHARNPSTWEAEAGGSQGQEIKTILANTVKHPPLLKNTKKLAGHGGVHLESQLLGRLRQENGVNLGGGACSEPRSCHCTPAWKTEQDSISKKK

SEQ ID NO: 997934 - protein, 113 aa, Homo sapiens
GEMGCLTLCRPRVGNGMGQQISGVTGEGSTFRGSRPFLLGSPSQSSWETTGPSGTAQPGLILREYSTGKEDGVFTPLGVTPEIWGLRSTGTIMDPGPLLELSHTMWLGINQAL

SEQ ID NO: 997935 - protein, 116 aa, Homo sapiens
RRACEDEGAEPMGYSAEVYYDEGYPGMIDNGRRSASLEGRGRTSVCEMVVAERWRQWSRVPRTAQNDGIRGGHNEFIHSGEHEAKACGSKYQRIGCGRSGLVAESKADGIGRVRGP

SEQ ID NO: 997936 - protein, 238 aa, Homo sapiens
WLMPVIPVLWGAGVGGSAGSGDRDRPERHGEAPSLLKHKKLAGRGVCTPVVPATWEAEAGESLEPWRWRLHESQDHATALQPGDRARLCLKKNRPNLEQRLLSSWAQVNIALIVNSTDRHLCECSAMKAELYEHRNQHIHLALSKYISSTYYVPGPVLNKCMITSTEQGTSFTLKRSHTGTLKAKLSNNNNTTGLVTVGHSTCTVYCTCPGSSSKACRCLFITVTLHETSSTKRAIGD

SEQ ID NO: 997937 - protein, 106 aa, Homo sapiens
MQIFVENPYAARSSPLRWSPVTTIENVKAKIQDKARHSPRPARGSSLQATASLAQMAVLLSALQTIREGVDPVHLVLRLSRWVCRIFDEVALEPERSISRGLWTPM

SEQ ID NO: 997938 - protein, 263 aa, Homo sapiens
DSFNWYCGATRLLLTELARRWAYWIGESRGRLVLTGRHDRRAASAGAALLGELPVLLLVLLCLPACGVTVASPRCNLMPASFGKAYKFSRGYCNNYKCEESFVKNSWREGLSGSAFKGSQWSDLEEFCNRSCEVPNKAKFCILKQLISLRIIFPVGTVWTMSAVQVTEENLLSHKITAFRITMVHSSRTLYTPKSWPNREKSEWSDGCTRGLLFGAPISFLMYHRYQLFWSTLVWLSRQFCQGVTRCECREIIGPATQMPGHT

SEQ ID NO: 997939 - protein, 184 aa, Homo sapiens
EPVSVGCRANFPASMQTPCGQTAALPPLGPRRQWARSPPATRLLAACCCCVAPGGGARGSGDPDDPGQPQDAGVPRRLLQQAGARCFTSSTSGPVAQGATVLAEVQEGRAWINPKRGMYSSRGLHHRALNPESLLQEGEGRLGKMFCSSVSKKSETQTNINVTCTRLIENKKKTTQRITCFTSK

SEQ ID NO: 997940 - protein, 193 aa, Homo sapiens
MGGHTTRGNFPFGGKPFLRNTVGEGKRGSCAGRTLNQMLNNRTRVDTWNTTRVRRPTSQRGHPGCGHSGHENWARNEGEAKRLRNLVDRNIPAAGGESLRHNRAARAQGEPPKPPGCKTGRTSPGPKLWGKRPETLGTLGAFNDTTEKNRPTRSDSEAGVKSAYHKNKRSSTTVTEDIPDENRQRVHLGRRPQ

SEQ ID NO: 997941 - protein, 128 aa, Homo sapiens
MIKDFPLGDNVRLYHGPNFGVRHHKKQVLEQVAAPEKRIVCRWGGNPTIALMKPLLVVTINGHWEGSLREGALRGDRIATFDIVEPTNIEWAPYRGTTHLPRKKGVGVGIKGKLLHPGKVCKGYTGCR

SEQ ID NO: 997942 - protein, 148 aa, Homo sapiens
LTPRPAHPREAKHANSSKTEKRTARKKSSTTCTTTDTYRETQKGNDERARTQQGTAQLQYTPTYNTHLNTPHRQTTRRSLKHETNRRQITTDSTQKKEHAGPISKLTPDEQTTNKRRPNLSSSLQYATTPESARRSDASDRSVSGGRE

SEQ ID NO: 997943 - protein, 78 aa, Homo sapiens
MFGPPWDLNSTSRRVKRNTFPGDSRFGTRFITSSLHYICAPGGSEGNGKHGPKGEKQHGTWASAGGYTQLEPFYTKTQ

SEQ ID NO: 997944 - protein, 156 aa, Homo sapiens
MRVRGQMKCEGRFSAPEEAETLRTTYGANVERLAQRVRTDTAFFSGTHENVYPGFERRNGWLLGFPTCILPCCHNMGSPAEPHFREMPMGTPDKRKAPYRCLRRIVVQSPLRCHLVVEHATHRRHLLSKAHLVRQGSFKTQKTFRKSSRNATPLEH

SEQ ID NO: 997945 - protein, 101 aa, Homo sapiens
RSPFKDPEVRFVLGNGCDHVVRYSPRYVSAHGRVLVDARIGYCVQFTVSLRGVKDKTGCSLYGYHVEMSEVERDRCRSLRVESIVCVKGLKKALMKKHIAD

SEQ ID NO: 997946 - protein, 114 aa, Homo sapiens
AVSPDRRAHPQRSTWKKSLTAKKEELLNAMVENMGNREDPIPQDSFEGVDEDEWDQPETTYTSTQLCCHFHSANITVILKLEDTSSGTRTPVTPDTPAITRWELTNSSGRSGKL

SEQ ID NO: 997947 - protein, 132 aa, Homo sapiens
DRLYRSLADIEYQIPLVRIVEDDFCTINNITSFRQLQAWIIVIHSCNTTGKGSKGALGTLTRAMGDRTFDFAVSALENAYFSSPRDYHSSLMGTLIAFGLFIYSTVCLVFDDRGKALYEQAPVSSLRVLHVA

SEQ ID NO: 997948 - protein, 107 aa, Homo sapiens
  misc_feature (40)..(40): Xaa can be any naturally occurring amino acid
MKELSSILSVSHCIVSHLRRGMPVHLDSFPCIAPEAVKYXQFPFFCFFWETWVPRPLCCARGLWSCAVVGGVLPESQLWRNPLANLSRGVFQSHFLCVCTSGPFPPV

SEQ ID NO: 997949 - protein, 105 aa, Homo sapiens
MKLEDSNFYKDIPSVRRVSHKWTFPELLTPSPTLVTLFFSETVSSTYTKWPTFQFMAVYVAKLGTILPTLTHRPSATHGTSCLLLGPFDDTRHYTSLLTAQDVHY

SEQ ID NO: 997950 - protein, 376 aa, Homo sapiens
HNIAACCSLCNTVVVRDPQGISSMGGMAEIVVQTQTMSVSMFTGSWQLYTPAHSSISSRSLLVSSPPSTPTYRTQPDQAPHYPSLPALPHTLPYSPTTHPAPTPPTAPPLPTHPLLPAPPYPRLPTPPLLPPPYPPPPPTPPPTPPPPYPSPASTPNPQPLTTTPSAPHLPTLNNILPNHYPLPPPKPQPTTPHNTSTRTHHHTTPPTHRTRTPPQALDQTPYPTPPTHLPHKPPPPPSFTTNLHTTHLHNTTHPPPTNSSQPIPSQTLPPPPLIHHPIHHPPHLEPTLHHSLYRPLSPPQPFTTQTYLPPYPPCVPPTATTERRQPTAGGRISPQNALTHLLLRAPTHSAPPQTSAPSRAPPPPPPLDREPLTPP

SEQ ID NO: 997951 - protein, 123 aa, Homo sapiens
MSRRKPMMMENRLLNHWSSKQLRVETETVGRFLSSSRPAIFHQKGLPQGGEAFGKAVSFRRAKETLCPNNAGAPPLGFKITDSFSFKRYVRYAPRERKATLALVTAENFLKAWVRLSTVYRLN

SEQ ID NO: 997952 - protein, 86 aa, Homo sapiens
MIFPFFGLNRTTHRGTLTQIPASNFGQLTFLFQDSTDPNILGPTFGFRYNPRPQFSSNSQKYSPPFTSRFSHRGSVKGPFFLHFKF

SEQ ID NO: 997953 - protein, 122 aa, Homo sapiens
MKFAQTDASNRQRTERLSMIPAKHYHKAYYRPTVSRTVNSNWRGWHAHSAVNFYVPAEAKLDVLSLRIRGINGVTPKGSKGVARFFAFRQHLSMEPFAEAQPRASINIAEDLVRANIFAIGG

SEQ ID NO: 997954 - protein, 268 aa, Homo sapiens
MSAHFPLLSRPAHARALFNVVRRNTRVGSSLAPCNPPLVKHLRPFDNGGMLRTATLRRALTYSNKGVPLTVVETRPDVLYPINTPAQETRNTALAHHTESFPSTGCADAFGRNVRTLGTPCRKRFLSGTAKQQNFTQSGFARTSGLGAHNTRLAHNVPPQATTANPGETITRSGQLIINPAYNSRRTRNRSPLGARTHGLTCNQAIPRTTLTLLLSINRTPIADGGVTKHAFITPPSSKTHSLSREYGAAPLSRPQENHSASGELHAT

SEQ ID NO: 997955 - protein, 138 aa, Homo sapiens
MLFPMEQVRLPCPELDLGDFPERRQPVPSPLRSFPRLRPYAATRRICTLPFACPAPCDFPCLRLLRPPPRLAPALFNPQEVSMYPHPSGRTMATCGTCGISTANTTGKPSIVQISRHPVVAFHVRGSSLHQRYLLAHH

SEQ ID NO: 997956 - protein, 38 aa, Homo sapiens
MSPATTFFQLAHASITSPLPLHTCDPSPNTTRRPLRPL

SEQ ID NO: 997957 - protein, 126 aa, Homo sapiens
MRTTAPILLYPVYCVTRGPTDGQPFDRNLDVCNPLACRRWSRSCKHTQAFPCPRPVITDGSLLLPFGASFLRDLVLYRVHLRGRVFYVYPWVPHGLWSPRLIGFVPSRPFLISISLPRSLAFAFYA

SEQ ID NO: 997958 - protein, 66 aa, Homo sapiens
PGTTGVRHQAQLISGVFGATDGAFTNSLAQYGLRSLASPCSKHTSGSQKLLGYCSACSHHALDSLL

SEQ ID NO: 997959 - protein, 113 aa, Homo sapiens
AVRRSRVSVSCFNSVCDGTDPGHSLYQTHRAVHPHISYVRVVNIRVHHLRRRCSWLSWDLASTRTVWIGSFLAKNPNPMKATPEITVRNLMSSRNVEWSRPVTSTPGGELQLH

SEQ ID NO: 997960 - protein, 152 aa, Homo sapiens
MHSPALVRRTTASGSVQGLASRVDDAPRVRLPLHRGASPGTRSVTGEHGSEGFRMMVDEAQSKMRHRSSPVSTPVEHGYRQPRLVTITGENLGYSQLFLHNVSVALLASTEGMQSPGGVADPARGTRTCIPHKKVTRTRLDEKNDDPGIHWF

SEQ ID NO: 997961 - protein, 164 aa, Homo sapiens
IAILKLRDMRARVCRRYRWPVSSCSARTLFIIWARRRLIRSRDSLKEFSVMTLPYIQGNINGIVEIYLGIANGVGVPIHSDDWEVVTLLGENLCRTSNRHNLVGGHLEDIRALSSYWDSALIYIHLVPQTCTFSPLNWPPRWSNCLDLGLQPHWWSIGPSQPNR

SEQ ID NO: 997962 - protein, 276 aa, Homo sapiens
  misc_feature (43)..(43): Xaa can be any naturally occurring amino acid
  misc_feature (174)..(174): Xaa can be any naturally occurring amino acid
DVTVVYKSLVWRSLTHRRDAQARLGERGITDLPYLQRIMPTMXKSSYARHRFPFRGRHNKCGAPMTDARQIRRLSYSEATGLSVLVVGETNTYECGKRLDSLSGQHHGGVNKPLTVFEKRLAWHSIFTRRRSVEACRSSTRIGWTLHQMTDVDGSESIAIGATVMDDTAMSGRXSWLQCLPHICRKAIMSDQRSEDISMRSRRVLKRSNRCPCLCHQWSCYGVPSRTSLNKCYPCGRHGYICIHLSLVTLDFAAQVSCNFTRELWRGHEYGVGRKT

SEQ ID NO: 997963 - protein, 411 aa, Homo sapiens
MAHPSAEQGSGTRRHDPILTVLHLSRAESGAPGLHVQARGHSSEARTHLGMSAGSCDHPGKSCDPQCVRGAFRLTEYHLYRRTTNQTSWVYTRLQEPGNECASSPSPSITWSTVQGRYHCQYYSHNHSSEYSDPLELVVDEEPPGKTDTISASAQDPVRDPLAEGNCDPHSVSSQVGTSERGYQLLVYTGTRRTDRNSRGKILKLPLAPLHTSECVTLGAQYDLQIGAPEAAPNISTRGVRSKGRTIDFTDYRNFFHVIHVGTNTPTVESTLAGLARLPLGVLALQDTPRHLLNRTRHEDPLRVGPPCGASKPALKPPPKAGVLSVELSRATTKHRIADEQDIQRVCDGENLDNLPITSDQHGDLRQNPRAGAISCMDQRGRRTRAPDMYAHLHSELTKTVKKSKEDSNSD

SEQ ID NO: 997964 - protein, 104 aa, Homo sapiens
MRAGREVGCPEAPARVTGPRRSSRAAWSCAGCVGCPGPTGADWRLPVGRHVRGRRLLALLTHRVRLVVQVAGWRFGPPSDLGQSAGGPGACCAHPAQHSMREKT

SEQ ID NO: 997965 - protein, 307 aa, Homo sapiens
MATTSTTGSTLLQPLSNAVQLPIDPAQCMIITQHDHYFGLRNFTDGHVPRRTEELTSSQRRIRLLRHAKLTGTYRSHNCNFMGILEAHFALTKDYITSIRRQIIPYHTIWCNLAHAETQYERTEPSPNTAARPEALTSVGCPCTFHLNHLYTHYLCELQPLLAAIFKLTSFVANNSIIYSWKYPPPYRPATDPNILTFCIGRYALMPMTYCLHASRHSDAYCANHWQTLTVRTVNLCKLATLPTRLRAVSTRLLQAVLPCTRAERSPPSLLASQSAVEVHAPPYGPTIQVPSLRPLHERIPGHMLSV

SEQ ID NO: 997966 - protein, 226 aa, Homo sapiens
LVPGVCARGPPCRDHERATTGACTRQMLQALTDTVNRLRISSIQATTAVGSEHPTVMLQRRRDHGVSHLLSTSMRYKCQDRPGESRTMYRYCASPMVLMSASSILYAVWAEAGFLAEAELLITVTEGLMLLNFVTVAPEYPESIVFQPSVASLRHPWAMGLAGPLDEDLASTARSTSTKVQSTVVYCLLGDGELSEGSVWEAMAFASIYKLYNLVAILDINRLGQS

SEQ ID NO: 997967 - protein, 314 aa, Homo sapiens
MCSRLADSNVPLFATIGISSPLGGIPEGAWVATDPTEWDIIALCTGVPLHSFCITPFLRGGRNFSRWKGVFPRKFTAYATRRFPQVCEKRTLFHVLNHLCRKPMIQGNLRYTSSFPRTLEHQFPVFTRVGTPQLSPFKSQQRADTFVRMSECLENIRTNMVRRDTLEMVSWRTTLCLAHHSQLERALFTHLLSNTVFPLVHPTQYDARVPYTKNPTPHSSAGMIYTASRVRNNRRRYPSNLRGKHTLARRLTALQSADTVASTVHMPMRAIHRRSLWLANRFSQFPAAVNKHESRRLCNDSNPTYRGQSVRRGT

SEQ ID NO: 997968 - protein, 228 aa, Homo sapiens
  misc_feature (180)..(180): Xaa can be any naturally occurring amino acid
VQTPSLCSSRGPEPCRCDTKERVQLLQKFTRSDEIAIRAAIGSSQRNVLDSVLGLQWISVRNGRMEPRCIEHLTYIGLTLFPSYSMSTQEAVFSIVPIAVAKGVVGKQSGDGVLLLCEIGAKVHASSIAILFPGECRRIAAYPIDTPNVGREYMDVLEEYPFEIEYGSSSESRSYLGSDXSWNRYGLVRSHLCARGRGRPRYTGDQSTPICSLVHAMKCHTEVVRVEL

SEQ ID NO: 997969 - protein, 112 aa, Homo sapiens
GGLERGGGNQKRLVAAACVPNPLRAALATTRVHGVVSERSGPADCSDAWAQLPSALGRHQGVPARPISSKSDTMEAHAQGSLETEPSAKEQTEDAVASADFSSDALWRRKRT

SEQ ID NO: 997970 - protein, 142 aa, Homo sapiens
MLVTSALKCCMCATPITNFNLRNASQNVSPFRGPKQVEYLNAGRSTDHSPRELLAWENHYKRPLCGTHHKGPLGASHLFYRHDKSFCATKTFYAARGAPARARIHVLRTPEGLRDLQRRTLPCGPHYKRGVGISNHPLVTPI

SEQ ID NO: 997971 - protein, 308 aa, Homo sapiens
AWGTPEVGWGAEWCDRRRSLMRRFRAPRSVYCACSPLMTGGPGSHFTAVSASVYACHFNCTCAPRGPRLCARACCRWAAARSTTVLIAVSTHTRASCAEALVCAPGSPAAFSSYPALQRRVGSTALVLHVPMRLAETLSPLAVRLSGCAVACLSVCHDVPLWTACPGRLLCPAHRRDVLSIMGTDGQLPPGSPWATCAPTAGMEALRVIARTGTPHNPCRQTPCTAMTPNSGRDPSPWIGPWLAARGPRILVWRHGPPDRNGLGSRPWWTLIWHTVWRGPLFEGRLSRLAGHLGVLPPGWWPPFVEIP

SEQ ID NO: 997972 - protein, 355 aa, Homo sapiens
MACPREEAMLSCIDVVAKAFVEASDEKKLRAEEIEADSKRPEIPAFEQSLARVPFTCGLVIEMLKTTDRRRHAAVIETWSSPTGCDNDEERGWQGLCTTCKKNTTTCVVVAQFVRLTCENPIRGPPGLFKHLSFAAATSSDVNCKKAVSHNTTSGTENPKARTGPLTNDTCQAPWHGMQGMRNDSHAGTDTDYQDSNDKKVPGQSTYRCPFAQHPQNDALIPSCGHEARPHPRWDDPRMNRDGTGWPRKLDMGPRDGFDSSRVPVKTKCGGTDADDPTSSEMTKGKTATKGSPDVGKPNEGWPRKTHRGLAPGGLEWALAHPGRVTSLGHALAQGYITEWVKKRLKLARNYQDES

SEQ ID NO: 997973 - protein, 162 aa, Homo sapiens
MFVPLNRRHAGSPIVTNTHTLFTVQDIGLKVHNLDGKDPGLTFIAHQVETQISWTSSSPYQNVELTDTKLCGGPTRHVGLGCLLHIENDQAIGPLIGTFDFYPWLRPLEAPHTLGLHLPKIPERLPLSFYRHKRKANPIPRNTTIIGCRKSRATSLMFQKPD

SEQ ID NO: 997974 - protein, 121 aa, Homo sapiens
MEGALDLGGLIGRWVCDTSTVLCFSSRCGRSLSLHSLLDSVGLWREEPGEGLGPGHEVPFSSLESQLRSLNSVPHFCVISGSMSRCWWAQEPVCNEGATRALDPAACEPWVPCRIHSRKHL

SEQ ID NO: 997975 - protein, 325 aa, Homo sapiens
RRGQHRTCMKMDVGSKEVLMESPARTTSADSLGVRNWHFPCLPSAIVKRPFRNQWTVVSGSVIYVDDCREPVLHVVSKMEAKNTYRYMVLEMSIGAPEAPVKAGARGEPSWLPILLSSLIGSTGRSRWYDLIQVAADRSTSPSPWRPAGYMDEDSSRGGIAQILRLSLEKVHDFQMVLLCVGQVARCHNGLKRGTGQRGGEECRCQTTASPEGGNPSAYTWKQWTVDDSTLSAGRRVARGYQHAKGTAVRVKQGSRGKKPQGVQGRRTRDKRGPLDSAPARRAHEGWVQGTTPGEEQGPGGMGGWSEKDGRRAEVAAQGRGSPDH

SEQ ID NO: 997976 - protein, 98 aa, Homo sapiens
  misc_feature (67)..(67): Xaa can be any naturally occurring amino acid
TGVCENLTPKSQNSGKRKMISYQHVSSSDNVDAVQRPRILLASLTHTNSAGWQSINKRSQSKILRRXEDMLRLGHKGVLQRYALVSLDYKPGRELEVG

SEQ ID NO: 997977 - protein, 196 aa, Homo sapiens
CRRVRPVPVCRTMESYHKPDQQKLQALIRSYGQTVLRISLSSYGAPLQAGSVHIPTSCLHARAEIMAVLFFHTMRYKSQDPRNPHNDRVVLSKGPLQTSRSSTRVWAEAGFLADGLELLNRDWKITPPHFGLGTRSRNKAFTDGGHVAPWATGLGASLEGEAYTGKYFDKASYRVYCLLGDGELSEGSVWEGMVLR

SEQ ID NO: 997978 - protein, 135 aa, Homo sapiens
FGVSAPCGTEILAGVVITGIIDTMKVTHSDWLSRLPLGVFLLAYLVDLAFYDLVRPGVRSASWFRTRCMLVDSCGGHPQGSESRTMAGNLDQTSGSSRQSLRLKYLAHDPDLQVSMIGIDGSVVDVACWTKYINA

SEQ ID NO: 997979 - protein, 321 aa, Homo sapiens
RDRRALSSPPLSRRRQPNAPRLIRVRHAAPGVCCVLAVVVPGCAPTAPCRMDGPSVLLLRNNAGFAEASGWPTRYPCFVEFVCLLACGPPARGLWPLAVLLIGRMGTAERPERFLRIQEVSGQKGVGKRAQLANADWSLNPCGSTADNRAVDGEAELRQHIQRIAYQGGKLRKEPDQGAFLSPPTWGHSLLTNGVGPTDGKSAEYAPIPLIAYGLGGEKSANRGTPVAVGKTQAHLGVFATRVGQKPLPRERSPFWSRRKHPKGMKALGALVPIPGPYHFLKGEPVVQRFRDLPLTRRARVVPWPRGPKHTCGPLQTGAIT

SEQ ID NO: 997980 - protein, 99 aa, Homo sapiens
CWSAVAGSWFSGSMVHCCLDLPGPEEYPASQVAGDRGCAAARCSGYCFSVSVEYRGLPYVAAELVLALLDLTVMLPEYGPPKCEGIVGREPSTTQALSH

SEQ ID NO: 997981 - protein, 144 aa, Homo sapiens
AAAVPRRADSPGHVPEILGNPGRAPGTAAGTSGPVAVPGRSASACPGEEGSTLCAKASTSVSWHVMESAVDGTASVSWWRSASYPMAVVTVPFSTSPATRPPGQRRSFRGPVRARYSHGRYLIEQGLVVKATVRNLTIQLAYMY

SEQ ID NO: 997982 - protein, 242 aa, Homo sapiens
  misc_feature (207)..(207): Xaa can be any naturally occurring amino acid
MATTGGRAPNAKVWVHDCDFNGCNPGDKDNGRVNVTDQDENTERTDVEATDRATGGDTTHPVSGQGHPHKPLDTPNNGTRHNRLELPGRAADKSTHHKQFAHGDTITSSRCTNPRCSTHYATEDIKQHIAGIDTTCGGIYAAKRGTPQTPMQQIVCALDERVNMRKKNTTGYKETANTQSLITGATLVQECDTHMKMSDASYQYATXQSTPNGTADNPTALFTEVYVVAERCMRSTLKHNTK

SEQ ID NO: 997983 - protein, 280 aa, Homo sapiens
FYIVFVGIGTFKYHKSGVGPHLSLPGPVGPSPIFCLMYCARGTAAVGLCRDARRACLAPEMSLCERKRASSQATHKSPCEQEKSGESPRQSQQAITEGRVWDERERGERPDDRRKQRTVLSAVDRRRPTIVVVVLCTKCRPLFYTLVVVVVDHNGTLVVLITRSGLQEGVLLNHMKQQLPPVGHYFKKEGITHSRVLLKRGELIAGGSQKHLLADEVKKSGRKGEMQQKDTRCDPFIMVLYAPNPAGEFDGALFIPSPLGTNRRYTPTEKKGAKNKKDTK

SEQ ID NO: 997984 - protein, 98 aa, Homo sapiens
RDLASESDVDKAVWWCAMIRGNDPDNSVDASSDRILYQEAEEFLGTDSCLGKSYTSEILDSCKRTPSMWLIWLASSGPHVDRSPSQSFLPKDDEMETR

SEQ ID NO: 997985 - protein, 95 aa, Homo sapiens
MACSLMTCAGVRSGWALGLTMCVQALLWPLKGNTETRSDVQLPYYLTRNWERICYSSGLRFSHSSKHVANRNPAVKRTQRGHSWENDHYQPFKAT

SEQ ID NO: 997986 - protein, 154 aa, Homo sapiens
NIPEVDPSPVLMGVDRGTSLGQPLARCSAVSGSVARSSPRCDFVLLTFLRDSGLWTRGLYLRRTIFIPESPVSQSSVVGSMVLYTLVAKNLSLVRQSDAICVSRSHFVCGTSLCDNNDRRKAFTTNTCSCVAIDFIVDWYQQDRTQSFVGKVEC

SEQ ID NO: 997987 - protein, 70 aa, Homo sapiens
AKRKRRGGFAVQAKKPIKKRNMMRSRQLSGTPQAEEVDGRREGPDPRPRLRGKSGINRGTGFVTLFFQRK

SEQ ID NO: 997988 - protein, 112 aa, Homo sapiens
VAAGIARGPVFGQGYTSSCSSPARTTSWQASFLEDCNVIPGEIGAQLKLLPMNASDTGSYRPSSVEQVSRERKGKGKWRVLQAVERGLEVKGARETVFFGLGKLLEIGVKTV

SEQ ID NO: 997989 - protein, 292 aa, Homo sapiens
DERPCERVWGYKVVMSASSGSGLITDYVLICVADSNPVQEPLAGLSVTIWELTTLLLSWYVTRSYHGYRSKHANMLLVLLNTAGATVCELTIEVRHSISVPPLNVVKDPHNCRTTYAWCVTFSLAPLARGLGGGQNGVVGNAFGVIEHWDTPCGVGFTSGGFPHGANFHIPLMPYGGAIHSGSFHGLVVESGNVGNRKLIATKNARNSMYPRCKSFSGVRYAFVCHFGYLQVVRGLHGHRFAFGKLAPGKAFQGLEYSTRRGIPKTFPSRMCYLGGHLTTVAVEAATTGSCE

SEQ ID NO: 997990 - protein, 308 aa, Homo sapiens
SFPASLEKLGNVATPRQPLCMWTFEQGLGAWTLWKGCALQPATLPTVPCSPSLVHHHPPRPARGPRRRAPHPAPPTPTPDTSPPPPTAPSALPTSRLPQPCRPHPTTRAPAPPRPPTTHPPAPPPPAPPPSPAAPPAHPAPPLLHRPPAHLPRALPTPPTHLPPPPTYPPTAPPPPSAPPATPTRPGPPPPNGAPPRPRTTPRPTPRQPPLPPPLSTPLPRPLPHLAPHHPPPPPPPTPPHPRHTPRPHTAHAPHHDPPQPPRTPPLPTAPPRPTPHPSPPHAHPPHLHPSPPHHPRPPHRAPPPPPR

SEQ ID NO: 997991 - protein, 302 aa, Homo sapiens
KERRMAAGTAVGAWCAGPQSVGGSSRCSKHHSPDWRRHWLLKCTRVCPQETTPAGWNGNLEHRPDRSLEGPVIPSGGGPMGQMWLVSIHQRSPSSFRPVRGSRMTGFFRCQATATTEWQQADRSPNYLSSVSTSIPGDSHEICRISGLLTLTGLVVHQLQRGETMLSSAGQSLSLDRALFTPGHFGTGERPHLVTLHRATREAIIVELGTPGPTDDHTVTEPRGHPLPATRCQRIMGNPSTLGVKTPPCTPEGTEQQIPPASHKALIVHACKHFPRQPIGTCFPHEHNLVRHLYEHQLQRQF

SEQ ID NO: 997992 - protein, 215 aa, Homo sapiens
MRDQLHLAPKPPYHTTPTKCGRPAATPSTSSSTHEPAEDLRPHRTRHGPQPPQKAPRVLHNPTQHHRPHTPSRIRKPTPTPRPIDTTRRRGTTRSGTQQPKGGPHTRTHAGQNGEKRARTNEYNRGPQPAHDEPGPANHNRDTPPRTTPPPHRARKHTIHPRHYVTQHNTTERAKPETGVNHTHNRIRAPPTQANTKRPKAPRATRPLTPRKHQP

SEQ ID NO: 997993 - protein, 374 aa, Homo sapiens
MPVARAVGPGSLRTLQRSPSRSVPRGSSGMPLVEDPVVEVRDLPVQFMTPIMLTTAGLRGMTAVSVCMHQCPRRVTFEFMLRVDHVARGYDDWADSIRDSRIRKRYVAVALDSSGVNDGLVNGESMSVSVPGQSANLVRAVLVRSEKQVPEHSDMVLEACPLGIVKHEIGRGGYGNPEVAYYDKEFWLCLDRYRTDVVRKGNRDAPYVEVPLDRKIASDLGFLRFQLKYKKRAPVRHDTFGFDGHFGLRECEPFKRYTQAPTIGRRRFGSERPGGRALSEFAEKCGELAVDRGRFSRVGTKRIRRICWTRPLGTKTKEGFARMGRLPGADSDEEDFAVVMTLWGKFRRPWHTGYMPQFGEHENFPMCYGFVSPG

SEQ ID NO: 997994 - protein, 105 aa, Homo sapiens
MVESVPSVRDDGTDGALLLWSWILACVPGLHWNVFSEDAATGPGAIESVTMQELSSAYYPISRCHANHMIARRRPGVAGREYLLVSVSAWQHLVAEREDLLTVVA

SEQ ID NO: 997995 - protein, 133 aa, Homo sapiens
VDVSCFNSAWTEPGRSFPSPARTPIVQTLRHSLRPAPSALPHLYGGALGAAGILARPQLGQPVRPPVRCNLALCVVLVMDLTPRVRTILNCAELKTAYRRHGTFMTDPKHDSSPGVTCVAGLDSRPYPIALYS

SEQ ID NO: 997996 - protein, 217 aa, Homo sapiens
MYTLVVRGNPVRQRGVWCCNIVLAEKFGSRGIVYSAYIGWVEQRLMRLWQEMVFQCETGVLVYIIREKWGGVLQNLVDELFLTTDFVSNADTSRNIYREALTRERVLIGEKHNSVGAARCMKIKAQVSRTKNLGGCSAPEEERKGAQTTGPSVATARAGPRGKRGLRNESGDYCRRFGVQTRGVYGEHTIRVSPYVSFWHSAELVASNNSRRTRCVL

SEQ ID NO: 997997 - protein, 184 aa, Homo sapiens
SENGAERRAVSPADMESELTTRSAMISNGPEEEHPSCDALPHSTCVSALSSPSHDYVKSADGFALSETDPAMTGTWAVMTSTRMVTLAYVCDLCETLGHGYRIARTSPRSYVVINVANSRIVCAVFFHMDTIGGLLTPFRGPSREFLRGVRVYCHGDAPGQMNDGVRRSKYTGKHVKEWLTGWK

SEQ ID NO: 997998 - protein, 316 aa, Homo sapiens
MSSDEFRLVSTSSRDRLVSLLDGPKKHQCMSTSAHSRVGIPESKTQDSRCLLGRKLVWSHRIFRRCRRLLVLHFVSYASSPGTDRVSVGSLTGYPCVPRAQLKGSRDRACLEVWGERHVTHDVEAHVSGYYVAMNYLDTTSDAREKDTRLFVQGVIGVFIELEDRSTGDSPIWNIAEVDRCYACDRQDWVGPRAGERMTERPQAWLKRMRTTNLSTYLSLLARGPVPAGWFRTKLVRHILANSLERCIVVSARETNSCDFLDYPWERWSRKWLPSVMVCKIVVPQTGWHQVPPFLSFNGLQNESLGLVWGRRDLHL

SEQ ID NO: 997999 - protein, 222 aa, Homo sapiens
  misc_feature (85)..(85): Xaa can be any naturally occurring amino acid
MGQEGIPYCGRLKAQMQGEAFASALEVQPIGRYGYLSSAKRGDDRWTIQFVVTLHPILTNCTLLLCAPGGGHHRYLLDREGRSRXKPPKGANSAEYSMTREIIGLKSVSKHAAANVTRLGYRRTAAEVPLVTHFLGLVTTLSNAVNWALPVERGIYPKSWWRQSDREGVSVPPAHDQSLRSGEPATWLGTAVTGLRSLNDPQREAAVTKRSTINGQKRGRNP

SEQ ID NO: 998000 - protein, 373 aa, Homo sapiens
  misc_feature (192)..(192): Xaa can be any naturally occurring amino acid
  misc_feature (313)..(313): Xaa can be any naturally occurring amino acid
MGSGTCSSEMTAMESCDYHLIEALQASETVVYAPSYALSFLLVCNTCCMTTRRNTSTYSFELVHLVSAPPSERPGRNPFNSKKRTICTFSLRGNQILRWGEWSRDGFVPHRTSGTRRRQGCMRIGARKTCGRTQTTWWDKSLPRETGKTLVLSEGTPVGKEIRPKIDIPYCKSRTSLIMTLRNGESGGVSDXSKTAIKYMVLQREVCYHGDREHHAGGDLFLKSIGNGTSEGQLYSRRNTRSLASHRHIELEPTVRHQKVSAVSQQRVENLIPIAHETRCYRPACYALVVSHEQAAEQRFPEAKNVRARGIRXAHMCGTVSNSWLRFRAGRNSLCSSWALPSDKKYRGVWQTHNLRNFAVWGESAPPTCVLFW

SEQ ID NO: 998001 - protein, 139 aa, Homo sapiens
MVGVNGVWSYWARGQSWSAFILWYEWIKLPSMTPVIDLNYSGLYMFRDMIPPMANSMETSEADESVKLVSQWKSSFTIFHEAEITSKHQVGLMLALSYLDGVSHWTSFYRPCEEGLGHHVCTACDADKGVHPFVLTPPS

SEQ ID NO: 998002 - protein, 219 aa, Homo sapiens
MRAVKPRCYGDETRVLRRRSDLLPGIPAKQGYVPHQWGHAMMERRQWGTTNGLPGDPWFAPLAQSQSVDNKRGEHPWGQPFPVQYVCMGPLRSIPKVPKARRTSTREWLEIFPRGQTYYVQFYKSFRVPFVGGLPEEFDSENWEREQDLVVPQGTQNQVYPAHRANLKAPGHLAEGDQFKGRKAFAWCSNRGDWPGGALVPRREAEGGHRRLLDHGGEH

SEQ ID NO: 998003 - protein, 121 aa, Homo sapiens
MTSGVGPAGGRGVAAECKADARRGGDADRIWLPSSWGPGVGRYTEPPLGWRLVGLVRAPMDFAVSDFAWRVGGKNKGGYVETGQYRSEKELIAKTAKKWFPNGETLWVVKETIFSFKTVVV

SEQ ID NO: 998004 - protein, 134 aa, Homo sapiens
MLSVDLMTGVWHEEEVIVVTVSAQRPDVLLPFYEYLATGRDSVGASQRDPRPTVLGDVAAVVQSSRVRKAWAGPTTKCHLPDGGGDLSSLVVRIKDPLIASDEMENLKRVPHLEGALGYGYRCALTCAAHTPVE

SEQ ID NO: 998005 - protein, 264 aa, Homo sapiens
MSRRIKREYWAYCPWFEAVGTVTYRHTTCYENKKLYLSLSESGLTSEYREEGNQRQPYDIPTEGKGARSSSRMWMISSVQILHTVRGTRMDYLLRGASREILRKRDDRYIAVGHLSRAETDGQLQHHFDMHSDWNELGRPLEEPTPWPMNGMGKALGSEEAFVAIFGFRGDTLVARAEGKIVGPFNRGPNQCGKEATYKRDLPEVRSKTHLIGGTISRYAPKGVIVAVSGATFLAKAVVSTRGERGNGKSPMVAITNAYVAVVS

SEQ ID NO: 998006 - protein, 206 aa, Homo sapiens
MGNIRGVVVSTADCGGAIASQTYFVTVSDPAVPPAGGTRVCGGISWGEWTAIVRAEALGTRGGSKVVRRCPRERRSSLPCKDEDVLAPGSPLALFRLIHLGLAQSVHEYLECVLAREHLRGSTGSCTVLLSSGAVPGVAHAGPVCSRAGCPLEEDLAPVPYVQRVTSTRRKDESRSTRLMSSIPLDAQSYWKSPCMVAPQSDSCVS

SEQ ID NO: 998007 - protein, 141 aa, Homo sapiens
  misc_feature (34)..(34): Xaa can be any naturally occurring amino acid
  misc_feature (40)..(41): Xaa can be any naturally occurring amino acid
MLSPSGPSASARLGAPQRESPGVLDGAVRVCWRXPGVRRXXAGGRAQGCKRQHRKADPDRISVKSSARAVALNEHLAMGNLHSQDIDPKVVEIVTVPAWSPILPPNIGTLNSPQLKEWEETLVVNPRSPPVVQKYLVEIGY

SEQ ID NO: 998008 - protein, 337 aa, Homo sapiens
  misc_feature (76)..(76): Xaa can be any naturally occurring amino acid
ALPWSAQRGGSQNVTSVLRYPGKLGQWPGRAETSDADARRLYNTSSSCAQQVATHVSAGDKMPPDVGESGYEVDLXDAGRMLELSPVHSDLKILRHYRVDSRPTNGMPDVLVDLCDLPGGTTSGAVRLRDYWLLRPAWRLHGLGLDAGASRVDRSRVPSQKAYRAESDYPWIVLYGSCTDSMRIARILVESQEPFLGEAMSSHARIGGCSTSRHLSHASETLLVVKGAMRDSVRDLVVPWHSPCLLKDIADREVNESSNAKSPRKTRCASDVKSPRRGPPRSQVEGGACHALGPSVRPVPFFRVKRRKTSVRRGPCARAVGISCPPWAGERRTGLGP

SEQ ID NO: 998009 - protein, 110 aa, Homo sapiens
IIRALAASRSRLPAAPLLARRFRSPSPRGSRSDSDQQPVAGKGDRGGGGQGKRGCSGGSRKMSGEDEDNWSKAIAEDLVVTSVYTMGGDIAQQGTSVLGGAHLRSGVSVA

SEQ ID NO: 998010 - protein, 244 aa, Homo sapiens
MWLEILLTSVLGFAIYWFISRDKRGNFATVKMGEWGPGTRSAAREDRQRSALSRWKRQMRRSTDLHQKDRVSSVLTPSLWRDSLLPHSGVQAPTYLKNSHLLAGGMNLTWKKQVEILNQIPSSFKTKHGMGWTVHLHPREAPPSVEPEDIPRRPLLMVHGWHRLFLQSCYKIMPLLTDPKNHGLSDEHVEEVDLPFHPGYGFSEASSNEGVQLEWTPTGIFYKADAAAGLPGILQCKGGGPGGT

SEQ ID NO: 998011 - protein, 318 aa, Homo sapiens
ETLGGIKLRGMVYRSSLCIENSCIAAHDQRGRYGTLFTMDRVLTRPMGTVMDVLKGDNRLSMAGSCIQLCKDLTGDPQPWKESTNSLMLPRNEEPFRALHSIENGSETLGRCRRNLPNRVRESTTVGDEILVSGRHSGPWCGYSLSQGDEAGSHAWKNNVVSVNKEPVAEPDIMGSIMAWSIVISHVYVTVSSTSRTSGQEGMNLAELCDLRSSDKASAVTRASQEVCSNYAPGLSKRYEETDDCIETGKAPTGRGNATNGLRISPTQCARHELPPEDWCVTVVPEKYHRISRPEECTNGPSDQDVKNGRGVPMRGND

SEQ ID NO: 998012 - protein, 461 aa, Homo sapiens
DPLNMGRVRTKNREEGGPEFIISSKYYTRRWATTSHTNNAAWCEEIAIDPSNELRSKIAGYVDSRSDECELQEKAQLEMVFSSLEAARRMEHEEQEETKLIVTEQVSMPCDQEQMRSDSKITLTLKGKMPASLSDLTARSVANLSRVTVSRVSRMCGMCNCVQYTGSCGVQHCDCGQLCVSWYAVWLLSITHDRQSCGITPEGRKSTIDKNRRAARGYHLKVPAELSRSAKRNGGLYNSVAIGVHIQCEMCGAHSHDSLVSAELFETIVCPVEVSRKTPVGSPPNSLLHLESIRPTVIYRQERPRPHVKKGHSPWQTQLEHDVELVPPPRADTYPWGIHCRGVTTQPKTRRRTPAKIGAKGQRHRTENARRRVTKRQHRSEGVMETTAEGSNTPPEERAAQETDTRAPNEGPNRLDMADRASKRSSRDARPTVDIGTKTEQNTHAHEKRKALNPGNKRKTQ

SEQ ID NO: 998013 - protein, 129 aa, Homo sapiens
MRSKDTRAVCVGENPKDEARTPTWRGAVVGTPKHGCKYLGRPYQEMCPFASVESNRLNGTVLALGIAPRITKLNGSNVELKTGAPTEIIRRQGSTQGEDRGEKAREESTPARVAPIVGSRMLPRFTHEA

SEQ ID NO: 998014 - protein, 259 aa, Homo sapiens
MMDPDMRRSPVSHRPIPGRCEVQSRDPDKLDRLHSPRSTGSWMSEGRGQSFEDDDGMVREKRRVRLGETVHVYRRSRVCDRRTKRDLAPRRATVGHQNDLAWEWLSIATSGSEPWATRHEVASHPVNAIVDSSQNNNWVRSGDLDVRHDTELGLSHKRIEQPRGKEPVIWELIPLARVNMEEATLSHCEDYCAGRIQMRLRIGKYSSYPEKTGGKQGICFNPYGGTVEYGKGSALWPASERERRREFCPRYESAKYACV

SEQ ID NO: 998015 - protein, 281 aa, Homo sapiens
MLVLAKDQRILSDVVVPVDYRYCGMVLPVDMGNDELSKNEDSTACGVTRETSWLHGIKRRTAERTMGTRMDIRTWRGTMRASGWDQWRSEHIGSGPSRKRTLGSSRGSSVSEGKRAAAVGAGIQSGTNRMQGQKAPIATDTLPLVVPPIASYRREGGASDADFVADSPWPEGDPGFHAYATCGRRNPSGSLFWTDHNGRGFHYRRRMQTWWSNWNPWVHWLPAAWEPLQHGVLYSPLGSQKGCALRIRQKIERIKGASYASVANKGLGLKFRGKGMGGDKI

SEQ ID NO: 998016 - protein, 148 aa, Homo sapiens
MEDTPLVISKQKTEVVCGVPNQVVCTAFSSHILVVVTQFGKMGTLDLPGAQTGVAHVTSRQALVRRADKNVLLGQDEPLIHGLVLREPGSVLCLKKLETETVLRRPWTVKDKSMEGLKALREVIRDVPGAGDRGRAGRRRSVASARDT

SEQ ID NO: 998017 - protein, 203 aa, Homo sapiens
MVVLGSGDAKVSQGSYVWGTSTAWGRKDRERVLRIYQLGCQHSPLDDGKSAINAGDAVKTKGISQLYHREHSSYKMTVTVCAWWIADALKGGCRRRDEAERTNVCMDPGSLCEVPYPCEDRDYNFAGGPRIFQSSMNGCSFIEYDPRMNAGAVTLYDMIPMVQTYTCPITTRGTVPQSSGLSYPSMCGFVGKERGNSWSYIHS

SEQ ID NO: 998018 - protein, 282 aa, Homo sapiens
APTACDPGERLRQMTRERGRALLRPDLRRDLGPVPCCAAPPSVRARASQGPRVSMRSRSADLRWSPAHAGRVCAGSCLAAGRVGMPLRREVAVPRRCRAHLDPGQQRSSWAWWAPTAAFWTKYMNHLTVHNREVLYELIEKRGPGTPLITVSNHQSCMDEPHLWGILKLRHIWNLKLMRWTPASLQTSASPRSYIPLSSGLGKCVPVCRGAEFSTQSNEGKGVSDTGRHMPRLLRKPEAEQTTMALYRNGGSTTQATTHNKGPQNTYDTPSGRANPYESARL

SEQ ID NO: 998019 - protein, 124 aa, Homo sapiens
GRGFLASTVLGRNPVLVPQPVRDGHSQPSVSSSPCASDCRWANRPSQAPGGRCSHKLRARTPHRTPIARPAHDDRDPPRQDAPELRPELRVPSSTRQNQPLEHLTLSLRFYTCSSGRNVTWTSR

SEQ ID NO: 998020 - protein, 173 aa, Homo sapiens
MWGACNVTVHDSLGTIGTHSETVPEIGGEHGKKQCSSYVYGTSEAGRQLHWAHMLGGTCGAWTSREFPSGSSYENAQVLQNPIDTPVRVIQDSMIQIVRTTSDSEELSTDSSVACRRLLGTSKLDLKGTRHMQLIATGGKETPSIALFDTEGTGRPARGFQMELHRWASFRRY

SEQ ID NO: 998021 - protein, 245 aa, Homo sapiens
SQGGCLDLFWKKTKNNVFQKNTQVWRGRHSQCGGSQGCGHPGLEASLGRPALMRIWQLRGPHKSGPANLEGDGEWVDSSWDVRWHTWALWGPPRLRWCPQGTGRRETVGWGSHHAGGPRGVYSPAVKSPPGEMIAQVHDTERDTPARALAPMGGGTGGKTSERGGREGRTCTISARPTDTRAHRRRPPHSAQRRQTGGNTKREQRQPAGSHQAPRGTQPEARHQQENNQTEYESAARPPTILNAI

SEQ ID NO: 998022 - protein, 259 aa, Homo sapiens
GEGLDREKVSLRVFGEESRVGPGLWLLSDMPLSRCAARTRLVPREVSSKHLEPEPEEEIYVPEDYDDDPVDYEVQTRLEGATQLSWYKVFDPSCGLPYYWNADHRPCYPGSPQHDPNLRGYQIVPKKSLDSQLHADAVTEKFGTGTLDKSDRGHDEVRNLQLMRNYTWVPRPKSRPGPATSLTGHRERWLLTKDRTDERRAETGNGDRGKRRARGELRSTTEKERQQENGGPSKYDRRRDRRIHYPQQEHGKGSKAQKD

SEQ ID NO: 998023 - protein, 126 aa, Homo sapiens
ASFPARLCFPAQEPQAVGSHGAQSEWHGLEAPLPQGLAAARGPRGSTSRPVMIRRRKCPVKPRRAVSNPQHLRRVPVRPIVRWPLRFRYHTKVRRRAAAIRPEGAQRWTCIHKKVARTIGHVCGSE

SEQ ID NO: 998024 - protein, 40 aa, Homo sapiens
MAMISNWGQPNGKKYPLGRRISNYLDTPGVVRSHWNPRLN

SEQ ID NO: 998025 - protein, 74 aa, Homo sapiens
AGVVKTSPNSQRWERNKTHINIVVYWTRSIRASPPLRGHLIYKSRWLSTKEPLKQLEKEAAEMGRRASFKYAWV

SEQ ID NO: 998026 - protein, 133 aa, Homo sapiens
MVQPHELWQLITGITGLDGSIAVLSSCWRRGYEVHGIVRRIQSQFNTGSRLRHLYKNRPGSTLKERMRLHYGDLTDRYLPCGRSVNASKGPTEIYTSLGSPESTSNIYFEATLRYTCRTLHGVGHSTHFSAAS

SEQ ID NO: 998027 - protein, 142 aa, Homo sapiens
GSVVAVRLDPLPQGLWTGAVVSEHLSWPGSVTVPVGGLISRMHVYWSHSHDMGLLPVVVLSLSFVPGCKQRKGDWFVVLSDVGDMCDSLPETIQRIHESSATAVFVSDRASSCHRLSRGRLAITNNVFNPRLPGVLNHMAET

SEQ ID NO: 998028 - protein, 238 aa, Homo sapiens
VCRRSTSALTLGPKPQCLARAPLERDGTSECANSSTMCCVHLEDTRLGQLQRCASAADDRCTGVSPGRRSSSTSFLPWTSLQLVSLQNLSRTRHCQGRRTGMYRDQTQTHLRCHEVHTASRDAPEHRASGVIQPERAHMPIQGRTITPDRDSRMRLTLRANNRWSMQHRRNRAHGGAADKRRSAKIWLQHDTNMPEHERRIGDQARLDTIPQARPKEDIKRSEKHNEDNNMARRHAGE

SEQ ID NO: 998029 - protein, 69 aa, Homo sapiens
MALETGHPVTLTTKRTRSNARQVDETEGHKCHKPVPRRCNQLTGPKPNSTGIMRAIPGPQKSRKAEPAE

SEQ ID NO: 998030 - protein, 229 aa, Homo sapiens
MTSITSSLLLCSKSRRRRQRIRTPGTILPKQEPLPSAEAIDTDEFIIAPNVVLHVMYAKVPKSRVGTWQSLYLREADMADQPDIGPNIVRKGLVNQTLRKIPHNDKDITHHYKVATQIQDKNENGTQTINTECLKTTVDKTSTQSNRRIHHHVDPTGDIEHHTAQRPWAAKRPADGHPATTTRKQTHHQAAKRTAPAQTHNETSGPNHQGGVDHNAQLHTQGHSKQRPH

SEQ ID NO: 998031 - protein, 315 aa, Homo sapiens
MSIFTFMGANVMRLDDTYSFQVINKTVKMVIPAAFQSDSGDSIEVSRNVEEIVVKHHQCICRMRCHTSRSTGACPSLINYVDTLGAENIPLDFFLILLFQNSSVTENMCWRRAIWRTMDASLRKHDTEFGLSVCCESERPASDTQLDEYPPVLNYKAGRGTKKKTLPKDSDQFNTRVNSQEEDCYQVPNRRDIDTSEQLRHLQIRSVLLQCSPDSLSYQINFFLNTNGKSRRKWVGTCKIQQTGTLQHAGPASPETRERHAAILIPSRPTKAHQTPNCKPGNRPHKQRPAREQPLRAHPATLQRKANHDNVVQIK

SEQ ID NO: 998032 - protein, 277 aa, Homo sapiens
  misc_feature (60)..(60): Xaa can be any naturally occurring amino acid
RVLPAEYRCRENYPIQSQQWERKKSHINIVVIGHVDSGQGSNIDSLAHLQSIQCALAIAXEEPLRKFEKEAAEMLERAPSSMPGSWIELKAERERGITILILSLLANFETSKYYVTIIDAQDTENFSQNTLTYHGIILRLSCAVLIVAAGVGEFEAGISKNGADPESMPFWAYTLGVTTEISVGVSKMDSTEPTLQPEEDMTEHRKAKSARYITNDLAINPDDTKRYVPNVWLELVKQCVEHKVISMPWVQGNGKVTQVGTGKGQEEATAGGGLGWI

SEQ ID NO: 998033 - protein, 364 aa, Homo sapiens
MAEAWLSMWRHGMNPGTYFFVRGDIATRRCVSRIGLMNDGSPRSCHLLGYVPSERHPRRCSQWCVLVAAVVGIASEPYMNGLASGMKSGSCDSDTAEGCIVHTVVLEPRLNGGLLYRIVGPLQKIAMGHGCADRRVRGSFFDHTQRISTMGMPPQGIAPNTKVKIVVNNEVFVHRVGKRQGNNKYTMSNAEGPGVNVDKPRAQQGVSRNNIGGELGHVLVRIGTTYEGTQERQFFSRLVCAWDRAEQDSTKIVPLGKAGMRKPDMKQESIESRMGVPSSLGGMNCSHAESQGAKRAHKRAEAAWAHSGNVGGKCRRLTLAYMETPKVDHVATPPKVAIAIMEMCKCDSTVTYGGTMNASKHSAG

SEQ ID NO: 998034 - protein, 108 aa, Homo sapiens
MESQDRQSVRVSYARPRASWCLRMNRVTVPPTCSHCAVVIRTGVPDLVAGKILATTELFHIGSDGVTADVAPRGEALTSSIACRGGCAAHLKAPEDASSSTNAVTVNT

SEQ ID NO: 998035 - protein, 71 aa, Homo sapiens
QAQPSLEMQKDAGEFVDLYVPRTCSANNRIIGANGRKLLHPDEQSPMLIRSQCMLHRGQLKTLCISAGTYT

SEQ ID NO: 998036 - protein, 376 aa, Homo sapiens
QNTIDVLDERRLQLGLASGGSLVAPELWGTACGFRGGFSEGILEAGVAAVVGCRVGLCLRQLAYCRPAGYGRGLSCHRVWAWFESQDMKIHVPVRVDLSLLPAILCESGGSLDFFLARPVSQRMRYCERYTAQCEKAIPWCRPACTMSHRDILLCRIRGERNKWATCSDPSGCSQIASLWEHVLAALNHIGLGKPSQYPEVHEDFFPFRSRPVAGKKSLTEGVGNQRNPGKGPAEYLVSPLFRDKCWTQEALVLQGFFRLAWVNMPLKYTLDSPPRVSHLVGTQVRSRFNPLMVPLRSKMPLTSICTGGVGINSGFVNVGVNQTSFASPRGGSLYTLSRTTPWWYKNTYTGHKMEDRKPVIGKLAQDFLLKGTPLR

SEQ ID NO: 998037 - protein, 132 aa, Homo sapiens
MRESHGKNGIDEIERQAGWLQHWENGHPFIDHSLGVLGVQREQRAAVEVSVSVIDHLRSWQIHEHPDKLLVMTTPSDCTAETANDFNRKNHESTGHISVHDMVTAAVSPLAYTMAVGRKFERRVISEQWCRM

SEQ ID NO: 998038 - protein, 218 aa, Homo sapiens
FGLLAASQPQAVPPYASEKPELQGPWKRNTMSPEATLQSCCVSACRGQGYPSGLRLKCSRILVTTVVCHMLSAEFLLSERLELRMIQSCQSAASAHVNPVDRASLREHCTRYAYEATYRREAPVACMPSRVNVHVRAVGPHRRCTTRAEAYFSLHMRRPVGHLQSPQLQEHAESGGRGETTDVESPLRQGRGLLSRGITIHRAQGGPACASPRNRQGG

SEQ ID NO: 998039 - protein, 271 aa, Homo sapiens
GRIRHPRVINGDKCCHSIAETGRRPAEERIYFAALTERTLKKPKTAKPRSSITKATWESNYFGVPLTTVVTPEKPIPICIERCIEYIEATGLSTDTASTGSAGTSLEMDESAETVGSRATILDLAEKDFTVNTVAGADEELVASELSLSALGPDISMQIDLVEAHKIKRTGAEVACPLRRYQEKIAKGKPTEVFKYVISHLKPGQPQEQGESHGPDENHLHLLLAHIDEDLIDSSQDDTHSTRANYQTISEDSLIPGRATLHSFYNRTINR

SEQ ID NO: 998040 - protein, 312 aa, Homo sapiens
  misc_feature (35)..(35): Xaa can be any naturally occurring amino acid
MPITVPLPHAKSLCAKVYGRSVPMIPPSGYLWLIXYVYQDIIEEVSHGAVVGPHWCVVGWCSRDIAPCGGEVRLVAVSVLDVLSERRTCRLYYLPFTVLCITGENTAVEGVHSSRFEVTPLSNPVGHYPEETSGVASDNAVDGRMPQLRMSGICESVRTRSTLACSMRNRCQGTVSVVLVLIRRYFHQTIPKAIQEDSLPHWWLVRQRDPIVALVSKWNYRPERLLQYHRQMDGAQVTPFSFTLGMASGSPLRLAVGFVGFPLTGDIDFRWKICPPNSLNVGESLWPRETENNTGWNDESENSDLLWRIRID

SEQ ID NO: 998041 - protein, 217 aa, Homo sapiens
MEDSENKGREMQRVGSRQMSENRGKCHAKCWTRRSARWDDAPTDLLRHKTMHLQDSVIPGWQALPFLGHTWLRHPWSQCLGTGCIGHVLAARCVLLWNPVPFPSWPRLSTLPSSAAFSPYLPGEPGLGHESASGARAQRDQENPLAWKVWCTLTQGRTREEEAQELGPAAPGAVPCTPGRAKGHGMAGHPDTGLGRPERHREGTRWATAHMDVTGIP

SEQ ID NO: 998042 - protein, 188 aa, Homo sapiens
MTSYSTWHRDIQITLTFVPGSSSVILSSTLIVYGETRLQLGVIVTDRQFSGEKATVNRKRQTLTHLSLSPPLGVCEGYLIRAVSETDCYGENRQIPLGDICETAVIPIQCSVVNTNTASYARRIETVRDFVPMSEKRLPQMLAHDIIWYRRLASRVHLTWIRADNGTHFVKFRREQTDTTDNLPWQIW

SEQ ID NO: 998043 - protein, 331 aa, Homo sapiens
AFEERAGTVLPGDRAGASVLQNLDGMMMTLLLFVVACVLIHERRTGQVRGGTMTVSDEGRVQRTVSNTQGKLTIRQLEDILNMLVTRGLHNRVHLTLSKIKNADTIRCVKVLLVVMPEPYEPQSPNGTVKQNDANLRPISQERYVELPGMNDTCLDMGKSSPKGTVVAKVDRTPMHSRSPSLGYRNVSYKGPLPIVQDPIAASVDQLVHRFSLAEQTASIQLAHRRKFGLVPREAPLRLLGPRPLGLLAKRKGIPRVKPSWQGLTAPPFSFTRWPFGGVRNTLGAGNPDQLSGSFAAVALTGREHLEPRGPRATGNAAKPSLTFVGVWFPH

SEQ ID NO: 998044 - protein, 368 aa, Homo sapiens
AQLLQVLAGGRFCAVLEGGYHLAVTGESAVHDSTCTLLVVTRSHSLSGPNGAMSEVPLESIQSCPCLPRVPSLEEPPAAEMCPASSRCSPEHADVPTRGVPPPLHACGVSYVCRGAAASLAAVASTSVDPRPVPLVHRDLPRGTRNRRAMPLSTAPDYFTVGIVATRDRSVPTGQASSPLDGEEENHAMSLGAKWPTTERFALEAPRERAQALPSDQPLWDMHSLGNPSFKALRWHLTTWGNFGGAQRGFERRTWLGALLNQYNVAKAFLDVSPYNGPLPTGHNMPYAHLVGEHCFGALGSYPGAKRRMCSFGNPTHIERQGPPYQVSGPCPCIDRSEGPPIEVQHMRTWVKTRCAAFPSQETAFRDH

SEQ ID NO: 998045 - protein, 159 aa, Homo sapiens
MAPRKWRCRLFHCVAAVSLTVTDSLDFVKIITILVTATAVQRGGTLGYSLLEVSSLWPSSSKTVNLPVDHISLILVCGLASRPVLYRLNVEGDALGAGFLQNYVDRTESRSTEPELIQVKSELPLDPLPVPTEEGNPLLKHYRGSAGDARVASDKESVM

SEQ ID NO: 998046 - protein, 378 aa, Homo sapiens
  misc_feature (99)..(99): Xaa can be any naturally occurring amino acid
MHVASGNCDREPLPPGLGRSRSTQQTGLALLRGPQTAAPHTWNDLAACHIMRGAPRRLRVLVPMALPVHGALGLPFWLVRSAHTCCNPHGLRTSATLPXSLCSIDTAHENPGMVQPFSMSMPQPGMHVEFRTEREQSAVLHHESPKVTICVAPCQKPRQPGLNHVLDKSGMGLAGTPQAPTAFTQGDLEASPRSSQACLLDLHQSLHTSICDQAMTFPSCAREQGTGPRSLKGFPREGVTIIPIPGVDEQREGMQTVYPEPMQAPMPFPFQARAHERRLGTPKRRHSANSTQDPNQGLDDTHQTNAKGGTALGKGPRDPQSGAGTPPSTQGPTIDPGAAQLRRREKEHTHQRQKKQAKPKSNVPQWAHPVGPHRRDNQ

SEQ ID NO: 998047 - protein, 91 aa, Homo sapiens
  misc_feature (68)..(68): Xaa can be any naturally occurring amino acid
MARKQCDKHEGCYGAPEPYKPVDESHDNHEKTPNGDESFSACLCANTPLHLVVRVVARRASAISYQSXRRRCAISQEKEEDYAHNKTLGRQ

SEQ ID NO: 998048 - protein, 90 aa, Homo sapiens
MSFWWAISKDKSLSSEYISLLTFPGDNPGKALEHGKRSVGNQSSHRLGRIPERTYPPPGLERSETRGRPPPGLNAEPGGPTAARPGHSLV

SEQ ID NO: 998049 - protein, 141 aa, Homo sapiens
VCLLKILMSTWVRRAARCYRYSKNKPYPKSRFCQRLCLMPMIRIFWTWGGCMAKQWHEFPAFVAYMGVEMNMTQRVRLKPWRLTEFVLNKYSGKEVVVNGMASIVRRDELHPRSTVTPTFNKHVVLVLGLDQRSKSRSVRE

SEQ ID NO: 998050 - protein, 262 aa, Homo sapiens
PFQGSGCVIAILGNVLSVAHLARGEPLTITAISAAGARWSRGPSSSSVPRAHGAMPDRPRNLSSRSSVDEYMIVNFGSAKYYALCGFGEVLSRGFDYKLLWFPCDMTLKCQYARWSPYESTQGICNRYSQFILTMTDGVPWSMGIWTGAHELSPWANSPCTRTLQSFRLCYGESFTTGCAHRQLFAVCHHGEVTVICGLRHELVCRPSPSGQVDRNVSWVEHVLPVGYLIGKASITVSELSEPLKQGNCPTIFRSASSRPPQ

SEQ ID NO: 998051 - protein, 333 aa, Homo sapiens
MADIQTERAYQKHGEPSFNNKKRVLLGETGKGEASRGTYQEHLVVGLQRQPLRRLFEGTYELKEMPLLGGNVSIRGRILSGCGDLDEDAEDALSSAETICHYILQVQPRSRSATRTCLVQLSPCFRDVQIGDICRQCGDVPASVARQLRFNVLNGHQGCRHQEAVPEVLRLDIGPGPSRMAIKLFCSIPQIKQNDHNDKTRRASQSRVSRNMGSRALVAHGVNYLAQGPPRVSGDNPKGPKSRGYRANMEGPAMKVGEKRRYTRAVKEMQENERPPTGNMEQFDKKLGDVTGVSPNKDCKTQRGHGGQNQKTPGTCFNPCQSDRAEVKNRNAI

SEQ ID NO: 998052 - protein, 270 aa, Homo sapiens
MDLLVHHEGPTGPFLLLLLRRGLASEVVPIVRSVWFLGAEESDDGDVDGETVGVESCAKRGQSHGESRGGKANKAKSEVKSDPKKYTTSQEQKAKNQPIDPTNEHKTAIEYPAHDHQNKQIEASLPPNSKQNSSPVCCEIDLPVAVVWLQVMTASRRPLLSCWLLGVSPAWLVPGRIAPSLLTAFCLSTIGSFVVFCTALRAAPPNVALLAVVDSQDNAHLAADMSPAHMNPTRPHHLPVTRCAFREAHAPAPNERLLNQAYSPLQRTSH

SEQ ID NO: 998053 - protein, 80 aa, Homo sapiens
MYPAPKGDTPYIQVNVITMGPSPSGSEGDPSSQGKVLPGLAARGTSGGLPRRLSGATAAYGLLCISLEYCLCGVAFYGCG

SEQ ID NO: 998054 - protein, 189 aa, Homo sapiens
AAVPHRPALLNRAYMTPASRPSSSKATICLPTSSILLTNNGHSVKLNLHLGHAHPGPPVSLQCHADCTCTGRNPNDPDGHEHTVSVTEVRPTRLHIVHYNSDLYPDARHWQTTSQKDLDCTGCIYIEMGSIYNPSYDRSSVTFNMRVQQARKHTSRDSTLKSCFRRGPHEYYRYREYLSTTNFKRHMEL

SEQ ID NO: 998055 - protein, 267 aa, Homo sapiens
  misc_feature (57)..(57): Xaa can be any naturally occurring amino acid
  misc_feature (149)..(149): Xaa can be any naturally occurring amino acid
  misc_feature (170)..(170): Xaa can be any naturally occurring amino acid
  misc_feature (197)..(197): Xaa can be any naturally occurring amino acid
MWKTQPLVGHSNENTVCPPNWVCLPPKAKGLEPPIFHHTRKWKRAFGQTTVVLALFXVFENETERGFSRGVSHVNDLKRHSHHTIFPRKETPAIRGTGSELSGSINGTNTLEYDPPQQKCLVAPLSGVGFYHLFSGATKDAVGIVHTYXRNNRWSFFPNHGELCVRARKXTTPDGLWLFSTKTAVLVMRNIRPCFRXENRVPPPQYLSAAARVYESRQYYRDWVVHEQNVSHPKRTQRVCRGVAPTRCFFPPFLCATTEVGVIKPPL

SEQ ID NO: 998056 - protein, 118 aa, Homo sapiens
  misc_feature (76)..(76): Xaa can be any naturally occurring amino acid
MCLSQLRPDHDHPAGPDPGSLFTIPGHRRGSGPEIFSFDPLPEPEACPAGRPHRLLGVGYPENAQSTGLEVASTRXRTFGPRCPAQGRCPKCPGRENPENPQRNPRDTGPYPSFVRWP

SEQ ID NO: 998057 - protein, 170 aa, Homo sapiens
  misc_feature (112)..(112): Xaa can be any naturally occurring amino acid
AVRRFLLLGRRVLGWRQKEWLQSCPEHMRKIVVRQASEYDDRDQRDFYDADETWPCGQSASRPTGRTGAQCESLRVTMAEELSRGSIPMKDRPCAVKRLKRRREDAVRGGTXRVVRTHRLEACDRSRRLTRCWEGCDDTPRGAAGWNDGKLGESRPRLKDQFTYRPGNGP

SEQ ID NO: 998058 - protein, 209 aa, Homo sapiens
MGQVPSRAIIEPTVMGHFALCPPMGSRRTSSRLHLFCECGPTERRASKVERKPTELVEVDHTLYYEPRIRCHWRPRSRVRVLSQYFGNQYAGDRLRQGGLRSSNPCREVIARDKGPSLEKVWLAEVLNIRQWRGMCGRPITFNANFVATIRNGKDMAPPPLRIGSHSGIHSRVLAPVCVGWDSGKRMPGTKQRKDKWDSQVGFREEKQR

SEQ ID NO: 998059 - protein, 260 aa, Homo sapiens
KHRLAALEPGAAEPGRGSAVSASGPPGGATAELLPTCCPRHLDGRPQQANGPRPERHPWAPRTRPHTTLGRSLAWRLSPTPTRRAGAADRKAAPGDAPYPGYPWRALLLLLLAAGCISDRMTGKRVMQPTRSLAGIQPVRAGRERGRDDPEGEHLQGGHRRNAANRQIKDFRSLGGRSPGTGPNPFRSSLKPGLNLPTKRAWVANGTLTTGTPWTPPWRADGIGAENRRGPRQTERQPREATYRGSKRRERQRFGPGRRK

SEQ ID NO: 998060 - protein, 347 aa, Homo sapiens
GPGGVAVCQRLPCLIPWVQNDEGFVRRRCWARKCKLVTSGPWLEVPPIALRDVSSSLESPGAEGSGHSIALWAVSDKGDVHVPDLGSVGASNLRDSSWTARWHRTKPLSTIQSPRGPAYQDVGRWQGDRLRTFYTGIRVPRRQNRPVTAWYHIRNPPRQRLKQVSAGTDRQEYALDENGNLETIAKGYTPQLTRRDSSREHRVQQKCAEEVRGPLDQRLACNRNKRAGEGKKPWARRGTSGDKRKPRDSSTKKHNTGTKKGENADITRARLATLTIRTGPKANQWTPREPKTATSKEPEVHQHEQDHDPRKCRDNTAQDNYHNERSHDEGTKRNNTGARGRQERPNE

SEQ ID NO: 998061 - protein, 76 aa, Homo sapiens
MDTQAQWFNTGRSQEELRKFTPVLTRQTKLPCWARCICHFNPKGHVYPTKETGLEGNPCISDRDATGALLIPEVVA

SEQ ID NO: 998062 - protein, 106 aa, Homo sapiens
  misc_feature (80)..(80): Xaa can be any naturally occurring amino acid
MTPKIDGSLMRGSSVGICCGSRAGRPGIYLSEGQERRYGPVSLVELEQGGDQNGGSVLALACPVAPSPEALAEWIKQVWXNWTSASHRSLDTNTNHKTLVIVSSRG

SEQ ID NO: 998063 - protein, 163 aa, Homo sapiens
MHEGGLVRRHVTPHSWADRSLQGISCMRRYDYASELEITKIYEYLVDTRWSPESTPPGGIGHTRRAKLTTIGRMHAGETEPKEWYIPSSKAFLVQGYGSESPFRGTIVNMLCPEPRHTEGSVRISLGFSKQVDSPEDIQRMCPRLATPLTVGVAHMWAQLKVD

SEQ ID NO: 998064 - protein, 417 aa, Homo sapiens
CERGNLNLYPCTFTVGDSTKVYYDSGCARYHAGDQVPPGLGANPDLHIRDNAKGANPLRFFRPNCTWRQRVHRPLPRRIDGSRHFLCVSAEAERMALSNGEASAETASARNDAYYVHGYAGLTGRAERALRPLGLHYAGLVISPPTHGKLNTWRGKVLAQIYCALDPNAQGKQEGTPIGRPWKGGLSRRVSQRARGAEKNHFARHDLGDLDAIGVEKQKEKYAHLTLSMESPQERKGAHHVWEPRWMSSGDGVQWQGTVGHGMGHPLVNDQGGPVEMARGEPTARGNISTPQKGYASRAASRYFAANPLPNLNSKIRGKVCLGDLVPWESSTVGNTMDRGHVHAMLGTSFGELVLTNTSLGPCGHHKNLERTRADHWHATGREVNRQERLQVAKEDGTTCRNVPPGELIDLRIGKGE

SEQ ID NO: 998065 - protein, 218 aa, Homo sapiens
GITAAFLQKTDRLRLSKNQRPARAKVTEHVRGTRPKAPRTYPSNSNSARSGLPCDARSKDEYHGTAMLEYHSLNARIVTMWAMREVERCRVTYVMYYEMSYGLNSSRCTIQAEIVEKRLNGIMCRRSCPTSPDEHQQQVLGAIERAKQVTVPELNSIIRQHAPMSILAVSELAWPWPCPLVPPLPVGLAACLRCRRFSARLAVSISTCPRLGSQAQLS

SEQ ID NO: 998066 - protein, 145 aa, Homo sapiens
  misc_feature (13)..(13): Xaa can be any naturally occurring amino acid
MARGSGAEKVWLXRTGVRCQIEVDTTVLHCDASDVKRAVQPTLGCDDTQENSSGCVGELDTAIAVIAMRRMVCRSLAMRAVLSKKLGGALDVHLIQREIGERLEDSRKVSTRKDPAGNCAGFSDMVKLRIDHEGALGVRLVESYQ

SEQ ID NO: 998067 - protein, 354 aa, Homo sapiens
MTQSKGSNRDYGRQRRGGKAPIGEDTSPQTPRYPGNGAPRTIEQGLTPERATIYGRANHPGEERVVHATSNTAGNNTNPKHTRRGAHTPRETTVGTATNDHTRDHQEIIVPDSTVIPTKKRENKHDIAQENTQRAQGGKPHNHTRHREEPTYTETTPRVKELGEHHAHQRGKLDVDTSAHPYNRYSGGDSTKRRRHWGHKRYTQHNMDRRETTTDEVDQPHTRRNTTNKPHAHAREYSAPHRHKRRLDPNQHEETKTEEQKKTNSEAKQKQGEARILEIARPDGDRREESNTDNTRHNKRNTANNTRSEKQINQTISDANRYRTRLTHTTQPRGARRQSDKTKYGEEHDRSRTH

SEQ ID NO: 998068 - protein, 66 aa, Homo sapiens
VIAVHRSMPQHLRSPPDAADGEYLCHAAFTYAYHDKETNSIGMHICDSNKSPLSLIIDSLNDSRTD

SEQ ID NO: 998069 - protein, 219 aa, Homo sapiens
MVIVGLNKELSTAEGAGEQKVYAVRYEEENEILEVMRNVESELSIVRDFSGPLKLLKQRQLLHADMRARLKQKVKSFGQKGYRVRSWLLCKNSDRTNHTLGRKRSRRSRTGFAVSRTIPQNDPSAREGNLMIPVNDLHADRYSKPGIGHEPHPLPDAPPEQGGLHPPNIPISATDNEHSGSERPRHNPPLEPQAQQHKNTTTRTAATPNSTRTPPRTQR

SEQ ID NO: 998070 - protein, 106 aa, Homo sapiens
MDLSLGPDSGSTERGTNVPRLKLATDFTLTCGGQPERIVPTIFIRNSVMMKRAPCHEVGLTALLLFDTLWVLQRKRFESVREYLRPLVLPPTTDAWLIFHLGGATP

SEQ ID NO: 998071 - protein, 329 aa, Homo sapiens
MFEPPILLPILYRVGQAQEQGGSQGQFRSMSLREEQHRQVSTNGSGAELVVPACTLPRSSLKLKSRGTLRYGPGRSVCLSTQKVGHTSQLVRHILHIARGLLLARNYRDASCPSANTRNVASQNSGIRTMAGTYYDLLLLNGPIWYMFTAISHSGFGSSTTEHRQTICVHGPSFPKALPTPLLNVFHALASQGVAANLTPGKTGAACTYPHGPCCPYWHPSTCNPPVLPCIRTYGHSLPKSLRNRLDSHYSGSPRKDFNPVCWFPIPADNPGTNSTCRTYSTPMGHHAEASARVPFPPGYTEHPPPIGKAGYGYLPLNLSGKAGGLSAQ

SEQ ID NO: 998072 - protein, 125 aa, Homo sapiens
MGGAGARGLRRGCERAERVENIGIHGTIRFPSETQVSGVKLLVCCSLLIPVSFRGARDAHQGRADCFWAGWHECGMQGNAGLMLILQVATLTNGRESEALCWSLDANVEDVVGTTGLLAASACTK

SEQ ID NO: 998073 - protein, 110 aa, Homo sapiens
MFTGKKSCLTEASMVMDLSLGDKTVFQWSKNGRTSELERYTLIVNDYAMVDSASSVSGGWLSTEENATNQIRKTSYAQRPTRSAKIRKKHDGRVMTREVPEQMHLTRSGQ

SEQ ID NO: 998074 - protein, 261 aa, Homo sapiens
ACPPAAWNPLTAWECDLLLGGWPCRPTSLISGGLLGSDQPLPGQAHRSWLLGLSWAKWALRQPHCAWAVALPTGRSHGPALLLRAAGSGAAAARCLASAEPVRVCSHPLCPRGCCLCRPTWTAHSGAAAGDNFIQAWGPWLPHMTGLVDLTLSRNAITRIGARALGPESLRFPPLTATGVEWHRSLRGPVICDLISGTAGRWPSYEIPEELETDCLQNSECLAVALLLTPYLTYYEHAQAFALVIPGLLTLPRSAVLWLGA

SEQ ID NO: 998075 - protein, 259 aa, Homo sapiens
SLVAQIFFWGGSEKTGGKGPFSLPFLSNTRKEPSQRGDMKRSPKKACGGLKRDLVRRANTLCGAVRFSCGPLQRRCWGTGGQPSWAHTGRAIFWVLPKESPGWGEPPRYEILRARALHIYFQRSRGKNFAPTMWGGFIHTPRVLDLQAPPESVICAAPQIVVGASHPPKNGRCVSTTSVFRGPPTGGCCFSHHQGGEHVVLSHGVDTQRVCGETSSRRPVSPYFFSQKKNLLLKRGGLVRAPLERVVVDTGYTSSPEED

SEQ ID NO: 998076 - protein, 266 aa, Homo sapiens
MCVRVHLFRDCRASGRADSSRLFGYAGNLQESFSPWILRAVFSACDVGGGAAITITLRLASEAYTRRYISEELAQQLEKVVKWHHSDMHDRPECNGKDRCHGPRFARVISLVVNRCAMARVTRMVVMGNRVMTIRHRSRIDNLWANFVSAQFLVLELGDVSCIGGFTRNPEEVPNGVDIPVNHGPNYRRWPNVERGHTKCGLRARRYRIHLTRKDSRFGGNAVRGRLWFDEATVIRQWTTLNWINTKWRPQSNKKKPEKNISVRQS

SEQ ID NO: 998077 - protein, 187 aa, Homo sapiens
APPRPSRGPSRASQHVHPTSATPDIHLAAQPASRAAAPEVRSELLLAPAAWQQQLSTASAPRRALRGRALCLWGPWWSVRQSRAACTDVIHDACLGARLTGWTTRPPSLQRVRQEEERADQDPQTMKFASFIDKVQFAGAARTSMVEIQVDSCVAGVEKSVQETVRHPQIMLVSAQDWLGPSGVSSE

SEQ ID NO: 998078 - protein, 121 aa, Homo sapiens
RKLANTEELQFYLTGIFHDWTIINPPPIVLPRLISRPDQWVNPQYWVVSALTRRKVGHPPNKKATRRLCRSTQRAAANKSGPPTNNRGTDRPPETIGDRRRSQPSEAHANKAAVAPTQQSS

SEQ ID NO: 998079 - protein, 102 aa, Homo sapiens
MHAVHPRLHLVSLLAGVRPGRPCLIGPDGITAAGVAVCSAVGAHTCGNRPVTWRDFSRRKGNWLTACDGPDESCINSSEAVSGYSQSMVNVTYVMRFGSFYL

SEQ ID NO: 998080 - protein, 151 aa, Homo sapiens
MSNVRVSYESPNSVRKLFIVQGGAVETTDESLRSHLLSNGERSRTVWYREIQTPMRSRGFGLVTYATCGGGGCSYELQWSSQGWMEELLEPNRRCLQRRFLRRPGAQLNCDTSRYLSGGIDRRKDDVYMIHRDYRGLIFVDSYGRERIEVN

SEQ ID NO: 998081 - protein, 41 aa, Homo sapiens
MAPGAAGNREYKQRTYTNTQANNNETPNRTTTFTNNNTNND

SEQ ID NO: 998082 - protein, 210 aa, Homo sapiens
GERERENSASESSDTELPEKERGGEPKGPEDSGAGGTGCGGCDDPAKKKKQLAATYALHKPAVARATGPSEDVPDDMREEIACGPTHRAARAGLVQNREPSGVKRERNQQLDLCKGGYVPQFSGYAAYETCTPRYSYKMGRRAWRQRRLTRAYFSIHDRCVQSMSRPSHSHDMRQMGQGVLDATRAQKSKLTVSSSAVRGCRTDPLPTGY

SEQ ID NO: 998083 - protein, 400 aa, Homo sapiens
GWSGLPSELAAGLYAGSSPPRSLSPRFLRRGVGWREGHLVHNLASICLLERIEMKLDGVVSIYVTEHCEEPCPPHPYASLERTSYLRDVGKKTIGIVTELKIAHVYNIVIHENLHMLNVRHELSVDGRESESLRMRVDTGCSTEYCVCESANYESFQDANGLRHDLVCNTIVRANDALRLIRRANLGIRRHLQHKHRYQSLDVPVTQACRPKQSSCTSETIGSNAAATSLTGTPEKEPPVMASGMHVGSRGDVRGQYRPGEWAHRTGVTGTKRSWALGTNVGSLFARGTPGRVPRQAGTPRTHRTDNILDRARAKQEGSWDAGTLAQAAPKEAGARVAWRANRTGKDPKKVTCLGEGDRAGGPGMRPTDGGTKEQPGLREGDIEKEVPGTWQTIGPCVEK

SEQ ID NO: 998084 - protein, 70 aa, Homo sapiens
MDFLVNPVALLVRPCWALLPHWKYSGARRKVNAGGGACKCTIYSCTLYPGSYVASILADVVGSPVLSKNT

SEQ ID NO: 998085 - protein, 134 aa, Homo sapiens
TVLRRGSQCPSARGPASGVGPALGRTRRRPDAREEPLPPRPFRPSRRSPRGRSNHELTLAIPRPQVATHQLHQVVVPVGGAAYPPPTRCHHRAGYVGTYAGQFNQDYLSGMAATCLGPFGGANMTNLYPGAPWG

SEQ ID NO: 998086 - protein, 201 aa, Homo sapiens
LVSAALSAAAGCGGLSGLAVRLSRSAAAEARYGAFCKGLTRTLLTFFDLACAAAAVNFPYFYIVASVMLNVRLQVRIEGAPAAAAGEGPAEGAPVSPPAPRPVYAGMKESWSRVWGARSAGAGSEPLDSRPTPDKGTDVPSPEPALRSQTRGPWIAADNALNWAPAHTGYQKLPGAQDEPVASLLAKEGETRMREVLPAAT

SEQ ID NO: 998087 - protein, 324 aa, Homo sapiens
MQRYLGVDPSVSCLGARCGNLLSVSCEIMRVSADCISADGFLSLDCPVMPAVSDPGGSEQTAGPQVPSDSVRRYVEATVGSPCIRDYTEKLNIVDVAYRGELAHSNDVYPTCWQTDESKFMLADDLADIVSFRIYTAGSYWDTVFRIGGGLFPQIGVAGMLVTFVVARRVVKQRAFTARKRRVAEGLLIGVHRAHSGVNLDLGAEVSISPKTGSPTGFNACVSPVPAYPEGCAVTQRVESWWTWHAPLLLSGTRRYPTRLSRARLPRKGKSWGCDTKESWLNSTTMVGHPCAKMTASDERPSVWHSEPGATSSYPSTLAMLMEF

SEQ ID NO: 998088 - protein, 208 aa, Homo sapiens
DSGGVYLYALFIKSSGHAYTTSTARRQFVSAQCVCSNRPLHECYCTNESSNAIQLRTNVFRAILLCFGDPVQQRVIRLDLAFRSLARNRELLVDSPESLSVTIVHTQHSSQGAVRPITAERSDLWLALGTGSPITNTLFICVAFYCRPAQWIVGSGNVAQTMYLCQSNFVPDGAYAGCAPTERSSLNECETMQGCALVRRILFPKELY

SEQ ID NO: 998089 - protein, 272 aa, Homo sapiens
  misc_feature (238)..(238): Xaa can be any naturally occurring amino acid
MLSLHDPSRVLCGCGRWPSENHGSPRVGRASHVGVTPPWYLRIHEPSPVLQSQSAWFRTSAEELVHAELVEVLEPEGRIVPSEFNRFSNPWSLCVQHDRSVGLSTMLNFETPLGHECGAERAPKTHSLSGKLARAEKQAQKCGSLSGRRHGNVGPWCEGMLQGLENFHVTSLTGRKSGCPARTFPLRLVPRDNAAIRLVRSSAWITVATVERLQSKTLHGSHLGTTLAGCVPGRPLGXNILKEGQYWLLGQFRRQPWGRPPFQESACIVAPG

SEQ ID NO: 998090 - protein, 220 aa, Homo sapiens
MRRSDYNVAADVEFYYYGESEIVHHLGYHVMLLPCSIVREVSRTSSLVPPDPEAIRHDIQLSLTPSYEGERVCGDGYHALSSRDHMAVVGFILSVTPVNLLGTILVGPSCSVYTFVAACEAVGPFRTDPYRVKGSSGISSTYRSRIEPLLRDTDICLGKLTRKVPRMQPNRFKEAVSLPVGHLCAKIGVGGVPLPHWALSTLCIAGYLYRGTPLRFSTPR

SEQ ID NO: 998091 - protein, 151 aa, Homo sapiens
ERAGTRVPLTEACKDLQNWRHDEDSAAVIVGLLLTWESGQVLAGPDVSQHKKLQGHMSQSRASQGHVYIQAHIPNMLVAPMRLHKLRQSTAPRPSGTHKTNTAQTGRTSHALHSQSKSPFRPEHKALQGTGNRHTRPEQLPPVRALARNPK

SEQ ID NO: 998092 - protein, 321 aa, Homo sapiens
MNNSWLPDVDGQALRGRSCTGALTQETLRSYFSQYGRQSSAFVFIHAHSIKTSQPSLRRAYRGLVKNFNRHANTVIGARVLGPARPGPRVSMARETIGTRQAQCRQPPEWALQAWQQKHRARNAQRHGQTDGDTQGRRLTPGSQVESYTHNVDGSVMGTFARTSRGVVGLTDHWTTYTRATVTLSNTNELFQETSGGPTWARGYTVQVEIPRFSNVAPGSEPGHWNGGTTRGKESYAVGETTIMCRFCNPFVVRSKRHNRETHDKFPKHCGGATPMVGPFVFHKHHHLARHFLAAQAGEHASFHELGCDTPQYRPTGVGDD

SEQ ID NO: 998093 - protein, 148 aa, Homo sapiens
  misc_feature (64)..(64): Xaa can be any naturally occurring amino acid
  misc_feature (79)..(79): Xaa can be any naturally occurring amino acid
MLVGLYLDSCSHPGSEIPLVVDQVILRESSLVTDSVCAACKSKSPVSSAGYLSFEGKTGTNASXTYFHGWNRDHKITPXHGTNLEHFIVLKYARNAKVRCNTFILATTYILKELTCVGFEDLRSPRSVRGLRGIERIPGGQVCVPKTV

SEQ ID NO: 998094 - protein, 198 aa, Homo sapiens
  misc_feature (141)..(141): Xaa can be any naturally occurring amino acid
MAGMTDSSGDYIDSSWSCVSVGERTRGRVVTSAGSRGDVDTSGWWCSLKIRGDRVNGKPGHGQTDAHLRGKQNEARGMPARHQIGQLEQGTGTPWPERHDTLTYGRPKRYQETQYKSIRGLDTKHTGSRQRCSTSRWHSFXSPKTAHFLPRGLIGLDNLDRNIQSKESRDNTQNEEDLLTPLASGGILEERKGERKKE

SEQ ID NO: 998095 - protein, 125 aa, Homo sapiens
IICSEPDTCINESAEEGAGSVSWRPEHRKAKTLTDNRLTSKREDKGTSGPKENTHNREPRKTEGDEHTTNARMHNRSIHIIRVKKRHGRDEEKKRPGPKGESNTKKDQQTKKNNEPKEHDQDNKK

SEQ ID NO: 998096 - protein, 215 aa, Homo sapiens
GWLGLAALPGSRRRSPAPLPPLSPAPLAPGTAEAAEPWAIVPGVEQKNYYVCVPLGLIWKLYSDIFWDLVWIVHPARFPTGNVDYYMESSRRYPDHLALPWGCRPTPPAERRNGQRSPAASRHHPDSPDAEDRVKRIPEVPTHGLYTYPRLGSHRTGPREAPQTVAGLKHTLHQGATKSTKPHAAQAHAQSPSPRPKNHASRIAQRTIAPGNRPR

SEQ ID NO: 998097 - protein, 247 aa, Homo sapiens
MWPARPNFVSPFWPEEVRTYGPQVDKALPLYAWDNRPIQNPPLTSLEGVPTLGASSVPSPDYPFGGPLKGKSLASICSWRRWDSIRKWTVAVNSALQGRSRVVHCPSVCRKTTVEGDNHFGALETGASTFLEGAQEFSLSMEPLNEGVSRLEPAPNRPLENGRTSGLFTSTKEVFALNFKRKGFQLWTPSLSGFKREPRREQKRGPSPAWAGWGAPRGLPKSLVGLSKRVWAVFKFTECTQDLKRRK

SEQ ID NO: 998098 - protein, 368 aa, Homo sapiens
  misc_feature (236)..(236): Xaa can be any naturally occurring amino acid
FGCPASTVLGRKPALVPEPGLAAHSQPSDHLFSRSARMVPMGPAPAASEVAVACQSAVDGRPFHLALPLTRAMQQLHLRLVTPLLYALRDGKHGQRIDDAREIISLGTLRNPYSSHNSFYYLLVREWLNLSLNFCETLTWIGTCFGVTWRLESYCDPDKGSSVGYLCNRRQVAFNMHGGQKGGEEQSGLWGVDITALNLQHGRWAQRNTARKPGEVVWGHSEYISYYRVFPVATVXFEPERPILRCDPLRHTKWGIRWRDPHLPKRSPSYICERKVDGTIRRADITRLTICSADTGPFAPFALDAYPTKFRGETSMVANPLRYSKAEFFGLATNRLGLEGNTTSKGRFSQFFEGIGQNGFYEVIAKTY

SEQ ID NO: 998099 - protein, 285 aa, Homo sapiens
MERQEMAELVIDNGSGMCKGGVTVGTTLPEPGSSFQASGGLQYHRWAVDRLGVGLGIGLLLSRADEGLEEAGVGNRWTLEMYSPIRAIGAIVIRILGTDECDAEYIMAISQRFLTKLKTADCWPPGRVGEPRSGVSETLKGHSPMDSPLKGTQPRKEDKQWSVQEFMIYWRDPLCVNLPLAGHYLALPVWGPLSRKARGARAISPVPLAGAPLWGPTRANLKGSTIGFQLGVAFPGAKKPGEVFQTTLFQPGVGPLRVAVNPCRGAALYLAPLCLGPMQASISLV

SEQ ID NO: 998100 - protein, 264 aa, Homo sapiens
VRSRVTARGALGVRHGARLRALLCGAAACGFAAGAGCGVPGGKPILCPRRTTAHWAPGKPSLSLHGQDDLSARRPPRTRRNPLHSIIQASTESVQGSTFQNHESQGRDKRKLWATFVWPRSLVPQEQDEVVKYRGSLISNNCRGPNCPLVKKNSLGRVQQKNCWAIRSLWNRWGPTERPNLCGPREDKLLANTISPTFLCHKWKPQKFGPGKKNRGHPQFQTHFPRGINLGDTPAALTTRERTAGLFQTLGGTICPGSGAQQPS

SEQ ID NO: 998101 - protein, 38 aa, Homo sapiens
MPNKFTEPLVDDLTDHIISTLFPTFRHKIQRAVNSGYK

SEQ ID NO: 998102 - protein, 72 aa, Homo sapiens
MARKSKGQDPEGNVENGGQRRASRKEFLRKVGREFDPMRCRLAPHWEEQFPSGGLGQAFAPGPMVPTGRFPA

SEQ ID NO: 998103 - protein, 102 aa, Homo sapiens
GYKSGQNILNYVQRSDLCSPRDPFSPIVLVLGRQSCGLSLQQWGEGGYPFPRGRETPVVVWPLPINKKCVESSSVAKLCASGHSSQGEPAFKRLQGCLSRVG

SEQ ID NO: 998104 - protein, 31 aa, Homo sapiens
MNSARDPYGRFCPRWPRGPTQGLQGLVENQH

SEQ ID NO: 998105 - protein, 229 aa, Homo sapiens
LRMRGIEKRDGDMCFLWIRFVVALYSLLSYVLEPGRHDRPGRSGLSHDIQLSRRHWMKQGDRLEIDDYWYDRVFQGINRRNLSGLNDLAAKLLLVSDAAESILYALTTWPGSLHSVLYVIMQVQGSSSTGSVGRNGARSSVSATDDPIWRSGQKSAMGSTSRDYQLRKWPVVDAQDASSVPSSIGAGKLGVVASCKGNMTRRPGKAWETATQTCPVNKGTARKLWRNGL

SEQ ID NO: 998106 - protein, 96 aa, Homo sapiens
PANSTRYVTCATRCRHCMSWVRLAYRGILSISVLWESSLVGSPIGSLFTTSNLCLRSMSWTAYTSVCIDSTSVTEAELSVGGKPHTLGYDAMCYCR

SEQ ID NO: 998107 - protein, 190 aa, Homo sapiens
GKAEASGSAELRSWTTSLSLLNNDITIELGGHGWSACNPSLLGRLRQENALNPGDRGGSELRVARRCSSSPGEQMQDCLKNSISRAGRETSTCSLRHHFCSQPMGHVCGAADTESHRCPWWAWAAWKSPLGNVKEAVKVAIDARISAHWLCLCLSECNMKLGEAIQEKIQEKAVKREDLCIVSKSWATFL

SEQ ID NO: 998108 - protein, 133 aa, Homo sapiens
EETSNYFSTFIRLLAGLQPSPMCAVLRDRTQEHPGRVIVCRDDPGIHTSGLTCRIPPTCHWISLLVPQACQTQAERDISEIISNGFYRRNHRKVGVNEARIIAHADRNIAERSLLFDENSAEQLGSANSCRID

SEQ ID NO: 998109 - protein, 342 aa, Homo sapiens
AKASAAAGHIVTDELATKLSLAWLQMEGRGAAGETPEQPGLNCGSGGVRRGAPDCGGRVLLGMQRTARLERQACLLAAAEPQAMGIWRSPKSPQTDDVFKPLNQFKGVLQEADQGHGEDVQGSMMPGLGTASSTLDGAEDLIDGETLGPLRSNWDLDRTLIKEGGGGTLTAKLRLTGKYPSVDLPKRAGRSGGAFQEGTGEGLCGCLAPGVFLRIRRVLPVKGWSRGVQRRHSFEGQGPSGADFTRCSQYPGISGRERGWISAGCTRKSRGTGKQGGTRKSDAAGEGKGSRRATAGEKRSGPFPTGEAIADVTKPLVKDTAQWAVIGRARRHERVASVDPPQ

SEQ ID NO: 998110 - protein, 114 aa, Homo sapiens
MVLGWSPARRLWWGSLGAAQRARCARYWPRSQSCTSRLVGRTVGRACGSPSRPPRGSGPMPHASSTACWLGVAARCGLRARPRAMPPVTGTSSLCLLSRRGRSQWFSSIPEMSN

SEQ ID NO: 998111 - protein, 350 aa, Homo sapiens
PISGSVIQVADSTLHVAQGFGPLWNQVGSGGSKIVRASGIMEDATQNGETASTDRSYSRIMCLSASGAAVGMEDVIRDEGSRIERDDDTFAQQFIERFTLAEDHQSSHMRTEKRLEAHCRLLLRGPNHSGVPGGDDPFIGEQVAQLGVAVRSSIRTIVTPGKVEYSNLEFDAHHGGIAYRFTLRVWRDGNAAPPGQLDLALERPGTEIPVDNGCAPFGGTYGRFHQWGCYSRQFPGSMSIGPRSANGYKPQYSLVGTVDRTPEFVYKTALGIALQRTRTPVFGPRWLRFVKGNRLFHLTTSEARENTRRQRRHTNGLDDAVEIAPRYNTGFEQVFGKQRERNKHIGRQHP

SEQ ID NO: 998112 - protein, 274 aa, Homo sapiens
MGDETIGKKLPAIYEVVHDSMQMHRLVDTAGQPSKDSLHSSYVTYEGTDMHAESRIKEGDLVTLINKDWDRRRAGGNRELNGENAGVYPEEHSRKLVSTGNSETRQGTQYRKNAHRHHESDYLIQSKTKEDTGEQMKERTHEPVKPEEYPCVEAERTENVTPKQRENTDRRLEDGRTKKKKKPKTELETINKQGTIQIYHGRYNGRKEKGPRRRRDKKAKMASSRQGRLRGHDWHPQRERAGKENAGQGYLDGRRQPIGMTKSQQDSDRNRTTS

SEQ ID NO: 998113 - protein, 228 aa, Homo sapiens
MLTIQLSSESLAQVVSLLATLMQFHRRTSLQWASSPWFNGLTDLQARQDTRNMSAPDSNAPTVDVTLGSPHSLSKGSRAEYFTSMRISQVTTFCWSTLLYKGSEKQLDRKYNMTSLARTSLNRNHASLSSPAKGTSRLTLCSSQPSPARLPAARDPFDAPGRFHGLAAIASRHALPTGTSNPCESNRTYGTPGPRYSTNGQSKAKTPQTTAPRALHYPAGGTTQRHRH

SEQ ID NO: 998114 - protein, 173 aa, Homo sapiens
MRRSEKSNLYPLDRRTLPAPRMFRIALFGSTPQNLTDAIHPQSWLPARRERYLECVVQTLRHRSVTAVLSSYAARVRNGDTDRGHNIFKTRLCGPSTSHLYAQSNGWIVLTLPLSSMSSLSGGPSGAVRAMTLCLDAPWGTTPLKGLLCGALFGTMSACLVGHLIPGATADMP

SEQ ID NO: 998115 - protein, 126 aa, Homo sapiens
MSFGLRSGGDGRKCTVKCPVPPICTCTSYRGPYVKLPILHTVFTQLRDGEIPRKRNKRFLATMDENGCGAYPGAAQFEPFSQFLLHLRCTVTMLARDNYFPQGLICFLSKHLFPYTPSYADGQLYS

SEQ ID NO: 998116 - protein, 281 aa, Homo sapiens
RQIADSAEYLDALIGTDGPISCAHVPGRVHRWHNTRYCWAEKGGGLYACDRHPTDFSGSTILLEHEAVKYLAFPSARRMNTKLFSEASYQFRAPQARDLHGRTRAEVCLAPYKNQVEGNARSGPSQGVWTDDPIRSLATKTEKADWWFLLALKVVASEAYKTSMPILGAPGITKSGWRRSQAVTCHTWTEKRNRRHAKVSKQPRRERHTSVSEGVTEKRVRSQNGSEPDKLTKVPHETVRRRTRRMSVDREARINELVKYPPLPLCLAFTSDGLTLEMFGE

SEQ ID NO: 998117 - protein, 322 aa, Homo sapiens
MCLIRTLYQLIPEQYDPQPEKQQWPRPVTLALKRSNRPYTYAHIGPNWVVNQSSETPRVGPLGDNPRWWPPGRENGPYGPGGSGIGEQQTLGGPDMAHITGGSPGSATHPGRKTIHKPDTHRKRDHSTTREGRPPRGDQTTPPGSKGGLKPVGRAGPVQDIGGHVTESETTAPVVERGHRQMRARDIRKERGKRDFGPAVTKGGDGKIARQGTQHLPGSRDTRGVYPQTRGHRKPEHKATTRTSYTSRAEYNQKGAHRGHTSPTTDEEPQSPEESTHTGDTTRMQERYPLPGTKQPSNGGDYGANPNPHTQRPSPPRTTLPP

SEQ ID NO: 998118 - protein, 69 aa, Homo sapiens
VAVRSLRGSWRADVLARIRDPQAVAVAVPAALGPSRRDAVVTPSRSRPSAPFSAPMTQYAQGLIVISLR

SEQ ID NO: 998119 - protein, 55 aa, Homo sapiens
MSSLFPRKSLEKFLGPSNYLRTSGKPVVSDSPTEDYIIFSFVVQTQHINIFFPQM

SEQ ID NO: 998120 - protein, 120 aa, Homo sapiens
VEAISGLHSTGVSMVNHASLGRGLRTRLCAGIMVRSEEAGPGWCPRSTGCCACAWLIAREYSGGVDGTLHSVTGRDAMGTLERAGSVYGRDGRPWEQDRPLRPYYHLGAAYWLFCCVIMC

SEQ ID NO: 998121 - protein, 313 aa, Homo sapiens
QQNASISSLCLDSAIVNVKVETSSTCPEPLCTATLLDSEKRRGRTCPSRVSYGEQEGLRVEWTANSLYLSTHADTCYSRQYMREYELTANHNIRYESSKRASLGEERASRLFRVRGTLGWLTLIKTLVVTVQGVEYSVPRVYYAGPRVVCVPCTVYDWVPSWRDQLRKLTWVPAFENRMALPLELKNQRCRIGNVTKGTAYRALPLAWVSELGIAPQGGLAIDREGPHPSPLGNWAESYPVDVAKPLSLTGESGRPRVVGGNQGNLPALVFGLSVIWVGNHVVAQFALGGPTEKRESDTLLPVHGGGSLELVG

SEQ ID NO: 998122 - protein, 292 aa, Homo sapiens
  misc_feature (51)..(51): Xaa can be any naturally occurring amino acid
MWDLGTTSLVVLPDVSHSHRIGEGSPSEGLGSGFGPRNVYPRLAAIDGRLXGLSYGCQPCCAWLIGDVCHGTWPVGAWRQSAHRICSARLLYSADLGCEVLPREGLQVIGLDNEEVGPRKGASDSDWELRENGLAAWITQGLGGLTSVVSVRLTTSSYDDMGFCGELKKNLSFILDSPDYSRGPVRLQLRYYGVPSIGSGSFLSDIETTTPSDGILNHIERTFAGGEKQSCKGLPQGDTRVRRSAPQEAGPRWVDSTQAVALLSPDCGLLVLLVVPIATRASRYKGLPNPPG

SEQ ID NO: 998123 - protein, 196 aa, Homo sapiens
  misc_feature (157)..(157): Xaa can be any naturally occurring amino acid
AAAAPAAASSSASCSRRLGRALNFLFYLALVAAAAFSGWCVHHVLEEVQQVRRSHQDFSRQREELGQALQGVEQKVQSLQATFGTFESILRSSQHKQDLTEKAVKQGGEWRSSRDPPTVLAGNLQEWRIPQNDLSRWGSMVVEGTPRERGLSRSPGXNNGGRERLTGASPKSHQRTNIAIFTEVQKRSQKEINDMK

SEQ ID NO: 998124 - protein, 265 aa, Homo sapiens
SHPSGGRIKVFNLSTMCPSCTLTMASWQAETPPMRLAVSKSTATKPLSAIWVGEGTNKDRHRVLRVGAEPAVLRTPSCSRICASSCDWRHDSSRLRHRGLVHMVVALQGVESYALEGCSLANLLRASRLTMIAPSRPINRNSDDNPIDHSCCMRETSFKAMDDGVAGIPEWSDERGISSRIAKPRNGRSRRVFGGENEFVENLAGAPLTEATASGIVWFMVDPSADRRWWHREPSLADVPSTGVAERARTGQWECRATPSEVKLG

SEQ ID NO: 998125 - protein, 198 aa, Homo sapiens
MRDIRENFHLTVMHLLCPGRVVQSHMTLYHDYAAYLIIALSEGVPQALTVDVLGRGAECLVTIGVVRSVAHDSCSTQETEDALRWTAGTRASIMSELQGEMSRSLPMDSWSIMIARAMLALSRKTAEQEEDRSWHHGTPGSEDPVQEIYRENQIHKERSKKGDNQTNKTKVKICSILERGGFVGATLRLQSPTVHSRR

SEQ ID NO: 998126 - protein, 187 aa, Homo sapiens
MVDDTSHGGFVGIRRAIRCDKPPSEGPARDPLRENLYCVVWMPSVQVELKLATEWAVLLSYKATFWASKNCLQENESGPCNARGSLLEGTRGTTVNARELSQGNARAWHGSERSSKPVDTKGNLRKDPSQMVQLRPHPQDCAPVFPSCRPEVKASTRDWDDPSVKPGWPTVVPEEGLRTEAPSDDAL

SEQ ID NO: 998127 - protein, 178 aa, Homo sapiens
MRPEGGIAYSCATCVLFTCEERSCEAGNEKVRREKLRTAAPGSGKALTFMAVEEDSSARAGLSPRLGVHRRQVESSAQSSCGMSSSECCWVVRSVNAGAVCPPGGLVATLRRDLGGFGWLASSSLSSVTTLAALELATAYRTRAIIDTLRAGNAGKLKPKRWSLGKTLACPFAFGLGA

SEQ ID NO: 998128 - protein, 226 aa, Homo sapiens
GENYADTSGRCAAGVERARAVPKPSNRPTRPRLAHPHAREHSQPCTTELELGVVMGKRCRAVPEAAAMDYVGGYATVPGYDRPGRAGRVQEEGAAWTLAKSFTASCPVSAFVPKEKIPDPHKLKLWLKVNGELRQEGETSIHDVDHIPYIISYVSKTHNLGRRRYYHGLGRLKGVGPVKENDEIEAGNTRAGQYDMLKVEKPEYLSYFVNNFRDKNGTQDKKQATA

SEQ ID NO: 998129 - protein, 148 aa, Homo sapiens
MKLRQLRERPPMQARIPEGLNQTLEQSRVGARSGLTRATQTPTAMPTIWDQLGGVVLMDHFERTHLLSSIILPGMTTEMLGYSKTGIGGHHGPHGIQGVRRVDHQPQQEHKRKRETLTRWGVSATLSPRHNVNLPSSQLLCRPKKREA

SEQ ID NO: 998130 - protein, 162 aa, Homo sapiens
  misc_feature (46)..(46): Xaa can be any naturally occurring amino acid
  misc_feature (73)..(73): Xaa can be any naturally occurring amino acid
MVDCPWSAPWTCVTSGSWPPGAVAVEVFQAIGGGELLAGRNVVFFXRLVPAQAQGRICRREARGGSTREAKGXENSARGKPGEDREGSQGRISERKVQEEDSRGEPGEDREEKPGAELGLGKRRRRGFSFTRNGHRVGGLDSPPEAGGQGGVLSGSDTQARD

SEQ ID NO: 998131 - protein, 129 aa, Homo sapiens
MEAYEDGVEMLFRTGAQVSLHSHKATSSHGLGEPCSHRRHGGTLLFAFRRSARSSEQPRGANNLSAKEHRRALPCHIMWPEAIAQFNCRTPGRGTGRFRSCSPGAAPSSAKQPGEKEHPQLPQPRERDN

SEQ ID NO: 998132 - protein, 341 aa, Homo sapiens
SGTPPPRLGPLRPTLRFATNATYRRLPLGRPLWSGELALERANDVLRNRKGVPKRASLGKVRGPLRGAKPGLPQWGPTPTPLMGWPPYGPRPPHLQTPKDKNIGLYPLTPRNRREGNWREREEGSMPFGRAPLEAHAYLARHVLWPREAKQRHGSKGATRKTRCVKRVHKGELCGSLPFGGESLSVVNWRLNLTHGKGGPPAVVAPRSKTGWQGRQPTIAPRFDAWPIFWYPNELVHYRPRNSMPTPHQLEDPARHKCRLSCARHKRPRWGVGGRELYTHRAIVSPPKGTACPQLIPERTLTATLTAVSPGRVPQHPRPSLPHYPRKVRYDLKSEEVPPAM

SEQ ID NO: 998133 - protein, 159 aa, Homo sapiens
AQVNEDLVSLPHQLPEASEPPRSPSEKRKKTFVGEPQRLGSETCLPQHIREATAAPHGKRKRKKKKRPEDTAASALQEGQTQRLAWEPHVQEGGPMAQLPCLSDGRIDGTLAYHGELATQVSTVLRTATTRASTQTESRKEQKILEQKAACSMPHFGSA

SEQ ID NO: 998134 - protein, 76 aa, Homo sapiens
MGFSTLATSTTEVPGAEMERSEHTAFTCVHVAGRLTSRTAGPAIAAHSHRPTPAGAYRGRFRLEKHSHSPLAYAVL

SEQ ID NO: 998135 - protein, 195 aa, Homo sapiens
DEKASRKERKVILLLEVSSLICLLIVGKGILASLRLLPLLVPTGGGDTGLRRKKKKLLEDWRGAKMKVEEEDGRRQTERRTDRSGSALEDDAARTRYGLNAVLPTRARTTRTTGGIRRCGSLLNQVWGLGAPLLGTGRCRVRGSPSPSHFFTSAPCIWALHHELAPSSFSPSLSHFRLSTTLRPSTLTLSIVPTS

SEQ ID NO: 998136 - protein, 322 aa, Homo sapiens
EGVKIPGRRTACCRKALKRQGEAQGAAGSAGGRSVRPAVVEKMQQRQDRRRQNLRRKKAARAERRLLRARKKGLLLPQDLERAGLVLSLSTPGAAVFRPRRLQDTALSPDAGSVPGSPQTFGLSIVRGTQLVTLLEFEAPRSQIPCDERREFQRHPLNDRIRDLQTPAESGEGELGALSTAFPWAVKASAEGSAEVRGGGTVRVGSQLPVPHCQSFAGAIGTEDGGRLNAGPRCTASVQPEITSEQAIEARSASSGTPWTLRSTGEAQSRTMVHHWGRTPWLIPALLAYSLLGSHSFLFPSASGAAVLLSKNLYRREQYFPL

SEQ ID NO: 998137 - protein, 143 aa, Homo sapiens
HPFPIPSGILLCHFTVVPFTRSQYFHGVPGPSFLGFSFVWRMLCDCRRHAWDPTAPLARFRNHLSHYAMSNNSTYAGMSLWRLSLMFQYLKKFSAQMVIDEETSGSMDTSYSPMMLLHSWLDHGPCTARRSIDEPFVEHHGHR

SEQ ID NO: 998138 - protein, 211 aa, Homo sapiens
PSIVHPIRPNVSQSFLSVCVPLATMVFCFCDIINLVCSVLADCSVYPIMGMDLFMKCLPSLVSSAVLFLVWTLALRLLYSVHFSHSLGFPVSLLSVLSYSSRGLFLIGLVPFGSVRIRSFRFALHTAYPCSDSDSAGLATQGLTVCCAFVPSSCSAATPVRGFGCDSGLGSLGRLGCGPPRRQPPPWSLGNRCIITSENEISLQSLCTIGS

SEQ ID NO: 998139 - protein, 220 aa, Homo sapiens
  misc_feature (212)..(212): Xaa can be any naturally occurring amino acid
MTLGFLKNKAIPEDSKKTDVSRDAGLCSCEWISSPFVTQRGRGPLVLTWTSLLPPDARPRTRRRLNMHYSHGKRLYANGKSTGPTSIFSSRHTRIAEYAHCSSNEERRNADANSRNLMLMDVQLPRLLLLQSSPRVPASLRIASRYINPVRIKKDPEGKKEHWRRDATPCPRSPARSRPSNFPASALNSLKPGLGRAVAAESGLEREATCHXRQPQQSRI

SEQ ID NO: 998140 - protein, 165 aa, Homo sapiens
  misc_feature (80)..(80): Xaa can be any naturally occurring amino acid
GEAAQMPGVTVKDVYQHGVRQKLLAAFHQKSHGNAESPRMGGYRASQAQSTKSVAPYRWRYIGSYHRDAASTDVGHLVAXRGGSSGVCAAHERNESMGDVHEKRRHAQTIFIRGSKSVARSGPQSRGGAEIWLEKDHMMAAVNLQPERSKTILTTNRLHGGSCHN

SEQ ID NO: 998141 - protein, 201 aa, Homo sapiens
ARDLNNVGTEVPSVPARAWSGGSGPRGFWSLHAPVLGPCLCGHCRLPPLIVSQRLTLVPGCVHALPCFALKSSGSARPFAPCLALLTAQGDAGLEPRQVPGLSPARHRNQLFSLTMKADAESGLWAELRSVPVSNFALRRGSSGPLLSCREVAVPREAISLGQLAGGRNGEAEPAGQEGARPPPTPSCHRSPPSLAPHIAS

SEQ ID NO: 998142 - protein, 69 aa, Homo sapiens
ALFLTLSSYPAEVYQLGPFLRKRAVLTLYLLHCHRRYNVGLEYGCTCLADGAPICMLDRSHRNIDLLSY

SEQ ID NO: 998143 - protein, 133 aa, Homo sapiens
MKLGRAIPPKCWDPPTLLLSARGPQFLGRVAPLNCHFMDCSGSNYSPRKEPVISRVYLKDEDRWGTTAEDISDLTFMSSASPLLGLRKEIGGSYEEEAIFFTHPFLFGTATPGLRLGPWGSATGIHKPPQPSQ

SEQ ID NO: 998144 - protein, 254 aa, Homo sapiens
GADSEKSTVVEGGEVRFNGKGENKIRKPRTIYSSLQLQALNPDGSSYTQYLALPADGRSIAASLGTQHRLTVNDLVPKQRVSKFKKLIERRLGLLLEGSALANSVGPLSAGILHTDAAPAWNPNSSSGKRLHARKSLGSLYPQLHIVVPFYRTKKAMLATPNYVRLPARLLRVSPDPGPSRHPGPSIPSGKDGPRGKKEQWRRDALHLLGAPRGPAQQLPGIRALACTWPRAEQSSAENGLGGKPLPPIQPQQQ

SEQ ID NO: 998145 - protein, 109 aa, Homo sapiens
MPYNVIGPHVHCGGRVLRLLSTISSPEPSTSRSPAQVAWPCGWPTLSGAPEVSPHSDSCPFQQLQRAVSLWGGEPQGLFLHTCSPSESGYVEPKCPWNQRSGPTSCVVQ

SEQ ID NO: 998146 - protein, 72 aa, Homo sapiens
MSHENPVWIAQLRELEGGERTRQRYWKGVHGQTEMDLHFGELCGRLDSLGLRLLFYREISEVDFPEIRRRGG

SEQ ID NO: 998147 - protein, 251 aa, Homo sapiens
RALEASAAQRRLKIKKYKPDVARFQTWRTKPIIRWRTLSLCSAELQEFNWNKLDITGKATSTTGSGEKHKDAGFWKTTISTLRDQELAQLHKLDTGSERSRRSLNYILSTNSYLSSRLSTYSNSHQQYVHNSITYLKIKRISNTPSHSLDNRCQANNQAQLVIILNITWKTSSKPHNPHQKCYKARKSERTGTSHYGFGYTDATNLAKQKLTATTQFKHLFLIGQKTYIGSTPTFTPHDQDYLMRHRSAGQ

SEQ ID NO: 998148 - protein, 259 aa, Homo sapiens
MVEQVLMRHCVLTVPWIGGVGLTAVTLVRKAYDHGSVAQYEESILTRVEHPEGNAQRPGESLHALIERSALARGVFWTDPEDSEPEHWIEFENTLKLLALMISLSASMHGFINCIIIAFDIGAGHTMTQSYYDQNITRLSAAHLEDTEQPIQTHSSVCNDRTYLDFKRPWATDDRGLQEDEPDKGVHPQLPGQWPRDSADRVYRPVADRPFKPYRPTPLGIAVATTPIWARLPEEFLTQNELDSNGSVNLAPGLAAGTP

SEQ ID NO: 998149 - protein, 321 aa, Homo sapiens
MEKLIFDITTLSANLLTQYHALKLPPEAGTCQHIQPSYLQLTTAAYNLNHTTQLTHAPQRETPYCQPTSLASSMQAFTTTSLALANLPSTPSQQRKDTPESTHAATNLCPHSTLSSATPQQALHHPPIYFSLRREPGLGALGLAFTHGSNPHLPHSFQHLISIYPGAYPFPDTRKPVGNVNTHNKKNNHPPNFPYANLTLPHNNPPHIIPPRPISQPPHEENHNPNATPHLDPPLFTCTKRHIIPPLDTHAHHQRFIPHKHEPTIPPPTANRQPPTPGPVENFPHTPRANDNTPSLSEPTTQTHPTQTPPHKTQLWTLARQ

SEQ ID NO: 998150 - protein, 74 aa, Homo sapiens
AVAVLCCGEGEKALCIALAVVGLLLTPESPAVTDAGEPPEDASHQSDHVLQQCRSTQTFKLSWTLRCIREEGEV

SEQ ID NO: 998151 - protein, 111 aa, Homo sapiens
MSGRGKGGKGCGVMGVSYAVIARFSAITSRASLQTSYPAALLVAAVSSEFLCLIYEETRWCYSKVFLDNVIRDAVTLHMSTAITAKTVYSNGIVVYALKRLGTLLFTRFGG

SEQ ID NO: 998152 - protein, 125 aa, Homo sapiens
MQGLEEDTWQTITGQTCTTDYFKKSGTAFHHKVHAKIPEPESTDKYTKSPEKLESLKTCLAGIYAEIVPTSMFLHEDAWVRPPNYIPFNKHKDSEEALTLPRVTLWGEIIGMLLRSGSLQENHFH

SEQ ID NO: 998153 - protein, 168 aa, Homo sapiens
  misc_feature (67)..(67): Xaa can be any naturally occurring amino acid
MHCLGRAGKTAEGKGAIFHVGEPHETVKTLATGHVSQSGPGSETWPWGTRVGVMTTCRTQGISQDVXQYCPPQEFVVVEPSYGDGKGCRVIQIPGGIQGYTGRNTPEIRVGVNLLEFARWSLIVDTKREEGIDLTRDSGIVLVTRVHLGWVDDIKVDLNPRAMEIRMR

SEQ ID NO: 998154 - protein, 63 aa, Homo sapiens
MGPQPEKVKHNRAYLEKKAHEKGHSSPVDTAPQGERLFRTERGKAQPIGKKPCEIYEGASWKP

SEQ ID NO: 998155 - protein, 238 aa, Homo sapiens
  misc_feature (15)..(15): Xaa can be any naturally occurring amino acid
MTMEIATTLFGVKQXFMDFADDTDAIYSIIAIPKFKRSGAQQFFKSHFVATTTLQSTFSTRSLGNTNSPMATTTNVQPYGEHRKKNAQDIVLGGGGLKLPSKPLGLHWCWHHGPPKTIRSRFGPHFGDNLCSTSLAWVPRPKSMVTLGGTLQLVSVTPRGLALSVEFTKKTPLVVQTAFARLPFKTTWHFWQTRVYLCVSVEPLVTVEPSIFRGGWPPYTFGNKMPFVCSTEPYGHQM

SEQ ID NO: 998156 - protein, 285 aa, Homo sapiens
ARQVLGRSDGGCAVTTSGFALQYPERVVIYLYRGSRIYSRGTAAHALLRYLHTNFAQAVPRLSSRLYDVNEQEAIYSTASRQSRIVQKRIELGTQTAEFPEQKVECMAIHSQACTRRAVTSPLRVTLVNGHPCGETCRHRTHTCSPGRDKTYLATVPTPSLQSATDIHADLNNTTRIAPETSYHQALRSSVITTGNLRTLGTQLHCYLDALPRTIAFKGQYVTQRNASRATIRTPIHLGPGRLAASFGPVLPHAGPNQALCHTAIEHGLGGGPKPDPSSHTQWGT

SEQ ID NO: 998157 - protein, 534 aa, Homo sapiens
MPLTHPAAPLEKEPGSRCPVLARLAAAPRRALNAFNTTLGSNSPLLTLGHHTEEAKQDQPDLLAHLSTPPTYLALTESLALELLNKRTVTTSLAPRGQLAAHAHASGLSPFRTSAPPTGHSTLHLSQPPTTPRPLHLGPSLDTPRHAFGSPLPCGPTKRNYVLPFWERNGALGTFTTSPRHNGRMAPWPLRPHIAHLTSATQHTPRTQLNLIMFPPLPLGTPALGATPDVPPPFPSTVAVNTRPPVQTHCAYERTTAGTPPNVTTPAGAHEPGGFLTYTPTDRAFVPPWGPPNYLRLHPHPPHQCRLGTHPKQDTSTKGRTPPTALLPLSPGGSYPHPPRLTTHPNGTILRPTLQPIHNPNLYNTPHAPPTQHSSTIFQLPPFPYFYTLVQHPPSFLAPTHPHTTLPSPSPPTSTTSTRPSTHSPRATHLSRAKQVLPVAPPFLSHNHLSPYALCTRPRLITPHQLYTVIQHPCGDLTSHPREASMGTCIIIGGHARPSHLLVGRPSLTTLSLATRTHTIAPAPSQCVIPITSN

SEQ ID NO: 998158 - protein, 133 aa, Homo sapiens
DRPAVVCGSASGAHRRLERPDAPDVGCDGRVKQLGAYAWVAVNVFWLHEINAVLIGTVVISEKLVEIVEERELRVALLTKDEECLGVDLQECVLCRRGESVVEGSYVERKWCYNVATSGEGVRATLVQHLPPL

SEQ ID NO: 998159 - protein, 79 aa, Homo sapiens
RIASKPLLAACAAPSLHAVPPQIDHLLSMQRIDNVYRKRRVKENARSNRERDGITWKPDTGGEDGDESPQKLGNGLIAL

SEQ ID NO: 998160 - protein, 191 aa, Homo sapiens
MASQRHLSSEPLSRKKLYLSILISLQISLIITFTATELISFTILLRKHTYAQLGYHQPMRQQQKPERRHILAMTTALVGFPFPNHRTELPRRKTLGLTKHSITESSMAQELSKSGPTTDLTSLHKKFHSQDNHLQESSENAPKTKVESRIGWITQEAGGRKTYRQQEENGQQAARKQDLRPQDERKRNTGT

SEQ ID NO: 998161 - protein, 376 aa, Homo sapiens
GGGCSSGRAARACDPAPQPASRPRVRPGPGGGWLPKMEASTARHDMLLRRTHGGSTGTGRNEETKTGRISTRRNESTTGGRTATNRGQKPGQTDQSGNKRHQHTTHAPQGPDATRHTESSTGIDAIEPKRSHSQQQDEDMPRQTQTAMQEPEKMQERSTNDTASQTGTRRSPYASKTMGANNAQKNGKKPHAQDITANGQQSAQYNTPKTHPQSHQPGETDNTTQTQHPCERHTSARKRSTQHTRRTTTNETHDHDKANAQNQTVNTMRRRNPNQTYRNTSMANTREAPTRKRRTTTKNHGPTQRTDETNHEAAHEIQEPRTHDRHTDNQQTKAHQPRQQRDKTKDRHETRTPHAQRTNRDPTQQNTPQSTTLNTA

SEQ ID NO: 998162 - protein, 109 aa, Homo sapiens
MPSDSVTSAIASNMYNHEATWTFYPEPRLYNMVASMLSLHPRSIISMHLQRYVKYVFAQMGHKATSRTDILFSQDVVVQQNFYPVSKALGYPHSVSRRYMSQERQVRSQ

SEQ ID NO: 998163 - protein, 282 aa, Homo sapiens
MALTKLDSKAHRYRPSRGTDGNDKTSMTGKEAITRHTSPWQTVARPTRRRGNEDSERHRHRSGHHVRNRARTSVHAQRNKCHRPVVTRGNLHTAPELGHESTIVSSETCVRGRRNEPQGRNKAPTRQQKPGDSAAAQRERRRTQRNNKREATDKAVRERAEARERKSGGEAREKREKNARTDMKRDEHTGERDRETKQTGRRQRRRRAGGKRRRRGQRAEEGKDSRTTTDKRERDRGGWGAAGAKASKRDKQTEGTAPGQAERKDQQDEKGRRRKHAPRKER

SEQ ID NO: 998164 - protein, 270 aa, Homo sapiens
MARKLIHLRDPRRAIRYQIIRDLQVLHECNSPYIVGFYGAFYSDEWSIMHLRMGHSMVVAGVPGPTVLKLGQEDSRSVDPGGKVSIGGSPCVLGSTLLSRSSHESCHPEDVMALQPIRRCNRLAGEDQAVGDLRGESASLSRAPWADLRSLARRVSLQSPPRSWLPRVTTIYLVLHGRYTPGMPMAPVSWLELAVGPGTPSPLSRRRKSWKAIFVPCPVRQTGATNGEPHSDLASCRGPPLAPPSAVTGWIARLPCASLNSWDYIVNEPL

SEQ ID NO: 998165 - protein, 136 aa, Homo sapiens
MSSCNYVAIGKGWGVMESWKGTTTHFGDADTVCRGTKKKALVIEEMRTHKKITFGKGVSWCLDMTCDRTLGLGINWACSHDERGHNGMLIRRKGFYNAREGINFARQFVGVETEDKGQGERDVDNLNDDRKTTLWS

SEQ ID NO: 998166 - protein, 103 aa, Homo sapiens
  misc_feature (20)..(20): Xaa can be any naturally occurring amino acid
MARGPLWRRQPRAYWRTGVXARPRTMPPCETAEESKEPAEADITELCRDMFSKMDTYLTWGTVTGTSEETIKLLENMNKVTSLKYLEVKDIAINISRKLRGSY

SEQ ID NO: 998167 - protein, 114 aa, Homo sapiens
GNTSRAPTVVPRNCGRAVKPPVFSGHILKPPLCFSHVPYCESSMATYMWLLGARSLPFWPLGFRLHMPTAWSGELTARLVCIASNWSWILATDVATDAGGSMTSGRTSTVVPIQ

SEQ ID NO: 998168 - protein, 208 aa, Homo sapiens
MAEWNGGGSSRDMVVVATREPELWNEDWRPFKRQYLTSKEQFHQFLEAKGQEKTCRETEVGDPVCAMSLAEPDGKRIRLEDGQTADVVTTEEAAEPVGMHLQTQKRARGRKQGSGPTVKPSVTYDNEQAVSLPNPGVWLLSVSSVHRCPLSASYVGRYLDDQAGRPGPPAALLFETFDRCPYGVTCRFAGAQLKAEGQNLVQEELAAA

SEQ ID NO: 998169 - protein, 175 aa, Homo sapiens
LFPVWSLETTCENGTKKKKKKKQKTTVLRARARGPLSEKHFLKTHIALWARRGRPTGGKDDNVWPHKGGFPKGNTGVREGNIARVRGISSTTIHKKNSARGGGATKRGAAFLLYKQNLSKGSGGAVSLRGAPTYPGGIISIHPNTEEELSHQETKTCSRLDLSNSFRRAPASLAG

SEQ ID NO: 998170 - protein, 130 aa, Homo sapiens
MVNPTVFFDIAVDCVSPWIRVSFELFADKVPNTAENFRALSTGEKGIWLLGLPAFTELLPGFMFMAGDFTTPIMRDWWQLSIYCGRTSLNDENFILKHNCVLVIVGPLATLHEIQINKMCSQGVISSLSA

SEQ ID NO: 998171 - protein, 71 aa, Homo sapiens
GETKRLTTGGQTGTPRQKVVDPFAKKDWYDVNSTCYVPILDILAPTLRSTQRPKASKDSHLMVSRVDARLK

SEQ ID NO: 998172 - protein, 134 aa, Homo sapiens
MNTNGTWNAMECRRLMERNNVNPVSPEGRMAYPRGLEGTAQIFASFGGRKGQRPEKRILFFSKNPRAFLPSGPGFRCWPRANSHREKVNQTDARKGGFSPQNYGKWGPPRLGSPFLGNKRLAFGFPKVKYPVRP

SEQ ID NO: 998173 - protein, 68 aa, Homo sapiens
DSIIRRLMKMNRGIKGAFQECKLMRFEIHCWGLDEIPVLGQEYTEKTRDLLSMLFSMCDLMSKKIASD

SEQ ID NO: 998174 - protein, 30 aa, Homo sapiens
MGPLSFGRFACKSYNMRPWAPKVASWGPPL

SEQ ID NO: 998175 - protein, 98 aa, Homo sapiens
DYENSNPVPENPKFFRCHSYHTRIPKDKVDAIDIADRAHTPKMLVDTLPVLINHPEAPRRRSIYILLEYSCPRAANSLSQTPQVIRQLEFFLTLEGRP

SEQ ID NO: 998176 - protein, 245 aa, Homo sapiens
MKDDIAALVVAQAAPCECCKAGFVGATYAPPGPIFPSHLWGCSQARKGVMVGWVRQDSYVGYEARARRGILTLKVPHSDVTASVDQPGVPTVARKIWTTTCFYILSMRVVPEVSTPMSADRGRPMNAQGPSRGEDELMIMFETFNTLSLCTLLSRLCYPLYASGPLPLAIVMELRLNGDHPHCCPVLRGVMPLPHVHACVWTLAWPGTLDLMYPRDRILTDARGYLLRAPYGRCREKFVAVTIKR

SEQ ID NO: 998177 - protein, 534 aa, Homo sapiens
SQQTLPACNELPGGRRSSHALPTKCRSLPTLRRNCYSGLAGCCEPAGRKRGCSHDRRTTSQSMTGVAPSSVLNVPSDSLRPRSLMSTQLKCRRVSNGRRWDEAAGVLPSLNEVAHGRVAWYLTRTSRPSNARSFALAQVTPEWSDWWCSRSLGSRWLGSYDQAGLKPRQGAHRFASSFSTSNTQSDHGSQRVDARGLDMEREKPKAKEWSHEVCKGLGSMPRVTSQPWRFDLPESWPEGGPSERVAPVEVEHRRATVVEGHEEAVFLEGIKSTSLKTAWDGRDVEVRLYARVHWRRRGDLEVNPPGYTLLSPSIHSRGASNEYIGRPQGSPQNGVLQFTRSPNESAPNSVNTPELFNEGLPCKQAWGGPLREPPFTQAHFLDKHKDPFNEGVVPALRNLPDNQGFVPPQMTPFLDRETKVPHPEREEALVGQGDLGWRANTGVEHDWPPERAFWRLCKLDGQSRRGHKRCRSRFPLWLARLDTISWRLLNIHGDLFKHFSQRHYGGPRDRGFGKAYIEKSPPEWEPEKGFVPYE

SEQ ID NO: 998178 - protein, 212 aa, Homo sapiens
  misc_feature (113)..(113): Xaa can be any naturally occurring amino acid
MRFPATIMLSCLLLGRARYMHVSGELLIFMQVRVLLSVNIRGIDKYPIVVSTYLVDLFCNESRPTHGDSSRTSVYNYTAGPIVTLSKGEQSFHCLECCWLECVASVGLDCGGXLERRFPPLSSTSHKESWLITRRGSRSSPCRRVVNHDLWLVRRNRCLDCCSRVLENKTVGIRHFEGTITVHRCNIKGHGPSETARRYSRSIGRYRFRDKP

SEQ ID NO: 998179 - protein, 179 aa, Homo sapiens
GEDRVAAGGTGVSFTSPSSCCSCCPNASVPQWRVSARSLDAQRSGPCESPYRSSTRLPSLPAGLRPVSCRGAGWKQTWRRGPNVVFSSESILAGRCRIGKLATDDDSFSKIEEYEVTVVRVENLGLLKNEYVGCQWAVGILSNLGTWYSLLRFTGTNWYIRLIWGTHCDGLTTSECWMV

SEQ ID NO: 998180 - protein, 266 aa, Homo sapiens
GGAWCDVTRLIMGQAKSVATYHTSVSPLCLPKAFLGLTLSDPKARRTGLSSAPIPIAQRDKLSRPSHGLRIYRVVLGPLCTLNSWCLLLPYSRVYNSMNGARWDLKREDGQPPGPHGSVTDVTPVFLGAQRMAYSSDGQRSLPQVPPTYLDDSGLIAPPTKSYDFGHNGEHFGAYVVFNDCVGGLWARGGEPRCQELSVTWHLYLLVQTRCLLIAGFLMFAWGLLLVIHARAWTAPERARHASPWLPCGRSLPRSQTVRSPSRYPS

SEQ ID NO: 998181 - protein, 38 aa, Homo sapiens
MADKPPFVGKRTTGGYYTLKTRLNTAPFRGGFTHFFPR

SEQ ID NO: 998182 - protein, 106 aa, Homo sapiens
MAAVQSSFGSASEGDRGKRETVGRGRGRGTNHFYSQSNLAANRKAGLWDVENLGFLKSPACKTVVVIRLSTLFMETTEQLCNRIGYTCLLGRPNATEQPFIKEDQN

SEQ ID NO: 998183 - protein, 94 aa, Homo sapiens
MGSQAMIMFGAFTPLINCERLLSFQSGQSKLIFNAQRRNSTWDNLDTRNNGIGVRVTTRLARMNGACLGTQAVVDARGSPHRWCGVSSAGSDSG

SEQ ID NO: 998184 - protein, 134 aa, Homo sapiens
MSAPAPKEGFQEGCDQGAARRMGEKRKRSRKESYSVYVYKVLQYRFTPNNGHLIQGHGHHEFLRKLTSSNASEARLPDWPTTTERSTITSRRSRPRGASAASRRSGQARSVRRSQGLSPSNTKLQVKLCAEVLQ

SEQ ID NO: 998185 - protein, 226 aa, Homo sapiens
MVARLVWPNTKLRMTPVQRGGPGGALCGPGYGEPAGGFRGGFGSGILVAGVAAVDGGRGRGRGARGGKAEDKEWMPVTKLCRLAKDMKIKSLLRRSIIFSLPIKESEIIDFLPEGPLSRMRVKKIMPGAEADPCRHSCNQVQGIMYAIGDYKWTTRIMGVKCFQWSVGQPDNPDRSHQSMAKALHKSTCSQRLLGEQGSGKAPRIVPLTSVTWPMRDLLLVTPYIP

SEQ ID NO: 998186 - protein, 59 aa, Homo sapiens
  misc_feature (28)..(28): Xaa can be any naturally occurring amino acid
  misc_feature (57)..(57): Xaa can be any naturally occurring amino acid
MVDERMRKEGRVARMPFLIHTRDVQAQXTAFMDGLDLTRLFLQRLCVRNTLQAVTDXQM

SEQ ID NO: 998187 - protein, 136 aa, Homo sapiens
MGVLACLTSCTNFSISFFSSLLGRGMWFPLTLDNSRLRQLSVVAYRLTRSEQATGLSVNQLILMYCCEQRSVEILTEHDPSSCVDHVISQPSSVHEHLMFRSTPVSSPQQHSVVERSQSLSWIALQGVHDSRNTAH

SEQ ID NO: 998188 - protein, 272 aa, Homo sapiens
MAQAGCGAGAGARWRRLHGVSVWRSRPSGAVRFVTHEVKSLSLSCGLLVSGPGSQLHVLSARAAVCHGRAWGCTLVTLSDGTTAYVQRAVKGDERFLKWQVIQLRGWDHRIHSPRCTVQQMKLSPLSDGHACCMLDDGSSGLHTPQHPEKAMTPGALEAVQLEDGSTCYIHHPVAVPSESTILAVQTEVGLEDLAAEDDEGFSADAVVALEQSASKVLHDIQIPRNVKGQQVGDRAFRLWVPGVWAYLTAPFISYRWLNELYRLASIPNVIP

SEQ ID NO: 998189 - protein, 282 aa, Homo sapiens
  misc_feature (177)..(177): Xaa can be any naturally occurring amino acid
TILPACGATLTCTCYVPQECNIPGTSLHSPGRGHRLYPSLQLNVLGRRIGGAEGVLLMMFVIPVHEIAHRLACPLVQEAEMTLCLPLIFQSSLAWIVSSKDDTLELLSSSSSYHRSSPVFTSQWSYLALVPEGRLPDIPFSIQYSPRSQSATCLLMKQPSAFLCACLITLMATPRHXSTVTVENSIASPRFGLGDRHRETQRSQAYSKRITDGTPRLKQAQRPAGKLLPLDGSVAREQGKESEAKRAESELRPDSVLAFPGAVSPFAYPSEVFLCREETRVA

SEQ ID NO: 998190 - protein, 616 aa, Homo sapiens
SFPLLQELAGVKTHALSNAQNYLTRRTNTPTRPKQQACTACAGTRPEHKAANPFNTPEHNAPKHRGDRPTTLSRPAKTPCLPFSFHGTRKTLAPTRLNFPRDFLAPLDYFSPRHTRRPQMAYPHGKGTRLNPSHVPGLLITPSPRRGLWQHTRHHITRPKGARQQRRSSLSGPKSLWPFKPKTTPPQRSSWRPGDLRNPQTQQPRRPRRPSTPPGGAPCGPLNKQFPLFPAPNNNHAGPPTKGATFNVLNFPPLRGFVNHGNLGAWPPHFRATLPYDPIAPFWQRSPYIRRPLHHSHIAIARPLFQGASQTVSTPGLGNGNTTNPFRVQETGPPKGPQLFATPPTSSGGGKAPKVSYPFGKLSRHFPPFSYPPLAGYPRAPYILNRAAPGPYYRGNGGEGFGAYHTSSPPFGATPSPIRALSCSAPSPVAVRRALSYPFSNPLSCASANSTPGASNTPPISRLARVSPRVSRNTHITHRTVVSFSPPLPHYDAALKPPDLNKTRNSISSRPHVINDTHALLPTASSTTIYCEGPPHTHRFLTHQIPPPNTTKHTLITSNTPLQNSLRKGPPNNTLLGLHRPHDYTIFLHPPHNTCQPHTHTFSIHHFSSSLGQTSV

SEQ ID NO: 998191 - protein, 67 aa, Homo sapiens
HRRSQINISLPNRGTEDKQTLTLTELAALNYHATATGQLQLTQRHDYRATLAAHFWPLSLHGYASTH

SEQ ID NO: 998192 - protein, 226 aa, Homo sapiens
MPSIFCAHSGHGMVLRLYASYQEYSSPWTCVRSNVTLDLIRVFGFDIVILYGYASVIGLDRKVANVRHDISRKHEEDPFNITIEPCTCMCSYRPLSSVVPHDLSEDPQAALHGLVYKRITGDHSTVVTNASKDHERVATLEMFTYQAFTAALKATYDIPCEGGRIFYVALLRGCCAEGNLWVGPLSQGGQHVWFPPRSSEWCHGVLLFGEPCCPARVPVRVGPCTG

SEQ ID NO: 998193 - protein, 258 aa, Homo sapiens
VAHDGAPHPSSPSNPPLCRLRSFCRFPGACSAVASLIGSGPWLPSSLLTRRHACRQTPGRHRHTGHDRNKGAKGTRQIKRPCSIQNELHYFNISAHACAREAHAHMRFSLPENGHALLPASSQRNGQLIPHKRYKAYQHPYTLAHTAPITLAGKAEPQRCNLWLTKLTGANATFKKLYPRNFSGNPEETQTPPTRSTHLVNHNPTETKPNPQLTQNQAAQSAPHHFGRNGRHTGTPRQLYTQKRLSGKDLEMRIYNPQ

SEQ ID NO: 998194 - protein, 250 aa, Homo sapiens
  misc_feature (42)..(42): Xaa can be any naturally occurring amino acid
MVLPATAAPWWGFALGTPILERMPRTVDADGSSEQQLRYRLXEELMLLALFVLKLGELSETQGILPISWFGVVVSLVFVCYLPFVLVLDLSLGAHLSPPQGQVPEHVLVFASSTGKVSLMTHCYECKTVMVILALMAERAQSWLHLLSPCQSGRGPVQCLSSPQVPPGSIRVKSRVDTLWLQTKGCCSSHIVWGSVQSPGSYLCDLTTPGALSAALLHLKPFDSSALTKKMTLGGEGAPPSRAFSQELVL

SEQ ID NO: 998195 - protein, 134 aa, Homo sapiens
  misc_feature (55)..(55): Xaa can be any naturally occurring amino acid
MAQKSRVANKLHVRRQNVHESARDSTRVATITPSWQSFAMPTNCAEMSLVGASIXPEVSLGPKHIGGSRSHCFMALSHPCIDLSHLNGSVPLRMFRNTIAGKVYFEQIKVLFNGIHSMPNLALRLTNRTQNFAF

SEQ ID NO: 998196 - protein, 259 aa, Homo sapiens
PLHSPVHGRHAVGDIEAEDGAWCAGSPPRCCVRPSAVTSWMVVTQFAEDWATLVSLDAQHAVAYVTVETKPVSLATKHVRSGCSDSSLLYPLVFSRKHTCGSVIVSSLIAWTSRSMVLLCQSASETGQVRTGWRLECALDGEVLILECCQACWSYLGTRSTWPCSYHDAIDSPVDPPHSTQLTVARCLPLRSPVGRCVTFVHQSPCEPRTMITSCLQARSLSSGYLAIHLCMIGPGGPGPGRQSRTGSHQDLKSSALWF

SEQ ID NO: 998197 - protein, 225 aa, Homo sapiens
IEAEDGGGVAGSPPRWLCTAFSSLHPGGGDPVWEDGHLVSWSPAEWPVTSASLCSPTKVLLGQDEPLIHVFAKNLVAFVSQGTRETDAVLLAVAVKDKSMEGLKAPEEKVIRVCQVKVNPGGIQPRAAQQDYVNTQIHPIRRLKSLPPSPHGGRNYGTSLGARRKDSCLRQTLTLVSKIIVRIDGEDGTRHQRSRDMVLTSSESLLLCENWRNESPGVESRPPGV

SEQ ID NO: 998198 - protein, 108 aa, Homo sapiens
MPGTIISVISRDGVSPCWPGWFRTPDPPRLSLPKCWDYRREPLCPARHHDRASTPCLDPKHFYTENPKVTSQFHPLVHNPPGNNNHVTLHLWIYLFWIFHVNGNHIIW

SEQ ID NO: 998199 - protein, 305 aa, Homo sapiens
SFPSCKMAGATTVEQAEHTQQQQANPQAQARLHARWHRCKTGSTSTAQNSPKKGHSRHCSLQPVYLVQRQIGQVIRRTRMSFAAKAPCTKQDSTTDRLTSQALQKHTSNGSKVSRHTCLRKPSWVDDKASGEYHGVDYNFSTNAVASLSLPAQTVPSTSMLQTTGKTTLQITHDEQTLRAQTLATGNHSAYITHMDGHKGATRRGLYLTARWHSGHSTLVDWDTLVPHIDSTYYDSNHNTDSEVQSPTCNPKKSQSSRHGHHNPDTQSYMKGNIPRKTEDCGKPPDNDRTGGTHVQNKNRNKMTH

SEQ ID NO: 998200 - protein, 315 aa, Homo sapiens
VSSLKSKAFQYEFRGSRKEEINLTLVGSSAYCKTTDVLTIKTDQVPFKAGSNYDSCSVSTNSVIPMQSRKYCKHMGNDTVSIDSSTMASSHHHEATHSIHLATAHIILGAHTLRPSNCNKRGCKHTHIHGTHTQSQSHRQTSDVGYLTRQNLQQPVTKQSACSVSVSYKHMHGKAHRVAQHCHHVYIEDNETGTSREKARNVIEKLVETQMGQVEVGQATEQQRSRRKYATNSLNKSYALTLTRSRGKTQESIATNIRRTEHSAKQDARHKRESTAKDTENRERDKHTRGQNTARMNREQDHVQKHNTTQERLTK

SEQ ID NO: 998201 - protein, 141 aa, Homo sapiens
  misc_feature (70)..(70): Xaa can be any naturally occurring amino acid
  misc_feature (81)..(81): Xaa can be any naturally occurring amino acid
MCTLSYGPKPNGQRFAKGPKLGWAKRGTEDAELNEFSDTKFNLFAGAIGAPSWGRPCSREQVCFLNFSSXVCARLPTLCGXPSPRELKVPVRGGIPITREYFPLGEPIFFYSPFVRWAPLPGKGPPKKWRPFIPFYLSLSR

SEQ ID NO: 998202 - protein, 108 aa, Homo sapiens
MNANTQPHLDIHTTTRHPAMTPNAPTGTSNHKTHRHTPAKETNNDRPTTDPVTNQDKHPTRQHAKPNTAHTASTYNATQGDLELIETDHRPTRHREPDQTEAGDRHNN

SEQ ID NO: 998203 - protein, 159 aa, Homo sapiens
DEMKNTSDLPDTGSHVDAAYGQIRSRVGPPPVSPTDVSAMNKRLKSALLLDRLKRRIWLYVEQMHDNNGIELPPDMFLLAYNTCACFAWTADVTAGSLGMVPSYLMQLLITIRVARKSGEEKCVTKLAVRERDGLQVQSKSLFHTKHIGRWNRSVLAQR

SEQ ID NO: 998204 - protein, 99 aa, Homo sapiens
RCHGGCAEEDHVALMGWAVCNTPHEAGKAILYTKHSCMFLRKSLTNAAIISTQYTEPDSQMRSWLMVKGNPDVQTQISTAPTSRRSIQHRGDSSGCNMN

SEQ ID NO: 998205 - protein, 107 aa, Homo sapiens
MLRLRQPTGRFLVCSYWFGLPPMGIQGVGSATCRYRVPDTRLCAPVMRNCRFCRARSFSAPQRPVRDVHRRRTSSPLFSFDSRCLLCCAPICVAKGLVTASIRRSFS

SEQ ID NO: 998206 - protein, 404 aa, Homo sapiens
TFERLLVSMCQAIVMRTRDINHQMAQAQHAQRHLSKLVQGSTQGTAGIIAFNHDPCHKQAFLQLELTHGRLILGMANRRLVPSQCAARAVFPGIMSAKMVCKHHTCQCATANRCHAIHLARSRLSLMLMQQVPGHQHALPPWLQARRAPLRTLRLDHCYQLTTSMFRLHTALSTDIWDNKWLARLTHSSAQIHQKDILLDYCADQNGRDTSHKQLKHEPRKQTIKTSATQQTQTPRPKRDDHTTHTTHTQQPPTTTDQRATTTPNQKKNTEDQDKTAKHTGARGDTTRTTRTEARGTSTRDTDHRQTANNPQCIKDNKRPIRSEDRPQQQNEITQAHTTQDHERHTTTPNATTRKRQEETAKTHRKDEAKEQGDKHEARGKPETRSNRTKGENRVTRRNRTRDQ

SEQ ID NO: 998207 - protein, 68 aa, Homo sapiens
HRGRSELISVSLFRAVAVPMVRVHFSGPSDRLPGRSERLRMIPHVSRDERSSDAGQWPLLTEKCGIMT

SEQ ID NO: 998208 - protein, 130 aa, Homo sapiens
SPPGRREAMRGRPAPCVHRPAPSRIPIRTLPSPYHHDAHGTSFLVSHSYYHYISHLLLWLLKKRSYYECKGSHELASQHHERCTSMPDETTFIHWTLSSLDTRPTVMAIDEEPAMNNQTIGIFQERTRDT

SEQ ID NO: 998209 - protein, 97 aa, Homo sapiens
  misc_feature (89)..(89): Xaa can be any naturally occurring amino acid
MRLRQHAYEHSPGSSLRVHQCRWAHGGVCMAACSAWRPIRRCNGIDIVESNGQLDSSELAEQRAERTKACNTALVARSSPRDTPRNTPXGVPQRVSP

SEQ ID NO: 998210 - protein, 112 aa, Homo sapiens
MGSSLSRRAYTIESLTPADWTYYHWTDMTHSAHSWFTWGAIGTKIVNIELMFDGGVPLRGKAVAKCMGTLVGYIDKSLYILYDLRIKDDLEANSRNGGGIHGKRGWMGQLTC

SEQ ID NO: 998211 - protein, 79 aa, Homo sapiens
AQADNCAPNLILEADQNLQSSKSLVECTPLLADCYSWLCCLPSVLFCLPVPEVAFAVGGCMACWAKEVCMDSSLILKSD

SEQ ID NO: 998212 - protein, 138 aa, Homo sapiens
MYPAKIEVPPITMYLSFPPWRILYVTSRYSQLDTPTQSGKPLDLPYLVLGHGSFPGCPCPTCWLARRLFPYLRTQQFRSPKWSWEEDKSGSKRALQDKDITSPTSIRNPRGHLVCGGELNHGLPGLFSCLVRFGVGRP

SEQ ID NO: 998213 - protein, 217 aa, Homo sapiens
LFWTVFARKPRVQKCGELEGSSALPLTILTLQPWRTWTYAISRRKRSMLLRGAICPCLSHQTRRGMSPDKRERNPRRVSLGRTRHASIRKSRNFTRISAPRYIMAIDLVRTSHASLHRPHREARTSSNCCHSRASIKATMRTSREDITIETFIISREAPDKRGYLRLQAMWWVASRGTYPVFSYPSWGRTQQAILTLFVSFDIFLERTSLVGPRSSR

SEQ ID NO: 998214 - protein, 341 aa, Homo sapiens
  misc_feature (184)..(184): Xaa can be any naturally occurring amino acid
  misc_feature (188)..(188): Xaa can be any naturally occurring amino acid
  misc_feature (197)..(197): Xaa can be any naturally occurring amino acid
AWGTDGSAQYLDVTEDTLAAVWDLSGLETEMIVIIARAYAAVGRFGVLCQLDVATVRSTHRDKDQLVYTPRSNHSTLLSCVVERAVRRAHPGATPHVLCYSSSTSVFVRGFTRAAAPKMLTGRHVSVALYTDVCVATIRTLIPGSVAQSMQHDAGGRGSVVGVSRDTSQVEEREWWRVGGFAIXDSLXVLRRSLLSXGAGGIYRYYLRLCHACAAVPETTANMAVTRFRLLVGWLRFARTPFLQGKWTVVLLIDVPPIRSTISRSGIWRVFEVETSPASAGRGTPLDEQLKLTGIRNSGGLARAGSNQVGFGVPQQPERRISLPLELASNTLWLNTEYHVR

SEQ ID NO: 998215 - protein, 145 aa, Homo sapiens
MGSSGLDPVCVLTEALWASCSWTRMCRYEWPTGLSGETRTVRSVPALGLLVVTSVMRDHDSSNRGCRMCERRDPLRVFQVTELAHDAIDDRLGTWRIRDRLSFGSLLSNFSAAYHHVVIGLEDHPWSRDAKGAWVPYLVPMPLQC

SEQ ID NO: 998216 - protein, 60 aa, Homo sapiens
MLLDQFVEIVAWTSSPVLATGSHDSRTKGLHIPVWPKGGHRNNVNPFTCYPSDKRFRDVS

SEQ ID NO: 998217 - protein, 349 aa, Homo sapiens
MRLLHRTDNYDCAGASTSTVCESLIEVNLRRAYPVPSSVISASRDSFSVRRVGWSLAWSPWQRAVVAVRAVAQAIRVVVVCLELSGCSRGYEPVCAFVLGVVSMCNRGVDSRRRSAWHVSNARSGSSLVVAEGSDVGAPVSCEWLSRLCARNVDWAGQSSGSRGPCGPSVAAFPRVDLSSSLVGVYSTCDGVHGYGGPEGLGPWVSVPLRKCGSRSVFSVSTFQVWSYAHKGPTLTNGKLSGWQPVYRPDIGFVHLLTWLQSRKVRRPNLNPRIFPKGQWMRGARFGRERCFTTWGDHHVGFPWLKAFVHSRIRIRSFLSDCGVAIKEELAIREIPSSDKFALTVVNHR

SEQ ID NO: 998218 - protein, 157 aa, Homo sapiens
MCTESVRVLIESTEWVNIMGRAPTTLVHVVHSLACCEGPRSNKEFVGPRAHGTLTPVVLELRGSVTRRRRRTCNRCLMRGAKWVLVEFPANGANRKAHGGNDCPLGKTPPPWAMHQKPRKGEKGPAIGPRDGTSGGSIGGPPGVVSPLCFPFPVGGL

SEQ ID NO: 998219 - protein, 72 aa, Homo sapiens
LCWLTGEKSSTKILTYIEHGQWRSSLRGYATCTSMDSDRSLPLATICMSCRAHSTEMPSDATAHGELWGFTG

SEQ ID NO: 998220 - protein, 79 aa, Homo sapiens
MNALSSKLISQPKAFFAKMVVDAVMMRDDLRELRHDLDSRRYRVEPLEDSQLVAGVAFKNDLLFAGVLKVRSHESTTIP

SEQ ID NO: 998221 - protein, 179 aa, Homo sapiens
  misc_feature (15)..(15): Xaa can be any naturally occurring amino acid
MAHSVVAWSNCGLLXAWAGSIRRTISRELAVNMSGTFGGANMPNLYPVGPWGWQHTECPHVRLWADPPSALAICSFPYGMYPPPREETDAVQECPHYPAIPRGPLCQGHAQWQAARIRSAQGGPSLGQPSSDLTLVKGSSAHSLGQEGKPSSRRYPRIPEGRDCKTPVVAPLARWKAGD

SEQ ID NO: 998222 - protein, 312 aa, Homo sapiens
MAAVQEAEQGPDRRTWMACQVRSADVQVRVNHAIGQHQRKETPWPKGITQASRTHRPIAAPNRLAVSLNRLLAVEQIFIILGHHADMSIRQRAQAPQASGGPRREPPRIDQTRKAGILAKGHRFMIRACVASSDARDTFDRAFKRHVGTLLWTARSCVLADLVAIGRERQTGVRTEHFAELDIPESVQQNGSIYIHVYFTKSGFHAQDPRQKALLPPVCHSPRLSRDDQTNTSADDFRKPRTLLTGETEADPEMIKRAEDYGAVGRVESPIGTPRSPSNIVDDHTPWGEEGSVPPPLDHYVKFDGRERGLLS

SEQ ID NO: 998223 - protein, 72 aa, Homo sapiens
GSCCPGSTSGSCCAVCRLSVSVPYHCRCQITSDFGWLIPKVMRIYDTQVRKWTREASPHASRLQKPLLNWLT

SEQ ID NO: 998224 - protein, 68 aa, Homo sapiens
AVRSLRLVASADVILHRFMCDVYCREHAVYASQLVESGRQLALHTFYAFEECRMKDWTRDPLHDWLLS

SEQ ID NO: 998225 - protein, 44 aa, Homo sapiens
SEPPEHKCREYYPYEPKWERKDDYISPLLVIWTTVDSGKCQPLA

SEQ ID NO: 998226 - protein, 146 aa, Homo sapiens
  misc_feature (55)..(55): Xaa can be any naturally occurring amino acid
  misc_feature (137)..(137): Xaa can be any naturally occurring amino acid
GEPGLNEHKNEQDMAKATPCVLQGGRRKNSGHRSTYSIARYIFPDSHCEGTYSTXEDDLIGVTKVALVSGAVRLTETSLRENGRCFRDYLSTTTRYTWKEYLVGRDKLEERRGLGSELGRTGEQPSRRVGSLLIIEXDYPSRMPRE

SEQ ID NO: 998227 - protein, 286 aa, Homo sapiens
AVGWAGYAQSLLADAGVRLPAWLAAAPGEGGGFNLPAALIVLVLTALLMRDNRQAAGANAVLVALKVAIILGFLGIGAAHVRPELWQPLVPANEGTFGAFGWSGVFRGAGVVFFAYVGFETVSTAAGETRDPQRDAPVGLIGSLVVTAVLYVAVAAVLTGLVPYRDLDVADPIARAMAATGLTGFSVAIKLGALIVLTTAALTALYGQARIFYAMARDLMLPDVFARIGATSRTPFVAQGLIGALSPRLVAALVPIDVLGELVSNRTLFAFTWSARRADPARTELK

SEQ ID NO: 998228 - protein, 78 aa, Homo sapiens
AIAYVRTVYYYHVSDPIGYDEMSSTGIPCAASPFDHCLVSTMVPECTAGEKFCCARVCTVVDDTSSIGYKQGFNCLQQ

SEQ ID NO: 998229 - protein, 128 aa, Homo sapiens
EREREREREREREREREREREREREREREERARETRARSRGGPPRCCYVSSCLCCVVVEQTRYVFFLLCSIISALLLVSVLVCVCVCVVGVCCSLLFLSQVLYHVMSSILGGESSSSLVGGGVLLLAS

SEQ ID NO: 998230 - protein, 339 aa, Homo sapiens
GTHRSSRPRGQRTGPPSAAEPARSPFVPSLRLGMQDWLDRGLGSQCRHWREVPYNLCHIPWGLVHSLPDPQEASQHACRSFACIAGGLPGLENEDRPEDDVLRPECVQGPACSVWISERLGGSEASGCQSLLRMSENAHTGDGSDLFGQRDAFVPSLKDRRVEPNHKNINLVEFGLVYSKTSELNHCAGVGLTAGDLSQMIKYFKKQKRLIPERTRMEVLCAAVQRRGAHAFTPGVMHRDIKPANVFITATGVVKLGEPWVWGGFFKSGDHRSPLPSGGTPYYIVTRRGSMRTVQLQSSDILGPLRLACCTKMGRPSRRSFYGHKNGISFSLVAKKSSL

SEQ ID NO: 998231 - protein, 183 aa, Homo sapiens
  misc_feature (101)..(101): Xaa can be any naturally occurring amino acid
MSILSRAPECCKRGAPDSVHAAVNCSLARNVTASCELPVRDHSNHGQQRRSIVLKELHSCTYASALSHRYATYNASRSLVPHPVLMERPGRYAAVAQLTWXHDYSGWDACIGKYSLLFAINFAQISVVGVRPGRKLIPWHTHVGSSIPIANQSGLALMCNLSVVPACALAFLESSWWANRHWE

SEQ ID NO: 998232 - protein, 218 aa, Homo sapiens
SSGDLSGGCESYLVNLSLNDQRWLQWGFRPGYPGSSAWGHAPWPLLPSVSPTSTLPHYPYMPCSLHPTMSFHLTPSGGGSASSQHSEGSLEQWVDNGVMRGAGRTGTRREERAPESKSRTVADESESLQLEGADFGGVGEASGTSDEGGPPPSRGSELGECAPNLRDQARSPSLWTAHHGMALTPCKVQDWWSLIATNIQASKSLQHAAHNRENCEHL

SEQ ID NO: 998233 - protein, 70 aa, Homo sapiens
MTVLRFSSSPDQGEEPRDTHPWALALTGKGPGGLYTGGRSTNTRGADPSLRETDGGSTFTAGPEVRVGQD

SEQ ID NO: 998234 - protein, 74 aa, Homo sapiens
VAIRQRCQVRLAAPLVAGYALIPVQPQGLPGYSYTHGVPIEDAHDGWYEMNGQLSLGACTLPPVGKLHTKATFD

SEQ ID NO: 998235 - protein, 128 aa, Homo sapiens
MAPARLSRSFAGNLRALLLEPSNSWGNERGAPFGVFGTGPVGAGRLPAGRDGPMAHCLGSRLYYPWQQLRAFLAIGVAPSKGNGAKLKSLVPPRYRKLQRSCVPMAKGGNLRPFFSQDRISNEPLLPL

SEQ ID NO: 998236 - protein, 169 aa, Homo sapiens
RTLAFNVPGRRLWLWAWLDSMVELWAWREWGTADCLLLPTMCLCCLACACFRAVSGLPCGRDGWTQDWHEWLIAVAVWYYQTRDGDQGLYINLFSVSQWGFRGQGYLEYSRRMILPMRLAKSPMDIWSKCVHERLRSICERHASSINGSGYHFTVPSWHPCSKEFAECA

SEQ ID NO: 998237 - protein, 255 aa, Homo sapiens
MPFEVCLWRLSRDGVVADGLGGLCVDSGYCAGPLVSPAPVRLGEAPWECDDARSYECCALRRANSGQDVGIVRVEYAGKQRSAYPALLLFDQPLELVPLTNFDSPGVTYVIDQSTRTQGNWPLGWGEFTRARARKEDGPSELRQWGYSSPRVASRRAIYIVLVPPRGGWIPARRKVFHYPSLVPPLEWAQTCNAWKRPLMPKRVKTNGKSKPKIQPIPQVNTLEGRRAPKLWWGPVKACKKSRIENFAGQGKRPF

SEQ ID NO: 998238 - protein, 115 aa, Homo sapiens
MWLSVRRVLNRDYSCPSVEVHCRDPYRKRRLKIARKNSTCNRVGMIKSRGEKSFPGFTKERTGTKNPTNLVLGEWGEFSTHSKNGTGKDLEPRPRGRGQGKTERTGRRDSGFCPA

SEQ ID NO: 998239 - protein, 140 aa, Homo sapiens
WLPAAFMVACTNHSQPAPGQGPRTRGQGGQGATFAGHMPHTRGHPAAVPSIPQVTEQPGPQAVTVPEGPTGAVGPKRGLRATLFGPCRIVILVNLISANNFRKIEDILTLQIVYSRGFLQNFVSLRPEFPTARKQYSLPP

SEQ ID NO: 998240 - protein, 151 aa, Homo sapiens
MSGLISTGLRVLPFVDAHHAAHQSRGRMIYVPRGAVFTNSPGFSRGGGPPFWALRQGAFKQGKCVLSGRKAPVLSRRRCGAHCVSELCISGVPRMRHIVSEQSVVSEVSPARGISGAPLAEGLRFLLSRDLILLVGPIHSVSGGAREQERR

SEQ ID NO: 998241 - protein, 177 aa, Homo sapiens
MASNMCRSVFPSSTRMDSLVCNVKLDYYAQSFRRTYPGHSTQIEKALISTPYIQINKFAEGIAKGMNLRDGNSQGLGGRGNKERLRCTSGAPVAPDQRVVLHERRRLFLWSVEWVEKTPEHGLTRYIGVQVVRLPSFLTYAPMELSVRGYIIRNFGGKSKVSRKGGHRLNVKGATSV

SEQ ID NO: 998242 - protein, 151 aa, Homo sapiens
MNSWLWVKTLSALETLLVCVWARTQNSRVLRGRVKAHLSRRRGKLAGTLRVRSPPREVGVIYSASAEPKSFSASLFCEERGALLSKLCAPKFAGASRGGNSVWRFMRGVSHVGGGFSPSLHSARAAPPEGVFPHRGCVSPPHKRPHTQSVV

SEQ ID NO: 998243 - protein, 493 aa, Homo sapiens
  misc_feature (311)..(311): Xaa can be any naturally occurring amino acid
RELVSSFLCFFFVGNEKLTFFLWGGAGRCPALENFVAAVFLGCRTCWVTLCRVETRMVLAARGRGTRPLVIDVADLAFPHDSGGDGVLRHVVLLWGPPFSRARIDPLGAICLCAEMIGPAGAIAPEWAPLVGSCLDSCGFHLPRLHRWGAFSYALSTVVADSLFPAFETRGAFFMCVSARWLVCAPLEILRRLPCGGGVLFCCERAPRHADVSSFWCDGPTPGWGSTISLTVWPSVLSLPPREEWAPPLCFCVVFVGNRDKCVSGPVALCGRVRWPTRLLRRLRVEMCSPGAKVCCATCLVGQGVSAVGEXLLHRRGWAVFAGQRHEEIALTAGKHEGREEDSPAKQRPLPGGREGGAPTQKEEARREDENIPRGVASHHPIKSEREETIRRGKAVGGHPTEPLERSPPQRRGSLFLPTSVVVPRRGEEERNAPPPRVSGGGTNQPPRELPLCEVSCGTTRLVWLTNTPTFARRAARLDYPPSGKCVHQNPLP

SEQ ID NO: 998244 - protein, 237 aa, Homo sapiens
  misc_feature (124)..(125): Xaa can be any naturally occurring amino acid
  misc_feature (129)..(130): Xaa can be any naturally occurring amino acid
  misc_feature (178)..(178): Xaa can be any naturally occurring amino acid
MEEPQAGDAARFSCPPNFTAKPPASESPRFSLRSADGSRYGAVAYSGPCRLCPMNASTGRHVPLSGSQNRQGQIGRQAAPLIEVLSSCPQAGRSDPAGPLNRRQEVDSPVPQPPMGQPVEALLXXASPXXNPLVRVELLCHAPVPRKSPSHRSLLAEASVLCLCGGKPPVTGPRSALXPNLLSLREEEEEEMQVTEAPVTQEAVNGHGGPVQVDMALGSAEMDVRKKTKKRDQQSER

SEQ ID NO: 998245 - protein, 149 aa, Homo sapiens
  misc_feature (24)..(24): Xaa can be any naturally occurring amino acid
MDGPLLGLYWGLAVARDVLSHSVXCPGGTFSSIREILSSDPSCGSRGASFRRVQPLLRSPRFAPRMDSGRWHGIVSMGKGRNGSPVLMWFFLDRVESPTIGTYLQGRWECCARPRLCCFVAHSILRSICCRRIVEILLGPYTKSKVDSN

SEQ ID NO: 998246 - protein, 87 aa, Homo sapiens
VRPSALSSTPYHVNNLSPLYKCVGGFMVNCPLKDYYEGGRQRARVSYSQLSRGRCYAEIKRLLSRRVLAVLNRLLTEPLSSTKGHTR

SEQ ID NO: 998247 - protein, 110 aa, Homo sapiens
  misc_feature (45)..(45): Xaa can be any naturally occurring amino acid
MRRTDIGRRLMPNALYVKTRSRHRQPFRGDFWQQGYLEWIVKTNXVKDALSHTFPLQDRMTRDRKVNLPIKEYEDLNAWRPHVESESIQNRCRFANEIICSPNKPAIGTS

SEQ ID NO: 998248 - protein, 144 aa, Homo sapiens
MYADFRHRPENLVVLVPNAGNRHEGMMKRIDLYRCERKRRKTTRMERRRVRSELTIRTSKASLGLPKVAVPKRIVSFQPQERCGLRRELCLGPLLWGRIEVYIPTEAKILERYRSLLSVSREDRLITRVPNVPTKTGFRTNDSR

SEQ ID NO: 998249 - protein, 178 aa, Homo sapiens
MVEDIINLEPGELKKGSLLSRTLIKDNFQLKSSQYNGPHQDPLTRLLWYRADGKLALRPVLPSISMKSSQLILVNMASFPEELAWIRSLQSTWQSGPIVYHPTGRVPTLGKLASLSEASISSSANITCTACSYQGYNENTWHMNLNPRSGRDANSGTHSPINQRAQRNAGECGQREHR

SEQ ID NO: 998250 - protein, 120 aa, Homo sapiens
GTRAIMEQVKYSERTIHRYCISAHLGAERKLHKMRQLFVRGVPLGGIIADLRLPPPDVHRRAVTHDDTEAVSLYKATALPAGTVRHGHSHILPSDSGPVEWLSEYTLSAGRIGLYSSYLL

SEQ ID NO: 998251 - protein, 271 aa, Homo sapiens
MRFAWGPGPGVIRRDRVLGLMSLRGLGYAVHVYVVSRSESQGTVAADQQSLLRRLQPMLRANSGGPLRITPKALTAHGRPACELCTICELKHARGKSRDSPSSRKPMRVVEWSVPPLKRLKREEVPPGPVGPCPTIPASKGGFPENYPPIRDFPYPVAHSFFVAWFFPADPSTQSWPFKPVQIFPEARGNQPARALGEGRGPQGTVEPMVPPPDVGKAPLENPLKVKAQELEIGQGGGPRVPLAPFNTKEFGQKPMGVSTCASYPQGRGEI

SEQ ID NO: 998252 - protein, 285 aa, Homo sapiens
MTELVIYFAQATSWLGEVAVCSSRRSSQRLAVVPDSMRVTAAALLVQHARKHDSPSTKKYKGIVLTALSAFPDEQGVLSFWRCYPCQTSFASFPISQPSTSSFTGYVLGMIFAAGAWIEASTSVLCRYLCWVMLASGGAAGAISLCFVYPAWTFAREPAWLADRGKVRHESASSGGLGDCLVKITKSDGIRGLYQGFSVSVQASIIYRAGYFGVVQIRARACSPNPKNTHIVVKLVIAQTRDRPWPGVGVLTLRHGAAGLMNSVPGRKELTPVHGPRRLLGEIFE

SEQ ID NO: 998253 - protein, 68 aa, Homo sapiens
RMIMVGPAADDVRMVESLLRHTSVTRPEATGHDANFDCDGSQSGCLFMSVTCDVTSSARNDGPVDSSA

SEQ ID NO: 998254 - protein, 174 aa, Homo sapiens
MLITTCERTSSHISKYSRIYFCQTSLLMLRSREILERVPVVLPQEWPRSQSSRLRRGDDRARMHSSMWMPLICQRLQAGRLYQILDPPRSSISQLGSPCTQLAMNVLNGSPRSHYLADSILSSQICLPDSYRKVGCRTPSADLFHYDSMNAVNWGMREYKIYPYELLLVTTRGR

SEQ ID NO: 998255 - protein, 70 aa, Homo sapiens
DHAACAVSMHTSSTNMTYTTVMKRLIISALRIKKACLITSVVVASTAQTHAVIHVIRCWLVEHCARDNAS

SEQ ID NO: 998256 - protein, 183 aa, Homo sapiens
  misc_feature (171)..(171): Xaa can be any naturally occurring amino acid
SWKMAASVVCLGRYRRGTCASCCARRSGGPMLRTHSSWWMYWQIFVSVAAPEFCCRRSQRLRRAWTIVAAAVAFRMHVLFVPELSQLRGEVVGVDALVPDRCLMNENMNKCVCAKAYMCLWDATPWASSIRDNETRHSAPLTMWRHWDAHRCVAYDAMRAEATSCALAPYXVGTRANRLAMQC

SEQ ID NO: 998257 - protein, 233 aa, Homo sapiens
  misc_feature (92)..(92): Xaa can be any naturally occurring amino acid
GRSGPSAVQSARGSGSSDRLLVRGVQPADRLLWFVTSPGRTAYSSPDMKDLSVPRAAMACPFVACGAELKHRLNVLISLLCNQIEESGTALXAERSVSDPGTNYMQSILSSDVDDRLLWELSVSSLAHTSCSHRTRGSTGRVFSITSRGSRIVWFVALPVGHFYLRDLEVFPVPDFHVCAHVMAAACWCNAVSPCLGVAGVLRESVDLACLARLLAGFVVTMTCARALVPSES

SEQ ID NO: 998258 - protein, 88 aa, Homo sapiens
PCLQCVLIREIDKADGMFWSSVEPGDHQLFFLHVPLYRCDERSLVTSHHKTVYIGIESHVVTGRRLYISRRDAVVDLELTNIPCLMLR

SEQ ID NO: 998259 - protein, 239 aa, Homo sapiens
PGVIPSCAVVSLGAAFSESPYRLLSYLSACRHPMDSIRCPHGTCSPPEAPELIFSVSATQRAAQKNFIHFKVDTCMNNAAPVHLQATVSYRGMVQRMSCTELQARGNDITQAVHFKVNTGHFCNCPVTANRLPLGAYDNNKHQVVFKGTTVWLQGQLPSSRGQHLKSASWADRLQSTARLTAHEEACDNSSTYHPGKNQRTENPGQVRSTRDTHHEQNVTTIDWIADKIDDDDINQPTD

SEQ ID NO: 998260 - protein, 185 aa, Homo sapiens
MTSVSKIIHHIQRQEFNPEGSSSFSDTLEAIEPPLQPSFDTENLAEQSPYDSKVIERGIVDSITGSAGFMEAQACTGGIITPQDTGQKLSLQDSSTPRDVIEQDMGTRLKPAQKAFIGYRGCAQGKKQDVSQQRQCTEHMATVCRLDSEYHGDSRYLTGGPRRPRQVHGREHKHQTEDTPDKRVT

SEQ ID NO: 998261 - protein, 149 aa, Homo sapiens
MELGVQVPEMTFVVTGSQGTLEFSVNAVHCSTRFRNGVPGQEVIASGYLRPPFIPVSSACPLFVQHVNISNHNHPGGFISTSTNCCNVFTKGKLQLWANLMNDYSMAYLNRLNRTGGLKRLVDRRHRNVPMSRRRRTKRHDQESIIGPV

SEQ ID NO: 998262 - protein, 77 aa, Homo sapiens
SLLAYSDPWNSPVGNQLDPIQREPVCSALNSAILETHNLPKQPPLALAMGQATQCLGLMARSGIGSCAFATVEDYLH

SEQ ID NO: 998263 - protein, 197 aa, Homo sapiens
MTFYALTQVTLVRWTQTQEEKHTRQRTALQEPDNNEHLTAAFDTTLTTRQTTERQLDLSLQLTHACATAEPFGASSTVTHTQAAMYLNDFSQTHLLTRDSTQAKTQPLTRFSELTVADTTWTTRDTRDPPLKNILQRAFYNLLLTDCMIPRSTTKAWRTFRDVFARRTWRETPGVMQANFEAYDYEDILTTMVTGRN

SEQ ID NO: 998264 - protein, 112 aa, Homo sapiens
  misc_feature (47)..(47): Xaa can be any naturally occurring amino acid
MKVRIGQNTAEVERIVCVLVYTSACEVTSGNASACSTRRHCEISLMXDMRSPFLTLQSYSNTLHEHNVPLVKEFGKKVYLTGDRELAKVMQTTFKPTKVLNITDEQASYTTR

SEQ ID NO: 998265 - protein, 104 aa, Homo sapiens
MIVQAMVDNTLLQNKGQLTFDTHALVQDLETHGFDKTQAEHDCISVNCFIKCQPGYYSITEMVTQAQQEIPVQQLDGSYWMLQEHDMVILGEKVNSAISAEHER

SEQ ID NO: 998266 - protein, 80 aa, Homo sapiens
MVDLIKLGQKEVQWQWPNARSEQLLGKAHGTASIMERPRRVVERQEAHNAETDTILEGSVPLLKRTMFTEHLYAWLTLRN

SEQ ID NO: 998267 - protein, 139 aa, Homo sapiens
MILKDKVKTPTWLSQLATGIYGIPSVINSDNYRVFPWLGESLNPGSPRCSESFIPGSFGTHQGQGVDIYWRDYYTCPLTKTIKLWCMQKHLVDLVCITQVGLNADCTLLTQQTLNTPTSLHLGSLLKLRMIMALYTSHS

SEQ ID NO: 998268 - protein, 132 aa, Homo sapiens
MCYSKTRSYMSGTCDINQPVQFHFDKVCLISRGVLLTDIGRCLLHFTGAYQILPMRGVVLINYPDNTHQKCVWNLGNHNVDKHDKNLSISDVLWDLPLLISRILLNLLLIEPVPGVLVKFHAGSLYLWCNKT

SEQ ID NO: 998269 - protein, 135 aa, Homo sapiens
MNHNTILSKSHYSSLTNHNGYKPIKLWEYEPLSLLTSQSVTRSAPLCTIQAMSSSHMTYIIYAPISNQYNRNALPQLQHIAFSSMSLNLYSIISMLVEVPLNPNLQLQQNLSILLQCTHMMMPKYQFYRTNSLTL

SEQ ID NO: 998270 - protein, 392 aa, Homo sapiens
SKIREEYPDRIMKHRFSVSAIRPKVSRRLGGASLYNANRLRQVLATSSLRKHTDLMTYRAFDKRQSSSYDRIVLSEIRVEMLDSLAPLGYGDLEAIAVCSAYRVMCGVTFVSWRLPQDQARLLYRCGELRCGLLVAVSPGLALRSMSRSFAPLLYSSPGIDSSEVTGSAGARSAELRTPARWFGWPEEHWMRCACRTSAPIGTPNLKRSGAIVVSRGRVNGSMGMRRLVIDADIGFDIVPRTKNRIQTFLVESGIAPKLSVVKNRVVRSWLNSSPAYGGAKKSCPRTTLPIWGQSKRTGPIPQEKPDPKGRPHLPGKQRFPRGTDGYPSRHKGAVVPGPTWVKPRGAQGHVVTEKVVGSTRNEPRMAPTCEKVTRGEVPEENHCESPKECVT

SEQ ID NO: 998271 - protein, 110 aa, Homo sapiens
MTNTITRTVDTFARWSGWTSRTKNSLPSLITRDVFKSLDSGRTLVGLRLESNAMQRYPNLVHCMRSVCTRRSRFSKLFTPGRAKNQGTGHFLPYWEPMNFPLESQNGHLG

SEQ ID NO: 998272 - protein, 82 aa, Homo sapiens
DHYAQDRDAQSRCGGPLGTIRLVLPSGRIPWGRVASVDFGILSTTGENASGGNTRKRSQSNVSRVEMLAGQLPVIIFYGGGF

SEQ ID NO: 998273 - protein, 127 aa, Homo sapiens
MRKVSMKLEVIIPERYPFEASSESDFAHMPIYHAKHLILRGKALCAAMLLKIAKATEVLGRPSLKASQTVLSLYSAAQCREPSPDDPLMADQYPSEVSDMDNARPVLKECRDQWDRESMQGQADAKG

SEQ ID NO: 998274 - protein, 182 aa, Homo sapiens
MGLWTVAQLRGGNPRRELYCAQARQNAQSGTHWYTRCGKFPSVPFPATSLANRFCATQQGGFGTLAENEPTFAPRLRVPTVEKIEARLNNGATCGHFTHLWDKRVCLLMFSNSGVGWAQRICIISTRQRGAVFPNKVSFPKRQLVPSTPTVLKTNGVGTRTFHKPQLFVFRKFRKRRKTGYL

SEQ ID NO: 998275 - protein, 184 aa, Homo sapiens
MPSIKLQSSELDDDYFDTLTVEHWPNNSVTYLRPMMDRFGNWLTERTMTDPKLPPTTMCNASNYYNKGPFTLVHPEQQGMTRPSILEDDDEQEHTQRNSMHIRCYGTKEFREQLTKGTTFICNSFWTGETHFRTSRGYAWMSTLHRRVGQVCIKRDKVHGGAFSKEPFHVLQHTVNIRHIVDYG

SEQ ID NO: 998276 - protein, 172 aa, Homo sapiens
MRIENVSISVSVAHLSWTRSVTVRPQRLQGVQICANLKCHKEDFETLKRNPRKVRWTKAFRKQLVTELTVDNSFDIVKKRRNEPIKYQRRSYGDKTIDAMKEVEEIKQKRQAKFIMNRLKQKIKSYRKCRISKTVKQKIHLIRAPLAGLGETVGRESGTAVTSRMWTWKMRP

SEQ ID NO: 998277 - protein, 167 aa, Homo sapiens
MAKLGYPVLQEGRIRATVQRDSKGNRHDRGTFGIADGKMADKCKYSSTAKNTQRRSKEWTQEQYQQEYVTQTEDHKDTGQELGSHKHDMRETEDQQKGPYPAQENTQQKRITRTGNTCAKDRRGKATHGEWKPRSALKKKCHIYGKLLKRRQSTQACPRVKTVHQVD

SEQ ID NO: 998278 - protein, 69 aa, Homo sapiens
GITSSQELDVCEVGVTRGFNMRIEKCNCCLRVQSILLYKIMHVQYRLTISKGVQDFARSNMSVEKRSIE

SEQ ID NO: 998279 - protein, 146 aa, Homo sapiens
MVKKRKRSREESYVCVRVQVCLKAGPIPTTVQSSSKAMGIMNSLLNEIFERIAGEASRLAHYNKRSDITSRQIQTAVQPAAFPESWTKHAVYGGQPKAVTKYTSIHSKHFQGGDNKFKTIFFQTVVNCWDNCYHLANKQMKNGVDP

SEQ ID NO: 998280 - protein, 76 aa, Homo sapiens
VVSPRRACKLAVLSRLAELLEWLRREPAAAAAVTCENGGRPWIDNPGELITNDRRNHEVTPYWNHRQVNVPSSIDC

SEQ ID NO: 998281 - protein, 396 aa, Homo sapiens
GAAGLRAGAAEHFFDLVPPRPVRPAGVSAWARVGGSRRLPPADGASLVALVLARASSRQCIQCIRSPHQTPEHASSPQRLPPEAAGMQATKRQASTERHRSYQTSRERTCEVDPPECGPPDLPSTSDPGTHQPITAGNAVDSEHKEGVTSLNGCEWKAIHIRRPTVPKIGKGPGMDPPLRRAKGLYLAHIDACESPATGLLYNRGHLPEDYTGTRIGTITMGIAYRENNSGPKVLGRTTLVIATRDGTTPLVPRRGKSRGKRITPTLRSGALAINIPAPYHGNAPMAQPTNQGSAMGTEEHSVTTHIDYSEKPKTNSNLRDRAVGQIRIGNTIQIRNGDGYEGKKDGKPQYPSQQLGESNGYIPPPQWNGGNVPTTGRHNSGRPWDTMWVQATDPT

SEQ ID NO: 998282 - protein, 105 aa, Homo sapiens
MTDRRPTIAECAINYHSRNSRGPPFNAPQINLASIYSTPYVIPCTNVIDNVWTRRSTREHSERKHLAHHHVVMSAKVFDLQAARRTTDSSTTCIEQLASNTSTQR

SEQ ID NO: 998283 - protein, 283 aa, Homo sapiens
MDDIFTQCREGNAVAVRLWLDNTENDLNQGDDHGFLPLALGLAWEGRSADGLRCRSCMGARTQCNETVGIDKPQLTLLGSQVNGNNRAYLYRQLLQYTGTDIICSAMNMGIVAPCAECLSNMRAKHQRGKKDPGVHTLEGPYGQRTRVTQRIGEDCLLGTQAKRHPVKQTHSSRRRRSAETDWGHRILRPVLPVHGHSISWKGGPTHAHRAPEHGTLEPDSLGRSTLQTQPSHFPGRKPPSEKITSETSLMRKGRLAQGQGTLVRARCLKGSANWDVHRHDAR

SEQ ID NO: 998284 - protein, 470 aa, Homo sapiens
LNAGCILDAVCLSANGPYRRPETLVCLFRDFPCASRNLTSYSAVSCANSGHGALSSRMDLDAAREYYTFSDLTAAILAPNDCISFQMKLDETPGLSKMVVCIHGIVGSRAGCTIWIPYESWRSGKNGAVSWQRPIHVNNWVQTCRARLPLQIDLILKLSESNVLRFDLLGVRQKGLGPTIDKRTLWESHISQGKVKRLLLLPDVLRASCTQCCIPQYCLGCDILDTPKAVFATPGGILIGKTPFLLNTLLAVEPLALRLTVGDAKIGRMESGPYLLGPLMYTSVAVDRIIKEVHRLHVEKGKSVDAYNYRDTPTWEMGRPKDHILSNRSTPDRREVDSDTTHRGKPLGKGPQADWDGTGKVSNANRSGYDHTAHENHKRSHAGPINNTRGGQGEQPTENPAIRKHTNRRHRQTRTGKEPVKAQREAPHYTTMEEHDAARCRRERSLTRRNLSRTTAAMEQQHVADHQHGP

SEQ ID NO: 998285 - protein, 296 aa, Homo sapiens
GAARSLGPGCCPAAGPGAVRAVLLAAPCELHGCPWAAGEAWTRGAVTGTPVQPRLPLRMPKGCAGVTTGVVPLCCRAATTECRKACRGLPTSLGSLHPLCCGAPSTVRWAPDVWDTEATLGPGSACLTPGWPTGCTCVVLTTPHCLTLPQVLWSRRLPNLPGREDTCTCDVCCPVGDRAPSIRARFMLPNLYPGGVSGSQAALSLGLYGISLVTAHVTLEPLALAQPALIAQGAGPLCAPFLAGTSWGTLSPYSNWTSAWAPTIVKRLMLHLVHRLPPSPVFLPADIGTRNRCRVP

SEQ ID NO: 998286 - protein, 326 aa, Homo sapiens
RLKPIFRARRLKNHTSKHCAKAGNVFAASTARSKQDAGPLSSMQAILQPGQEHQASRKGQVIQFYTLWDIFLQFSEENNGEAIAHSYPRAQIQYSDILTQKKHPERTTITTNTVIGRQHISTPLERKAFLAKPQPVRYGKAEDDQKRGYKLANSCLLTADDTPQYRHTRGDQTSITCEEENKRKDKNNTPHGGRKHRKRSITEKKPTPKERGQPKRRTQNGRRKHTKTEGIYHTPESDDRETHNNDPPERGKQKTEKTNRSTNNTPTQHKKKQNRKKQQQEKQTTRERDKTEQKKKPELDGRQTNNKIHTTTTQKHSQETTKETKA

SEQ ID NO: 998287 - protein, 253 aa, Homo sapiens
KVQAEIGDVSDYSQIMLVSVYTIQHFVCYTSILQIANSTFASSMYLHISGLQRPFLPAMHEAKPMAILSLWLRQLDMSSVPYLTGLLFKQVSQLLDFIKTLTDELACLTNPWSQNNMSVSYISNTLASSKIQVQVSGPTLEPEARGKQADAMADSDLSQHSCIITTIVLIALIKQHWEQDPFLSVILADITTEQISVTAVNGQINGKYNHCHSRNISHLKCHLNTCIITQGIKARMSQSLQLDGPKKPFTNGL

SEQ ID NO: 998288 - protein, 208 aa, Homo sapiens
AGGSRRQQQRWRHEHAAAASGTGRGRPGSGDWARGPPTSETHKLVVVGGGGLGKSALTNPVHPVLLRVLTTNPNMEDSLQRSICSRAMAFPGRAVNILGHRSGPGQSSGAHCRSSEYHCVTVHGGSLLECPAHYTRTGQEVSHVRLRPQLHFDGEAIPCEALKGVPGRTGRFTPADGWLGHRGDTQRVPREFRGVSSIKPHIGSFPPA

SEQ ID NO: 998289 - protein, 300 aa, Homo sapiens
GASSGNLVGSPSTLWKLGSCALHNKSCCFSLLVSTPPLRAVTLTVKVCGFTPEISETMNPPRGMNNSGRATFKNCNIHYEGLRIPPEVSETMNAPEGMNSSGRATSKSCNITVKVCGFTPESQQDQKTHQTGRTLVDTSEHLKEQTLDNTIFKNLYTSARGSCGFILEVSRPRTTGRKHIQTHMGDPDGTIAYRKAEMAAIKLQMGLRMESHMSSSNQFLSEDPLDWPAGPIHGLEKNPSGRDDQLSGRGPCIWPRHSREDSSSWASGKSQEHNEADQLDGTWDNYRTGILGKAQTGRTN

SEQ ID NO: 998290 - protein, 158 aa, Homo sapiens
MTSQVLLGGHWDWTIWGTSPAGNLSWSRSLGSKRGKKVCHYPSWLTGQKQRPGTCQMALGKQVECAAERGDTPGGDKTVTLGPKELRDKGPQQARDIQPRPGALRRAGRIGETGDSRPPPQGAQRNGLKPVPKRRTMAKHAMPNDNRRPARRPGQVHG

SEQ ID NO: 998291 - protein, 127 aa, Homo sapiens
MDLCTSYCTGAMICVSLASPVKFSHYFTHASRHDMFVQEGNWRLYRTTKSRNRSGVKTRGHRPEPNTLCSPEARSGLVIHVRSRTVRCHWGRRMAGERTIIPLDLSVQPPKVGHFPRTMVTELTGTD

SEQ ID NO: 998292 - protein, 103 aa, Homo sapiens
GSAFGDALRLSEHGPASLQNVYCTRNPVQAQCWRVITLHPQVLMASVKAYTNFELLSRECCESVDNSHREDQNSVCNEVTDCTTTCVATTVSTCTRDRDIAFA

SEQ ID NO: 998293 - protein, 71 aa, Homo sapiens
KLGGGHCAVPYFARIRAPRLRLVSFAQMHVMTRIPEYVLSIDLHVNLRYTFANLEQNDLGGRHNVVHKVLI

SEQ ID NO: 998294 - protein, 78 aa, Homo sapiens
RAVGELLGWLVSARGLERLANRAIMSHQIKLYYFGTNTYDEEFEVNQTCTMLPKERYAIVWIPRNRHLMSVNLNVRKS

SEQ ID NO: 998295 - protein, 66 aa, Homo sapiens
CPPVAFMFILDPAKQVGFHERVQSPSIELRVLLCRYQCCVNSFAQADSECYDVLATREDVRRDLEP

SEQ ID NO: 998296 - protein, 220 aa, Homo sapiens
  misc_feature (32)..(32): Xaa can be any naturally occurring amino acid
SFLRRLVMASPVPSSVGLIGGHSCFLEEDLWXMIVDALEFVNPINKRARRVKPLSVLELNYESGSSMMVNYLGSLTKGVRMRSLDYLRFIAYVVCMVRFGVRWGKFQLDIFGRTSGVSEMLFQLGIKAMINELVEILRQCLTAFLNPCGRKFFTLSRCAEYWEAWGYGGCVTMAFIWHYCSFGTRGIFLITRNQLGKPVSFQKTFETRVDIMALEDSIGG

SEQ ID NO: 998297 - protein, 46 aa, Homo sapiens
MRDVFADSYSRDTWRTEIQSLTLRTLGNNSTFRTLWSHADNLLTSS

SEQ ID NO: 998298 - protein, 143 aa, Homo sapiens
QLISARSEELEAPVDSSHAYRIKSNPLDMSVLISNANERAQKLFQIPIATCQEIDWTRAMGLFTSRANSKGPQLVHIYTDALFNQIRCPTVLIISCHNSQLGLTRKVPAASRVEQVCMTLTTHLTEGPAVSRQLPCKVQHALR

SEQ ID NO: 998299 - protein, 263 aa, Homo sapiens
HVHAAAKALLAMASSGLKTAGNSFCSEVPCLAAQYHRINQSGPVNSSVLTSVQSGDRYSSIRTSAHVTDSKLADRPSHCAELTRLPRCHNITLAVSPVYFVLSHASGQNGTPNTSFAPSAPIHYSTNCGIKRNNFNSEHVMQHYTILLLSCVYTYILLRVPFFPPFFFIPHIPALNWPSKSAPLGLLHRPLSKRSFPMCLAMAIPEGDKPNFDPSPPPTQHLFRLHNIFAHTYPKHFPTHTVNFPNPPHTTLLSHITPNAPLT

SEQ ID NO: 998300 - protein, 103 aa, Homo sapiens
GGGLVAREARSQTMRPAMSAMPRRVPRCDAGGLVRVRAGLGFGLPAGSLEAGPGTMRVDAAAEAEAPARLSPPASALSPGEARRTGCLEGGGPVPENWEFLFT

SEQ ID NO: 998301 - protein, 205 aa, Homo sapiens
GPARLRLEALAPCESGRGGSAALVRRALGVGGSLLVLSRRVDPLPRSALLGDMRAAPGPAVHGRGDASAYVAPGPPLINAERSARGLVHIPHDSPENYRLDPAVPVNPCVAFPRDPMPLRPQEAPAATHARVDRARAWGVGVATAGPKALGREALRERRCRCRKSSFGFYQAVPRLATRCGCLEDMPASEAFPLGRGAGPPQPTR

SEQ ID NO: 998302 - protein, 59 aa, Homo sapiens
MRTGSHMWYGTVASLYPSIEEHQQLLLPRVGRIDCSFESNVGIALGNEGSALCAQIFVA

SEQ ID NO: 998303 - protein, 117 aa, Homo sapiens
MYSFNRVLVEPFGDAPASFFGSRNSYGPFRHLVRVQYTSIWPSLKFPLERRYLVNIFSIPRVDGLSPPSLLIHISRNTTKKSGPKKGTLLIPPRDTKTFDTHRFPGDLITGNRRTKI

SEQ ID NO: 998304 - protein, 108 aa, Homo sapiens
MVDFVPVSRVLVLECLQAEAEEADLVCYMRSTGQLTVFASGWMVSFTSIIYREEGHFMDVDWLNLLVFGSSDCMTRCGIIGLVVFAWSYRVNMVAICFMVTGLAIQLA

SEQ ID NO: 998305 - protein, 167 aa, Homo sapiens
  misc_feature (143)..(143): Xaa can be any naturally occurring amino acid
MWVKENDSSSQTLSVSCDDCRIQGDRSDTLHGLDHESYRMQVCYRVNRNPVDKKSLTKGRHCSTHWANRAHFKSNAVGVIGLTLENGLSRSTRGYQPLVSIFLWWKGLGDASKVTHVELSSGCPKDYMSTFIITEHCINEWYXSQVHATCASSMYESAGSVVRMKFR

SEQ ID NO: 998306 - protein, 72 aa, Homo sapiens
TYETADICPMDAVINNVDCGDIPSTVEQNNRCLRGLNPSDSRTRYTTVHRHKDPRTEAHEHSPLPELQASAS

SEQ ID NO: 998307 - protein, 206 aa, Homo sapiens
MFGDRYDYSLQTTKTLETLYLLFGAVSEESYVDMLISLLIRAELGQSQATVRRYQSLQSTTLVVTSPLSLCNYIFFIYVIALSVNRTAIGNSELVPAKYIGATRIWQLFPTLNQHKAFLDICNLTYSSITSLTPLVRSVTSCDVTLESSVHKGLEIELLTHILACEHVAIITTSQHSCEWPSSKKPKTQFITHFNNLKQGVVLHIH

SEQ ID NO: 998308 - protein, 246 aa, Homo sapiens
MALGLVEDDATYFEAGRGDNEEEEEPLCIAVVKVGGTTFILNFVNEEHMVKAIEGVTRGRALRVTCVYSLTARTRKRTEEVKAGTIGVCGRVNRRSPRGEPRLWAPTGVARGGGPVGGNQALWDTCARSRTEGHDGRGQWEKARGGGFLDTPKIGQRAGRLKGREWVNGNPATTEMGYILRRTDNRGGALKDRGGTPGGGGPHCLNLRGGGTEGRATAATGVTHLYVGGSSSAPENWKQRALRTEG

SEQ ID NO: 998309 - protein, 74 aa, Homo sapiens
ASAAVMSSGASSDLPWSALAEHAQVGALAVETDPWSLTADKKSVSDSTCMQNACEGCPDWLSVQRGTGNPFRET

SEQ ID NO: 998310 - protein, 318 aa, Homo sapiens
  misc_feature (143)..(143): Xaa can be any naturally occurring amino acid
MPSRSESAVTVVPLSDFQATEARTLCVNEKKMSYSYILEENRVIGGKSTTGYPSTKYWRTQKPLGERTLTMVDNSGGMMRTDHMIGDAMLATAKLVSPWVPPHGATPVKGTFPHVVGDTPGWPQEVGLTLQGGPAPHRTDLGXHFLYHCGVAEPSTGYKDECSRNEIGFDNTNSNGLPIIQMIVSSTFHVSKDTTKRASHAMMYGALHSPPDRIAPGVRPPATNGENYPRRYPTHGTVVQVGQNNIVAPPTGKVDTKVCDKVNGIGNGRARNLYARRVMRPPPQFMGAMRKTTPLLYPTGRGARENSSDTPIPDRRQT

SEQ ID NO: 998311 - protein, 212 aa, Homo sapiens
MRIDDSVISVLGPIYPGTTALSVRPPTIARCSDCCKSIMSSKKLYQKKRNPRNVRWTKSIPESRVVKSLQWKFIVTFDTKGRNEAYQIPVDELWNKTIDADERELARNHTRSAKAKFNNEADCRKIKSLRKGSGYHTEVKAKIIHLYPETPSCMAKGKPTLRHDEHMVPAVTHEDCWALGRCSLKNLCNHFLLCTFEKCPLGYLGTVTLFIF

SEQ ID NO: 998312 - protein, 253 aa, Homo sapiens
ALRDSLSRELPWKPPGSWNEKALEVYDLIRTIRGPMKMPNTLARTGTWSRTQSCGMFTEITDRTEYLVIYQVQRQQVPHLLFGRLYIGRLCFPAATHTFQKMFLPNFTEQSTLATLLPLLSQGTPQHQTRSAQQHSTYTAVDLDLTTMKHKLRHDFANLRTTAPKSYKRVQHFGLGNPQVLRWIPLLESPLGTFGIKDLVHITVEAPNTCGRGYKYGYVALCSTVAYQKRYSLTATFNHGHEYTYKWFQTIYQ

SEQ ID NO: 998313 - protein, 237 aa, Homo sapiens
GPATCRIRRRTPCDVVLYSHVFWLLAADLGHGTRQSRGPFATLQIFSPTFTNGGTILGNGFAHDFGKWSASVEYLALELTEVSQSIRGDEPPNCYKIKQTTNQPSGIAGAFPIEENMVLPPCTQQNFIGRAKRPLQRHLLHISPIVPNYTSTGPLDHPYRGRDHNLSLATICMCCLPKFRLVIHNTAARHSPFIPTANAYTWFTTPQHKFPNAAAGDTICGSCNNDNTRDTRDSSLS

SEQ ID NO: 998314 - protein, 222 aa, Homo sapiens
MTGKELIWKSNISVVGSMLREKVDSGRRDTYCRIRLTPMKTSIGSLRYQECAIIYVNNILHDALFALMTRLRERVYSIGATITSAKVMLRGVVAAYMRLRSSGIRYSHAPKIGIAILYIQYIAHTLNTGYGTFVGPTNSPLVTDHASKAFTPHNGTRKGWPQGRPNPFQRTSQDIISWQSRNIDDETLLRAGMRIPPKPLVHSTTPFMPAKRRLPFKTNTTM

SEQ ID NO: 998315 - protein, 75 aa, Homo sapiens
RRWAEPTMAADEKRPKLSKSLLRMKFIAHTGTGLSNTKRTNYTEEDENIISAMSTGTWICRSFKEKESLHNRKTQ

SEQ ID NO: 998316 - protein, 197 aa, Homo sapiens
SEDPGASTQTWSMNTVYVWCHSPAKCHDTVVDALQMPPSASAPAGRKYRGDLIGIDNERSLGNVVQNFYEDDKMSYGDLKNMVSDNDEWGHQLGAVCQEQVNDDLRNAGVNMVRGDHRGARYLQCPSFCPRGRSGAGGQSGEVTWELDSVARMLNTKQSVECHRNMSGGRGNAWNNGWYMTVDAVDRGPDVRMKEGE

SEQ ID NO: 998317 - protein, 407 aa, Homo sapiens
KLISQGEAADTARSSKETAPEAGPFVDRECHSGLRCGASCGPGKSPDPTLGQNHRADVDLIHSLAAHLSHVGTNSQKHSADGRGGLHDCASGAPLERVWPWGRDERTPGTLPRASRAGWGIRGASEYVLWVVAHGVRGIHRKGELLVSTPFQFGMVPAWASKLEKFLLLTRTISCFDETQTATRLNARGLAPHRSAFESLQNLMVRTETCSRLDSLPVRTDHREYALALPRYHTPASLGAANAKPAGSEGRSAPRRITSAERSKTTHLGAHVSGSRPKPLHPRHPHTDTTPPRGTCSHRHHNTYGRTPRPHSTLRPPRDKAKQRNVARGQGPIRPPTALRPASRPHRTFTALAKRDNTFQGAYHNTARGGAPAIKPQGAAFVPHTGAHCAPPATHRLEPRHRRRSAG

SEQ ID NO: 998318 - protein, 78 aa, Homo sapiens
VAATAPRQVGHPEATGSSLLDKQATGRRMAAKLSRTLWEDKVWAFLVRPDTQAPKGVLYRPYSLFRVSDQQKWSIPGD

SEQ ID NO: 998319 - protein, 72 aa, Homo sapiens
  misc_feature (44)..(44): Xaa can be any naturally occurring amino acid
VPGGSRGLRPRRAVDCQQQWRLCSVSRFLVRRNGPRDLKLKKPXLVCTLPSGMTCVCSGGGVLHSVIHTGGN

SEQ ID NO: 998320 - protein, 192 aa, Homo sapiens
VDDLEALRNESGGLSVRLKCRILRMPLGGLRLCPLAELHVVHDLSRYLSHLLQGPDSMPKMWMWQLHGRVRLVYLSTPIHGLHRQCIYSTCDSAIGLPVFSSRGSAFLAAYLESFVSVDATIPWRAALTPSWSTWGLVTELLLDYVHGACLAVNAAECRAFVHCQLYSFAGVSYVNYHDVGICKAVAMLWTL

SEQ ID NO: 998321 - protein, 111 aa, Homo sapiens
MHVSFSRGFLSGLLVQGHLRDPFWVGVLNEITCRYVESVHGFVPVPTWQMRLVTMECHASHGMGTLSYLCKAALGFENYDSGISFSTHRIFTLYLRTRGHLQLILMITIAS

SEQ ID NO: 998322 - protein, 169 aa, Homo sapiens
  misc_feature (25)..(25): Xaa can be any naturally occurring amino acid
ESELVLMCGCAVCCAGACMHAVWVXAVAGLCGSCVPGGCAVLPSFVALWCLVGDVPGDVVCPCVCVWHGGLLCKLVPGSLEVKRCDALMGCIACFGMPLMPWDSPGCPDRDGMHWPLEPLMHHPLREWLPGSPLGAIESYRRRAPPGKAQANGTWDRGSVEALVGTFGG

SEQ ID NO: 998323 - protein, 152 aa, Homo sapiens
MSMECQRWKAVNTRAYQAYDSVHDQERTGKAKQEIRRQPCEGQTAEKHPIKSTTHEKGIGDNQRASRKDYPKGGDEQTSREAHRENEATQNTRVPTREQDTRGQESRVTADQNYQHTGQYRENNKRRDGRNRKRLLKTHKEPGENNERAELS

SEQ ID NO: 998324 - protein, 356 aa, Homo sapiens
DPAWRSPTVCVVATWLLCDVTLYSRGTSCYLNAPFLSFRMRVLMHMLPIFLGPARRVGYCFIALIIPDSLVVPCTGTRRYRTLRLPRTLYRPSHVNQPLDEESSDSYLNRMMKELSAANGWHHSLIAAQAILANVMMRLRENSTLFNRTQGEFKKLVASMVKAGMNARLLLSSCDNSRGQARQKKGPKEVLNGKRYSLKRMAKKTQDGWAVSGGLFCPSGQYNDRSQACQALRWGVERPPPRSVPLETTLAQWAAGDAKKKLDSARAPYLCGSCQLAPGGILKPGHGGGPPKSSCLYIPMVTDTSELPQELKATGEGFHSNVKGLGLTTPLEAYTTIGLAGVSGAQKDWAVCGGDV

SEQ ID NO: 998325 - protein, 183 aa, Homo sapiens
PWCQCAQTRASPVLARLPHSFDSPCLRSPTDSPACSSSFPQPRTADHGWTAPSDERNTGPEAGVGNNAGTLVPAHLPVRSVTPSDHLQGRARMVSYRVRRLAAKSEDTSRGRPLGTELLRTRMPRPHGNANAQRQTPTMNTYGEGEAKEAHHTSWRGKRNTKDWEHRSQPLGTACTGKVGKAR

SEQ ID NO: 998326 - protein, 94 aa, Homo sapiens
VAVCCVRLGPALLLDDLLLLGPLLSLLSLCPCAAACSACGWHAIGVCPRVSAGLVWLAVALLARVSWCALLLAFYIVLKSTGDGLSRQRDGTEH

SEQ ID NO: 998327 - protein, 254 aa, Homo sapiens
MALEIFGSNLQEHETMNVGYSHAFASSSIVGNIVQNQPHVLIVHYSIDLPTETQDDIESENHDLQGHIYRTDVMHVTCIVMLPWMLCVELLRQDMGTSSKDSGVRTREKTLTALLDFNNNCAVLKKQLTFDRWWLTQQHGELSQTWTRPSPVKQGPRQPKKSWQRNNMERKGGNDSQTQHLSKIKQAHQYADANETPPGKTTDKAKQGMTKRKQRRDMTHTALTTQPNGRVDSDQEVGNSEREHEARPKRTLAK

SEQ ID NO: 998328 - protein, 99 aa, Homo sapiens
TELSVLGVQMSLSGLGTADGVGGPWRDGPARMLCCLRCCRDRRGLARVPSRRRCPAVQLDTQHHGNQMLLSVTRMEEEYVEQEVSLASRTLYIKNKSYL

SEQ ID NO: 998329 - protein, 181 aa, Homo sapiens
CCARAPCPLRWTAAGVRRRLNAEGAEGALLAACKQATAKWRRPWLDTRRLDHQCRRTLNDAYGTPQQISSRSDCEQTPQHGGGRAGAVSPLTKIRVQRQILPLFFKLEGIYVLDTKIPVTFELPAERLTLRKERSKVDSFPPVPLGNARIGVKLPFIEGVLTWHILVMTILHGATRNNQGA

SEQ ID NO: 998330 - protein, 439 aa, Homo sapiens
  misc_feature (365)..(365): Xaa can be any naturally occurring amino acid
DYQMATKIYSILDPVRKPGTTYYADIAIRMYAGSCAWKSCSLKSISGCRRVNVTHSDKRLANSRTDYDTSLGISSGQWTDVYADQRWDFAHGFNAVEPPGKYYLSDYVQNQVIPRRDARGDLRLATSESAESPTRGSTNINVCHRVTLPSGTNPSCSWILDCWLATTKTLNDSNLVLLHNDHPWARIGHKDIDRSSFTCINKHLAPVTRKPVSRTPLEAIQISHLSNPKLGYTKSWANEAQKQYVEAGVCHNNVDMYLAHSTILLAYHMVLGIPNNRSTTILSAMCERQPTTRYGDGTGTNAEKITTKRRKYRRRQQNRENGPAERKHARGKRPPAQPARDKPPTKGNTRVASIRITCGRGDHTXKDTRRNINAAEENNLKKRSYATQERSKAHSTQEQHKRTDDAHRREHCQHKKRVTPLNQKRAWAHTRAEVRKRRR

SEQ ID NO: 998331 - protein, 345 aa, Homo sapiens
MDLEEVEIARLSQTLEASNAIHGRNKEPGQLADMLLTMGVATRGDSYKCAMAINTKFRPMWAAQTQFQNGPGPGGDYMWPPPMGLNLGEQLGQPRDNRWCLHNADCATGCGPQRYSSRCRMETDQSGDNVGTYTRHTWGQCPGPREWKAIGVCTPTYTGPGEEQGQMEGTTPLCQSIISYCETRMPLAHCNVGPWRTRSVRVAGHTRGGQQTPWGDTTVDTHSGRWSWRYDDRNTGTLRIPTRTDEHCPTDTLKRGGYRHSQPGRIGEAHRDATYKLSTGTPTVNTHEAFVRIGKRREWILNEAEMRSAQRYKRTGHTEHQQGAVVTICGNKPPYGSTTEAIANT

SEQ ID NO: 998332 - protein, 195 aa, Homo sapiens
ERVGNVRLRQRAVFVCASALNTSRHSTSEGACCSNRHSTAFFIHDSVPQLPHTLTKGRQRTETVAKVSMGLFMGGKTGQGPWDTRYNRPGNKKQKALNARGEEGITSGMCSHFGKEFRKEVTIPVGTKKKWDLMVQGLLEVDANGERDKGGTELFNFKDLECVHKKDQGLSCNLGIVHLTLGGAQLGTPEKSGAV

SEQ ID NO: 998333 - protein, 349 aa, Homo sapiens
MESPPVWMAMPVEARCLRVWDCILPTTRSTDKHLAAVHISQDVYKDWWLWVHVRCWSEWQTGVSQVPGMVVTSCSRYNVTTERKICRECDHEASSERSFLGTNCGVFNCPWMVSVTGMYRWVGHTRFGVGEPSDTWIGTPRMGTGMRRDLSRLVPRVDGDPLERQFPKGQILKRPGGNGPRGIGHWPHQGGFQTCAPIGKGVRARWLRRGQQRIWNRDRDAVGFKNRLREQDVGAVLKISLVERFPERRIAFAIFVWRIWGVSHGKNSAPHWWWCVSDTNAPSQRKINCTPRCRGLRLWGPRAQANRGSPTKKSSPAGEFVIKTVRVSTNQRRSDGKPVGQVVNQNVRP

SEQ ID NO: 998334 - protein, 43 aa, Homo sapiens
MDSTSDSPLWAPRKTPTEVSIFQKNQSASWINPMGRHITISLP

SEQ ID NO: 998335 - protein, 111 aa, Homo sapiens
FISSGITWHTYGKHNIWQRLIQNVKDKKHAECTCIRNWSYLGVPMCSHNLQARANPLQHKASVLQKKLFSSLGGHHFIKDIMEDAIDNRLDSYKNGHIVPSVQQYGMVQEL

SEQ ID NO: 998336 - protein, 80 aa, Homo sapiens
VRSDRSKMATVEPDTIPTPKSPDYRKRRERISNQGGCQTQNHYIEYIPYRNRWALWLFNRMIKRKTLDIRKSCRAVSPMF

SEQ ID NO: 998337 - protein, 73 aa, Homo sapiens
DSRRVGDSRDEDSKVGRCSEVLAFSFTCSSVIGTRCALVARRWEEFMNESAEKLESPDPMNGDVWFRAKYRHC

SEQ ID NO: 998338 - protein, 446 aa, Homo sapiens
MDKADSDRWHIAGWESPGSDTGKPGIDNVKHVWKCQRRERITDVGMEVGKAHPCAPCVVGWTTFHHRKVFSAHPRGTEAAEHKKRHSVYTKVKPPYKKQQNEGDRIKHQKKTKNDVRMEKQITTISEKQRSKRPKKENKQRKDETKEDQEKKQSKRHMDEHGTENREIGDHNNISQYNVADREKQRRYQDKRTGQPRDHPIRDNITADTRPHPKTVTQTDNDKTMRGRTREGERHDKGNNDHRKSHTTLRDVGTKRMNNETRREQQQTTEQSETITTHHKKGRTHTKRDRRRQEKNKLYERELEQKKRRKKTTTQREDDEGRDIAAVMHTNPHRQTAHNTRGRPTNNPSTNNNNRDHTTRRKRHNHIKDRASMKSRKERRKNTKNKEQTQSGVRQPTEERAKSRPHHPTQTTTTSEADKQKVTRKKQTKVGEKNKQQHGARKSDHE

SEQ ID NO: 998339 - protein, 268 aa, Homo sapiens
ESWKRSSEAGTGSFAAIFLSNQTGDGRREANQGLHRQVETHERIKDTLYSIAWFFSHPIEQTRFLDSYFPLDQGGWVTKISTNMIASSNKRNLLGRHSYWGATVIMLITRPSMDELLEGNRHGQWHHGQNTKVWSHKPKTFSRRNQRNTNNLYPIYGKKKVGHTGNTIGTQMCAIGPFKNAGAHQHLAHEKDLDPTDSGGFHNDNVLATQLEGFQYDGLLDRPLHGTRPKVGNKGCPLPKQHTRWKETEIQNVGTTTESFTSLIGHTW

SEQ ID NO: 998340 - protein, 141 aa, Homo sapiens
MKSRKKEEAKVIKLEKKQTIEKKKFKKMRAGRVEAMRVRTNWKYIQHRETARSRGARKSKSNRRTEQKHRRQKDNRQTAPENRQQIQNEQLDNKSNTPEAKRRNTTHKHTDRRSRRHKIGTKITRQTAPENNDNTKEPQKT

SEQ ID NO: 998341 - protein, 101 aa, Homo sapiens
MPHPTRIHSGQTRRQPPQPTPHSGKRNWNAQGQTAHRGPTDTQDTKEQQSITNPTNRKHQPRHGNTQAPGNPRAYATRGRQAEYDRYQYKTPNTPYYTHPR

SEQ ID NO: 998342 - protein, 145 aa, Homo sapiens
ESEVRRLYTDARLTLSQWIVQNTLFWSVVILVLQWGSYWIIQVAENLDEACTLGQSSYDPDSQCLRSKRIVFQEFTTDYSGSYRNESESGSLRRRISKDMNIDQQTVMQGEGSAEVTSERLTGLVRQAWADEVDEHRRKREVTSV

SEQ ID NO: 998343 - protein, 214 aa, Homo sapiens
EPEEEGGCLVVVTERSPVHRMAGHRLVLVLGDLAHPTPVQQLGQLNSKKPPWLPGKKFQATISSWQPGKTFGHAKRRQFHGRILQRTLGRGVEWFQYCGGRRGRTSGVEENSGNFSSQESRDTRVGLNSGLGKPRFSNKQLWALGNSPMWGSQFQEVYILPNWGGTHLWGTTSSFNDAPGFGKGRAKFLELWDTILPLSSASGVEAKQHNAKHA

SEQ ID NO: 998344 - protein, 378 aa, Homo sapiens
ASFRADSAHASMVNVPKNPAGTFCQHVWQAPKPITLTQYTKGKGFSVRPGTSGRYDRHAEWLWWGKIKAEFILETRLKNKKEDGAKGILSAVEPQSARNLRRMLVIKRCKHFGNWGQAAFKDSSTRCQVASQYPKGGQSFELICKHDENICAGSQCPKKRNKKKEEARKPEGNTCDSGRTANAHKRQKTKEEYPESAEVERPKPPPRENESRENTEGDTRRLGYHTEADNRTCTKEKHKRALVSTTPKTQTIGKQDATRGGSNTKRAEASGQQQNTQTEYDHQRREHQKRGRKKQQKEKRKARKEMRQTTRRNTNKHYKRPPRRGGGPETRNADRAEPPQHKIETEAQNTTMRKQQRREHERQERTRKRNDTATSRNS

SEQ ID NO: 998345 - protein, 154 aa, Homo sapiens
MPDAPLRIRLPLRLHYLRLKPGTSHNPRIKQFYRVKCSYCTALVPSVETMFTSRENQRLGNSITKGFKVDTHGFWSVPSTCGWPPGRLGTPRVDQSHPQYTGGEWIGQWSAIYVGVDHFELIGTHCGRVVIREREKNVGEVGDIEGGEEKELFN

SEQ ID NO: 998346 - protein, 150 aa, Homo sapiens
MNHVTVADGVNLSLNAVPECDMLEENHVQPRKPRRGRLILQSRRGVPSMGGMTLKSDTCNSTMLPKVYARGFQLPICGVRNTQHGVTRDKFNTLGNMTKWLQEQCYVSDLSYIYPNILAPLTKQVPHRAQATTFWGHYFPEHTQTGIQSC

SEQ ID NO: 998347 - protein, 106 aa, Homo sapiens
  misc_feature (94)..(94): Xaa can be any naturally occurring amino acid
MGDREQLLQRARLCLSRRSATTNIGPPPIEGRDQSLGTHLNEGNSLLRDFPRLDSMAKLAGETTSPSGRATSRMKKQEKATEDPSGPLALPSPXTPSSPILPCHNH

SEQ ID NO: 998348 - protein, 322 aa, Homo sapiens
IVQHIFNSPMATSTPYGFANNERFRTTGWGGGKLLTTRPGNKVPFDPCVSESVHAMDDRVVVYTQFNIQKRLRNCLCTVSVTLVMGELPQFGCQVLLCTTTANSLPTSWLDLNQLAHYMLKPFPAYKSPHGSCNVHSISKRIVMHRHWTHDQWHILYTHGHTTKLQYLVTRNTKIKHIIHVIGTNNSPLTENQSCQARARRTREYQCDLITYPSNIQEARTEEWTMGIKYRTHKKGPNDHRHVGAKTGMKNRPRQIPTYTQVPKKPTNLGSSSGGPKDRPRTSATAKPSRERTRRAHKTQRHRSNQSERRTRCNAENRSTGH

SEQ ID NO: 998349 - protein, 41 aa, Homo sapiens
GEGAGSPSPTSASPHRVCAFLATEHKDQAPAARGGHIRVPS

SEQ ID NO: 998350 - protein, 158 aa, Homo sapiens
  misc_feature (80)..(80): Xaa can be any naturally occurring amino acid
MNTYSVWCGAEGAHDARHEAAAVAPKYTVFPLTGRTPGRPSEHGALGDFLHTNIYKNTRRGEGEHPRDACLRVDKHSRKXGASCRERGSLYRRGGLSISTDRVRSPNRRERRSLIYTSKYLARPESPLGETLRCPKDTCRVANYLVDRIHSHRPKDMR

SEQ ID NO: 998351 - protein, 121 aa, Homo sapiens
DRQYHATRYTTNEELIWTVLAVKVCTHCASEEAIENMAHRDGRLVCIIHIADVVLTRIHLSRYNKFYTRISLEIFSSLVGMLIVADSDFGIYPGIMGSGKEDYIAKMYSFREVETEAYCVK

SEQ ID NO: 998352 - protein, 92 aa, Homo sapiens
EKPAENGSDGGLGRVGVVVAGLIWAYRLVIVRLHMLPIKQRAHAYYGESEKLCQIGKRNRQEKIKGFYRESNSAMADYWVIILWTSLKPMRI

SEQ ID NO: 998353 - protein, 267 aa, Homo sapiens
MRDMSQSSGPTQFEARLTLCSLRELKHVDSWVTRSHYATLLMRADLEMEYLGVVSDCAERLFWTYPNCNTLVRDNLTAKSSLRKDVTEDSQGMAWRVERKNAMYGLVYTGQYFGCPATEGQRNARGGMDNPPIAMCGNSWDGTAQKSNGVSGANHGCTTCLKLCTGNDSQSTDDFQWGWGLGAEVVGESTAFGHARPDRRQRHTRVDACAGQQQRNVLTTVQWARADISNQGMCDLWPDTRMHSVWNESLALSDQGRFLRKRHVGRV

SEQ ID NO: 998354 - protein, 200 aa, Homo sapiens
MLRLVYAVWDSTWEKVNEQMFGDYQLLKTQVNIFLEIPPGYDGLEYSHVMPTTVKTPLKAIRYAPTRLLAVQKRLVGAFVDIRGSNRVGLVWVTPRWPKRIWKGTGNYWVMERRVVWESGEERNVQEKLGEVVIRIEGLCKKGGDGMAFPRDFNLGVCWDHVPTLEEFRVLCKGGQKKEVLGRATWQVEFKGPLRGIIKE

SEQ ID NO: 998355 - protein, 95 aa, Homo sapiens
ALGWPAGAGSVESSAVAVCEPVCAAICGPDILKDSRQWLKTGDNENDGLPWRAKSVIKLSIFGRLQFAEGHNVSTRNEIKQWIEGLGNLFAQHNA

SEQ ID NO: 998356 - protein, 217 aa, Homo sapiens
DCCKMAAPSDGFKPRERGGGEQAQDWDALPPKRTRLRGRKQMIWMACSAYCGACDGASLETVKVGKTYELRQIRVTKHRSLVLLTEWTGTRVGSAGLDISRAEFADADGVVHREGELACYRFISITQKNVLIEVNPQTRIPRTFDRFCGLMVQLLHKLSVRAADGPQKLLKVIKNPVSDHFPAGCMKVGTSFSIPVVSDVRELVPSSDPMYVVGAFG

SEQ ID NO: 998357 - protein, 119 aa, Homo sapiens
GKSVDVSSQIIKALGLVARSVLSYHQSETFRRKPSHRQKQYGTRPRSIPRDKKPTTREYNRTKEASQESNPHDFSHSRSYGHSKHQDRNEENNKNNQRPKEQKGDQLTHKQKLIKTEDT

SEQ ID NO: 998358 - protein, 185 aa, Homo sapiens
NLNTTFFDRRAEEETRSSIPTTYSDFAVTLKFIFLSYQASEIIVPYELTDSGNKGEPLGYVGDGLERMISIGFLGFSRVSTPVYLRVGIDVDARAYVALRYRESSLSLIRRLSIICLTRTKLRRKQYEMICVQCSEHLGFILLGTVGGLTGIGLANSSLDIEVHEHVLRCSVTFHYVLSNDGAVM

SEQ ID NO: 998359 - protein, 75 aa, Homo sapiens
GATEGLSTGSRRVWLAKMNQMMRKMKKSSSIKREEVDENMVENRERLNELRRELRLIELWSGEDHVDRHLIVRRG

SEQ ID NO: 998360 - protein, 98 aa, Homo sapiens
FSGLYRWRCGLVSACKVLSVLFSALPGPKLVRAGSGALRGADAGTMVHLTTLLCKAYRGGRLTIRLALGGCTNRPFYRIVVLTTKCPRMAVRRAAGLL

SEQ ID NO: 998361 - protein, 72 aa, Homo sapiens
ERTTGTHKNGRQWRDVSAPQYSCDREKKVLEVKLVGAGQVVDIDAGDFSPSGIICERFREGYYGVVKQVHHW

SEQ ID NO: 998362 - protein, 93 aa, Homo sapiens
LLSAPSPLPPLLLRLFLPPPGSARIQPNPNPGEPFLLFPFSRHTASDKVIRAGPKNIIPSPSHTSIACPYQNLKSFDPFADAPKGDDNSRRGH

SEQ ID NO: 998363 - protein, 109 aa, Homo sapiens
MPRYAQLVMWPLLASGKSTLLVPQLVQHCEALNLVLSKVVNLASRQQNISNNPCWVTSGKLIEGGLMYMEDDSRDDYGPKGREWVHCALGDICANNFGTCAWRNGSVAM

SEQ ID NO: 998364 - protein, 468 aa, Homo sapiens
  misc_feature (37)..(37): Xaa can be any naturally occurring amino acid
  misc_feature (96)..(96): Xaa can be any naturally occurring amino acid
  misc_feature (133)..(133): Xaa can be any naturally occurring amino acid
  misc_feature (172)..(172): Xaa can be any naturally occurring amino acid
MISKQLDENRVIVPVDDRRYYNISTYDMRSSAGNDNXHVGHSPVDYEIPRHNGDWLMFTMGDDCSALPQEMAPYITYYALIRLYFTCTHPLRITEXPCATVTQRQSATRGKIFHRESSTRRASARVRANASHXMRIRIRVAYGHLCYEVNAVRTVCTELEKRAIPLFAKGGXLLSRLRILRMKIAFIPLQLGPSYTKNLPLFPTRNTLIAFPSRTKILQSSLHGQNGLKVATGGFSTANKASQIVGVLQTLWLNEYERSVARFGSTPLSAMVPAFECPKVSNPMYIPLYSGDPVATVARLVPLKKCKLGWHSEVDIPHSPQFIDGRGKNTLQTRLPGGRCQAVAQTSKHKVFFHTGCFLTNKEITKCFDVKKKNGISTYEWVATYMAYWQPHMGHGTCPKYTVTDFHQETQFQLKQREKFPRPFHRQESRKVRTPTGTHYHLRVRAERGQRERTFGDGYKQQGAPGDG

SEQ ID NO: 998365 - protein, 118 aa, Homo sapiens
  misc_feature (60)..(60): Xaa can be any naturally occurring amino acid
MACLFLSSQVASYFTSCGPLFLNLWLNSLSLTYVASKIVGQLHYLSTSLFAIVMGYVLLXGLNDEYLSTRSIHTITDNYAKNQQQKKYQEEGIPALRDNFYSEVNKCSFLQPKNFTQK

SEQ ID NO: 998366 - protein, 362 aa, Homo sapiens
FYTSGVCRQNTGVVTRLPPRKPKWDRQRSHIKHSSCIGHVDSGRSRTNTGPSDAIQLPVVVRAIEKPFEKILRSEAARCMRAQGALYFKVIAVAIYGIKVGRVLKQSQTVASVHPFDYHPLIVNMYGRPSKVLMLTYASRCRPVSTVVNIIPQNDASKLVTIPGAEFGCLSPDVVRMAGKLGLKVRKAWDNRPKRNLGKKPLTQVIGAPLIVTKPLLEGGCKPRVRLRTGMDWNQKLEFSQLGCSGPKHWARTRRVLTQDTRSQRKRSAHFVPFSAKFGGKWNTRNQQEDRLDAKKIWEWGPGAPALLGDTKERQPGAHEGHRGLLQTVRPRTVDCATVCQDVDGRTVMYFERVSGDNVKCL

SEQ ID NO: 998367 - protein, 161 aa, Homo sapiens
SSAFGDALSSQRMAQLILQNSLLFTKSCASIMGWRCDQQSYNPPRSAYGSVKAYTSFDARRGHCFAPIETAIKSERCGMSVTIVQEFIRPNAGKLGHDARGHNMPSQPNPGRKWTQTKMCNRLHSIRPWTVLGLNHCAKPVSDTASSDSGPSLKELPLAHD

SEQ ID NO: 998368 - protein, 481 aa, Homo sapiens
SVVSTQSGYYGREKQTCSILFKDAFTFAQHNHMHSTSTHTTSHSGKLNIQAAKPGSQASKTNTVQHSKHAAQWTIVYAQHTSIGIACFAKSFPECIFSMHLGTLVSSTAFHHQSLFPRTSMGCTHHTQWASATSVPAGQPTQQGGIKFFICKQHIIGSKGKGLLARQKPQQECQQSNRVKSFNEFPKANTEKVAFEGKVNVSKRQARLGHHMKANLAEEKKSHSANRTPDKGNIPRYNPKMWTTLPTTTRSGFRHFLPTGGHHHGHTPGRHNFTTALAPPRTPVGGSSGVHTGATTQLPKSLRQGGHTETARTPIWALRLHCATAHPLAISNSTWELGTHKWRRQTRGDPLVHPHRNATRHGTGNTTDHKAPRHNPLGQFPTIANLGNNTHRPHNTWRGHCDREPTASDHYGFQTAPQLLSQLDHSAGQQYGRSRYTPARSSGHKGEEPLNTNGDTNRGNYRGTTSTHTRISTPLVTTQQG

SEQ ID NO: 998369 - protein, 201 aa, Homo sapiens
MFSINPLENLEGVHQAVVLPWVVFMIRRKRHWHSFPDPGLLLQKSRRLNPQKWQRDWNHFLLRFTDSALCVLRAMKPSKHLTKRNQNSRTGTSDQAGRPEHSTQSPQAWRTRGPVNISVIKSRITLGPTENPSGRGNSPANAFGPILVTSKQSKGITLVTFTGQGKTTKEDNNISFNPFVAALEPRIDCRRVNWTLLSQCG

SEQ ID NO: 998370 - protein, 397 aa, Homo sapiens
ERPPSGCGCGAASGHHLRWPAQRTPCCTGLLCALATWGGPRNPRLCPMKRVFGVWGQLSSPQPWDILVVCAPMPDNNAHTHNWHASHPTYTTYGEHHSKARKGEHTDKRRMQRETRGKQEDEREQSEQRQQKRQTRAGEEKTGEDDQRGKGSERDEKKKAEEERQREGGGTGGRRRKRKAEEKKERREKANKTQKERATGEESEKERKKTEAARASERRSRTEEASTKNGEKTRDRGRGREEERGREDKRSRQHNKNGSKAKGRRGRQRRRSPEETRGRGERPGHRKEGDSAAREGRGGTRERQTRRGRGNRAKEGRQGEKRRKERTEKRRKTERRSQGGAQTKRKKKRKQEHRARGHTHERNTNKDGETGHKRRRTERERRNERGKREDTAEETKR

SEQ ID NO: 998371 - protein, 67 aa, Homo sapiens
TESSALVADEGIPSAREVLDLVVFWLRVTPAWREVFCEKPKDYTVTNRNRIQATVSEELYYRYFVSL

SEQ ID NO: 998372 - protein, 195 aa, Homo sapiens
MPVAPMKGCSHINIVAVLWEVTPPGGVTQKTEVGILDSFRLRNCLVSKPCVSSSIHQAQGGRYSAKGVHPPVGAHCTSPYPHTYYMVLSCSSGRRGTRPGPVDFTHGRGISATTVHKLCVYERCNTWAKLLVAPRGREGRSRTNTDKQPLASLWRWRHSRHPRKNGATQPAKSSVEGTGGHAGGTAEQKVDTQET

SEQ ID NO: 998373 - protein, 294 aa, Homo sapiens
MELYKPSPEQFNGLCSGCKAFLHWYTGEGMDEMEFTEAESNMNDLCVRVPVVPGCHSPSDGGLSSTEEADGVTVGYEALQSLGYMQGSSVNSYISLPSLVPVGLFHCVHLACIPCRIIHDCTDTQTNIKGNFANSQKQETATRGVHIKSIQKSGGACAHPGESTPWTQQTSAERDEEVHRRGEMTDNSGYTRADHQRQNNHSATKEKNKDTRRPFNTTQKRRPTVGDQYGTIAEENTTREIATGGQKRENEKHRKVRAQKRKHKMRRRRRGNEREEEKEGKRQAEQSDTNHEKQ

SEQ ID NO: 998374 - protein, 74 aa, Homo sapiens
LVRDIINGYVPSIKHYICFNFDIADYSDILRSNTSLDLDRLTCTEKYCHVVSSTVHFETFSGVPYYFFCVNACV

SEQ ID NO: 998375 - protein, 253 aa, Homo sapiens
MHRLKVIYSVYYYQAVCDSSSHIVTLTYYRQKRQNHFWITSGIGHEAMHYHIWATTKGFHCVMKQAPRYTYTAVGGYDRLEDKEGNIDNIPYTNQNGVAYSPDADVHKLSLADFGQEFRDKSKQYKWSHGNATEASERPHEGNTKEDLSTARRAGPDSGAMTTTRTTLQPEEIGTTPGTRERTGVGKTDEKGPERDSRGAQDKPRREERRDNPKYTRHQTKKSPTANTKEHKNKRGKKKEQPSTSAIQKAEIV

SEQ ID NO: 998376 - protein, 400 aa, Homo sapiens
  misc_feature (239)..(239): Xaa can be any naturally occurring amino acid
MRQLLHVGGSELLKQLDESLGVAIIGALGERSRTCVVNERSNTPKRSHGAYGSSSTIIATVLSEGGMPASLILLEAHTKGAHRNESVEPTSRAVYQQQAFSMGTKGCPSVNVVQTRLVSLCVAIPHARHTCNAHESTLIRAIYFCESANADMVCTCAFGPFTGLRKREGKLLTDTLGGCFWHVLFTAIFAADPMDILRWRITGIWSSFQEIYRHELRLDIGPTYAVGLHTFKETQVALXNKQDQRARNLRPTSMAIYNSPRPHTRKGAANSWGSLADQRLTRGPGIGGKGRERGLVRSTKDGRQTWHERVTRNQCDKWKTLCKKGEQGGEGTEGEEGQGRGPPTPRRTPFGTRHGGSVQRAIINWEPDRNGMAPTTQSRTIGGPAKAVDNLERIMPATCH

SEQ ID NO: 998377 - protein, 212 aa, Homo sapiens
AYRRDVFVLMSHRQVFRMSDMVPSQYLIECSLAGISVAMVAYDDFPLLGDPSSWDTHITVLLWWDIIVLGNVVTVVAGNVKSPYFAVCCIVVVAVKPLINSLDTDELAMVVAVMFVPLPICRLAVRKRDPETRFKKTLVVKRNVQSSFIRSRETSYRSLRISHSIARILLICDLCTLLVTQSCVHVGQSIDGIVVKNTLTLESLELTSNAFK

SEQ ID NO: 998378 - protein, 120 aa, Homo sapiens
MIDRAPLASGTGKFPINFGLCKSWNGQLRHFSVRTQEALITFSIARARLLFWRIFCDYTALVKRVPTQFLCWFSPPIRHWDSGFVCGRRLDGYSLKSCERIANYLSETGVVLICGAEVGR

SEQ ID NO: 998379 - protein, 108 aa, Homo sapiens
  misc_feature (43)..(43): Xaa can be any naturally occurring amino acid
MIILPEKVGSMSGRLQSQRTWEADWQANHLNPGWREVAIESDXSHHCKLHVVGNRCEHSVSKKKRKETGINKYRLLYLFPWVSNAAMDNFLEAFQDFKVGYIPKEKYL

SEQ ID NO: 998380 - protein, 120 aa, Homo sapiens
MYFSYGYMGQKIRVQFLALHPLITLHWCMEDLLDKKPLDFSETSGHYRSTRRDTTGAREEWWISPEYGAIINSKQCVPGILERTEKNRYYTQRPCPTSTKPRGTILGGHIINGVRGGNVQ

SEQ ID NO: 998381 - protein, 168 aa, Homo sapiens
ESERRWRTVVVEVSSCGGLRAVGAPGPGAGVSLIFVPVWPVWDVPRVCGSPGGAGGLRERAWSLRICDACGELVLLEAPGGRKAGCAGLMGCSVPWPPVSAPGGASMGHLGVTVFGELRRHAHVDVEGSRGSWIRIGYGPAGLNPVELQLDGTPLGHGDVLYSTSFEV

SEQ ID NO: 998382 - protein, 125 aa, Homo sapiens
GTCSASRSTRRYFPFIEELITFHDHALIIIFLICFLVLYALFLNTHNKTNNTNISDAQEIENRRELSCPAIIALGPAIALPSLRILYDNESEGQGIRSPYHRRSMGQQGYCTYEYTDYGGLIFNS

SEQ ID NO: 998383 - protein, 369 aa, Homo sapiens
MPPPLRDQTALCLRACCEHSDSRPVRQRVLWGICPQVAKLMAWLSWDCRLRLSHRLRLPPPPPQPGGGPGPDNHVSEDYWDGRLLAEPGGTTGGRRGLNSLGRRTRAPEDAGPREFWRVGLVACHPRTDSTQGKSELSEQIQNGTAVGPQVTTSRSVEPEVHLEQKEQSVMTPMHARNKRTLDLKHSGGRDGPCGGEQDATPVEDNVAPAKATSLHWLPMCGENYLQRSRMKRGESQRFRRFVDTQRQYADDQMRHHSERIGGDYEMDAKKGEPRGARPTQERDPHRHMTALPRAPQGVERAQYQAARDAHNQQQPRRAKPEERTREGKYKGSKRCGTQRKKSTKQQGKRGRLEGGRHPQEEDRDEHQN

SEQ ID NO: 998384 - protein, 35 aa, Homo sapiens
MRYPDIGEPTPKKASEDRPVVNGATERYERRASKL

SEQ ID NO: 998385 - protein, 143 aa, Homo sapiens
MRKINQLKANEAIPSGYMMRPYDRMLETIQEEEIDPCRIYYFERLVTFGSPLGTFNPDRTLRLFTQRIGGLHTSCGSNPIYFGTSRNEGCTQIKPKGGPPQKVWTTVLGGILPHFKKRQPGPRNERRLRRISENVEFNYEHER

SEQ ID NO: 998386 - protein, 99 aa, Homo sapiens
  misc_feature (8)..(8): Xaa can be any naturally occurring amino acid
MRGNACIXHEGSKTKYTPPACKQLKRSKPREQRQNGAHRRKPRIIQKDYEPREQQQRPRHPNVRCPKTSLRQVNVIPPPKSHVGDLGKRHRGPHTPGRQ

SEQ ID NO: 998387 - protein, 310 aa, Homo sapiens
MPLHSSLGNRVRLRLKTEKTKTRENKKKTLEALPEDSRMSSRAYSTWSRAILTGGQAIPNDIVAGYPRTTHTANPKILLTLRGTSICATLTPDFELRRLSRRAQFPPCTHNNSDRGFLDTSVVPMCSPRHNVDDGVIFSPPCDAYIPHTLSHCYTIDVTPLRTPVTKPLGGMRRTHRWSPPYTPNIISTSRRNGSLSERPDAVAVEEIPPQWGHQLYKTAATFRKATILCVVISRKNLYMVEEKKKDGMFYEHHLGDVRTKRARCEKTYISERRSINTWRIRHHEGGHRRRRLYWEMPPEGHKTSSAVNA

SEQ ID NO: 998388 - protein, 125 aa, Homo sapiens
SCPKQPEVICENGFAIHVDPENPTKSCGDRDEVPIFVFTLRNYCVKLSQAYQRDMHIRKATKDLKDVTLQKQCVPFPTLQLVEVGSVCAGPSLDGGWTLGSVGHKEVRNFLVHMLEQRRDVSAES

SEQ ID NO: 998389 - protein, 254 aa, Homo sapiens
MSDTGGNIGVSLREHPAGAPSTTTGLENFSTPITKQRRRRDQPRRRSCEQNFPTAASSWKAPHTREPLTTTVRAPSAQTALHKLLQNYTSDPAHTGGSPNQYPYPRHPTSTKLLTYAYITHSTTSRNPNNHQSKHNTPSNHPNHHSTNTTSTSYPNHTNHHNASTQTPHNTIPSTHYKPPYYTSPPLQILPSLHKPLITNTAHPSHYVHTHHHTYHSTHLSILNHSHLPHQTHLTVSHTPSTQPTTIISTLHHD

SEQ ID NO: 998390 - protein, 112 aa, Homo sapiens
MVKTISVLGVTIGPQILQKGPGIYGNCLGTLFTSTWGFLTINGSGSGLLTFEYIKLPQVFVKEAFKVCGTWDFTTRIRSPFLTGLIFCQTHWGNLLNEVKSSGLLKHRVPTL

SEQ ID NO: 998391 - protein, 128 aa, Homo sapiens
MAARHTKAPSVFAQSCSLTPRILSINTAHNFRKRPRAPARGVTEWRLRRQQRRVGHQPRRTHWRGTQSKDTASERSNPPQEIKRRAEDFRERMSVAPHTPAEELAEGNASRTRTTGRRLPTNASNQEI

SEQ ID NO: 998392 - protein, 130 aa, Homo sapiens
IQLWDPELLTQRGGPAEPVTHLCMCVSGSGSLLMACASSWMLWRACLPAVCPPVPQSCKPAACWKSCPRSWAVIIRLASCLQGAMAEGNGADPWYPRIQPQNLKNSNRPLSQNVGQLQKSLKLPKYPIGN

SEQ ID NO: 998393 - protein, 106 aa, Homo sapiens
MHSVGVSRLGILHTLDGSEHGAHQVYGSRVSHPNRLNFSGLLDATIAVRDVPVRVGPNVSSLLQLIAGICQGYLQHQLDGCFEDSLHRQASLHNASNGRCAAFLFT

SEQ ID NO: 998394 - protein, 292 aa, Homo sapiens
MGQAMLPDNDRYLRSIGTTLCNFPWEYFISASLSGHRKYWMCEAILFAEVNGQTFVVLGSWYHKGGLLGHTVTVLAYPVRRQLVAEAMAGKARVRTVTGGMTVTLARATVSYNTYTLGCESQIVEPGGKNATVLKRFWQREMYGRPLLTCDYRLFNGTFMIRDVTVTQHVYLLLLPNCSGAGKLPPRNTVQRCYSRENTFTNSGHNSELFNFLRSGDTRGTLSQVRATADKGRWTVQGHQHRDDDTRINHKGGLSLPDNRATTFAKGPSNQAVQASPLDPSRTRHRRIRDNA

SEQ ID NO: 998395 - protein, 263 aa, Homo sapiens
MRLICRNIRGYSENEPLGPLAMSHIFGRPKMISDAIPELEGLHATRKGEDFREGPLEGEAAVTGGTDFLEFMNGSHVQLAKDRVQSKLRILIRSGGSITGIDIIHAFQIVGGSVGSINKQPYPWNSLKNKRTEPTGTHKPQHVGGGSRPGGPPGTQTCYTRTRSTVSVHERSPTDGDQRDSMGPTNGAEPQGNNTSRGQDTTQQGEGKPTPQDKTNAAARGPPRRAVDDKKYRHRERNERAKHEGVNTTTGGSNRASHEPFKK

SEQ ID NO: 998396 - protein, 70 aa, Homo sapiens
PFHLAPLQNGSRMRRVASKNTGPFCHLTEDENPEEYTINIHKRILRVWLSRKALQPSGNVKRAFWDNSCQ

SEQ ID NO: 998397 - protein, 319 aa, Homo sapiens
GGGAEAAAGVEPAVRPPPCGLGLLACAPGFSWGVMSWERVWAELLRTVSPELILDHEVASLPCFPGQEPRCRPEPTEVFTVGPKTFSWTPFPADLWGPGRSYRLLTGQEGTWNPPDRSLAQPPRHLIPAVAPKGGSSSQSVEGDGALSKLTHVPEGVRPQSFNGMCHDFEVTLARHRVSCHPQESRPRKGSNGQIDPYTCPTQSQLCRPPSHQKIREPSSQAHTVENLEQLAQNPGIFKATLAYFLQFACIHSKLPAVVTDFPLVMEPRINHHFEVKKGHTCNRGRYGKQEEYRDINIGHNKVRAERYAYGGKEQTRVT

SEQ ID NO: 998398 - protein, 71 aa, Homo sapiens
TLTKGRGPTLRNADGFCSWRIAAAGLAVVGWRPWSQAGFQCMFRAADHEALACECIPDYYVACIQHWITSI

SEQ ID NO: 998399 - protein, 78 aa, Homo sapiens
EGGYTYRMNIEIQPREAEDKRRHADTTQHATKTASTEPEKDRNKHHNKEDTTKHKKTQNNTHKNNKNNQQEQKTKKNT

SEQ ID NO: 998400 - protein, 132 aa, Homo sapiens
GKWSVRWCPGLHHGACRTFIDISEDSIIGCLSFVLILKSKEELHHLHEENSERVALHCEIVSSYIHWKPGDVCLNREALDVMHVEPVLTEQEWVVPYLVWIRGKPMDRGDSKAFEICKDRYVPLGWSKIVRL

SEQ ID NO: 998401 - protein, 137 aa, Homo sapiens
MGPPNSRGLATWSPSFDKKRPWPFLARANLRARRFPSVSQHVLHPWTWGFPPPQLGPCFGTLVLPREHRACFLARALGVLTPPKCRAGTRRSRRYNSGDPGVPVRLCATLTSRPLRLSPFLNARGLGARIGAYPCVS

SEQ ID NO: 998402 - protein, 110 aa, Homo sapiens
  misc_feature (84)..(84): Xaa can be any naturally occurring amino acid
NPGGGGCSEHRSCHCTPAWATKRDFVSKKKKKNTYDIGDSFGSGFSQNFFWRVSNALILGLQAFGFGKPPCPESLHIWLGSSTXCSPRAEEQKSTPLFGGEGGNGERYYL

SEQ ID NO: 998403 - protein, 49 aa, Homo sapiens
LSKSIRFGGAGPGRLSEHGAIPSLPEEILVHDVSRLGYRSSMTERPEER

SEQ ID NO: 998404 - protein, 277 aa, Homo sapiens
MAAHFSSDHAASLQFNEAGPSSEGLCTESRRRIGRGLAVIHLPHMRTSQTCDHDVSVCVQGSVEGWEPDDDPIEEHKKAFVRICLSLSVKKQYEELTLGAMFETGQRKSQEQNCKGNQQIRKKEFAGHCERKCAVPSEQLGWPWIAGLWAGACLGPSSGCNQFTGVYSLVPPEIPWWAPLAMSLGKGDPAFSNLGCIKCALGGGICKVGQQQVASCLLQRAMTEMRKQAGLTTHSSHHSTKRGTQKGHNRNTRDLPTVANGRRRKKGEGPRGNTRKN

SEQ ID NO: 998405 - protein, 181 aa, Homo sapiens
  misc_feature (90)..(90): Xaa can be any naturally occurring amino acid
MLLGLLARGAVQAREAPQQKMLQQVPENINFPAEEEKILEFGTDIECVFTECLNAIQNIEPKIYPSMTGPSFVQRGSALTMDHNTLRGYXLTDISYRDMRHQKGGFMVDEKIWTGIAMGFLCEYRNGSRHLGNQQDHEDVGQNVGDYQSINNQCLSKLVMRYFCWSGTKLQQDIPSEDFES

SEQ ID NO: 998406 - protein, 105 aa, Homo sapiens
MEDFGVSTRFTVNSHYGQTRDPRRQLDPQKHCGHTYYTLMGRLVSPNGTSTIQTQGQMGRRIEQSPPPGRRRSGDIPKGRPRPTLAPHSDTQQQYTAGEGHVPTQ

SEQ ID NO: 998407 - protein, 228 aa, Homo sapiens
SSGINAECPLRPGSAYITSTSLAMSGTVTGHRMSCSCRLRLLIPSHICSECISIHDWQAWMYRVGNACWELYMPGTRYPSPMARCQVHKHHWGQADDIHSTTILQRARALESTVPRAVYVRPWKPQSSDERSALDTYTPASYTLRQLITGKRTDACNNYAPRSTYTQMDKGALLENVAVGTDLRQQTGRHQMTHEIIQGHSRTNKSIARAGNVGTCGYKPCAWAHCER

SEQ ID NO: 998408 - protein, 336 aa, Homo sapiens
GWNVTRKDGHASGTDADLRALDCDPTTNCPTDKSLGARAYSEDVYNDWWYRYCILFGRVETGVLKPGMVVSLSVQSKVTHGMENLSDNATMKLGSEALPGDNCGLQMSKNVSVKDVSCVANCCMVDSRIMNRAMERESGFYSSGDVSVKCLKCWLMLASRCEYWFPGQGTMSVGRRSILQDLSASYEEYSKGSRTGELVAEQNTLGRAGECPSHHGQNGNNDTGVTWEDKERRGRQMVLGTEKGSDKGLRRDHRVLPYIPPGTAPKLLERPRYWGTKPGPSRNQVRERYNWRPSRPASQGYVHKDTRSHTACTGVARGEKNRCTQRENRQQRRWRD

SEQ ID NO: 998409 - protein, 276 aa, Homo sapiens
MATRPDHLAPNEQQRVNPGGPAQGPAYCQQPLDTDGTPWRMDPLTGNDFQPSGAELRAENQAGTQTGTTVGHNRPSRVNTHIWQGNRRTGANRRTPGPFHRGSATPEGLSATKLACNRGVPMTGRPITPKQTSARGPSKCNTEQTRHTVATGPSGQQRHGGAAGRTPDGTADQLGPRRTLANRDSPAVGQQRQRGITTEADSERDRHTDQPSVAPTLDTSRSHRAEQWDTHRWVDQPREKPPTQKRDTTSLENHQERNEEPKHTGARTQGRPTEPP

SEQ ID NO: 998410 - protein, 123 aa, Homo sapiens
MHERSWLLGITVAEASWLSGGYLLRVRIIKVVKGSQMFNSIRGPSYTRPRQDKTQQASTSQHEFNIGVDRNQLGQVHYASCANYWPRDNKSEETDTDTQRHARPARAARTGRQQRTQSSRHQG

SEQ ID NO: 998411 - protein, 405 aa, Homo sapiens
PVTRQYGNGSAGAQEDKVNMVMTGFHREIMDHDIAAMDIIREEKTHRRKPEAFVNKSQNERFMRDHIRRESINTSEGGPNSRRLSRSTKVNSTPEPGRTTTETRKPTRRKREGEETGNEHGRSGKRENSAKGRQREDKKGAERRARRGGGRGEGRSDSAEGERRTERAEGRAGGGERRGERRAGGRAEARGQERGAGPEPRRGGDAAAAATGKNKKRERADTTEGRRKKKEKDEEKEGAGHRQSAKGREPEEKRDREARRTRPEEGDDAARRNEPTRERRQQTRGRAGTGDRRKRQTEERAEQTASERAEKRQKEDKDREAQQEQQRDKRRRRGEERQTRAADDERGAEGRDKKRESRTTSKTRRSDKRQRASRCRDRRPSEREEAQDEGRRREEERTQKTRAAS

SEQ ID NO: 998412 - protein, 71 aa, Homo sapiens
SAKLALMCYLRKAVEDKHAGVLFQFYGKNRVNPRYQQKAVPVKVFPSRKTSAVHNSCLSRLSSSRIYSPDK

SEQ ID NO: 998413 - protein, 361 aa, Homo sapiens
SHNKKRPNNLVIRSYVMTHPCAWHHALHIRSLQQFMSSLHTAPFKHTVTHVLQGNKHPMLDHLRRRMHFSMVNQQAFIEATNKVYLHSIIFSRPRQYHNIRAGWIQSMFVHFSCTAMGTDVTLKLIKLLCEEIWLQNTTDELEEMGPSLDLVLRRTHLASDDLDKIIYEKCQKLSSQQQDETIKPSDTSGIQVTGTDSICQKQDPNAQRTTTRKTLTRGVDKTSRTRPAQGTKQEGTHGRTQQSTTTDPRTNTLRLGRHNTKPKHNTHKTQQHHVDDSRSERTNGRQRAAHETRRPTNENRDSEHSPHKLTRRRTQAEKKAEREQRQRQDTRGEKRTAAGRQRAAAKSRKETRQRERPDEV

SEQ ID NO: 998414 - protein, 163 aa, Homo sapiens
GKGPVFLLREAPGGRTCVRAQAPSHSHFPFTAVPAVVAKSEYVLLGPPSMGLRTRWNQHRQNMWKKDVWIPDRILRCKMAKRGVLNKFKILQMLQELSSSYGSKMPERQFCIERMSKLLTIMIQPYMKNAKWNTCRQGKNSEKLEFLQRQGYRSFQRRHVGRV

SEQ ID NO: 998415 - protein, 66 aa, Homo sapiens
MLGTTYDALIPMELNDKHIWSDKNLLLRLQCAYECEQDTRDYAEEQNHAPPMKKTCVGNQPRITYM

SEQ ID NO: 998416 - protein, 197 aa, Homo sapiens
  misc_feature (62)..(62): Xaa can be any naturally occurring amino acid
MLSASMVDEQECNARVNLLVRMLRDDPHSYALDVAGAPRRSQEHETATTCNPTNTLDLDNPXSISRPSRETTIHTGPELGPRSRIQRMASLRYHGHQETRQHKGHRVQETANPQHTRAALNPLDPGQQRKQTQPLENFKATISQDPHSRDKQPAYDIPDQGTENMTKRADSDKTAELSNAQSHTTKQETSGSTNNKH

SEQ ID NO: 998417 - protein, 494 aa, Homo sapiens
MPVIPPLWAGCRQQICLQVRQFGSTSIGSTMDAQPHLVTQQSTKHNISGASVVHSLEVLSSLQAELEAQAAHRLAHSRAGSRVHQLQPTQIRHELPQELDQTAEAPQVIQTKRTNDTHTTNRTQHNIAYGARQPEAPRKRQSDELQATHNTRHETAAPERNNTEKARTKKNKRVTTQQSKRVNTNKKTQTPRVTKNHQLRAERGINTDQPTEKTKDNTPTGRRTTHPRRDKLLTRTTHQARRQMQKEKNKRRRTTKAKKGPHKHQEPTSAESTDNKGDKRVKKNTRQNNKTATRDDGWYRTTDTLTKEKKKTPTQKKKEKTTDKQKQEMKKKEKNHQQNRKIEKKKREKEKEERTKNKKEERRKKEKQIRKIKREKEEKKKKKNDSQEEKKEDQRKEETQRNDNKTDNYNRATERATSKQEPKKGRAREENRNTNRTDDTEKTARGKKKDQQHRREARRATHAERTTEQEAKTEQQKRAKQSQKQTKRHHEQKQ

SEQ ID NO: 998418 - protein, 123 aa, Homo sapiens
MVIQCIVLAVFLLASSKQIQNETNRDRSYGILMKPEIHRILKNQALLHANEENRKWTERNMYLTTSRPATGYPLPPQIFNESQYRGDYDAFFEAENNNAVYAFLGLTAPPGSKEAEVQAKQQA

SEQ ID NO: 998419 - protein, 123 aa, Homo sapiens
MTTAGRPHIDRQESGKMTPRAAHTGERAAAGKKEDAHRQAETHTQNTTSDQLEWKSITTVTTEQHKQLQKNTQTTNNNHPRTSTTDKTQAHTKDARPEPTTNDETHTDRTNVRNITTQRSTEH

SEQ ID NO: 998420 - protein, 106 aa, Homo sapiens
DSSEMHANVLLESGGSDTGIMVIGDSLWMIHGQSSSCSYVGIYKPHYKTTARSRGITEMFLSNHFPECYVTWSVVIPWIIIKTGVAKRICQIIQNSCFPNADPQLA

SEQ ID NO: 998421 - protein, 135 aa, Homo sapiens
MEGHSQGNAGHILNNPQKATESTRIGTPTKGRYIIPKEHQGHVSQEDTKVPHKKTTRGTREKEKPHEHYYKPQGGHIQIREYMTEGHNGHKGTGPSAKEHQEEAKHGKPEEQPIKEANDKWTNTQNDQEQHRERD

SEQ ID NO: 998422 - protein, 132 aa, Homo sapiens
MGETHRHQTVFYHSVANLVLCGPNLKLKRTTGSITVLRTAITPLVIVTVDTVQQTRCTWNHFAPNNNKGPLGVMGVPYTKVPPNHLNLPALYGARGPKQLTGFTLLSAPQPYAFYTVRTLEDDTDKRGPAVL

SEQ ID NO: 998423 - protein, 181 aa, Homo sapiens
SPSGESELRGMCGRVSEIGSACKPWLTNCTASSQHCQNSNSKLLPLILHQSMVHGNLFTNQRQSGHTVMQHPPWGHESQQQAAVNRAHAFTCKSDARWVMGDNLTIPEIFLTECMARKNERHENSEEEIQQKHSVCLIKDGNGSYSVLAETSTCDDKTLAEEVNQMKASLMNMIRASSIID

SEQ ID NO: 998424 - protein, 109 aa, Homo sapiens
MCNRPVAGCVVRLTCMGQPLRRWSVLWVGEQYLVASYVRSGGLIANSFTWPRRTEVPQFVRDSPGSKLYEILLMVAENGAKKAIMGGVGNKKYRRLCGHVIRVPGMDGP

SEQ ID NO: 998425 - protein, 188 aa, Homo sapiens
MSLESSFGSLGYGGTLEISGKYMVRLATGSSRRNLEISRTPTRFRKQCPPGNVRRERTLRDTCLGTILMLEKSGLKGGHWQAAGQEQWVRYPKGNRHLVGAPQCEGAKCPRIRSPNRKGKEDVSVGSDTRVGISWDLVVRGKSGAIGRGGVPICLCGHHHTFLDIDFDNRKHFRKVFTDRTIPLSLAW

SEQ ID NO: 998426 - protein, 67 aa, Homo sapiens
MCDFLQRRVETHGAARAKATAVHESTYSRTEMFLDGSLDFGICLTARRFLQGRLEYDIVSCSSLAVI

SEQ ID NO: 998427 - protein, 194 aa, Homo sapiens
  misc_feature (173)..(173): Xaa can be any naturally occurring amino acid
MADIQTERAYQQAADQSFQEIEKGVLLGETGMEKLPRYYNEHLRLALYSDYPREAIDGHLILRMKCPFIWLMCPLRGAGSSLRVVTIDEVCHDGTMCHPTEIYSDTTISGKYKRIRRSATKNMSVALMSTLLHGYCLRSGDYQSTSWDELPGPSDATTSCAIERASQVSKGCXALREARSMKVLSAGSSVPLHH

SEQ ID NO: 998428 - protein, 138 aa, Homo sapiens
MLRKLHEACLNIKQKVGRRSFRSRYQENQTVMTGRAGLSAMAVCSYIRKKMCLQSLLELHKLSTERNEPHWCDFIETHYLHEQVKAQGNWGDQRDQICAKMGSARILALADLSLLTGTPWDDSATDRLRLGLISHSVG

SEQ ID NO: 998429 - protein, 81 aa, Homo sapiens
KPNLDTPSSTPPEEETPVLVPNTYSEFVSVTLKFIVLILPGFGIISHDDNLNVTPDYQEPIWIHRYGLSYDIKVGFLGLIV

SEQ ID NO: 998430 - protein, 266 aa, Homo sapiens
  misc_feature (70)..(70): Xaa can be any naturally occurring amino acid
QKLATTHFCSHASVPSTCKAEQCLINCLVHSESPWVNDVDASANLVIHIHMRATRTGKPHALHETKITRXGRSLDGAHFIWARLTRTMCSPTLLTPQHYSIVDAPPAPLEMGWYNTERHIGVTPIHAVGSIKREQHTRAVYHRTDKKKRAAMAENSLSPKHSIIKKQTRIPPWRRREQPPKRHRTVLRIKHNKNNTTQTKQRRAIHQIMKPATQYHTKEGDHIQTTNDKKRTLVSKYEQQQAAAAEYDTLQTIYLTCATPRPPSGD

SEQ ID NO: 998431 - protein, 138 aa, Homo sapiens
MDDDTTKRNIDKGKGSKRKTTVETGNEQEQSEQTEDSRHEQNNVKSDGKQKTGKTWRHNMRQQVEYRTKRKPTTKRKTKREKTRLGTGIENATAMETGHTNSNRKVARERGTGKEIRKEQVKDKRTSKKKNEKKKNKE

SEQ ID NO: 998432 - protein, 204 aa, Homo sapiens
MRKSRQRVVESGETTEERIREEQKQERRRRFTHNKEEEKAREEENTGESVCERQNKNLHKRRERLIRDEKQQKHERKLKYKQEGNEIPKRTGRRSKRIRTTVMKRNPRAHGVADTEQRQKTDNETQKERRKRKEKKTKKKKRKKKKDREQSTKKEGKKKESKKEKRTRRRKKNKTEEERRKKATKKETKPKHKKKKRNKKKEKK

SEQ ID NO: 998433 - protein, 105 aa, Homo sapiens
  misc_feature (30)..(30): Xaa can be any naturally occurring amino acid
  misc_feature (103)..(103): Xaa can be any naturally occurring amino acid
GVQRSGEELVASAGSRRFELQLKGNWQLRXGVVCNDRLGKKVRVKCNTDDTIGDLKKLIAAQTGTRWNKIVLKKWYTIFKDHVSLGATMTIPTECGTEPGSFXYQ

SEQ ID NO: 998434 - protein, 214 aa, Homo sapiens
  misc_feature (8)..(8): Xaa can be any naturally occurring amino acid
MQWLEGLXNEDVTNISPGRMYMRTYGEAKEVPHMLRMERESDMGFENGRPLVRCNLYGKVKNSLLELKSENVYGESREDTFIVKLNSCGVVLHAKRFTTGALCDPLPFIYLVPSVTFLRTKPHGELHTLGFCNAYNNGPYESKPSWRNTFGDHIDNLPFRGPFKETVGNNFNFWMVRGLRNRVNLWYYILCAGNMWYVMLPLRHNCGGIIPAAR

SEQ ID NO: 998435 - protein, 155 aa, Homo sapiens
MLAILVARISCHVAELQTRTTYVPDANIAPTLSSNSGEVILGVDMMDSVTELHNLCHGLLIFKSDDWKNKLIFQSKPDIQYAPHLEQEPTYSERIFSKHNVLVLQMMSIHERTGHFLKHGERDGVFKDASLLTLGGFLTTTLCPSRMIGYRLLDL

SEQ ID NO: 998436 - protein, 82 aa, Homo sapiens
GPLLTERWTELRPLVYKRSCFSSITSSESGRSSLYAEKKFDPMGLTEPWFEPIACSVLRLDDKYSRHRNRASRKRFKVLDDL

SEQ ID NO: 998437 - protein, 69 aa, Homo sapiens
RPQPVKAGDAIATLCKSVRYLKKLQGISALLGGHMHRTKDNGPDVTLKGLLSTKHTPEKPERLKAKPEA

SEQ ID NO: 998438 - protein, 348 aa, Homo sapiens
MDVGQGQHMSGYAIQAVEDVPINLVERDAQAPAADSTPYVKIRTSFIAYMPHTHIPLKHTMRILRQMRSALGSSTLFEKFLNEGDKHTCGHGALFPRKTTRNANHAFGDYSPHTGRKEPPQSGGRPTAIRTLRFGTCIGYTKTVGHHIPHNSTMGGNRRVREWLYVGKRHPGTPFQETPPTEKNNDIAPTGEQHISTKKGAGTGRKGGTHTRDYVCAEQEHRPRTWSKPTKTEERCSPHTKKERRKPDRTKGTVAKKTTPPGRYCKTNPPHTNTRHRRKLTVGVGYTYRRTTRALVMDEKQKITTSNEEGGKLRSSDCTATHSQHDDQSIAVSKHRKKHRRSSDERRI

SEQ ID NO: 998439 - protein, 155 aa, Homo sapiens
MTGDSYSFPSNSQSPSFPFLLHTFCHITGSVHECQTNQHAHASWHYPLSALIADMFNTAFRTVQLEQVPNWHSLWTRHKHPKAINDTLMTERHDCKFPDPWFDPHPLHDVLFNRNCTASTHTLSDSSVHGLCIGTYAFNHIQPSRCDPERLPAID

SEQ ID NO: 998440 - protein, 166 aa, Homo sapiens
ELQVVGDKVGKVAVAVHCAFELQGHSEMVARAVRRRAAETRHIPVGRRSQLGATIALQSTSQACGMSVKTGWRTDAAWLVALALRPALALQIGGSYRVSHVVLASKQFTSRGQAVDPTVWTGAVPHPGDGGGFGAHLGGARWPGGLLAVSPGEVDHREDGLRDCRS

SEQ ID NO: 998441 - protein, 105 aa, Homo sapiens
MYTNLGIRNGRGMGKTKRGNFYVPAETQICAFVIRNQRVSNWTLKAQKGSKRGVRQLLSAFRQILQVEPFVEAQQGLRLTMLRICRAILFAMGVTPKSGKSGKLN

SEQ ID NO: 998442 - protein, 31 aa, Homo sapiens
MNGGGSPSYKTEGELSTRREPAWNIYQYLAA

SEQ ID NO: 998443 - protein, 68 aa, Homo sapiens
MPKETPVYIMNLDPKEAKEIGNRAQKLGYQSQTPMGLPWTLCQKNLTGLDSKNRSGSLDRLGPKENLN

SEQ ID NO: 998444 - protein, 107 aa, Homo sapiens
MEGPHTVLVSRRPITRVGSRSALFERSMVRSIECDIVKDYAFVHMERAEERGEALRGLDNKRRVQRWDVCGLKFRAAVVPENTPLRGTPSPGRSRHLCVSSLRNRGP

SEQ ID NO: 998445 - protein, 187 aa, Homo sapiens
MPPSLAHIRRTRIQYNLDKERTESKPPNSWFQANPQWLSSDAKNTHNQSIQHETLVGSAQGSSRNMRLCWNPCFFGARRAAPWEVQVVTLAPLCRVMSAQRERHSCVDVFTTGCWGVPLSTPISLQLVAPRGGLHAETVFFVRPTLPSEGGSSRGAPYEARSLFRTRRGSPRDEGCGYSRYSARRRV

SEQ ID NO: 998446 - protein, 166 aa, Homo sapiens
MESFKSVWHSLVIPYTRHQAFLLLQESQKGGLALPLRLTYHEIVPSCPMPLQFGRAPNCLGRGTIPGKLGIYLDQAIGLFRRGNLPQGGRLFFLTYLHFPRRQRKSPLTGEPPVGLNSKKTGFRGITWGHLDTHLALCTQLGFSEHIYHHGAFFPTPTATPNATSF

SEQ ID NO: 998447 - protein, 180 aa, Homo sapiens
MVFRSGVPMLTDGSIYSRFDLHGKGRSLVPIIACGKKACELTNWECLDTFGTGPWGNRHDNFESTGTTTRGLDQGILQHEVRRADPENGVFTTLGCLTHLPRLGDTVVVATEGELFLGRGFHIRAMDAKLFTIWVLVLFTHFQGPQDVGAHLANTYGYEPGYYGQQGPYVVNPNVGARFD

SEQ ID NO: 998448 - protein, 138 aa, Homo sapiens
  misc_feature (87)..(87): Xaa can be any naturally occurring amino acid
MGDVEKGRKIFYYEVFPDATTVEKGGKHKTGPLSPWSLVGWNDRSRLRWILLYYSTPNIGTYRSFIWWSRTITGCEYFWSNPIVSTXPGNNNMILVVVHCDSTGKHTGARRTNQRYLQKISLTYMHVINLANMRSDVH

SEQ ID NO: 998449 - protein, 67 aa, Homo sapiens
DRDAREKSIAFQKKMNTDERKHGDIVHDGVRRHICTDTFHIALPSYCHFILGCTTLCTDATESGIRV

SEQ ID NO: 998450 - protein, 152 aa, Homo sapiens
VRRLEIVYPKSVELACAGGGVPVGFPPVRLPGHRGSDICPVGGISTPTFGGSVYDTIKVEVARQSVGGGRITGVLTPGAERAGLRDMKEKVEAVSRGRHPVHQPCVLWQGGQVCTREGPPVQVCPGKLGGTFFVPPKIQGAAGYSPKNSGVA

SEQ ID NO: 998451 - protein, 111 aa, Homo sapiens
VLFYIPVLADQCHEPILRRPGGGPIESDTGRWAVSARICLMVSPCCASVSSSGGARLLHDRVRVGSGGFARSMGGMLIEWCSWCGQTTHCCALHGSATIETPSPGGLLVCS

SEQ ID NO: 998452 - protein, 319 aa, Homo sapiens
HLKMTHRRGQRSNKAGRNKTQDRQKGEQKTQEATTTKRRDKTKTEQKDREKKKNKEQRKKDTTAEQQKKKKRRDSGRSKSKGRERKGAGEGKARGETEKQAERAEREGRRESEEKRQPQKTKNEKKKKRKEEEKAKRGREETKIGQRQKRTEERRRERREAGEGRERREERTEERREEGRDKGGEKRRTKHGKGREGKEKRKEEKKTRSTPHEDEDGQKMQKEGSTKRQRSRKKPEDRRTAKEERKRKKGKRRTRGQHKQKKRKERSTHKRNAGKSETKKRTAQTNQKERGKRKQQTTRENEGTTTKKTNRKHKEHQDV

SEQ ID NO: 998453 - protein, 145 aa, Homo sapiens
MEEAIRPGRDLSAKKKNSGERKPKTEGQEQDNQEREQNKRKERKHGRRPPEGPHRANKRNGPRRHEGRTKTKRGGRNTEGQKERIKKERTHEEKKKEEAEEKKVTTERKPENKMVPADTCEQGGSRRQERHRRKNDNWTAKNEEE

SEQ ID NO: 998454 - protein, 47 aa, Homo sapiens
MSDEKTTLVDVGTVVLGFSLPIIKKRRGETTGVFGNILEEGSTTNDR

SEQ ID NO: 998455 - protein, 97 aa, Homo sapiens
  misc_feature (16)..(16): Xaa can be any naturally occurring amino acid
MRHNKVRVGEFLLFTXYYIKKERRAGGQKPGEKRVSLSKHNFSQENVRVSRERGLNNQRGGTSLFLQTAGESSSQEGEEFLAEYISNILTPRYLWGV

SEQ ID NO: 998456 - protein, 226 aa, Homo sapiens
VKGSHGGVHIRTTVRAMGKGTRRTIRYSKVTTMAIRSSRRLQDLRQLASEFIVEITRTQIVPDDASETSRSTIVSIDRDYVHISICCGMSGDTDHLVHSFIRIYMHGHEMIMAQGIMESHVMVDNDILMDCVGWRSGDVVVACTHGYRPPVHSLKNVVYLQNNLGKCAFTWVVVRYRGEKPWLVSKGRVLFVPLEEIANKNTCNQRSTNPVANERVYVNLNFIAKS

SEQ ID NO: 998457 - protein, 83 aa, Homo sapiens
  misc_feature (9)..(9): Xaa can be any naturally occurring amino acid
  misc_feature (24)..(24): Xaa can be any naturally occurring amino acid
  misc_feature (26)..(26): Xaa can be any naturally occurring amino acid
  misc_feature (35)..(35): Xaa can be any naturally occurring amino acid
MCQCYVSEXTCDMSYLIRETVESXQXLTDLLTEFXTVTRALSGTLGGGREREETETEEDNKGVKERDTARDKERQVYRGDKQN

SEQ ID NO: 998458 - protein, 152 aa, Homo sapiens
AAIVPAPRVSVGASTAGAVGWGRRKPLSGAGREGSAEESPGAAPLARHAPHSRHQGGGERTPGKKTPGAPGGPPGATMGGYTQAREGHPQGLSRRARGAPRGLEQAPRGRRHTRGGASYNEENNTNGDREKGPPRTHHGGRPRPNTPWGARE

SEQ ID NO: 998459 - protein, 119 aa, Homo sapiens
DQVQACGRACFYQSRGFPLVRYAYNLPRVKDCNCTVCVHRSPPVNRIDELFYESGTLVLIFHLGKRLLCIDCLVSLRRKAVVAGYISPYQSFFQEEQGALEIINSWGERDMRMVRSRVY

SEQ ID NO: 998460 - protein, 81 aa, Homo sapiens
YLISALASEVSVMLGESVRAPKMLKLLVLIRLSLIRLMRISLMDDAECSSSLMVTYVQPKGTRITLMGLGAERKIRQSWCH

SEQ ID NO: 998461 - protein, 135 aa, Homo sapiens
GITSSQAWRRVVGSHAGSTVRIARSVDCLVSGPYLSWYTAMMFVRNDVLRLFMILQIYMSYHILKKKLQVLAKFRWTKSEFRKDTLVESCTVDNSFEFERRRSEPIKIPARASGSKYVLSAMKRVEERSRQKRRS

SEQ ID NO: 998462 - protein, 149 aa, Homo sapiens
THKSISSPIAPSPLHGRLGDISDWPYLEADHRRTAIIVRTLSSSSGRRTARRDTEPYCRRFSEYGSAQWIFIDHLNSEPARTKSYPLIVNINYSGTEKNALCDYQYGIGADASEYSSCAFLGLDPVMHDRMIFTGRELKTYDSYDAIVS

SEQ ID NO: 998463 - protein, 73 aa, Homo sapiens
MASFTDFPYCHGYILDKLRQNPFHYHIHRRKSTFFPQTFSAIRKPRRFSDYPDGTTHEHPIICRLIHCFYANI

SEQ ID NO: 998464 - protein, 143 aa, Homo sapiens
  misc_feature (23)..(23): Xaa can be any naturally occurring amino acid
ASVATGAEKVVTPSEVARVESLXTFSQQPQGHFFPQSQHLPLRSAPRIPNSWYRGCGGWRDALVAGLTRMWIHNTRGSVVAGYGSHLEDGVWHWDTTRTSTWLSVSTRPPCGDKRWEMQGIVGNGRARDSRKRRSLPEEYMAG

SEQ ID NO: 998465 - protein, 77 aa, Homo sapiens
MPPIRIIITSQDCLATHVAVPALGLETDADARTSKANHFHRYSDRGYTTVNALKSVEHTTSFMPIVLELIPKIFEVG

SEQ ID NO: 998466 - protein, 72 aa, Homo sapiens
NPEKKSRTLTDEEPKAKIHNLNYYSVAFMGKQSGDTTPKYLLMPSNKQHMYIGTVTGLVLAIEIVGTGYQYK

SEQ ID NO: 998467 - protein, 373 aa, Homo sapiens
MPPSLSPAQVAPQPLPLAMEARPPQQPQGLGAARPGQAALEGIGGGHEHAGTEEARRRKPDETYVPKVGSRPKRPDVSLTHKIAKNETQGTEMGHCQLGPARKGRMHCQVQQVTPKRTQRQVGISVAITDTPRIAHRQAGGEGRDNGIKWVYNGEAQTKMGIAKEGVQAPHVLRNAKSHTTEYNGQTNQFKDGDEKKTQIHNGNTAGPKQETDAKDVPQDRDVTQTDSDGVHKHDEEETTKEQSHDTTESNTADQGRQPELKHKADGATKMTSRTVLSQRRGTPSKSSTEQRHPRVVMRGQCSSAPPPQSGETGWRLATGSRGKAERRKNRETPATAGEKEHNTQDSTKEKVRVPEKQVGPSDRPNDGSRHSI

SEQ ID NO: 998468 - protein, 226 aa, Homo sapiens
MTLGINMIYLHTSKRPTEPAFDLAEGESELVSGFNIEYAARPAFALFFIAEYTNDNSSDKHPQRTTIVPEEQHMTHSARELYTSTIMVTKTLRYYTSRVSYDTSKQTYPRIHATSQLIQPPMNKTFRTQVNPESLTLLVTMVSSSPSYKSPGIHPVKTEGEKTHNRREEKHTMTESKQARNTQKRTPQHNKNKGTRDTKKNTNKENRGKAHNKQSKTTGQGQNTKA

SEQ ID NO: 998469 - protein, 106 aa, Homo sapiens
MVFRRLLWSVGRVVLCLLWNLMPETSGRDGNDVIDHEQGFGRMDLALNVSETGHAFSSACMSLISSSSFRTVPTRDYVRHSRGYEGYDIYIQYMVQTTRVRPMQRI

SEQ ID NO: 998470 - protein, 150 aa, Homo sapiens
  misc_feature (65)..(65): Xaa can be any naturally occurring amino acid
MWSTHLDHSYSRRLKPDGGSPTPGIAILLTHMLETKLFGGNVGSQILMVEYKPQYSDGHPNGTHXQELHVYQHISQMNSKGTIVINVCVTVMTCLDGHLFVLAVGVVSGSNPLWTGLAYDRAHLKTVVAQYPRTKSFGPRIHSVLSIYHR

SEQ ID NO: 998471 - protein, 96 aa, Homo sapiens
MSPREKNYQRVVGQITLRARFVPMYNFRPCGGKQNELPGRLRHGTIPAETVRAYTCENRRETGPGLDLAYAANYQTIRESRLTEAGLGSVQTICTT

SEQ ID NO: 998472 - protein, 75 aa, Homo sapiens
HDIGAWHSHLIITYCSLAGTERFCNTIQIAQFSMVHYVASIERGSSKLMLDDSEVTAAVPVEAGRSRLMQVAPFA

SEQ ID NO: 998473 - protein, 153 aa, Homo sapiens
MKLRARRPLRELVHLGDSRGFSPELAVAVDDIFPSSLPLKATINISSYSLHQTTHNITIKKSQNVLWTWTLRVHTHKVGTLNPSRARELSKESVNCCEVMRGKRVDTTSVVSSREIKALRVKTFKRASVEIFDQIINKDSELLIRSENPKGKC

SEQ ID NO: 998474 - protein, 131 aa, Homo sapiens
DLDVNIDPIPFYESAGAMFLRRRTMLFSHADRHLQRNDSLNNCAQPRMLLMPNLYRISTRNQSTMCLRCEWPMHSQSTNSVGGFIDHGAYHINDSWARCTCRRCESVWLITYGVPLDAGRPMSIKLIRIVA

SEQ ID NO: 998475 - protein, 275 aa, Homo sapiens
MESRSNCPSHTDAGDDAYSGVPILQVIAQKVATRKYVRTRPGQKGRHSIQNGQPQRWGQERLTARRQGKKSQRIGPSNLWTSDVSNRLYMSSNHKQQQSDETHTERDRPQTHCLCERPCHCASPHRGGRRTSGADTHRPRRGPARGAPPQERKQMKHPHIGTNLRTVANQGRSKKTSGGETEDPQIHTEPRKLNITTAPTRQKRNNKHTPGGCEAEPSGTSTLIEEAKQHRRRHERMYQARGKKKRLSRQYKTNTTRRLPAEKKRRPQNAKVKRP

SEQ ID NO: 998476 - protein, 155 aa, Homo sapiens
IGRQSICLSVLSLSPMKDERVQDIMRYTDDSVIPVNTEQAPYSSRDQIAAQVSAMIYSFAYTCRRSWIDLVPIEWNTPFSDYGVNCVGPKVASSQEMRKDCNNTVHQDLCQVLLSDLLKRGHPRTGSKIDHIVRETGLVLSLTWRYLPLVVGIHR

SEQ ID NO: 998477 - protein, 150 aa, Homo sapiens
  misc_feature (37)..(37): Xaa can be any naturally occurring amino acid
MTKLLVILYTNKDNAPVGLNRRVPESNSKMEVHEVHXLESYQAVSPSRARISTLRPRSCNLTIYIILTTTEFLLLNLNSRQQDTYYYLSTMKQANMTNTLNSIHTSLSHEEAMTTDKTDLFAQMGHYEEFTKNNSLIIPTIIASINLLKL

SEQ ID NO: 998478 - protein, 158 aa, Homo sapiens
AVQVVSSIRCSHNIGCRKPGIGGTPPEDLSLYTYHGDRRTSHAKRHSLASLGSQTQLRELVRPHVLWILKSNKPVTDFVLGETAFLQVLGAMPGTPALAIWPATQARSSNWGRPLRILVVASVPWYLSFPPRSFLVLIMGKFPDRSIASFFCLGIVSY

SEQ ID NO: 998479 - protein, 285 aa, Homo sapiens
PFPLAGSAEAARCLELLVKRGESQHGRSSRALAAFLKKSGKLKVPEWVDTVKSWASEQTSCAPYDENWFYTRSCFHSSGTCNLTEVALGLAPGHKIYGGRQRNGVMPKPLQPRLQEVWPGGSSQALEGLNKVEQGPEIGVRKLIDLRDKEIWDRNRLDTVCSCQHRSIENKPCWVNKVASIRNKSIKDRRELRHMRCERTLGHWKKTSQERPYGEGRLAGDYEKVRLPVQTCGETPQGYPKKTNATGEDRIRELPSTLPTKTKKKRRPEGQHHAEVGLENGIPPQ

SEQ ID NO: 998480 - protein, 212 aa, Homo sapiens
  misc_feature (89)..(89): Xaa can be any naturally occurring amino acid
MTLNSGALIVRIPCANWNSSRSRNPFDAYYTYQTRDETTPHQLLRDHKLHAIGRSHSTSTIQLELRQRIVEHRRTGHYYSSDTITAHAXLIQNTAPSTTGNNSYFIYPQTIIFHSQELFPEATFTISMPMPHTTHKLERAHGTHKQGIKPDYNPTRKSTRHYNTIQYFNSTLTDVYNSHLTLHAIDHNYDKTNTKTQKYIPERRDLIYNIYT

SEQ ID NO: 998481 - protein, 302 aa, Homo sapiens
SPGVLVEVTSSLNPAWLSLTHRRDAQRKTGLTWKSNYFLKIIQTIAYDYPIMFHCVEQTMWRSKSRMHARSGMSLSQGKAVGADGAKNTMMRKVIRGHLGKQTSSVSTVLPPYPGGLCSVPLCFSSEDLSEIADMVGGRARGAILPRAVLAGLSAPLCRRCGPVPRRRPGLACPRSSNPRFPGLNRFSSIISSGFTVVKSCRWMSHGLNQEVETKWEPAKPRLLNMLKISPFSFWAGHSSRCSTNGSIYTLKCLISHEETSASRFLEGVRMLPVVLSCQIGYPECCISYPIPFVHGVLRVLA

SEQ ID NO: 998482 - protein, 128 aa, Homo sapiens
GRPRARLCSGWTAAERGEKESDRWGACSGGSDCCCRMGAGRLGAPMVRHWKVVPREPLVLCLAWGMQAGLGGAPEGRSAVSHVRRRGDAARRWPAVGASGVGTRRESTEGSGQRDPMLESPCQRVDNA

SEQ ID NO: 998483 - protein, 130 aa, Homo sapiens
MTADTSTILACSEEDSTINIGAIILSTCRLETNKSYRLITHYQGVRSYVKPDIATTRTGNANMQIDSCLHVAACSSVKDFSLLLWLPGRLCLDWRICELDKSQSSRTNRYLPRINATYDMLDYDFHAMIT

SEQ ID NO: 998484 - protein, 70 aa, Homo sapiens
QQTISDDDGRADCAVVDAVSLGYRDLSGCRRIDYNRRRGVRLSMGAQEFNAGRQWLEASSSTNYSSDLSA

SEQ ID NO: 998485 - protein, 168 aa, Homo sapiens
MLSCLDSARYCCYPHPDVVGYPWYTHEDLYAWASSSEAEFRNYAETVVERKSNSENLINWVILDAPTYTHSKNRIHKSDRKEGIEPPKAVSANPMPHDFGKKKDREDKKSVWGPVGPGELIKHDRSAPTKKGQRGQSSRGTGQTSGDARRKRGGGPGMTNQRRKGIDG

SEQ ID NO: 998486 - protein, 104 aa, Homo sapiens
MLLVRESNADAPCVVTQCKVQWVWSTLRNCGEAEWTVFYHPWVFVGQTPPFFNPRFLLWHNGGAKGYVVDGIKHKTMCRCHTAESMRSGIVSLRRKHYARPLYH

SEQ ID NO: 998487 - protein, 82 aa, Homo sapiens
  misc_feature (81)..(81): Xaa can be any naturally occurring amino acid
ELVRVYESELSSVVCVAFSRNIACILSCYLLGLYPQHELARRHNSSRHSRYTQCCYINKFDRKHACMAIVIIKQDGGMQIXV

SEQ ID NO: 998488 - protein, 77 aa, Homo sapiens
MRARLALEWYIRLRNTWPVSQRLTDWCNIAFKCLITLRMACGPRLLSVARRFLAKCAFKVPLVYITRLSSTQAPDYY

SEQ ID NO: 998489 - protein, 339 aa, Homo sapiens
MQEYALSFSCFRQDAGIKFQLKDGEELYHCSCASEALYANSEKPYTTNANESLRPYTQIHLRIKCRPFRYHLNLVLCLDCSKPGSEKEETPVGADMIMDDESAKVKTLLKDNRLLWNLDSEMVGNGSRSWELALQVAERSRLDLDQDSSNTIRRIHCTLDQLLTEDKLPRYSTSNISECAPRSSRCRRAIVLQLACIQGTAPLMWLGRTDPKFPQRPPIFFLWEAQSPCGGIPKASQTWHDRFSKPMMTPTREREIGARSDAHNTRTVSSEDGIRRGTRKKIIVGRTTADGDAREGPRRKTTRTRLSAKEVQTEENIPVHSRGEGRTEHTVKSAHGKIR

SEQ ID NO: 998490 - protein, 174 aa, Homo sapiens
MTQCSATRSTINVYFPLSENELLHLFMIIDPSVIISSFICHILPPVCPFLKNSLKNTNLIVTSRDRLSEISTTVMNYLCTLPSSLVLIALPSLRILYITDEVNDPSLTIKSIGHQWYCTYEYTDYGGLIFNSYILPPLFLEPGDLRLLDVDNRVVLPIEAPIRIIITSQDVLHS

SEQ ID NO: 998491 - protein, 288 aa, Homo sapiens
MRGHLIEHDVSQKRYSEPRRGSLGLHAVWNAVTWPGYLSVKALQCSSLRKRISHDQTLIQDSTIDFTCVITYGIGIDIRISAGTSDRDRYPRVNEEEGKCMVWIASVPIRQMTTITRCEGESRRICSWHSFDNVPLSDETPPGVDIEPTWSFCLEISRSSRINIRCEHCELNLMEAHPGVMRPSLDSMDSHFTTREFNLHTQKANLSASQRKRGKKSRLVDKGTLPAQDVNRRGTWTDVQVPMCPLSAHPQDMFARLPSIVAPKMRAPHFDSGDASAESRRRSVEPRE

SEQ ID NO: 998492 - protein, 131 aa, Homo sapiens
MTPEKGCRTMESLKGGDGAFWRHSKPDLEERGFRLRPLKIKLTRTCTARRYKVGHQAAKSGLAGQPDVQNGGNTRRENRGDLDSRRRKTTTHPLKERSPGSGHTLQRRASGLKTRRRRPGRQNKKSNDKRD

SEQ ID NO: 998493 - protein, 190 aa, Homo sapiens
  misc_feature (106)..(106): Xaa can be any naturally occurring amino acid
  misc_feature (109)..(109): Xaa can be any naturally occurring amino acid
  misc_feature (128)..(128): Xaa can be any naturally occurring amino acid
  misc_feature (187)..(188): Xaa can be any naturally occurring amino acid
YTISAAHVAVQVLEDGRRVSYVILVTEYRYELLSQLKMSRSADNEGASGYEYAHYGERSLVSAYNVRHCHSIQGEALEQGVRLQIINTLQQAPLRAMEVAPHKKVXVRXKPCKKGQHISIQKWGPATXDGPSKIDSQTKGKAKHDSIFIAFKRYDRQQKHDGTDIHQDMKLTEAFKQGSSLLKGFSXXKA

SEQ ID NO: 998494 - protein, 107 aa, Homo sapiens
MCLSPVGSPAYPDISFFRSTLPLASSIFIHGSLRNAKGPPPSYSAAVPAHDETGGQHLSHAEFVLDIYRFNFLKSHLRLAGEGVCGSRPCGSIEVAVTGSGASQGLY

SEQ ID NO: 998495 - protein, 198 aa, Homo sapiens
MSIFKTERRSDVFFTRELALKHGYSWSCMVRDYTNARYRSIDYLQPQMNTENCSLREKGRRCSGTDCVYVQQEVWLSRGQCTQLYAVNKCGHQRSRVPLPRHESLRYKLLRRVLLCGRDCYGVLRFITGEWGQRLRRRGRLVKLRGQRAKSMKYVDGLMIHSGDPVNYYVDTVVRHVLLQQGVLGITVKINAAVDPYW

SEQ ID NO: 998496 - protein, 252 aa, Homo sapiens
MPWLVVPNEASEAVWSAPKLWMLDKLTGVFAPRPSPPDPHIVRECLPLDRFYLRNRLRYARDRRRSREDCMQRFIKIDGKVRADITYSCLGFMDVTRPLTRTGENCRLIYDTLGFALLYIVLHLEEARYKFVQSEKDLCGHDNGNSLIWCPSIDARIAFDSPSPLIKVNDSIQIDLETGKITDFIKYDGGNLCMVTGGDNWEELVDHKRERHPGSFDVVHVKDANGQQFATRLAKIAVIGKGKTWVFSSRRK

SEQ ID NO: 998497 - protein, 89 aa, Homo sapiens
PGVIPSCAVVLWSSVLLISWSAILSYLGACRQPDGRFDGHGHEPPEAPELSFRLVNYKAELEVLIDSYTVGTKSSDNTDAPDDLQERSV

SEQ ID NO: 998498 - protein, 110 aa, Homo sapiens
MPWTWSTPLIYTRNRTLLEWGTRLPVGDLNRTFWINPEISKVAFPQGFPTLDKNIGRGKGCWPPVLGRGRERLGPGGSNPNSKGPWICLQRGRTAKNENNFSFPDGHEIG

SEQ ID NO: 998499 - protein, 123 aa, Homo sapiens
  misc_feature (101)..(101): Xaa can be any naturally occurring amino acid
MWTERSSGGVVQKTGKAVEYLHVYNPSKGTYTGRDVPVYKRMVGRTSPDATDYGMNHWRCNNHSASDYGGNCVIECDGSNDYRYGPFVLRALMTGHEYVTXNAHLNYVIAAPEVRGINGSDLR

SEQ ID NO: 998500 - protein, 197 aa, Homo sapiens
SASYSVSKPSSDEQGWAPFPVNAESGGTLASSPEFPPIHFITIAFLVVLFKVLGPIQSIAILLNHRQVTTEKPAAFRTSFNNSPVSEERPAKAGRVNSSPREKRQEFILLFGVVAVTYEPHAPENLYGALVLNTRPSVGRFQWTLSTFCSSTLLWAHLLGTEKFLEVVQQLSLNHQPDLLVNYLAFGAQTKCAPSNL

SEQ ID NO: 998501 - protein, 101 aa, Homo sapiens
EVSMMAVAEVVDRETQLNGLYEVKEAGSAPYPLRRSSWEHSRSVFLVFIMNNVKHTNGQHGTEIYIIHQRCGKFMNASLDPKLRKGKPGMTRIREEQKNSA

SEQ ID NO: 998502 - protein, 326 aa, Homo sapiens
  misc_feature (43)..(43): Xaa can be any naturally occurring amino acid
ECVTNLVLLACWGRVTGKPVSDPDRTSRVLIAVDHVCSEVRIXHSIRCVTSDWMLQELAVEMPCMERLHSCTGNIEHHCAGMDQGMPYVTIGPIGGQCRMISLYNTLTSDVDRRAWTMHCEPLGRVDSRRALRSTTVTLSVSFCTWTPDRPSVLPPTETVCINRSREGCLPSRSYDSEGQQHTLAKGDHLTLLLEPEIRKLVLTSAPVFRAFVEFTTAVVRGNWFWGSPSRAHGHVLSVDYGQKSKAGVLHLPKTQGFHKLVGGGTYLKSDSLSNKSQAMGACLIGCLPGVERKEGHSMEGLVEKPRYSERPSLTNLTGLLAEGSP

SEQ ID NO: 998503 - protein, 170 aa, Homo sapiens
MARGPKKSSEAVWQLQSHWMLDKLTGVLCSSFHPSGPHKVDEVSPPHHCPDVNGLNVCPDRKMKYTKIGMQRFIRIDGKVRTDIAYPAGFMDVISIDKTGENFRLIYEDRRVAFAVHRIDNLKEAQGTSCDKVRKIFVGAKGIPHLVTRWLPGPVRYPDPLINVNDTIRD

SEQ ID NO: 998504 - protein, 80 aa, Homo sapiens
  misc_feature (79)..(79): Xaa can be any naturally occurring amino acid
DYRPCGTRGRITLERLMGHKRSLRIQHDAMFSIDMDVVWDSSARSTHNGPRGTEHRGQVAVERESTEMDMYSECQFDCXS

SEQ ID NO: 998505 - protein, 102 aa, Homo sapiens
MRLRIISGWGQTVESENPTVLSEYMLRHYYQSKAEATNTQLIQLDLSKEQVTLGINTRKSYSRVHDQRIGFTILDSWISDIPNGAAAIDRFVCSSDLKSYVI

SEQ ID NO: 998506 - protein, 129 aa, Homo sapiens
SCHVNYLMLYFPQCTTEACSGHRKPMVPHAIFNHLVVSQYQKWSLLHNNASNIQPSITDIFISQHRTLHNSLPSVKPLDYKSVWLPRWLASVHNVSDPLLSLLRLIATLLAHHSVLPPSPWLVPKLRNS

SEQ ID NO: 998507 - protein, 102 aa, Homo sapiens
MRIYKKGDIVDITAMGTVQYGMPHKCYHGNNWKESTDVTQSCCWYCCKQDMFKGKILAKRINVRIRAQLSTLRAEIASCKRVIGTMIMKQKEANKMKGTWVQ

SEQ ID NO: 998508 - protein, 103 aa, Homo sapiens
MVRGPKNHLKRVASSYKHWMLRLNSDQSRVLAASYQYTIRSLIYSIEKESCIRPSIQYISLEMKTELESYSILYEADSKRYKKHCKLYAGRVADINKNRDECA

SEQ ID NO: 998509 - protein, 107 aa, Homo sapiens
MAGVRIILWMCRMYPRHRLGYFTLRTYGDSGLYLRYSAIARTLVCYRVVLSPKFVVAKKYVRNVGQLFCCFNMCGSLGPSFKGAVNCSIAEENFRANNMGQSLGESE

SEQ ID NO: 998510 - protein, 200 aa, Homo sapiens
GRVMTQRVSVVTFLGASRRPLFLAFKVITSPRRTPRVFRGAEAGGPTVVEEGRCVTALAGPVWRVVGGRGAVARSVPGGWVARELARRSRQSCPPPPLALYAVCSPGRGRRRSQLPGVQPTPRCDVVMGRRLRRVQQDSRQSKSREDRRSWATGLWGKSSLTIRFVEGQCVGSVDPYHRMTLLACWSRSKMDKKYHSCNL

SEQ ID NO: 998511 - protein, 146 aa, Homo sapiens
MTNDRIITEQVIKKMPSNILGECYMSPLIHIKLVCIARRFRKREHSFEGRNQRSKTSAELQCGTLREHGQSARGVVARSTWSARPNKVHLVLLRVRPSLRLRSCGKREALSLYEKRRTLFSLTDNWLWLIVLLLRETLNVKTTLGY

SEQ ID NO: 998512 - protein, 116 aa, Homo sapiens
DTRVQHAYRKVYSVRGPSIRGHGMMFVRQRWQWCADYANSKVSYMNFKREAQSSLKGGGPKQFRKAAGKELTVDEVQFEFDERRIEPIKYQRELWNKSIDAMKRVEGNLNDEARKC

SEQ ID NO: 998513 - protein, 103 aa, Homo sapiens
MAVGTLYTYPERLEGHCKALYRLSQYQRGSGPLCSPAPLLNVPILWPKANSSSPMNISSSREISVHGQRSPAIGGLMMDSGDVLRSERPIAVRMVSECRTLRG

SEQ ID NO: 998514 - protein, 113 aa, Homo sapiens
MAAAAPQPFFRTQNNRSRMFPGLVDPLYILHLSSGSYSEYKKKQQDVLLVVLEAKQNRMLKKEDYCRPMNENRKWMTRKCSLKIVDQATGWTSRATLRFSMKASDRGDYDAFV

SEQ ID NO: 998515 - protein, 234 aa, Homo sapiens
AFPAAVDSRGVRRLGCVQVFNFELRNPTVHGRWNGISCVERVMRRYILASHRGSEVTALIHEWPITWNAAKLAKALDKRPSAHLSVLAFAAVMSPMYVYSMVEGLCAEHTYQPKSRLLTPDETMENGRPLYTPTEMRETPYVVSPVALCVRCCGLCAWSSQAADVSRRAISNMHLTKYVRRWSHHDSYPTYSLVLFVHHSEKFTCMTLTCRNMKGRLKFLSDADLLAGRLCAHV

SEQ ID NO: 998516 - protein, 133 aa, Homo sapiens
  misc_feature (124)..(124): Xaa can be any naturally occurring amino acid
GLFFGKMADYDLTTRIAALFGSAIYSFRFLNFSLVDRRYIIDEEEIHYNGKLWTFFSDDHSTGSTYAMDVYEKSLLFLMILPHAWRDDNRTTVVGTTEYLQAMKRVDPHCEGLFEDAYENLLEXKMRVQAEGW

SEQ ID NO: 998517 - protein, 93 aa, Homo sapiens
YLRCCGFFSFSEGSERPPEFSSPLATSVTIVLVPSPASGTCPVYPLKCGLCSLHCPNQFIETLMIPQEIIHTRTWRASRSTSLVNCVPEELLR

SEQ ID NO: 998518 - protein, 68 aa, Homo sapiens
  misc_feature (67)..(67): Xaa can be any naturally occurring amino acid
RTLCCDWCGACGPCSDTRARGPVIPPRPCPTDGPGIWGVGAVRSSVDDWIRLVALRLLYTFAEKTLXV

SEQ ID NO: 998519 - protein, 233 aa, Homo sapiens
FLSLWVCRQTHSVSVEIPTRYHTPKMGYGKDSYQAVVVDWTQYDSRACPTRLTWRIVTYKVRVASYRAEPLCTKVLNNREVMPCSNWSIMVPPLRPVNAVWLPFGIKTLHKDWYALVNRLVKSSQCGLTHRYVGHKFLVWNPCLQAGVLLNHYYELEWALSTCNHPRKYHFNRIDIDWDFNRGESTSCKSLASCCLGFPGLLFLPDWMHRMKLYRRLGHASQFTLGAGLLLVV

SEQ ID NO: 998520 - protein, 115 aa, Homo sapiens
DIIDDRKRRRSVDRKKKGYVSGLERSQKSSKGGSSRDTERIERIRMPGPTERGLYQRVVDQAKDLQEVKESENQTRIETKGVNGRMPGISSAIAFAAEDVWIKTGLPFLVKRMLP

SEQ ID NO: 998521 - protein, 104 aa, Homo sapiens
MRIEKGYVCAGAIYPGHGMMFVRKCWDGGHDLGNSMMNRNILIREATSPSSIKCKVDGKRQLPGKRVVQELAVDNAFELEKSYKMNLIKYTAMEGMEIKRVLMR

SEQ ID NO: 998522 - protein, 75 aa, Homo sapiens
ENLEAAITYRPKPGPARRSRKYRHSRSNQSAYAVMCVVTCCVIEKAINGRRKCSSKRGSVCTPSSSYSPAQSVST

SEQ ID NO: 998523 - protein, 152 aa, Homo sapiens
MARMAEKSWLDFYVPAEPKIGVGHQSQRYQWSEPKRFEEVCAAFFDLRRNLQWEPYVKLNKASINMLRIVEPYMAWGYPNLKSVRCTSLTSVVYGKINNEANSFDRYRLDVRDLLVDTASSAWRIRFMRSILSGQPLRERRIIPVALQMVFS

SEQ ID NO: 998524 - protein, 112 aa, Homo sapiens
MPLYEGLGERRGRRLAVRDLTWERPLPSVDLLEKLVQRCTKFLVGYTKSWDCLMPVESLYQYNYSIQQRNYVAYLKEFIRQYYILSAVYSVNPQMTAESVSYRIGIMSFVTS

SEQ ID NO: 998525 - protein, 85 aa, Homo sapiens
PLAAILRPRVCAPNLRWSTRDPLSTNPSPPRGPYSLRQDEHETINEPGINSAETCKAQVRIVWERNCVAERSKVVHRCSHRQDDK

SEQ ID NO: 998526 - protein, 129 aa, Homo sapiens
MSQETSAHQVRIFTLLSGCASKPINEFTAKKTKVERGNTVDVNEERESAACGNDISLVLSPPIMGFVCLSTKLEYYLFRQTSLLGGGVDTMASRHYQWLVSQRERKSSLQCAGGAPPTIDMITDGGGSK

SEQ ID NO: 998527 - protein, 154 aa, Homo sapiens
MMLSLSYLLHQHIALQTDIHDICTHHVPSLYILEIGISPQLCSMRVGVVDHDLAILVITLKHIPNRGIPTRFDEVVICTYYYAQFHYNRSPSLDKTKTSLIGTMAFRPLAGIGEIGTCVLGAIFRDRGRFNKVYLRFVARNGGVIDYSIHKTKH

SEQ ID NO: 998528 - protein, 71 aa, Homo sapiens
DRTLTHTVRETMGPDVEQMLTVCSCVRKCRGDIHSGSFPSRMGISAPSRWLRKNDTSLEWNTVVAVVDLAI

SEQ ID NO: 998529 - protein, 470 aa, Homo sapiens
  misc_feature (29)..(29): Xaa can be any naturally occurring amino acid
  misc_feature (77)..(77): Xaa can be any naturally occurring amino acid
VLVRVNRERRLPDCGGRRGAARNATPSQXGSPTKIHATKSTTGRNWTDNTKQNQQAHTHRHIQKAEDKSTHPFFSTXREHKKATKTDDKREHKQNTKKPPPQETTTDHSKTTHTKKRPEKKTSDGTTTDSERTDTSSTNQNKEMSKHTQKKQKKKQRENEPKDKTRETDVADTNREQTSRADEESRETTNKDAPQRRKTKGERERYKTRAANTGATQTTRAEQETAPPATTKKVRQGPRADNRKPNAADEEQTGSHAPTKKEQKPTTHCADTKTKTHRERNEDKPLTGGAHHKQEQSDNKNNRRRYDKAEWREKATRKPKKTEKKSTDTDRNGGANRKNNQQEDSQRINKKRNTNTTRRERREHTTHKDNERRTSRERNNETGEEKRDTQHRKKKDTRANSDNTHNKAMKQNRKSNTIADDEGREKQQHHTRPHRPPADRKTDAEGTQQRTGKKRKSKSTRQNENNETHE

SEQ ID NO: 998530 - protein, 244 aa, Homo sapiens
DSRCILRRRRSRHDDCSLDKGGDAFCFGLLELSASHSFCAARLCMSSSRRSFHEEPAYFLTHGNCCSSLPILDPDLPQSSFLHEEARLKSLLFYAQNCPKMMEVGAKPAPQGICPLQQYTTNRSKKPLRPVKKDKTAKAKANRLLMDPSRVQMAHSFRLGTPCCHKPGTASKCPFLAAQMTQNEGSSVFCKASLELQEDVQEMNAVRKEVAETSAGPGVVSVKNRWRGFQWTVKNFQDHFAKAR

SEQ ID NO: 998531 - protein, 265 aa, Homo sapiens
MSVISQFLCRITCRRGALTKERSPRCFSQTFSEVCVEECAHDDACERPWSDYDETSEPFDLTVAHICGTKCPVIEQRETIEYIASNLAPIEGAEQMTDTFNGVPNGLSPIEGSPIWPFVPLPCSGGIALEVDGRTLHGLSELADCSSNENWVDDVGKHYLGAELSKRAFDRTEMGLRQLKAAKFAETGYSLALSELEGNYALIAVKQTGKLSTAEIHGHVPPGTCMARSDEFRDALNERLEDTNGRTHCTQRIADRMEERMSVSD

SEQ ID NO: 998532 - protein, 69 aa, Homo sapiens
WRPGTRSSSEEVNSSSSRLRSKMASESKLLVAEPYGINHENGKSQVRLPEAEPGNEFVDGKAQYYIDVY

SEQ ID NO: 998533 - protein, 106 aa, Homo sapiens
  misc_feature (59)..(59): Xaa can be any naturally occurring amino acid
AFTLTFQTGSVSSSSDESAHFPQKSLYVMRSAILSKMKLGVSIAKTSSCARLIDSVLIXEDCWSIGSPRVETARRVAILMLPSYILPSIQTLDQRNITLQITQDFS

SEQ ID NO: 998534 - protein, 114 aa, Homo sapiens
MPGPPLCAGASWWSTTVFASCYRPSNKPLMVIHSALHGKQLLGLSMVYALDPVFPWCIQSHMILVLIEYSNHGVSPCKTVFETSESSTPHACLMYAIFLRILCLSYYAPGKCLD

SEQ ID NO: 998535 - protein, 142 aa, Homo sapiens
MIQVVTDLLSRKELLATQTVSRLAPQGIRISGDRVNLTQSLRRANTKDTFLRAGANPWLIASNWNPKDIWDPASPGFSKPWKIAFYLTFVPPISNMDAMAFEQFDPMIMRFGYLPCGAPSDYGKEIWKYARRGENREGKGEI

SEQ ID NO: 998536 - protein, 201 aa, Homo sapiens
  misc_feature (171)..(171): Xaa can be any naturally occurring amino acid
MVNVLALAIDRREVSECKRYSLLVALSHLLCSLKGRVSNLYSFVGAKELEFFTNEDMGFKWLGGVHPGGELSATVGAVFYPRGRFAGVESDSPLCAQLYEHIFCPSFVRVVLPGDLHSHSLSVGGANCPSYIKGPRRMRVGSPRGVVLFAQRRTIVRAGGRNPGCESQPSXERVWRQYEPRDTSRRHICSCGERIAVIGYI

SEQ ID NO: 998537 - protein, 98 aa, Homo sapiens
YLAQAARPESLRVYLDPAPLVVETRAPPRDAGLPSLLSWILDTKLIRKHGTVAYQKSISTGPAPMIDKRYTIFVDECQSITSRGQCLLLKTMNIRNER

SEQ ID NO: 998538 - protein, 105 aa, Homo sapiens
MSYSSCDKHKSILSKNGRDPGEARSDITAHRVCLMLMDSPLNRAGFAYRFISITQKNVPELKVNPQYPIFLMKAVDRPVRWPSMVQCFYIIAQMLRAADWPPEGF

SEQ ID NO: 998539 - protein, 231 aa, Homo sapiens
MDDPVLRPGPLVQHGLPGIQWLDMDSHFVSARCLQAGIQGERDMDVAVEAVTIVETPPMDGGGHSWAYVDISPSEGLRELSKNLVFAEHPIDVMKCKNGVSIYNFGVNIKGINGSLPHVAAQKSRWDEDWSDDAIPWTIGTFERAMTNVRSLESLPEFYVAHYNRMDAAHDVAVWRPERNVPLPLLVLFQGEADRQLVWREGMLDGGAQCRGLGARLRYRVESPVGWGAKV

SEQ ID NO: 998540 - protein, 149 aa, Homo sapiens
  misc_feature (1)..(1): Xaa can be any naturally occurring amino acid
XGGIDFTRITEMDARREASTSGLPYPHYPLKGSDPSRKIKCIEPFLEQDNYNRINPWKTSLLDSVGMELEPKWVRKHVLENYTQEIASVPSRKSQDLEGRIVVATKEKRFLKKFRIGRGNTLLTLYVRPARIGGTMWGLGELAHTGCRT

SEQ ID NO: 998541 - protein, 113 aa, Homo sapiens
MRCELRRCRCGNNMSIPACRCIVTRRPDRPAAAGRVFLAWKWEILGHGMAHEALSRVSRSSHIKISSARMRLFEACSHIIYERGYAFMVVILLGLHQIHREDESGIRQVSRKI

SEQ ID NO: 998542 - protein, 90 aa, Homo sapiens
VNVSCTIDVSVCIVCWVYYNSGRGLLEGVRCLCHCIRRGVVRCSAVEVVGDYSDGVSWFWTTMIAVGRGMYRILDSRVGGESELLGGRER

SEQ ID NO: 998543 - protein, 105 aa, Homo sapiens
GSSSPDMVFTCAVFCYMLALLLHCRAHLLRAFGTLGTHSDEAVNDLITKNSVYDQCRYPESALYSQTYLIHALSSVSCVFVQHDLAYTGSQYSPSWHIIFEKVYE

SEQ ID NO: 998544 - protein, 109 aa, Homo sapiens
  misc_feature (100)..(100): Xaa can be any naturally occurring amino acid
YSALPERRQVWCCPLISQAPGLQYYVVVSCYVNEAETHQVYERCDYIAQTVGHRNDEPIAEVDCNSGRLIINTRATVHDGHSKVVRTDEIQMALSICIAXGTWIVGCDG

SEQ ID NO: 998545 - protein, 105 aa, Homo sapiens
MRIVDLIHDGINTEDEVCQMLLIYESSDILGMLSLNSFRSEDCELFPGADSGLSSSWSAAGRLVTNVCCEMTSCFMGDALSRKRCQVTWYFGQLIQHLKPLSGYL

SEQ ID NO: 998546 - protein, 98 aa, Homo sapiens
INPLAQAVIYSTIFAGTLITAAKLVLILYLSGLEINSAELFMLRFYTKRKVNTASIAQREAGQSSSLPPERKQPRSPYILLIAILVSDTYTCSGRMKP

SEQ ID NO: 998547 - protein, 37 aa, Homo sapiens
  misc_feature (4)..(4): Xaa can be any naturally occurring amino acid
  misc_feature (13)..(13): Xaa can be any naturally occurring amino acid
MLLXTHLKPRQLXEPVVSTHGEHIDQGKGESGPFKAG

SEQ ID NO: 998548 - protein, 163 aa, Homo sapiens
FNGMESHTRKDGTFASVNQRHALTALDVHSYHQARPNDKPVLSPWLVQDDPTMMCGGYLVHGVPCEGVDGNDVGDSSENLDGCDRPFCDQVYTFYNTGMIKIMFEYCYHGKAFELKLLLWGSIVGVRMLKKIVVDVRWICFGLWAIVVLGDHAKDETYTYWIC

SEQ ID NO: 998549 - protein, 116 aa, Homo sapiens
MSQRTPYIRKTCVTLRLLHGTPKDDYDDVMMGRLCSRHSLCEELSFMHKEGCTCQHRSVWVHPDGSLAVLMPVGGICSNRTPSDNFRWSPSRPLNMSLSVMLRASCVTSHGQGKLL

SEQ ID NO: 998550 - protein, 90 aa, Homo sapiens
SFPSCKMAGEKVENPDATEKKPARPSKVDAVLCMVTYTGQPSNSLKSTPKKGEAPICSATLSLSEDICVRVFLDLPMYSIKAYVPRGSTS

SEQ ID NO: 998551 - protein, 222 aa, Homo sapiens
  misc_feature (99)..(99): Xaa can be any naturally occurring amino acid
  misc_feature (172)..(172): Xaa can be any naturally occurring amino acid
PKEEVEEEAALERASSELAGVAERELREPSPAARRRASALRPPQNRSPGQGSSVTLVRHGQIRSSVEGRRGLAAAAEADRRREERRQADARESRGGNVXEGPVAVRSPAADVAPLEGASRAWAAVVHGGEAQIGIRGASCITHVSLALTNNTNRRQFRSIPINGPLTLEGPXSHYRGNALTVDAHHRLVEAFPRRSKPLHFVVQCLTLTLPTIFNKPYELGH

SEQ ID NO: 998552 - protein, 75 aa, Homo sapiens
  misc_feature (67)..(67): Xaa can be any naturally occurring amino acid
EFLTVDAKVTAGVLYLWLSDGGPLVLSYEYVARLFLYWYTWYQGTRKIHWSHRGIIEVPLQTILLYXTGKTRDRC

SEQ ID NO: 998553 - protein, 98 aa, Homo sapiens
GVVEWMVWQYGWWSQAIRLMLTSTRADYLSVKSHIQSAIDVNEDSEQVHERAAKRLTRRLCDQREVADNTVLACSKAGDHSLVVDTEEYAEIKTSETI

SEQ ID NO: 998554 - protein, 69 aa, Homo sapiens
LPEVDSLSRRVLTPCVSLLLRSLSLSDDATLSEPGRVGYKRADWQRKALTCLARGLSWIAAVVGDSHSR

SEQ ID NO: 998555 - protein, 148 aa, Homo sapiens
MSNEARLRGVQVSLYNSCLRHDQDLLQKLNRMQHCLGKADRLDRLCIENQFTSKAPVEEALLYAKFRYLNAGLVARVHFSPIQPVVAGGYRSNTFALCEILNQFIKDGEDGAFWMEVVSLPVCEVTSHVRGRLNGWFTALQAELYEAV

SEQ ID NO: 998556 - protein, 383 aa, Homo sapiens
  misc_feature (116)..(116): Xaa can be any naturally occurring amino acid
MGSRLLLYNGAKMPILGLGTGEIYRPWAMVYVRPVKVAALICLGYAHYYQTCCPVLYSELMNEVAGVTCRGRQSQGVRMAEKTMSGDFLHVRYRTMADAMQRYTICMRRCSWLTTXGARSRKRAYPGRAFEVWHCKPWYPSCLMSTVPGHALCDMRWGTGKFFPQIRIGCAGPMVGLPHVATSLSTFSWHQQLMMGSNGNRSLGRGSKRAWSKKTNLGKTRYIITGTPFIPRVGKLSTCQYTKPKWVVQRLITVPGLVSGQKFGRRSSHNGSSTFKGKKSLDSRSNLVPMFAKERQYAGMTTGAKGGVPYRGFGHGDKGPLRANRALTEPISGFRGERGSPEEFKGRVRKSQSPRVKTYNGPGSQGTRVPTRHERKIGGENRT

SEQ ID NO: 998557 - protein, 266 aa, Homo sapiens
RKAMYNEEVLTPLNAEGLTRKRRREVLGNCLSSTHVWLVDNELACHPEVRLHNCLDTIAVDYYRCLECMCRRTSCMSHGTKEDRFPDQRNGEATHLTIGAGWCIPRAVNPVSWTAVAATWVRVLPRGVQMNGAGVVSMYMTETGLGGHYCNYVDRVALMDHSKSDVCPSSRMESSSEEDLQVHGASVQIHRIGWTHVRRLGEKSSRKACVNLTAIRGQETTRKRHVARIGRGIHQGRGLMESFDKPYQDDETTDGYTAKSKAAKRN

SEQ ID NO: 998558 - protein, 120 aa, Homo sapiens
  misc_feature (60)..(60): Xaa can be any naturally occurring amino acid
MRKVRVSTERCMIMFVLDSTEVAVAIFSIAVRDKSTSHVISKIMVNTRHDTLATTLLLPXYYKLREFSGIDVYASCMISLWSIAMPGLRIEVNVVVAYVLLAMSGHLGTSDVAHSSGYES

SEQ ID NO: 998559 - protein, 460 aa, Homo sapiens
LYRRDLMAVTVSPEQFSSSQIMALPRAILPSESRRQSRPSMSDRLTGSVHLNGMTQFTRPVPELIHSTYLGNTNVLGMYIYNLMTVQRRPGRRSNGMNKQGSVVDVLLTHLVENTNTSVWFVAHMWDIGGKSPHREPYRTVHRADHVCLSHQLQVGLDIGKRKRLFPLLNANLWATIQIINRTRIGDLLTQCSTLATEQVGGRHSEGDGDIKEKHKTRVRNRDLTGQANVTQEQVTFDSLRSHSPVASNLDPQSNPKGMAGPVAFHFPCLTSRQRKRRTPHHLDFGMDSRKGEIQGKAQTLVGAPESTSLWHFREHTTRSAVILHAHEDGRYTPMVGQPQQGLVYGRAQGTWKALESETSPLRGAETQKGGHNRGLHNQGRGATTQGSECGKQTTQRKALEPRRTQEAHQPDWAPYSNEEGRSPTTYQRDIGQLPCTPGDTPATLVGEPTAGQPGQREHH

SEQ ID NO: 998560 - protein, 111 aa, Homo sapiens
SSPGKYDPTRQNFSYVTGLDCSETVEYSQVNVDEMICVLWNLLNMKWYRSEEILMYPPIVRSSGIPWARWRNNLRHIFAITEDYEDRGNPSKIFDDKLCKYSSICTIGWIS

SEQ ID NO: 998561 - protein, 107 aa, Homo sapiens
MTTYSDCVLLDSGIMKRIGLDLTVDWVSCANASKLLGWYFHVFLNPKVQSCRMSLGPLMKLLLYAFPSTRQDIVPGGERLAAAGWKLADRVKTIAWGACRPRDVRNE

SEQ ID NO: 998562 - protein, 156 aa, Homo sapiens
ARRPRQEPCADSSSRTVPVGEVTWSPRRRGPRALSHVIELAARERPVGPERGAVCLVRLEDLVHGHLQESSASLTGQGDRPMRLGRGQHRLRAPPRYSTRKQAHWFENVNAGEIPADQEGQKRWAFDIVARGSRKRYKQSARDTSRFLGAKVGRQG

SEQ ID NO: 998563 - protein, 70 aa, Homo sapiens
GAAMSLWVDKYRPCSLGRLDYHKEQAGQMRNLVQCGDFPHLYSVRTIRCWNKRQELCVFYVNFMVLEWEN

SEQ ID NO: 998564 - protein, 158 aa, Homo sapiens
MDNLSSEEIHSRELTRLLMRSRGKVRGESCAFSPLSLRMQESETITMPGMNRKEAKHKPSIEEGLDQDKYTRPQRDGDDFNRTQQMLCAFVFVPTVYTNKELFDVWQELIRTTLGEMRGENSPCNVVSKQACPADIMVSFHANQANREQPVVDTFIHA

SEQ ID NO: 998565 - protein, 106 aa, Homo sapiens
MIPSFTGLTHYDVPYGPMSESPHQVRVNSYLTEKYVLNGHRSVASVVIMSDLYELHLLQIRLVHMNRANETLTAIALDTKSHYGGIINTYTLRYVLTYNGPERQNA

SEQ ID NO: 998566 - protein, 49 aa, Homo sapiens
MPKAELGILGKLLWGTRPLFSLELDTYYKSARVYNVCEATPGSGAFILG

SEQ ID NO: 998567 - protein, 72 aa, Homo sapiens
SSHMLSGGGKVGVVHLVFDVNYNGCGHNYCLTAPLSWNRRMEYSYQDRYIEDRGVTLPLPFSVSELVTLFQR

SEQ ID NO: 998568 - protein, 75 aa, Homo sapiens
DEHMSAMVHQIATASSVVYSARGRRRWINVRNDASCLGRYAVPKSCREGETRAMLTGRTEHLLGTDCCGTLCIYL

SEQ ID NO: 998569 - protein, 132 aa, Homo sapiens
  misc_feature (1)..(1): Xaa can be any naturally occurring amino acid
XSWESIKLYLIWSEAAQCVGSSSINVSFEWGYRYTGPLGRSWKGQIFAVLGLNLCLILVELPARIVTHETEHVEQPNFQSPHLRSPGKGRVHNLCKHGEDGAEDIECPRKVCTLGLWANFIQMAWFLISDNL

SEQ ID NO: 998570 - protein, 110 aa, Homo sapiens
ENALGAYIAELEPAVSCCPAEWKRVLFVYVSLAYGAARLSTREALEITTCLRERPECRWCVDSSHFRANQHAFIYLAVELYPSLTPLHRVLKYGLSLLVTTDLELYLIPK

SEQ ID NO: 998571 - protein, 122 aa, Homo sapiens
MGGIMQWPKLTRAGEHLTYKEEVADRENYCGPTVRVSACHRCDTIEVWPFDDYAEGRVYLDGATYHLWIDRTVAALRVVHSVNHATGKDSIIWSACVERMTEPVCSDPSGGVRLKPMLHIDP

SEQ ID NO: 998572 - protein, 104 aa, Homo sapiens
MDGCTTMTVSVGELQLTLCLTWDCFIVLTCTHVDLPQLEHWDETEPMGKASEGERKTDHMSPRLLTDRLKRGSSRRMTHGQLEWQRYEGLGNGWRKREVPFMVR

SEQ ID NO: 998573 - protein, 181 aa, Homo sapiens
MSNRRCDPGTTVIGAFAPQIHAMMGSVLFGKGQASVAKLWRVIFFLVDLSRISNHGKCGALARLSSLGVLKNVGNAMSQFDETSLVNRGDDALKPLGELLNALRVTSLSAKDCRLGPRIPRDSIERVFRCTRMPIRRASIVFAGLTQGWIELDQILFLLDYKKVRVKGKSEPLVPLDPWRL

SEQ ID NO: 998574 - protein, 83 aa, Homo sapiens
KLLVQYLIRTVDSVLPVFSNGSEHVAFIKRYSSFPSSEDTVAIFSIPRYHVGLNHVWYPWISSSLLEIPLLRERCNSEMKDDS

SEQ ID NO: 998575 - protein, 73 aa, Homo sapiens
DFLSSSASVRWRLHCVVLHAYRKVLISVRRSHSILVARHDVRPQIDCQVFRFRKSKMSIKSFKNEALIRSAKV

SEQ ID NO: 998576 - protein, 134 aa, Homo sapiens
FRCRAQLPGWRSSLPSVRSVVASPTPSHQYPLHSRTGSRSPWALPSRDGNAVSADRLGMCLPLGRPSSNETAGVHRASAEGSGVSAGTRLRCQSIASLADVGRMGATLRRILSQERVRHVRLAYAVFARYEVKS

SEQ ID NO: 998577 - protein, 30 aa, Homo sapiens
MNSLMHPILAPSNPQEFAPVAFPIYGRPRT

SEQ ID NO: 998578 - protein, 105 aa, Homo sapiens
MPYESATDVVSLYENIGAFLSGGTGDFVRQAILELNSRISVIEVVLEKRRVNLPHTIVDRDESDGRISKRSTSAIYGLPLVGSCRAVRASSRGSLVQNGVTNFAL

SEQ ID NO: 998579 - protein, 145 aa, Homo sapiens
  misc_feature (73)..(73): Xaa can be any naturally occurring amino acid
MLTPHMGQPQTQGMLHLGLGYQRRLHSDARETVLPPSCLTQEHLSTVMKLFTSSYRGELNACEHSETMMIFTXSQRLSPYTDDKERSDINLALVPLMLTEASFIQMGIPNIGALQGHAYHRVPTIKPEMKKKNRVALQNGPGRGI

SEQ ID NO: 998580 - protein, 137 aa, Homo sapiens
RLNVGQPCILPRNAFEFDLLIFYLGNLHFYISEIGLLGYVLFFFFLEMGCLGSLTQAGMLQYVAILGPLATSASGARVILLPQPSNVRWGLRALLATAPGLILGVLSKDGVWLCGPGGLLNFLTSGDSTLPRPSQRC

SEQ ID NO: 998581 - protein, 205 aa, Homo sapiens
MGSTKKPGIGNFPSEDWSMNPNNIEFLPTPGKNLSTERGGMNRNGVPGWGVPLERPALGGDRPRATTKVGQLGTPSHSPLRTTFNLPPLNAKIPFAKTLRGGPPAYFRKPPLKFKQTPPPVSYNPPPFLKTRSPHYTTPITLRSYNHNNRQHSSHTHYDFYLRRQQHHEMTTSPTKIQKYTIWLDTTTHIHDIRRQTTDDIDQHT

SEQ ID NO: 998582 - protein, 93 aa, Homo sapiens
VPGVYSVLRGVFSGASRSYISLVRPFSPTYTCVPVTTIGKIRMVGMDMSPPGGPMNYLFGCELEADEAYSLKGGLFDENRAPGIILNVTGSEY

SEQ ID NO: 998583 - protein, 95 aa, Homo sapiens
NCEAGKPSVDKSQIGSVVLNLVKTDIGDILDLLSQRDHIFNTLLVFGHEIMDVLAGRDRILVHGYLPSSNFSCIRRNVTKTRKSRNEMCDDLIKC

SEQ ID NO: 998584 - protein, 86 aa, Homo sapiens
  misc_feature (15)..(15): Xaa can be any naturally occurring amino acid
FSPNAVNMVFMWLRXRLAGVAYVSFGPSVPEKSVVDCQMIIRSEQGLRSMDLALKEETGHALQVACNSLIASSSIRISDHAKVCPD

SEQ ID NO: 998585 - protein, 104 aa, Homo sapiens
MSAGRSKTKLYNFNSFTTKREGNMYCVQLATAEIRIGVAIANEFTWRQSVLEVNFPLYKSLGHNGHVFDPYYAPPSYHVLERHKKEQFTCKHTFVRIQLTLKHL

SEQ ID NO: 998586 - protein, 108 aa, Homo sapiens
MDHFLQRSSQYGIITSIGYHLNCRVLTKMDFLFGGHPTAQKEFEDTSLGDRPAPNLRNHIWGDKSPDVPVKQYPVRKYTLVSGGVRPQLNGSPRGLAIGVCFKRNRKM

SEQ ID NO: 998587 - protein, 86 aa, Homo sapiens
ARVADGNDVVKVMELVVDGPGGGRTNVMTRGITRKTQNICNLTCTKQKQLLVRMNDEDTVEGPRCLSSLNLHTCVNNRQRLQCALC

SEQ ID NO: 998588 - protein, 145 aa, Homo sapiens
ALFPVWNHGGCTKTNDRRRFLLCQRTLKNTAKEFRSSCMIKRLRTKFALKRCSRKGKVGSLSMIKQSTITMEYEQMYRTEIRMARTGRKAGNFYVPAESKIGVCHRNQRYQWSDAQQVLKGVAAFFAFCRNLRMGTFVKLKQGFD

SEQ ID NO: 998589 - protein, 75 aa, Homo sapiens
DDASMLPMDHGDWGYIMTDPVTFNVGGRLLYRTSSHHIVRSVDPNSRHALCECVTCYMECEVSSRNHVLRRNSIQ

SEQ ID NO: 998590 - protein, 78 aa, Homo sapiens
NSVVATAQTKLRSYSCASLCYFLRQTMCDISPSMAEESMKVADEVDRLNEGLDDCGDEIIQLPSNETIEQEKQAGDSY

SEQ ID NO: 998591 - protein, 110 aa, Homo sapiens
MIECRPYQIAERESNGTLKLIRRADCIGVCLKRKYSLTRRRRKLNFVTGPVICMDGLTGSLTAKRYKGIIIDSSISTFIPSLFVPPFLCWARCENRCFVEERMIGIRYAY

SEQ ID NO: 998592 - protein, 125 aa, Homo sapiens
GDRSSSGARCVYLLGRSASGIRSGPVVGVVRPLVRPRRQAELSLLSPAAASAGLGPPALCTGEFRSDAAVPVPAATCHRADCIVRHLRLRSCRGHVVRELRPRVRAAGQSPQLIFLSKWYDNLAR

SEQ ID NO: 998593 - protein, 122 aa, Homo sapiens
  misc_feature (42)..(42): Xaa can be any naturally occurring amino acid
SENRCIEVIIYSTVYPPTMTYYPWRIECFAYLFSIIYLFPMXGSVRAYEPQEKNFDYEAYRQILDENVPVVRTGCRICARMNARGNVYMPCLCLCPPEYLVYQKTGALLFYKVCDLSAASKS

SEQ ID NO: 998594 - protein, 69 aa, Homo sapiens
LSPVVHVDLCPTALPGAYRDHVYDSIARAVIHKLERLSPIIILLDDGILSHDPRSSLLRCHRESRGQIR

SEQ ID NO: 998595 - protein, 170 aa, Homo sapiens
TVNVYAAGNSDPGNIMARLSRTVLERCTPGRTVRMKECQPVHRAVRDQLDSAGMVVEESRKIISQSEEVCSPPGVSGGSHFTPSDGGSFIVAAMFADMVSVPMTIRKRSRDVGQEYGPGYANSRSELFGYTWVDPRGVSGRAFDIARWRKDQLEDGHGYEWVSHQVMCSA

SEQ ID NO: 998596 - protein, 116 aa, Homo sapiens
MFEAPPGSRAPIRQEGCRRQVKDLESYVGLLGYYGFQADVNLARAMDFVPTSLWCMLTLRSEGCDNPTLMRSATLANGLCTVTSMSYRYVKMRRRRQERYQLARKGPKIIADTLGR

SEQ ID NO: 998597 - protein, 117 aa, Homo sapiens
MSTADALDDENTFKYYLDRYSISGYMGKDDGGGRMMTGFVVVIRYDRNLKSCAQDRMRGGFYVVEGGDLFHENKPSRKNITYLAIELLRKYCMGDRAVQFEILSDQSVNLVLVSFHG

SEQ ID NO: 998598 - protein, 230 aa, Homo sapiens
MQREYRSSTCRCNCSITDVGGCTYNDGRRMKDEAEMNALMSWNIDHWPIAGRAAIAEDNRVERMKVSLPCAVRMIAEVVLEWVQDARENSNGTDDIGCLPSCHVREKLSAGKEPNYSSWDNLGMGRVERYTFWGRISQNGRGQGGIREIFYIGMGLLKEVAARILCLETGQKRTCSPNQLNTGERKWAIGMLHNRPKILGKSQLLGSKLKERITLWRSGSGHQELWDGNI

SEQ ID NO: 998599 - protein, 214 aa, Homo sapiens
  misc_feature (37)..(37): Xaa can be any naturally occurring amino acid
MPASGVSYMTRFALSFLIGRTPVPLPRCRRRIRLPLXPAGRLGPCIWNRLEQLSMNSASTSSLSYSAHPDESEYRLGTVSPNAIVFSIVYSACKATLHRMYMSYRGDKCERKERSVYEPLTLKGGPPILAGDMHFEGRCESRVSYWEMYDNYAQSRLKGFRKRTRWTQTILDTGNKLFLIPEVRRLIDRTRRVRCTIVWYHDANYEKAPERRSL

SEQ ID NO: 998600 - protein, 205 aa, Homo sapiens
MDDDRMQEAEPATGKTGKLHAACTTDDCRYTTEARKNRTRDDIDQHNKQDTRIHIKRNQRDRHENHNTNTSNITRVHHINRPMRPTISEDTQKGHRTDTKRRTKGTSTGKNKTTGSIVTTAPAPQRTQNQKCRKNKDKHPRGKTTNTRETAKRYEPKGTPEHRAAATQEEQTQQNRNKQNKSKRRQSTTYERLKKTTMEKRTTEH

SEQ ID NO: 998601 - protein, 124 aa, Homo sapiens
MPMKLEEVEACYLRLQKQVFGKCQDQLNYEFPQHVAGDSLDRSPYTISAMSVGQRNPPRALKRTLRVCQSSDSWFNFSSADFKYVTEHKVMKFFRNKTLHFHYTVKMFSLAFLEVPNFCHLISA

SEQ ID NO: 998602 - protein, 413 aa, Homo sapiens
IRAAADRRRAAAASAAEEDSAARAPPATHDRRVHRHRPRASGQELPPKEKKKKKKKQETKKRRKKKKEEKKKKKDSSERATQAAKTDKRRQGAEEEEQGETRTEHEKERKNSKQEDSPQRRGNNTAEQWRSREEAQPRRPREKEKRNTKEREEEKEITNKKPEKRERRDSRRARQTRRRARKARTETTSKSRRGTPKKRRDERNNKNNKETQRQKQHRTPERDQPNSETDKARNKQGEETKKRTTQEKRKRSAKKSEEDKKQTKKTKRKTKRRKNKDRKKRRRKTRKRGATARTETEKRKKNREEARRREKGTRNDAPREINKTSTRQKEKTKKKRDQQQKREEKARKTNDNREPEKRRRDVEEREERTQRRKRERDRARQRDKTTKPGRSAKSIQVRSRTKERARIDTTVRH

SEQ ID NO: 998603 - protein, 95 aa, Homo sapiens
  misc_feature (3)..(3): Xaa can be any naturally occurring amino acid
MVXTQSLIVEIPRVDTEERHLLGQMKSLEVGAPASEGLKRQRRVPVWNSHVVLRHLIGRIGFCNVHILGGTPWCPQVTNTYGGSTQVRFERHNPR

SEQ ID NO: 998604 - protein, 107 aa, Homo sapiens
SLIAWRLCAGVNLRGFSHMRFANCLSSRLRVDLDLIARDSSGNGCLRCQHSGTCRRLLARISLGKNTHYMLELDRKLLRERDAADSSAIKLVVVNQNDIPGDNRMLA

SEQ ID NO: 998605 - protein, 102 aa, Homo sapiens
MYCLASRAINRDFGTLSIIGVVGADLAERKVQDRKLPRVAMDKTVPHSPVYKECAWPTNLDVNDRDRLEKLWAWTESVVTIWCRGRHISRMKEILIFTPLRH

SEQ ID NO: 998606 - protein, 258 aa, Homo sapiens
GFPGGKMVARMRKCAARDPVGHVDPMPIGPSRRLFQSMFSVKANRLLYVLYGVRAATRFDKAPIPAGLSKRTLFVLECAPITAQRRRLSRLLSDLWPRSSHVGVCREIVGDPWLSMPYRASTDGSQKISSIRISQYSRRFPGIDHSCGCSLGSREGWGVLEARLRWAPAMVPPPLLVSNSRSHPPCCNVVAFTKWISDYDKNSVVADPEDLRVEVDTFMEAFDQKIAEEEAKAKEEEGGPLTREGWVKVTRRGGRPVF

SEQ ID NO: 998607 - protein, 69 aa, Homo sapiens
GSLSEELAEVAGSFKMRLLLTSPSGRRLQMVRRRRPRPIWCWRVPGEMIKDAGPADGARWIKVPELVSS

SEQ ID NO: 998608 - protein, 257 aa, Homo sapiens
MADIQTELCRYRDKACLTDLSNTNEDGSCWVDTVGRRSSRGYLQEHRSGASETRLREAIDGHPTSCTRGQCPVSLVECVHSEERILIMDVVTSDASMRVGPSCQSGPVALILQRYNRSREDTNTSYQSKDGPAEETSSSSDTTRVPRMCSRVNEFSRTLGCTNSVCHVAETNVAQVLLEAKEHCGRPFDTVSVLEGQAQQGDALGQPERKRQVSRREGNLDRLGEPIQWPPTSPGNKFCNIDTGKLLRTNSLKQQHA

SEQ ID NO: 998609 - protein, 185 aa, Homo sapiens
  misc_feature (40)..(40): Xaa can be any naturally occurring amino acid
MTYDNCRIAYAGVMLRAGVQLTRHAALGASWGETVDLTRXCDVRLLTPADDYGTPSLAVSVGMNRHAESGPGSPGTLTAVTPDTRTREASENSGTRSRAWLAVALGAGGAVLLLLWGGVGVLRPPRRVPSPRRFSPESSTSSRCGGKTPAVVYIEILDRPFLGPEVPISNGSDSWWCDGSLSHAL

SEQ ID NO: 998610 - protein, 71 aa, Homo sapiens
DFLSSLGFVWWGYTRVQYAYRKVSSLFEAHLSCTLAMMFRPLKDCLTVLFPEYFRNNLIDVQLYNTYQDIR

SEQ ID NO: 998611 - protein, 132 aa, Homo sapiens
MILEGAYQGVPVSAVSCPCDRDMCARPYSRVLEKLYCELQSDSRLKLGCTVTCSYILTERGAVSSVTVSSWGPSPSTLVLSGFIYLCGECHPNGCLRIQINPENKAVSKVISTERALADFLFCQHPSCTLLS

SEQ ID NO: 998612 - protein, 147 aa, Homo sapiens
MLGEEREMSDAGGSARSKPCSAGFVIGGSHMPERKTSVAEQWMVQVALVEHPSSWNYLLAWASIGVRVPLVQVSGTEKMVGDDDRGPGILPPPLSDLNICGPGFGASFMTILLIIMTSVGRPGPAIDQEASLRPGSSCRELYAMYSI

SEQ ID NO: 998613 - protein, 113 aa, Homo sapiens
MTEKVGRRWRSIYNYGSLRTTELDSALRYMYWRIYGDLRDAHKILEKGISYSVAGASQENIKREGGAGGCRAHSRAGTTTSLTAAVECTFDEGDTSANISPEDLTRRFAKVSI

SEQ ID NO: 998614 - protein, 108 aa, Homo sapiens
MFSATAKIVKSNGEKPDDVRVRSSYSGSVWMLEDETRTLERVNACKGAEYLRAAVMESRELGGGWGKLSDIHLCPVASIEIFLDENPKIRGSTRNWRKMFSGNAMYVS

SEQ ID NO: 998615 - protein, 87 aa, Homo sapiens
QCVIIVHGRNQEATPIIMGDVLYISLVVAEYDISYVVPCLYVLRYTTVEDDIELKRRHSSQGDGVDLGSHIVYALLQFFVHGKFSMA

SEQ ID NO: 998616 - protein, 66 aa, Homo sapiens
VECGLLAVGVPRCTMGREIVGTEALERSAQLSLLENIPFNIKNVPESYHRQLRTYVIVDVLRVNNE

SEQ ID NO: 998617 - protein, 133 aa, Homo sapiens
MRDECYQDSCEIVSDTCEEGMSDEEGLRYPYYGIAGEYTHYKVVGHTAIDRISQKGTLAPRKWVPEEVVWRRVSLRRDWSTHGILVEEAAYALDSRSNHMGVYDSKSIAIDAVGEVKSPTIIYGNPPWVRSKY

SEQ ID NO: 998618 - protein, 265 aa, Homo sapiens
MILKKVLAADLSWNLPGDHLAEDPTEVLNLFGERRHLMGPGGRKFRLLGKGSLRQGQGMRFGQVREAPQRNFVASHHVGTSPKDSWVPNRYSRKELRGDLFRKRKTRLFGKSKEKRCGWVTSGHTVTPITHYAPRCCVRAVRAMGRPFFERISSCSCKQTLSCKWVRAARSPKKCFFRHRVAAIGAGAHTGEKPGWRTRDVCVSVRSHIADPGKNEERPAGRGTIAESAQSERETPQREGLQRGSKQRGISCQRAGFKGSGQVID

SEQ ID NO: 998619 - protein, 158 aa, Homo sapiens
MTCMGTFEYHPHGYRIMYPQPVTLDLYAYPTWQWKLLMGIILRGYAIVDLRGLRRYEPWTNCYLNGASVKPLDTETQVITQGPMVARNSEAHAIFRWEPTVLPWLLIRCICGREIPFRLWGVLTVGKPMVDVGSSLDGGGDSSSAFSLGCGGGEDEVN

SEQ ID NO: 998620 - protein, 321 aa, Homo sapiens
SFCCTKCIGKSVVISTLFTLSSPRVDFISRNHLLVLILWEQLILSRLLQRLLQSRQICRLFLVILVLYVYFHQYLQITVLAQKIVNALCHLVRVGIIFTQLLSLFDHLGKEVLGGGEARGQGMTMPVYMRDTPPFIRGVSDTDESVPLETHPQVSRWGIYRNIALVAQAPQSECYRRGPLIAHALRILANIVGAQGAGFLQRKLGDAWKSHRVAMGHLPKRRLRTLPQGVGEAPLQCPRAPTSSPSLTGRPTPRGPMLKQRLPLTVALLSRGLSSTHVCRENPVYASTNTVPNDIFVAPKVVTIDRGSIHFPLTNKALSAP

SEQ ID NO: 998621 - protein, 31 aa, Homo sapiens
MGSVTLNKAQQAPPKGPTKESTKDSRPPGPQ

SEQ ID NO: 998622 - protein, 157 aa, Homo sapiens
  misc_feature (121)..(121): Xaa can be any naturally occurring amino acid
MPSFRDIAIHSARSTPSNDLLHDLHTGQRASRANYTHPSAKRRKEYKARAQTHNVPRPGKPRTQRRCDHRWGTRGTSQASSRHKATPRVKRKDLINGAHGFNDARSRNHEEPQPAQKENEXPEHLGECTDSAHTDSGDTGPKGGNKPGAGRKPKEVQ

SEQ ID NO: 998623 - protein, 113 aa, Homo sapiens
LSRRVCSKKTTGLVGLAVCNTPHEEAEEYGTQRFWMFLRKSFKMQHIESIQNRLQMMKLAVVKAEPDVKKVRRASFEGGQLEEVILQAEDMNYIWARQNEGMATMGAISGRAS

SEQ ID NO: 998624 - protein, 201 aa, Homo sapiens
MAALVLTHAAYPVTDTVRTCHREDQSTPSWPHRAAHMNGNLDRWWNTDCFGTSARYMVAPAQLTGDGTRGHRYHRHGTLSIGPFQEGHHTTWTEPTRRKSLDCPLAYDRQDAKRQLQPKTRDRETKNTQKAIQEGNVQGAAQARPQGDSVAPRNTVNSPQARGPQGQYTEKPGVKHKPQHGNSPTKRSGHQHDNQGEATQA

SEQ ID NO: 998625 - protein, 561 aa, Homo sapiens
TAWPRRAAWRSAAQPQLCLPCPALCCTPPACAACALSCLRAPRTPPSHPPHYAPPHLRPDTHCACTQPAHQRTCAPAPLRTGPKTPPASNSTHLLHAYSTSLCARNPLTPSTGPNACNQTPSPLNTANTQATYKTPLGTLKPRPLGAEPPLLRHGNYTLQLKNHYSKTPRRLCKTPASLNTNNQATLSYTWRTPSRLPPHAPLLARPTKLSPQGRPKQRPPPTWGKPHPQPATRNLTQNTLTTPPTAPRGLPSPHQPHNNNPPLTPLGTPAGNPWNLQSLPYPHTPCTRLTTNNTHGNFPGFSKSPFHSTAPLSPPKSTWNLPNKPCDRCQLRNRLYQQRPTTLGPSSPTHPNFKPHAASKDALNPSPHLTFPHRNPLPPHKQQPNLMDPTLPPPRHPLPSHRARTSHTHSPSPRRSPHLTFPWPPEPPPPFMATTFPWLLQPANTPPPGPTRTRKPPPLGAPPPTQHTPLPHHTATNTPRNPPLGPPSTPSRTLYAPKHGDHPGTLATPLPTWPPQQHAHKHTLSNTHHPPPHTNRHHHAPLKPPRPGLPKDPLAHASQH

SEQ ID NO: 998626 - protein, 177 aa, Homo sapiens
MTAIILSPHQPLSHSARASYIHNSGQNESKPITFTLSIITSLWEDQNEYLRGLLTFRPECNWGVSITLRFNPRLQLAFRQRIISSLRETSRGGIVAEIRYCNVGTHFLRLVHVPRIAMDPPHVDDSILVTIYSGTDTFGPIPFDSWGTPSTCWGAFRTKTKDWQKSPGDRFLETPSP

SEQ ID NO: 998627 - protein, 140 aa, Homo sapiens
MISVKRNTHEEVGHGSYTIEFGSVSSMIIYGIDFVICYDESSYMDIGKVCLVYRRHGLVHYVICVLETKHFRLASFQDNVKLKSYSVYFAEVEAIWKVLIFGVRLLTKCIESYRKFTLEFLSSLWFMGAILCHVASMGFD

SEQ ID NO: 998628 - protein, 710 aa, Homo sapiens
LDGQHGTVPRLSPAATPCSSYNLPNAPLTTNHFPGTTTAHHCSLASLYSPLSSFNLHHSPIPQVHLSLPPLWAHAPTYTTQLPGHLPPSTRTPPTSPHPRNVSHSSHPPLHAPTFPHNDKTPCASGQPGLTHVGLGGQLGIKAKAITLTTNKPPYAGTHPKHTHVRAHTRRPRSAPPPGHTTQRRPTTPLSNTHAKQRPRDLYTLTTHSRWRHCRAHPLPQHASSTDPSLNTATPPLRHHSSKNTAVEGARATRHTRAWADTPLYLAASSTTNRRSYKNALITTNRGDPNRTTPTPVAAGTPTRPIPQNTPHANAPHTTRGPPLNRTLLARAYKHTTKRTVSSRPKAFLNHHHTPPPPTQTRHLDEPNTRTLAYTQTTHDTRTHKLSLGSATTTTPPPNTKHTQQTTTANPLRRAQTITYQAPPGGTTPTFYYHETRPPTTTITTPTPDQNAPDWRRATPPKQLPHSSKQDTYIFRTRTTLTPSPPRTLQQTITYRGAETKINNNTNRPPNYGGCGSTYPTTHQVPPDTNHTTSRGGRTETTTKQLTNTEDTVTRRYNKRHGHSCVRHATTPTMLASLPLHHHYIYPTSPYLFINNDNNHADYSPHHERTSNTHQVSSRPSTTRTTNQTHPPSRPNQPPRQDAEINITLSTRTTDTTQQSIDNNTTTSTIRATPTSLHQPQPQLTRTTQQHPAHKQYTPPDLRVCAQPHT

SEQ ID NO: 998629 - protein, 102 aa, Homo sapiens
  misc_feature (72)..(72): Xaa can be any naturally occurring amino acid
MAKDAEVRKQVHGDVDGTLYLQHDDTSQQSNTVGCTFDALEGIACNLAMEMRSINDFDRSKQYFTTFGRRLXTFAYVRVRMEEIGDFLIDFKGMNKLGWCWV

SEQ ID NO: 998630 - protein, 190 aa, Homo sapiens
MPLLPYPHLVIESPTPVKSSHSHCKAQASLSRSVQGVVGTQLVDQEPCIMTIRSYLGDAVAVSVGIAVCTESSMLWDIGQVMIYENSREELKELTNCATEGSGYYRAVKKDGDAKGLELSEPRAISHQQDRNEVMDVLVKLRDLENPKGANVVGNHRRNNEGVCTTGYATMTTLTGAQHAMQIGGTTVRR

SEQ ID NO: 998631 - protein, 106 aa, Homo sapiens
MLFDKPDGQSDMERNCRVHTFHKGNQSLADFFEKSCPCEARHERRFLLPFGGWVDIWTDVNILIPWLLVFEGVVAKEGWGIRMGPKCCQLIIGCGTKVSLIHAGVE

SEQ ID NO: 998632 - protein, 126 aa, Homo sapiens
ETGVGAEQRRPGLLMLAGAWACENCAGARRGLMVSHGQGRLGPPEPISPVQRLAALRRAGQGKPRRVDRIGGNDLGTPGKGSRGLEGMVGMELSGAKCHTLGRGMKRSWEQIPTDLTPGWSLVKFD

SEQ ID NO: 998633 - protein, 105 aa, Homo sapiens
MSIIILGLRSGPRHTDTLPSSVAKGRSAGWASKVAGCRPTQTDTLKAVKHPKIGHTECPGRLVTEAPKTKKIADFNAHRGTIHFKPSGKSRSVKIHEKTATQPKK

SEQ ID NO: 998634 - protein, 71 aa, Homo sapiens
VYSCGQFMFLETIAFESLVKVGSVTTKNSSIRDLLNEWVAAIGRRYSKITVVAVLSTNVYTVLLSIMFTAM

SEQ ID NO: 998635 - protein, 83 aa, Homo sapiens
AEVLVSGPCSRVDSSLLQREQAVVPEAPWKESNLRELCGSHCQCRKKNNARIRRMKEGERGRAGYIDEIRWSKSGMENEKNEE

SEQ ID NO: 998636 - protein, 90 aa, Homo sapiens
QKIYRDYKDEDGFVYMYTTASQVDIGMSGVMQSPMDGKTRLEDETPAILSYPCRARNVCSRQYSVMMLAEGMVSLLCIQRQECEKQGCLG

SEQ ID NO: 998637 - protein, 198 aa, Homo sapiens
MQSARDRQVKTAATRHAQTRTDKVTPNKTRTRTHITREQATDHTTNGQRGNKSEYDSERGHHERTKRKGIGPTTPRAQGEHTQKRATREDTSKSATGKAPKNETDTEAKTDPPRQRDKGRKTENDTARQQRAKGQAQKAQRRYHPQTAQRNQRIEQTRKRTTEHKQNETAPRTGSNEEARGATSRRRSKRIRIQQTRD

SEQ ID NO: 998638 - protein, 102 aa, Homo sapiens
DEPKVSIINALMKEFSWSPAHCVLRLRRSPDRNISGIDRDVRVQALCALGLRPLDITTWIQLPEAHGSVTHQEARRTGAYVIESARIITLRRKINGVELRSA

SEQ ID NO: 998639 - protein, 67 aa, Homo sapiens
  misc_feature (2)..(2): Xaa can be any naturally occurring amino acid
GXMTAVVFVTRKNRQVCANPEKKWVREYINIFGDELGWQGPWNLNLHKFACFCFDHGHSLGGFPSLS

SEQ ID NO: 998640 - protein, 87 aa, Homo sapiens
NAVEVTGTELSYPARNLVTTPCWLQEWCVSGSLSSRVGTPDFIRRISACCEEFHHEESIGCEQASRSLPPTSLLLVFGFFLLLYTNF

SEQ ID NO: 998641 - protein, 116 aa, Homo sapiens
MCCRCGVLERVPGAWPEAGGVLVGLLIQVVPAGGGRVVQVIRGRVGPCARLGLAMRLLGPSKCLIPSVQRDKTGFLVEKRCWGHRLGSPSNRFPIESLHSCSIGQAILISHSFPYY

SEQ ID NO: 998642 - protein, 97 aa, Homo sapiens
MGFHRVGQDWSSNCVTVHGSARLGLPQSGWDYRRRANIAQVKTVSYNGDDGGRVVIPGLIFQAYGIDSGGVTERQEHLPMTCIPTYLQVPLPSHMIQ

SEQ ID NO: 998643 - protein, 179 aa, Homo sapiens
EVTRAASQDGGGGGSRIGRGGVPGCLRWAPRRLAAGQARYLRSVGRAVAASARSRGWAVRWQRRRGMLLRGPVPLPSQLSGWRRARAPGSRGHGAEGAQMCVCSGIPGVGKSEYRVAGLWKTVLIRESLIQEEGQSCYEQECAVRKNEAREVPNLGYRWTRTIRGLGPMYYRGSVQLYR

SEQ ID NO: 998644 - protein, 83 aa, Homo sapiens
RGAPAREVDNFARSWFAVYCVTYRDYPPMRALALVWVVRLKAKVGYHGIYAGVGHRGTVRDYPDFIPSVDAEAIQKAMQRNRR

SEQ ID NO: 998645 - protein, 117 aa, Homo sapiens
RKSFLNLRLGRAGPGIRVKCDHVVSLAVFPIERSPVVLMLDIVCLEIPLPHIIIKQAAGRPNRERRAVNATLTRCESSGRGLIYTWESLFSNQGDCPKRETSRDILKIYQAPRPPWK

SEQ ID NO: 998646 - protein, 178 aa, Homo sapiens
MQTVTAAVDGAFGGQFRLPEDAACYMVGVYESAKWMICGPRQRGPSASVAIAEEEEDDIGLKIHCSRSFQSLLLVTNDHQSSGRVSWHWIAWSQLLGEPVEDPGLQRGPRACIVSWSRESQHVTPGKSDGYGGGGQVLRRKAGQQPVGPLHLSSGTLEAFPAAESVKLLPQQNYIVLD

SEQ ID NO: 998647 - protein, 106 aa, Homo sapiens
MTMTENARWAWWWSTRWVREKRRGLLGMQDDGDGVLCQGAYPGMCECRWSGDFKVGPIMKHNSWAHEEEVAQVVAMVDPGDIVVEVRTSTSLNPANRIIPFREQTS

SEQ ID NO: 998648 - protein, 128 aa, Homo sapiens
MESHSVTQAVLQGRNLGSLEPPPLGFKVILLGLSLPSSWGLQGTGHRAGLILVFLVKTGFHHLGQAGSQTPDLVIRLPRPPKGVGINQGYEPPHPAPFGDSGGVPQFGRREDLPSKWQWVGPMKNMLG

SEQ ID NO: 998649 - protein, 71 aa, Homo sapiens
VISARCDLRLPGSGDSLPQPPELLVIAGARHHARLIFVFLVQMGFRHLGQAGLELLDLMTRLSRLPKVLGL

SEQ ID NO: 998650 - protein, 221 aa, Homo sapiens
  misc_feature (182)..(182): Xaa can be any naturally occurring amino acid
AFLSVDGAERSIVKVSAYTAGRQCRSQSLLKERRTDEEALHWRVELGNNGGEPEEPFGANGEIARGSGVVNEEIAIDLSAPGAVAVGHDDATGGRMVACSLVTCIGRKPQVGCEEIVEPKSRSWCCQEVTMLYTTQGDATCKLVEEEYILIAWRCEEEVTTGEEHQSVDEDCIFGDKVSGEXKVRIVELGNIMNWDLSARWANERKGGVMAFMVDLCGLTQ

SEQ ID NO: 998651 - protein, 33 aa, Homo sapiens
MWVEGQEKPPETNTTYSLPQTGGAHKKGSVRRK

SEQ ID NO: 998652 - protein, 116 aa, Homo sapiens
MWVSTLPVLINPLGQPVDLLYASLQAALDHSAKLAVMLLPEYGLEIKMLAFMPGSNQQNKPRATAELPSSIPSRKADASIILSDSYPLRTSILYRTMNHNQYYHIKYSVINNHTWL

SEQ ID NO: 998653 - protein, 144 aa, Homo sapiens
MLWNVTGSPREHPNVTRAHRESDFTNFKLFLRVRLDISVGFTSPTGLRPTAMRSARNGSCPYFVFGALGFHRRLNLCYHLVTLPGKFHRLASSDARYLLVPSLDPVRPLVQIGSRPNKPRPGFSALLLAPFSELRPLTLCICVY

SEQ ID NO: 998654 - protein, 169 aa, Homo sapiens
  misc_feature (113)..(113): Xaa can be any naturally occurring amino acid
MVISHRWYLWWHWVTRLGEKHRRCRHNFWASLFSGHGNIFSVATNITEGTKVWGRQNPGVFTFAGIAPQTETLCRLISCYQAACVGSFNQSSWPGYTAQKETEGERETGGPFXPLMGTALTSNTHRAEFCATADSPAGAHPNAGRFKRQPQINPKLELQTRRRKEAKRA

SEQ ID NO: 998655 - protein, 102 aa, Homo sapiens
MLAAKPCVFHRSGRGMMLCLAWCQRVQLFGHEQLDDLSAYYFVSSSIFIGMAGSVVRAALLMRQPFRLGIEGSEYVLIPSSAVEVELLTSPQVHVIFWITQQ

SEQ ID NO: 998656 - protein, 119 aa, Homo sapiens
DKAKNNQWNTREKTLLDHGEASATNVIGNKYACSFAYHSEEHGEQMNRYQHLMGTWCEEEVSNRLLSNKGVPYDVRCLKCSTLGCNLVSKTQGFGNSVAQQEDTFMNFASKDNSLYNSG

SEQ ID NO: 998657 - protein, 224 aa, Homo sapiens
ADLGGATEPRGDTVLGPRAGSAGANGTRVRPGVPSSYGLGGSAGLRLRVFASSHGVRSCWQILVPGCCASVVLGRVVILWLRACRMCAGDRLPWTTNNRDWLQTTWDRGCEMSCVVQEHRGTIASCKSVRTRVLASEHRWWQAGCVVLTCDAPVAAWRVRLRASSVTLGGPRRLHQLAWPGARARRVWALKGRGALPVVRACWRSWPLCWYATMVARRVSRPGC

SEQ ID NO: 998658 - protein, 89 aa, Homo sapiens
QAANGAETMASRGSTVPYRDVAPGPRCRAMLKWTEADAESRDAVPLARMMLISRVLMEQAVGDDAMTIGLYVPWLCNAVQGPCAPSNML

SEQ ID NO: 998659 - protein, 123 aa, Homo sapiens
GLCARPAGPGLAARAVPSPARSIRSLRAGSCALPLRCWMTWGLVSASAKTGGHRADRGLGGCGAPCNGCMAPAGVRDLPAAAAGGPAVRPPEQGVTSRWLGHALLGLRRCQWIHSKMFRLVES

SEQ ID NO: 998660 - protein, 207 aa, Homo sapiens
GRRAPDPGFIRGEAGTRARSRRPRCPGGANLKVPRLIRVRHAAPRSAVPGLGTSLVRGLRRARGGGPLSWMLAGQSTFAECAWGPQGTCWWRAMPLVGGTERFWSLSMPKASWEAERAEGAGDQCWPRCGRQGGSLSVAQGVRRVRISIIKFFRTGGPRGNAPSGSITCVPEEADDVRERGGRGGKGRVATTGLTGQCAEALGKSSE

SEQ ID NO: 998661 - protein, 370 aa, Homo sapiens
ARASRIASRPVAPPGPAVRGPGTPARRIFCTVRFARRPSSQRLDCSPSRSSDKSSKKRKAHTATKAFRRHKPARKGSVTRFNQLNPVKPNPHRKNNSTQQHKLQRGHIYNAKREYAERKKNGDTSEHGAQIGPPIRPVLTQEHQKDFLVNHTRVRNNFCAVTQPQKKGRTKKKNQLREKKKPPETKTRAQKEKDQRKTQQNNTNKEERKTKKQREKRQKTQTEKNNNNTHSEEEDEREQSRRKQSSNKKPKTANTTQKQHKETTDKHRQTKARQTQYTKQANREERKSSKQQNRKGEKRERRQKDKNKRKTQKERKNDRREGERRKTRRRHKQKDEKNRRGKNKQTDRTNKTKKNEKEKTKRKTKSDKKR

SEQ ID NO: 998662 - protein, 143 aa, Homo sapiens
MAGRTSRVVVEGKCPGLRRLHARESPQSEKPFVPLCAKKGSRHPGRNPRLRLPPVVRRPNPLGALTGFDARVRIPKRSNCETQSEPNQGWRCRAESLSVGHIPGAPAACRLLLPTEALNGSPIAKIALVHRTRPLGAPVYLVS

SEQ ID NO: 998663 - protein, 129 aa, Homo sapiens
MAIKRLKPGAIEYMYRRREQMKDIDNQACILAHGLILAMTLLHYMKLHVGIKSFGKDEPGAKTLRRIQIDAILVNSYQQALPSMEAQHKKWKGLYYALRRANAQLNAGASWMDSCVGFGTVRVSDRRMT

SEQ ID NO: 998664 - protein, 252 aa, Homo sapiens
GGGTRRGGVGRERAPGTTSRLKVFQRPEVVSRGCGRIRLWRLPRSATTWRLKICYRREWPIRCPPVRPHQQPGTLISPRYGWCGRVHRPEGSRGLGLPAPNPWTTHSREYPMDSCGRGEARDEGDGARSSSQQPVVRGYGPWQVGGKLRLTRLHEDASSRPSRLGPQCCHSSRVSGTPRRCRGTVVHSARFTVCSPPRQQAGLGAGPMVGVAGWSGPGTDQQGACGLLEGAEWGTCCVGYPAGSVWGAHRQC

SEQ ID NO: 998665 - protein, 184 aa, Homo sapiens
  misc_feature (170)..(170): Xaa can be any naturally occurring amino acid
LVRGVNGVVRQGERKSVTSAELFLSPKPFVGRREMMRFVKGYTAFYDMGVHCCGRGLVCIVVALESHNAMDHSERMALSGHIVRQCHQADEASINSYKSCSVELKQTIILAHNCSGSDMSGHGSLEIKEPSRRYYLGLSCVKKPKECGVVLGVPVNREDWESRTLVYEQXAGSYEVTARSVRKW

SEQ ID NO: 998666 - protein, 98 aa, Homo sapiens
TVSAGLPRCDGDLPEPLARSIAVPFRALPLSCDPLHLGIMFRKFDARQKTVSETCIHVGEHFSILMGIEESMCIDATFQVLNAMVLINIYALRKILSK

SEQ ID NO: 998667 - protein, 131 aa, Homo sapiens
MQKRPARLDERCMLYTLQSTSIACESSENGVEVPGGGGSQRAEVSLPLNSILCQSQRDSVSNFALLLGSKIREGNTPRVIHEMDALLVQGAPVDSSVIRVASAPVAAGRCYPVRCRGTMVVPPARRRGWVS

SEQ ID NO: 998668 - protein, 308 aa, Homo sapiens
  misc_feature (142)..(142): Xaa can be any naturally occurring amino acid
TAVRAAVPPASAPARKQRAARGPAHPQAAPGSSSRAMFQACERPQEWAMEGPRDGLKKERLLDERYDSVLDSMKDEEYEQMVKELAGDPARAAGGAARLGALEAAAHRGRGLVPALWPSSMNAKALTMAVIRQVKGDLAFLXFQNNCSRIQSTVVVDHQPARNGWRPLPGKLVGDPGAPRLSRKYPLELACDAGLAWAKRGKILNPVLDQPRNSNPFLKGYQLRVGTRCSNTLSFYQWLPGASGGAKGSNELQTRNAQQNPVNAPSWPYTPQVSMRKYSTCWHPRRKRCAADITNTNLTRGIVPNTAH

SEQ ID NO: 998669 - protein, 293 aa, Homo sapiens
GVSSCFRSGGHIRTDDVRTAHHPIPPTSQPVAWRLPSPSVHPAYVAPVSLSVSLLASDPGPVLCSRGGFWDFTLDDGPFMMNDEEASGRCHLRRPETRILSYPPYSDHVYYSAATCHHAGMVQCIRHMGLKSVPKEISPDTTLLDLQNIRHSPELRKDDLQGSPGTSYALVLVNNKISKMHEKAFRTTCGSCEKLYISKNHRGGDPGQDYTSSLVELRHSRQPAIRKVPKGVVQRAPEHELHRDGAGTTCENSGFRTWSLSMCLKLNYAAHLSRARLTGIRGRLPETWNDLQP

SEQ ID NO: 998670 - protein, 77 aa, Homo sapiens
  misc_feature (56)..(56): Xaa can be any naturally occurring amino acid
  misc_feature (73)..(73): Xaa can be any naturally occurring amino acid
PLNSSLVREDDGLRPGVIEFRYAVYQLCLATNLQNGRGAIDLVRYLRCLLDLEGHXYHRTCTWIMTSYHLRGXDHAS

SEQ ID NO: 998671 - protein, 84 aa, Homo sapiens
MCDTGHLHMPDGTFKAGYPFRWNKSKKGKRTKLENSAGIQSKGVAQRPPPQGETIDERTGVYTTSARGCTNTDRNTAVCGNTQK

SEQ ID NO: 998672 - protein, 289 aa, Homo sapiens
MPSILNEDPGTLRASIVTPQATARISQCHRNASPGGRGTLLGESAFNTRDQLRLRYASEATFGNSWYEALAFKEEPRASWPKLVIALINIVETLEIELETDHGVELHASEYQNTGGMSPASFDVVRLRGYLTHHGFLEHEGGNRFTQKACACSIGVNVLKNSFTPRTGSLYASQNFLKLVWEVVTMVEPRDALLTQAPTLGTEACLCNSTLSPLNSVTFHGPILDHPGSFKRAFYVPLRQKDEVAIIAESNAEEGVPDVNQWYKALAWIHEGNTTNSKRNRSTQTCDRG

SEQ ID NO: 998673 - protein, 208 aa, Homo sapiens
MATILIFRIPPNCIDCTYLCIATMQAELTYTRGQSRAVNRRYKLAKIRAITANLSIRPPSYQAHGRDERRQWRIGHTDLPKYDTYQFRIHTVADYFQNRANRATKSMSNTSLWKRYESMGSNEAPRIRECKRRHQQELGTMDRGVLCPQTREDSPIMVGQVQLAHKTVCLYGKQDHRGRGHHTIQLSTKERNFAHCLQNNGPHPNIGG

SEQ ID NO: 998674 - protein, 111 aa, Homo sapiens
KLSEELSGGRLKPKPIDVQVITHHMQRYAVWFGGSMLASTPEFYQVCHTKKDYEEIGPSICRHNPVFGVMSYTLGLHYVIGVRGGGDRRLQSYLITCIEIWMGWYMSDLKT

SEQ ID NO: 998675 - protein, 324 aa, Homo sapiens
MIAHGSRCRVERSDRPRYRGWHEYTYHCMDFIARSVSIRHRPAHDELLRRRDLIAQPKECAVDCSSRILSSRDGRSKIQESMRNSEDKTRGVRPQTGKCLTSWVNVTDDSDDPCRVRTSPPRVQRVNNGKPSCTTWSYRKELGHIDVTGVCITAYGQAWLTHDDNGWTCEVLLKHLRETDNRARRHKPKTTRTAGQHIAKSSRRTDTVSTVGDRIGHKSGGRTQPERPRHRNIIHETNDDGVKRGHIGARETAKWTLYSPVHHRRGKPRTITDHHNPKWATKATQGRTQVEKKRRSTTPRDGGGETTKLDATHGCRNQVVERDT

SEQ ID NO: 998676 - protein, 117 aa, Homo sapiens
SLRPGPRFHNVPQQIVKKRPLDLHPARSSMARLRADANTENTDAKPVRQREGSIRTASRSFIEPHERHTDTSRKNTYDDTTVNSELLVTAVHNDHDNSHQTLDMWRYGLCHVFYTNR

SEQ ID NO: 998677 - protein, 462 aa, Homo sapiens
PPASRTRGCVRQPSSGLGQRQRIARLSPRRPSDYPRNQDHDSDRPPSADPDAGLGRGPQTHGLRVERRTLHGNQTTHNETTPDIRRAAKSRPTEHTQTKPHRKALSHREGKDRRCVDRETTKQVKHHKPNPHRSEHPNTPVNQTRRSATIPREEANATGDVKHMPGQRRHREEDDPGDHHRARGRPRDSDAHTAGDMDANAPVNTSEPRRHTAPQSAPAERKTAYEKNDTRTQWTPHQHKQREYLTDTAIGARRRAHTQEPEADGEQQHNEEIATTSRDTHTPSETNKKPIGAQRDQAVETTEHIREQSLTTGPESTKYHEEPDPQAGNMPHANTRRMRKRNANRSNSNHVRHHIRATSQTEPRGGTTPNRKREPNIDAHRGTPEQERNHRRHQQEAEFGETRQQRWASADQAKPTLREHQRRSKIDQMARDHKKEGTTHTTGERPRVAVTRGVGGVEERYR

SEQ ID NO: 998678 - protein, 309 aa, Homo sapiens
MEGVEEKKKDGSCLCHETPYDTQRDTELSQTLKINAPETRTFAQTRCFEHGNGRTRLSTDKKQTALLTQELSGTMYTNLKIRTGRGLAQTTAWQTIYVPLHDTQNLAILSIRHSGRVSTGRAAQHGFVKCVSAKRSIALSLKHLHMDTICDSSRTGISIYTMLKDLYEPLLYALGGTQQNLNRSGKRDTHSYNALDLWATTQYRSRTTSLDQTHRRISNMQSESPWVNITGNQLLHGGTIDSDEEYKLRDRANQHNKRRDTIKITLMGPHTNSMTQRHRDSGTCKTHTHTTRTGTKGDTKTGSKRRNRR

SEQ ID NO: 998679 - protein, 460 aa, Homo sapiens
  misc_feature (12)..(12): Xaa can be any naturally occurring amino acid
  misc_feature (66)..(66): Xaa can be any naturally occurring amino acid
  misc_feature (143)..(143): Xaa can be any naturally occurring amino acid
FSQLLAQLNLSXPLGAVPKKKTKKKQTKTYFGARALRALQKTFLNTFRLGRAAGPQLGKGRPWAIXEWFTNRGETPGQREHKSGYGKFSPRSNIKHNAAGRGKTPRERGFMSTKLSTRVERYSEEEPTRQGRPLITTARRRLXRTERGPTRKSYKELTSPTEPRGGKNEKTGKKGTNRKQRKEREKKTRASKKTREKKHDKETKREQANQNKTETNRSNSRNKQTRTEEKEREQKHTTREEEETERNEDREDRGEEKKEEQKKKRKEEQKDKRTTEQEQNGEDKKKVQNKMKIRDRGRDRTRTLNKQDKRQSKENIQHKETETKRARRESRKERREEERRKEKNEEKKRTRTQRAREERARARDRQRQERTERRREKKQRSERRKQRKIAGRQQREKHETKERRRENKTEREKKRKTEKKQQRNREYEREKKTVREKSQRRKRKRQEGYKKAQESREERE

SEQ ID NO: 998680 - protein, 157 aa, Homo sapiens
MKLFPVEEASVQRFPHKEPRKEKKGREIAFNIHMRYTANRWGLVSRNPVGRPNIHTVHQTHGAPGAYGEPPRVESVVAVVQYGMGIHCMCGIKGSSTRLQLRTPRNCNDKTRSVEGPQTEPYSLEKSGSVFHNRLLNYAWNFRCPRYTHGLAIHACQ

SEQ ID NO: 998681 - protein, 118 aa, Homo sapiens
AAIMDRQVHESVVLENAGDYVVVTDNNCYQSESYFANYLLQLEMATLCFVIEEPDLVSYSPRISLFSLNRVVIFPECLFDVLDHIKASGIESSIAGMLAIVSSIYAVVELSAGHRWKT

SEQ ID NO: 998682 - protein, 264 aa, Homo sapiens
SLLVNPRPVMRRTEDCDAGMLSARVMTMEAWEGSTGIRFEAANANRIPRPIAYLSSICTAWHTGHQGTHRSSITTRASTDVAHVECNWLKAGPVPLVTLRRNFAKRSGIRGELTSAHIGVKQVDIALPIDEEINHLDTGPNHGTRNTAYNTRVKTMKHRVLRDSPTYEDQRLSIHADKTAAPYAPHMTLNGLPQTDGTTVTSQLNVVGGTQTHWGASPDHTHRFPPIGTTPDWSRTDIHMSNQSQNFPRPSGPRLRAPSHTNSS

SEQ ID NO: 998683 - protein, 46 aa, Homo sapiens
MHTRQPVQFDTPSSFPSWKEVEEILPFILDVTLPKKLVRSGLPHGR

SEQ ID NO: 998684 - protein, 55 aa, Homo sapiens
MSNIVPPRYGSQTTNLPIYLSNTIISTTDTSPAARSHQRPCTRRAHPAGLSTTTC

SEQ ID NO: 998685 - protein, 184 aa, Homo sapiens
  misc_feature (69)..(69): Xaa can be any naturally occurring amino acid
ALSRDRLVSACILLHRTEVLNYSSFPVALVSCQTLIESVSIDAAESFEYYAIENAYWSTEWSAWLDSFXELKEVRRRLSSLVPEIISVGATERDERYTRSWTRHGIDLLYTMALLFRTSTSVIIRGAYPFSTIELRTVVMRGKNPRQKDEYQFTVFECDIAFMAVHRVRGTFFCRTAYLENDMG

SEQ ID NO: 998686 - protein, 202 aa, Homo sapiens
MGPRVSRADAVLVVASDSDGVSTMHRFVGRTDTSPIPHEGIHCDAMQRTSLPICPTGPVTMHATHNVNVGRHDVHGCMDVPRRNTRMTHNGVRHYHTSVDPQGTCREQNKNTKGYTDIVQHDLLPTGVRSHDCMGLDSTRSTQRTLTLIDQKWNPYQREWDPRAEITRVKCWAKHMGAMVTVAMEPLGYAQGSSEEPFLGTH

SEQ ID NO: 998687 - protein, 117 aa, Homo sapiens
MLKRGFGLLGFLSGLLCPSSFCPEQVAVSTPQSSFCMPCRLLYRQRAESPEVSINEPALGTNSGGGRPRGNQRCEADDNYQTTRQFRTESDIASNIDLRCLNSQLDKYWYSRGHTNS

SEQ ID NO: 998688 - protein, 376 aa, Homo sapiens
GAPAAGQAGLTSTSCLCWALTGDVHALVSRRTLAASLSLHLSLPPAAMAAGCARWLCGWGPQAAMAAGAGAGSAPRWLRALSDAAERGASCARLGGAPANSAAGVSLGRARRCELYLDLAGSSGSQLWMAPNSITLLGLAVNVVTTLVLNLLLSHGPPEEATILGHDLPLCTWELRSTFNPGHLDCYSTGDNQQPQQGNKALGTQLSVGTLIVTHWGVDSSFPARHITLGTAEESIPNWPASPVRQHLTTLHMDDTPPVHSFHYGAMVRTIQTMRATSGQRTLKGSQTRGHCIARTTGHNRWPLARTGNNTHNSSCDAGNQAQRRDRSAGTSGTGTTPNAGRTTHGEIPYIRQARLNRGQRAPPRHIGPHQTRTPR

SEQ ID NO: 998689 - protein, 309 aa, Homo sapiens
MPGREQAWMPACGQWDPVTYCKCAGGTWLTHLGSHESSALLLARKHARPACGQDSRSSTRHQGHTTTAMAPSRQSCEATHTNDHRQSATEQGQHLRDHARTGPCGAATVNGSGLHLTIAIAHRKQLQRSQPCHALGGLHCPSYTPAGTSRATACTRCDRDSPSDPPSAASRTTPALTAHPHTAVPARHIINEHKALSPPFQRLRALSRTARHITGPEVALAQAITLPSGTGLGGANEPGKYPRQGPPPGNAPDSAPAQPRSPDTALGELAGRHPSPWAPSHQLQPATAPPTQHTPPTHPRAPHPEAAHP

SEQ ID NO: 998690 - protein, 171 aa, Homo sapiens
MFIAPRELVGLSQTSDSRARKTGHCDPRAHEIQLVRIFLHFFPLLPSTRTRILHAQGGLFATGIGGAKLFQKGQILRHVPHGRPSAVNQRFIVSPTRQSFVRRLLCNRGLTSVIRTPSRAATPPVKENILDSSGLPLAVPQTRSRAHLFTISGTWCPPSLHAASLCFLTSV

SEQ ID NO: 998691 - protein, 109 aa, Homo sapiens
MPVNFRNLGNPDAGQHSLCRLTELHRHHALAHSIVHKPFELIRIRNSTTPSSQAFSGPHALYSPAIFPANFVSNARSREPPLKRVSGSFAALCPVGPNPARLQSPTCTP

SEQ ID NO: 998692 - protein, 76 aa, Homo sapiens
EALRQPAQGVSAECGRESESLSDNRENKVSSVIIVNDDRVLNDNIISDERYQIAISVDIGIIAVSDFKFLNVICCM

SEQ ID NO: 998693 - protein, 111 aa, Homo sapiens
  misc_feature (1)..(1): Xaa can be any naturally occurring amino acid
  misc_feature (71)..(71): Xaa can be any naturally occurring amino acid
XRLDAHMTTYRDLHEATHSSLSEEHIQPSRLFHKVPLSPLLFIEEFTPLMYIASKEHTFVPKAHAHRMGLXARYDCTEMSPGERMDWTMEYLTALIHRCIKPPVLKATIRR

SEQ ID NO: 998694 - protein, 46 aa, Homo sapiens
MTANSLYISNASVRHNMSNSIEERTTTYNGGAKKRTGKTTDEKTND

SEQ ID NO: 998695 - protein, 69 aa, Homo sapiens
LKAGAVRERRLSVDGALISVLEQYQIYVMMPEEYNTKPRSDKATRFNFLAKSSVYPYSYAQMSNTYIGV

SEQ ID NO: 998696 - protein, 76 aa, Homo sapiens
MALKCNRSSAQGSLPCCSNLAPTNAQHSAGLRFLFLDCPKKEHVGPSRGFREDPIVLDGRVGALVGPEPLWLLGAP

SEQ ID NO: 998697 - protein, 121 aa, Homo sapiens
  misc_feature (47)..(47): Xaa can be any naturally occurring amino acid
MVAGLAEGASASPKVGHFARSGGASRTLGRTCTEWPVLSLEITVRIXGSVKQKDSCYMNKRGKTTRYVPLDTRALHITLNYRDSNDVTGNRATCIALRRKISYRGYHVIRISLWAVKPGNS

SEQ ID NO: 998698 - protein, 343 aa, Homo sapiens
MTTTDSWPDISDTMQKAAEHGREETDSQDTEVSTARLGEDTLRTRQRGTRANEDGLEKKLDDIHSIARQVNTKTCITSGETLRTEARIPVGPSTGANGNGPLQAGLDVEVQGIVERLINCHRTPKEQKTGKTVEARTTKRTKGIAKNAKREKAHRMGEYMGYRRQGGQQGTASDVETHDGKSEQRHSMGPEATLHHRRRVRRARKAHTGTARFTRGHARHVSHQKRSGDTVMAQRRAVATTQGTTESSKEKQRAKEVSGCRRRGEPGKVSRWGHTKVRYQQLGGTTGWNPRENTGDERARPPDSAQSDSVTRAAQRRGTIVTDPMRGKPHRQRAAHYQRERTR

SEQ ID NO: 998699 - protein, 88 aa, Homo sapiens
NSYDTAEERQTLVLLCINISIINNNKDRTSIEHIYCRLILNKQRGQLDKIAKEDKYEEKTKDNKREQTQTTKNIHTTKKDKNRRTREN

SEQ ID NO: 998700 - protein, 86 aa, Homo sapiens
  misc_feature (71)..(71): Xaa can be any naturally occurring amino acid
LYRAGFDGVMSHRKFSDSRRHGSRRLILPRKAQTAGNDGKGEELPLRMTRPSRSTLTAFLGSTIGWLCTHXSCGERRRWLGDSQRL

SEQ ID NO: 998701 - protein, 147 aa, Homo sapiens
MVQLFRHLSTITVGTSKHTWIQWHNGAHRVDLWATVRLIQLRSRFPQQVIFPASTLVKQEIVGRLLSQGGASNTSACRRHRTWKYGGSVQRLHYLPAPNNQLLSAYVNHLNRKSAPTFMDQPISPPELVVHTPFPSGPLNQRRHILG

SEQ ID NO: 998702 - protein, 210 aa, Homo sapiens
MRTSGASASGPALPLDPPDKPVRNPLTRPSQRKLLPHKTRRGGATYCTGTSTNNPEPMDRDSSPNRSVTRYLCPFWGTTFTQHSAGQRNHCITSCKPASSHLPSLGYSTAWEIRVYRELRLHSHHSQTYPEPTEIAPLQRLSLATQTRDTHQTSRTLQNLPSCKPALAYIGAPDATEDTFRSPNRAGSAGCRPSVRPTGAPSKATPSDTA

SEQ ID NO: 998703 - protein, 305 aa, Homo sapiens
LPSHLALGSCLASRKQLHRGGEPRRISQLQSNSNTEDSAVATMGSVNSRGHKAEAQAGDDGPGTRAGQDHSSFTSCKGHQLLETLPTVGFNAGASDSSWDTLSLTSLANRCEGQAPASEPSLERTIWTGTDLPRATLTGTATDEARLPELKPAELTEVLNDPNMAWRPLLGAGHKAGGTCCHFRLLTASRHQADVYEKNTTDQHARELRGHDEPLTRRHGACRRHLQYRLLQPSLHILAKPSNAALDKGGTSPPGSARTSRQHRRTKTHGTQDRSAARSARRQSPTHGEKPSGTAGDKLDDDRHT

SEQ ID NO: 998704 - protein, 292 aa, Homo sapiens
LFFLPTCEEGFLSSPSPSGMIVGSPGGLPSPCRNCVGQLNLMFLFEIAQIIEQDFFCERVVKTGHNYQLVYDLSIVDRSVVTHPEFFIVHSISQAECFCNLLSQCILRSTVPRSGCLCSVYSLNRPYWCHSEQMKVQDTLCVGHGDTPELGHSTWAPWIEVTPKTPRSYGRERATDAATRTWSFTGGAFRGQYSRNGTLEILLGNTKTSERTQYRHLRLYLSYLSNRRSYAGSSICRATTRSHVAGYEVALGVAPVDIDRSRHTDRDDISTRRKGPVHSRPSGKERLAAHVE

SEQ ID NO: 998705 - protein, 137 aa, Homo sapiens
MRFPKCLEFTKRELRRIVLANLGTVPFNWQRDGSLGSPCETGALITCCVVLCAYLIRIEGFSLNTKIVQGQSHGPRNPLVEELATGRSGATEPLDVSLRFRSSRRNAGNCSISGPSKCACQFPWLDRIQTSSDQLGR

SEQ ID NO: 998706 - protein, 120 aa, Homo sapiens
MCLVNRARLVSLSPRITLFSLTRVVNPKAFSTAKDRHGSDESHVALLHLQIYAALNKCGALMKGYGDPLNLKIRGSKLAGNARVIDMSPRVGLLPQEVESLVSYTSVGLMLPKQKPFESK

SEQ ID NO: 998707 - protein, 270 aa, Homo sapiens
MTSLPLRILSSILITLTLSRINALSQLHSHPLPNRLNLYTHSPFTSHQASYPLLSFSLNAHFTYITLPPPPLLYPPLSLPSTWYRSLLYNQKFPGSSLHLPAPLLPTSPFTLPPCAPNRAHLTPGHPPRSRPPKGAHSHARPQPAASPATSFHPQPNRCQHNPIPAPLSPSAASPNTPPTISIPLQHLFTPPIPIHKNSTPLDPNYPPTHPLPKNTHPQIPPLRPITTPPPPATTPQPPPPQTPPPRTQPATTTQHPFPSPPQPPRAPPH

SEQ ID NO: 998708 - protein, 112 aa, Homo sapiens
  misc_feature (64)..(64): Xaa can be any naturally occurring amino acid
PDVIPSCADVLCESADCLYIITILLFLFLSKCAVTDEALNGIIRWSIGAVTHPVSAPSNYSIIXLCEAKRTDRRVYQLVDVVGAIIDVDTRRCHPCVVLLDESRVIVLQGAS

SEQ ID NO: 998709 - protein, 284 aa, Homo sapiens
LLTICMSSFEKFFGHEIYFVPMCEPPCPAQDTKSSVQKPQAFLYTNNKQTESQIMSELPFTIASKRIKYPGIQLTRDVKDLFKENYKPLLKEIKEDTNKWKNIPCSWVGRINIVKMAIPPKVIYRFNAIPIKLPMTFFTGTWRRTTLKLHSGDQKKRKRKNNKKTRGGGRKGPREKSFSRHPRVGARGAHTYGQGNTWPQDGCLHGEETAGHRNKVVAEKLPTPENEKREAGGWKTHEQGAKRETNPGREDHEEGEVKGGTLIKRRGDPQGAGAGSITNRPGTA

SEQ ID NO: 998710 - protein, 257 aa, Homo sapiens
MGLGVRGWGRPLTDCGHRPDAAREDHPGILGEPRSSGGHEVTPTLQDPTWHPCAYGGQHHCGGFLSASPLGGRRSAQLLSATETSALAWWCWAPEVLSTAEPSEQVFGIDALTHASPTTSAMSRANDIWLLRLIGSAVLGPAGGGMLRHAREKGQDPTAAGTRQPGWLLEADVSDSRGGIAAMELMAGQRSELLVPGTSGERAPGNRGTMTLTHGSGTRKWGDRPTERGLLAPADIRRCPLVSTGNRSTMDFVHIIG

SEQ ID NO: 998711 - protein, 71 aa, Homo sapiens
MTGHAETKQLTEMLPSILNQLVRTSLTSLRRLAVALHKQSVDGKAPLLLDEDDDDESSMILWRTFDERSRM

SEQ ID NO: 998712 - protein, 81 aa, Homo sapiens
GAVVCCINPVSAPLRNCSVYVSLQGCCCVEQASETDSHVSHVDSVHVMADNFNPSMQLADIPETSNDNNWLYYVRRIGVTS

SEQ ID NO: 998713 - protein, 302 aa, Homo sapiens
MARGPKKHLKRVAAPKHWMLDKLTGVFAPRPSTGPPQVERVSPPHHFPEEQTLKFALTGDEVKKEFALQRFIEIDGQVRTGLLTYPGGIFMGLSIKHLAKDGEKNFPVLDLIEHPKGFGFCWYHSVIYTTLKGGAQGYTGLVAKVEDKESFGAGHQKGNSPSFWVELPLNGPGTNSWLTPRIALPFNRLTLYTQFQDLDFKNDLGKGFTWISINSSTTGVNLVYIGDLVQVLKPQEEFACEFTIQQSRHLVDPLTVVHGEKMPNGKQALATRTFPTCGDLAKGNQTMDFSSPKDRVIRLHHC

SEQ ID NO: 998714 - protein, 44 aa, Homo sapiens
MPLFETKKLNSAGNFHFESAQQLEVWHTKPCSRIGAKKDFESTV

SEQ ID NO: 998715 - protein, 147 aa, Homo sapiens
MPEMPEDMEQEEVNIPKEEGSGYWCHVGFLAELYTKNFSRNNWHCQLGCGFRTEQGPKFEPGSICWDSELPGSSTIHSMNFFKAPMLIVPFVQAEEKDPDVRQKNHASMLAFFKLTLWHCLLGHIYAKRESHALLCFGNAFSSIVTL

SEQ ID NO: 998716 - protein, 122 aa, Homo sapiens
MASVVPVKDKKLLEVKLGELPSWILMRDFSPSGIFGAFQRGYYRYYNKVTFHVDRKGEHLGGLTMVAGHATVLFSLLLFPLTKHLNATTGFRKITNLKREHTSWKPPRDPNDPFEPRKPPFP

SEQ ID NO: 998717 - protein, 204 aa, Homo sapiens
GSGWTAAEEARRNPTLGGLLGAGSDCCCGWEGAGSAAPMERHGRAFRTSVSSAWEQAAGGPPKGPGGKEPNWRRPGEQGAVRLPAGGASGLRGQHEGRRIRTGGLLNRRGPTFGSSPAKARFKKPLEGKKAGAAFSSQCVMGHLRLFRLRQPSWGPTAWVINFLGAPINEPFHLGLNRTETTRKTVCDNGPFNTKPISGTGLPV

SEQ ID NO: 998718 - protein, 126 aa, Homo sapiens
LVRKRVCRQNTGVVKTTPKSQTWERQRSTHINIVVIGHVDFGQVPPLTGHLIYPMRVGHRTKKNHLNTHILKQRKGFGLETWGTHGAPFQRYWPWGFYGITTWNRLGAVGNGWVIQSNLDIIPTLW

SEQ ID NO: 998719 - protein, 178 aa, Homo sapiens
MRLEMFDKLPQRKCLMTQLDHRMLLSRCNNDDYVFVCRLLHCPLPGLQEDKARLTEGCSFSGGMQHLRSTLSQDEWETSLNKHILQKQRQAEELIHTKKKFWAAGWIPPSGRSALHRTDPVCVVARRGAHNEESIKQAGLQQVIPKGKNFGAPNHTGSREFPTKYKKPLRSNTEGFDT

SEQ ID NO: 998720 - protein, 162 aa, Homo sapiens
  misc_feature (162)..(162): Xaa can be any naturally occurring amino acid
MSLATQLEHIVGDGCAVTATHVARTYGERHEPILLVTRYAPYLWSTDRRTTVLRDGHQQNNEAWTRHAHQRSGAHSSRPTVHAHGQDKQQEAEALTNRHDKATRRGKITHQNKDKKLIKSTRHRGTARATQLTIPQHNQHAKTRCATNLTTSRDTTDGEDCX

SEQ ID NO: 998721 - protein, 283 aa, Homo sapiens
VTRDGCLLPDVTVEMPLIPCSGLVACCGSVCVTTHVADPEGGCLRRACKLEREQCPPSLVEPGDLMHGNCWGHLPGMSVGVMPSSLEAAKLTLGVRKCSPFVFPSREDLGSEVLSCLATHDDVARRDAIRQVVGNTDCEAQGHGNGRTVCLCTTSALTPLAAHLALRSPGRPDKNDGEKPPLVVVLSAPDPGCINSSRHQRMTTPFCDYMELPISPERCPYSEHTHQHRPRKWHLTTEDTTFRKLPPATWAYTTEFYRHFYPATAKRPFHTTNSPITFYYCTL

SEQ ID NO: 998722 - protein, 273 aa, Homo sapiens
GLNDHRMTGCRVHDASLPSGRAGAWGLPLPPATCHVRADRAEDEKPLVLEMLEGRLCKDTGKTRGPPLPCTLACLALLLLAAGKPAVCAFVLVFLRPGPPPAGVPWLWPTVNAGAYGPDVGSLASGGWPGEAPGWPCGAPVTCVRVLALAPGHNMQGDGARVSRLSVSRWHRRRGSGHGGCWPSLEARASGLGWGHWGDPRDPATWSHVADEPDLAGGMGERGELTFRKRDMERLTRHVPTQPSIVYCRAPMTSVVHYGHPDLTARQILTSAT

SEQ ID NO: 998723 - protein, 183 aa, Homo sapiens
MLSWILPRKEECNDHGLRNTQTCQPLRLSGLCLALMGAIDSRYIHYLVVQLIAIWSLRDDPNSAIPDNNRYIMSIFGRRNRRQHAVNNNKQHQQQPAADNEQQHAASSTQQQQQQAAAAAASGREQLTARHKQSIVPQTRPHTRGKPQRPSNHQSSSELHKHYSQLAPLLENQLSTVIHFTTK

SEQ ID NO: 998724 - protein, 479 aa, Homo sapiens
  misc_feature (276)..(276): Xaa can be any naturally occurring amino acid
GQRPLFGLPSRSRDVGRTAVDQGFADIRGESQLCERSIAGASQPSLVFVSVLRCCLPPQMSIALLPGRGTSLLDIAFQSFVLCGTLRAFVQLVITSRMARAPQFACEHVACQVRNRVRRDVVAFPRIRGETLALPMGRLSLVAYSHPLVMSRERRRVVRAPSQTRVVCPGLSFPPVYRPSVVLRSLRYGAMYIAWESRSLPPTRPMTGGVSPWHLVLIPCLMTPGSGGFDQFRFGPIWYSLSDVSGFPRGEASREERGSTQVFPLLPILVSLKHKXLKCTPRLRKEGAGVTPAPKQGLGIPWSLFRGKTLAQTNIIPLAPVKTLLWRPPPGAVRIARSPWTRRTLPSSLEAQPGGPCFVASHKAYFTDVPPLIEEFSMRGVCFHLGPHTCVSVVAPLCRPWGPCLFLPLGELRRASIPGLLLLPVRAATLVPSPGAFAPERARRGRPGGPSFPCVHPFHRNWGVYRKGARHLALRAVSP

SEQ ID NO: 998725 - protein, 98 aa, Homo sapiens
LYDGGARVERVGPRGSGKRQELRESLHSRLKAICAVAVLYGIDARRLVESSDSRNGKQDMNERCLGVHKRCATGECNEIVRCSTRGSCMGVHTQTVVA

SEQ ID NO: 998726 - protein, 138 aa, Homo sapiens
VWSVFRCPDTDGQSQDYLNAEEHSTMTAENLDSDIVSVAASCPASSADLDATTLQLLIRERVCSKLTLAMISSMDYYSSQWLFEGTIGGVVIYSGLMGISLYNTAAQHDLTKFENRLLVLYVDQHKHTIAYVRAHISG

SEQ ID NO: 998727 - protein, 270 aa, Homo sapiens
  misc_feature (51)..(51): Xaa can be any naturally occurring amino acid
MGTQEVEKVQAPGPVKEIGPWFTVRQKAPVSQFVVAAAEVPYGNRLEFFPXIHGVEFQNKSLTVTSGASPERTSDLVKDYTDLEVTGASTQARGEGKQQVSVALISSSIRVAMLEDKMGSASSWQGKPPKKINTESSRLESRSPEKCVLVNLSKVGEYRSEHAILDREKGAHRRLSKDHTTELLRMCTCGMSEGLSAVFGIRSYPLTNLAMTGCKAKTEKPMMLKVHCTFLKIGVAMLKGSHLPRAKRIGPCQVQTFSRGASHGYNDQKA

SEQ ID NO: 998728 - protein, 101 aa, Homo sapiens
PAHDPYQGARLSPPNDLRRYSHVICTSDRLDKRSLILEPTNQSHRNHYTKEWLRCNDERSTVPDGPSHITTLSQDKAFVVRCIIPYFSYLSKFCLLRRGFV

SEQ ID NO: 998729 - protein, 240 aa, Homo sapiens
MVSGREQREERRRPERRQDEEGEGRGGERRGGRSTGPGGGTRARGGEQQQQRGRGDEGVENEGRNGRNVKRGRTRRSGDVRMGKMREEYERGEKKNREGRREEMKRGGMKRKEEHRRTTPERRADRRQEAKDGERRPGARKREERETREGQERTTKQRNGARESQTTGREERQRERRGENRDEEEGRREKDQYANEERRRGERRRRKDKQRMSKREEIKGGKRQKKGEETGTRDTKGEEK

SEQ ID NO: 998730 - protein, 110 aa, Homo sapiens
EERDGGALEAECPLAVPKDADALLTMRTPGGSRTVLMISAISSETELSHRVVMDERAYTNWYIDAYHCMALIGVLHFQLVHTSVERISTKLVGMHPCVVLLYARGRSLYL

SEQ ID NO: 998731 - protein, 120 aa, Homo sapiens
DAHEDSLFWSHLDTVVLTEITLLKRTSYFSELIFFLAGISAQCALDNQYADHSVCVSRLEIACSCKIGKRIDCIPYSPYQYLQAPYMDIRSDWLMIATLRDALPMISSRVLEITLLRALQ

SEQ ID NO: 998732 - protein, 297 aa, Homo sapiens
KAEAKNVLVLSDPGLRGFRILGLLSSVGLAVLHEVSIRAWSPDGPRQRSQSCSCPKGHVDPCVCLQEPQAGRGDVMSVAKVLGLNRHSVQSLGDLRRREDLVLVVIPMDFAPEPVGARLYLRAPVDVSDIETGGPEFRVPLVIPARGCLQERLGFVEPLAILSASGWGSFAPGNPDSPPAARGSRFRLIVLRWCPGRAFQPLIDVNCVLPSRLSPIGFSRDPPSWLCDFRRQRLGGFQLEAHGIRSSACVVTALVIRMLIPFTSRVGVKRALERNSGNLVSAVRASFYWRSPIGCGP

SEQ ID NO: 998733 - protein, 109 aa, Homo sapiens
MRTLRVAPEYHGQMNTHALRMRSDHSDASMLYEKKSFLIKVFDTQMCMFLEQGTTVMWEAFRCLVWYTCRGQQLERTLQQAGHALHEGNFVGRCHCRLMKHILRPEIYL

SEQ ID NO: 998734 - protein, 80 aa, Homo sapiens
MTIDGYPRITIYARIEQRGRFKFPNLIDHPREGYLWIRKHSPQGPLQGSRYEKPPNKRFKSPMLVLNEGIDPPSITIEWN

SEQ ID NO: 998735 - protein, 109 aa, Homo sapiens
INPLAQATSSTLPSLQAHRHHTGLSIALGFFCILEVGPRDTRTSDYAFESPKVLEPIKKYNPRDDHHDRHAESKVYFPYTGICEIALSINPFISSISFVQTRWTSSGDR

SEQ ID NO: 998736 - protein, 178 aa, Homo sapiens
MRAAGDESSEPLIAECVYIPFPGQDIGAGNVKGGNVSPRHVCGRDTPSDDHFDKISSKRLDGIMTSRHERSDRVKDDSGNRSCLKHVGYWVGPNHAENCGHLNEVVSNFKRELTVTLTWLKVAPRHGLTQMAVRGTGPLQVYVTNDDVETLQYEDVLDDDEPSSVSCYADLALLVHAL

SEQ ID NO: 998737 - protein, 76 aa, Homo sapiens
  misc_feature (76)..(76): Xaa can be any naturally occurring amino acid
GMVGECRCRCVGRFVLEAVFVYHHPIRRYSSYHNVRCGHPQMRIDSRLEHWSSNDSSLGPPIHVSLAGLLEHTGPX

SEQ ID NO: 998738 - protein, 197 aa, Homo sapiens
  misc_feature (30)..(30): Xaa can be any naturally occurring amino acid
  misc_feature (79)..(79): Xaa can be any naturally occurring amino acid
  misc_feature (129)..(129): Xaa can be any naturally occurring amino acid
EVLLRAYRDVRCRVLSEDVLHRWLNKLGSXQDILGSDEVAAWEFSTEIEIERSGAEADSSYANNVLTDRASYARALRVXYRKCLVQMKVRHYRSEGVQDQYKSLSGLPNGVKTRKGGGGRLVTNCRRHXPIGMSMMGICCGIPVEKPTPRAFTGPLPTELVRFALEHQSRGLKLHRKGRFPIKELWAIKSLRNERPF

SEQ ID NO: 998739 - protein, 142 aa, Homo sapiens
MVVVEVGFLPGMKQIGNVAALRLELFIDLLGFLMSIQDMGLLLANVCSLGYELIAEAEYPQGGVGYDINCGVRLLRTDLGSTVMSSLCQEQTLPKLLFDHIPVELGVIMVCIPYEMPKTWRTPWEMGGWTGPSETGMPGLND

SEQ ID NO: 998740 - protein, 114 aa, Homo sapiens
MRLCVLLSPGCLQNWWYWYCSCWASGDLVFSNPVWWSPLLPVNVTSGSHNLIVRCTMYALSEALPWGPCGLQWSRMCLSRMFVVATLLVTANDDPSIGRARTGLSIVVVMVIDP

SEQ ID NO: 998741 - protein, 89 aa, Homo sapiens
MGAFESVFHSAVERTEVARGLRDTVVSKEAPRERGALRPGQKRILPVNKRPPGSIEDPPEKLGVSVKETLGFSTRCEGGPESSSRGVVD

SEQ ID NO: 998742 - protein, 103 aa, Homo sapiens
  misc_feature (77)..(77): Xaa can be any naturally occurring amino acid
MTAQSFHHRLAEEWSYQYTLVACLGTDSAAVGGRYDFWIDCFTVTLTQWDVSCYNWCSAHHRVMYVSVMVCRELCVXRSGEYESNPRAFELQASMVKIALVGE

SEQ ID NO: 998743 - protein, 149 aa, Homo sapiens
MVSRCSRSVQVSSSLLYVPCSRGPPVCGPVYLTGIGEIHEARDARTSLVEPSKMVTIWIIYGDVAEELLFWRQCAYAWYILPLADICMRNADVHDNYERDLVFLGHCCALHAMTLYHVVSEQRNKKPWNIEREYADALVQTPQVGVHVA

SEQ ID NO: 998744 - protein, 135 aa, Homo sapiens
MQEVGVGLYPRYLLCYNRQTVTPTVRLCTMGPTSYCEQSETSRVGEELTICYLDMLMTSEERRKQLRDQYCLELDCFRCQTQDKDADMLTGDEQVWTEVQESLNPIEELKAHLARGSRVVAMCQAIIRSNSERVT

SEQ ID NO: 998745 - protein, 69 aa, Homo sapiens
ISILVDSRNGGHRVSAPEPLEGCRKDYIWVVSRDSCSCVVTCTPVEPRYSSHRRELSSVEARYILSRGR

SEQ ID NO: 998746 - protein, 253 aa, Homo sapiens
MTEPWLSLPGPTRGSTTPPIYAHYKQQHPPARTAPLTYLVPKGIACLHSAITGKDTLAGQGSSYKTTKAHAPANLRQHEPPERLPATLMATTPTLTAPTGHAPHPPNAHHPAQRATTTNALANRPERTAPTLHSAPSSGPTRVDGPTFERFTPSTATPPVSRHGRHERYHAFVLTGADHGSRNEPNSKRQSQLATPHKERPETKTERPNPSTTYRGHEHLKQRTQAANSRRPKCKTAGHRTTDSKQQRGNHTN

SEQ ID NO: 998747 - protein, 100 aa, Homo sapiens
MEMVGVTSLPGPSGLLTGTTFANGSLSIACCPVPQAVTVRAPSGCKGLILEIALKSGLARKSTCFRARRFPIGNRAEVDELSSDLGARTQDYNKPPKCLR

SEQ ID NO: 998748 - protein, 242 aa, Homo sapiens
MAPSRKFFVGGNWKMNGRKQSLGELIGTLKGQGAGRHRGGLCFLPTAYIDFGPGYASRRLPRIAVAAAKLLKSDYGACTGEISPGMITDCGSNVGGPGALTARRHVFMGMSVLMLIGHESAPMLWYRDSEYIACIGEQAICNEGNCRSREKVVCRARRKVVADSVIGLEQLSYLAFEACVWPIGTCPVLLTRQQAQEVHEKLRGWLKSSVSEVRGSEHPFHLLQGWDWATARNWHPADVTGY

SEQ ID NO: 998749 - protein, 43 aa, Homo sapiens
APLAWTTISGSSMSLALHHPIQLMVVSPDWAFAHWINKSQTKN

SEQ ID NO: 998750 - protein, 141 aa, Homo sapiens
MIALIASPVLVQTRSEIPSHNEVDLVGQEIALYPFSLVSDPVLVDTISRINSKIFSVEINSITITEFITYKVYLDLLIGQGVYCKNKPQGIIILLKPATTSSAPILYPTYWFVLVGEHKREGLVFTCLEVSLRGLNLGCPK

SEQ ID NO: 998751 - protein, 75 aa, Homo sapiens
DPSCLAMLEVSPVKRHEDGDPQLDHVKQFSQLVVVRHRATSHGPIDEYKTPGCIPTLTALAPSVVLCERSTPYRG

SEQ ID NO: 998752 - protein, 109 aa, Homo sapiens
PRSHINVVCLRAAIIHNDYSDLCRCMINVQPAHPQFAWYAKDGLNPEVCTFNPNASDGEILHSFHALIGISGYYYLLANARRRSLTYRYYKRLRRTVSIAPEKSVNIKV

SEQ ID NO: 998753 - protein, 163 aa, Homo sapiens
ESGPYHGLDKTHKSVKIAPGAVVCVESEIRGDVIYRTSDSDPPYRQELLSEARANELMGEGKLLEEQVGLIDRICLTQILSLLTPKIQNQNYDHCTNNVFDMWVVIPNAMEVWEYNNVIDSRERICRHDRNVTVCRARWLQSLAACVQPTSIHLNASVPDEYG

SEQ ID NO: 998754 - protein, 135 aa, Homo sapiens
  misc_feature (89)..(89): Xaa can be any naturally occurring amino acid
MRTSRYGTGLFIVAVTEKKIIYGCKVDDKGIQRLLYIQRRPIAHSAEQRSEHALRSGSKLAIWITLELQKQSVEHSMVFRSSEACQPVXNKRQSIMEERIPLMRVIRQNPSKYIPWEHKMICVGNLSKRGRKGQT

SEQ ID NO: 998755 - protein, 106 aa, Homo sapiens
MSRIVKSYAPPEPKSAMIHLGERAKSVSKRRISLFRKEEEIRKTTWLSLNSPLWTLGMNICAHSPAWYLSLSSSLGATEGECVSLPSLLKAQSSAGSANALGQQVE

SEQ ID NO: 998756 - protein, 68 aa, Homo sapiens
TGVIPSCAVVSLEQRAFISVRPSLLPKCVPPTRWKIRWIMDMSPLRSRNIFLGCELQADKYYHFKVDN

SEQ ID NO: 998757 - protein, 117 aa, Homo sapiens
MGGTGKILPQSRTSKNRRRGGRRTTGERSITAHKPYSARERRKKLQERTQQTAGKTTATKEREIANREEKHDQNIERKVNKGRTNQRDETDTREQNEGGKRTRTKEGEADAQHDKHN

SEQ ID NO: 998758 - protein, 242 aa, Homo sapiens
AGQPEAARAQVQAGPKKRCCRRCMPTVCSCHCARGGTALTSTRAHWTDRNLCQDCVSIRWSLRRTRPVSVWCTTGPPRKNTVQSTSHASCRWVTVSGHKTRSSGLTCNGRDSLGATDVRMIRGLNCVQGWGNFKAVAFYRYQRANRLGAPNLSIVDLFTQDWTSNARSVLDWDKERCPPAGWSHRKKTVMNWAIAGFRRSPDTDLVSDPFAFSGSPTDLQAPIFFPQYEPEEKPIQIVQGAN

SEQ ID NO: 998759 - protein, 69 aa, Homo sapiens
  misc_feature (57)..(57): Xaa can be any naturally occurring amino acid
LLKHSFVVLISILHEYYDSDGAICLISLTQNPRSFDYVVLRIYHQVTHNRCEATLEXLLDTHTSQMSSF

SEQ ID NO: 998760 - protein, 364 aa, Homo sapiens
VAGPGELVLAEFQVMLALSPRRTLPARCGSRKDSEILEGQPGKEGVEYGAVLLPSPGARSRVTIGADPGVTLVRDAPLGTRQDSCDSVDSTGCYRRIGPSGYYGLHALNPFHRYLPFNRPAMVVQSRTRKQGPRNNRSWGGNHPLVRTIHGKWAVSINELRQRLAFETGQAPYETPPVRTGRQGRGSLADDNTTWHVEMDSYRPDCPQGYVVNEKPVPPNRNVARVLGDLPEDEIGAVYTVKPWGYSLFTVEQKWYDNAKHTDQVFLVMHPGVGDNAKELTCAMKDSSKVLGRLPEKFLPRKCTQTQRRCVATATYTVSRAIVKDRSRVETLGRGPRRGHDAGLGKSAVVWKPAHNGAAIAGCS

SEQ ID NO: 998761 - protein, 130 aa, Homo sapiens
MHVPFLIWPYQIRIYVILKSVYMLDFSEDKKRPRVSDHSFKLAWKQDFYILLTGSLGKPGSLSRVVLSWCHSFLGLGKGSRKKGDLHSVIKSCSTGLCGSIGQGHSWRRTFHHFNLAHERRYWQTSLTFI

SEQ ID NO: 998762 - protein, 188 aa, Homo sapiens
  misc_feature (35)..(35): Xaa can be any naturally occurring amino acid
IEKWELCLERVTQSRKGVNVTPERMLTPGYTEKTXSEMGQVSRQANLQDTACVGADRRSSETRKIRCIRVGVHGSVRLERRAVPYCKTSCKLPTGRKVVPNKIPKSNRTRRPVWYKQGDASKTKGSGIERLHVGDEQKTVREVRIKDVDSGFFRTKESLNMEQDELRKNVENLLDMGAEGWNARRKAA

SEQ ID NO: 998763 - protein, 104 aa, Homo sapiens
MGLWGGRPAPCGVHNGHELYTGQALHQGREERSNDAVGCPSQKDVVRCERRCTLWGAPLQTRGAAGLKHAPREKKSPRGAPMVWNNKEGGSVKIKRAHSRGEDA

SEQ ID NO: 998764 - protein, 240 aa, Homo sapiens
MASQRHLSSEPRINEEKNSSLSILISLQISLIITFTATERNHMCISSFENHTYPHLGYHHPMRQPARTPERRHIRSVCYTLVGSLPLLIALSCDTQQEALGSLNHATTQVSLRQELSKLLRPSKLNMTERYTIAFIERYLFTDSTYDSLEPMSKAPSVETKYLPQYSVKLGGYGIHTPHKCILKAPEQTPHSLTPSLGTIPLWRAFMHNKLPSGLANKTEAYNSGQCSNIVDRAGTITPT

SEQ ID NO: 998765 - protein, 69 aa, Homo sapiens
LSPGVLVEVTVVFKPCVGIPDAPPLMPREDRAILEVHIILRLRSVQLVDDVSENVVSCAEHDKCAAPKL

SEQ ID NO: 998766 - protein, 89 aa, Homo sapiens
  misc_feature (70)..(70): Xaa can be any naturally occurring amino acid
MVTGQKKKQLKKEKNESFGNHKNTEKTRGSFPKPRKRLLKNPKGGFALLHDNWLTAKVDPSRVYERDCKXSFHQRGLRNLSFSEETTDL

SEQ ID NO: 998767 - protein, 113 aa, Homo sapiens
  misc_feature (4)..(4): Xaa can be any naturally occurring amino acid
ETRXHVFSSITLNEQGDRVYTLKKFDPMVDKTKGNPLAFQGPPNSLPPGFFPQELTKITFLDHRNTIKKRFKVLMTQQTAPPVLLEGGFPFKNLDCHFLPVLGLTPPSGKDFR

SEQ ID NO: 998768 - protein, 99 aa, Homo sapiens
MRTGMRRIGMAILKRHGDIGTCRFGRSTPFTCDECHENPCALIGNYASIVRTAQLLVLLPSSATAIAGASFVLYWYSLFVIPLLPDVKVSRFPNLTISS

SEQ ID NO: 998769 - protein, 141 aa, Homo sapiens
RLTSVRGGSCGGVLRSSAGRAEGCVSGPDCDCTGVCVRAWEAMVSAALGAPVGGGAGGWASPRQRHGDLWFASAPWGPRLWTRECGLGALGAPNRGSACPGGRVRWGGPASSAALGPCLIRERTPERRLPLPWAHVPCAEQ

SEQ ID NO: 998770 - protein, 74 aa, Homo sapiens
  misc_feature (73)..(73): Xaa can be any naturally occurring amino acid
MKHPIICRLIHFSNSENINNFHDFEKPFASKAKSPNSRRTLHKPGVTIWMPPTLHTFEEPVYIKSRQKRKEIXT

SEQ ID NO: 998771 - protein, 108 aa, Homo sapiens
MQKLLRGSRPWTGKKFFVGAKRRPITCPNKREKVNKEFKEMNEHGLYLQNYYSEWKGGRKNTNGISIKTIPRFHIGCLLKTEVLLQNIKRGIKSCLSTNEKRRRTVLD

SEQ ID NO: 998772 - protein, 140 aa, Homo sapiens
MTLFRNTSQQELTNTNISDAREIETAELSCPASYLVLIVLPRSRTHPLHNSSEVNEPSLIHQNQLAANGTEPYEYTDYGGLSLQLLSYFPGLFLEPGRSLLTSCELLTRVRCMYSPLEGPRFRHNSYITQTSCSHELSPH

SEQ ID NO: 998773 - protein, 340 aa, Homo sapiens
RSLYASSTVGAARRNHVDKSEPMDHGSVILVRILGHDVGALESIRQENERTGRLTDAVLTQLPRWMFCDWSIDIGMLIENEEMISNDCRIGMILTVYGTTVTGPSDWTVSRIFDKNVRARGSRKKNGLGKLTGACLLPVSHKVSITSDTVKPSRRTAIAWRKRSRSARLRSDTSAVNCTPLVDARLTTHFRRLTGLVFNVGPEESTNSHRELGARATNTKNVRERKGIKGDIPTEATSTAKKNVTPPPTRRTTPPLSGPYPERRGNRQRDGLHNRARLAITAPRRTEKALLCQHLHAQRNGLTNVTADNNLLFLGRPIERRHHQEGRMDALRMAETAPQR

SEQ ID NO: 998774 - protein, 220 aa, Homo sapiens
MFSDYAYELRSIPLIPKNERPYNLIIEYRYFITCSKLLILASSQLFSSVFIQDMPQTIYIGIIPYAIRPTSEINPQSMQLESSISIFFITQVTSINLTSHFPHDIYARKYISAVGRRKRSLISGQHKYNPPIRTMEAGSHDGMRSSNRNSRACVSNPDITIIILAPIKIGIGNRDDPKGWLAKSEHTQWSSQFDVFAKKHTNIVINNLQYTMDVWWATSE

SEQ ID NO: 998775 - protein, 174 aa, Homo sapiens
  misc_feature (85)..(85): Xaa can be any naturally occurring amino acid
  misc_feature (88)..(88): Xaa can be any naturally occurring amino acid
MAPVWCLHGCRQAGSDHCTPIVLHLPIVQGIRWCYTMKSSMSDMGRVGVAARGGRVRGLSPHRPVCELLGTPRWKVSILCEHASXNAXCQGALPSHSLALRRFTHVGVPLQRQLELSESWGFQVEAFKAWRGSPLGGRGGGRGVGVGMGFPPIEALEGKEAIAPNFILGRRLSG

SEQ ID NO: 998776 - protein, 186 aa, Homo sapiens
  misc_feature (84)..(84): Xaa can be any naturally occurring amino acid
AGVSRSFEGLVSGCILGHLWYPDCAIMCVAVNGCAVDLGTLLRGYKCRLQDMLNEEALGGRSFAINQYHDPEGLWQDFPIAGVXVGVRLECWKAWYRLEGRAAGRRDTYDITLRTIEVEAGTRRMRRIVRRVSLRGSQWSDIRYSLNDCWLMVGVEEPHVALKETAGKIQWKTILGSHAFKDNGRA

SEQ ID NO: 998777 - protein, 217 aa, Homo sapiens
MVAETSEELMCTEGTAKASSISCILRLKALNAGDTAEVYYTGADIGLEFVVSLVCRSWMFRRRGCGGERVPRSDIHSKIHHMRWLCNGSPHVFAPLSLVEQELWYHMLGRFEYSSLYILAGAHWWPSTSRLHHKEKYVPMFLLWRLSLEFNSCAIGCGKVCLVEVIQSASLLCGITLWYAVDVMVGKTLYISVGRENIPMRPREASEKREMAWCVGK

SEQ ID NO: 998778 - protein, 75 aa, Homo sapiens
GVESRSSPHGRPAGAPVSPRKRKSLMLLGLFMSVENTPMRPGFNIVWFIRDRCCGWTLGRFLFTIVELEDHVMLE

SEQ ID NO: 998779 - protein, 186 aa, Homo sapiens
MDMDMSPLMSPVTIFSGFETNSADNDYQLLRWIDSTARMSTQLSGRTVSLGAGAKDEWRIVEAEAMNYGTASPISVSLATLTMSVQPTVSLGGFEITPPVVFKVEVVVHVACCILVDSHFSSLWRKDAQVQKDEEDEGCGNSLSMYLGIGTVLALEVVVKVPGPNSKTLAADEDDDDDDAEADDAS

SEQ ID NO: 998780 - protein, 136 aa, Homo sapiens
PHRPAWHLSADASGLRQDLAWAPGAPIPVSVCVQLCGTGLGSPLECQGSPEHAFLKSRASECVAVCLFDLPIAPIFIPPPVSDPRGRQLARECGRAPSDVLPVTSGSLISLVSVGIEPPGYCGRGGLTGEDWGDVM

SEQ ID NO: 998781 - protein, 43 aa, Homo sapiens
MALLRDADREDLKGDIMLLCWTKNPMEMVQEVWTESLREKQVC

SEQ ID NO: 998782 - protein, 150 aa, Homo sapiens
MEFSEHLERIIAFGWLWKDMLIQVPNPNTFGISAAMWGSYLRPGFDTEHCRRRPQFRKLGLSFPRIVLGAISRYEIVDESTDAMCSSLKQLLLVPLPNLLYQAIESRGYAIMSPSSRYYCLEILKADFQLNPKRKPYNGEAQLNIRTTFR

SEQ ID NO: 998783 - protein, 267 aa, Homo sapiens
MWHGRKTECQKCTRARGVPKGVSYPMGGRHVPANRERNITSLRATTQGGKRKQHWGTLLQRTSATHINAGGVTKLLVHTPGTLGSGLTTKNPLATLPTDLFGTRLTRRSVQHIIMGDQPTNGPITRHRQTDARQTHPMAKLRHLAHTRNPETIVYGTLTKTRKHEDQAKQSRQRAPPQTCAHGPGPPDTQPGTQPQPTAPTRANPPYNTPATVGTPGNPKRYNGNTHPDTNRHTKAKTDRQSAGQQKEQREKRQLNTHATTMNPHAQ

SEQ ID NO: 998784 - protein, 229 aa, Homo sapiens
  misc_feature (92)..(92): Xaa can be any naturally occurring amino acid
KNSPHQGAGLQVRASEGPMVEEQGPGETGTRFPKPVRMHVPSNPKTMVLGRCIELRWCRDAGAWRVQALRCVIVKILVKRHLLTTGRIGVGXESAESTQVQSVAGGTSGKPVVWIVGSGAVLWSQTFVSLGCALVLSWTLIVLSPASDDGVRRWYVCDLGVCLYPGGQAGYTAAGLILLSVSTVRMICFIIEDEILRLKWLLLGPQVDCIEEIDHGHGQSLHFVKSSQA

SEQ ID NO: 998785 - protein, 119 aa, Homo sapiens
GPGDWLTYSSQTLTGSWLWMEVQGGPSLGIETVLLIVIFTRCSCHGSLCGCKRYRVAFTNEAEADAWTQYSQRGVDGLFLNDEDDRLLVSPYDRTESMKETSGGKSSGELPSVRLEGGF

SEQ ID NO: 998786 - protein, 103 aa, Homo sapiens
MAFEEGLSLCWEPNLPWGLGVLCDNGVWVGLGLAKWRQKKKTGSPEKLPLKLGLGARRGHAVRNFKTLKFTKPLLGGAINTCVCEIATFPNFQNWNLVFKRGS

SEQ ID NO: 998787 - protein, 167 aa, Homo sapiens
MHDIRCSKSESTEFLIRAAYRGVKSIIAMRKALGYTSLLIPISNACKLTKWPGLEYSTFFYNSQYSKQQQVSQASRNEELLQHYYSVVTNPVAGLVAQIQLLVSTGQTNQMIADELPDEPGTISYSRRKRSVRWERSKTLLAQEEHYLLEEALANKGPVLGPQNKSG

SEQ ID NO: 998788 - protein, 122 aa, Homo sapiens
  misc_feature (67)..(67): Xaa can be any naturally occurring amino acid
DVIIIPSGPGAMVSAEMTMWSAPEGDVEHDSADNVERHSLTQIKNGGGSRDIARISCEENVLRMSEXEMDTRCNGGEELATLGTTDVREQTCDERELDRIMVPRRRTVLVIENRPVSTICLV

SEQ ID NO: 998789 - protein, 102 aa, Homo sapiens
MACTFCGLRATWLALLLTDALIFFAIGTLYASDERKTDYKTPIDQCTTLNPLVLPEYLIHAFFCVMFLVQQSGFTLGLNMPLLAYHIGRYMSETSDEWFQDS

SEQ ID NO: 998790 - protein, 155 aa, Homo sapiens
GPSEPAVGCAPRQPAPRMAAAGARPVELGFAESAAGVATAQRAVPHARWAVRAGMAWARAGLPGPQAPGPASMCGPPLSIPAATAVCAGCPWTPGRLRNRLHLSIFWLPGDARRWHVPGLAEVHQGTSTLTPGEKQPIAYNLQLLQAHTYLERTR

SEQ ID NO: 998791 - protein, 106 aa, Homo sapiens
MAFDTGVHRYCDYLEKLLVLSQEFDLSPLYHSSLGSYPHSYGRRLVSHPKQGTHAPAYHPPEKVHTRVIGRSRNHRRYSGVLSSTLETASSMCVEMHHSRPAKHDN

SEQ ID NO: 998792 - protein, 124 aa, Homo sapiens
NSVVATAQTRIRSLLVRLALAVFLRKHVLTNSPIWLRIEKVQDTCLITDSNEQRTLMRKTPAAFHNECDLNRRSIGRRYQISECVRRQNMLLVQFHKAVVFIDFTSLIAVLTLCKDAKTVGIIV

SEQ ID NO: 998793 - protein, 68 aa, Homo sapiens
FVPGRCALTDTHGHTSHRMRSGFSVKKMCDKDYSVPIRVDRNVHMKGASAYLLVNALSRKRSYDVIEH

SEQ ID NO: 998794 - protein, 136 aa, Homo sapiens
MVEPPFEEIVSGQNPPTLNHVERTFKAKWIDSGTAHSHPSVAYRVWFLPPRELYIYIVVHPTYLIQVSAPQYLAHGKTGSNITYRRQSGAVELTATYQTDPPHTFYIGTIHHRMEEQERMAEFSVTSLTDSLQTNR

SEQ ID NO: 998795 - protein, 93 aa, Homo sapiens
VVGTCRGGRCSESRCHRVREGPTDVTGWVLCPGDATGCAGPVGPGGARARGWCFPRARPCETCVFARLPGAQAWTRDGGWSLGLHKRGKLTWS

SEQ ID NO: 998796 - protein, 105 aa, Homo sapiens
MIMKGCKSKGENDSHNVAIAIVDLTIAVVGKLAKGRIKLGLVEPIGTWLGYMGRIISHRDYRRISLWGENYSIERSNAEGKEEVAMFFSADHIAMEGDACGLFSL

SEQ ID NO: 998797 - protein, 107 aa, Homo sapiens
STGSFPSNSAKMIICKVKTIAISKSFPPPKSSQCLHVDVFLFCIKFTVRISSHRRYFTILSRCKDSSSLRISTYLYCNEFSLVIKSIVLIFENVVLAFDKAKFQLIN

SEQ ID NO: 998798 - protein, 70 aa, Homo sapiens
HQSPTSRRDVNYGVIIRTFTPMAPVQYSIMLPLLYYIGRGLYYGSFLLRQKPENIRHYPPCIATYSNEPS

SEQ ID NO: 998799 - protein, 271 aa, Homo sapiens
  misc_feature (131)..(131): Xaa can be any naturally occurring amino acid
HTLGVSLSCRHVRTHPVCSSVGPLGWRRHDPQLHGSALPRAESGTPGPIMQAGPRPQTHTSGLSNGVMLSQVWEPHVTHRGVQGTPGGFGSYRCITEESPRNRGTDMNPSGAIEQGQILLSRSSDMRSYAXVEYPNGGAYRMTMYGWSIEGAVIPLELVIDQEATVKANSFAGPGRVALGVDAQRKRSRGNLPSSEVRGLANWSPVVLAESRMRDSPIPILESGEYTKHRSSMKHKAGTSPMSSCDLSALGGRYRCYKSQGFFAYLQVKPE

SEQ ID NO: 998800 - protein, 270 aa, Homo sapiens
MERRAEDQQMNGRLEAVGAAGAEARTGADRVAGATGPMKLPCVEGLQASGRRTRYTTREYCQARTVSDPLRRSLWTPYVHDPEGTQAFDSSIPCSNTSKGVHWGSNHRRRAWQTLTINHLAYAQRAHQSVMGRLSTHRFETWTGISRRAWHKKTRVSGKVTRQCTRFRNVQEWPYTIFCSFSKPPLEHRVRGDPGTGGGTHVIAQEAQEFGENNARCVHENEEVDAAEAFHEHLCKPWGACRHALGVLGAILGPIQTLDIRAPPERIGPT

SEQ ID NO: 998801 - protein, 130 aa, Homo sapiens
MEEYWVQSPVGVGGEEFRCQSPNKALECSRGMNIENKKRERRMRDYRFVKTYEIEIFESEIMGDKGVEHVVWVRNCNVSVVSWRCMYESLKHHIGIGRGGHCVEDIYRRRLEAPGPHEKVGQMGFHGKKR

SEQ ID NO: 998802 - protein, 167 aa, Homo sapiens
GERAGRGGGGGVELVVLFGGAGLAYAPGACGDCLDPVSDRPAWLDASRRLTEPQAMGPLSQDVEPGDATTLVCRRACGGDEAEDPGGPRLGECVSAHARHARKNRARARTGTNISLATCRTPGERFEKIVVRGCDMTEWCTHGLGRCEVRRGSMSSFVPRGCYWLEQ

SEQ ID NO: 998803 - protein, 88 aa, Homo sapiens
MRLYGEVINRTLTIHDRREKCGHLKSLVNAILLEADEDGEIKWVSWEDDDTFGERIRKVGSGKQRAMTEVRERRDPRIGGRIGKFRGI

SEQ ID NO: 998804 - protein, 244 aa, Homo sapiens
RLDKSYRYFNNINRLAKEFPLAHRQLEDDKVTVWCSNDYLALSKNPQVLDAMRKTIDKYGAGAGGTRNIAGHNIPTMRLEAELAALHKKEGALVFSSCYVANDAVISLLGQKVKDLVIFSDELNHASMIVGIKHANRPKHIFRHNDLAQLEEMLQMYPKSTPKLIAFESVYSMAGSVADINKICDLAEKYGALTFLDEVHAVGLYGPHGAGVAEHCDFEATVLQVSPIHHKVTTVDSEPVMDPC

SEQ ID NO: 998805 - protein, 166 aa, Homo sapiens
MSVVIGTWDGRLVACIVPCGGLPQVLAQGAPALVPLGPEKRISCSRASKNTTSCERGGVVGELFRCRWAWQEAIRVATKWRRCGKSRWYRGALSDGLRALLVGQPRMVGKWLVQPGGGFYPVECRLQCVALAVPVVRPCLLLALPLGGQCAGLASGGNPALGVGRP

SEQ ID NO: 998806 - protein, 96 aa, Homo sapiens
LRHAPSPLPRGEGPIEINGGLIKYINTVVSCLVFVLGIIGNSTRSENYLEEQVQCRNGPNICDRQLGSGRPCAHQSLSIPIKCLASVLVRGLASWS

SEQ ID NO: 998807 - protein, 242 aa, Homo sapiens
MRVMAPRTLILLLSGALALSETEYRGISITRRVPARTAESPGFIDQLGYVDDTQSRAGYDRRRARVPPEGSRMAPWDGSRMGAESIAEDRETSDTYKAPGTDLTDVETYGTICVALLQPRAEAGVFTSYQRMYWLAEPGGPDWALSSRGYNQFAYTGKDYFGLNEDLKLLDRRGTRRLRITQAHSGKAALLEAAAADEATWRARAVAVVRRYPGEREKTLQRAEHTKTTREHQTVSDHEAPI

SEQ ID NO: 998808 - protein, 42 aa, Homo sapiens
MPFVWEEARIGYGEAERQRRHTHCGMGISKREYHVLTTRRRH

SEQ ID NO: 998809 - protein, 114 aa, Homo sapiens
MREHDEEKQRGAQNRRGFPQEEKDTPRGDREKQQRAVRGLAHKQREKKRRRRGGGNNTQAAVSLESKDDRKEGRHLGRTRNKHGGGTYQRAGRGPQQREAPQHKVTPGARGGGG

SEQ ID NO: 998810 - protein, 92 aa, Homo sapiens
RYLSATWRELDISPACRAMSCQQSVTPPHPGSLNGLQTCVDVANDILANLLQCRCTSIGGLTPLASVPTCVPTFGADGLGDCSLDGNPPDSH

SEQ ID NO: 998811 - protein, 104 aa, Homo sapiens
MAQKSQVVPRGSYPCTKLTLDLSNHPPNSRGVGQSLSKHFEFYHRKGRETFWIACPAGTAFGPLIVPSKGITLEEGYVGFRGLRGPRRFQSPWLGFASSIIAFK

SEQ ID NO: 998812 - protein, 103 aa, Homo sapiens
MRSLNWNSSQPGELHRSMLRLLELVTALAPVVLHGYRPLVQMGEVQKELEPVTDLVQPGTHYLGLLLHSIPIVRLVQPLCAGCPVRRETVLQPFCMSHELLKL

SEQ ID NO: 998813 - protein, 132 aa, Homo sapiens
MRSLRLYTVFRSWRTKGHPASGHAQGQTQCSVCSRPPTEEAPSPIKASTSVVCSGDFYPGAVTVAVEGQIGMPVKAESGRPPNPSKVEQQQSTRAARYLSLEGRAVEVPWEGYSCRVTHEGEHRGEDSGPYG

SEQ ID NO: 998814 - protein, 295 aa, Homo sapiens
MHLSSSWHMIQVHKETGTLPSSRFYNHDQSTEILVEVPLACESHVEKYRYVCRCPFYEEFRLTQVMIIKNSMYREIGKKTESFEEVRPDPEFVHLTTWTQTMQRRYQCQHRIGHYRFRYYGTPLVAGTLTCACNGKLLFVSAGSVILGVDACERLFPVTCRFSTTVPIRVRLSTRPGASGEALLCRQQPKLGDTPWSNFSFGSCVTSMSSGDLPGGYECGTKEGDPYLVVLPQVMPLETCGSPDSHSSQDYTNAELDSGMVRCRTGSSEGQPLGPFLVRHHWRRQIGMNKESSGN

SEQ ID NO: 998815 - protein, 46 aa, Homo sapiens
MRRRLGHERTERCTSLLTNPYRHGIDTPGLRLGERERYPIRHSSGT

SEQ ID NO: 998816 - protein, 234 aa, Homo sapiens
MITPLHSSLGDRDPVSKKKSEKKIWAWAQGFTPYNPKHLGRPRWGGSLEARSSTTSLGQYTGGPHGYNFYLSLCFFLLGLLGLQYFFQISKLVKLLGWARGGITRVNPSTLGTRQGGAYSQRSGNRDHPGYIVGETPVLGIKGPNNFTGGATGGAPWWVPGNPEQVEPGKGPGPGEAEHLKVGPEIRRTWGPPAGVWTERKLRSQEHQTPTEQRKPCAGRWRPLEKRLKPHSLA

SEQ ID NO: 998817 - protein, 113 aa, Homo sapiens
ESLWRPWGASIAELVSSLLEEWLIAVQLTECPEGAEAACVRQIQIAIDWSRNGWQLRAAYYSCGRKSGNRCERSDLFDRRMRSAGRPGLPVIGAGSKNTEAGGSVIHPLRVCT

SEQ ID NO: 998818 - protein, 74 aa, Homo sapiens
KAVVMRRTETGDVFKASASRRILLGGHAERADEDKQTADGYGLKLLVSREVNASMRRDLPRIQDEKTDSNEEAS

SEQ ID NO: 998819 - protein, 184 aa, Homo sapiens
MLLCVWVAKVHLCHVPNSLFPHKSFKVINEATVTWPVNSQASRSPIQFQFSSMMHAVTGNDNLNMESTCGLLWSIFGDPIVDGRSVKEFSPQRILSYRIDIIRFCELDNRAGENRNPSQAVCIQPTDSSRCADPWRRRVELTALYEQNVKADSGFILRAHVSFCACGSNEVRGLDQLCIQQLLS

SEQ ID NO: 998820 - protein, 123 aa, Homo sapiens
MLSTSGDVEALSRVKTLVLQHIGSHVHSERDLLIRNPPSSRFYLGLGGYKHTKTAKRLGMYTLHAQAQAPVSFSDPSSERSTLTKYACWRHWLLCTLVDLAHLSKHQWDNLIETFKSGSARYL

SEQ ID NO: 998821 - protein, 190 aa, Homo sapiens
TLCCAGWGGSGSRGWRAGRRGPADVGGHTSGLVMNPRVSAFSDGVVVRVQQSAFMTFQVDARYAVVCGFEAGDSWKLAPGGVDPSLLMQGRGADQSGPELVLRCGFESLPRTTCDRIDSAQTQFSSLQNRHKNNHLFRVAAGIPFVPFISAGHMGRHEAEKRLPVKEAYKQDPELATLQEDGPEANRARN

SEQ ID NO: 998822 - protein, 69 aa, Homo sapiens
YSVVATVQTRFRSYSCASFREPLAPWAQLLLPSLLLRYSGRFIIPSRCYLDESAMRPKFRCPELGFSSR

SEQ ID NO: 998823 - protein, 84 aa, Homo sapiens
RLITIMSIITIMDISTLGAVSFAENQQARSTKCSYSSCSSRPASTHRKATRVSIGRVTRENRDMPASEDLTRIYRREALSNRDV

SEQ ID NO: 998824 - protein, 132 aa, Homo sapiens
MARAYGQIRMFQKAAVDKGMLHQSLANTVKTPSLLRNTEKISRAWWRVPVVPATPEAEAGEWCEPRRRELVSRSRMNLLPAVELQILVLHNTRIKNNTEVKTWWSSVALREMPIARVPHMRVLSIEKNHVEK

SEQ ID NO: 998825 - protein, 184 aa, Homo sapiens
GAEGVHKGAGPMRVDSLKRPRVPGPRQRRPGQIVDPSCSLVGRSRVVVGEMPVRPSGGARRYCGSAGWECGLQRTVRSCLPFRHVCRFALRIAGSAVTHRFFHLSSCVVLCVGLLGTELVVSISGSHARDWDRSGNVGVCRADEISAPVQRSISVKRIVAYHRVDFVLVARLDVSLDGHLVMQT

SEQ ID NO: 998826 - protein, 77 aa, Homo sapiens
MCVVLVCQKAVTLQRHAALYLDARKVERFLAPYGRQDLHLRIFDPSPEDIARADNIFTATERNRIDYVSSASVSTTP

SEQ ID NO: 998827 - protein, 125 aa, Homo sapiens
IPEADSIRAEMSRSVALAVLARDSLFLRLEGYPRRYIRKIQVYSLSSTQEELARVKISLELHMCLESHPSDIEVDLRERMAEQTVEKVEQFRRCLISKDVVVVYSSCTTLKFTAHREDQMSMPAV

SEQ ID NO: 998828 - protein, 94 aa, Homo sapiens
GERLRRSAEESVDLRGSQYSRPELFSRLKRRDDLWMLKYARELKERDIEKRDLSGSGKSNIQGLLWMQDVCNIDSSGIVVKRCQEDEYSRILAL

SEQ ID NO: 998829 - protein, 119 aa, Homo sapiens
MQGDAHVRRRDPYPRKREMLWRGRSHRTVQRMPNGWVNFLYYHVKVFSFTLGCWDFLLMRVRRRLARGTVRLDRARCRAVGLMESAVGMERDRGGIRARNLYIILLELNEKTTNGGSSS

SEQ ID NO: 998830 - protein, 209 aa, Homo sapiens
MHFVYIIPLFFLGDGVLLCCPAWSTVVRSQFTAKLHLPGSCHSPASASASRAAGITGTSHHTWLIFGMVLVETGFHRFSQDGPQSPDFVIRPPWPPKNAGITGVSHRAWPFFFFFSREDGSLALCPPGLGCGMGLCDSRARLETSCLPGAQGSSPGLKPPGLAGVSGAPSIGPWVNRGSQGGDGVSPVVVQAGRDSRPRGLPTLAPNVW

SEQ ID NO: 998831 - protein, 272 aa, Homo sapiens
MTEDAPSQLGNCHVLGGEHEAMDYQYCKTKIRQDRTKAGYVSRVEPQGTFRERKRGGSLYGGHKFDRIHIGRGYPCAGMGHPGKGVIGLRGYPLKVGTRKGRRTHLFLQQGKHPRGKEESSLGKPVCDVVTKGFHKRVADRSYKTTHPTMGPKRLGKAQLIVTKRARPAHGFSPIINLVSGVQKGSGEDKGKSLANEIVKGEGVINEDGGLTVVVEGEEKMVHTVWFLIRFKWVKMPGLGYLGLFVVDDNGKREVSPCKWSKEILEDQKAND

SEQ ID NO: 998832 - protein, 148 aa, Homo sapiens
MELLGPNAGGALLVWPMWQDVGMYPLRLVAVQRHGQSQTTSGMGYPSAIEHGSDALVPEELFRRKKGAIRYEGPREIRVADYHSVAVNVPLSRRNTTSCQEGLKGPAQLWEAADAMDPLFRLNYSDGITGARVSVGRIEVGRTRTARR

SEQ ID NO: 998833 - protein, 199 aa, Homo sapiens
  misc_feature (181)..(181): Xaa can be any naturally occurring amino acid
QFGGPVGSVSCVSTVLGTETDPGYSLPASDRPPISSPHCIAFRDHSFSGPSPVFWWTMPSTVYYAGCSILPCQPNHETSQEFVMKLFHPNVVGSSINQPGQFVPAVPPNAYLSSGPSNYRALMIVGIVDRTMTPYFLFATKPWSEGVKAPKGPINAVLLNECKHNPVGWSARDLSYASVHXQVKPMTESSDVGAMIHRL

SEQ ID NO: 998834 - protein, 229 aa, Homo sapiens
MRPRVPPDAPVRVLPAKWSGLEQNSGDVFGHAVQERLSAMRTFSSDARVTQWDSTFVRPMRAPQVPVTCDCGEISGGGGFSGCSPYAIRAVLPKALSVKAGVRQNGGPVYLQIELAGHSTDERNDQYGPRRLAAYGETLDPPGGFPNYRRTWLARNAISPKGKRPRAWTLLTGRRSKTHGDGGNGRLGAMNQNADGGAVYSAIEQPATAHRNNASLARLCTGCYHTVVT

SEQ ID NO: 998835 - protein, 121 aa, Homo sapiens
MGRGHLYTGHDNSSGLFTGKSLVDAQNELYELLSKVTKFTLEDGIQSTEEDPYNIVRHSSCFSCILLGLGDNKAGLKEPTAGLLPRVDPQIVLHRHVLPNGGVPASNYPGIQQHRPVIIRR

SEQ ID NO: 998836 - protein, 130 aa, Homo sapiens
MGEPLQLVYVTNQEATERLAHNPVARYIVSGCKTCGPGLGRLPSSGLPGSVRHTERAKELPSALGTEEPCASLDPRADSGSLKITKAPSGTAGPCGESKRESHTWEGPVRWTGLRKIPGERENETLQRKG

SEQ ID NO: 998837 - protein, 284 aa, Homo sapiens
MHKVSDMHLLKMYGHSSATGTPDYKRVSYKHCTDALARLDSSLSLDANTNTCTSNTRKHLTTNRDIQEPPEINNQLERANCFLALHTLNRCTLHQALKSQLLHKLATGDYTTNSRKRRFSSTQQQHYPPRNGLDFSPTHAFGTTSPLDRHAGQQTSAGSISPNTAPKVYQPAIFYLRTDTQPETHWRTNELLHLARKPAQQRPATHPHLSPHHNAITHHGLGTTPAPPHAGHHQPATNLTPRRHTARHPHHNATPPTHALPAHTLPNRPPPPPSPPTATATPTP

SEQ ID NO: 998838 - protein, 105 aa, Homo sapiens
MAHGMALSQVNILSPTGFENPANRSKVNCLVNLLPLCHAPRITHGGRSDVLSYSACDIAHPHRYSPGRAVKYRPATPLLASPLAYNTHNTRRTLGNCYDVVTFGL

SEQ ID NO: 998839 - protein, 96 aa, Homo sapiens
PRLDWMANSALYLRGTACAIFVHCDLSSWLYRNNSKADMNPIDSSPGDMYALQEAHTAIEMSFSASSDAKGRSILPPVDNQRKNGSSVTLEEPKEF

SEQ ID NO: 998840 - protein, 265 aa, Homo sapiens
MIYVKVLSRYRNYTRKDKYKSDIYDAVVDISFGRAYCVKGGLETALGIGKCWSRLEVERVRNPTLMCSQSLGLQLSSSVGIVSDDSWNPLQFVRIADAIRASSGKCDLRGVCLLSDATIRPFDHELIHILCNNIIILSRDGVSLFRPGMECSGVISGRVANLRLHGYRAHSPCLSLPRWLGFAGACKACWAWYSDPIENGVSAEIGQGRSRNILDPQRESVRPRPPQGGWGLQGGEPTMLGAYHIISYRKPIIQNLEVKPQKSGP

SEQ ID NO: 998841 - protein, 120 aa, Homo sapiens
DVLRRESSGFPAFNRCLDGTRRSFPEPGRPPHSQPSGHRLSADTLRTGPRSPDRRSQTTAAADRSTSPAGLSIKYSRHDGPEVLTLRQGAAQKLPTRDFIERRSNEYGQTQYLGSSNAHH

SEQ ID NO: 998842 - protein, 128 aa, Homo sapiens
  misc_feature (110)..(110): Xaa can be any naturally occurring amino acid
GNGVSPLVCPGLEYRGMIWAHVSLVPSVGSSDSPVPLPPKLRGRYNGHPLTIAHCLIFGDFEVKDRDFHYSVAPGCGSSKASCDLQNDSYQPLGPYREQVPWRQSRGVLXAPNVVPPSRGEVPPNSFS

SEQ ID NO: 998843 - protein, 121 aa, Homo sapiens
  misc_feature (69)..(69): Xaa can be any naturally occurring amino acid
VGSSLLCVSQTEFLFIQGYAILFLFYFLSFVFLLIFFVTKRDILVLQATHRAGDFTGDVTDPLQPQWSXVISAISGGRKIHKISLSDYLRVLSTKRETWGAYAHRAHFGRSNTGVLRGAQK

SEQ ID NO: 998844 - protein, 119 aa, Homo sapiens
ERCCDESSSGCPASPVAWTEHRRSFPIPAAAIASPSVSVVHRHSIGTCPKGLHAWLLQRRSQLDRAGADSPSSLIVCTSLCTDAKSHTSAGCGPRNLIQREATSRKSPALKSRRVIHIA

SEQ ID NO: 998845 - protein, 74 aa, Homo sapiens
RRWCEEAPPSCGLLGLRCRLATSLDVGKCVEAGLLRPCFVFTFDHISGHDAGEYQTWEEFSRCCQRSFTSRGTL

SEQ ID NO: 998846 - protein, 152 aa, Homo sapiens
MGSIILLYALVFHCRSLETWKYTSGTNPALDVVKAAVCSIHIRRIYKVCVYMSDICVRNAATSKNIIARTICDSYTSPICKMMVTASMLLLLICAFSVEAMASLTLLTREKKYHEEECVYYAGARSVINQWTNNLVKNSEDIVSWRRVNVQT

SEQ ID NO: 998847 - protein, 102 aa, Homo sapiens
MFPHEIGVRTRCSTVVLSSVDVTELINVVGLYDPSIGSPPGIKLAILYPLKALFYCIMSTQYNLAWKLVVYVNLQWRETPKLGLRSYLEYIDAHRSLTELRQ

SEQ ID NO: 998848 - protein, 119 aa, Homo sapiens
PDQTLEDERDMEMNWGRNESQEDQRGTDRTATVSVRTIQRSDANDPENHETVNTMNERSCKRRDTGAIPEAVRTGTSNAPRSDLTRVTVGTQETEAQRGDSVLSGNVQCMEKITLEYRD

SEQ ID NO: 998849 - protein, 108 aa, Homo sapiens
MVAGLLYRQLRRAWVHYLNCLTDPRNVVALSYDYIWYLSVAVVGIEVLPHLDSSVACRFELQGASWLMVAKSRESVCSNRAPIEQEVMCQLETDEELISLDLPLFSLI

SEQ ID NO: 998850 - protein, 148 aa, Homo sapiens
DPRRRRRRLPAAAASAAEEDSCRPAHRQLTPLPAESHLPHGLGPAARMLPSRMPHTTNTKQSQNHNTPKRNTNTTTNTKTRHTQHVSSTYTHKHKPPHQRPLYRTYSIYIVFTLTSLHLFISLKVNITTFSTTTYSFLTLPLHIPSYL

SEQ ID NO: 998851 - protein, 215 aa, Homo sapiens
MLTKDECFLGYTGPGMCSLVYSASFRIAPRAECLLVVPLCRFAQLARPLQEVRPSWSFAFWGVLGTDCCANGIFAAVDNKLLLVPGNKAHLYYPEVQSDGKTVQRKSFVQRPFYCHVISLSEYIEHIDHRCLSPRAVMWSTLREKRFWKADLCNTVRQEITIVERAYLALGIDTVVEETFFKEPAVALLRKLRYPPQGGGHGLPLQGTCNQYWLV

SEQ ID NO: 998852 - protein, 113 aa, Homo sapiens
MTPIRKTNPPNKINIKSRHCIESPANPFQNLRMMKVRLSPWRLLILQMHHRMIPEHMHIHRQRRVNLPFDQSPRSSRDVKMAESSVYLPPADGAVNIRNSCASSYTYGRWCYI

SEQ ID NO: 998853 - protein, 96 aa, Homo sapiens
GCFAESNRGNACCNSAWTESGVSVCRQQPSDRDASILVGPVLVTHRIIRYNFGESGLRMACQSGQSRSHCTVNIATQRQPEAVGPQSLLALPVGVM

SEQ ID NO: 998854 - protein, 106 aa, Homo sapiens
MIPHSSHVSTRRSLRLRHNLAASASRISGVTMAHAIMRQSNLLEMNLDNKKTGVSRMALPIMVLGVYRGCNANYGLSYGKLVYLNSLYSWYNLMRTYGCLRRGPSA

SEQ ID NO: 998855 - protein, 78 aa, Homo sapiens
ERGDRDLNGLLSSLVQMGLSAPTISGLQDELSHLQELLRKWTPRISPEDHSKKRDPHTILNPTEIAGILKGRAEGDLG

SEQ ID NO: 998856 - protein, 109 aa, Homo sapiens
MGMLHEGSFKLRTLIHTMGGRRHGIVPYYQIDTSPRPIDRSIRNEAPRASSAFPACNCSFSCKFETTHFFIFYSPFLSKSFSRPALKRQNTTCWLNEHRKHTDNGGTKE

SEQ ID NO: 998857 - protein, 192 aa, Homo sapiens
YLSTILLGDDLALSYRNSDTLIIEDMIALWNILGHCTSCCMCVLVDPNKKYRACVLTRDRCMSCEVSTMAVLVCGPFHMGPSQSRRGAMVPEDGGPSCSSQIVLATLVRHVVQPNLPCNQRRWNTKGPQERGHLQRISREGTQGPDTHLTKPTTCECALTLGLSPGIARRRAPKEQTGNSWRKASEGEERFT

SEQ ID NO: 998858 - protein, 159 aa, Homo sapiens
MRSEPIQIPGSPNAISPCLARLRLTDGPLQPRKSYANKPGSLIEPALKPCEGSLASPSSVRLEYAARPGFLGDTGVGTKGPTSVPLVNGHLQARSLTTSDYDIIVRHYSYTGKLNISADKEKLAFKLTSVVFILIWLLYHPGEHLGLADHLENQEIPSN

SEQ ID NO: 998859 - protein, 136 aa, Homo sapiens
IIFSIDYLSYLGCPQRNITVLVTKAFRYFYEEESIVQGASGPHVCSPSHLEMLRAGGSRGREVETHHWPTTGETPIIIHKNRKRYSQWRGAWVPCSPQHIQAQARWQDEWVLTWNGGDCREPRIGSHLPSLKTLGR

SEQ ID NO: 998860 - protein, 279 aa, Homo sapiens
ISTIITTITIIITVITTITIITTITIITTTITTIIITIITTITTIITIIITTIITIITSITIITTTITTIIITIITSITTIITIIITTITIINTIISTTVTITTVIIIYPTEGHYNAVMALNTWNGKMVRNFHHFGLRRTLCTTDADIQRRAPIKAQVTPSQTKTIERTNTLPITGTKTECMTRGQRETADARKTLLDANINTLLKTSPYMNVPAKNSIEDDQRLYHGQKQKIGSPRRHCSDDKPSLQKTQEWLGPSSGQTPGPTDRQATAVTRRAEDN

SEQ ID NO: 998861 - protein, 114 aa, Homo sapiens
SGGSGETLERAGKRPNINCGRDSVSGSLSQLETTLGTGSQVRLLVPLPTLTCVERWCGHKARQWFRGDLTRREVGVLASDAPLRRQGCIWFHLPPVCHILYIEHCTIISTQEDA

SEQ ID NO: 998862 - protein, 134 aa, Homo sapiens
  misc_feature (28)..(29): Xaa can be any naturally occurring amino acid
MRYRKAVMNVPIGSTDHNRCQCSSPLRXXPCLPSMTPQSSAQPATRPSVQGCCMELVVLDFATSWSPARKGQTRTPIPDDEALATENESHGHILEHGTEADYDGPILPDEPKSYITTSLVDACFDYRIHEKAAI

SEQ ID NO: 998863 - protein, 128 aa, Homo sapiens
MVLTPPPVLHPLAQQAKEPGLGSIIWLSLERTRCHGRYISRGNIHIYAAQRTEAMGGSHYLALGEPFDGSAAVRNSCTGARALQGVTQTPPTQGNDTVHRPGQSSVYVTWKRSRRHYFSCAEGLDRIA

SEQ ID NO: 998864 - protein, 323 aa, Homo sapiens
  misc_feature (137)..(137): Xaa can be any naturally occurring amino acid
  misc_feature (178)..(178): Xaa can be any naturally occurring amino acid
  misc_feature (194)..(194): Xaa can be any naturally occurring amino acid
  misc_feature (306)..(306): Xaa can be any naturally occurring amino acid
  misc_feature (308)..(308): Xaa can be any naturally occurring amino acid
MARATHTHQYRTCNHLHEIEHREEYKTPTRSEEQQDTHETELQDNNATIRTRSCTQPTTRVDREMNSTKINTQQQQETRPREHQKSDKFSTRSSWRTVNDSTARDQLNITLNTTLRTHRTITTPDTKATKHRWDQQXDDDNTHSRMTDDTQLKNDDDNNVQIQQQTEKPNRGGDHYTXTTRAPIAQHSSSTAEXRCTKQRKIRYERLSSLTRPLAYSSTSYSKTPELANDREQKMKDSRKQRQDKPMEAETQDETDRYDKSPHNSDTRETARYIEVVDSNETARHIEHSARRPSVDSNNERGSHSXHXRTRETHTSTDDRDNT

SEQ ID NO: 998865 - protein, 51 aa, Homo sapiens
  misc_feature (27)..(27): Xaa can be any naturally occurring amino acid
MGSPTHKGVSKRESAWILKISAPAAGXTHQPHQETSTDTHGTPHNKQPHKQ

SEQ ID NO: 998866 - protein, 116 aa, Homo sapiens
  misc_feature (38)..(38): Xaa can be any naturally occurring amino acid
EEHLLCSRRCVGLGDAGVHSNQLKYCCTESVTLEPSLXVKINLDALLNSPPQYIPPIRRHASDRESKVVCKVYDPVCDVYRCTACLVVTMFHYGSYIIIQSWRLLVLACGVFPWIF

SEQ ID NO: 998867 - protein, 278 aa, Homo sapiens
MTPKYAIINPPYYKIKLNQLTQSNHPRPQSKQSLSMTEELSGVTCLGQPCLVSFSKSTTRVLNSIDLMLTNSTEYSRRTSPLCHPSRATIYYESSDNCMCIECNTRTSHYDRPYATAFTISLLFIAASFRTNIQEPQRHNSSLALTLSPTLTQHPDTPLEYMIPSLTLAYLTTPHQVPSLRAILDHLTRMRCPKTNFHSPLHEEPNTCITHLITKRSEHNILRAQSPNLPSFASNMNLIRVSTVAHVPCTGKRRHRYKEKGIHGSTQTSQFAHNAEVP

SEQ ID NO: 998868 - protein, 314 aa, Homo sapiens
GPWAGTAHCSMLPKKAQHRHKPLPGTGPCCLRRIGYGSHDHLPPPAPDAIYPLEGSAIGHQPQSPTAPHAAVRRHCTDTPQDGQTVPYPEAACEAAGTLLAVLLPWSVSTTGGPSPVILDPAGPELTCEARSSLKLIKTIDPTESSNAGTYRVAYQSRQLHERTLCLFKESRITQGPSFQIVKGLKYDAGGGDIGELTQRQTELRLDDCGVPTQPHMKQTLSCTLKHWVVPGSSTTRCQYSEVIDPASSENRHEHTGSMSLPYREAKQTETRRAEEEGDDRSDAEMKDRSERCQEENVSPKTRGKESKRARRQC

SEQ ID NO: 998869 - protein, 66 aa, Homo sapiens
APQIPDTMEENSESLVHSFPVVTMRICAWRLESIDTDVVWGPNPSGYVCMIDQARCVTEKVHGKVR

SEQ ID NO: 998870 - protein, 135 aa, Homo sapiens
ISTRTRNLSASRLQDDSRCLNLLSKRITSQRQQQQTDEVYNSKDKVIREQKKDHGLAQEKVHGQLRSDRDRHQEHSQKCLSSTERKFHCIERTDLQRFNSKQVWDTIKVELHDKQGHARTSTQMKTVRQKSIVST

SEQ ID NO: 998871 - protein, 243 aa, Homo sapiens
YFFLSSACGAHKFAALSYCCYPSSRIQPDTMGFGDLKSPAGHPGAHTITWLDKSYIRGVCAIIKQMWQYLKPCPAPPNCRPCVMPYVGYTHHQRYITKYGRSIFAQRVTKHILTKLDLAEHVTNYNPATTTRHSKSQEHREKTTNIETKHKYDTAAHKTTHTATETQRENTRKRANSKRGTTHRSNKTENSTNRNLTKRNMQIITSQKYKQQQPPLMQHKDTKKEPSDKHHDSNGETTNDHEE

SEQ ID NO: 998872 - protein, 411 aa, Homo sapiens
SPLRDGTALQGTHSILLLISFHLDIQGMCLPYGVPISLLPRHWPHRPPYYLHPIRTTHMTPHGIAVFISLMTHGDEEISIQRTNPNKDIECNTQRDDRDDDDTDPFQNSLDIIDEIRENHLMKGISIKGSNETRNATRRQYHHNIWESLEEHHKETYKDLVTKETTEEVGHSEIAANTTRHNKRPKRSKGELKQHKQKAVCGPDMKAHKHDSTPKKPHRAIKEERHETITKHTSTPRAKSQDTEQSHSGHYLEARTKETLEGPKKNETETGETNKKHSMETPHNQPQPNDAQLPERHKDAHREMNTLTHEPRTAGPNPHQNPPHSTEPPGHRRTPTSTQKHEQSTKPSGTTGAQTTTTPEPTTHTQNTRRHSHERTQTQRTPETSPQTQHTQTSNTAPPAPKNNNTEHPPT

SEQ ID NO: 998873 - protein, 70 aa, Homo sapiens
SYQILLLVITYTTNRPQPSTPPSSTRTEEETPFYTTNYSDFYRITHEVHMLILPGLRNTLPYCKLTTPEE

SEQ ID NO: 998874 - protein, 148 aa, Homo sapiens
SSEMAPEADPECRITTHSVSSRMSTPMASILYELMTGELPYSLSSTTEIRSSSWWARGYASPDLSKLYKNCPKAMKRLVADCVKKVKDERPHYNHPDPCLPLSCSNNSLPKIKPERITETIHDIGQTTHEDIHACTHDHVPEAACLSS

SEQ ID NO: 998875 - protein, 145 aa, Homo sapiens
NEGGSLEPATADDKKLQFSFNESEGVNNISGIDEVDIMYTNQGTVIHFNNPKVQASLAAEHFHHYMCHAETKQLTDMLPSILNQLGADSLTSSSETGRSPAQNNPVDGKAPLATGEDDDDEVPDLVRTTTEASKNEATGLSQLLR

SEQ ID NO: 998876 - protein, 177 aa, Homo sapiens
DLDCSEKPSFDIVPHPTSLTRRQIDPDERLLRRRGLRQLYRQRSLNSRLIFINPLHRITGDAPPCQTQTVDTRLRNHHQGLKGEEGSCGKRQKMEETPLLTGKLNGGNREKQAGSTNAESDESKQANARVRGGKQGSEAQKHRPHALSPRAKGTHRSMQDDRLSIRGKRRSRKHKRY

SEQ ID NO: 998877 - protein, 282 aa, Homo sapiens
MSVERLWASCCLWVGALKSVLAEAHVSVRRSIMQFSSCSKVTLVDGQNDKRTHTQTEQLLWRNSKPRKIYTDAFVETNFGKQGPKRMEGILALNPLTLTHALATWKQRPLGGLSELSTDNTPAWLPGNELSLYTRIPLDPRTGKGPTNVGNTIHPFFGPGTLFKRGNRLCLSTEPWELPFGPSDGLPPQLSEGPHLPSRSGPIFMQARYNLGNGSWTCTSSNGGSSQLNRPLCRDITFVGRKPAWFGLEKGQTFGRRLHTDTHFGQLGTSVKRVYAFSCYAL

SEQ ID NO: 998878 - protein, 164 aa, Homo sapiens
RRGEHNTCRKMDVGSKEVLMERPAELLRSSPGPILAYPDMNQYHLKTHFLSIGWWWMVLIDRGDCGSPDLMGLHMSQNNTAQNWGTRETEAIRGEPGQAHSKSARAREIEQHMEYTHGKQYTDRAHREHKRAADEITQNACMHRTNATSPETPARPHQANSPKT

SEQ ID NO: 998879 - protein, 296 aa, Homo sapiens
ETFFAESRRGYMLQQCLDGTRRSFQHPGNGPNTIDRPYQKLYTENTRNWTTKDPDTNDPETRTDKRRRPDRTIYHKYDDKKDRRYNIDRTRPEDNKTEKQEGGNKRRDQPGENINDINTDTPDERMTTKKQRTDTEVGKTPTTRKTTNKPQQTEAERGNKNTKNTQNKARRNQNERRDKHKDERENKSKTRHRRRQEARGKERTRQGITRHTTVANTRQIRGKTRNMAKEKDGQRNRATKSKEYGGARKTQTKQREREEPREEGRPKKARKHEATTQAQTQRHKKTTEDTATERGT

SEQ ID NO: 998880 - protein, 125 aa, Homo sapiens
  misc_feature (9)..(9): Xaa can be any naturally occurring amino acid
GRTSSVLNXIQYGTFMRSLTEMYRNDVSSISERQISYLRPVLCKMYQKLDKFRNGRGMAKQKAGNFICTCRNPKLAVIVITNQRYQLDVTPKRLRTGVATLLSAFVKTLHMETFVTAQRRLRLPC

SEQ ID NO: 998881 - protein, 267 aa, Homo sapiens
METQESQRSHSVASVLGDTSGDDLWLECKPIPGLLRDSKQFLPSIAASRRAASRQGMNAGNPRYTPMATWATVVRRYTGLGAYEDHPWRLTKDRIRRQGRIGRIHQEVATGEIEHERLQTWGKQPPGRYHKENTTENSETKSRESNKGMRPHGHREGKPGRNWTETQSTKDRKACRRNSRKTGRTTSTIQTDTEEDQQRDREKPHRYQRGRRGQNREEEREGEEEHERKEEAGRAQDEEARKEKQEGTERAAEDQEKTRSERARATG

SEQ ID NO: 998882 - protein, 309 aa, Homo sapiens
MRPRHLAPSAALPATRQNGLQGHNPRTRSSCPARSTYHGLHMITPQNELTVALVEQRAQLDDPNIGQTRRTTQIPSPNTYIVKQLMEAPKRFQANPHVHHTGLHPIPRSLQHANKRHGQSQIRTPRGTNEHRSKQYMGHNHPYTRTQPRPPWAHEQPATNKAAPTHHTGRIHFHTHPTRAQHTRQRAHKAPHKRRALPPPGRIRPNHTPRTAHSHHTGHTTIAFSNTTTPPPNLHSLSRPTTTITPLHPHSKNATCAYTSPHTPYPPAHTTSISQENISPTPRYNTWDTTTNNIPTTAQHSPLHTHRTL

SEQ ID NO: 998883 - protein, 109 aa, Homo sapiens
PPRGKEVGSVRSCYGAEFPGRAGRAEAVAAMKAGATSMWASCCGLLNEVMGTGAVRGQQSAFAGATGPFRFTPNPEFSTYPPAATEGPNIVCKACGLSFSVFRKKHVCL

SEQ ID NO: 998884 - protein, 447 aa, Homo sapiens
MRYQATREKEMAAYEAAGDSHPQTRGTACIQDVQSPALPGHSRSLLLVDRAVPGVPWHIIAPAILSMTPMQAPEHHFPRDIMSPLMIHLVSGRKDENTHSVNTLASAPLPEPPMGHTSSCDTRNVIRPRGNTHSLHWNRTLVHNTDGAPHVTELHTLHFRPDRLTQLTNMDERHNVTLDPILKTRDALTCQPGEEYPPFHTHRRPRLASQLETSPLANGVSTTAFIVKRKMQYQISIVNEIGGYRTKMNIPGYVSPHCSHKWQPSSNTIRRHNHSTRNTRATPGTKRTFPIPTNTTPKRVYRPMCRTRDHATRRPTHAQPLNRSQRRCAHLRKKRTTHSTHHGLTLLTDLTVDSADRPTLSENNKRRTPTHLVRVNSQLKQRQRHNIEKKARNVKVPTTTNSKQPGNESPAAPQETVPPTTMNDIRQHSGTQEQYHHLGDNTTQRTI

SEQ ID NO: 998885 - protein, 148 aa, Homo sapiens
MGCGDEKGAYWCQSCSIRMIDHKIESILTAWRDPVVEESQEEKDYMEETVMSPSSRDIQVCGQVKTLSSDDNSGEDFGPLVLQLMVEGLIDGRNGDSESGGCMSDDRVMIATWVLESGIVIPESRCMSAETSNDIVLHMKLRSMVEQR

SEQ ID NO: 998886 - protein, 233 aa, Homo sapiens
TVSVGTRSTEISAWLYVHLGYLQHASAFHLLARPRPSAPSNVHPCLFSTIHARADLLDSRRDIPTLVDGLIIIHPQQTGLLHRDWLVPQTAGLSTPWAHLTCTGHLRRSRETPNVTTRNFASFLRAHTDADGPITAKGLGSGRPKQVTTYTNTQSGRPLDRIGASTGPNGKEALATSRVPPSGNPHSDRTPRTPEQHIDCDCDNLDIYWRRGNEEEKFVSKKDIVESKKSFIT

SEQ ID NO: 998887 - protein, 108 aa, Homo sapiens
MTYLKYDAVVVSGSKLTSLNCLDNDWQMRKSDKTVRPVKEEEFEKHSCVIEIIGSGKWLLFRCMQNFATMLMYETFVSRKVNQTEMRGWMTIDSRAQQDEYDGGIVSM

SEQ ID NO: 998888 - protein, 123 aa, Homo sapiens
VRFLASGEGARWPLAKCIGWPDIVGMQMVKNQGRVSADGHTKHSLGTDLWAKEIRSKRLREVPYELVHWFHDFGAYYRLQVQRKQQYLMFDYPRDHEYNRQKFRGRAPRTGVTREGHCSVAKI

SEQ ID NO: 998889 - protein, 215 aa, Homo sapiens
MDCKNNRRVRIRTVTGLEQTTLGANSTGGTRPQNTPPASTWTQWTTWWTSQEQRTVPQQTTTRIEKKPQRAGTPNEQMHQTRQDDRKKKRARRTQKTRDKKIGTNSKSVDTNQESTRTTKEHGKDTKARGEHRRRKRWTPYTKGERRTKAKDQESRTTDAKKDHTQGRRTRAQKNETHQTYPETNNTSQNVTHRRKNTHRGPKQPAPTNGHHPRH

SEQ ID NO: 998890 - protein, 69 aa, Homo sapiens
NWSFVFLILSTVSSRWCRPASLLSVVPGTPLTFYALRRVSFPFSRPVLVTQAMDMLAFPLHRCFLLSLP

SEQ ID NO: 998891 - protein, 74 aa, Homo sapiens
CPLAAILRPRVCAPNSQVVHPRPLEHQTLVPPQRSPYSASEQDDTRTQVMNQEKLAQTAGTKCALVGTGNVLAE

SEQ ID NO: 998892 - protein, 311 aa, Homo sapiens
MSFTFRLHPAVLWKGREWTLSGHFLAWGTGTVVRTLLGLVRKAVIATSQLISRPWGAFFIVPWGLLFGGRASNYGRALPCDELPRPWGFIRVLIGGVFEFWDSWEPGEVVGQTSDALVMVGRYDSRSRHGGGPLLPVNRLGPEWARFFPRFDPGARWDLLKKVGRLNRPIGIFEKSRRGDMKGVVHLHTTLDWTVGRLGISPDYPLGTSERPVRLLVQKWLAPGFRPTLNVPPNSQYAEFTITVGHLNGHYRSCLGNTTIPLVAQLILWGPIELENPRGGRHWVTQNWDDTSIGPGWGAIWAKRNPGISRN

SEQ ID NO: 998893 - protein, 60 aa, Homo sapiens
MVPPVRVNFARVAVYAIDGGVRHYFRTHRAVPTRRPGVARDHGCLEAPPGSTHTGSDESH

SEQ ID NO: 998894 - protein, 259 aa, Homo sapiens
  misc_feature (104)..(104): Xaa can be any naturally occurring amino acid
MGNREVCAGCASRTVQEPYERPGGQSGLHVLVCPNQRLLRFWSAGHCGTRRYSRRSDSRMMKSVEHKILILVSSEKDGCMEKEHNSCRPLFVPVAQAEDDNTTXMIGSSRSFDTMWAIDYPSIMGLEVQSMFSQSGSWLISRCYVEDKPGGDVLLRDYLHTAVRDDSCLVLEMENAKSGHSGIVVPGRFLPSMWTWQSRSELPHLLDIPILERRDELPLESSGTLGTVHYRLAVIGSFSHFPQEGVNSEDVRNDSHFCQ

SEQ ID NO: 998895 - protein, 128 aa, Homo sapiens
MSGERIGIDVGVSKPIPRIAKALMFVNVPLMDGIHKVWVSKQLHNSMTEEEAYRCPLIYNDVGCAHENNLYWLKGLFETNYKRVMSTLKRADIIYTIRVGLSICDFAQTVTSRKSPAWDPYVYVLMVL

SEQ ID NO: 998896 - protein, 84 aa, Homo sapiens
DRLLGGGLEQSADMHGKAVFTASTYRAAIELHHSLWDWDTLRDIPHPRGMGALVWPLIWVGPFEQLGVTQCDSLDVVPSMLRSK

SEQ ID NO: 998897 - protein, 124 aa, Homo sapiens
  misc_feature (102)..(102): Xaa can be any naturally occurring amino acid
MTLLSSWVTEQDPVKKKKKKDLAWILETKSPSFKQRFWKNLVGPMWGPIHNYLSRSVQSVLPSPILLGPWNTTPIILPEEFRRAQQSFTRPFHVGGVPERLXPRGPSSWLQTGSLPGRTSAGAS

SEQ ID NO: 998898 - protein, 201 aa, Homo sapiens
ESKCRLCGALCFTLKALPSRGSRAAKRRCSASTIKFAMLAGGRVCGSRSSALHALISRAYNYPSTVVTQDMSRKITCSSSNEKLSSKAAAQPLHGTTAYPRKFRSGLSMCVALIFARLVIIRQRQSDRKALEKVRKQIRVHHSYIPHLVSWVLADPSHTRESDNWTDFALLALRSPRGRKSPYLHPSSFFQIINRAEITTT

SEQ ID NO: 998899 - protein, 85 aa, Homo sapiens
  misc_feature (61)..(61): Xaa can be any naturally occurring amino acid
VETRAWGRRRQLVSEAARAQGDPVCSTMSEEEAAQIPRSSVWEQDQQVRAAPPMEQGQKVXCGTVPSRSVSGQVSRPTPLLAGKT

SEQ ID NO: 998900 - protein, 168 aa, Homo sapiens
MHCTEIRDTSPSPTEFQPERIFPAAMHKGAIHMPTALLCMAPGTWIGPTVCCDGNDLTILPCILRHFRIGIHPQQKSTGPKTARRYSAPAYRAICVRLTHAQRTSTSRLHRAGPNPTHAPTNKTPPPPPRPTSQHTTPNQPHDPVTPPRTREPRDTAPQTRNDARTRK

SEQ ID NO: 998901 - protein, 156 aa, Homo sapiens
MGGEPGRGRRRWKWTPGDRGQRKFTGWGPTRSRELRSLHNKNKQNRQTKDKHIWCATTSRAPEKKSCTEHTRRNGGQAAPHGRGGREDTGAKECANQERKPWGNKTTGREEFPTKNIKTRRGKNRKRLCDKNHKVGSEGDQTGSFNKGRPHREAGN

SEQ ID NO: 998902 - protein, 243 aa, Homo sapiens
  misc_feature (13)..(13): Xaa can be any naturally occurring amino acid
MVTKKSKPSYHVXPSPYATIGDTLLLMCFMAHMSYFLSKEQDRGNFEIQLMRSLLLIAATIHDVDHPGRTKSFRCKAGSELAILYDEHCWCWRADTCGLDLPAEPLEMIKCKYMSESMERKDYRTLRRGIIDLVLARESDEALGAMSTTFVNSINKILGNNQQENGGNWINNAGKSSNDYAGGVRENLDLNRKNVDYSCCCVQYLATLRVVHRRGLCAISEEIFFSANDADEQAGFTGGDASV

SEQ ID NO: 998903 - protein, 110 aa, Homo sapiens
MGVRGPKNKTTNSKRENTCVCARETCTRENRIANDTTGSVDAGANQRIGTCDTPWHKKTEAEPKNPRDQMTIRKGGTGHKRTPAGEPEDKWTNPQGDTEAYRGHNKGPKA

SEQ ID NO: 998904 - protein, 255 aa, Homo sapiens
MALALGFLSVAEHSLPSDWEGGQIPVCERTVATGWPMQRNDTTPGARCIGQAGFIYADIGPLRNEVGASEGSGFLRKIPWTNTCRIVAYQLAPEKIWKDNECFPREEVTKTHCTGIRMGLIIVYHSSTYHENVHSRGDTNRAPLVPKIRWGGRTVGHCSACDCVVNSLHGDQPKDPYRCVALFDVTTDWRRKPCGGLVLFVLLDEAQEQLSRKVWRDSRARRFTYRISFSCSMHLQANLHLKVQGLIQSVTHLGI

SEQ ID NO: 998905 - protein, 83 aa, Homo sapiens
ELARHDGAWPVVPASREAEAGESLVAQDAEVAVSRDRAIVISSLGKEELKLHAQKEKNKQRKVMGFIAMGSMQNTKYFEEGNF

SEQ ID NO: 998906 - protein, 230 aa, Homo sapiens
  misc_feature (66)..(66): Xaa can be any naturally occurring amino acid
MISDHPNLSTRSPRNWLSSAVSAYTDQLAHQSSSTNIFVLPSEHRIQPWQCSPWGHKAGHYTMKSXEGLNLESHRSIPEAQIHRTAFLGTPPVPSNLGTTGMLAWLSTGQLACSSAEGLKLVDKFAGRMCTQLFHSEAFTVDFGDTEEAKKQIKRLRGEGYSRAHMWMGSKELDRGRQGFALVNYIFFKGHGRDPFARHDTEEEDFHVDQVTTVKVPMMKRQACSTIQHG

SEQ ID NO: 998907 - protein, 145 aa, Homo sapiens
MTRSIIAHESSIRYLHGNIYPYDQQMLKLYQMKVDPVLKHRARSLCKETVHIHDLTWEKMSRHCPHKEELKQRPGFDFMYTSDGYTSNDLSLPVKLRWGLGTWMALRFKTEHLIGSVRLPDKLASIIAEGFGLCLLLAQPNLGCD

SEQ ID NO: 998908 - protein, 66 aa, Homo sapiens
NNQSVGSYLIDPRSPRPTRRIYLQVISTLFPPSTMTLTQHSHRYFIYCNQAQIINLTIEDYMDFRF

SEQ ID NO: 998909 - protein, 68 aa, Homo sapiens
VACPVGSDEYEQKFGERWSSRAEVASRCCEALIGQRMRGDHDSDRCWRSPHELVCVVLLMCEVMLVRC

SEQ ID NO: 998910 - protein, 142 aa, Homo sapiens
MTQIESGSVVHRFRRFGSDSRWTSGLCHAGDMASLMPMFASRANLYVGLVRIVLRRNTNDKSVESYLTRCNPSIFRDFYIQSSCRLGAYLLPWENQTICSITIVVRWNIPACSTAGRRYGGNQAKLGACMLQKYQYGIRDTR

SEQ ID NO: 998911 - protein, 82 aa, Homo sapiens
GANRRKDSKEHKQEKHNTQNKHKHKSKQETTNTEKKTKQQKNHTQNTRRDNKQTATETRQRRTETERRTHLNRDTTRQNNTD

SEQ ID NO: 998912 - protein, 388 aa, Homo sapiens
MVSDHGIDDYMRDGSRRRDMKSRMYVPRSRKEREKGEREEEREKTEAKEEKKGREKKKEGKRRKERRREREGEGGKREEGGQKKERRGEKREEEEHQIKKETQGETRKKKKKGETTDKRRKTGEEEKKKEEEKNERTEAGEEEKTKEREKEPGGKEKDRKKKNKEKERSNRKRTKKEENTDERETRQADQENRTQKKKQQRDKRDEQQERKTDEATKQETTDKESKEGEKRKRQRRRKERRAERTENRHQQEEPEQEEDKRDREEQKPKRRSAATEEKTNRQERSTDREAREKQGDAETDMKNGTEQEKKGKDNEKTNKKGEESRNKEQRRTQKEENRVKEGTENTKEKESREKQQEEKKKKKKEEQERKAKNKRRKGKRTRREERKK

SEQ ID NO: 998913 - protein, 53 aa, Homo sapiens
MWVWEPGLVSTGGEQQRHVIKSSDKTIMLMFVTSRAKMLVDTVMRSVPRTICQ

SEQ ID NO: 998914 - protein, 301 aa, Homo sapiens
GYCEYGGVKGEAGIMPPPGGYGPIDYKRKLAVVEELSGYSMLAIGIGTLIYGSLEHNEVEPCSAGAYNIEALTMVSQSRCCTRVTVQKPDRRTFALMLRESLEEEAIVMKDVPDGKVGESVVPQKPVGAPTYESGSCTWAAQPQRRLIHARPRRSMWYTVGPCALRSIVASPDPVPQWWSGINMLLQEPRGQAPEETIIMEGTFLHVNIPYHRERVLKKKGEGEARDTREGEQAKHWAQNGGATPKRERSGRRGAERQGNDQPAADDTRRRAGSTPTGVGGAKPREREGPEEKHTGARRKQ

SEQ ID NO: 998915 - protein, 309 aa, Homo sapiens
SSLALAQPWLVVPTERLKRGGSSNGIGCWDKLDQVWYASVVRSDAVPYNGEKRVSSLDHFLMREQTVSMRLTVRLRRNRNDFALSRGCHLTQSDWRTAPDSWYISAEPCRGSVMGSAHQTLEQRAGGDLPVCSSDTEGSAYASLQSVINNTWERSANAYQVRRKELSNRSCVGTKIGNSFIWCSLGCPGPIRYPDPLITVNDTIQIDLRDCSTLLNFITVRLLVNLLYGDWRCSSRNDLVVITNRERLPGDPYERGVTCTDAKATGLHSTFQHFCYGKATTTDSLPGERYPPTIVREDKNCGNKHGALV

SEQ ID NO: 998916 - protein, 257 aa, Homo sapiens
AESCKRRRARRVKSRLGTAPEGTGSVGHQSVWIPSPRAWGSHGSRFAFESDLHSLLQLDAPIPNATLLRRWAAARARGRAWRPRTPSTPMTGSANRISTSAGRGHPVPKSVVKSSFQGVQEHLLSNTLVRVSGYIARHSADAVPYWMVASIRSVSNGEAKPEKQPEAHQRRKHQKAVGFGTLNGLSKYEEAQDPSAQVEKTTKMAPEGLSEADLTSTSYEAKKGTPGIQREELALHFLSAGQNRILGLRRENPKMTY

SEQ ID NO: 998917 - protein, 296 aa, Homo sapiens
MACSCGLRFAWVVFGPCGGAGLPGCACPGSAVQRAARGSSPLRTTSGQWPVSSKVWALSRTAGQWIAGSAPGAIAWGGRGVAGLGPWALAFRDGRVAQVDLGKLGTQRTRLIPVGYFTGWHYPTTSLWAPNTKESQRRGYTKCNYIKWQGVVSSPSRGPNRTLGTLPVGDHNPGKTIGMRASCLPYPPGKVHWQGPNRGTLGRPGPEKQDGDGGFHKENRGTPPESENDSASGRNGRPTWPEAQRGRTARGSTRPIACTHQERRQIPPKDKAGGGIGNRRGLGPKQTRESHLGRRL

SEQ ID NO: 998918 - protein, 102 aa, Homo sapiens
MAMPGWGPGSWPGTRLTFDVEAVGIVEKRVMLCHSHPTLTAFSYSCLLPMVFRTRGLLFALRLRKGNLCLAVDEHMMLTGCERIEGGVTHIISSRHKTMVTR

SEQ ID NO: 998919 - protein, 291 aa, Homo sapiens
GRRTPVAGIFSSFLDVLSVLMSLMCLGLDRGAGVPVWIPQTDVRVTVLARRGGLVGYMEARGARRQTRTAVIQVGAWEDKYADCGWSEAHAMESLPRVLQLMEGHASKLAIWMLVRPEPAGANVYSWRVDRVWHRGVCSVLDKVPGAAVRGGPAGSWTVIQAARNDAVGISRYLNQEGRFKVATQKLQVRHPVNEKNMTAAWYDLSMTRQVSESIVERLKDKIEGDALGDSGVQTRASVHSSLAGATIGRTRDDESGGKTDKKNKLKDQNLRFQVQLAKTAIPVMVVAGSS

SEQ ID NO: 998920 - protein, 124 aa, Homo sapiens
MKGHAICTSDFVDSNSGEYEMQQEHRRSTLSVTSISKKDRTQIYRDTLAFWQLESSMPLLWFPLMEDRWTFRAYLIDTCADTDVFLSLNCFHDGAWETPLEGTLCLLRSIPVSPEIKSLEFWRV

SEQ ID NO: 998921 - protein, 170 aa, Homo sapiens
ELCLDLLVRRAVRSQLKERGLSVANPSDVLLECSDFSGSGITPNKLTRQSRAVGHRRRYLETELAEHGGLMTVQLLEFQSSHRRSRTRTLDKSDINRRQHGCDLPRRPYRLEATWRLIAGSTMYAWKSSTYGPNHGRPRVRPYPHYVCWRTGTTMPLTRRHLTHGQLGPS

SEQ ID NO: 998922 - protein, 142 aa, Homo sapiens
IPPSELVGVNLSVDDKPTDLTCQVSRLGVFRYPYEYSTTQLEGFQSNNKDTVITSNVQGKSDEIGILSGGATQSSHWTRCIHARSFEGTGHPSRNVQRELLYKCGPEEHPHSAGSLGYRVNELEEKPEKYWQRDEIHRILPR

SEQ ID NO: 998923 - protein, 107 aa, Homo sapiens
MTAVGGPILFNVHVLIHKRAWFAGRTIEFSAHVVAFHRQVSQGKAAHGQFGVVYPQGVEQQRYFSTLGSKGSSGYCNELVPTVTAQLRHGAFYKGRTSSGSTTKAAR

SEQ ID NO: 998924 - protein, 118 aa, Homo sapiens
MDPFRQLKPPNQNYFERLIRFDCRHLRSNVISGVYRILRESLLATVDALHAVHVSPNRGDSIPYVRVTRNVYRVRPQNRSSDICIRSHIRLRAQCQLIESCWIDAKSYEQPEWGDASQ

SEQ ID NO: 998925 - protein, 112 aa, Homo sapiens
VLQSGPLSLHGKVPDRKAERQERTILMRKPIAVARSLLSDHMCPVGMILPPSDLAPWWVSADDGDEIDMHRLHGIVGSARTRRVLLYSNRTHLKLSEQSVSGRTPGLTLRGR

SEQ ID NO: 998926 - protein, 155 aa, Homo sapiens
MEAWASSASAAGVSVADVAAAGAVGCRSVLAVAALRRLAAGRHRVLPRTSVSEQQLLEVEDLSLSLLQGGGLGPLSMAPDLPDLDPECRELLLDFANSSAEADRVSGAQTPGPCASVRPGTPLLPTGRQHDGQDQPRPGEYFRESELCQKSLTGR

SEQ ID NO: 998927 - protein, 79 aa, Homo sapiens
GHSSALAPGELPGLTMERKVLVAPEALKEKDQGQEGHSPREILKSLATEGSAPHSESDLPRMQDRGDSGDLMMMSEEES

SEQ ID NO: 998928 - protein, 145 aa, Homo sapiens
MRIRVRLHTVYEGHDIGMTVFYGLELDIEMHSALISIEERMSSNIFMDMSVSLLFALDVIIVHTLSNERLIDSALAGADISYLVQFYRYSDVLVYASRAHSVDLFLIAQKDESRLISQIDAPSDRLLWRDVVLGGFLQSSLTVLA

SEQ ID NO: 998929 - protein, 186 aa, Homo sapiens
  misc_feature (86)..(86): Xaa can be any naturally occurring amino acid
AVRRSRGSVSLLQGVSGRKQSPGTLVPALRYALRFALSRLAISGEPYFSGQSCRSFVETLRRHAPVVGLDIPSLARTNAMQLPSIXSRNSCATRRWRSCRHSSAGYNLCNLSGLPDSYHSSLRLSIFDRDRCGSGRREPLSSAKWPRRSAEGYERLLKMRKQRGGRLSSRTSGSQLTDDVVVEAQI

SEQ ID NO: 998930 - protein, 272 aa, Homo sapiens
GPRLLCTPDFGDTDMQCEPLKSAVATGFKASQQDDSMQGPVLHGEGCWPTSTHSRPGPTQMAVCELGPCSCTRQPHRTTTGTTWLISSPSQGTLTTQPPIRRLTRVWRGPTSHPLGDPKGGLGEPRQAPAQGQTRATGEGAGQGDARGRTHQRDPRHNRVVNHHHEETGTHTNTTDAKDNNDTEGSKGQGQEGTHRERTPYDTGAWRDSGTDNALTSHIMRRWHPTRHGQSPDSRPCVNRNGFRSYTPKRSTSNIRESVNTYTTKTAIHHGM

SEQ ID NO: 998931 - protein, 320 aa, Homo sapiens
  misc_feature (67)..(67): Xaa can be any naturally occurring amino acid
LINRRSRVDPTLEAYFVTKVAPIYCFCTALRTSYPAAIVAYSSFLPLVIASNTSALHSSHGCQQHTXSYSRLAQAHVITIIGSSTAITLCTLHHFSITPVVNHSSDSMLPHHSWVQTHRSIMASVHIRHYTVLTLSITATPYHLSTFSTITSNSLLVRTGFHNIYTSPLRFGSVIGSFLLTFHLTPSFKVGRRPPTPLCLPLFYSMAPNHNHVFPKFYVSCPNGTCYLQMTRKPKGKTTPLHTWLRTFTAILLLGELNVEQYHLCYDYHRLDVLRAGTPFCCHHFTARINTVYIVGAIVSQWKLIHDRARPPKGRLKSAR

SEQ ID NO: 998932 - protein, 134 aa, Homo sapiens
  misc_feature (50)..(50): Xaa can be any naturally occurring amino acid
MFREPDSDDAYTTLVTGLRATEWSTFTHGSHCHNLRSCCLSTKSSVTILXNLYVTTALDLGRPHQEAPSREAPRLQLPKEQRFNLKKRPYMTLIPSPLFYIQNPWIESWEPHSSKDSHLRGRGPPGGTPYTCDG

SEQ ID NO: 998933 - protein, 284 aa, Homo sapiens
AEHSAPADDTFARSLFAVYSNTSLPQRALDECDLSSMATVGYHGIYLELDTEEQEEIIQTLSPSVDAEAVQKASPRNWNLMTKMLSQHSDLERSNCTSGKSWMRSTDIINARDSGKRTLETMNLTAVDRLWTNFAAVSCVDPELTFHPSKSPDCITQAYPQHPMQAGAGDTNHAQIALDSDPSYTYPREPTQGPPCRAHYSSSKGLIKYTSHRKHAALCRALTIHVSRKHPFSALQLFPATTASMLWTLMGPRTAPKKEHIDQRSWHTVRIAAILAAQNHKHAP

SEQ ID NO: 998934 - protein, 210 aa, Homo sapiens
MTRSLFKGNFGVQTILSTIGYDNIIQHLNNWPQELQSSLTDFLTQNRAAHSTREVWHKICSTSLGRTAVWTRLQYSMSLEAGPLHQSSQQPSTTMCAHMSHSACHKRYKQERAPVTDWQRTLTRYKRQKTYNRLYTHRGLIPGLLSHYTPPGRFTTFTQPMALPRQKLIDSQKHCPGNNRTRRRTPRPFSPGSALTGGLRAGAPRNSPFC

SEQ ID NO: 998935 - protein, 601 aa, Homo sapiens
  misc_feature (93)..(93): Xaa can be any naturally occurring amino acid
  misc_feature (477)..(477): Xaa can be any naturally occurring amino acid
AAYLHITHTLKACKLTAYLTANPRLTLVLSIITTLHCIGTHTALLDYCTNTVETLTRLRHSFAARALRAHIALRVTTSHSHVALTSYYVTACXQLRYTPLQGTLMSIYTRTQQRLGGCHISHTDSRHTAESHTHSMLAGTALDITRKLPTALPPSMRLHSNRRTPLDRGQLLIYLHYGHSLHGPLTVRNTDFHTITYFNPRPLPPHAYTPTTAPHLAPHTTDHAATTTTRLLPHPHTDHPTTPLFPPKPGLTPPRGPIYIRLDTQATSLHAHTRLPHSPHVNASPTRRRYSTPFPQARQLRNLPLIDIPLDTLAGLPQTTHSYSRRAHRRALTDTLNNGQIFQHYPHVLAPLRRHLPGNLPFATLAQAPHHPFLNTHHNRRHGCHPQDAQTPQRIWLHPHTSNPRDAQRAHPTHTQRPNVNTRTGPPLEQSETDSHDEGATPTARERITHHVGVTPTRLQHTTHKHRLFGTHSYPPXLSTRTDLSGNQTIQAPHTSRPTTLLYERYIHIFHKATHPLSETSHSLTYDNKISPINSLHTTTNNNNQINKTHEHNSLTTTLNQLPFALNTPPQPIFTLHLTHLVQSIHHTIYILTLLCNILIY

SEQ ID NO: 998936 - protein, 265 aa, Homo sapiens
MHQIAHVTEQQDTTEHSNGNRTPCNFSSNTDSHIDTTHTSHRQVPGPPAPLPPYLQPLNRTHALDGRRRWLPHAPVIPSHPGATAAVHALLPWQVRRLPARPRTGPTIGCTPLVSYFTPSTPLTPGMSGGHCCAWRFPRLTRKRSVKPRDTSACTPRKVTTALAAAAFNTQFVPRTWPFPEHCVPTKGRQENFPLERTTDYAAKPWTEPSSTDRMVLASYTVSHATNSDTDKLPGYATQEKSPATTEPVLNNKCPHTVVTHRHLQ

SEQ ID NO: 998937 - protein, 113 aa, Homo sapiens
SSSECQITVNNVKIVILLFHQNNISHLAIVFYKAQSQEVQGVPIQVSQRKTPVRVFSVMFRDPYKFSNSRAFWYDALTFFVAFIQRIMPLASTFSTRLYNSRDSQMPLFPPQS

SEQ ID NO: 998938 - protein, 154 aa, Homo sapiens
  misc_feature (59)..(59): Xaa can be any naturally occurring amino acid
MSTLSAEAALANQRELDTHPQHSLGTHNANQEHALSRTSVGDNTPPGRYQVNPEDNNAXTLRAEKRARKQTTTDTYGHETANSRGNHHFYGNSYCLRTTQCNTLFTPQHANHTTTSHLHTSSSPPPLTHTVSSGQGHNSDHKPHTTRSSRATTT

SEQ ID NO: 998939 - protein, 74 aa, Homo sapiens
AGRRSRGICLWLQQMLGRNRSGDSLPASDAPVRFPSVRHCETAGEHLRRTISVLLGTLLMHRCEVVSVLLANQA

SEQ ID NO: 998940 - protein, 207 aa, Homo sapiens
MRAPQLFTCPEWMIQLADQKQEFNKVGSKIGRRSVSRSISQSSTDRYSSGASYTDSSDDETSARDSSKRTLREAGDFCVKNIKRAECGEETIEIGGDKKCCIDGLRKRAQGEKAFVVEPKSWVDHTCMSELCAYGTLWVLLGGQCRWGWLQTSIPLFTEGGCLSSRKWVSVVGLEGRVRTLNLGGVSTQLCGLWRGCEPTLDLGLIG

SEQ ID NO: 998941 - protein, 84 aa, Homo sapiens
MPLRHHRLDKDHLLMKLSSKKLVKLSGAPSNAGKPARGALGPTASPGSNRPHRLHPLPPRQHPRPPNLAARPPQAPHQQHTGHN

SEQ ID NO: 998942 - protein, 71 aa, Homo sapiens
KLPKAVVCGVLHMYGNLNMDHDWFPRDIVVWTSVRVLTQYKTVWPLDLTCVGKNLKDVSLIEVYINRNDIE

SEQ ID NO: 998943 - protein, 239 aa, Homo sapiens
  misc_feature (38)..(38): Xaa can be any naturally occurring amino acid
MIAHHVPQAITGCVWMLTRGKRVDWSQIEDLKQRKVMXVAKSWPGSESNRTDASTHTWDTGVCVDGTGLEVMGGLQRNQAGCRSVDRVNHLEQRLVKVNWEKAFNNNTIKWGRDPGDYISDNHTPWSNFRPHPERSAQWCPTWSHLLTERQKAHVGDVRSHQCNGKRSDHVAAQGRTREGDTRGIQTKGVRESDPHIMTYARGGVNSRGPRDRHTKEAREESNRGASQSGTTGEGGNKS

SEQ ID NO: 998944 - protein, 238 aa, Homo sapiens
DWPRDGPAARGCSLGRQLEAEADEEADPPASDAADTQAIEPQCIVQQVPAPSRMQMPQGNPLHAVPYPAESWLARDTVQVELIPETKGLFLEACGVMRFQPALQVLGYTDGTIDFRGSSQEMLRAQVPHTVWWPALANQEQCWELTGEFIEARRKSPEALPSNCVDADNPLFSEDGGSSRLFLSFQRARMLKEASPQEVRNSASGGPKFLELVSLVPRAMEFIPGLTSRAHVCHNACK

SEQ ID NO: 998945 - protein, 404 aa, Homo sapiens
RPALVAWRVNLVYTGSVPCRSLFSPDSRLLCFGLKQLQELLTKNFKSQDQKEAKGAVQWHFSSNRSAHQQHRQVHLAPICLAAPDRTSEPRLWANSFLPKPCITAKHPQESVIISKGDQQLVLLCQDQIPKLGTSDLNRASGQHQLDEPSKTVTDEPTRSGQTGAACLVRHQRENKTSRIFLVTGRMGNNGPFCMGDSRTVVVQGHNPMVTQNYSRDQTRWVHTGSWSTGNNRLEGKALAKTAVTNRDDFNRRGWRTALRRHWASRTTGREHPVGGQKMIFATAIDEQPTTILAPRGPQHTAPQDTMGTKGEGPQPEAGHKPDRQAARASVAGNTRRARTRPRVDREAAHKDNTAQSKQQATEELKTHGRRRQHTQKESKTTQPSKPRAQTAPRHQERHTRRQP

SEQ ID NO: 998946 - protein, 138 aa, Homo sapiens
MALMMYRASTFWNYTIRSFQDKAGTSRSVPTGECKVSRNCGMKTMVHLFYYVISTARYMNEIQQIHVNGMFMNGGGVKSRVSPLSMIMTLYRWKTGKEDYDCMHVKKLCNSDMMLLHGIRTSVVAADREDYVHVVYTK

SEQ ID NO: 998947 - protein, 93 aa, Homo sapiens
AEEGFTQVTRKGGRGQKKRQAEQLSAAGEGGDAGRMDTEEARPAKRPVFPPLCGDGLLSGKRTEISPVKIHTIERKLDEDIYSYWEHWDFRYA

SEQ ID NO: 998948 - protein, 83 aa, Homo sapiens
MVSGVKVWSGDQRLEIIRGVDCTYLVFESYSRLSDDAEKSGSGSVVVIWVNRFYPQKKGKVRGKVDKPCKLGKSPGECRWSKD

SEQ ID NO: 998949 - protein, 270 aa, Homo sapiens
DKTRRLRLTPLFRKGHRHANICIHDTFVTKTVSLDMETLVTLSRSKIWQIHLNMQGLVKEILFFLSSILRTADRTNHRLCPTFLRLMKGNVTRLAPYEAQLKGYGNDTVRERFISHNGQVTAAQRSCSHYLHMNAISTAIPRTNWSSSVDIRGIDTCCYKDLRVQTFSIVIQTTSHLLSDHELTESWTALVPHQPRRTENSDSTLPGRFQCANMRYSVEMAVPCGNDRTCKTSKYPRYSFSQITCQISQPCLKVTQGTCTKSGTDTPRRC

SEQ ID NO: 998950 - protein, 399 aa, Homo sapiens
PRHKPILVPDAAGAALGPSEVSDHGHLLRPYGPSHDLAVVVRSCDSSTQSSQKTAPGAVPERSSNIIPTVEATCMVIYFGSESTSEVLELTSYYSTTLTVTQYHLNKPKQQLNTTINIQKQKNQTKTQQKQNKENITNIDQHNPKQKNNYTNIKTQTIRTQHTHNNRQTTNELEQRAKHGDRRRSERGERVHRRGQNRRSTQAYSDWRPSHSSGNEMTKTRAENKGATERRAAPRRSDDPQTTNKEKGSAGDETRTTAASVRRRNETQQQHDDEKTLKDEKRRLSAQNSQRRPDDTQTRPTTVDRTAKTEPEQTRADAHEHTDATGRGDGHPAGASGGALRREGKAAATRGCHRRGHTARSGRRRARRRRHDERSAPHSQALIQLIPNYPHNSILLVCH

SEQ ID NO: 998951 - protein, 118 aa, Homo sapiens
VSDPKEWQKIPSLREARLILACEVEETQMKKNKEPEKAARGTMSEKYVELMRKGSQGLYTSRENIQYAEIRPVIACGHQQQGLHGIQHPSTKTLLHKQLLLTGNKLFWDLLCENQLMC

SEQ ID NO: 998952 - protein, 140 aa, Homo sapiens
NKRKSSGFAFDPSVNYSKVYSRYRPQYGYWVIGLQNTCEYNAFEDSSSSDPKVLTLFMAVPPCRIGVFLDYEAGIVSFFNVTNHGALIYKFSGCRFSRPAYPYFNPWNWLVPIELVLPTNFLIFSISLHHISLLYIALCR

SEQ ID NO: 998953 - protein, 71 aa, Homo sapiens
VIGDGLETSKVRGIEDVMKVMESFLAVLALGGSRSVEVSWWFNSCTMEMGEKERSNETCHELVIEYTGLYS

SEQ ID NO: 998954 - protein, 213 aa, Homo sapiens
  misc_feature (62)..(62): Xaa can be any naturally occurring amino acid
  misc_feature (160)..(160): Xaa can be any naturally occurring amino acid
  misc_feature (196)..(198): Xaa can be any naturally occurring amino acid
  misc_feature (201)..(201): Xaa can be any naturally occurring amino acid
TLVLVYITLVRKSRLLSPLQPTVGTRRLDRVVSQVPSKASSHFVTKHIQATEKITDNNDAVXTVEEIYYSDYTTALAARNQKAKSIHTQVKHVRHSSFPGTESSPVVITQEFKQSGEGSNGVTSKVCDTITKVLTEPGRMYYVKECEGDTETVCNMSHMXHRNRTESTIINTVTKRVSWSNTEMSQYYVEPRSSNXXXLQXPGASLAGLALPC

SEQ ID NO: 998955 - protein, 75 aa, Homo sapiens
NWGRTMAEKTQKSVKIAPGSKSVCVAKCKSAGSMYTHRHLRTSCIPPLKRKQFICGKPGLNQCIRRKETTYTAQN

SEQ ID NO: 998956 - protein, 142 aa, Homo sapiens
AGVHRGRLGVPCGAVHLKAYVCVGGGGSCIDQWMIVGYSCSCVSIIEAQEYRGDGYWRSIIVRKPEDQTETVSELKHRVSLMPGFYHRVHMDLRSGVLTNEACLLCASTSRIPWGQLCGYTGLEQNGLENEYPTRKVTGVFI

SEQ ID NO: 998957 - protein, 258 aa, Homo sapiens
MHTISLSNPLHQHHPHTYRIHTHAPRPPAHPQPQAHPGPHRCSHEPPANQSGEPPANTHTAPPAPCLTPSFPQPPHTTPPTHPSHPHTPLIMPNLHTPLTPHSTSLHSLHDTPHNNTIQLPHPHSPHSTHPPLDHIPCILFKHHHTTLSLSQHQLCTTKTHTHITPKTNIIQPTHLTIINPPTYPPTPHPHPLSPLTNPHTLMLPLSPQASHFLPHPPPPPHTTPQPTSTPHYITLSTTPTPPHPHPPLHLHSPNYPT

SEQ ID NO: 998958 - protein, 237 aa, Homo sapiens
LSEAGNAAIEVFEMLWSLECGGSLGEAPERMLTRPHIVYALFLSLCAAPCLEYVTFGALTERTDKEVDLYRPRTRSLLYTSSGLCRRRGSAPERACPGNVHPPIIAMPGEPYLTRVDDEGENSGQNRSGVTHLPITFQECLCSYTEQVRVGQSLSDEKVLHAQRTKRLYGNGILCCKAPKVKFTLDNCDTTLGALGLDALSLSAIFNSSANPFGVILWQRTHTRGNWAAKWRTYSGS

SEQ ID NO: 998959 - protein, 84 aa, Homo sapiens
TVTATVAGGWVPETWRSRSPVCSCVRVGAETSPGQGSYQDGSGGRDSRRVHQQEETPGGRNLRQIAGEAARDPNLRRARTVCGV

SEQ ID NO: 998960 - protein, 95 aa, Homo sapiens
MTGSWGSLQAKGLGGLHEVSKRKALGTMCVTLCEISVFHQYSRGFPLRMSLGLGMGLTAERAIRSLVANKITVYFPNGHVLDLVDDSTIVIRQGN

SEQ ID NO: 998961 - protein, 118 aa, Homo sapiens
EREDEHSICMKMDVGSNKVLMESPGGTSPQISLWADRVIACWAQSQLEYSHSFIGGRCVVVLNRLLVDPCAHVLASLVVSEMEQEKIERRIESHENDRSDEVDATGKPKTTALGPLED

SEQ ID NO: 998962 - protein, 118 aa, Homo sapiens
LELLTSGDPPASASQSSRITGLSHCARPIYLFLRQDLALSPRLECSGVVLAHCGLRLPGSSDPPASASQVTGTIGLCHHAWLVFCVFSRDRVSLCCPGWSRTPELKPSAQPRAIHNSG

SEQ ID NO: 998963 - protein, 344 aa, Homo sapiens
MAWGAPAHLKRLEGGASIVDPGEGRKCGEWTPFLVPHVARPNAVGHTTAGERSTILKNTEKDTEQAKREKQGFTNTVDSTEKAPWEKNIHNAQPLFFDILHYPGSGYLTHLYMGAVRIPRWCYFVRETLYTLYKISFSTNPLYTPLFGAVNSSPTEISVPQKGFFVITLSGGARDTCNPKGENTVSTKAHPRGGAQFFSPEVIPPGGLDNSSLQRGEHLHPSQPGAVYTRYRTHFPSFNTAGGGPGGYNTGVRYLNPAGGRKYHTHGPPFGGEQPPQEEHSGVGKPTPGGGPAPQTELLNKYPQPCLGGPTRGVVVKNPPVGCSLTRKQQCSQKKYKSGRGDIV

SEQ ID NO: 998964 - protein, 130 aa, Homo sapiens
EAEEYVREGSVELAPGEQTCWAEQKLSSDETASDSLERNDDAVSMKVYKHEALITKKPNALEESGEGTGSQNAIFNVIVSGNHNNMLSQFTAQKKEIHSVATWSQSTVDVIQRDPVVHLTDACDENLHLC

SEQ ID NO: 998965 - protein, 231 aa, Homo sapiens
MIKRKKKKRRTVSRFDPDSFKRAKLRVQFGSPSGGFFKDFPIPDVTLKRNISLNSLDFLAIGDTSHWLGTGGGHTPKFLPTGLVSLPGGAWQGPLGNVCVWPLCRAGAPSAVMEPVLEDLYWIQKLYAYTRTPVLLVNFNQLLASSTVEAWTAGPSLAMDWSGIRNMVHSRFTQGPLPRGGDSFEDPNSGSKGLSPLGLQNFGSTQKFLPFYLKTFHKHTTQNLVGLPQNS

SEQ ID NO: 998966 - protein, 30 aa, Homo sapiens
MRLSDSDSGPNQALENAGNFHKHPFPPNAP

SEQ ID NO: 998967 - protein, 64 aa, Homo sapiens
MVPELSQCIDQPLGGPSLSEAKYGHLPQNVRSLKYWKLVVAWYLDLSTFLEVLCQRIAVKGFSS

SEQ ID NO: 998968 - protein, 146 aa, Homo sapiens
TLSYDPITAAIQIRILSFTMTVLLTKRMITQTSITPYIVFPVSAYQVQGPSWMQAQHIFYSILVAVYNIPQWSTTIVTTSPHLMSQPCCVLDRMYSICPLGSTESISCLERQVMQREPILPTVMSLYADRQRFLLRRQVVNSRWLV

SEQ ID NO: 998969 - protein, 172 aa, Homo sapiens
MTSDLRLHSEEHSCALVQSSVSLSTDTPFWAIQTIIRCSSGQNLSKGMYVADVETGRMRQTQALADQFEDKTTSVLERLKICVLLSSTTLTGPLQRQLAKLCLSELGCTSSGPSDIGEELEMWEDVVILCMNRAGQHGKAEEILRQELEKERGGLVNTGCLEMSSETILGMT

SEQ ID NO: 998970 - protein, 210 aa, Homo sapiens
MECGQERGPEWRARRNYLQLAPRGRLWQVSHAFSRGANLENGAFCIRVWVVGWSVIDRWLIVVERLGSMEIFLALSPVEHLLENGYHEMMSIWGCRKARKVWTPVVSTWLPSLRTLVDTIRRHKLGPSEAVWDLSQAMLSDSRVPEANRPWLSCMVLSIDTIRIAKKKHSPRGHVKGLFKYEERFDQRFSRGIELFMYEANGAAGRLTCR

SEQ ID NO: 998971 - protein, 157 aa, Homo sapiens
MTYDIIEIPDRKLDKNYQNLLDYSVIAYMTSQFQSMRTTYRCGLDIRQEYLDYCASSTNTTLRQSWTTPIHYKSSINQIVIVGNLLVTDKSSNGHIAEFSLQLISAIVNFTYQKNECCKTNSSADGPCSSEQYQNIDGLSISESVHRPSYGSEGLLS

SEQ ID NO: 998972 - protein, 146 aa, Homo sapiens
NPFHLVLRVGQALQFESPNSLRALSVPGPCEGLGIRDEIPAMKAPTGLTSKRVGTTPGLAGEASELRLYEEKPEGGAQDASPEDVTPKSNLIPQIHTVIFVESGAVWDRWISELPVGTKMLRAWFESVCMTGREGQHSPRQGAQTD

SEQ ID NO: 998973 - protein, 230 aa, Homo sapiens
MSILIFNNFISCTSCNIKHNPCPVILLKRHLEFNYSKGRLAHVHLTFLWHLASSKHISAPPSAADSESWACCTPYFFPDLRTCVSCKNIIMNQSGCLIMSTRSRCAHNLSSPYVGPVVIRCLRQKESCVYTGQKVQVLGVLPGLHSQYCLLTLVHTHPGTLNNKNRSGHTTLTSGGWTYPDYRLSRHENPSMWFTTREQHQWSSGLTTTLPVQQLDYNGYWHLKPYSLPH

SEQ ID NO: 998974 - protein, 308 aa, Homo sapiens
MSPRQFKLTQHKTLGHTGFTYATFTICRTRVNPFDDHGFNNGSERFLTHTVRYAGDFHHYYYSLDNAPHSLSSNQHTMTGIPHTPRTRAGRFQSTGALLCESSPVGTAIARIDTLASSLSYHVTLSFNRRHFITYTTELDKKHISGNTNLTIMARPLGPTRHTSPTPHPLAPLPPTLPHPLRNPLGHPSPVAHHAATSITAAQAAGTTHITPTLPTQRTSRATPPYPTRLLLTPLYPSTTTHTTHSIPPSPHTPSHPVFCTPTSPHHQNSHSQPPSQHTPTSIPRYTHVSQPLHNHTTSPIHHPPHSQ

SEQ ID NO: 998975 - protein, 207 aa, Homo sapiens
GWCLLSSLSQCAELSAVAICQPCCTGHTCCATPCAGNCSCFGLRPMPWLDLQPRWSPGGHFRCPWPKRNKRGRNPGNGPKGATRQNGAQNTHHGTVEPIWFPKPINRTLYVCLVPDAWCDTSAQRTPLCWVGSEPKQNNTASVGPSSGITAGDPPTRKAANPKRAGQFTNTTEGKKNAYTQRTKRHTPHGETLPRKAAPAVYASGAR

SEQ ID NO: 998976 - protein, 106 aa, Homo sapiens
  misc_feature (54)..(54): Xaa can be any naturally occurring amino acid
ERQEQRQTEREQRKKNRHRKHNRTEQNRTATDNDKQTHTQTKKERKRTERNATXTLPSGKRPVPCGCWAQFLRQFVNAFPVSPFALRTQFFGTPFEWFLTNRCFPC

SEQ ID NO: 998977 - protein, 220 aa, Homo sapiens
DPQWLRMGPARTHDNGATTPMVLPCLHTTEMCVQIACLSVTCFSCAFLHCVALPKVRRWKLTKAFPLVALSPVQVEHPQETTSDRLLRKALAMPWGWKNPPARRTHMVSVQRKARQVDWPQQSWWPPPCPHSKHRFIPPRSQRTPDFIQLGQFPSFSPFGTSDDAQKRSGWYGGKRCRRYRVNPRCPAIYGHTGGKTFPDGMGKKLGGNAPDLGIKSVGT

SEQ ID NO: 998978 - protein, 362 aa, Homo sapiens
VAETGLPSLSDTKLADPGFSWAHSEATHGSGSKSLVLAPSACPGYLLGCCGMESTPYPMWQRQSLCATTKLPRLRTAILRTPDQVPPTARPASATRHWLTTQDMHLQGQPCANQLAPTKAGQRMAPQRHPNGLTRQAYDTWIGPTGQATPVLVLKELLVPTVDTLVTYGFIHKCDQPTRESNPPVRAQRNNDGGTPNEAHTTGSAFTTTSKMRRPPYHEQSPIMGPHQVTQPKTQPLRGRRGAAECKKQTNNNRAGNVTSKGPAVNTPTPANHRRSWSWARMIYHPTDETNAPKEPDPPATPPVYHRIPYTHKPKPVAPRIRGPLGPPPPDACCHHTSDTRKGSTAHMTYPFVTSARPTLPN

SEQ ID NO: 998979 - protein, 240 aa, Homo sapiens
MTKKRKPVVKKIVTPCIFLGVAEGCVRTSRSQGEHVRRVQIEKKRFQKRDVTMGNERLVRPTKIGQHQATKARLIKGGSFSSDTGSQREAGWTVYQKFGERGRRVVTTEISVLSNSWDYRHMVKLPLEPFRGRLTQTFAPFVRQSIGEKPSRGQVNYKSEGDTYVGELHQGWVGPDTLVITSGFHVRLFVSRKCVEITLWWALVYTRKAVLLSHTNTGYRWGLGTVLSTSCSHSSYFDAT

SEQ ID NO: 998980 - protein, 71 aa, Homo sapiens
MPHSSRRPWTSPGKLKGPCTHSKQGHCRSNHVERDHTEQKQTRDIDSRQTHRTRGGTNQRGTTTPGNTQVE

SEQ ID NO: 998981 - protein, 314 aa, Homo sapiens
MWAAELLLLLAGGPQANVDGLLKDHCRWGCRALLEEMRPCAGGCPNGTKMHFKASSPPGPRLSTEGSVWTSDPDNACEKKRPFSFLRQEPWPCAAVAQSISEKEINAGFPDLVAEAKPSLCQLGCRSWYVHEPPWDNHGSSLGQRDPDGTIGTLGAKYHLTAPWVTIPESRATNERWVAPAMCTKCRAYEDNVGTTLTGRSDPGRPKQTHPVTSWEPLLTSVPAFFHSGECTTQHQVKTPQCIGSGTEAEAKSRNSQKNQFGQAVQTPNMGKGSLCRCVSRQCLTAQREKPPVVSKEFARCGHPSSRWIRWEIH

SEQ ID NO: 998982 - protein, 385 aa, Homo sapiens
MHKNCPVVANPELFLKPRSQDWRFLAVSYNLGESNSKPGTYQRQKHSELLQHFNAPLTRCGNTAKKQETDRRADVAPTQSDRADSRERAASAEGRERGQRAAKGDEATHEAQATESTAGEAQRNAARPQAEESGERGRTQAHNTQGEQQRDEANAETNKRESEQKSKRTTREDKHEQNTRRKKSRETKRDEQDSKHESRRDAPGREDETKATDQIETRERTHERSIGKSEKRKETRRSKRGEETERETAQDKDSERERKQDNTEEEKERKSETRQRKRNREKKETTGNRKERELKDGREKERTNTRERQRGEKRRREQRKNDNEESNSDAERAERTEARRRRNEEDEETEEEKGQKEKTNRGADTKQERERGEEARERDAKEKRQ

SEQ ID NO: 998983 - protein, 279 aa, Homo sapiens
MTLSPLLLFLPLLLLLLAVPTAGWCMAVPYCKALDFSWELGHHVNYARQAIYTCWGPLNEVQVHLLVTCDPLPMKHLCGWLPSLPDPEELFPNDGCWVMADSSDVTLVPYGNAHGTKDVSRAGGSSTCQHGPNQELQHSPKVDGLRAALNLTMQLAFPDHSLACHEWSDLHEKSATYCLQRLQPQGCRKELIMGVVHWADRGMLLTPRQGPQRTRWSPATDRRMCLGVTAKRGPPLGTIRPTLLTWDDNRNKGKQPDDGRHQQVTTRHGSRDAANSGTH

SEQ ID NO: 998984 - protein, 87 aa, Homo sapiens
MSTCEAVRSIQKRSKSDRLREVERRRRSERWVEWGSGEEEEKREKKIGKENSDKGERGKDQDRKEGKSGERRRKRECKEERKKREIN

SEQ ID NO: 998985 - protein, 148 aa, Homo sapiens
ARQRTIVKESACFAFNMLPLNLTCRKSCLMCHSTTNIRGIPTRRGLVCSQDSSADHAFKLCKQPACKAGQNCKASGKDGLFRKLLTHICEWMASFESLMGINTLNDSVPKSHFYISLSWVLLKNVSIGAVPPNLFFISSEGVNRRIMV

SEQ ID NO: 998986 - protein, 86 aa, Homo sapiens
IRNEGIANAMTVSRVSRDFCCSPVHDLAVPGDDEVVTITQRCPSASESTLLRSSDARLSLITWFAVCDNAYVIQVAIMHAGIYDAE

SEQ ID NO: 998987 - protein, 222 aa, Homo sapiens
TAVRAAVPPAAPQRWKQLLHALWPMLHPACKLPCMLVLRHVPWLADAAPRSWANGGPPLDGLTEWSGYLDDRALKAGLGLHEKTDGVRAMNGQSELQENPGLRARQEGCPLRDREAPGRGTRGSPEATGDSVPCQLGPIHSHEQHTTCILDPWANADSRPRVEHGDAPCALRSTLSKERTPCEPSTYQFRLWLVESHKTSATTHTLLEDATSVGRLALGESP

SEQ ID NO: 998988 - protein, 303 aa, Homo sapiens
GLSELEMQLLRSSNAAELEAEAAGEVPSDVTRPTYARTTSSTPDRLLSTKNNYYLGLTGQAKDQKVVVRPFRPSLPSQPFRPVREATGLDMEPEQNRKTRDQDERHRNTDTQDKTQQEEHQTTQKSQYQIVRNPPGSHRAHPRRNMSGRGNHRPDRGRIANDITNAAQRVGEDEAQNHKGGDICQERNREIALYASVRRGSPRLPASPQEGTPMALSAAPPYVYVGDEEKDRHGWLDAAHFTTHEGTEPPRSKPTSGPTQRSQNEAKLVGAYLSTGKLIEDDAGHYSRTTPIERRRQVGLRDH

SEQ ID NO: 998989 - protein, 274 aa, Homo sapiens
RRSSPRVVGVSCFNSAWTEPGARSPPPVWLPIAMTSVTSSHAPSDVTQWPHPPDCIQLPDASHTNRRPGRTSSIRSADHERPRTTLDRCARNYHQDSRGRHTTAKIKPGATTPPTVYLSTVLLHYEPQMTVDSLKENFAKTTYTLTHISIEREGTHCLQTPTTEKLAATQTTVDTHSSLPRLIPGKRTQNRGGTEPGATRTATCTAANAEGGASDPSRDRHKPAKITGPANAGTNAAPHTQAAHNEPQQTQPPKKTDAIHLPITPITLEMRRAR

SEQ ID NO: 998990 - protein, 249 aa, Homo sapiens
VPIGDGPENWTFFSVVVVFETGSLSVTRLECSGTISAHCSLCLPGSGDSPASASLVAGTTGAHHHAQLNFVFLVKTGVSPCWPGWSRSLGLVIHPLDSPKCWDYRRGAMRRLRIGHFQSVALRGWWQQHQGQFSGEGSRSRDERWRWGGLGSGVSDGNADGISRGQWDDTDWQWRAKCGGHSLGTPQPFGEVQVGGSLEGQESSQLGNMEDPHLYDKNFNIAGLWAVRCPHGQETEVQNVLTRIGLGGC

SEQ ID NO: 998991 - protein, 376 aa, Homo sapiens
GGGAVRPGRVCGVDLTDARAGAGLVAMELLALGALCGLLWPGGGLPTVHEQWENLWLASVPPGGSGLDLQHAGTGTPWDTPYTGSLSMSLVAGLSLGRAGLPTIPNVEALRPPHVNTDNQLPHLHSGPRGQANGDQKKGRSKRTEQHREDKRHKGTHDETRQDQQDKIKDRETRNENRTTASHTKARNTQRRTSSSRKHRTNREELRKTQTTDTPTMNHKKVENRSAIVTAAQQAEPGGNRQTEQMTNNARPTCAGLHHTLGQVTTEARLAPVGREHTIENTAETRATRDAEAPGHPQTKTVEDGEHHQTTSQQTHRTQNNTGPGRQTASAEELKRKNAQQTQQQEGAHHETTARQREHANNEPPNHADYEEGRNS

SEQ ID NO: 998992 - protein, 117 aa, Homo sapiens
LCGAVLVLARPTPAARARERRRVAGVGRVLCVALRLRRGAGGRNVGAAGAFLSYPNCGNNGLTGGRWIEGAERGSELHRGIMTSAAVQEHPRRNRMILVWVTFPSDEEDIINSADED

SEQ ID NO: 998993 - protein, 299 aa, Homo sapiens
AFPSSSYKMGKSFANFMCKKDFHPASENPNHPTHKYGWQQLSKIIIMHQAQHTPQKQLHASQYLQSNKESSCIIALLHGQHERVTAMAFNFHVMQAPTKAAQQHSKHESSNRKDTPARSSTRITNLAMAAQGSPHAATNHAETLTMNSQQTQPSWSFTVRQCAGAITMSTNGGPCQPQIENVLCGSFWNQCKFGSTDGSGPSMHPGANSGDETPVGMHWKRQCHWRRNLTAHASNHQEVHVGQVTAADSKDSSKVASPARRPHNNQNTKKQTFSGELSIRRDEAHNTNRQPRKTASGRR

SEQ ID NO: 998994 - protein, 115 aa, Homo sapiens
MACAQADGAHYSGKNLHPAEAEGPGDGTWNSYMPLLVIWDPTIKDSGLERIQIGTKCRPKGPTTVTRGPRTKYQEHRPLKRKAKTIRTGEHLRETSINTTEQQKKKDKNDKKQRD

SEQ ID NO: 998995 - protein, 124 aa, Homo sapiens
MPLFWIKGYEAPWCAGKQDCSRMDGGVKHRRYRPTKNYLSYLTAPRIILAFETDVTENMNSKDTVLSRQSNLTSAQYETTTELPDPLLLVNNHLTLLALAPAMCKQFYGPVRALTTDQNCRIWN

SEQ ID NO: 998996 - protein, 149 aa, Homo sapiens
MTGGIPRHPQTKEKSRSSNERQNKESNQQPTMKQKKNTHQTGTKTTKNKTTSKNDTCKKEMTRNQRNKERRNIHKKERERRKKTGQHNHQKDINKGDETKTSYSHQTTMIENNRKKKRKGNSKQQNTTRRIETDKTQKQNEATTHHDKQ

SEQ ID NO: 998997 - protein, 114 aa, Homo sapiens
MWAQTRGHILIRAHVQIINRVGHIYNTCGPTRGKSCLDEIGVAQRGTCGRGATYERPLSPKRAHCSQPQVAAEQDHMSKGAPPRKHHATPAQTSTKRTSGTTRRPRRNRQPTYN

SEQ ID NO: 998998 - protein, 233 aa, Homo sapiens
GGKKDMGHEQNQGAALATRCNQFCRHVIAIIHVSRSRVSLLTHNVAEDDLAKIIDIHCNTKCTGRVMRGPQVVETSPERTYIDADKTVSVLGLFPQTHSGWPQPCALKFVLDVGITEHRREIASLPDCKFADHKKSLAELGMTPGTIRRPNTLNGDKFPGRPRRRFHIRLKLVQRLTAPLAVLGNAPTNSCARVFGHAQSYLPQTQWLAQAGNCGRRIPYPSHPCANSDLRRP

SEQ ID NO: 998999 - protein, 368 aa, Homo sapiens
DVLRRESSGFPASTVLGRNPALVPHPGRPAIARPSVTVFTAPVVTAQGPPAHAPDAASDTGRLTHAIILKSHANERTGVTTSAGLRQKLPPRTQKAAINAQTPTWELYRHPYVYHVPCLTIMTGDRCGFEELCKYFLHNSHEEREHAEKLMKREEPRGGPNLPSGYHRTPECDGLARDGLNANWSCALTCGTKMVNQVHYWNWKNWAMKNIEPIVLIHGDNYMNEQVKHQDWVTVNQLAASMGKRTNLECAEHDLGKATLGRHSKGKQQTGLITKTAGETGGNKADETGTRTIQKCAQQQRRPGENNLQTTGTRTEKRKKYAPHTDKATQRKREARKKKLKNEKARTKQERGNAQPTPCTENEKTPQR

SEQ ID NO: 999000 - protein, 83 aa, Homo sapiens
MGGRTHRECATKIGGAAAATNSRGTSVTNSSGVRHTILRRTSPPAGVGNKPRQKKNKQTNTVGGGRDEARNTTVTAAQTQTTV

SEQ ID NO: 999001 - protein, 152 aa, Homo sapiens
RASYEHNVKFAVSSQYCYTIDTMARETDTSNRRIACVAVTSSRLLALRTITIFNHTLRASRTQHVTVLSKLKYDNWMCRRELIHMVVLSKLCESNVKLRCFKLIQCTVLEIALSYCSNLKSYYKRIKDDESFHFRAKSYYVNEKIQLWDNYH

SEQ ID NO: 999002 - protein, 103 aa, Homo sapiens
GSVAAADCGYRVREDSALFSSVPWRLRKPRSVVRIASEVYDELMMAYSGARSTGEGRQVEVGVLPTWTTIVDAEITRMIGWRGRSDIIYGEELRSELSIVLGP

SEQ ID NO: 999003 - protein, 77 aa, Homo sapiens
GPNLNTTSSNPPEEETPFYTNTYSDYRYPEVYILYPTRLRNTLPYVTYYSGKKRTIWIHRYGHELMISLGIPQGFIV

SEQ ID NO: 999004 - protein, 395 aa, Homo sapiens
MQSKANKHQHRVSKKDMHGQGSSMHSSLSNGDVTKIGISTNDTIWKQQKGTYTGRPTEISSTRIRKGCKLAVHSISLIGKGCTFKNQVFRQVNQIYKQSFRYRDRNIKTSKVCGNEADIFLIKTEEARHFDTRGRQVMHLSKRDAIGKTFHPWAPDPAWPRTTVWPDSQFSKHTAPFSAYTAVDLYYPNTTGDQALENNNGGTHRIFNIGEAAWRKEALATSHKCRRPGQETQQKETMRHTALGETDRTVGYQPTPPSLTAGTPGLDKRNNSDTLPREQNTPLAERTPIIQTTWHTKHTTSTIKSVITATCNRSNGHIRIQYTHEETPTIRTNRPAHENTKQHHRYTTTHTTRPPSPQGRHTPGNHTNSQSTPTQAGPTTRHDQKTHTQKTKNTR

SEQ ID NO: 999005 - protein, 170 aa, Homo sapiens
MTANALNNEYSDRRTYKAKINNNRTLLHNTPSHYAHRKWTTMQKQSDKKRPHEGNKRKTKRANARRNENKRCHDRHEVRAAHSGTPTTEDMPQRVAAKRSTTAQTTRAEQKPKIREQRAKNAEDTKERKNTANNAKIKESNKNNTAKQHTESSIRATQTQGQHKGTKTAE

SEQ ID NO: 999006 - protein, 261 aa, Homo sapiens
MALITGHPLCTGGQSYPPMHWGPAPSGSIPIPQGFQRKMSPSNMRSHRPTATAGLQQDHNRLHKLATQTGVGYAGTRTQSKISNTPRRGLAHACGRETTNRHQAYTGATRDPTTQQHYRATPPWEHTLQTHPANNRAPGHPSRQPGNRKRTRVATPYQQCKQHTTNNRAYSHADEQQENAHQPLPAPHQRHTERKTTYGQPNNTPTRHHATGPTRHAKPTDQGSRSKERETQQKSQPPGADTPTAQRRETLGITRDTRQPQ

SEQ ID NO: 999007 - protein, 283 aa, Homo sapiens
MACVWMSMVRETACLYQCASNGPGPGRSRVVACRKGNDTGLCNGHPKKNGHLRVHRDTRTTSRLIRAIDCGRAVRLGLEFHWRSEAICRDVVSGDGNVVLNCTQSRAMTLRGNGAGAEPLHNGSSISYLIYLLLASNEITAEYLKRLTCIALVYHHSEPDMVESPMLPHVSIWLLSPDWTLVVKAMSLQTGGNGAMRLLELNETRTQIGCRDTRNMEAGHSGHQSKQQESGRSTRAHKDRGKQQKRRGKAKTQRCTDARMRLPYTSENVIKMGGRMRRRRNLQ

SEQ ID NO: 999008 - protein, 178 aa, Homo sapiens
MTTDNDWTLGLTPDKLTDDNEYDLTNPTDCLMEKCSEELYMECTTCNGTALAQSHLGATCTKREYGHSTPAPGKMAAHEGQRTTTLKTHGKSRTPRKRIKEDHEEQQRKTTNSNKKPPRSNTDQTRTHTAKQQPEQHEPKHHTKSKQRNKSRTNQRGKKAKRKRQNNTHRTNSDATNT

SEQ ID NO: 999009 - protein, 296 aa, Homo sapiens
QWLTPVIPALGKPRVGRSLRSGARDQPGNMVTPYLYEKYKNQPLYTRWPQKLRRKLLTILKPKQGSEGQDGRVERGPQAQTKEDPRITSLHGGQDMRSGGQCNVSSRAPPGETKLLTTMHHQSFLLTTESPMNEAPGQNKQRTCGSLVNVKSQQGTKARTLYDTACGQQVTPLMRAGWKRRHDVRMVLINQCSGMLPNKIGIISRDTRGEYKNMIRITLQQKIYTLGRTLKNRTPGEPEKRTRKRVKNANQGHTEGDHVNRLMVHKTRKTRQRYKGRNHTKRRDGGQHDANHKQNG

SEQ ID NO: 999010 - protein, 345 aa, Homo sapiens
TQSQTHSPGGHTELFLNKSQHGSSAGHYTGISSTRQSKRSSHHQTYAPTRRKKEKKQKKKKKKKRKKNERRKRTRKKKRKEKKKERRRRDETHEEERETRREEEEKKERRTNKTEEAEEKRETKRDRSTGDGRKRRREREEEAERGGEEEEGRRREEGRRGRNREGGERREEEGGGEGGERRRRRREKEKGQGRAREEGKENRDKKRIRERERDRRERKEKKERGAEEREKGGTQERKEGTDQRKGQRSNEIQQIKTAKNNEQATETTQRARARQKKEREHERREERQRGDRQKEEKENDRQAGQEERTEKSDRKAARKDKRERNRERSRTDQKATQRKHDEPAN

SEQ ID NO: 999011 - protein, 201 aa, Homo sapiens
MGRIPQNDSLENMEEKQKDVYMIRGDESATRAQQEDTHETRSTMRNDSTFLTTNIKTKEANKNNTKENQTKRNKQTSTTVSTQTSYKKSKQTQRKHTKTQNTQKNTKKGEEQEEPTRKKNKTTEKKEQKRSTPKEDNNTHKTRTQKEEINRRNINTKTIENKTKDKEETTQRKDNKQYKQNSKNNMTETKKVQAEDRHRKR

SEQ ID NO: 999012 - protein, 124 aa, Homo sapiens
GAPARDRRIRLTRHWILKPKHDPESGIFCVWRGYCILSSHRMGTGGTNNSTDLIADQRADTLYRYRDSELIQSDRRRGTTSQTYRADSVISWLEHIVFQNLLQRLQINIFILYLAPYRLCQDRE

SEQ ID NO: 999013 - protein, 534 aa, Homo sapiens
MEPITTPHQTTSAAPTPAPHRATPSTMPRPTNAPHPASTPTYAPHTRALAHPPQSATTPKPHTHPPTPPHPPPPHAPRTPPQATNDPTPLAREHQAPRDTATPRPAGQTPATRPPPRTHSSPAPPPPITLHRHTGTDPPPPQQPRPTRNHHSARAHMHTPRSHRDPPHATTEPPPQATPPPPPPTLPHQNAHRPPAPLTPPDTHAPPHTPPHTAPHTKTPHTTATPTATTREPTATRPTARHNSPAQHTPSPHTTPPHPHTTHPPSPPPTPTTQPPPALTTPPPQQRTNHPTPPPDDHTPPPPPLTPPPTRHTRPPHTPPTHHAAPHPPPTPRPRPPPTHQQPTTTTTPTRHTQNDATTTPTPTHHPHHTHATTHRHTPTRRPPHDVHQRTSHRQTAPQQPYTTQRTHATHQTTLSHRQPTIAPEHNHSTYRHPGPSQTAYPPPTDAHSHPTARRSRNAHPQDTARTRTTETTHEDEAPTTTTTYNDWRTRAATQTDRRHTRQQHHRHVTDTTRDSLNNKTTATTSRPPRRTIN

SEQ ID NO: 999014 - protein, 684 aa, Homo sapiens
YFSLGIKYVFNWYISDGWQAMPFIQPWWSHNLFTSTDEQSPPSAIIITAQFISLETANNRTFPASSKLVGILVPMQTSLTQFTWPMPALGTHNHRHVYSPKAFGSNSHPFSPQTGWTNRFIKAAIQPFGNPRTFKGNFFNFPSQPHLSTTVVSIRCRKLCEGPEAASYTTYLNNVNFIKGNTLTLTFVTAPGALVKRRPQFHGTMAPKSHFGAGKHGGGWYHNVDPTLGIIIVTIDPGTYLTPSSQETATAQPDKHPPQSSYSRPSNFSPNALLPHSRLTRWNIPTGAYTAAYTFLQLKDVTYLTGQHKHSPQAPVTNAHAIRDGHLLGYVPPRYMTPFSRTPVSETPKNGGHNIGGGPHKYMDYTTIGGDMGHSSHRGIMLWGYKHRAHRLVHNEYGTFLIRKQKCHLPAHLQQDFSTSHNGARNHTGAEEHHEGNQQLTRQGQSPQLETTEPTKRDADTTGGTPPGLRENTPQPGTITTQIRHAHQLTRPHQTHVRASRGTTQHHNEYDNTETHRAYGPHRPPHSRPTTNTDETTALTTPHDDKQASRDKRPTPITPHRTASINDSQTPMTPRNDSDTNGSPMTHDTVQHSQSRRERQINAAQQQKTLMPQPRNSRTANTNHPNTMTHRPHTREKNRGPPTARTTQRTTTTQAHDEQTSDTTHHKATTLRRAHTHCTQGDKQ

SEQ ID NO: 999015 - protein, 124 aa, Homo sapiens
KKSYSNDKRYLVTGLCAKMERRKLIVAICLMTLDRLVVHASTLPAVTLELHETYQTKLCSKYSSIGASIQNACMSQFSGFTYMCISQTIAKSQSDKQRGEAFVNSDLNMNDFGNIDAFLGVDMT

SEQ ID NO: 999016 - protein, 41 aa, Homo sapiens
MTNNSSLQRSDGSILIVTLLAKSFCNNRIVQRGTKVIVIPR

SEQ ID NO: 999017 - protein, 248 aa, Homo sapiens
GKLYLVGNNYFYDWDVGSIYTYSNLYALNNLVQRSVAGIPRACHNLTRTRPNSALQQASIDEAQFNKGVLVTVFSGHSYTRWRPSADYGHAQHMMAYPFRNQITKGTHDKNNVHGPRRRQSTTTGTANGTKQTLGATTQLSGAFKTIPHFPGLTPTPSCCFLPRNEYRQRQKTRVLRQHSRENNHKGVAKWPLGEIPRLYPTDSPDTGIGEVARSRRGTWIVSRSERVVGSVNRNATDLVRTDTCGNT

SEQ ID NO: 999018 - protein, 162 aa, Homo sapiens
MDASGVRDHAGAKVTETPSLRRLTKIRRMSLVHCMKYKDNTKKAERGRRIGLATPEKGARRRKPVTSAPYDSREWSTEKQTLSQNNKMSLGQADKAWGINPWRVERGDMARPEMATSGPRDTAYKITHRGWGTRYRLEGSESDQGRGTIGSTAATKRLKKRG

SEQ ID NO: 999019 - protein, 452 aa, Homo sapiens
VAGRTVRQTESGVAAGVRSHGVNDYYQTLGLDRGASDEEIKLGLPHASALRLPTTAQEPMEARAPDGHTVSTAPLAWRDLTETGAHRRKPGRQSAERIPHRHLTNAGQSAMGPSQREEELRPHMVCGQGTRGGRGSRLHRKLGVQPPSRLYTDARITHTISPHLWETKPRLVQLGPIVVRSGPTNSVYKYHQGSGEHEPNLSPLLCSEPRPKLISLLRESANGATNTTRARQLRNHSGANNSGTPKFVQAVEQHPTQDINTVQLDSQSPHRTYNLRERQTLESSHRQGRYNNTANHKRASATHSIHNGEPNRTTPAGDNLQVGPTNYTSTRRHSEVNRVRKQQADKEVQGAGAVSAPTPTQLLDYATQIERKAVSSDVNVIYVRPAVLGSAAQSPLLHYETSNGERLCETRHESDTTLICEHPDYAAHPKTVNDGGSNMSTPGNGDKQQKLQ

SEQ ID NO: 999020 - protein, 292 aa, Homo sapiens
MKSQSEVQKEEIEEASANARKRKYSPSLPLRTNRITDTRVARKANAQPVNGKREKSERRRMSHTKMLTKEYGRPKAVPNIARSSYFPKNVTAKRRIGQNYNHVKRRKPGRRIYELQQDGENIWHSDGGNRQRMKDPAQKGDITRSDQMDPLGERINCHHEQKPIHIHQCPVMPLTGTMIDGNTRWKPRRASHPGAAGNGNETTVQRKTETSTWTINNRCTGTVAAKSHKEVSNKQRPGRKNLTGHRRRRELSASRTDHGETENTRRPDSNPARDRQPTQGEKPEATTNTAAN

SEQ ID NO: 999021 - protein, 230 aa, Homo sapiens
MRIIEREAEDAGAERCTSLQPDNRADRLKQNTKKQKKNKNKFGRPASEKLNPSWGRGQVRNGAGVPGTPGDRGVPKKKAGGPGGCRKHPRGGVRRDHSGTYHKGGPKEEHQINKFTAGSEEYYIDRQPQSANRRSSASDNERANVDGRKQDSEPAERRRARRREQRQAQTQTERQKAERQNSNTKAERHHKEARTEEKTTKQKSKHSTDTRKAELETETQEGGTTESGRT

SEQ ID NO: 999022 - protein, 302 aa, Homo sapiens
RSACTKRQGSMTGEAEQKKRTEEGEDERRRTRRPTELRKDRERTDDGRPILARPYSTGPDRPDHERTTERHRHLTTTDRTTEERQEKDTDTHPPPLTHTEPHDTSNPPDTDHDTPDRHTPNTPGNRTATTRPVTAERPPTSHATARAHRPTPDPWRHPRPDPTGTTSTPGNPTLHAHARQTRNGDPAPLQWPQQPGHARIRPQPGPHDSPTNQHATTHIRTHSPATPPAHPAPQIRKPTHGHANYPGPEPVTPRTGKTRQAMTPPGRHPHTRRTVMHRPAGTRIGHRNLPRAARTPPPRDAP

SEQ ID NO: 999023 - protein, 141 aa, Homo sapiens
LQHACTRELTYKGEIVYVLKLYFSVQNTSHSCLINHHLTNHVSSDIGYFNILSRELNNSIIKANHAPPNEPPHGYSISLNTRYLLLRLLAPKGSHDKHLTLNKGYFQTYPLLEKSQAPSPGCNTTAHYGLVYIPVNETLSA

SEQ ID NO: 999024 - protein, 236 aa, Homo sapiens
MSKAINQWTTRGRTQDMVPRRRIRSPQRKTPIDYETTPTDRNPTGSQEQPPEAPGTHATIPTVTKRVDLHTASRSLSCGTGPTCRWCAATGSSTLGQYRVTPSGDDYSRSLGTPGGYRQAEWCIDSCSYSKGVCCERGTTNRTPHRGTSTGPLADRRDTNNSRDTNDDQYSGRKALLCADPYTAAVPTQHKKHNTRSRGLATRLKTDVARRSKDDPRRVRLRIQGQTVVTHNTDQQ

SEQ ID NO: 999025 - protein, 278 aa, Homo sapiens
MDLLWILRSLWVLLLWGAVPCLKTPWNDHQVPYGPRGNWRASISLVPALPQLVGRESPGRVRGETKGAPWSIIGASGNTRQEWGPGVSQEIQVNSCSVCTGWPQEACRVSLLEPRAANIGAAWIPSVAYLAGAGPHLQICRRGWYTEGASGLAGCVHMRQDWIHAEYLVRSLGSSLRKAASVENLESLKFLAWRSEEFATEFTLPGVTWGAAGVELGTTFDGNTELSPNYCDLSDITRGGQIMYQREHWGKIRTRVTEGDSLRLQRGQALTTYDVDTI

SEQ ID NO: 999026 - protein, 230 aa, Homo sapiens
  misc_feature (37)..(37): Xaa can be any naturally occurring amino acid
MVYGTLLLLLSRATWSLIARPMVWGSTRPLNDFHMFXVMPVSVRGEARRIQSHVGLLWIGAHQGLCCILIDEGPRDPEEMARSPWSGPARHREANGKGEYNHAIWGNPGEGTSEKSPYVELVVDQEVFHGYRRFHELRNELQTVHNIIISRKVRKGLAVVLQSNTLAHDWEYAWGTLDTTTGSGAPRTEGWPVSATRRGYSTIIDFTDAESDWGLSGSLNSSQELWEIGP

SEQ ID NO: 999027 - protein, 188 aa, Homo sapiens
MHTAHLHATSEDWTHHPLHAHIGLDHFTLTPRTPLRTLGPTLLAEFTHNCTRTDSATLGLDQLADMQHSTNVKQLGQTGTGTALTGLHQHSLRSWHHLGPLKIETGKHGHCKRRATLQLPKLGNIAIGSLEHICPLAGWATTEALDTLDSDQLGLAGPWENIGIGKHLKAIGAIARTVNHFGNIGLDP

SEQ ID NO: 999028 - protein, 173 aa, Homo sapiens
MVVTPGEARSLQWSRESRPWNSKPGATEARTPVSKKRAEQCRQGNVRSRYCLYPFWFSHKARKCLQGPGATQDPKCRYISTDWFTNTLVLGRTSLGWEHPGGFTPNSVVTPRWDNGGPTVKNKPGAQAPAKTQRKEAQRNRDEESRGLHSRLKQEDTRKAIGPRGATWGQDNP

SEQ ID NO: 999029 - protein, 199 aa, Homo sapiens
MVVHAYNNYNYLGELRQESCLNPGGGGSSEPRSRHCTQAWATEKHDLSFKKLIIYPLYLRYCPLLSLSAYQYSCLTEPVTTLILINYTHFSFTSGNFSIFSLDPLDSENVNQNDEQSRSVRPRLEYRETHLSDSSTDVKTSMGLQRQIPPMAFGRPRNKDYPLQKTITPINQNSISWAHTTSNTDERHKHARITQATRR

SEQ ID NO: 999030 - protein, 69 aa, Homo sapiens
DERVVIGGQPVMMPSTVGGSMAYATGVCPECKNAGCGLCPGEDELSWMIINERCQLVDRLTSALPVVEP

SEQ ID NO: 999031 - protein, 183 aa, Homo sapiens
RTVRRSCVCGSGLRKCVNSGQYPVTLSYAIAVVMHYSDCDFSCICKKSGERSILRRSDMTYSRIAWSRRRVISGYVSILEYPQRSRYDLRFSQSPDTDRGGSRSTAVVNLYLQASYTYLSHGLLFRHSDDVALEGVAILTRDTGRGDSREGYRASPARSPKQRDGRRSHSKRNHRSQLQDEVG

SEQ ID NO: 999032 - protein, 113 aa, Homo sapiens
PQCSAAERLGARGDAAGGPVLRQCVLATWSCVRARGCRAVRMSGLGGRPRKAEGDAAHLRGEPSDRRCASKDSGGPVLQVRPASDEIELKNRDTELVPFRHSCAYEDPPRCHE

SEQ ID NO: 999033 - protein, 135 aa, Homo sapiens
MRLPTRLLRLRVTRFLTPVPFSNYAFNELFYTTNTTYSKRPFTAHRTVPPIWNAATNWLAQPRHTNGAKLPNTHQRGPSSLPLFNTLQSKPSILVNPVGTGGRLGHTGNFANKAPLSPFSHIWRLPLTHKHQWVN

SEQ ID NO: 999034 - protein, 108 aa, Homo sapiens
MGTLIPTDDFSFLLDQLFAFPLYSGGVPTSSSSHTLRGHPWGTPLLGTSDPAGLRLLPSGPRGGKRTPHLFCTQAKPGVFVSLCGFPLKVLGGATPPPANGGAHLPGS

SEQ ID NO: 999035 - protein, 146 aa, Homo sapiens
MCERLKRVTTNKCIAKTSATRYVDTLHEKHHDDNNKEHIHNKATQDYMRTGEHTGRQRDTTRELSPHKQIGGRAKKNGEGTPQNEEAHDSIRQTRRGTKTSRETPPGQRDKQNNEALNTAKMRWKHSPVAHTNREPTPHDAHRRTQ

SEQ ID NO: 999036 - protein, 260 aa, Homo sapiens
MSPCLFHDSLLFFFGFFFWFLCEEREFWPLCSPEAVEVYMGHDSRPHAKPSAFPRFQSNFSVPTASPDSGDYRALLPPVPGIVWIWFFLSRKGGFSRYSQAWSRTPQPRGCSTVACGLPKVRGITGYSATSAGQSPFLESQKGTQESSSKGTRTPITYRASAALRRHNSLNVLLKQHPTLYTHAAPTPDHLHPCDLTPLPPCLKAEHAVTTLNLDRSTDPGSPDSSPGYHTTRGTLPNARPAAHHPTTTPTAHKPHRPRT

SEQ ID NO: 999037 - protein, 438 aa, Homo sapiens
GKSCVTLSENAVLRRPWTLHQEMATAASSLLPAHTEPPTLPDRPRLLTTWPLHAASRLPLTPSFPPLPSPGPCESPAALPDYLSFCLTSPDRADAGSLPLRNPVRPTTRPARPVPDPPRGALGYSARPGLDRRPPPLPLPPPIVRVCHPRGRTFRLFPGAVPAAPPAVGPWPAVSHFSCGPPGACLPCLLRSSSTSSCLAGMPRTRGCSRPSRSALPPAPARPRPGRPPPRPLLHRRAPPRLPAPPPAASPRRRSAACAAGPSGAAAVAVVRPSASARPRPAALAALRLSSSAPRRVALLVCVVVSSPLSPASVSRLPPLALRAPRCPASRLPLPFCPPSTTPRLTPSPSALGVVRPPRRRSVPPPSSPSRPLRSAGRRSSRAPSVRACRRPRPPPSSARAVVVVSSVCRSPPSVPGRSVRSLLLPPPARRAPSVLSR

SEQ ID NO: 999038 - protein, 183 aa, Homo sapiens
MKAHITQALIWLSQRQEGTNACSRSSGSLAQTIAIKGRSHTDEVDPLRLYHHAPFLRFLSQLTHPCCPASARVLPEVSLARQPHRKGTMARHCIIPKHCWPYAFVPVQDKPRHKRKGRNSKVTLLRKLCTKRQPLPIWDAPSEKAKAQWAIFRNPGPSAEGEINLMAPRYFNGTANRGNVPEH

SEQ ID NO: 999039 - protein, 67 aa, Homo sapiens
GTSSGGAVLPVEIRGGREDSFGCRPRMLCNGVEEYDNPTISHEEIQVCSSTMPRIIDEDVISERSFS

SEQ ID NO: 999040 - protein, 113 aa, Homo sapiens
MTLGTSTAPSESKAFSAGLGHSIELTGMGPIWGLLSSRRPETDAWFASCCLCSALCLHGSSRLPFLGVKVPSFADCEWCPLCLLGEPPPGPGLLLHMMTWGCLGQAPEEDWNG

SEQ ID NO: 999041 - protein, 131 aa, Homo sapiens
GISILLTDRNLKTTFFDPAGGGDPISIPTAYSDFSVHPEVYMLILPGYVSNLPIFVTDYSVRHKRYHCRNTLGNGLESMHSQIGFQEVYRCERKHDSLQVGIRRRHTSHISAIRVHISASRIPNVRQQYYS

SEQ ID NO: 999042 - protein, 173 aa, Homo sapiens
MGVVGVLGPKLVRLGHLFSSGWVGMWAHHEFSHVGDLAKALLGIPPNPEEVLPFCLPEWVSPPFNPFRHSHLLLPVAPLLTLSHSGWDLDKIPIFPGPPSGTRGVAPGAVAVALGEHLWRPRTGLLVGPGIYLLPSLYILTVQRFSAGSSRPTPPVLHTYLGVPSWFPRGFGG

SEQ ID NO: 999043 - protein, 182 aa, Homo sapiens
MGAGPPVGAAQQGPQTPANTKVEGSVGGERRATSGRAATEAKHRLRKTREGADSTEESTGIGERERANHNREVESKDLARESDTEEEATQAENQDAGLTQTGEADHTDERQETETDKVEGPPRQMRPDGESTQRTAPLTTHEQAGRNQSESETTTAQARAKEESRRDDATPKRETHNDTHKQ

SEQ ID NO: 999044 - protein, 289 aa, Homo sapiens
MPGMGSQGQSVQFHVHMTVARCRAVPKTGDGIIDFIGQVHKTKEQFGQDAAYHGCYCSAGVAPHRGVTSRLSIVLERMRYEGVVNMSQTVKTLRTQRPAMVQTRVTSISCSYLCGPRKYLWHAFDHYATYLTVPSPPHRPTAVGLRRGPSSSEPERTIGTVLLRRCCTLAEAIVPTGITASQGTSPYQSESLQNIPWSKLGWPQPGMAPDGPSVHQSHLGARFKLSVALRILMLLLMGWEIGGKSFRSHFLNLGFTPEGIVGHFPLIVPSRELRIFSKGHSKGWRLYTV

SEQ ID NO: 999045 - protein, 76 aa, Homo sapiens
GAFLKLTAFGPRCLVSVALVCARRRSLSFWPGGYPAYSKDSGLLTSSSREWNSQISVTLLLCRGFQSSPDIEVDVY

SEQ ID NO: 999046 - protein, 383 aa, Homo sapiens
  misc_feature (49)..(49): Xaa can be any naturally occurring amino acid
  misc_feature (382)..(382): Xaa can be any naturally occurring amino acid
MSCACLYHIVISSSHMHRLNMGRCFDASSRECIIRAVGPVLTVRLSKVXLTGHSSCRPLCNALKLTDDTLMDGKLHRGTAEVKATHTRKGPHKQQLEASSSKGACANNGGISRISLIDTSSKKLIERYDLMIYVVEPMCSSPITPCTKRNHVKRNELDLQEASGKQRKEEVKFFPPTSKITTGYDTFLPPSRKDPQVKRPMLRFDLLPGAAIILGLPHNDEKAIPRHHKEQVNLRRYNKARRPEKMGQGILTRSQTVSTSRHNVCTPPYYPTGGGNMCKFGVERPNTVPVGVKRNKGGLAIGPKVLTNGRYIEGGRPKHGQPWGNTTTVGHNGKHGKRNSDEDTLNRKTRKRKFENANMMDIRNVRKFATGIAGNSYRNVAXP

SEQ ID NO: 999047 - protein, 259 aa, Homo sapiens
MSLISPLVGPSPYIFAPGASLFYNKRGGEHYYRPLVRTTHGNRGDPSPKRKIFHALPAANNTRGRIFHEEAEGGPRLGGVVHYLTKRERTHNIMGGLLTHRRLVDQAPKPRVGHHCFTSFNNYMKLSRPDLVVHALLCYLHQIISAYIVSPPRCISPHRTEAPQLFQPRPPRPFTHNPQALRRNATQDDSLGLNSTGLGARLQYNALFMTTTTQGRAGRPTVQQLLSTDGHTNEEGGTTHYVSYATRHERGAYTYCFTE

SEQ ID NO: 999048 - protein, 385 aa, Homo sapiens
QTGETEPWRVSEDFVSYSIRQKGTRMIRDRMIHRSTSQGSIKIPMCTDATDYTPTTSRSSHSNFHRTDQGINIYRKPTIYKQNADYGRTRASPQNDIIQVNPRFPSKTKAPEHQRDNQTIETDHMAWYPPIIYAVSRDLHMKTTRSSGKKKGKMMRTLTEDSRAEYKTSSTKRSPTLTGLGPEEPSTRSRWSTREPGKGQNRNARRKRNYPYKTEQNTSTHLQTATSPLTNEAQGENTGPGNHRQYEHEQQAKEADQREERTQTTNKPARQMTAEQGTKKGNDPDREDTKTTPRKDPVGTTKRRKEDKRKKDDTKARTKAQKSGNTKKETKTTEHSRKHEKIENKGGQKKLRSDKQRKVDRSDKKKKKKQQKQNDDSYDKHEEKQ

SEQ ID NO: 999049 - protein, 72 aa, Homo sapiens
DEFDGPAALSLAATVCGRRQIRENLFQLSEDEHFADFLLRIVKPHLVGSTMLRYNFSAYLVTCPRPPIFDEV

SEQ ID NO: 999050 - protein, 121 aa, Homo sapiens
MALGKSLISLVLLPIHTHAHMHVLWVPIHHIHTHSRDISFIFTSYRDESLENSCCLTYPAKHQSYLLGIQKVSPDPASEAADLNSSTSHWAPGSIPFLLPILHVGPLLQPFAVAYIRPVAL

SEQ ID NO: 999051 - protein, 102 aa, Homo sapiens
NPGGGACSEPRSHHCTPAWATKQDSVSKKKKKIGLGHWCWHCCRVSSQPLREAEAEEFALNPGVRRFAVGPRFIATCTSSSVDDRVETSCLKKQKKFSFLTM

SEQ ID NO: 999052 - protein, 469 aa, Homo sapiens
  misc_feature (316)..(316): Xaa can be any naturally occurring amino acid
MSNCYAQIRAQSPDTDVEQRTLPPYGTARRPKIDIHTQKQHRTHRNYRDGRNATKTKPVGETARQPSHHGYTTRTHIEPSTEHNPTTLRGSQPQIGSRGQTPIETNQRHRQGHRGHTNHHRHRAKALGQYQTITREAPPQAADTQPTSGLENTVIGSSLGAAELVRGFPSVYTTGNREHHPCVATAPTKVLYGHQQWITKTRTTVMSSKENLVGDHKASRGNSEHLTEECKNSPGVDDDVVSCDKTTRPSVRSAVSVSQHNRRAPANSKEEAEQTQHRLVYTTDRKTTNDEQSDARQGRTLVRGRTECRQLVAKNXRKPTLADMRAASPASEHARAAARRHDVLEQHERSYLSTKEDRDTEYERERKAEREEQTEQGTENSGAESESRGVGRLVHAQRGEQGATASEQGEQVVDKQRTTAQQGRITARQQTDRQEDEGAEKEVVEQTRRSRTGREERTGRGEKPNDVQH

SEQ ID NO: 999053 - protein, 179 aa, Homo sapiens
IISRGKIIDGVRFVIMHEYTKLKQGREDFRVPHNDLTYQTCTPRFRMLFPDDVPELVYPVDARMALLRWGQVVHNTRIDAPLGLYPPVDPSHQGFILPDPMDYSAPTPMVSILDNGGNVIFIDGYCANEDNSSSEAARFKLGYANGTDFLKETVGRKPVLENVRERHYGVYLTGISLVA

SEQ ID NO: 999054 - protein, 102 aa, Homo sapiens
MPCTWGSELGTTIQVYAQGLSHSATLQDTTHAKTNDNSDANCTEGTKGNGTSTRDTRRTLAGTTCNTPLRPKPWTTRPIEPKEKIGQEHTICIHSITHPTPK

SEQ ID NO: 999055 - protein, 109 aa, Homo sapiens
SGQQGRPSQIKEHVRLSRTAQSLMARHVQLRFLLIRWQQHPLIKHRMTAEMQIFYWPNYGLPYHVPQAHATDKSPSEQHSVQRQARRIRPLTETTTLNQTRELSACYVH

SEQ ID NO: 999056 - protein, 461 aa, Homo sapiens
VGVAAANREGTWNRLVFPGCCCPSVPWPGDACCQFWSPPGPCCGPDIPSSGVHLALRVTCHYWRLTRPTYGCGPACRVCLSYVPARDLKRPATNTLVSPAYDPRCIRRVVFDPRDRAGRLCTPCSIACVNDDNPLCTLAKQRLEPPSKVVKGSGRNPHGAVNNTYRTLCCSSPSCRNCNTASEHAQRIAFSAPRRNSETVNAFEPPVGLKRTICVSANHFLCRIIPRLCNHLVSQPAAKKTDQPMRSHNAQPMTALSHNKSYETSSPTQKETWCHAAPGLLNRQPRFVAFDHEKHLTVSIPTPRRSSDHDKRKGVYIYTDPVSPTHTRHPHIITHATKQTLHHHYFYQPSSGNPSNLRSPMTTTSSQNFLSSHNHHTPVSLLYPSPTHLRSNSYHTPPYLSAYYSPTPPPYVASHRLAGRDNYQPRPPTTTTTCTKYSRRFTAPHYYKWTRFATHHPTLSS

SEQ ID NO: 999057 - protein, 68 aa, Homo sapiens
GVGGLKVALNSCSPGSSPLSAEYVGLYGAGWLWYGEVSCAIGVHETCCDLPLSGGGTVCHTFTQGQDD

SEQ ID NO: 999058 - protein, 128 aa, Homo sapiens
CVQESEMHMHLAAKMDVGACKRWSLMDEHLPVTYILTCITLCVPAFWQFHCLPQGCTLTTALSKSCCVVCVVLCTINTCHVGMISCVNATCLNCVSSNTLMTQEHDNCARIGLHCAELECHFWVCMHR

SEQ ID NO: 999059 - protein, 207 aa, Homo sapiens
MVHLSSFRLPRKGTMDINTLAALTPGSKHMEEQLDTEDCLDKDYIPPNRDADVELQAPLTQPELHTLPGLSYEVHKDSTPITKRGRPCPPGRLWAPRAYNRQPGNHTGKNQPRRNTKQVQPKNPVGRTKAPKVAQMPSHNCSQHRTTGTQGGHKAQQWGNAVARSTVNNTESWSLQEKTTVATKNKETHSARTVEQGDRGATQKPGA

SEQ ID NO: 999060 - protein, 614 aa, Homo sapiens
GRPLQASPAARGFMLAVGPGWQRCRHTPASIQFLFSFCTQHQQHSITTLTLNTHIISSTSVFTQRIICVSADSQYLSHSHIFHISVSQHSLQQPHHIMHKAPSSTAAQRMQCTWHTQHYTQGLSSTTPSELGQSLGSNAQAFRNPIVHVPHTHNGPSLTHMQHNICKPAQKGHYTMQACAPATIFQVTTDSGTRVAKVGLFLQGISTHECKGVATFHTTQACSHKVRSKVYHITSFWIQVGCNPPQTMPILLGDGWHDIPLLYEHTTARNFTTNRQDDGGFALLQTARQPVVGDNTSTYIGTRTDGGGMDNSLAALQVISAHTQPYTAAPHPAHSLTSEKNASPRNPAQNQPGATHQHLLTPPGAQPSDAQDAIWPQHTTRPRPTDHTHPHGQSVYADTTRRTQHTLVHTTHTRHKRHAEATGADTGTNTAQLTERQGQQQSTPPHRTKTSHTTHTIAEHPHNTRHSRSTTALEPSGGAQAGHDTHKPHRHANTTRRSYRAHNRVTTATHTPPPVPPKRTRYGTHSIVHNNRHDQSHKHADYSTLGTPQPYNKYLEKVGRHKRPQTHTHTDSAQTINADRPQPNEETETHNDTRRKRRHSSQQRRSRAAPQRHR

SEQ ID NO: 999061 - protein, 293 aa, Homo sapiens
MLGRLPQLYHNLPDPCIPHYYQYTKHIPSHLPALGPLTYHTTYTTLRDSSLHSKQDYKNIHGTYRDDSATHRWTTFPTKKRHITLPNTILAHFPPIRTPQSSTRGTEPYPHNTPYHIEFPDPEAPHQNAKHKPTSTDQRTHTHTQNRPQEADDKDTKDITQTNTLRTKNTQWTRRHKYLPLQKHTYSTHKHPKQTKTSASSNTTTSYPPAHRPKHRKQTSDTPNTTPNSQHPGEVHKQPKKPSKHTETTRAQRPRTTHDQLTTNANQDKNNARSRSNTQRNQARKERQNTVTP

SEQ ID NO: 999062 - protein, 250 aa, Homo sapiens
GVSLNSPAALEDDILMAFLRLLGARPTPQQPMIQGTMQDWYLTLGHHTYLIDSRGSNIPSHWHNSRSINLPNCIQGTTCTPTPQSVIDRPFTGTNETGYDIRIAETRTTANHKFGQIGTPPHTHTHKVIIEIAPKLYWAFGHSPDIFGISNMALCMDHNKIRWHSIATHAILVAPVISIRARGLAKLALRIKGREMTAETRGSPQKRIKASIQNKGRQALGTPNRHHGLYRFNHPKDKSDRRLGTFSHTI

SEQ ID NO: 999063 - protein, 106 aa, Homo sapiens
MKHQRVIVRWIASRSIGNMLQRLSAFHVLLLDKLRSTEKQKKLLYFTAFLKHNFRVSIKEENTEMRVEDDRKNEKWGDKDEEYSDRIMHMEELERGRDNSTKNCDL

SEQ ID NO: 999064 - protein, 393 aa, Homo sapiens
MPYIHNHGLGSHITRYQIPMGPYTERKPVEKTNTYQRTIIPWVGYQFEPYRTGPDQLGPCSNTYTLLNSQFPHSTDTDTAIIIPEVGYCNRHYTKLSLGQTHRLNIGPFAKQHYGTQKCGKQGPLQIRIPVCGDQTHYIPITYLAREIIESGQVSCETHSPKRDIPYQSKRPCPHLTQVSNIVSASPRESARRTGETHSGGDWTAHEQQQITTSRHSTVLRNITTRDYQTDTYTQDKTKTSNTRQTRLTRQDTALGGIIKTTTRVRDGTTTHRCKDMNTTDTDTAPNTGTKQRAITRRTAPAPEGVTEQCPPGTTVATTQARHHRSTHRHETRTHRGRRTTTRRREKKYTDAPSRSSAATTHTTKSKRSSIKRQNEKQQGERELDKEREQTVK

SEQ ID NO: 999065 - protein, 141 aa, Homo sapiens
MRASISKLLPLADGKNKKKREEEREREERERREEEEREEREKKEREKKERKEREKRKGEQKRGERQKRQNRGGEKRGEGKATVGRRGEREERGRERELEKRGRRAARGRREPRGGRGEGRGRERRRKERAETRAEEERKRE

SEQ ID NO: 999066 - protein, 206 aa, Homo sapiens
MNKRDTKEQHKDRHTPEGKPTEGTPQRSKSEEERDQQPPMEKQGGQTSRPRTHPTQSTPTNHGHNREEQHRGRATDCPTPKRHSAPAETTTHHGDSRTTVATRGRGEREKRRATNPHLNENKESRRQPHTGGTRGRPIGEQARRSHEEDTNGERPPEERVDKQIERHTMTHTPMRQKERTATEPMIAQEITDPTHHRTQNPRPSEL

SEQ ID NO: 999067 - protein, 352 aa, Homo sapiens
MTWRKWSPPNAHNSNTGPGTLANCQRTLAPAHEQESMEMQTYHTMISKGTNDNTIIMVDTKNHSHCTKQRTPERTIAARNRNTTRTRHPIYGTRSRERYRCNAPGKQIEAKPRDKRNIKAPRIGTYIVREYLTQARVRNEDTRHRITHTPCPHNNEYPKRNHRGGPWSAAMHTHRLGDHRVDDFIVRKPHAIEHPRRTQKALDRGPAEEKVGNPGTDDHTWAEGSQQKNKEQGRQETGLPGLGQIRAKKPREYGTRATPTGAIATGTSQRNTRNRARGDNGVPAQTLRHKIEIENRRRERGKKREEAEETEDHARKDEAKSKRKKKARKRRTPPRSNGRKRRSRQRTEADSE

SEQ ID NO: 999068 - protein, 133 aa, Homo sapiens
SSTQQGFVAMPGTQLQFTSTTNLTQCKHIHFGRVTTTATQKILQSHACFINVIPWFEVVGYMLSTEISCINEFRMMFGYLFWHWLFHSTCVATSTQPKRQRQCKPESLAFHHHFRINTVCCNFLYSHKGMSPE

SEQ ID NO: 999069 - protein, 525 aa, Homo sapiens
GLNHAYCHTGINTGTAICQAADITRANAFIQHSAQAGHMQPPPSLPSGTWPCKCTSTKAAGAGPRSHGACATFSQLIPRQPIMIISEQSTQRILHLITTGTKWPPHGIMRSSALHQPHTSGPTFASSHPLSHPCQRLLDPGPPYCPVDTVGNSIQGYFNEPQFTCRHVIFDKESQSVLSEPVTGSPGTLSLLRQPQWPPWDCRAFTRAQLGPPCISSGTYVTSWNPKTTFKKQQFYNYVPKSGDTHSVGPTLTWFTPAYSHSLLRPDTTNDISGLSLWRPTFRSSLNAQFPTNRHTGMVTPYAHTHTLARDTKHTPHRTLENLHTYYNAHTAMHLPHAWAPQTQLSSCVHQVNETPGVPQLTHWNPNDYTITIRRNPFCTHLRQYSQVDDVPLHYVPPTNHTALTFQASLTHIVTTTSLHTSASYSPPPTTPHHPTCRGCHTPTPVRHVLPQAHHEFHPRHQPPTTHGANHHTTVCHTLACARQDIPPATYDAIRDYTAHHRRTPTPRPRRTTSTDATRTHARAH

SEQ ID NO: 999070 - protein, 72 aa, Homo sapiens
TLKKGRGPTLRTRGFAMAMSMRTADGGGSPGAGGFRAVSGSGYRPEADDSDIIGHAYKHCIKSHHDKAVASI

SEQ ID NO: 999071 - protein, 102 aa, Homo sapiens
AHKPHVTGSKDPEHKGLSGNQMSKTLAGGTVMLCSNPLSPGFTACVSWRIRCEVSRVSCLYVTIQSYHILVAPPLECNGHHSRLNWNLHLLVQAILRPQLPK

SEQ ID NO: 999072 - protein, 227 aa, Homo sapiens
MDLYTRLTRIEERGGDFSVYNENRTTVTHARKGVDFYRQAPRWKQLPPLEVPRGNAHCGESHLYNSALGVLHTGDFDKLTERAMQLTTQLAQMHFANRWGKVGGQGDLASTTTLGENTDIHATRLSRAQEWRTHTPEAQRHGQTYPRGQHVGAQRHTRHILPTGTRTYRGTQSSGHAHHQNTRLPEVGNGHNTERLQDSHRPASTPTTSQNNMTDDTTEHQRRHGRR

SEQ ID NO: 999073 - protein, 433 aa, Homo sapiens
IITLRWINDENEHPVHLLSNGQFQGLVQRHAVHHCSQASRQCNSRRQSHFKVNTGNFATMSVQPTVSLGGFANQNTYQWSSRLQDVVQGQDGHIKWHKTIQSASWKESMPEVKTDARGQGRHVKTLKVISVERRFLTPVQGWLDKDYKDKKGKNIEIECMTGMHDLNELMKEGMNDEKIELIGMQLTEGNELSGTADSTKRTHRGKHPLHITADMRTHDPKTHASKKVQTSDTRQQRKSNKDNALNNRHTQDTHTTGHQREHNFLITTNKNNGTQHTTSRYSTTRTNGNAITRCMVGKRSRRRRPPDRQAHKNTDTIEQHKARGEHNHQPNNNGWGTTTQQHDATVQQEKTVRSTQNCGLLAEQVDLTTTARARTRSKNSRQRDRTGAKKQPTILPNTKQGRHTATYHHRQHRQTGNTRVTKNEDTHRDETTR

SEQ ID NO: 999074 - protein, 111 aa, Homo sapiens
STESGTRSWRDAAGKREALAHARVLELCTILLTRGYRIIVHQDFVMFVEGQGSPENKCLALYEEYSSSTPRFNKLVVDARDIVVLNAGIPEVSEENFQKHPTTLAVTLGRR

SEQ ID NO: 999075 - protein, 105 aa, Homo sapiens
MAQAATHVLAYVNIMSNHLHASFLSDNHFIITFYKQMVFVNNVGGHNKHTQTEGKRILFPNGISAIPCAPSITHVPTWHRERNEHVRYNSIYSSKDTLLIICTPL

SEQ ID NO: 999076 - protein, 240 aa, Homo sapiens
MPHHTQPDTTHTETCTQTFPGPHARGATAPHVEHGDRQMNRGRYRTTHSQPITYTHATPSSRRTTANCSAPSNTTDSTQDPRNTNRSAFTSDKRKPSVTPSSGHSAAINTPATTALERPSTQHHSTTRTSEQNVNQSHTPHSSEKTTESTASKHNRTDSEHWDPSHTPTNTQRKDTYNQAHKQTMNTNHHTTHNHTRTTDLRHAHTNNPANNSSRTQTQSTHKKHRNQLPAEDTEPNVDD

SEQ ID NO: 999077 - protein, 111 aa, Homo sapiens
MLQVHLGYSLAPTHRIPRINPHDPKEPMVPLSGESYLETTIWAMQNGAGAYWDVNMSVAELRTYVCILIHAICNNIYQSSMWCPKPNTLSLVLAGHSHDRKHGPQKHQGGT

SEQ ID NO: 999078 - protein, 391 aa, Homo sapiens
DLVYKLILKSLYQHNFSHSSSKHNSTFFPLHRHVTSSSAHAFINRTHTSLSFQLSQDMQFVKTRPQDTYIPFQLANSIIMPIISTLTGTTSPFLHPLFIKAALVLWPLFITAYYLSHDYNINCTHLLRRPCTSFTYVSSLQGPQALLHATLFISASSTLHAHSHTLHTTQHWQNTIYGQTVLPLSGTSWRPIAQSATLTSTKEHTTQIDKDMIPTQPYTNTQRPTHTHEHNHILPSKTPKRITANNHDATTVTHQPTTTPTLHRHTPGTTTEQPAILNHKRTTRGTRQGTSVPLPLPPPTWTQTHNTHATRAHPALSRRKRTGTPQTTTQYTRNRQGAREQINREKESTGHRANQPLNETPKQVDKTQHENQPKKPHTRTSYTRNANEHTA

SEQ ID NO: 999079 - protein, 123 aa, Homo sapiens
GGSQVRVAVAAGVGLSQFVGPGAADPDGWPTEPVTQRKALGLGSREPGHRPRARPRPSAARSSPDPSQQTDAAGLRHPLCSLSLRWLSDSGAMGKARSRSWSSIRPQTLKFKGTFRDVVTYKS

SEQ ID NO: 999080 - protein, 415 aa, Homo sapiens
MSAGGCTGLACTWQHMPASRHGQGSNVRASSPSWRQRTARAHTKQAHINHTHHTRTTKVTEDEAPASDVEATPAGGIRGNWADLLVGAHLIGLWVRQASGTRGARARNTLLTLNKEHVNRENFNVQGSNVQASNENSNNSFQDTSIMRDEVKFMKEAIIHDSESHSEGSTKRRPMRPGTRTGSGHGPRRTTTKHIHSTAHPGLDKPGHHTTGTGKRERTHARGAGHATNTSGSKRQTHRERRTPEREQHTPTGAENGNTLTHMETSDTTQGRDHCGQQSSRTNQRAHTITRTDAKEKNEIAGQRTSTRRRARHQQRRQSTKDNQQNDVENSENQQRRPGIRTEHNAREHVLPASVRGVASVSRVLGIGHDGPGASWVPERYTADPGHGGQLKGSTGIAVSRSERSTDTRRIVDGE

SEQ ID NO: 999081 - protein, 175 aa, Homo sapiens
MNWAPKRTHTRHGGNTDDVDTTHTHTNKHTNITIKETYNTPKRTSSHRESENTKTQSYKQNETEKSNEQRGTTQHTTTMHTVRPNSGECPTDRRRTRESHKQRQEERKDTPPPHQKHSARSVADKDGAVPQQQTTKHGNRNEKNNHKAAVMTNQDERNNKRIQEHTYKKKPRPQS

SEQ ID NO: 999082 - protein, 342 aa, Homo sapiens
SPEQCSLLLGALRPRAVAMTSELDIFVGTHDPYRLRTCIAICARWITQDDLTRWPCRVRLGNPGADWQPRQTVAAEATPMDHYRHLTTARADCMHCARPSYCTQTHLPDSALPAGHYVIETATMPFDEAKLREALRTEAVQNGTKHRPWLTSSTTHRHHPPAAAASTATTPHGSSRCVEDMPGSLVENIQPHFLLSDRTGQDYAAIDSLLTTSAQGRTHGRSEHQDTSLPRRTRIQHRPIGTANPRAPRTRHSQEPNACTDHGPRPQRLVDTTRGRHPATAPTTEAATRTTGRRRANAQHDKPAPNRPQRHHSHKSTATQATKRHHARARETAPTPPHPPQR

SEQ ID NO: 999083 - protein, 204 aa, Homo sapiens
MILGRKPFGLSSCSIDQHRGHSTYIFSFGYEFITYCTSILNSSVLSTICEDDNSSTPSSLVPWTIHSGDLHHCRNNLAISWDTSHRAADVLILCGYVAGLPFTKARDRSRAQRMQHHAIPSLPPTPRATETALTSFTADGIHSLPKTPRPTPRPQSTHTYSPHNAYATNTNDTPPDPPARSTRSRPHHRPTQASDETPYRAPAP

SEQ ID NO: 999084 - protein, 242 aa, Homo sapiens
MLMPMVGPEPRGIEFLGVSGVPMNADAQAWREWLVSTQLAMAIRKSSRVRVYDTSAFSRHESFSAEEVLWKLLNGCEMRRSDFLLMQLASLVGYRPKAVAEQMGGAMRGNPVPILIPCNKREICSKRETDGATYSGGLGRKEMASGPGRASGRGKPGQRRELKVWQGQGIKGRGGYLGLPDRVGRHLSMCRNGWTVEAKNRCYTGIGCRTWRDPWIKGSGASGINKKPKKRQTIPHAAIQSQ

SEQ ID NO: 999085 - protein, 447 aa, Homo sapiens
ETESLIDLGMEWSGPRSSAHCNLTTPRVDRPLLLTSDLPEWLCDCTDMLTTYTHGLNLLADDSLYALDDGGYSHRACSHGQRDTSDTSTATSTTTETWTPSPSAHVPHKPARGTQQEKVKAKRRHQAKNATNSNDNTKLNDKNPTDPTDTQHTPLHHRTRHTHKHHKANQEEHTSTAPPPHTSPTHHENQAPRHRESERTPPANEQRNPPHAPAHHHLPIPLTIPSLTTYLNESTIPIYNNTIIQTQKIKYSTITAKLHTNEYTQPSKKHRDTHRVGEKHRARTKRNARTGESNDGNDSKTTTGGQAADAATGAPRTQHGQHARSARRPRGEGEQAARKGPPTPPHRRGEKREHDAEQHEQRGDQSGDRRAPTTGQEHKKAAKQAPYGEEGGRENEQRRQAEKAAQERGGAPAAAKRASSAAGADEDGRQRSALQDAADATERRTRK

SEQ ID NO: 999086 - protein, 573 aa, Homo sapiens
ETIVLFRYSAGSTFAHICVIQAISQHHQTPVQFLHIQASVCSPFAFMVQAHTSFNTSFSCTQVKHLTFHGIPISILHSSASLILVSTHSSHPTHACAHLHINTAMAAAHRHIIILLQASATTCVHTSGHIYHHLAHSPHRPISSAHRSSNFSHSNFERHNTLSRSLNLAKSNIADNTLSTQQGPGLHHHLGRVTGQSAKTLAYPLRIHTSCTPHHSTAPGAPLHLPYIVLGHRVHALEANHQDLSTHSAQRLVKARRNRDTTSSCRHHGIYQTRRTKRRHVHIHNRASNSITQAPTERPRIVQTPYTHRIGATATTHWVYPARQTSSRQQTNHKEQLGRLTLTSNREQHTTAGHTTAHHPVTQDTQPDKRINNTHTSNNTPEQHTIRQAHTNKTRDTTTSKQQSTTQHSEQPHAHQRISAKRYPGNSHEYLIVHLHTTNTRARAKDTDSTHTRTHEAKNHTHAHWTQGQTAAKPRHKQETTQAPANAQQTDTHERERSDPTTRNLTHKAHTSTTSAKDRDNTQSRTQIYNHEGQASRQTHNHEKSTLRHTRPNTDTAPDNAPTKRTAHHTHRS

SEQ ID NO: 999087 - protein, 409 aa, Homo sapiens
MTGRSRRCTAFFHGSQQNMSFSHQQHLQEHKALPRKPPVNLITHTSTGATWPLPPFNTCTGCTFKTKLQQAFSALQPSSVHGVDLQQYLMQRAGLVLSPHKKNSKPGKGCTSPTNRLANISIAPARGQALGPSPSPHRPLTFHNANSFTSKTRHELERIRAHRIQPLALHARVQRTGDTNCLGSNDSHRSEHALRTHIVNHTSNVQGNTPNEPATQTPDTGAHPHASDTPTPSESNHAHPLHHTGHTTGTPEPTPEPPHATPHAPAPKRHPRARPPGAHCSRPRHRTTSRRRSRSTTGSPRCNTLPPQPHHVTRHMFTPQAPHNPPRHRPTPAQRAERGRHCRLLERRGELKIRQDEHPTAAGASHVQPSRHGRTPAPAATQAASLERHREGISSETVRRAAAGTLPAA

SEQ ID NO: 999088 - protein, 129 aa, Homo sapiens
GGCEIPTAVAASAADGASRTLIQPPTEPHPRSPGRRGCNRSREPENQATEPDARTIRGQPQAQSQVVEGDVSTSDLGPRKEGQRRSEPKERTTEAHHHPHPQKADTRLDLQGTQMTVGNQVGQRETRPW

SEQ ID NO: 999089 - protein, 451 aa, Homo sapiens
GPEAFRFDGGVCKPIATSTNTCKHITHHLSRPSKFMAALHMYHAGSTALHDPHSTEAHMGLGKPSAGLGKHPLPAVTWQASFTCHQGHDFTIHIMQAVYRMHVPAAAFITLRQQNNCKYICTLNVVLPLHRTESFLSTLECTLDSYTVRQTANSHHIAILPIRYQDFRTGTVLTDEQTGGKLKNEEHYSSNLKLSWTSQIHTYSPVYCHLQSILTTAQPPPSSAHNQPHATRTTPSAHEDRTTTDKPTNQRRPNTMTKNIRHGTPRQRTIPTTPPTANSQHTTLAAPAAYPDTRGKTRNKGQPTSTTTTRRQDETNAHDAHHKQIDTLQPHGDDKQTTRHRASKRTAPPHVPASTADHTTDRAQNERRREHTRRERSRAGDTEPNTGRQRSPSGRHHDLERRNAANDQHHSAHTASEKDTECEQRHTAARSCAEAKATTKRSSRHHEDNSG

SEQ ID NO: 999090 - protein, 536 aa, Homo sapiens
MSLTGSSTTQQFPSLRHLQHGISPVLAQTISACSMHMRHSILAHLPHVQLSICHMLSCSCKFSSPHAMARVAHTNTIHQTIMLRLPSLATIVDLSTAHVHLDPNRNQVFAKPDPSIIRFISELTPSSRLILPLRQHSHSNFYIQVYPTAAPILLTQTTDSLPVGFLPLTVHLGQPHAHMEQQRAITHALLDNTLTSGPLNPHPTQNQTFPPPLATLRPSPHITTSLPTASSAPPTHTSHLTPPDGEAMANQEKKPHTINATRAAHTFEPHTPLGHRAAATKTGLGNHTDNATPTPRAKATPQNAHLTQTPSHWPTRPNAQPTTYHPTHRDNPHPHRPKHPRIPRRRRARYNRHHTTRATTTHSSNPPHQHGPRPTHPTQRDAAHHTQEHNNDRHHHTRAHSETGAQTHGPLRSAHAVCHNAPDYFSTERPGQCSTSLLTRHLCRTSHTAGTPLRHTPLSYAHTIPLDTARGSRPPSASTHAADGAHADTRGRLPTRVAHQSPDAPTRTSTERPPRSSPSPATHPDRTPTTTPRDTT

SEQ ID NO: 999091 - protein, 90 aa, Homo sapiens
MPHIVQAVSGLTNRAICVRANSALTREIHFLGARTILDSAISSPATVWASPQIHVGSNLLRAPISDGYYIVQRRTGSDNPIYSSHYRATH

SEQ ID NO: 999092 - protein, 144 aa, Homo sapiens
ETFFAEESSGFPASTVLGREPVRIVPQTGRTAHSQPITSSRSPHPQDSPKVPGRRSELTAHEQAAQPARHIRPPYSSGRPVKRLAVQHSARVRPSKLHTQGTPEGGHQMRTACKGGKSLTAVPFRVIPWFAMVLYPIFVDPRIE

SEQ ID NO: 999093 - protein, 202 aa, Homo sapiens
  misc_feature (20)..(20): Xaa can be any naturally occurring amino acid
AQTLGDTLSSRRTAQGSFKXVYMYHEIHVQSSAWRVITSTPPSAYGSVKAYNNLDAERDALNYETRPSRPKVWMKVIHCQHFEPTVRQCSRDRISPSPNQRRTKKELASATRSQLFIWHTWRTAHVGPIEDNLSQDDASSRLNSFHEGLLVNRQRTHLIDIICSMNQPGSCRHINRVYKDNVQDVIWSKDIISDHIWMTSAS

SEQ ID NO: 999094 - protein, 229 aa, Homo sapiens
KETESIAPAAMMDVGSKDGPDWRALPDLLRSSPWTRLGIPLLPEEHLKPPSNLWLDGGSVLIVVVIVGALIMGLQHEPENTLETGSGDLIIWRTARKGAMHTPGPWSEVTWLTQLRQHYLPIQEDPNIGIIAMTCLDLASKACNDSAHYTKPQAHHWHTWYDHRRFNVGNVICARARGQQREMSTRRFLVEGELRSTFTEDAMVSQEQMRSPSGATKYAVMCGGTCTVM

SEQ ID NO: 999095 - protein, 110 aa, Homo sapiens
DNDEEEVVTFELGEMLLMLEAAGGDDELTDSEDEWDLFHDELEDFDDLDAIATLRWRVNWSADLRQQLSPVDGVAEPGVLLLRQGFFNSKVTVLRNFNPGPSLSQPLTFP

SEQ ID NO: 999096 - protein, 128 aa, Homo sapiens
  misc_feature (69)..(69): Xaa can be any naturally occurring amino acid
SAGPALPSCVLLEQSQGQGKQVPTKKDILHPVSSCPYSAEMCCMYFTYVISSISSMCNEALILEYWDTXNEEETTVYNPSGCTRRKTRSAKKILPAYPRLTEETTDCPCEHPTSLADTVGLKISPLWP

SEQ ID NO: 999097 - protein, 124 aa, Homo sapiens
MPGNPRLLEESVEARRIALEPWESEVASEPNALCHCDSSLGEVRADYCHLLEKEEASIEKEVVIQASVDDGRRKIMQEGISYKESVYSNMVHSPKIETTHLSPSDYTTNLLGQLHTEKSNANMI

SEQ ID NO: 999098 - protein, 151 aa, Homo sapiens
MERDRNTSTPNEEKQNEDNRHTQSNNTTNNETNTEAQNKTDRTGNRKSPMPKTPPNQRKKHTRRVDTTRPTHKQNKERTTQSKHTNRNTNEKRKSNKIEHTQDMTNTAKHEKQTTAHNEKHTTQTGQPTTKTTTHKNPQDTATRKPKTTTR

SEQ ID NO: 999099 - protein, 74 aa, Homo sapiens
EYLRIMSASHGFPIQRQWARNGMEPEGVIERTEMKHSSTAEMIPCKPLEKDPLSPCASTPMVFEKPHLSIRGKT

SEQ ID NO: 999100 - protein, 128 aa, Homo sapiens
MTHGIQITGLKNNTHPTTYPTRQAPEHPKGGTPYRHPGQPSPREHPPPQNTTDNQHPKNEESIEHEATPSPNAPDPANKNYARSIPDANSTRRRKQHHTPHHHPQTEHLELRNAISTHQTNTAANHIL

SEQ ID NO: 999101 - protein, 68 aa, Homo sapiens
IPEAEQTFVSEMSRSEVLSCARATLSFWPGGYPSVLHQIHGLLTSLQHSNGKSNFLNCYVSGFHPSEH

SEQ ID NO: 999102 - protein, 366 aa, Homo sapiens
SPSGSSSAAAVACVVASRHNPVSACSHGCTQLTASSQHCQQFHTAQLFSTHLHQQHGAWHTHNHPTGTLGQLVTCSISLGQHITKQTSKQLQQAPMHSNAQSAMLDGSIGHPIATLRCTFSAPIALGQAKQLDQHNSTRCKAKATFSSTAIPGGDMGSQGMGNSGGYHTSWVAKKVSTNVGLEKKHLGGTGKVRQDGKQSWQCQMTSRGARQHHWNWVDWVHRYTLMTRRRVPNIDVTRQQCTRTPSVPTMVGYTMCIVSKKNGLNSAHTPRAWQTALLVKQGYNSTTGSETTKLCPVNRKNRAHQVTTTGNPYRVIIKSNNEPTNTLIETKIRKQTQAEANGKNTREHMNKTNYKHEPSNLQEER

SEQ ID NO: 999103 - protein, 73 aa, Homo sapiens
VSKNVHMKIDSKVFLHESGSCDEVLLRSLCPSRDLTESSKAPPASSSVTQTFRIEHVGNERASPGQPGKSPCT

SEQ ID NO: 999104 - protein, 113 aa, Homo sapiens
MKTSRGAQGRNDGCRQSRRYGPMDHQARDDKRSENLPSHTQEDHERSQKTSAGRRTAPATKKAGPRRHPHRHIDKHTPVHRITTATPHGPAPPDKDLQRQPLAMYTNTYSRQD

SEQ ID NO: 999105 - protein, 242 aa, Homo sapiens
MQNYLTHQEECTGTCLITHLRVCDLRRYIKQTGVRSSLNCPWHVTNTQQTATRRKRRRNGPAQNRAHATTNSETDPTPRPLHRGNLRTHPRHTQTATHTTDRHNKTSEQSATHHNTTPQHTPPQPRGHEPRTRARQTRKRPAGSRRPRHPNTEAPHAATATTTPTGRHATPQPRPMGQRDEQDTGTKGENPRHAPEQPPDKRAEGAPTEAPETKTRHNTTHPHAVARTTSSRKQTHNEPRRH

SEQ ID NO: 999106 - protein, 444 aa, Homo sapiens
HLSELNFLKDKVFIFQDSFSLNLTNKTLLRQQSKGAGQGSSKHSSSSSRQPKQPTSSSSNKMQFHRQHPSVTHQCTAAAGMLHLPQNVSYGNLFAWGIPQVPYFSSQVAFVFPFNPQRMVRRVRKFSEQFFLKNPWIDFDRPQQCISRHTHRKIYTTRDDHLTWSIPQDILRNSRDCQGQNGTLVWYPLWTTWGTLIVSRSHSLCNIPFVPNWNHSKYSLGAIHSFNEGNVASTTNGGAYTLAWVNPTLPPEEGNAREISPELPLAREKTPKQHLGNAGYKQTLGNLVTKNTTGLGPTRGITMGQLGNGARAPTLAEHTDHPEDYLEDMQGGRTQPKPKPNHRKGKWMHKQRNKRPRRQTHKETNSGDNAQIPSVPPQSTDRRIRRKRDQHTLTPFAHQPGKTSPTTEPRKRQTATPTATTHSTQQRQPWHTNNNGPPTHRQTV

SEQ ID NO: 999107 - protein, 104 aa, Homo sapiens
RRSDSHSMHSNPFAFLGQSWRFFIKAVPCAKPKQACTRHCSCCTNNMYKCARITSRIIRSSEASSMRHIVAEQNHPDIHWFLCNNQGSTYHHDPTVTHCRTSIM

SEQ ID NO: 999108 - protein, 414 aa, Homo sapiens
NNNIIGTKPHMLINQSCNVARHCTFSHFSKLQPGSNGIQQIKHPSYIITLQGNTLYLIMAPCSTQTHQQAMENKLLHTNRNRKVSRSSSYLCPDQQQHFKSKHESKKKTTTHTKKKKTEGTKERQNRSNKKTDAQQKTTHRGLRKYHAVVVHNTVRHKRRRTIEGNPKHENSNEYKQTKRTSTQADRRPGGRQTTKPPTNNHDRQSKTNTQHPEYRKQQTKKNNTDTCEKRRKKERNTKGGEITSGHNRGGTTPQKQAESQQTNRVSQPKQNNARTRRKDAVATLTRPKGGENMLRTTTNKTWEAPRQTTSNHTSNIVHNTAEKNTTYAKVDTEQHTRGHKQQQPTTKETPMGKTNKPPIRHDNQHKPPTREDRPSQHNEKHGQTAAEAAHREHTTTQHNTGSKPHRRPARHAT

SEQ ID NO: 999109 - protein, 158 aa, Homo sapiens
DRARTLEGSTDGSRQHAVGAWAAGPQLCWAGTYVACSHTSQPGIGDATGCSKCNGGPQANHPSGLDMETEHSAGQQAWQGPVSPGSEAPGHQSLARCPSQRLPLPSGWSGLPADARILRCPRPVTRHWPPDPAPHSSRSRVSHHHPVPPHASCTILPC

SEQ ID NO: 999110 - protein, 102 aa, Homo sapiens
MRHPGNSTLQAYRHGSQLVLHSVRPKTIEAEKNSQDERLANMCQHHAGKSTHGRHPQPTRGTSRHNRRQSHGRPGRHTSHDNGRRRKEQGASTHRRTGQQRG

SEQ ID NO: 999111 - protein, 268 aa, Homo sapiens
MCLARVALFFAGTSLTAGFYCGDITDQRLLVVYTQHTNCSLCASLVSLRPPAVPRLHSSLFSLSLCSTPARIARSLSCLSFPPLLVSWLAVHSVRSAALLSLCSSTRASVLFERCCVAGVPQSGPRGVLSLSASVVCGYVPVVGCPRSSLCGWRLVRRASRLVCAPPPLASSFVCGVGSVVCAVRVRLWVLVAVWFLCATPPSLCGLFLAWVRTYVYRVGRPVVGRVCHVELLTASAVVARLYYVTRTYSRQLGRSSPRLLSVRYVSL

SEQ ID NO: 999112 - protein, 145 aa, Homo sapiens
PEYEYITPEHRNQQEQRPPRTHSTDNTSNKGEARRDSSGNTQESTTETRNTQAQERQRERIKHQNYKPQEQQQHTQHHNSPEEEGEDTRTRHKTKAHKANTLRRRETQEPSDTQRLPPANNRQKTDEQRTMTTKEPKPKGTDKNK

SEQ ID NO: 999113 - protein, 239 aa, Homo sapiens
MACYLDQLYSLHWVRDLSDCVWAGGTTQERTVFYVMYCVIGLELSILVQMWTGDAVRFLDQILSITNAEYVRFDERREGTFRGGDRMLRRWTDRREYGEQPRMDYPGERPVRGLLVVHSYWQTANYGAGRRASAVRAVSPPKVTAVSFRRPQCHMSATDKMLLVCSVRWLSIAGSPGEIRVGHGNCPRNENALGMCVQKGLDPTDGRPGAFRSLVDVGTQLPREWTRYPSGGVGEPKGD

SEQ ID NO: 999114 - protein, 190 aa, Homo sapiens
MKPVLYYKHANKFSRACRHVPEGRQNRYEPGRWRLRYADIATLNYQPGRRSETPVSKKQDNNNGRDHTIHHMKQPGARTDTTPAATQSHKEKAERKRGNHYEVLRVNTEHKPLCVRTTTKWGRKHAPPRNQQKRTHDYNETTTPKPMAQSKHVDARHAGPLSPHPPTETYHTDTKRLKRTGARQHTVGTD

SEQ ID NO: 999115 - protein, 138 aa, Homo sapiens
MRRWLIFFKVESRGRLSSPDFKTDHKAIIIKMGMGLGTELNQRKTFRNSRKFYQVFVGKVSTVLKSAHFNGGNKRGPNKAEWAIGVGDINYSNTACQNNFQMRNRGSNKWSLIIKSLETWCVPRGRADWKGRLLNLKP

SEQ ID NO: 999116 - protein, 104 aa, Homo sapiens
MITDGLSNDVSTRKPQMIGFYSHPVSDGCVPCSDNLVTIHPGGPGTMVDKAYLMATFADCGSDIIRKTTMLMACTNYIMYDSQSCNLRIQTERMVDKMDDVYII

SEQ ID NO: 999117 - protein, 131 aa, Homo sapiens
  misc_feature (1)..(1): Xaa can be any naturally occurring amino acid
XVHTLVGKTGGNRKKIFTGSGKGTVEGRIGTMSGISETKGGGSLILPDWLCYTKILRWNKTLEVNVPGPICWTTQGDFFRACDLKNYPLRHFVVTVGASGQRGTCSRSPFLWLNVCKQVGCLWEFINLWTA

SEQ ID NO: 999118 - protein, 204 aa, Homo sapiens
MTQRRKAQRRTQPKTQETATDQTETRQEHKSQNRRQNERRETEANDRPPERKTTGTYTRLAKLRPNKYTKQAEHEREEKEKRATRSRRRSTGGETRDNGADEDRGAGSTETAVQEATDSRDKGAGGQEQRKSTQAEARSNARPQKRKRERGARHKQTREGETAKQHTADARARQAPRERERKARDDRERDAKGATGESTEQRRS

SEQ ID NO: 999119 - protein, 164 aa, Homo sapiens
YWGRGADPVVMLRGSLGSRLCGVLGGSHRRSGPEVSGSGAHGVAGESMAHAGWSGWDLEMTGLDIEKEQIIEMACLITDSDLNILAEGPNLIIKQPDDVAGQQCQIGVKEHHGEVWTYPKAAAGEYNLHCTQAEYEFLSFGRQQTPPGALYTLRGNNLSSTVHR

SEQ ID NO: 999120 - protein, 128 aa, Homo sapiens
VGGMAPPMLLVVPVCVLLVPSLCEALIPCRCLRPAPMPPRGGSGGACAGSPCKFGLCWVAGGDPLELLWSQATATAPLGLGELTLENAGEVVPSFGDTSPGGDHKRCWPKRSYPGRLPLALAGDNPWA

SEQ ID NO: 999121 - protein, 144 aa, Homo sapiens
MIAHQNEPSHQPTLDHHKPDSAPALRATTTTLTHHDRNTKPFLPPNTPHRRRIGGDPREDRPHTSERHRPDDTHARTDQAACFRPKGRSDRPGGDNRQKQGERVDDSTQATDVKKIRPPRGEATQHRGRTQHNTPPTHIERRPY

SEQ ID NO: 999122 - protein, 166 aa, Homo sapiens
GRAAHALTADRHLPSRGGSSRCKRRVCCPLGAPAAARAVAGVDEGQARQGRPSSIAAPPAPGQGWEGTARGRARVASRTAASSLAPVPRQTGMLPRCGSLHRNMGLGCQGSFQLPKATSETADQGVPWAAASRKYCHPKKCMDRCATLSQSGGAFRRLLTGPKLTP

SEQ ID NO: 999123 - protein, 261 aa, Homo sapiens
RGTMLRVAGWRRRAPVWLLVAERGARRGGCWLALWAPGMRPYFPLAISAELAGCLLRPGGTVSGVLSRGGKPQRQGPSPGGRELPGRGAPGGPHRLLPCSPLPGGLASGPFPAWGACIAPALWFPRVAPMSREIGPFHAIRLLWTFLWSGGLPPQGAVGVRLRRELPKGLSTRVVGPRGYCEKGRPGTGDPRVTVGISTADASKNPSFWKRRGTRISTAKRPRVCSKVKDKSQKGTGKVTRAPKDNGNALVHPADQRVRAP

SEQ ID NO: 999124 - protein, 104 aa, Homo sapiens
GQCGSGLAEGVALRFPQGSDATLGCGARSFLFPPPGKGLGAGLARRGARQMNWELLLWLAGAVRAAPALGAAAALLRADEDLTLYGPSGRDDAQNGADDMVCGA

SEQ ID NO: 999125 - protein, 69 aa, Homo sapiens
AETGPSNLSQTPELQIQAFWESEAPGLEKSLSALLLLILLVLGWSAFLGKESRAESRRLDSESPRSLDK

SEQ ID NO: 999126 - protein, 72 aa, Homo sapiens
QWLKPVIPGFWEAKAGGSRGQEFQTILANKVKRRVYKKHKKIIRALVAGTCSPSYSEAETEEWREPRRRSLQ

SEQ ID NO: 999127 - protein, 83 aa, Homo sapiens
MRQKGGPLIFQNFPETFGFWRFYQQDPRDGQSGKNGAKKPQHRAQKSLRSHHQAPTGLIFGGPQKEGFPLFSHKWGPLPKGYI

SEQ ID NO: 999128 - protein, 223 aa, Homo sapiens
VVGPVSTEGTKVGWAWWCMPVVPAIGWLRQENHLKWGVEVAVWPECLCTPALPALGCDRDGCSTSRPPRTPRAPTRKQRTHGPTFNIYTNLVALVQALAKDGKNQPNFKGTFSHETFHGLGGCRRWGLPTNPLVKITAKGQLFLVRHGPFALWPAGSVDFPSQKGGSQRRRFLPETRTLKDPFGVPKNPNLVSDTTPARLGFPYAQTLVDTRGHLTRKEQKKR

SEQ ID NO: 999129 - protein, 102 aa, Homo sapiens
MATVLNCHSLRSFQQQKTQALRQQLGWNRYGIPGKSGWVNSAGVYQWALKYHYGHLKGQVEIMDLVNNTRLEDLVGYKLLWEWEWREGGWNETSTPVRGGIA

SEQ ID NO: 999130 - protein, 373 aa, Homo sapiens
DDSEAVIMVDVTPSFLVLSGMPCALTLDLGAGSRSLQRDFRRLSVSRSGRGEPRFLLCGLRGRYPVRALRQATPLSPVGWCRVVADEWEQEWRQMYSGPGDIAYDARDDRTDFPDVESLPRTLRGLTLHIQSEARISSTACQVECFWSCSSLGGHATSVVIYSPPGVLNHDIRPYRRSKDISPPAELRDFCASLDTLRGRINESGSMTLPEARDSPTLIAFLRAVSTCTSPYSPLGKQELAIGISEGLSLLDQQFRLGAGQRVGMWRTQSRLSQPFVWPLQYGPPTFAPSPKLPIAFLTLVEGANTLQQRSEAPGGYNPLAGKLDHWRPGTGHRTLGTAPDPQGTTDGSVEKTQGLARGIWNTLSEILGTILI

SEQ ID NO: 999131 - protein, 193 aa, Homo sapiens
DQTREVLLLLQVPVLSQWNQLKDKVVRLLPEALVVLEIGQRQGEQHVKGGKGRQGLEVCCAPTSGQQRLQSLKLSSTSAMNVVSNAKWAGSTHWHRQVSSDLNGAASRVCRATGSGFVNTAIRTLPSQFRTGTSNAALLLNARAVCAKHFVGPHFGASKVGAIVDTVHMIITAAFVGNGGTCELARGLQNRQG

SEQ ID NO: 999132 - protein, 411 aa, Homo sapiens
APTWNSLLRCCLLLARQCSMPARACRPGQLPPVALAAVPLLVPSRLVLGVRRGQGWAPRGKLEGTRAAEGSFVDFTAAKNLGRRRGANRGPDFASRGGLGGTPEGGAHQAPKGPRRELSEIAGEPKGDQRTRRRGSRLDSWRDEGRRAITATQDHRGKRIINHGRVTHRLPQQLSPGRIQYTQGGQGRRGAIDPQGRNRAGTQTRRDIVENGPGKEITPGGYPRGENKSPRGMRGTTIQGRHTTTAVVPSGRQNKAALREPNSRSRHKPQTRGNTTDEHPGGHTNLGALRTTRRAPQRGAFNRETCRTNNQNKLGETHNRSSRRAHRPTPRDEEENTGVKRHCYAPLTHRCGHREGTNKERVGEERPRRRGNTRLRVDATETPFPIGGTSATAKTERDPKSVTPRRSTQET

SEQ ID NO: 999133 - protein, 198 aa, Homo sapiens
MRSWSWAPLGQLGKSTYCATMGPRHLCSPSSGLVQGCKPGSKQQNTSTTPVHGLTSWETESTVELTCTLDGTDFLLTEFRVPKRRDSGVLMCMWSTFWPNNFLDVAGTNLVLGHCKDGTSYILLRHCPRSRLTLYTSTWLVMKPAWVQAASKHAGKFQSLVELHTCVGFLKFMVGVQFQSLIFCGHLGQPLKLAHGSL

SEQ ID NO: 999134 - protein, 353 aa, Homo sapiens
MVPSWRQCRQRLTAKQLLALQHAPTSVRNCTFNMQHSSVPTHSNYHQWHCSTMAQVPPGYQLSCTGANTHSPSFVNFNISVSRHHPFLHLSLQVNGLHVCTNYSVFQITSVFHSPMGPLSCYYRKFPKPHRTWVPQVSFFQSKSRLMRSYQATIHDRPLALYPEDNWPTGHTPDCNGTQSAGKLTSCPYLYQWLTVTDELGYTHTGQLSAIEVKRARHTLGAGDHSHLHWQLPSGSRTMTPLGFYSSSRYLKAADTGNYRFPYLWGSNTSSWERTTPLVGAHSKLSPGITIMCNTRSIINTRYIAGACVGNTSGDTPLKLPAGQHNVATWERCKRCSQLYTLHPCGHSFVVTN

SEQ ID NO: 999135 - protein, 85 aa, Homo sapiens
  misc_feature (27)..(27): Xaa can be any naturally occurring amino acid
MTYFSDARINNTRPRLTSDLYKRATSXGGANLSKIWLDYSLSSQHTPLCVKSVIPHKAINPFYERTDTHAYRKGVAEHWRENTLP

SEQ ID NO: 999136 - protein, 377 aa, Homo sapiens
  misc_feature (24)..(24): Xaa can be any naturally occurring amino acid
  misc_feature (212)..(212): Xaa can be any naturally occurring amino acid
MGEFQIASVIFVSSNHIKKIVSIXKIASDLVTLVEQATQLPLNVSLHSNLEPRFRDHPLDKSPNGGTCTSPSEDLPTIYTREKIGPARFFPELSHYSNLPLNWHHFDKQQLALHTMSNTHTATQNTRSIRTPLLYTPKVKKIAFANTGPFRRSRIGSSLRGNNTEGLGLIRTARQTEALDWAKRCSSSIIHHQNGPTDIRKITPTASNYVYXYQQKQRQHYKSFSIRTHFINGQASPLPCDKYVCGTTHVAISLPINTLAKTTTAGGLSLPKEATRDPRVSHQFMRLNHPRAGGPIGLWQRLRTQQRFLWDDSFITPTRREINSGHHLRSTELGETPTSRAISPMPSLSRRINSLPPHSRIRSKASPSRGKSAHDAH

SEQ ID NO: 999137 - protein, 89 aa, Homo sapiens
ESRNWLIEKINKINKPLVRLMKKNTEKNQIDAIKNDTGDITTDPTEIQTTIREYYKAHYTRYPRKSRRNGYIPGHIQPAKTQPGRHLNL

SEQ ID NO: 999138 - protein, 292 aa, Homo sapiens
MGHEQNQGAALLQMLPLLWLLPHSWAVPEAPTPMWPDDLQNHTFLHTAVLPGWESQLWDFSEAYDEDQLFFFDFSQNTRAASPARTLLTGAQEQGTCSCPSYFDNSSFCELADPRQIGPKTSAWHELPAVHERFPNLLKCLTPEAPLELWQAPNTLGSAPRSATSSSPPIADSCNWHALNFPSSLCDRDSGGPTSSLLSLARTATFTLSTASSSHFTPFHNQKPFCSTSSFLATGDLTRNHLTAYTRQLVPNRGTPGKPHLAPHEFCLAAIAACRSPSGLWPLAPVSSHTSH

SEQ ID NO: 999139 - protein, 135 aa, Homo sapiens
MSKTELLPDRLGHMFSGPPEVCVTEHDHSHLAENKSLLIFYRSTLFADTLYFVWQPYSPLNHLFDVSRVMALYVKVRSQTVSGIITAKFKIAGLTLEHRRRKTPSGRLSTDKGSLSRTQESILGSLAPTRLEANP

SEQ ID NO: 999140 - protein, 137 aa, Homo sapiens
MNERLAQLDITTTHHNTNNNFLIAPREQLPCSQPLLHNPQCEDSTLRGTINSCLVDIRHDSTTVSDNKRLYAAADREHRCRDISMLPCKARHRATGVPEERSDIIGSYETARAAASTPTHHWHTVQKTARRKSNERE

SEQ ID NO: 999141 - protein, 218 aa, Homo sapiens
GSRRRWQGEVEAVERSERAGPGTDGSIAGLAGVAGKLSDEWQRACVRPVSLTVCGDQGGGGGRGELARPRVPLLVESGGPGVRPGVARALGFSGLTRRTLPTFLGLLFLRVRNNAQGGPFGPPGSRDTFRTLRACMPRSARRTKIPLNVPSAGSRAGPIGAQLPLDPSMCGARPLVGSDRVCFATRSSAATLIRKRGAPYPSQCVLSGETHVVTVERN

SEQ ID NO: 999142 - protein, 143 aa, Homo sapiens
SGDQICMNEELLLTDEQSKWFLKKECTPDEEAVNIVEMITKDLEYYINLVDKEWQGLRGLTPILKEVLRVKCYQTASHATKKSGMKGKVSQFGKLHCYFKKLPQLPLPSATAILISQLTSTRQELHHKKDCNLLKTQMIISIF

SEQ ID NO: 999143 - protein, 102 aa, Homo sapiens
MHFLSACTKRAHRYNTTSTRGNTNQETGQQYLTKSQKCSYSNRKGNNDTDTVWSTSSSLLTGTVANSGNMHEKRITAKLLNRSRVTSWTTTSLLEHYFAQTR

SEQ ID NO: 999144 - protein, 72 aa, Homo sapiens
MKVLVQRITKCAREGRPEVQNPQPELGCRHIKVPRAGEGKRGVTPEETNTHNEKPGVCTSSSVNRTEKQKRS

SEQ ID NO: 999145 - protein, 82 aa, Homo sapiens
MIKGDHRASEEVAPRRGRVVKGPPGTRRTLPHRSEWRTDGDIAANEGKHDQGNTAEKRDEEVTESAQEMSTNTEAERRENEE

SEQ ID NO: 999146 - protein, 78 aa, Homo sapiens
  misc_feature (29)..(29): Xaa can be any naturally occurring amino acid
  misc_feature (48)..(49): Xaa can be any naturally occurring amino acid
TPYRGSLILQHGVSEAPWRLRMAVSWNRXYTDGAELPLALAGDTRPRXXVWGRTLRLSVISSMATDSFFSFLFFLPFF

SEQ ID NO: 999147 - protein, 33 aa, Homo sapiens
  misc_feature (15)..(15): Xaa can be any naturally occurring amino acid
METLYEPSISVRRVXCFLANDERSELERGSGAY

SEQ ID NO: 999148 - protein, 187 aa, Homo sapiens
  misc_feature (159)..(159): Xaa can be any naturally occurring amino acid
KGPVVSATAQITIMKFLTLALVYLLLGPEMSSSQKSVLFCCRSDGELLSVWLRGSCVMNAYSDYVSDIQLNIGFRSKYFHCLGENYEMLTNIWRTLAASLGRMKVISTAEMKIREILFVPSVMLHGLYLGLRSESLVQNDTGVQRRLAVVPRLMFRTCXVCREKLLRLPLAFLTLSEIWVVEEHYRV

SEQ ID NO: 999149 - protein, 103 aa, Homo sapiens
ILRCLGMSDALLQYSIYTTDDSRNCSVLSPDSLHGHSSTYAYSRRGHVNMARVHPRVIAARICQEVNMPSIDGLKMLCLIPSMSQSLLPLYIAQRFMSWILEI

SEQ ID NO: 999150 - protein, 72 aa, Homo sapiens
TILESLFRVPCLLLDVCLPESEEAAWLASVTLICVLCTGCIVSRGGSVVSLLLFLHASEGGILMELESILMK

SEQ ID NO: 999151 - protein, 33 aa, Homo sapiens
MQFPGRLNQITFTVYTTVGVYYGQLLLKSVEQN

SEQ ID NO: 999152 - protein, 103 aa, Homo sapiens
MGNHAWGLAHGGVYQHSGIMTTALRQVTKILSMDRLCSGAHKRSEVLEHQGMCIELNWALVKKCELGGARVKVEQRKALPTQYQLGRKIVGFGALARWVTNTL

SEQ ID NO: 999153 - protein, 69 aa, Homo sapiens
PDTDDLKQLANGVDRYISKYELGHKPFSDYGNTPRIESTLDKVVDTCEGMTAHSVSQKFTKIALTGKSL

SEQ ID NO: 999154 - protein, 110 aa, Homo sapiens
MSIITNMDISTLGAVSFQKNQTTNGAPEMLLLILLLQAFITSISTRVSIGRVIASRTQMNMPSRSDRCYYDVTKECSVERDDINQLLCRIVPQGSDDGLLGADAANGRHS

SEQ ID NO: 999155 - protein, 84 aa, Homo sapiens
MESYYSKGYRHKFPAPSVSICGELGVLIMVLLNFGITWDTFGEKGLRQGYLVEAQSKIVLGQEQDPDGGKFDRSQCLVREMGIV

SEQ ID NO: 999156 - protein, 134 aa, Homo sapiens
GTRSSVTVQIRTMKLLTVPGVLLLGPGVSAAEACFSFLVLRLLEWGPRDYVDEPPPLDMRERHNSHLASDEKYVPMPRRWNVMMLPKRGPWGMSWRVQERGVTPSAGRELSREYLMAYGMRKDSTRFAFQGWLE

SEQ ID NO: 999157 - protein, 113 aa, Homo sapiens
MFDHIAVHRCDRDAVKLELAPARKGRHCSRVSIKGMLCVGSNARDLARGWWSRAAPRLVGSTRALRACRGRRLRSGKRRILEEDRYGRGPKVPQRREWDVNKGMAVMLMVKQK

SEQ ID NO: 999158 - protein, 211 aa, Homo sapiens
MNRIIVYDASDDRGLTDTYAWHARSMCCSPEDGDGRQDSILAYIIRDIVRPKSKTLQKDSIDSHEECLLCSVAKSSRQTVAGRSRILASLYDSIPNHRLEVSVAWSYTWGFLIPEWRLNSGRRCTVRQGRNGSTGAFLILVLPRSSGTIQRKSEYAYVLASYFGVNKRSAGQQFPLSGHSSSLNVVPQHAMSGNDDNYLHDHMEIGLNYQN

SEQ ID NO: 999159 - protein, 204 aa, Homo sapiens
VPVPWPGGGERGTWGREHSRSPLLCTPLVGEHSRSPLLCTPLVGEHSRSPLLCTPLVGEHSRSPLLCTPLVGEHSRSPLLCTPLVGGPRLQPTADPPGAPGWVSLSRKGYVVGAPHCGWGDLIPHRPPPSSWSFPPRHCFAPAPFGITVPPCLRNCFGRCKQPPTRPPRSHGPSPRPKKTFCSCKYSQQVQTCDFIFHVFLRTD

SEQ ID NO: 999160 - protein, 233 aa, Homo sapiens
DCCSMKIFDVSCSIAQMTVSLIDKLIWYICSPYMATTMKYRLSHNVEKFHVWSQGTTSSWRSRYVMHEMRYLGENMSLPEEPRYLQKHMSHVAKGDHLCKGLTSTSAYQMCSYLSPWMRVCLRCMPCVWVFRVFELVDHLGDEKSFCYYSPNLMALNSSPYSMCTRLDDSDLEFQIAAHSSCRKRGIVIVGLRWRTRSNRRPLRRPSSHFGSLYYQRLATFTQNVILITVIAY

SEQ ID NO: 999161 - protein, 198 aa, Homo sapiens
  misc_feature (20)..(20): Xaa can be any naturally occurring amino acid
PRPGVTGELLLLAWKRGTEXSTTLMINVRREEIDQRDASPACIGKEERSGTEKRLLFRLTYSHVAPSSRYTCLSTFMSCHPVGHWMNETPVQFTGFLGELSNSKWPHARSRSFSHECARSTIHSDRLGGYFERTRGRRAIRGCGGKGRLLYTQLGAESSLFKRIRPLETLEANNRELNHPGGFSDPPVNNYGYCPLPI

SEQ ID NO: 999162 - protein, 237 aa, Homo sapiens
METNSPLRYFLNVRIFPHYCKRTLLKRNEYQRIRNFWHPFFERLPLRDLTAQFDPLSALLKFHREATKSLGRQVVGFPIWHKALAKERRHTEGVREYRLRVTVSHHLFALIGVSDSEGNTLLVNRVSSQYRDIGPPDSLTLKRSTFSWNLSHYPESLLVGPQKVSLKRVVNCGVSQPPTHVRKVGLHLGWEQPYMHNLDRPSTGVTRRHTWTPPKLVYKETHLHARCIKSSRKYNTC

SEQ ID NO: 999163 - protein, 224 aa, Homo sapiens
  misc_feature (12)..(12): Xaa can be any naturally occurring amino acid
  misc_feature (90)..(90): Xaa can be any naturally occurring amino acid
MCPISPDVVYCXIDQVALRRFIEDCALLYYFSRQDVACMAKDELNMNAATWNGAVMARRRSATLISLYIAYTKDLSLTPYHPKELVHCVXDSILNGSVSRDLGFTIGQEDMMRGYDDSGDYYSQIHTRGGRWDERRKEWMMLPRGSVDSCILEQMAVTVLLYYKSLEVITAFSVCPDSPYRYSPSLAYLDAVNELFLINPDSRAGDYCQVGQYLIILLSLFTYK

SEQ ID NO: 999164 - protein, 116 aa, Homo sapiens
MVKRPLGLGPSLAAFDQSWRFAQLEVKVAFINSRTLGRNDIHLTLMDNGELYDHPLGEIANVYVSYTCVPFVRFGFFSLSDESNISDCSECAIVRQAGESGVKHTEWCKAYYMRLY

SEQ ID NO: 999165 - protein, 130 aa, Homo sapiens
MNKKEVVEAVDHVETQTMVVVGIVGYTWENPSRPPDIQELDIGMRHISDDMQGERTYQELGMKSKERRPRPKVPGRRKHGQGTEGMGKENATPGGREHTGKDGRKVLGKGHAGVIGPRTQMRHEARQGAK

SEQ ID NO: 999166 - protein, 245 aa, Homo sapiens
NHIYSSIKYNIESWICTDFLAGHGALRRHSPSQRFVNPRLCPQTFNSMNMHGTMKVYVWVLMDVRCKGKRPMHAWCMLQEPRRETVRQYFPETWIWDIGRCDKLSPWLWLSVRSTQSPGHHHPSEEVRRGLLDCLKMLGLWLSACHCLLSEPVQALSLVVSSQMPLTLWVVGEALLALECASVRKGTFPNIAIRECSVQAWKPLRDFLSWGRRGEGKQRALTAVCAITGLAKLVSWAVNPESHEE

SEQ ID NO: 999167 - protein, 80 aa, Homo sapiens
TEWLHCPLGVLCEKKTLLGQDSQWVICFIVLVATVMVTGDREWTKLALPPGSCQFRTLGSNAVPLVVCDSVANSIALLIF

SEQ ID NO: 999168 - protein, 105 aa, Homo sapiens
MSVISNLCIGLKAVQQAIPKPWAPWFVSSLHTLVGWLQSYPGFTKRDICTTEHTCNICSSPLLDHGAVVSTSKCTIEIPDGSLQLLQPLFTTSFQLENQPAIHEC

SEQ ID NO: 999169 - protein, 137 aa, Homo sapiens
MSLAGIPDQLRTSFSMYYARALGEDQATESYQGIEPPFWGNNTDPRRHGEKDMWVRPPHFSLCVKNSFMGYAEYQKPNLIRYYEIEVQHSVATCALFGTLFRWPVITRANIGLCPGELPPSWKLHTKGPLINNTVCL

SEQ ID NO: 999170 - protein, 85 aa, Homo sapiens
SLFCKSCKLQYGVRRLHIPSLRVVLCGAERIWKTSNGYNYYNALTPSSCPQSGHIAKQEPVTTDARSLKRSRSERLVAESQRLVD

SEQ ID NO: 999171 - protein, 226 aa, Homo sapiens
MWATTCAAPCLQRVEEEDETWKFEDQDSKEAKKPNFINLGHQSADIIITYLGADMEEFHGRTLPDDDSCQVIPVLPQVMMILIPGQTLPLQLFHPQEVSMVRNLIHERRTFGCPCLQHMSTEREAQFGNNSRDYMPIEKNRIREMEIVNSEQPWDTQRFKVLELRTSQMESSKLKCKSFPNGVCAFNQCCSSLRNPLIKCQHFSLQTCLTEKTNVPTNVARRIPEA

SEQ ID NO: 999172 - protein, 166 aa, Homo sapiens
MGRETNHESTTQTQKTTVVAAHTAHPWNTALFGTHPNGERRPRRSAQQRPTQCNTLRHKRRAIRTTEERHTHDGGKHTNEKGGVGREKPQPPEVKDNETSRAALERNKRSAQGAPGDQTATNHQKKGESAVEGAPIDSSDDSHQARPGRQPTQAGRRAQKFSRGIT

SEQ ID NO: 999173 - protein, 105 aa, Homo sapiens
MPFKCTELCDSDGLSRGRSDIARNYHGAWFRREFDRDIDGVKTSVYVDPVHVLQGHDLGASCELDLEEDGLGQWESSWSRPRPLEHTHLKTAAMMGPRRPPGIGP

SEQ ID NO: 999174 - protein, 76 aa, Homo sapiens
ALSWRVCLKNDHWPCGIWRVLRILLIESANEYCTLKILDVLELKIPEDNARIYDKYTEQTYKLTSWLWFKCVKPAC

SEQ ID NO: 999175 - protein, 150 aa, Homo sapiens
  misc_feature (44)..(44): Xaa can be any naturally occurring amino acid
  misc_feature (142)..(142): Xaa can be any naturally occurring amino acid
GKESRLLCFSQPVECAGGGDSSALACRPLRLSCGFPGDFLLCPXPLPQVWAVEHLCRGMCVPAIYRGHTFSCFSFILWGVFLTVDNRGFSRHVFVPQAVALSNSPDPLVLTLACALQPSRYSRAVDPPAPQALYFVVSPKWXGGAHFSLI

SEQ ID NO: 999176 - protein, 213 aa, Homo sapiens
KEGRRKERKEEDRNEEEKKKKETIEEEEERKEKRKREERGKKENEEEERRTKKKEEEEKRGKKKTNKEEEHKGRRKQKKRTETEGRGTKNEEKRKRTDGGEEQGEEEENEGTNGRTNTRTDERRTHGTKAEQITRTTRNDGHERTRRHTNERTNERTKKKPNEGRTNAGEHERKLNDNRRTDRQKNLTKNARTDTKDNRTNERKREGTTGEEK

SEQ ID NO: 999177 - protein, 125 aa, Homo sapiens
VLEPLNLTSEPSDYALDLSRFPPATPGRLLTVTPSHSPKKNPENSHKENATRVPGARERIPNWDFRGKLNSEHYSGRRHPVLEAGPMRTETEAHRDRGTAQTGGYVPCAGHMDESSLSLFSYLSH

SEQ ID NO: 999178 - protein, 121 aa, Homo sapiens
  misc_feature (41)..(41): Xaa can be any naturally occurring amino acid
MFKFIDCLTSMQTSYTYSFNSTILGVTLESITTIECAHHVXIKVHDCDRFSLNWSAHALPLCAVNCERLLFMPVPLRYMLEQNRWRVYVSSRGLLCVQWSLLRKSCWAHFNYQGRLRFQRI

SEQ ID NO: 999179 - protein, 96 aa, Homo sapiens
MAIIDREGLHTKGEAEYESLLYGMMALGRERDGVGPGIKALQYTSRTISPTVRRLVLPFRYIGLGMGLAWTDKTVVVKEVDGGSSLAEHQMKPQRR

SEQ ID NO: 999180 - protein, 207 aa, Homo sapiens
MNRRSRKTVITSSSFVPGEYTGLAMTSHRAGKVVTGLGIQGDTSKEVVVGCGPLYDTHTRMDGCGHWWATVETAVDVLYRTIQRSGSLVHGRTLNVHAMHRRRFYVRIWALNLDERVRSFLCNRLSAQEKIGLGLERWGMKRLTRERGTFQDLLLNRKVTGTNMPTRWCIVTPSYSQELRPWRILLTTQERKGLNAELDNAMVEVGW

SEQ ID NO: 999181 - protein, 83 aa, Homo sapiens
MPLSTPGVGNSSKTLVLQKMEEINNIVINILHEFICPQYLASKENVEPSLKKRVIPKGLLKIMFVPSAYHTLVCSICGKWTKK

SEQ ID NO: 999182 - protein, 39 aa, Homo sapiens
MRVARFKHCDYVCAPKEKAPIQGLRAWYLKKWLGQTISI

SEQ ID NO: 999183 - protein, 221 aa, Homo sapiens
MAFTPSVASGGLDRADLVTPPAWASLRTRITGVNHQCLAFFIFGTQSPTPCGPGRRKRREAERPVGHKEAPNLNRGPSETTRGHNPPKDAGNNGAAVSTKTGAQFVYTLNEATGRFAPHFGAAGCLSEFLETLWVNPPTWRCGGPPHKGGAGDYVAACGQPNTHPPSLFGGKRVLFKYHDGATNMGILAWRTIYFSQRVSLYIKGNYSCRRTQCCHKRISR

SEQ ID NO: 999184 - protein, 62 aa, Homo sapiens
MRLGCLTKVRRRLELNLRGGKSFLEEKHWNNGDRDKDKINKRLLSKEKAPENALGHYVVDLI

SEQ ID NO: 999185 - protein, 108 aa, Homo sapiens
MSAWISPPWVLESPKDDYSGLRNSRYGDRTLTDAWWTWGYPTQQECVLFSTWSIDSSVKYLGETADLFFDHYQIIVKEGDVQKNPWFIWVGEKVSDGRLVNLGETPVR

SEQ ID NO: 999186 - protein, 313 aa, Homo sapiens
WLTEVLTLGSSYPSTSASHVAGTAGACHHAQLIFKFFVDTRSCCVAQGGLEFLGWRSSHLGLPKCWDYKHEPPCWPWNLFFFFQEPGLNLGCPGWKRSGHNLGSLQPRTSRAQVILPHQASRVSWDYRVCTITPVHNLEFISREGVWPVGPGVVSNSSAQVIPSTSASQSAGITGVSHHAVAHGEFLDHKDIGALNRDWGRDLETSGNHNGTGSRYTQVMAVIQLAAQPGFSKSWELGPSIHFAKLSGHIVFGANQNRFKKKPNLLSVVTRRVPARDRKLPKNVLTSSPYNSGGPMVLVVTRGGGPTSILINP

SEQ ID NO: 999187 - protein, 359 aa, Homo sapiens
INAQWPYTAWGTCDSLLRCCRFGPYTQTDCQPPCTGPAPAADPCRGPSPGPLPVGPGVRREAGTGAQWEAQRDAAREVLLMMDISRHANILVRSSGHTAGTVIASRSQPYEGPGGGITPPKGPETAIRGHRATRDCRKTDDDAGRTEKTRMTGRQTKQEYTDWASRCSQLGSNHTQRQEDSTRHRPGGHEEPGTHTWEQTRAVEDQSQEPAPRPHTGKQQGNPAALGVGIEDGRRRQQKARAQRADTPGDNTSRMGKQTTPRWEQPVTESTKGQERARGKVPPRMAQGWPTDAGTNASIQRNLTAGNTTIGETQSMTAHHDYTQQGRRRGTERETHRSDGGTTKEKPQWRTNRQERSDE

SEQ ID NO: 999188 - protein, 386 aa, Homo sapiens
VRTPRDRTCGLTLHGGLRRCGARPFSSSPGCCVVPDERCPTGKAGVPLMNTSMLREVCAVALFGKMRCDVRSVHLGRRLADDPEDRLVTTRSLELYSAVNILEEVFPPNLGTLTECEGPSRSGARRSITWCSYPRTLRRHEVVTLPRSVDFSTKGTGFPMVPRAVGELGVPPRARCLIFEDATHTLNVSACVFPSIFHRFGNSVFIITSGFGCPSELWIRLEWRLRGALGWGLLRGGPEQKQATEYPTAFRVARSEFPAPCTKSCRLVRSIEPGRLIASCYQYRGFSRGAGFGVIACDWGLLRRGSCPFVTVACRHRSAPRLCSCCGRGVPTFRFPRVAFPVSPPFCRAPGAGGPWGPDVLQRSNPWGQNFLLATDSLGGPKLVGR

SEQ ID NO: 999189 - protein, 102 aa, Homo sapiens
MLARMVLISCPHGPPASASQRAGIAGVSHRAQSKISLLKLRHDLVVKRLVVSRILGGLRAREIPCIPEVWQTYLLEVDQLHCAHVWPSHGVWMSTQVMQLCS

SEQ ID NO: 999190 - protein, 222 aa, Homo sapiens
MLQMITYQEDLKEKKEVVERGGNMDRRRPCLTAKWLMMEALGTQEADNEETQEEDSKVRGDGTEEDGPKTGDLVRKQDGMHEGLKASCSSALRGEGRGPGLQLIAWRGLKPIGRLNPHERSRKATRAQGIDVRPRPSIDRVTYEGFKSAVENSIKNIQGAQVAVGHPIKFAYAAVSNLCAPHGLPFREQLLDKRACEDSQSLRITMRGPIYDNSIGGAPRRT

SEQ ID NO: 999191 - protein, 372 aa, Homo sapiens
GLLGRRADGLAIELSGAGNAELLPACSGCLGLRRGLQPRGSSSLCLAPADTLAVDTLAVGTLRGRAAAGACCACAVPAGGMTGHVARPGAMLRKDGSRKECARRCCCVCSDLPGPILAFDCLDTCSGSPQTSDLKLVGTAGRALGLAADVRRDYRACPDAGGSRRRRLPLKEEASALGKRRSTGPDRWVAENPKAKHLTTMRTEMLCGTHGTSGHDRRCRSHTHIPHTYDIIASERTAQGAPGREFITHRLQTEARDYWNEPCARNIREPNSPGSLVRPVVQRVQKAPANYQTISKKPTLEKHARETKDHIQYQTATLMDNKHPQGAHNLAQTTSNGTTTKCEPLRARPPPALRKPPDPHVPTPNPMTRTRN

SEQ ID NO: 999192 - protein, 186 aa, Homo sapiens
MVSEGPGPQCQGARRAVLCRGEEPHHHPVSSPSHQSPRQRVQELSTGVRGEQRCPAGTESHHQPVSINRHPVSLARRVQDLTVPGNRGEQRKHNRRDESTTVTQSIRHGHTRLHRPRGIQDTQCQQCDANQQTGTREQNRNSRQSHPDITTPGARYGQKTPASKTHHMDTRTHYRRKRNTRRGKED

SEQ ID NO: 999193 - protein, 130 aa, Homo sapiens
MVITALREAKVGRIHEVQEIENQSWRTTVENTRINIKKIPQNISPGSAREGSHEAQSHRTRLKRQENWTETVGQAGAMAQYEARKWDDIENQDMEQTHTRNPRQGPETQGQIKALGTTHRRHKGNNARQR

SEQ ID NO: 999194 - protein, 152 aa, Homo sapiens
  misc_feature (85)..(85): Xaa can be any naturally occurring amino acid
  misc_feature (106)..(106): Xaa can be any naturally occurring amino acid
MAAKYNYLLLRRDARGASFPTAVRHTAPPAAASPDEGGGEHTFFLSDRSTQAYILDETNRLSSTLFVRQNPHPLSVVLGAFVVAXHQHQSYFAFHIRSGGPQRVDXLFSDGIQPACGEGEGDNHSSWGGYGGDAPSKEGDHTHPVSEGYTGR

SEQ ID NO: 999195 - protein, 195 aa, Homo sapiens
YLIRQRRRICILGTPDYHQNPRSIVGTSTVTGPSDFEPVVKVVQIVDGHAATILRGSTCKIIYSSIHANRHARMRDHRITTRWKEQDAASIIDTHEKSAQELKAKQGVHYINNRHECHRLMINQPERMPKLKGQASNTSSILRTKLSSTARRTHSLQLLEACKEQQAIPVMPHVLNPRRGSKSVSRKTPVSQNGR

SEQ ID NO: 999196 - protein, 132 aa, Homo sapiens
MSGTRLEGDARSVSSRSSWPYPGSRSEGLEILAFRCLECRWDSHVLMKHGPAYTPSMDTSGVQHEFTTALVPQTGDSCVYLLQCCCWYRMVNVDAEMNFRSMFDIEFWTLTWQLTLPSVLEYLQKLSLPLFG

SEQ ID NO: 999197 - protein, 73 aa, Homo sapiens
MALTVLEHEAQRIEGERRLLEHTDNRYESGDHVPIPRGNGPVETTHADGRRMTDSYTTIHRERASRGPRATAP

SEQ ID NO: 999198 - protein, 83 aa, Homo sapiens
MPTENMNYAYYNTPDKYDTFPIQQRGSVYAQHDSHTGNEPTLTYQLGRGTSETDEEHNTHADTYNTRQRTYIDTHIRPHTRTQ

SEQ ID NO: 999199 - protein, 174 aa, Homo sapiens
MPDPDICLLDMYCSEGIQMRSLYSPLPSVLESIFSSADFRYPSSGSFHLMNAETLSTLARCLVVFMRALPFALHRKTLVEVAPMNLQINRVECTNSDDEMAAISDHCCFQSRTWLRVLPTLYPSLMVPPPTPDPRGLIIGLCAEVEIASWMDSLARRKPRDEEGIKVRNRAYKC

SEQ ID NO: 999200 - protein, 151 aa, Homo sapiens
GALCSLVGFSRNIVVFGLSFVTNGSLFVCCPGWEMRVASDYQARGESRDRPGVAGDSPASALPSRWGLVRHNTITDRTKFFVVNVGRKTKVFLPCWPGMGLRTPDLRCSSTDHWVRLKKLPGELNKGDGKTPNANNTQRPKGAALMDRLGT

SEQ ID NO: 999201 - protein, 146 aa, Homo sapiens
MPCNSQHLGSAQGLGQITRVSLETILALTRVKPRSLLKFQKNLRQGVLARGPCSPSLLRRLEVDQLGCEPRGSRVVASDAGRTQRPSVFPPSLRQQEARTGASSKITMCCAYPVNHYFGLGSPNVLFFPFGAKQTSLGTTLGLKVP

SEQ ID NO: 999202 - protein, 108 aa, Homo sapiens
MPYSLVAIRRIFIISLVLRKSRIRIVYAICSYHKRNSWPKLYSRKALVTLRNISFTLSGHENNCQVGLASPRLHTSTSMPLSRTHENCGLITVGRILIIDTRCVMLEA

SEQ ID NO: 999203 - protein, 105 aa, Homo sapiens
  misc_feature (38)..(38): Xaa can be any naturally occurring amino acid
MLLHSGDLPESVQVVSSFLQNQTDESTQHSVMKCIRTXRWMASPTNIPGSILYRAGPLYTISSLMWLLVSDSTIDVDSGRTVSSLSIPRSLAEEIAQRATKSSPE

SEQ ID NO: 999204 - protein, 89 aa, Homo sapiens
TACQSEHSFFYDPIVTSLAITFATDIRPVERNEVTAEHIAPSVTDSYQYSRVLNEAVAVLKVLRGYHELVQTVRWSQKDVDAQVDAWEF

SEQ ID NO: 999205 - protein, 49 aa, Homo sapiens
QRHTEEWLLEHEHWGAGRPRQRLALSEHLVTHCQRSSIGSTGLLVYDLP

SEQ ID NO: 999206 - protein, 71 aa, Homo sapiens
ISDQKKKRLSVVMSHWKTVLICISNRQRSGSKDPRKKQKVYSCDVCNKSPDNGFRSIDKSVDVYSQLIMAG

SEQ ID NO: 999207 - protein, 214 aa, Homo sapiens
MRDTSDQLAALAICEDLLGFQTYAVYVSTLTQLESKTCHVRRTRDALKHMSGVSRCTEGFTVASRNPLSKAMGKVLDCSAMTAGIFAIDVSSGTHNSRGRFLATEQIFKGQKLALVSERRLGVCWVRGGRFPLAPPYNLIKASTFEANAELAAQTPVTLGGTISATQIRKVRTFEAAFSRRHWSHNLQGDLLERLCRLKSGATQLDKVRYANVS

SEQ ID NO: 999208 - protein, 178 aa, Homo sapiens
MLGSVHERRGLPSIPYNAPAATRTRSERKSENGFSERHYVDSIDTAYGSEGPKLQIIHQLYVPLSPDRGDLKARTRTSECRESATEEHIVQTKYRRRQEHPYNDEESIEPYTSSNKDRDKTIHTHRQDAKEQHDNGKIHKRGKITKIDRKHKRDLRKQAKRKQKKQRSTTITDMSTED

SEQ ID NO: 999209 - protein, 86 aa, Homo sapiens
SLSWCSAPQWAKFELMLPGARAKSVKGFPFLCPTGVPCAGLPVPLSVLWQPGGSGGWLGLWAGEAEALSVWVSQHMWSPWAEHQDL

SEQ ID NO: 999210 - protein, 208 aa, Homo sapiens
MTEPVRLSLRTLEVKVEYAYSDNSLEPGLLVESTLQGECELYHELIASVPPVPLLSPKQMMSDSDYQQEAYQGVLQRTVLAAAQQHSGLSKKKEGRQSREAMMTFQNAIVPQLGQQERSSPIGIPKAQQSPSYHTERPLSRSQSFCTRRQEKTQGEEEGVTSCQHRECHRHLNDHAKMKLMSKIGARHTGKNAPGRGRKQGNSLNQGS

SEQ ID NO: 999211 - protein, 181 aa, Homo sapiens
SITIRVWPGPSQVSEHGDTCVSYSDPWVSDRSAWILIQIQGRLGGKSRRTVTNVTYGGSVGHITSDHIRQEVEAEFDSSELSSTARTQGKGEAKRENTEEQTTKRRDRERQHDKKRKEHHRQNRRTTRHRNNGEHTQATGHRRASNTREKKRQRTQTNKRHTTIPKKRRQKRETTTKKKNK

SEQ ID NO: 999212 - protein, 298 aa, Homo sapiens
MASPYTILRSQVKQRTQNTYACTRVEERWRGTTERHNPETQMRGIAYTERGKKRETETHSGKTHGHERGQSHTTIEGYTTTPKGDRHERDRRAKNQTHQVSTANKRYKQMDTSNTRTPWTTHMQRTPPNRENSEHHKGYRAKDKQATYQNNTRAQYPKRHIPNEHHVLGDNHSPQSHETTQAQQRKTHKGHQEGHNTTEKRFTSNSQNERTGITNQTTRQKDNPQEDSHMATATPEEKSEDTSDTHTQKSTDTTQEGKTTEDYQNNKWRTTEDSRETHRNERRSANHTQKQGHTQLTL

SEQ ID NO: 999213 - protein, 239 aa, Homo sapiens
  misc_feature (136)..(136): Xaa can be any naturally occurring amino acid
  misc_feature (147)..(147): Xaa can be any naturally occurring amino acid
  misc_feature (189)..(189): Xaa can be any naturally occurring amino acid
  misc_feature (215)..(215): Xaa can be any naturally occurring amino acid
GDFLRRESRGSPASTVLGRTPGARVPSPGRTVPIVSPPVHTSFSGDPRNCPRRTLLTQCVVSAALGIYIETCTSVQRNLITVASAYSLIDAASHIVVMVASENISSKGPRELHGYPNSAKNRKPLRRSPIVSSPIXFDAWSQSIFDXPFVNTADMIVSAYWKETFVRKKITYSVSTTNRFLSAANDARXAIRRRDEKPFELEEVLAYEKRKILVXLATREFPLPYSESESYRRRQNFVE

SEQ ID NO: 999214 - protein, 81 aa, Homo sapiens
RRITEALLEREIPVMVVSESDDGDRSTGSPKRSVGYRVARARAVMPLHSSLGTTEQNPSQKKKKEVTIHQGKQDYTGDWSK

SEQ ID NO: 999215 - protein, 121 aa, Homo sapiens
AGMQSCKSWLAASSASLGSGDPSRLSLDEVAVGSYGTLSCNHQQFWRRLVICTVLVCMTGVCLPTGGPGHGSWISWISRQCGAHRSAIPRVLADCTRVTRPAASMVARSFSFRYLGDWKSR

SEQ ID NO: 999216 - protein, 192 aa, Homo sapiens
MAWRIGWCYCLLSPSTTFSSADAPGTRLALPIAATAQHIRSQTAPGMATATQSNSPSRPARPTPRTHAHHSEPAPPARPTACTTTPHTHHRNPTQGSQTPPTSGPNRTPTWTAPATHPAQPPATRNNNFPRTPTHIPPNHPTPHTPHRPAAAHGSQHPPRIRCRTPPGTQPNPTTARPADPAHPHPHAPQPA

SEQ ID NO: 999217 - protein, 328 aa, Homo sapiens
DSSARWDRLPSFRQNRSRFACWSQTGCTRIITCSAHAPGGHAFIGGNVAPQGFEANTTRSGRIRFSTDSSWETSVEAFVFRPHTLGDVYSPYVRRYYGDIVQEPAKAWASLEDLAIEGSVNVAMGRVLQIDLGVGGDPVLCTCVGQRAVTHSGVSENVGEQEDARARDRMFETVVFPEFDRMGIGEVPRDAFAQSPRFRGPIAWRIPRPRHETRLEQDGAYCPLIEQGFRCVGCGITDTYWIPLDYKTTPRQDWVLSFRVINPPKSLSHCGQGGKPFFGLDRISVKGVYRSLLASLPQAWSTTTENKKAFALNPPGCIRKGIRGTSRW

SEQ ID NO: 999218 - protein, 145 aa, Homo sapiens
MKTNALYLQGQSSERCTTITSLHLSTNSEFPVLLCEEGAFVTLLGRCHLRKFTLCRRTGFILSWHTLECHDACFHVDHDGALKIGGHGGLLMSSLWKPILLLDAIECPLSLNEYTSSTWLKCKTVEFYRGFQEEAMSVQILVPDR

SEQ ID NO: 999219 - protein, 37 aa, Homo sapiens
MQLRVYDLDVGLRTIPVVQPLCDRFVPLQAIEKSYVI

SEQ ID NO: 999220 - protein, 39 aa, Homo sapiens
MEEAFSRMDGELESGWSEKAGGRRPRAGEKSNRESNEKE

SEQ ID NO: 999221 - protein, 73 aa, Homo sapiens
TAKDKNRWEDPGKQLYNVEATSCCPLGPTAAKRRLTLCLPSCVGSNEQRYYGGGYGSTQATFMVFQACGSDTK

SEQ ID NO: 999222 - protein, 71 aa, Homo sapiens
YFTLRYHNSVAIPTGVKRYLYDVYSPLPLTERTVLNTDHARYVRSEALAIHYFLLCTATVGPERRPSCDYA

SEQ ID NO: 999223 - protein, 120 aa, Homo sapiens
MDFGSETSSCYTELSSTRGYSIFSYATKRQDNEILIFWSKDIGYSFTVGGSEILFEVPEVTVAPVHICTSWESASGIVNLGPPVAILFATWRETVRTEAKLASGGAKGLTNNRALTTWSL

SEQ ID NO: 999224 - protein, 90 aa, Homo sapiens
IVSCVSAVAVEELKLGKYGVDSFVIVNSKFCVWILRKNSLEPIYIPFMVSPRSSSRHMASYESNTKNPIDTNIRQQYTLLTVCYDTDIGV

SEQ ID NO: 999225 - protein, 137 aa, Homo sapiens
MPGSYLPYRYIAALHSKAPGGMASDFASARYAREQILVCTPRTCLPARDKIRGVGGAGALRKPWKRPAPFPFAVAAAQWRGSSAPPRKSRQLEHFRRDTELRNGWEYLSTMVERRPIEGPTHPSTGNKGRHRKDAPT

SEQ ID NO: 999226 - protein, 263 aa, Homo sapiens
  misc_feature (203)..(203): Xaa can be any naturally occurring amino acid
HCLNPDDSCISMIDPSGPACTCSSLSVLDLEDSSQSQIGATRRYRAASMDLTPMRVMQKSLVMLVFNTRCSVHLRTTHVDTSKTVFRKSLADVLLFHPQKLRVETRILMLSIGMPNPRVRHGVYNASDLPCASPCLEISGRLASGLHCGGVGECLSGSPLADSPQRAETWDLIMLCLCDTLDECRIDSSGVWPGLFARHALSXEATVALWDQVRDDMRVHLIRGYGSVLHYCSLMYRIANGQGLVACRTWQPLKAYEVDSVLP

SEQ ID NO: 999227 - protein, 108 aa, Homo sapiens
MRAEAPSGNTQYSGLRSASSRRKMPKKAGATTKGKSQSKESRVDHLPLLGPVAVDPEQDAVTIAPSLCENLDSKQNVCNRLEQQMAVNVAIACTSIMREEAYMLSSVV

SEQ ID NO: 999228 - protein, 72 aa, Homo sapiens
MNPLAQPVIYSTIFAGYTHQQRYSSSLIFYLSRPSKEDMRELVIPVLTKKINPSFLQKRAIEVFPRRKQPHP

SEQ ID NO: 999229 - protein, 68 aa, Homo sapiens
IQHGGATFGYKEAVSEKGVYYVVVAVYYVVAMYGIIILSGLSICKKRKEEQGVGWFAENVVNENRSET

SEQ ID NO: 999230 - protein, 142 aa, Homo sapiens
MVQGLHVTYTIGATCSRSMIRARRAVVGSDCKQDDLVDVEVLLFEATKTSRREVSTHMQCPQRLAQLVENSRCVQTKGEQRQREVHNIGITTRAPVDKPVASIVPIGANSRRKDNQDIRTIVQSHCVVQRLVDYAMSDLAAS

SEQ ID NO: 999231 - protein, 177 aa, Homo sapiens
NFTLLVETGFLHVRQADLEPPTLRRFTHLGLPKCWDYKHEPPCPDIFFFFWRLDVSLWSTQAGMWHWAAISVHLATSGLPGVSRRFSCLSLPSSLGITGAHPPHPAKFGIFNVRRRGFHHCWPGRSRTPDLRDSTLPRLPQSAGDHRALSHPTWANFDYSLLVISLAEQLTTIALFL

SEQ ID NO: 999232 - protein, 118 aa, Homo sapiens
MKDGHQRPEASLAYRVNGQYIMDTDVASILPYLQWRGLGFIDPGPIECAKYPQNSIDSFFCALDTSVSYRVLTWLEYHDEMNTAGLSDGLDAFDQEYQLDTGFRILSMTVVRGCTNSS

SEQ ID NO: 999233 - protein, 105 aa, Homo sapiens
QWLAPVVPALWEAEAGGSRGREIETILASTVKPLSTENAGNWPGGVAGACGPGCSEAEAGEWRQAARRGLRWAEIVPLHSSLGNGAGLHLKKNKKSRDGISSLLS

SEQ ID NO: 999234 - protein, 67 aa, Homo sapiens
GITIQDIGTGKDFMTKTPKAIATKATIDKWDLIKLKSFCTAKETIIRVNRQPTEWGKVLQSIHLTKL

SEQ ID NO: 999235 - protein, 280 aa, Homo sapiens
RRSSPRVVGVSCFTRCCGRNPALVPPCPVADRAGVVCSTRPVTFLFDSASPSGSVRPRESLSSAIRVPGGATPSPVGSRLCPGLGLIRRILGSDPVAVKQIAGVPNLRGGMRCLCKKFYSQSMGNLRVSGTGGSPTTLGKESKCLGEVFITGLRLTSLDHVDHGVIVYIAFLRARLIVTWWGLSELIERFLTQMVDVCANQTTWSYHLDRGPDGGEQWENWFPLGWEEQLLWTPWNMGPLGTTEGSPRRARNGVMGATGKGLPVCPVFHRVEVNSEMNLT

SEQ ID NO: 999236 - protein, 250 aa, Homo sapiens
  misc_feature (83)..(83): Xaa can be any naturally occurring amino acid
MLHTVQRPGCPLTGIDGPPWEIYIHLFNVEAGIVGMLPICRHAIRLGKLQENVGIDLSNSKGWGMALPVVCGTDNLGHTWQRXAPFPCVSQFGPGQWRTHKVSDGHHWERKEKGFLWRNVNGPLGKAFINGRHQRALGSAQGTTLNFDWGTGLVWPHYAAEEPRGGGKFALRLPNWGKTDRNKAGRQGGGTTELGFPCPTRTKRPDHTGSGIWFGPPLGGPTPGRAIGGKNRLVGDNGFQGNPKDFPFKP

SEQ ID NO: 999237 - protein, 110 aa, Homo sapiens
IVLTLQGSELRALRHHELVHCTPGNLNSSTFYALLISSLQLCVAYVATRDNCCILDEEIRIVYLSNLPVVDRRFYLSTYQTKCRLEDLQSLARHSYSLTLKTEIIQNVNT

SEQ ID NO: 999238 - protein, 175 aa, Homo sapiens
MISSSYPNRTEPSYINKKAAIMVFPHSNATRIHKSCLNSVSSSFNIRLTEQVRTSKAQVHSNTITSVTLINSTTVVLHSTCRTGRTEPAFSDVVEIPYEGFNHAKVAMRAVEHIPVAHVVCIYLQRLNTKKARTAAHYILTSHYYTKIGVIERPTSKAVKAQFVTVKNPSFENSI

SEQ ID NO: 999239 - protein, 135 aa, Homo sapiens
GWDEDLAAYAVPMYSFDSLTVSQHVFDCFMSGQVLAGLPRTSRQVHSSTESYYNQYESVLWQPVTGDLIVKKKQVHFTVNASDVDNVKVPLYMCAEFHAVSCVADVDRSYCEQQISQGDSQPTSLRHRTMNSITH

SEQ ID NO: 999240 - protein, 196 aa, Homo sapiens
  misc_feature (55)..(55): Xaa can be any naturally occurring amino acid
  misc_feature (137)..(137): Xaa can be any naturally occurring amino acid
MNRRKWIQCFNDVIAIIFVVVSKQLTRWSSGRTIQSQSALQERSECLLQESSGMXQGWAAQPISGESCILNQAMICVAEKVLAGKFEDVMDYLSHEVCSSYTTRCRMHTSRRPGSRTQRVTRCQSTSFEMSDREDQXPGHVVGWASRTATAHFHLCVCVTLRTIRRCCSIDCRDIIQGMRLRQLRAALRRESRKFN

SEQ ID NO: 999241 - protein, 236 aa, Homo sapiens
  misc_feature (106)..(106): Xaa can be any naturally occurring amino acid
MTTQIVQKALCVGSSVDRFGVHVDTCDSMVVPLFGNAIIGDRHCMAGIRQLKRRDVVKIHHLLLSFRLQTLQALDIDFGSEAHSPPLSVTPVLVGDDYSICNRFPXLRNNLRFGFDTSSKHEARIQVAARSFAIGLATNHKWENPLSASHNVVTVPYLVLALMGTYNMEKCTPKAPKNNLRSPQKYGEWEEIAKESAFGFGICTRFDRACAICYAIWQANIARAKLALLWWIATRH

SEQ ID NO: 999242 - protein, 116 aa, Homo sapiens
TFRYLSSDHPYPMCSFKHYPASLFIIRNSGPSVWCALKVFLCHNAAAMEGGCDGEMGIALHDHAHKTTRNILSCICGFSKGLLYFLTILFARTLSTLYDCYLTFFVQCIPKMLYFR

SEQ ID NO: 999243 - protein, 288 aa, Homo sapiens
NGEWNGMENWNREWNGMENWNEMRWLNRMRWWNGMYTGTGGWCGSNGTKLRVVEWYQRHYDLLRHSTCSVREIYLALGRTGTLLTAHCDGSGTRARHCELRRATQLANWTTYELDTARTWTHGTFATHCATTHTRTLRNLARDCDPGTLGTTLHTGQLRHMARHWEQGTLRPSRRLRAHRPTWNNWHHSTETATLARQLGTMCTCASTSGNSDTHWRTEANGQLGIKLPTWQLAAPTAPSDTLPNGRNYTLPVRHKHVNRNTERTGLMETTRDNGHQQNIAKNKPGTL

SEQ ID NO: 999244 - protein, 82 aa, Homo sapiens
TVLTLQGSELRAPDIMVVLPPELSYFYVFYSLFNMCSICATRDNCCILDDRSVVCPYLWHADSCLLIKPVDRIYVLEDILHQ

SEQ ID NO: 999245 - protein, 67 aa, Homo sapiens
QWLTLQGSDLRALRHHEFGPCMLRVKSKYRAYLSLLYYIFYSFITMCEVLSVAYTIETNCVASYSIE

SEQ ID NO: 999246 - protein, 268 aa, Homo sapiens
MGDPISRSAMMSMLYDPILSSTRCNGILFYQLRGSHAKRSSLTRKLYENDDTLLRCQNVEHHLGNLFCIHVDSSHEHLLQAFIICTRWYFSLCLKGRGCNQASNPHSILVEINGEVDPPYISLDHLQCSGLYASLAFPGKASIGQFRHIPLILLTSVDKFLFAVKEGHPEARIDTDTKRWPKCPTVKGAPTTKAPAYSGRTNSGFFQCPSGPIIQATGGYEFAVNQWFANNSQLDVTPLRKTHYVGRPLSDKKRGLRVTIYAQSLNDP

SEQ ID NO: 999247 - protein, 55 aa, Homo sapiens
MSFRIAFLGTEHFTDSRCQLDIAHAMNYVIDLDPSAGNIALIVAQALSPQDNDGP

SEQ ID NO: 999248 - protein, 120 aa, Homo sapiens
MLETNSQPIILYRELLVHKGLTRYLPMGYEQRVLQLHPTITEVKRLKLDVWNNPRIDLELEQRMLLVFHGLMIQTVDQVKDLYSGLIWPLIVCPKSLVGKYSKSSEGNWEICRVLVSSFG

SEQ ID NO: 999249 - protein, 320 aa, Homo sapiens
MRLRRSSVFPGVALLLAAARLARCLRRCYDLTDDQTFESRISDSGLLRALMLRSQSFAPWLVDTCKEHLHPDASEACKLTRDLKGIVPSSQNGWTLPRAQQPKPPGKSTLVRSQAGTIRKAPLNNELLPNDAMCSHTKRQGAGIIKWHLANPITSTVALGTSPTQLRSTAPAVAHAQAGRPMGKPQRPFSQRWTPVPLQGSNPWCSCKRPHLFINTATHTCPRYNALAFRNSECDALPILNLKRHSHTHTKRGISHCAKVSKVSLPTLPPEKGIRRISTKSPSPTRANNPFGKGRRKLQPVYNPGSHFLRAPPIFSPKSP

SEQ ID NO: 999250 - protein, 140 aa, Homo sapiens
MECQACKRHWHTDRKWPFHEYSVDEVKYSKCWNDVLPDTPSFVSFQEHVFDDEDAVVGQRRDRRNCRCEGLLGNPERTCSLTWPRGTRKIRVCFGTYLDCGPGDSLASPIPRHGRVNSLILPRGAPACTPCAGDTHHLKT

SEQ ID NO: 999251 - protein, 111 aa, Homo sapiens
  misc_feature (46)..(46): Xaa can be any naturally occurring amino acid
ASRIPQREKPGHMYQNEDYPVRSGLAKQKSIRFCGLRRLTGSHRQXYLWRNEVTLRALLTLSSVDRQTARDVPVTCEESGRLSRPCVNSTGQPLTDWLYSDIVGVRELELV

SEQ ID NO: 999252 - protein, 44 aa, Homo sapiens
MHASRLSRHDTHTSKEQTRSQGRPVPPRTCTQHLSSITPSQTFR

SEQ ID NO: 999253 - protein, 130 aa, Homo sapiens
YSKGREPPIKQSTVDSLVGRAAWSDREEGAVYCQPCRFLRQCTICPTPGQTFEAFMNAANRSAGRAHPEGDGYHEGVSKIVQNGNALHNVAPSHRWGPKVQSKHEFTDWGVTRIVEPRDDEIDWRRRDVE

SEQ ID NO: 999254 - protein, 533 aa, Homo sapiens
MQFGGPAGLSLCFNSVWTEQISGYSLPRLSNQSLPIYSRPALVTVLGPIFSAIIPALMVHSVTGTVIAVVKLPILCQTNHAAPKIRQHIYFALDSWDEPARSNRSLGPEFVTHVKGPPIQPYTFFLRGAILVTNPAIELSGSVTRGAEDPTCSYPPTETICVQHAAVTRLSGRGSLNAKAGSFRNAYELAQQDSHRQARRRGRLTVHPFIFPKVDPPSNRTQLHSHWYNAISTRWARAYTQARAPMHNSGTIHAIDRPEAPSRGPPLRDSNTEYGLGRIHTVRPQYSLGGTSHCTNVGPPLEALSFGPPDDRGLTLNTTSLRWVGNHGSPWGSNPTTRFPPLKTPDTRKTVTAKRAIYIRNANTDNCVSDNPQPLWKPTLTLSPNHQAPGALRDSTGASVIGVACAAVTVITPSISRDSTAALPISHRQTPTGNALTAKAPLHLNRPHSHGTLPGQGGPHVVPKKRTTYRGMFPADVKTLEFDCSHCPTPWGNALCRLTPVSRTHTLVLVITTSVRNHNRLVLIRMSHNHYAH

SEQ ID NO: 999255 - protein, 106 aa, Homo sapiens
MSSRFKSGQRSRLLFLEPLGKFKVLHESYYNIEIVLWQPVTADLIVTKETSPFFCRCIVSVDNVKAHLHVSGIPCSVLLGEMVDDLIQAADFQRTTVESPEPPHRT

SEQ ID NO: 999256 - protein, 71 aa, Homo sapiens
RPVDLIEDGGAICVGHYQKSLHVDSLRYTDVEKFWSRIQKKRKSPVCLSEDSSKMNKGKTYPSCVQLLRKP

SEQ ID NO: 999257 - protein, 67 aa, Homo sapiens
VLRCVRASYGSGHQECTKANKMPSSLFLPVRPGLRMLLRVVTCRGENSSIGGILACLSSENYDSRTQ

SEQ ID NO: 999258 - protein, 110 aa, Homo sapiens
MEVIPGELGYCRENGTDAYEAPSEPRSRLGICSSFMGEDNCSDSSLIRPRGQFVGTDIVLSKLRNGRNCGPITLKPVGRINPWGVASFGHCAPSFTYPTLCPPVLLPPGD

SEQ ID NO: 999259 - protein, 294 aa, Homo sapiens
EASGTTTEPGDSVIDYAVFCLVGHPPAVRGLCQPGPCSPWLEDPSVEDAGRWKTDIDLALMILGEFTQPFNKVSPPNLVEFDCLALYRLMTGHHPVLTGTNIFFSPVSIVTACCNVSPWGSQADTHDEYPEEVPVISDLTVDSGGSRSDGSVSRELLRTLIQSDSQLLLTIELWPVPQSTGLKLWIRSGMDVKIVVATQKCLLLSILSVDTRMRPEVKADQTDYVVDRVFRGNFVVFGSSTLDRDATFVLWVKLPIFFRKASGEKTFEGQGLRGQRNFHVDPGDHREGCYDERV

SEQ ID NO: 999260 - protein, 247 aa, Homo sapiens
MSPWKWFNGFWRETFDEDRRLVAPSRPEDYPMGDIHHRYPHTEPWGQEHVQPHNAGSISGQKASMFPSETLGAHEKLRQDSRSKGKRISGNRRGANATNPDSVTSARIVPGAHDPVMNRANKFWSINRKNCLDTYPANYLGGGTWLLGNKAPPGERQDIAPTCKCGRHILGRHLNCSIALENGAHEPVVKIKHCVLEHVFDVDPRSHGKYELSITTPFLDTARAYNQTHVVKHRAANWYINGRCTQS

SEQ ID NO: 999261 - protein, 43 aa, Homo sapiens
MLVTHIKPTCLQIVSTSLARLFPHYNTLGTRPTNQLSSQPFTR

SEQ ID NO: 999262 - protein, 170 aa, Homo sapiens
SFPLLSTPHAFGTMNVCDRPLSFPVSLCSLRLARYSRVCVCCRRCTTKSEVASSCLKDSWCMNDRIFKRLAIAVELALMHLCSISSGEGVHCMTWTPCRENLMWRLDRRARKFIARIHDCWFAYEWKVLRLKTHSCCSTKVNVFMSPMFGEDTDVMATSLSERPLPLKKP

SEQ ID NO: 999263 - protein, 336 aa, Homo sapiens
VRKSKSPASFEANTSQLRPALKGPRKREERERGAERRRSSTKQRVFRQAAKKEGETEREDKRSKKKEGRERRRTEQRDSDRTTRKAQKAAEKRENKKTNTKKRKEKKKQEKRKAKERKKNKKKKKRNENKREKEQARKRERKEREKREKRNKKRKKEGEEQKEEEKKREKKKEIKQRERKEKARNTREREREHRQQERESQGQEKQRDKEKGTRQETKELEEDSTEGRKREGRRAEQTLSRDGRRRESEKSRTDGEEREESEERKRRGKKQRAGGRDGGDAGGGEEERGEETGREGAGGRKEDGARAERRAKRGETRKRSGTEEGGREREGGSGDE

SEQ ID NO: 999264 - protein, 112 aa, Homo sapiens
MRFFMKEHECKFCLALVISTKHYYVRYGNKKGKEMRESEKERVTEKEERKVSQGNIKNCKRKQLNNTTTNTYGTGHGDDGTPRDTDGHEHTTTTRRLDTRGDDTRLDTKQLP

SEQ ID NO: 999265 - protein, 119 aa, Homo sapiens
SLSWLTYGNAVTLTSGPEHGHAVAIVPYSGDKWIHDCAARNMRITLSVCLPRASNVMMLAHSILMIATDLFLGTKSSVLDIIDYKEHTLNLTTSSSLGRLDNLWSFAAYLTNTNAYYDA

SEQ ID NO: 999266 - protein, 137 aa, Homo sapiens
  misc_feature (48)..(48): Xaa can be any naturally occurring amino acid
MPCFCFSWRSVPSLTWPKVLLTSTLATPVLPPGHESMPLEGRMSRPQXTYLDSYRQHMYFRIHRNCLTMTLNHLPPISHVTCKLQTLYSSNIRARWSPSRSTKINRNILALLPLSSKLSGYLALFAYCSPMVRVLQA

SEQ ID NO: 999267 - protein, 265 aa, Homo sapiens
  misc_feature (86)..(86): Xaa can be any naturally occurring amino acid
  misc_feature (105)..(105): Xaa can be any naturally occurring amino acid
  misc_feature (172)..(172): Xaa can be any naturally occurring amino acid
  misc_feature (178)..(179): Xaa can be any naturally occurring amino acid
  misc_feature (203)..(203): Xaa can be any naturally occurring amino acid
  misc_feature (210)..(210): Xaa can be any naturally occurring amino acid
RIRNERPMTVPRMEPVDRISTEDGENSLFSMNIWLVESCHAFYFIVFNEESKDSFSSRSIVIDLRISVESSFATALYYLLMVLIAXILLSTLASSFTRIVVVSAXYPRLLAALRSTVFRDVPFFDLGRSSGPRVWDHGEYYVVSIGWFLSKDPIRWPSSVAFMCRPMSDLSXNPQIKXXMGALRVAGLLQSAALPGIPRRPLXESESVFXVERSSITIRELLRSTRERWSLGRRTPTSVDTFRRARPPWKAPGRVARCGGSLANF

SEQ ID NO: 999268 - protein, 57 aa, Homo sapiens
MASFLWNLGHSWPSPSLPTWMEGSKRQVGFPIGLNATLGSLRRSRLETRGQVNRIGF

SEQ ID NO: 999269 - protein, 107 aa, Homo sapiens
MKDSVVIVQLTCCALHDCPGLLINDQEESKDLQILGKTSYIKVEHENIRSQSACIKAIRTHVISPDRIIDNQDMKTLRTFGVQENVRRNYEDMKRSIVNDDESQIFD

SEQ ID NO: 999270 - protein, 206 aa, Homo sapiens
SVEGLRHSVGGPYLISRRPLLQCGWALPNQSKDFATAWVGLTQSVEGLCYSVGGHYPISRRPSPQREWALPNQSKAFATAWVGLTQSVEGFLPQRGWALRNQLKAYCHSVGGPYPVKGLCPQRGWALPNQSKALDTAWVGLAQSVEVLRHSVDGPYPISRSPIDTVSGGTLPNQSKDNDTGVGGPYPQVSRRANKSRRSKISLREE

SEQ ID NO: 999271 - protein, 110 aa, Homo sapiens
MRAGLSVFCSVGLLPAAYLTPCSAMEVFPGLQPSLFMVAGGLEIGCLLRDYVLGECLVDSCQEQGLVAAFMLYTFAAALLFQPISTVGYLRNLIAMLCEALYALLTSYFE

SEQ ID NO: 999272 - protein, 363 aa, Homo sapiens
MHNKETKVVCESHLTQRIGGELIDLGTRAKYKLGAALGINSHMGRGEFITRSEGSKRYSAANGRILLADHPRAQERNKTARKRRLKTPPTPILTSKPTRLPIRGAYPLLGLRWRVMAGGVCSQLFAPGLFCRCAAILSPALLANLLLPPPPLCRAGSLLLIVAPPASLARRVLCRPCLGRWSATRIVGGVLRSNAIPPLSRSFCRSQSLCNALGVPCLRASLADWLFFPCVVLCVRSSLDVSAVALPPSVLPLACFVFLRNRSGEHSSVFVLRGGSSESCLRVLAVEAASLCVGFGSRRGLVERRCVSFGQLGWPLLCGVSCRVSAVRWRVGVVFSSPWVWCWWALGVVVCFGRGARLGVFGC

SEQ ID NO: 999273 - protein, 146 aa, Homo sapiens
MKFLRDILLVLPLLDRLAPLKSFVERFYIPKREENQSPGEIVLITGSWRLELGETDCLLNLAKLKSKRGPRADINKHVDLEEHLSAKVHRDLACPKGFQYPFVGPHLGTENRDDTHFSTSFLPQTHRSNGAGTILGQHSVHDTSPR

SEQ ID NO: 999274 - protein, 128 aa, Homo sapiens
EERYGGSLKAECRIAVPWAGLALLLLHSIGQTCSYLTIYYQRPNYPLEWLCVVQFTDTLVIRANLILAPSVCISLHLDYAQKGCHDVLLLESASVLSYLNPCSAYGTIPCGAAFILHVHGDLGSKLVD

SEQ ID NO: 999275 - protein, 163 aa, Homo sapiens
CDPDLSYGPHQLHVSFFTVVRVICLHPMRCLADAQIDSEPFFSSDSRLPGRALLYCECIARTVMRVAPYFPCDNAEDIPDVHHQAVGSKYFHLSPSATRDECVPIKGTCGGVPCDPYDADRTELSVEQIVRQYVIMSATGLRVVHLAWTRIMCLCLNNMWVSE

SEQ ID NO: 999276 - protein, 124 aa, Homo sapiens
MSYKQGGLGNKRVNHKREVALSRCRTIGCKSSEGRFFGTPWGMRNPGAIGEGKAPTFGWGQPDTTREGNINGELNYVRHKRHKGNHSQATTTGVHKRTRPESGGEDRGVTMDIAHTLDNPAWTN

SEQ ID NO: 999277 - protein, 78 aa, Homo sapiens
ESSFLWNLKKPMQILIPSLDSGFIVYEDYDDPVDSIYITMATGQKLMRAVRVVESGGPVSPEHCDQILQYRFQKTIRF

SEQ ID NO: 999278 - protein, 188 aa, Homo sapiens
MFVTRASQSAGQVHWTDAKRLYGSRGLIATDFQDSAAVKKLIKRLREEWNQRGKITDLIKELERILSDVSWVNCIFFKCQDGRCPLTPKILIEYKVRLLSREKGEVIGAHDAFRMHLTIPYFLVDEELSVLTVVDAEVQQVGCQRDSSSSRIYYRDGGKLEAMAASPEAPLATPADRLSCVASRRALG

SEQ ID NO: 999279 - protein, 106 aa, Homo sapiens
RVVYIAGKCGLVPVLAENYNKSDNCEDTPRGRVFLLYAVVKKISFDLTWDNLKGKKSWHTASWQNRWLELSLHGACSTIRSITADLMELCACEGCAPGSRERLQSL

SEQ ID NO: 999280 - protein, 332 aa, Homo sapiens
MALYGISMQTVCKRKAFRIAYNLFRQICYSDILLSGYAVTYACQGDEKPRDRRPADSFIVSMSFGHVNMRDLCIIVRDRVPPYIIDPIRVETYWLSPLKREFTLWRLTAIFARCTNYDKEKLGCLADPMRTCSRYCHEEQLRPVVEVSDELSSLEERVYRFVDLPEQEYEPRVLVAQCGTSGMIFERNPVKFEIAKEVPAGICISTLSGHYIFAYTPGLSGNSASTKYAKSKRGHFIVYNQYTAERSYFLGPVKQHNTKEIVHREMAIREKRGTIWYLKTRGPKLGTRAWLRMGHMGYKPEENFWHEGGKRDQGGQRFTPRSDEITQKQWAR

SEQ ID NO: 999281 - protein, 95 aa, Homo sapiens
DISSGYPVSGGGLSFLRGVKGSDGHLKVFEGSSIWRLYKMFENNMSEDSDSRTYYDCSRRRSALMTEVRTTATGKVYCGSLQVARASGNLCSNMT

SEQ ID NO: 999282 - protein, 156 aa, Homo sapiens
MAFALNAHRSPATDGVGIIIGPEQYWIEVHIILEGQRPLLRQVSLTPHLPHLTLVDRTSKDFENLKTGNAQMVPDLRGSSRQTQYLRRSRNRAPDGSTHKPNQQAGAIGKHSSGSTPLPVYRHGTPKHAPLRLDNRPTHNTHAVAHCNPRGNVHRT

SEQ ID NO: 999283 - protein, 76 aa, Homo sapiens
LHVWFQVSVSRLQRGSGQGSMIRRVQLIPELPHGSTYEYSYSRWLPDLRCNACCSSWTIIRAFMVTMSSHTDCWCE

SEQ ID NO: 999284 - protein, 172 aa, Homo sapiens
MPSDGLLRVDFVTFCHLVMASITPEETRRTADPVNIPSVIRALKRTYCSVIHGVLKADEGISYRGLLIIDRYRVFYREITVRMTIHCVAGSVDETFETRYRPSSSLTEHGDVKTQMAGKPGSDTIMPDVHNEQKNISPSKKMERWSCLKLPGMRLGIPLRTKHLRLEYKSPH

SEQ ID NO: 999285 - protein, 371 aa, Homo sapiens
GPHVGAAASDPRGYAEVDLGTEYSPAVSVLLSSCSEAPVASSCSSVLVNCVRRTTLCVETVVPGISGNTCQTHGFMVGLRIPFLKDQPTEAGHDSARSITYYRPVWGHARLNQTLATIFCILATDADVTTLTCSFWRLALFSPEADAMMLRLSGKADFTSDRRLSAVNKRLDVEEFRRRAHGSDCPVHSNGETSILMGRVQNAISMYQARLPKEMPRLGTNWRRGVTYNARKERPEWDMAGTIWVPLGEGGMVSENPWVPLIFGQSFSFDPVAGSSRARQTADPSGSFVMEPYSMGRISDRSMRKLNVQRCGNAFVESYRVGGWTRSVEKSLPNGGVVGGAQWTGFVLLEAEANPPEQRNAFQAPSNGNRT

SEQ ID NO: 999286 - protein, 273 aa, Homo sapiens
MAPLLLQLAVLGAALAAAALVLISIVHLQLLQKCQHSIDMNEEKFFLNAKGQKETLPSIWDSPTKQLSVVVPSYNEEKRLPVMMDEALSYLEKRQNRDPAVHLLTADQYVDDEQYQIRPQRVASHYCQTLLAHVTTVRCDNPWLKNRGQRCDAISTGYMQVLRRQTKILYGTLLNGGHKRFQMFGEHLDKGATLILTALGPNYNMAIALWISKLHSSSTESLAQRSLLPVLFSCMGSHFPAVVLSVKATQGHTVLVHNLFTPKQLHGTFNTLD

SEQ ID NO: 999287 - protein, 37 aa, Homo sapiens
MLTLFTTSPSAIWDILQDQTMRRSSREEIERPRKLMW

SEQ ID NO: 999288 - protein, 732 aa, Homo sapiens
QRASTSLFTGYIFSTHELVTALVEPLNLHSQTGLTLYLLQPYFLAIVACSCGTLAPPPTSHGYLPAARRLLVRKVPRTHTATPLALPHLHGNPCGTAYLTSPLTLSAYTLLTHFIANFPKKRTPTLNWPPSCTFKATTTPSYFPALQPLSPTHAPWRTGPKPSEDPLTALSHIFPANTELLTGSQLAPAPPPILARALWHGPFLRAPLSTAGPLLAAAPLPRALTRPGHPLRFPNAVPMLPVPAVLSRPCFFPLGATVSPRVPISPPLLSVHPDSPCVSFCPQPAPTRYAHLPSLSRLLHRPFPFIPNGQHPRCSSNPYNVVLSPTLAQIPHGLLQPPHFPWDLPPIQNPKMRPNNIVKTQNTHFPHSAAPPHHPPYLNWRPTPPTPGREPYKHPHPFSVPRTHQMPPPLCRSAPPFSVAPAHHTKPRAYNPPRNGGLPQPKQREGRTHPFPHHTHAPSSPLLNPRHTTPSTNYTSPPEVAPPRSPAQAPQPTLTRTTRHNAPLSDHYSTPPAPPPPPALKRHTRSLPTLPPPLTPTHARPKPTAHDPTLSAPPTKHAPRSDNTTHPTTTVDHSTHIIRPTSRRRPPPNDPRHPIRQRGQAPHHCAGAHPPQPRRSTPHAQRNNSLPTHTTPVWRHTQPHTTTHTTPPPAATHPPTHHHCRLHLAAHPPPCPTTTTQQQPHAYLAHHKHTTHTPPSTQTRPQPAPPHNTATTSTHAPDANTTSHTHSPHLPP

SEQ ID NO: 999289 - protein, 162 aa, Homo sapiens
  misc_feature (20)..(20): Xaa can be any naturally occurring amino acid
MVNRLVDLNPRLYVISRLTXVMPLTLHGQSIRNPPKLVFKPTFLWASMDFWKKSFRNPIRRVRGRRVPRRVLVGHNWWEQLRLVEPQKEKNPTRQIDTIAGQEDITHKRRIEKRGAPGRENPGGVSQTSICESCDVKGGTQARGDKHHRSLKHKTPRMKIAQ

SEQ ID NO: 999290 - protein, 116 aa, Homo sapiens
GNNLSVIVRYPALCNLLIRSCVTLHPWMLDDVITHNTSLCDCLGKALRCEFEALDEAARLSEPVMRKPLNDRRQTVVTNHVSEREYYKCNDIGQKSGSALLVSHAKADKTLPYKIE

SEQ ID NO: 999291 - protein, 108 aa, Homo sapiens
LLFQSSGSTKMSALGAVKPFHASEWISVLLRLRWRSQGQFECHCDYSVMTASCLLPNAPPRIDIMDYVGRHSAIDISVKEAYYQMLRKLQWQMDDVTPFTITLATVTL

SEQ ID NO: 999292 - protein, 105 aa, Homo sapiens
MVRTWTRVSRVLIRKEGKELFRLPIKDAARRKQGKDSHSRELEKDPLGGQGMRSLDPYVLEARCATLCAQTRFMEGRKTSAVLRNRNTRTGVAFAEIHAELRSTP

SEQ ID NO: 999293 - protein, 128 aa, Homo sapiens
ETYFAETRRGFPASTVCFVTEPGASFRPPPVRPCHESSTSVNLFTAPSVLPQGPRRRFQRSTRDSSLPRPARPTLYPSDRPPIERPDVHPRKVRPETTNQELRRPAINPPRSTWELYASYVIPVPLSY

SEQ ID NO: 999294 - protein, 183 aa, Homo sapiens
MQSTFDLPSIAPSPVIKTLAIEFSPFIAPMFPCVIALLPHKLQWVDSDLIKREVVPSSLGVTGIKTMIAYNSSAYNGPIHVLYIFRCPAISRLRELDKTHIFRSKIPPEKACIAAPHGPLSPLESALTGTFKQSLHVTYFLALGRDSEPLRNRQLQQDQAMHVRFPFVLPQGSVSETFVLPPP

SEQ ID NO: 999295 - protein, 69 aa, Homo sapiens
MLIPGRLRRKPLSPLHDRGYTTVNALKSVEQTTVFMPIVLELIPLKNLEKGPYLPYRHPSTPLEFKNKQ

SEQ ID NO: 999296 - protein, 105 aa, Homo sapiens
MLCPMQQMTVLRGWAQWIMPVNPTCSEDGCEVDKINLMAMEVRRPNLVQHAKNPSLSKNTKEFVPGVVACAYNPSYQGGMRLHVEDCAICSFSLWSIKCDSKKKV

SEQ ID NO: 999297 - protein, 107 aa, Homo sapiens
  misc_feature (14)..(14): Xaa can be any naturally occurring amino acid
  misc_feature (52)..(52): Xaa can be any naturally occurring amino acid
MVYLGLLLVVRVLXSERRDCTDDADGSQIELGIMLKRNPPRAMDRYLMRNLXQFGVPKILHVEMLDDWMLLAIYILTRSSMLRITHVTKERCQEPIDRSLRKKDFFG

SEQ ID NO: 999298 - protein, 113 aa, Homo sapiens
RQGDLGHLAPELSGEYILCKGDEFEEPLYHWQKDVTMEKLLVYRSRTGRSLMLLARLDDCRGRLRCIPRESDTSVCIPSKCTVNEAGVKAFHVCASTFKPREFVLDPWVQIYS

SEQ ID NO: 999299 - protein, 106 aa, Homo sapiens
MLAKASHNLVLSPPLLTYWEKSLELVTALLLIKYHSPYLQDSNILVNRTYTSLYMIYPEKQMGLIFTPPTLTTIKTLIQQREKHPHVHTPIPHISYISLNHDIITE

SEQ ID NO: 999300 - protein, 130 aa, Homo sapiens
MQSYYTQNVDGYTKNLQIETAPLERYGYLAHIIWDFTRDISSLCNAEENNLVDHNATPCWLSGQLDTMFSGSPFLNGALNGVQVNSLAESWDLPCKLFVHGVKPGRALSKSLGYKQKCGVPNPGNKGLLN

SEQ ID NO: 999301 - protein, 403 aa, Homo sapiens
VLSFPSSWDYSSFLSRSPMGMACGRPVPLLCRQLTAEPRCTRRFTTPHTCKMKTAYPLTTKHFSHPGIPTPAPWLPGPVQLQMPPSSARPRTPPPLCQRPLHRPPRYCPCIRSLSAPSHAPDPAPPRLSAHLSHLTTTTLYPHPPPFPPTILLTSTPLPLPTPSLLTAPPPDLVPLSPPLPPSLSCPHTCLLPHALTGHLPDQATSPCGTLHRVSSAPPPALTRYLSQPPLAYQLRKRHFRNLKRNWRRNTTPAPKPTTSHFTTNSLRTTLTRLIPLPLKNTPLTPSTTLIPPLALLHLTHSTHPPTPPLLTFTPYFVSTTPHYSHHPTSAPPPPLTTALTPAHRALRPLPTPPPPIPRTATTPSPDHTPRATRLHSALLPRPPQPTHHHPPTHHTPPAPHLP

SEQ ID NO: 999302 - protein, 240 aa, Homo sapiens
MSIGYSKAVGIQYVKNRKFLKKKSTDRTNIDKTVQIAINSAHGRIRRRIPSKRMPQRARVDIGDNIGITTIGKSVRSTILYRRCASLASEVNAKEATSVIGDEYTWGRTKAENCQRQRMRRREGMEDNVRRPRIPQYSNADKGVNSQRDVCDTFGRSDIQLVHKNAIQVWGGGAERWAHMRREGMRKSSRGGLYPGSANYGSGGAKEVTITIVLRAERDDQIWSRASIQERAYGARRDRT

SEQ ID NO: 999303 - protein, 245 aa, Homo sapiens
SLGGPLLNDLRPSHADSSLSTSITLLILGLLTKHTNHIPNDGRDANHEKAHTKDQSTHQPCSQQQAIRPSGTTLRTVPHPSATLTPTSRHRPKHEQTPHHPPSQTIGNQEPTQSSGRADSAHRTARYTPRGNRSPAHERAKSGPYETQTVHATHAHATHGKNSTLHLRKQPHKSPRVRPNENRENGETPQLARKRPTTNERRHQEPPTNSKARPLTQSRRENTPGGLDTPEAQSSRTGSRTETAP

SEQ ID NO: 999304 - protein, 105 aa, Homo sapiens
MRTKQGEWRHIEPPRGESHSRGSTPKREVRPPAGTTPAQTMKETPTQQKTREDTLGTHLHPQGDGDKNNPKHTHHRRPRDRDAPNTINNERGAEDATPHGAREQT

SEQ ID NO: 999305 - protein, 169 aa, Homo sapiens
MVMCCTHNGCYTILARSLTRRGELGIITNEVFPWEHCRWGARAKGGEFLLRCFVRSWAQGPHKVGASPQWGCSLGRPHRRKNLFTWAPCPPYTPFSGLWEFLLAPQEGCVRLGGGPITYFPQDKGPHSGGKKSLVLGTTWGDPKVHSRDLEHTLWDITPFISQSKEQTP

SEQ ID NO: 999306 - protein, 280 aa, Homo sapiens
HCLAPRASWSQICALSMGSYSPEPPYLCVEAAESQLCANRSSGAHHSSANLDRILDKWFIYRDRAYRNEGVTMRVGVQEIQATFCLLHHRNKTRGHDAFSESYHEPDSDQCFYKTNYLNVQRENWDHLQILWEAKSHYRYTMLNPQGTTMNLACIALSSDTMEEEKLGGVFVIYELYKPQRRPTAAELGRDATESSSTALLHFAKSDVVYTECEEKAECEPVGSTAATKKEKETTESGGNPSRITSRGSRHRSTWGGQSWPFRSTEQCGTFSFIPQIGIH

SEQ ID NO: 999307 - protein, 67 aa, Homo sapiens
AVVEMAMKSLNTLLSYLEECRVDGTLLGCACDGRLSQGDEETMNATYVPECSHFVCTQDDVNAEVEG

SEQ ID NO: 999308 - protein, 98 aa, Homo sapiens
DRERTSFTSTTNKETRGIITVDHIGQVRRTTTLKETLVCIHSDFYILLMRHVHAGTTLRNHIIHVCSADATKDGIYRLNIALLRQSGNFAKVVITIVI

SEQ ID NO: 999309 - protein, 296 aa, Homo sapiens
SFNFRHRATWTLGDSESRIASAFLSLVLHPSMRGQSRVRAVVAHVSPGMRIALGQIADQKTDTCTTNEMQDQPNHSGPRFSPRNAWVDVSALSRLLTSHARQEARSQEASNIFFSPVEHQHGERLAKMRTSTIGVDEGFEASLIESPRKESEIVRIVVLVGYPGRLQVSYLQRGFTMVAFHSGYRPQMRWLRTEEQERPKCMIRRRARVGPLVTSKVQGAIRRGYGWEIEAGIWDVEAGLSTLGLIFHDPSSNDPFSSLCRILFRAGNETRTLNERPNSLVSGTLGLKVLAIGNVR

SEQ ID NO: 999310 - protein, 180 aa, Homo sapiens
MGVSTDVRCHIPQSVAGKSSLEQQALNFFLLPPVQQSAFVSVMRIAPALGGTHKASTNILGKDILAYGPCNGRPSIVYDSLEAPVSNVTVSPGKFLSVSLISSSSIAEIFLARLYLANGTVILPAEGALYDAMVVNSSCCKRGNGQKDVVPKVSIEHIPAGRDLTVRHSPYVGPKEARID

SEQ ID NO: 999311 - protein, 165 aa, Homo sapiens
IPEADSIREDDVSLRGLSCARADSLFLGLEAIQRTPEAFRGLLTSVQRENGKSHFLNAIVSGFHPSDIEVDLLKNGERLEEVEQFETCRFSKDWIFSILLYYTEFTPSEKDEYAMPCEPCDFVTSPRSRYVGIEDMSSSIMAGSTDAALGIGMNFQILLACFVIH

SEQ ID NO: 999312 - protein, 208 aa, Homo sapiens
MNGQSNFTHSELKLFGIIMPWETTSKFQTVRIHMRTWIWTRDSGQTMEDPQHLARKQMRQDTPLPDRTTGMADIHLTYSTMGDKGIETKRHLGPNETGEGLEPTARPGAANRLRKKQTLPERAHKDQATTPESTLTPDTHQPRHSAPHGTTSQTWNRQASQATQAPRHNTATGVTKTTHRQPTPGIAADYRGQRTPGTPTGPPLRRPQ

SEQ ID NO: 999313 - protein, 72 aa, Homo sapiens
MAQLGNEFRDLGTFIDLRHGRAPWCRARVLSAGSIRSHSEEGDTEAVGIPGQHFIRDDYVQVWIPTSVTLDC

SEQ ID NO: 999314 - protein, 347 aa, Homo sapiens
KKHSKNFHQRFYLLECSGTISAHCNLYLPGSRHSPASASRVVGTTGAHHRAWGFFFFFFVDIFLGIKEGVFPYVFDAGDVVLGISSCEPLVCLHPTLLGPLPKVCWGHLSAKRCFSPMRATDKGTCALCAGAFVICAPLAAFNFCGPRGPFYNGLDFRGGPVVDGNHHPIFCPRDITREVWPPLSVEKLFCATVPVWGAALSQRRGEMLNGAPHVVNRGHFSFGPNRDFVASQYIFSSLRTRRAQKRAFLINHGGGEACGQTRGQTSQQILSVLWTLFLGNINVASPTTTSVCGPPAELLISGNSAGAYSSSETQHHNLFVADPTKKPAARRFPAEPLAGPKITLGA

SEQ ID NO: 999315 - protein, 181 aa, Homo sapiens
  misc_feature (49)..(49): Xaa can be any naturally occurring amino acid
  misc_feature (59)..(59): Xaa can be any naturally occurring amino acid
MVEGRTGNRNGWMKHLVESYTSSKLYERLCLESEHAVMEDGACIVCVVXQSFLASGTLXQRMTEANECLRAGSLGDSALKPVECESLKTSGLDKRNKSYVTVSVVKNSSGRGRFMENLSKWTFRERRLPFVLPRASQGTFSPKDVWRAKFRRILNFMDTHLERIKGWFPFEEQPLEEGFPL

SEQ ID NO: 999316 - protein, 112 aa, Homo sapiens
MRSLHPPGIEFLYLLCVFNFSLSSIVVRQYRKATKKTTSSCTLRMQAIQVSLLSDHYHVGSLQAFSLVITYHFNSNKVLLMAQSSQRHLCETHIRYHLPVCINLLNSSNGLG

SEQ ID NO: 999317 - protein, 142 aa, Homo sapiens
MPPSPASPLPCSLPPPPPPAAAPPLPSPLPPPYSCLILLPPPLPPPPPPPPRSLAMLPRHCLSSPLPPPLLSRSLHGCAQTFPARSARHAALSAPPPLTSPPPSPHLLRSARPLLLPPRPPPRPPLTAPPPPPPPPPSLPSP

SEQ ID NO: 999318 - protein, 282 aa, Homo sapiens
MARKEIGEPVLLEGINGSARKGPNMYANSPAATFALNSHTSVTTSKDSSPFIVCLLFGTSSVDPGVWKETHILGGGDLDTLGFLNSGVEPKGPLSKQQKRDKCMTYLVSMKVNLTRKPFIRKLAYGPANFPPKGSKTCFRWLPTRQLGEHNTGTTRLLRTQPGERKGKANEGNVEEAKNPAKRRGGKFPKAQGTHKALCGIPGNQETNLCGGAPIPLAPPSQIPAEQFVCLPLPRAFYIPPVPTFGHFQKFKKRLSIEMIYEKGQDNDDTTQYTKHTIDKHT

SEQ ID NO: 999319 - protein, 116 aa, Homo sapiens
MCKPRKLPYSWLIILPLVIPLQLNGINTEHTVVGTMMRKHKAGGLLQHCDYTYHDRYGLRLVLIFGKVSRGCWNPGKQTLQRHFQHFSPADFTVNVRIGSGEQGHLSSTSSPLRIF

SEQ ID NO: 999320 - protein, 216 aa, Homo sapiens
  misc_feature (63)..(63): Xaa can be any naturally occurring amino acid
QIGSPEGLSLDFNQCLDGTDRGDSLPMPSERTLTEFLSSGIVEMRPETYSLLEHNLFMLLVIXTSTVLVWLLAPFCARSETHEAPLEFSRDIMSTGNVEVRRRYRPWSNEYSRKVSVHLPYSRGGFYSQRQQMDCWLIGRGSGADLSVHGNCGPDVRKARRVYDAVILIKIAKYQAVGERSDLIHFTSVPILDEKTPSLERLVDGELTNPLEELAI

SEQ ID NO: 999321 - protein, 148 aa, Homo sapiens
MDLCQDRCPKLVPLESLRCLLRVNYRYNARETNWQTYIQLEKAIELIIPKGTLNLRSGISRVLDGKTVESKNVTNQVYIFGVLGEENLTMPLHVSHPRKNSRKRDSLLRRRSDVNNAGRATKRLMLTLELQVGDPTLIKGYDVRRIET

SEQ ID NO: 999322 - protein, 124 aa, Homo sapiens
MPAPRETCGIENDFLLNRNRLEVESGGIGTYAHAEVTLENYYSEYIFGAWSPGYPVDVVPGHSYSASHASSRLLCSGIHGIYHMQWAYVGDYPFAPDQDRASVTFYVGVDMGVDVLAQWTLRGC

SEQ ID NO: 999323 - protein, 156 aa, Homo sapiens
MSENRAPEKGGRDKHCSLGQGAPGEDAGTQRVPTQAWPCRGKHTRAGTGGRHDTSDLLSPYGRNSPRRYNTRAVTGNPTPAEVRVRRRRTNSRGRLIANSRDTPDEPTKETNSEAHGRPGETNDQTSDNKTIARTRTATTTLAEARRRKNGESAKR

SEQ ID NO: 999324 - protein, 156 aa, Homo sapiens
QFGGPSDMPPCSSGCRTDQQIRGTLIPTSDRSSDFLSVCISSGDHSFSAISLAFWDHARLPVCCWFSSFLPAQISDAPISSISEFMTTRSWESMRVKQAHGSNVVTVLALLLHTSFSLVRSYFSEHRRISIVGVLRRAVMPNFVRRSTLGRSDEAQ

SEQ ID NO: 999325 - protein, 106 aa, Homo sapiens
MRRLSPWLVHVLGDVNQWQCGIKGSRGKHEKFLVGHRILHWYRSAKRGFTAFVVSLASTGISYNPFLLVGGRGATLISKIVVVWSDTLGRWEISTRVRFAWQPKRG

SEQ ID NO: 999326 - protein, 81 aa, Homo sapiens
VLYFKAPTLTLEQMNRQLPVCLYSVGALLTEDLSRTMMLPESLIIPESERVPQASMLRPRTIRIQVPLDGSRIDHDILSEQ

SEQ ID NO: 999327 - protein, 89 aa, Homo sapiens
VMSLSSSACPWLLTLRDHLASVGAAAIVVSLFKIFWQMLVEKLECIHLPRTYFWLVTSMKEEQSQLQFDMTRKSFPFVFSLLQETRKLF

SEQ ID NO: 999328 - protein, 81 aa, Homo sapiens
QFGGSRGSVSCFNSVRTGTRSWGTLFPAFRLGLPDIRSARLAKTTRRPIMSSVRSTLLSWNPGQDHTVYRGYLPSYVQAKQ

SEQ ID NO: 999329 - protein, 136 aa, Homo sapiens
  misc_feature (82)..(82): Xaa can be any naturally occurring amino acid
  misc_feature (94)..(94): Xaa can be any naturally occurring amino acid
  misc_feature (96)..(96): Xaa can be any naturally occurring amino acid
  misc_feature (123)..(123): Xaa can be any naturally occurring amino acid
DSADTYKALELLGTSRHHELVLVTPPEFNFSTFYASSYVLSFKHAVAICCIARRLNMHDYTVDAEDSCQLNVSYTTIVADCXYFRVHTCIQIAXTXRLKVLIPAHLGNTTSPSAIYMFEKNDXTIHAEYEEQACIT

SEQ ID NO: 999330 - protein, 112 aa, Homo sapiens
MARCNTRKHITKVSNETTCPKKAFDSWDNPIEYLRSASLLQDFTESFIPLETHRDLTAANLGEDPWSTGERAFNASKFPRRMSTVPKSSILVLSFGSAGTYQLYAEGITHYV

SEQ ID NO: 999331 - protein, 110 aa, Homo sapiens
MKPLTNQTYMLVCMSVRIYSVKQIWLIDSLTMKISLFREAPHFVNCISSSGTGILSFVKLHSGLDKGKRLSNFAFDLSTKFSCETLWQESDTNWTLAVLPCGPIQPKNGN

SEQ ID NO: 999332 - protein, 313 aa, Homo sapiens
  misc_feature (85)..(85): Xaa can be any naturally occurring amino acid
  misc_feature (130)..(130): Xaa can be any naturally occurring amino acid
AGRLMPCNYLVNPGTAEYRVVDRSSVVVQSRRSILAVRRGVRHRRGLIFITLGLNVSPERVVWLARHSTITPDYYGYESESQRKXCAFEPSAHGRDVWRKEVTRRMHPLHTWHMPRAIRRSTQRRDSPVXWYLTHKLKQSANRDLLLLIAHYPGGSQRPEQLQRMNIPWEGRELYKLSAEVFPEGVEDPMYMAFPCVISLRYPSKLARHCQLPRVNQRWSSGLVSVIAEGPLTRLVGIMFTEEGWLKGVSTNVQEAYTVVQLSGDTQRRTCPMINLIPSDLLLEEGGNLTGGTTGRNLGPTVGFDQKITSKML

SEQ ID NO: 999333 - protein, 92 aa, Homo sapiens
GMNLQLSLLDQYLMEFNACRCRALALHQNGSDPLAAEGIRMPDMDAQMRAWDSMGCWLMRRNRTKDRMETQDDTMRKRGKVASEPSVVMLSP

SEQ ID NO: 999334 - protein, 153 aa, Homo sapiens
  misc_feature (42)..(42): Xaa can be any naturally occurring amino acid
  misc_feature (44)..(44): Xaa can be any naturally occurring amino acid
  misc_feature (131)..(131): Xaa can be any naturally occurring amino acid
  misc_feature (153)..(153): Xaa can be any naturally occurring amino acid
MSGLERTDEKQTYDQRIERLSFAHYSISSSIPVGVLAYCQYXIXLITQIKLRDLKAKISKKRTQNNLVVRLAKNVATFGINYGRIRQSRLSYSPRVCNLGKDLETIISTSNGIDYTLPNAGPPIGTTFIRXSHYKSRRETSGVDRAYQENTQX

SEQ ID NO: 999335 - protein, 410 aa, Homo sapiens
RFSHSVNTHTTYRHNEVSNLYFPLLYSLFRLRLHSQGVVVISRSMPPQAVAGMLHQVFTAYRAASKHYQTAIAVAYALMLQLIFQDPLVPYVCKPSMLTHITVALQVTVGNFSLQHHVASWMEGQSLRHIGALQYTSRYAIYTGRTNIQLAHKRRHNSHSGCTNPIKRCTHLRQWNWAEKPNTPTDQPWTQAPTGNCLVIGKPTTPRSPNTPQKTIQPDTYGQNSSHERPGKSDMGGTAGKITDEDKDDARPNQRTHASTIKTQWQKRDDANGKGARTPWEIEPPGKQHPSHLRCTKEKPHHKARQEEQTGKGRPNASHEQNRQGVPLKAHKAYDMTKSRRMTRGTARPNRPKNEDNNKERHTQPATNKGTHRKQYEGAMAEIHDQAHRENHTTKTEEREKKTHTNRNTR

SEQ ID NO: 999336 - protein, 135 aa, Homo sapiens
MALNQNEHNEEMKHKSLEAKNLPKPGVLVVGAPAGGPLARNERTYWLLQYTHCKDVGSALGRYPRRKSLQERPPYLVLPPRQNGSPEGGPPFVQLITSRRAFDVPKAIITLPTPRCRTPSAFKRNTHNHKVMCVP

SEQ ID NO: 999337 - protein, 107 aa, Homo sapiens
MFWAHILEPPRLSTIFAKPLVLVHHGLLREKKGISEVIEPIRLRTCNVVHAKTAMYSIVAFFGSGVTSPRESWEKYPRLRTVGRTECLLNQQRLVGALFLRLKQLPY

SEQ ID NO: 999338 - protein, 125 aa, Homo sapiens
MARAGRSDADRHIKRENRRRRDDYRHSLDNKNSTTQGVKEEGEGGGAATHQTRTTESARGGGRENIESRYRERYKNQTEKRRGSSVEESKGGCVGAINERQASGTAEGEKHRKNNAPPRRAGGWE

SEQ ID NO: 999339 - protein, 121 aa, Homo sapiens
KCLAPDYKVHIISFNRSLSPMHIDAYLQHHWNLRIVAFLTPVLDACHPSIDLFQVKLVMVLSFTPPTTNLSRGRSIHSGMSSKWLSMNVLMLDEKRVMVDANEVPISSDVLKSWVSLPFKV

SEQ ID NO: 999340 - protein, 268 aa, Homo sapiens
ISTLHSSLGNSVRLHLKKKKQKILTNYSHGGKATTSCHFKLTIQGSQRFFQGGQSLHSRFFTPRVVFKGEIIEIREAEIIALLAPLETRGSYSLCSHHIRAIFILLSLVYTQNLKVKQCGFFCVLFIILSSPCENGGIFHLLQQLSTSKFDQGANLYLTLRFLSTPYVFSFIVPPIFERAHLIGPKALFLHKTLFSVFKQELQLNFRCLGNMCYMIPLINIYLQPKIPNFYLFGTRGLPSGHQSFVSPIGKPQCISPYYRFMVTINCF

SEQ ID NO: 999341 - protein, 335 aa, Homo sapiens
DYRLQHCYYWDQNAVRPGLPQAHPHALSAWLSEAPTSIARATPGYPTCSRSTDANPLSTCMLMYMVRFYDREWSCYPEYRPRIKSLYRACTTKQSRINSLSCHAIEEHHACPIRLTREHVAQRGSYLHPMAVNTSYLVISSRLPSAQDPMSSSRPVNTAGDALISCVFVHTFAYCLRTGEKPDDGICLRSRSSLLRSKTSSCWFPDERAKSQYKARRPWHSVGDQCLTVGLLAHGVWARSLHLMVSVTTPDPLLRTKDSRNRLRSNSRNGERQAQSTSEGQNPCGPHNENVLNGDHTWASDALSLVTSQMCITSLFDALNSDCLRVGVCLMLPTC

SEQ ID NO: 999342 - protein, 119 aa, Homo sapiens
MLTYLVYMGYNFPHPLQIQSEKLCDLPWLHLQTISYFNMASYQGFHSYIPVLNSEFQAYGLNFQFLGTQNNKIPLRHRVLIVGHLPILGNYGKWQCTLIHSEFTDPIHYTPKGTFREIG

SEQ ID NO: 999343 - protein, 135 aa, Homo sapiens
MFGNRNLPSKAVWPLSYWMTKEKGEERENHYSSNASEDIPYSGGTEFESNYHRYSLGNLRFDFQITPSHNLVKTCNPIRKNDHCPSKTLKSKFKAPTGDKLSSPGNNILATHREIVASIPSSQRDRTSGWKNKAP

SEQ ID NO: 999344 - protein, 71 aa, Homo sapiens
MVHTPYYDNVKGETFSEYKIPGFDFGACRSPRPADSLCVGLQNSQKFQPSARTWGSEQRWSTSWEMADPIG

SEQ ID NO: 999345 - protein, 391 aa, Homo sapiens
  misc_feature (23)..(24): Xaa can be any naturally occurring amino acid
MHGSREHSAWQPIPHLPLRAVSXXYTSYGESSWVHIRSYEINLALDFLVDLVQALLLLSSVYSFACAYARYVIIPLGSLAMYCQFDIICITQRRIAWDVHMLGSVRMRLRFESTLCHHSTVHLHITQPLTAITFLRDRLRTYAQNPRPDLANLVVSFLEEKGGCSEGRKPFFHIPRSVIALGGHGRRMQRDSPVRSAIKPGKDQVCGFAWAYIASGARSNSANWAGLEGLRPTRSCPSQWPIFRQGVTTIKDTGKIVQPRPLRKEEIGYSSGAEMDSVTTPLTQNSASLFGFNGPWFPYLEGNTIGVKGGKNINGLVEDHQTEDNSWFWCGANSLFPIVDTAASRGIFAIGSGPRIWLVQIANTGKLFKFPLSGNPGLAGFRVEEEPSKTF

SEQ ID NO: 999346 - protein, 89 aa, Homo sapiens
KPTVAWSADKSFQVLYDCTLPKEVLGKGSVLTMWVYLAAGPSGGPCSIAFLAIVGSPGKGKVSEAYASKNEVYIMNRRGIVDSESLLGT

SEQ ID NO: 999347 - protein, 225 aa, Homo sapiens
  misc_feature (58)..(58): Xaa can be any naturally occurring amino acid
TTHSSSSSTQSNHLRYDETSDHLLGSHALTPSKLTTGVFHSPVHVLYQYASNAIFNQXVTNYYSRDVELWLRSIRIPVTANRPSLNYSLSDSLTYYIEDEGHILRIISLHQKPERSALILVLASIANRPLHEAMSSREAKYHTEGPQIISKLIIRHPIHGTELVSMNREEDYSDRQVPALKELLYLFTVIYAVDYPRDPMTAHPTPMLARKGIYTRPLGITSECR

SEQ ID NO: 999348 - protein, 78 aa, Homo sapiens
MHDLREEPWSRPRDRVKLVDRLGAPNVTTVANTAGRPENFRDTTKGHSRRRSGRSGILWHGKHGWENGRDIIAGTTKS

SEQ ID NO: 999349 - protein, 353 aa, Homo sapiens
MKRARSQTVLLLTICSLEGALVRNTGKGAIVCESLVSQYFQTCDSIYGKAPDGRQVIESQMLQAEVQVCTLKSRKEQLIPLIKKAGTELVQLLRGYFCWNLEHMTAIQEVVRDALSSNAPAGRLENHTGQSKSSVSLSKFFANNEDGMNEVRIKSTKKAMKSLCYWPIVRTLANRSYGTQPVIFGCPVGPQELKVDPVGPNSEVSPEEKLQCGLSTEVHGEMSLPPVEEMRRTRAVNQESVDIRDRICDTVEALGRAPYGGLLRQRGRQLTTREPGEINQEVSARAAGEDCMEADTPVRSVNKGQQDQKAATPDRSKRAERRSEVAKQRQWDQNEKTGGAGIADKQTGTEKKN

SEQ ID NO: 999350 - protein, 270 aa, Homo sapiens
MSGVRQSNTPSTRGSGAAMGKLIRTMELANYKATVGTKDVWRSTGNKFLSVHLHSCCATRTMAGDTSLAHSRLNAIHRYTDCLEMTSRENNSDTYSKTFNALKTSRDSYMRPLGKVTHQTEKYGPEPKLAWGIDRYNIGIGPHKVTSDHSTRATDYSYQQVSHTLGAQSANSGELAGIHCANKALINIIRRTVQLEWMATVFYVPMQPKFAAGATEYTSVATGGPSGEPNKLKLKTRWHTNGVSDITRQCLCTVTHKTQHDTPHFFACKT

SEQ ID NO: 999351 - protein, 194 aa, Homo sapiens
MWLPLQRFTPHIRRKTPTQAPVVPVTLAVARNLAPLRPNEFGTPLSGPRNIPTENTPLAANAGTGREHQAPNWAELNFALGNPMGGAHFPCKQVARIARAPLYKVPRAQLELDHETLGGPIQTHPSYLEQHGHGALNYGITQQPGDDVQTPYSTDPTFPPEQGDKTPLAPGLYSQAPNSAKHATLTRLLVKDAT

SEQ ID NO: 999352 - protein, 155 aa, Homo sapiens
RDPQIRYGTDQHHESLSRAWFSASLVLGVRSLKLLFSVPFGGGFRMGIGNNVESLTSVNEEKPIRFGSRDNTARVFGDYVCMPKIGDRVGVLWAVENADHEEWQREEYPGRILLGRMGAGGTRWFESTAMEIDIEGKEVGKTTCIIYLLRYLNGS

SEQ ID NO: 999353 - protein, 67 aa, Homo sapiens
DSADTTRLGSPGHSDIDELVTCEPLVNLDSRTVYAYFYFLSVNIVYSILLLTMRLDCLAILEMNTIR

SEQ ID NO: 999354 - protein, 73 aa, Homo sapiens
ACKNYDGDVQSDSVAQGYGSLGMMTSVLVCPDGKYSEEAEAAQRVLKSRHYRMYQERTGGRPPIPWLPFVPGA

SEQ ID NO: 999355 - protein, 168 aa, Homo sapiens
SSLSGTSTDLRQWIDHDFVLCSCRQFSCCTIAIGVLSRFLLLSPCAVENYSWQDWMTTSEKIYHTRPEDLEGVTFVPILTMESLAEFGLEFCTSSHNIDKRSLKHVSETRNTSFTSSIVFDTQDRRQSGYDEHLCMMYIIAHCGETPTTVLLTSSDVDDQSIETERPF

SEQ ID NO: 999356 - protein, 121 aa, Homo sapiens
  misc_feature (106)..(106): Xaa can be any naturally occurring amino acid
MRLLPTAEYRPNSSPDDWDRNKRLQWQFDLTRVVSAEALELRIRTQYKPPRGTYLPSVRLTAEHANLLSCPSKPRLVICNLIQHTTSRHQEEAMIVKLGHRTSNPXMRVIRQARNGDSAIA

SEQ ID NO: 999357 - protein, 118 aa, Homo sapiens
ETFFAESRRRFPASTVLDGTRRIDSHTPDRPPIDQTLRSPRSPHPSDMHPRPPPPTPAPTQHTRRTHDELSISRPHMTTADPPRRCARTTTRTSEADHQPHRSTVERLRHHKYVYHDP

SEQ ID NO: 999358 - protein, 148 aa, Homo sapiens
NAGPPRDSLMAAVSEAGVAGIYAVAVHVMASQLKPSRSPAPCPCIWRASPRRQDSARHGQCLAGRSAVLGGALPTVPCWCGPLNPLVCLGCVLVTVMGLLCGGPCRVWVAQPGRASPGSCSQAVGQNPLGTRFSPPSAIPASGFRTVG

SEQ ID NO: 999359 - protein, 157 aa, Homo sapiens
MFEVSARSRSLSRQEARLSLGLVRSYLQLITEKKHQSYQNRDSEVTTEAIEGPIISVGVTEAFIMGQYNRGGMETTVNGEYGKHTVLVEAVKIPGPKEKSFTSQEHLNSDIALTGQRLISVFSTYRLISKAVDGKKLSKMRIRVRVRREAEQNLEAQ

SEQ ID NO: 999360 - protein, 79 aa, Homo sapiens
KLFPVVSTEQFSQDRISGCTLRIDTRCTHGLGQYTNVEAVHARHTYAQQPMRSISWALEPDQQLSYVNAIEKVFKSVQS

SEQ ID NO: 999361 - protein, 212 aa, Homo sapiens
MYFTVSEGRLETRNGPSFCIARLGLIYTFHEGPVGYGFIDFPTNMALGLGSQSLSILGCLRGIRVTLCFERMVLQGGPHGPFMVTSVEGPGGDAETFGGLHAIRFQLIGWSPRMFAFLMAQRRRLYSVSGFTYFGPVWHVLEQLLGVVGADVGAAGSWVGAPRKRRRMWLSSGGRTRARALEGRTPYVGPPVSWRPFGGAPVFPIPVWLWAV

SEQ ID NO: 999362 - protein, 205 aa, Homo sapiens
MVFEVHVEANRSWLVEPKGSLEVELQAPPCETSLKLEWSGEPSLDYKTSAGDRKQSSSGNQLLWISKIIVPMTRNPPNDSPSTAPGSRSHMTFHNVTQCTQALQRARSVTEHQQDRDYEMACASYTLLVTQFEVCSRCAKRCKAPWEHGINHVSLHVTSWAQRRITARSEGPFRGSARPLHPEWTGRKNTFKQARDDCKDVQPQL

SEQ ID NO: 999363 - protein, 66 aa, Homo sapiens
AQAIATLHHSRVIAATTRGFIEPGILPIFTISESRVTTAWCLIPPGSKLSLSPVGSGSQTDAYPAP

SEQ ID NO: 999364 - protein, 250 aa, Homo sapiens
  misc_feature (106)..(106): Xaa can be any naturally occurring amino acid
  misc_feature (110)..(110): Xaa can be any naturally occurring amino acid
  misc_feature (112)..(112): Xaa can be any naturally occurring amino acid
VSRQASSLVDDIDCITYPADGHIPWIDITDLMHGPYELHVLGSNHGKVPYYISLYSILVATTCDGIYPENVFIGRELVRIVWLPYDSIAAGIRQCLRFAGVKDLVXCPDXRXTKQRIEPGDEVSIYRSVSALRKIDPTGCLSRLQLVMCLAHTYRGRRPVVGFLYGVTPKRMGIAVHHVRTSTGYQFVFALRATIFRGGSAQRIDVVTLIDFVLSLWSVTHQLAGHVLYCLVRCHPQKSELGYPIGVAPL

SEQ ID NO: 999365 - protein, 114 aa, Homo sapiens
MGEFPLWGHTQRLGVCKGCELLRALNVGTFQPLRGSKSKFSRAFKPLPKLAWEYTRRHTNQRPSYNFVGILGDKEVGFPPALRPRACFSKDLAWNLEGQFHAWPADPPKRWRGE

SEQ ID NO: 999366 - protein, 273 aa, Homo sapiens
PFLFKGVWPRARSPLTFRRPGRVRSSVWRQRRALSGPRGRASWGSGPWSRRAGEKGVTGGEKAAEKMCERDPGCRREMLTRRQAKPGRRNAAQKGGGLQGRVGSPRAQGGGAPFGPEGGAKENNRGRPRTIRGLWDPGHTKRSYTEKDVRQVWPNQLQGRDTLQSKRVEARGASQGRGCDPIMWGQGKGDAACEKAPRRSAPLKRDARGGGKDARETFLGGPPKRCWAPGEEGTSWASMWGRKKKKTPRIKKKDGRYQKVQGGWVPQDFPRVV

SEQ ID NO: 999367 - protein, 145 aa, Homo sapiens
RLQELRKEEEVAVGRDPATVLQLVQQSETPSQKKKKGKKKKIFGRLGPWKKFFKPLVWGRGPRWVRVDLGPKGVVPKGNSGAKEKGGVEFFQPIKKSAPGGDTPRAFSWNNSQEVGVPRKAITGILSPGRSKEDVSDFHIYRPVL

SEQ ID NO: 999368 - protein, 103 aa, Homo sapiens
AEIEEVYQWCLLRIKYLIALGISQIDHIDEKAFEKLLDLICELAHSRSQSRFYENSKHQRESFRLELKQLKKLHINQKNLTESVGPLPKSLEDLQTYVISKID

SEQ ID NO: 999369 - protein, 113 aa, Homo sapiens
MEFNDLSDRATPLALNTNDTKTYQGFTRPKGGLLFRDGGAIRTAFQSTNGLSYVHRPDSTRNQAFPPVELHQWLSHNLRLGSVSVRTYAGPRTNPASPFMCMAQNIFNVMPCT

SEQ ID NO: 999370 - protein, 178 aa, Homo sapiens
MGQEDKGQQGSLGKLKGGSIFCFHHVLVYLNKGSQKQNQHNNTTHNNIFCGGGSSAPQKKTVFVKPTCGVGARGGPQFVRYWTTLSHKQCGFPHKEEHTLAGAEKRQHRAAGGASLHHKKLKKHAPRAAHTQQGFADKTTLPTQGGGSSTEDAQHKGGAYQQQRGGPNSEAAPAFNNT

SEQ ID NO: 999371 - protein, 343 aa, Homo sapiens
LKTRTDITYTSDMTQAQHPPHTHRASTNDKRQVMMPNKTHMHTQQTKIDNLNIRRTYYAAALKVRYVVAQTTRSQDRRAAQENMCMERSHTTTEQRIRRSERAHMGFKHPDKDKERNTRRERHNIDPGCSKHTKTWRRIHAAHTSTPDEQQDGANKNKYGAIATLIDGASSRVNDDNNPRVSGGGKSELHEERSDTLTQSARYECSVNEAMAAMSRTTKELKIYEAYHITDNTQYIRNRQQHDTSLEQHQPLDTRAIESDYYAKRGERESGSLNRHKVAVSARTDSNDDNKAVLSETSIWNIIHRTRRRYNVSDLAKHQALSPQRTRGHDVRKSRDHLTKHWS

SEQ ID NO: 999372 - protein, 116 aa, Homo sapiens
  misc_feature (17)..(17): Xaa can be any naturally occurring amino acid
  misc_feature (100)..(100): Xaa can be any naturally occurring amino acid
MGTNIVGGRPIGRPFCXASFGSATMRRQHLGRLAQRHFPGPFYHGPKRKGLGERTKFSPSPEDVAFLEHILRDKSGGHKGVPPLPTGLLNHKVAKADIFXPKFVTVCVHTQADRQH

SEQ ID NO: 999373 - protein, 146 aa, Homo sapiens
MLEDGSNDNISHLVAQGLGNCHDSGEFSGHSLDNPPACPVRTHYRLHPHALLSPSSDATAYGDYHVIEVPTKLHHQVINVKGNLVLLMKKHQEDLQPKSSSGTKRPGHTSNSGFPWKPVRMGFLITLDPSVGHRLRDISLAMVEKV

SEQ ID NO: 999374 - protein, 132 aa, Homo sapiens
SGVRIRVSVIMYNDDGDADVSCLEGPRSTVQALFAWHYLVPECVSHRVHTAQLSKIRSVRQHTWTAVSQSGHISEARLSSHAYVLPNVCDCERYIDCVSCAIHMIKKSRNRSREARRDRIPGAPNVMTMSGA

SEQ ID NO: 999375 - protein, 70 aa, Homo sapiens
QRCLLTSAIYALQGRSVAVQKQIILKSVFHSNLYPVLVLCLECEDVKNARECVQNGSYLINLEEGYCTLR

SEQ ID NO: 999376 - protein, 108 aa, Homo sapiens
MSTTVHYYQAVCVTDESGTMLISEDDNTDKKTRSAAYVTGTILDLMQYKVISNLEARNSGGQELAPLLQEEDSRTSGLLMGLAGSHLPHRRNRIGGNIIFIPVVLHVQ

SEQ ID NO: 999377 - protein, 152 aa, Homo sapiens
DGKRFQTVCLRKECRCDESEKTKESREVSCTVIELLSPLLKLDCKDKSPVEDTDEKGCGCLRLHSNKKIFARMLALFGLCPRPCYRDLTSLDNTCETDDKSARYSAMERRISEYLGAQGQHLHLEPTLYHFNCRKVSEEQKKNNPLFRDNTF

SEQ ID NO: 999378 - protein, 153 aa, Homo sapiens
MHRTQEKTQRHTTNNEDNNGRRRAPRALGEEGEHTKWKRARRGHKRESAANGGKQGGGTNERGDDGETQRQQTGRTRDSPNQQKEQEKKPPPGQVNTAQKAVPCNDDTKHRAKRSTTEKGQEQQQQDTDKKTDGEEVTRRAERQNTDQSKEKH

SEQ ID NO: 999379 - protein, 72 aa, Homo sapiens
VSFWRAEHMVVQYWKVTKNLSYHQMDGPVAQAIVSDGRPRIRTVRDPFLSTLIRWCEDDGHISSQNDRRAIV

SEQ ID NO: 999380 - protein, 96 aa, Homo sapiens
TPMCWMYRYYCVLYPFSSCENNERTLVESNASSSKSYMRVPFIKFHVRIEIERIALIIVICTDKGMGERKRAMNRVRERDYAWRIWGDKWITLLEE

SEQ ID NO: 999381 - protein, 183 aa, Homo sapiens
MKFLLGHPPASPVTGSSGSLESFVKLFIPKRRKSVTGEIVLITELGHGIGETDWPMNLAKLKSKLGSSGDINKHWTGRKQLAKLARGLGVPRVHTLVGRLAATEKIFTGSGKGRVEGQKFGKMLVFIGNIMAGVVALYIQNWVGLHKNPQNLEKNFVTVKWYCGTIFVDLQEGIFFRAMTEEI

SEQ ID NO: 999382 - protein, 119 aa, Homo sapiens
MKLTEHDDDDEHDNNWQRTLKLTIQTTRLTMKLTDDETDTDDDNDEQELMSMMTTETEDETDEIDEMNMKLIEMTMTVTMTLQMKLELDDDNETDKLTMNNMNTEHNWNMKVTLNTETD

SEQ ID NO: 999383 - protein, 154 aa, Homo sapiens
MCVSLLVVLLMMFDAVLCVHAVLAEMPIIKWKRPWIDVAGRDYLHAYLLLVTLDRLIAALFCPFPPSCECAGDCPAMHAYRRNPFLLLHDRRSNRCVSFHSAIGRWSVASFLNHAIDSLKLHYVSRGPNGTDHNRLVAPERKLTTGQLDRKKAS

SEQ ID NO: 999384 - protein, 75 aa, Homo sapiens
KDLVLDVPIDSLPILIKVQYQYFSVNARRVQSRYSNEIVNSIYKSKLILIEDVHILDISLHHMLTMYFTIALHQS

SEQ ID NO: 999385 - protein, 206 aa, Homo sapiens
  misc_feature (91)..(91): Xaa can be any naturally occurring amino acid
MHHINRTNDKNHMIDYLKRAEKAFDKIQHPFMLKALNKLGVDGTYLKIIRAIYGKPTANIIIEWAKTGSILFENRHKTRMPSLTTPIQHSXGRSGQAIRQEKERKSIQIGREEVKWSLFADDMMVYLENPIVSAQNLLKLISNFSKVSGYKINVQKSQAFLYTKNRQAERQIMSELPFTTATKIIKIPRNTTHKGCEELQTTAQGT

SEQ ID NO: 999386 - protein, 109 aa, Homo sapiens
  misc_feature (92)..(92): Xaa can be any naturally occurring amino acid
MKATCMVLLSLSKRSMRIHRCYQSNEDEGLSARHGDSLLCDSKILTLLMLSPITGLWRGDDNTVCIPGRSCKTCNVANSFENKKREDAKASXLPRENPENSEEANFKHS

SEQ ID NO: 999387 - protein, 231 aa, Homo sapiens
GKVARGGGGGSQGPIPRTTSGFRGGQLTLGGKGIQGLPGRHLHPGTLARGSCTARDFKEAGADPNGSVYPGFLGPTPYGSRDPFGRHPAWPMCTTLHEESVEGNRISQRGTQQSILTNSRGNVNIPRDRHIRGYTPETSIDSAERRPCQRKCGRETSAQHEEEKFRTVIETAVTIPSRYYATVSEADKSKEIRERRGERAPRDGGNTPYEEEGVSGYRTQRDNSVGVYMRK

SEQ ID NO: 999388 - protein, 69 aa, Homo sapiens
CTFSAVMVRLMLVLAPVMCYSLWSLESPRLLSTIHEAIWYDTCRPSSHTEDAMKQAWSSTLTRIIEIES

SEQ ID NO: 999389 - protein, 119 aa, Homo sapiens
  misc_feature (76)..(76): Xaa can be any naturally occurring amino acid
MNLIRVLDDRSSGLISRVAYETQVPRSHLGQRLPVSPYKATAGYYALLVSNHEDVRKVSCYFDDTTDDLHENVSLXLWYPNSGMFAYAFHVIVTPELKRQYFTLWRLNSLEIIHDHTFT

SEQ ID NO: 999390 - protein, 309 aa, Homo sapiens
MTRPATYNRADRRRVSYHVRNTTGGASYAGPHATRHQRTTTPVGAAERWCTEHKPRSQHGASSEYSSCHVHPDCDTPTTVTTSSTQTATHSTTTRATAGKRACGPPKRNTTQVPTAAHLRNREERRSEGQRHTGETGRRSDSRIGARGVRRGKLEPRVSRRPDPVCNDNAHKLTKQTRTEQSASERRREHEIEKELTREDQGSRRRHGREKHNERREKGRRAERSEEERAEEAGDKPGEKQGTARVAERGTRRSGKRAETAEQQENGRRAAEREGRAKGAGEEQSTYRQRENKRNERRQTEQASTRSRE

SEQ ID NO: 999391 - protein, 144 aa, Homo sapiens
MVQERCTSFPVVAGSRRKPGLAEARVFHGMHNATSSIGTSSGRQAPTHARMSRSVVCYKCADKHERHVELLRNSCISTHVFLRSQEMTKNTAGLGYIHPYELRAFARDGQFGPYLDLIGVLKSRCGGIGGETSQAIDRPEDKAI

SEQ ID NO: 999392 - protein, 40 aa, Homo sapiens
MAKGEERDKGISSWSIWIYGGGLSKYATGTWSNEGWKCRK

SEQ ID NO: 999393 - protein, 130 aa, Homo sapiens
MRLDVELVKGTIKSSGPQFSMSKKKTKGKNKTMLWGARHGPPEKSCLTPSGGGRGGPVGSCRPGHNVCPRKKTGGQRNQEAGGILPPNKQEAPQGEQREMFSEKVPKEKIQRDKTGVFQREASKRPRNKV

SEQ ID NO: 999394 - protein, 120 aa, Homo sapiens
  misc_feature (64)..(64): Xaa can be any naturally occurring amino acid
MSHRKGWCQGCEACGLMPGDARLCDAWMVNLKERAQGNMKHVLFQELNVNCFQCRKPEESETSXTKLSLAASHSITQPVNEASAKAQTSHKSRDLGYSPEVSDERDRACNRVSSLIEGVG

SEQ ID NO: 999395 - protein, 65 aa, Homo sapiens
MDDMLLLDEYPGSMASCHRVVYTHIAIATGREFRKIQHYSQWQFLDVVSCIILNPRMILIECSWY

SEQ ID NO: 999396 - protein, 115 aa, Homo sapiens
MVKGGMQQAELTILHIYAPNTGAPRFIKQVLRDLQRDLDSHTIIMGDFDTPLSILDRTMRQKINKNIQDLNSALDQADLQNSELELSFGPSRHLHNSPLQINRIYILSSTTSHLF

SEQ ID NO: 999397 - protein, 131 aa, Homo sapiens
ITRLKLLLQNILKRTQPVLLVGGMMATKAHHALEQLIRDCNNNVQSMRRTEELSLPEAMKIEFRVQKYSLLISQSRWLVKSGERDSLGSSGASPGLRRKLNTAPVTHCDLIQMTCLLAVVGPVEGSRFPGI

SEQ ID NO: 999398 - protein, 111 aa, Homo sapiens
KRRAHPRFPPRRCRRSSPSSPPRKLREPPLALCQPRKGLPQCSGELKGSSMLRPEVGAKAEEAPRASEGLPASLSPLNRKLGNQTYLRKQVILFLTWKPGGKNQHELFVYL

SEQ ID NO: 999399 - protein, 43 aa, Homo sapiens
MKRYARTDKEEKETKSQDGAGRHEKDKKQNRTHAANHSKTRTP

SEQ ID NO: 999400 - protein, 135 aa, Homo sapiens
QLLRTHKMKLKIPLRIHSQAHLKHILTKSPGERSAMDYYRIICQLVFAGRHCRLCSSSCSPYFQLLDVQRLPRECTLQEKPFFSQPGAPNTSVHGLLLLYSIFHSTKVQERRCWSKQNVTSESTCCVAKSYKQGH

SEQ ID NO: 999401 - protein, 124 aa, Homo sapiens
MGLGHTKGIISDNLSSMTCEKFFSGECHRNRIDNKVPDEATCMGVHAHRDEYIPSFCIQSKKMRDCALPNVTRYNLNPRYRTCDAFTYTGCGGNDNNFVSREDCKRACAKALTKKKKMPKSFRI

SEQ ID NO: 999402 - protein, 207 aa, Homo sapiens
MRPPCPESSQLNRQVSPQLLTDASDTTAVNWQIGPNTQAWLALPGVPFPTSFNLVPRSQPLVQATRATPYNTETVPPNFGQGLHTSRPLALAQLAHRPTVGLGATQPAVLRTLAWERNHSAALDSKGYAAYHQTALPLTLATDIATTLSSQAGLVTASGRGLTTRPLLTLAYTLHNGVLMDTVCPGHTGHSPADVCDSADKPPYSDT

SEQ ID NO: 999403 - protein, 71 aa, Homo sapiens
GDGMIKVKNQLRFLAELAYDLDVDDAPGNSQQATPKDNEISTFHNLGNVHSPLKLLTSMAISVVCFFFLVH

SEQ ID NO: 999404 - protein, 119 aa, Homo sapiens
MPPTYPPRKLAPTLNNQPPPSRPAPSILQPTITKCDGSTHRAPCETRYQKPPRGHKAAHPQPEPHKSSKARLTHENATQGNAVPQQAPTGAADLIRPLTPDSRVHPPPNSRQTSRTIKQ

SEQ ID NO: 999405 - protein, 55 aa, Homo sapiens
MANAKPPNIQRINYSVHQTKQHPRGPRPTTWGEKSPRQTHNEDPQHTPRQPLSIH

SEQ ID NO: 999406 - protein, 119 aa, Homo sapiens
MFRPNILHYTPCCEKAPRTLYMILDAKPSTPPNATITLNILVNIFYSHITYFHAIRQLSPTHVILYDSSAIRIIIIGQGHVNQWDILIDYVYLVACNSPQGHHLGGNVQRSLTPKVLIV

SEQ ID NO: 999407 - protein, 135 aa, Homo sapiens
MEAALPGIRLGKREPTIPTRTTAVPKQQTTGVALNTGTSRLTAKVILAPSIPPRCQSREKKGRRHTTQPFDENEGATPRCYEFDREKVKQDLVSVRYKRGVERNTHNHVIIIVRGASYIDHPSCIRYAYVCQHRT

SEQ ID NO: 999408 - protein, 288 aa, Homo sapiens
MAHACNPSIWDAKAGRSPEVKVWDQPGQHGETPSLPKNTKYKNLARLGGIAPVIPVTQEAEAEELTWTLGGQRLAASQESNLWATEARTRDLKTKKKKISGQFSFIAIIWPILQIEESSPKQRINKVGTPRQQNVATPPRFIPRDSCEGRRQREKGRDLTERHTREKLWNTSTVGSPKMSGVKTPRGSIYTINTFPEQKSTRETRERGRQAKTPVNGPQSRYIKARKRQKGEGKKRAAVKTKREQVGKGAPMENANKQHGHHPGRDPNVMGETSSKPKKLTNDTQKTK

SEQ ID NO: 999409 - protein, 101 aa, Homo sapiens
SLLPSLSTQHRHAHKGRINTVKMTMLPQSNLYIQRNSHQNTIIILHRTRKTILKFIWNPKRARITKAIPSKKNKSGGITLPNFKLCYKLPKQPGTGMKIGM

SEQ ID NO: 999410 - protein, 104 aa, Homo sapiens
MTGPMKSTRKNQEKKNLQLVQKEELSRFLYHNSERSAHTDQILSSQYQNSIHDQDRHYAESCNLLTFFVDMYYINKYVDDLSQIINISDDHMSSTVFPSNHSPG

SEQ ID NO: 999411 - protein, 130 aa, Homo sapiens
AVVSTQSAHYGRGSFNLLMQTVPNKPTGPRLPNLPLNNFSWGDLGAEPEASEHVHANDFTSQSELVYSIESNRLEPTEQVTLGITVSNPILESISTMRVYDLDCWIMDYPDGARPLLKRFVLFNRLIRPT

SEQ ID NO: 999412 - protein, 99 aa, Homo sapiens
VRLISGRLSTDQITRVKREPSGCDKFGGYVVGEVNRNAINCTAGCSLKVGCLFDDMRIKANFNVTCNVVGPLNVEDSYIEIDSQRGCFIMILVGVHTQD

SEQ ID NO: 999413 - protein, 88 aa, Homo sapiens
ARSRGGLEYGGHGLGYNLMRKEADQRAKYAHCYSRYFYTCTIGVSETSLCVRRKMEGMGVCKSNSDASVLGTAPKEIDVSNLLPSVPE

SEQ ID NO: 999414 - protein, 165 aa, Homo sapiens
MVLHTEHMQRIFARSRLSGCCCECISHSRYLSVQDCPELLRYMVNKPILSPMPGVTPNTYSGMGCCFSRSISDSSNGPMKDVIVWCRESAHVGLEESELSVVVTLIYSYYYPIGSRSSYWWRSSNSGHCTPITESLAHDCSGYHCFVYFFALRVRYTPSYSIGKV

SEQ ID NO: 999415 - protein, 117 aa, Homo sapiens
MIESEEDSGVNVRIRKGSDIWHVLNMLSSLSAWFTPSGYTRGLMTCGKGVWSLESNKLGAHYGSSIMTMRKLIITSRGALIFSICKNTDNEVIHSCGILQDQDESTCLKFQAHHAAS

SEQ ID NO: 999416 - protein, 71 aa, Homo sapiens
AVTENSYDEANNRLFGSTSLTALIHYSCKNTPRGNESASVSYYRIIVHASLSGLAVVRVCYVAMFYHFLTS

SEQ ID NO: 999417 - protein, 122 aa, Homo sapiens
MSQDCRPCNSRPGQQSEIPSQKTQKTHTTKQQPEQQWPRGKAIKKTRIGTRGTTRTGNMAIPRTPKRNTRGNDKRRVGRRPPEIKQRRGGPPQAGLEQHAKISTGANTASLQKRVHSEAAYK

SEQ ID NO: 999418 - protein, 323 aa, Homo sapiens
MATGRTSGSKNEGNANRGENPGGDKDSKRRMEITPHTIQENAPRGENTGRESMEENTKIYREGGEIHERGPQLQAGGSYSKPNDGGEIPNKEEEPSEKNTRNKEATRNEGGKQTTDRGTKQRGKEKKEEGRKKKKKQQENEEKKREKRRERKREKRKERGQSRRETKRRRQRDRRRKRPQEETEERKDGGENEKEKQKGERRRTEKRQEREQQGEKKEAEREKEERERRKQEGEEKERREAQERDKTEQQKSDETERREESRKGKNRRKKREGRERKRARRKRGAQNKETKQKEKKRDTRRKKTTRQQKKTNRRVQQEETETR

SEQ ID NO: 999419 - protein, 282 aa, Homo sapiens
  misc_feature (84)..(84): Xaa can be any naturally occurring amino acid
GDDPGFEGQRGKPGGPKDIREKPGDPGTSRRSSDLLASTRADCRGGEQKRAGSGDRASEGDAQMGQLRSHNQGAKSLGHTIGGXEQVADTGRMMRVPKALARAAQGLDPGFDGHFNGTLLEPQGADPRLAFGTATGRNRRDACDAGRGQARRDLGKLGDALWSTRRQLGETPVAPPVETQETARRRLGHPWTCTDAPVGAGVLPCDERRTHGETPKALLVDQAGRPWVKAVPARVITRKRQATWLSLGDPGDGWALSDLRATEAMRVPQVRGGRRSPGPADP

SEQ ID NO: 999420 - protein, 102 aa, Homo sapiens
MDLVAMVGVMTCTWVAFLLALIEGAGILLTKICLCIRFPNGPQVLLERPLLQLPLNSDYLSSSLETIDYISEDFFPRISLTEGVVVREGFQKITCQAVFKTR

SEQ ID NO: 999421 - protein, 78 aa, Homo sapiens
GEVLLPWEEAQDRQRRKGRVYDSDTPLLHRNVRLSIRKSSLRPQREETNKTAGDSCEPLSAPPCTQHINVERGARVHK

SEQ ID NO: 999422 - protein, 121 aa, Homo sapiens
FSLHPDYAMVGVCGSGGRCSVPPGPLRVTHRLQRRCPQFSSYCGSAPSGGSILSWDRMRGKASPSARSRGPDNGLHRWRSLAQWVDVQLRLREYHQILNALGSAEGTGDSDLVVGGGPAFG

SEQ ID NO: 999423 - protein, 120 aa, Homo sapiens
MFPLYYSNEQHDVWGKHLPLVMTRHITQLRPHKAVRPPVSHKTLLKFATYEIRWIGSCAVCINIPRRGGGTPIDNDRATDLLATLTEPMDSIETEEIYPHPLMCITTNNILYMTPRISQR

SEQ ID NO: 999424 - protein, 81 aa, Homo sapiens
MHAHGPPDNTRGHGGHTPTRTPRHGHSGQGQATRRHRQHGQQQPTRSQRRQRTHRATHTGHNQRKQAQPHTQPPPCNSGKR

SEQ ID NO: 999425 - protein, 187 aa, Homo sapiens
MSNETIGTLAFLTSEIKYSLCIPFLAERIISMLNLLPATNLVGPQKMGCLKSQRDFSDIDFKPPAAYVSDICNYLTLNLGDEENFCANFAQGWTSYSRNSLGHRQFEVYEGKNKYRLGHYGSWASSATLDRREILVLLAEPADNQEAGRNPIGGMPGGLRFPWNPPIHGAPPGVWWTLVVGLPSLSQ

SEQ ID NO: 999426 - protein, 425 aa, Homo sapiens
QTTSGQLLQQASLLSRLHKLRSAVLVWALSLSTPDSPLTVKQIPCIHGLMLTGMHAESACLLHERILVHDLGVIRTRACCGLQFAAALCIVPDIHPHRYVAVHRSDRFSLTHAYACRMAAFCPPDMSSEHGRYLRSVAQQGSSSWPKHSKTSFLCGFHRLISLAIWTIRRKSHDCNPLNILLVIAYPTIPMVRGEFSIPIPEGSSYNNVSVPIYSCTCRGTAVTTREERSICIEFFAHESTSDFQFSQQPDFGSNVLQRCYVQFELRALMVACFIAESNGYQNRAYRSPRGRHSLCNGAFGIVHYLPQAKLLGLFPIHQSLLEPPYCILLFSVTQGNSYPFPEKIPPPVLSPSLTPAGDVRSASVTPNLKVHTRKLCGNQICMTGNLSRLYRTRGHNPTSCGTDWAWARVTYYGAREWQTQICDI

SEQ ID NO: 999427 - protein, 106 aa, Homo sapiens
MVWSMVAKNTWLKKPEIPGHLHLRLHRAQLIPLQGSFNGACYKHDGVPPVVTLGSFKPKRADPFLPNRNVSPNSFMVLGGTTFCGRTRRRGPWGGVPPYYGSCWAP

SEQ ID NO: 999428 - protein, 121 aa, Homo sapiens
MPVLLERPTHGHPPIRHCDIHWVGLYTERVASRCHSTYLASTLDMLRDVIITRYKNQRSGLNPRHAHKFNVELPGHALLTVIEISFEIGYVWFCVFVNILQISAPFCTTCETGFKILCLQC

SEQ ID NO: 999429 - protein, 90 aa, Homo sapiens
LGSGISHHLQNNELLRDIFGLGPVLLLDATALKACYVPRFEKHLYNSQLAFKARTKARKSVCGTMSGQTIRVKQDLSEEETFYALVIRIL

SEQ ID NO: 999430 - protein, 151 aa, Homo sapiens
MDRGPKKPLSRCGSSTAACWDNDRCVCSSSIHRSPEVERSVYPSSFYLRKRLLSSAPDEEMKLTEDLHASGYPDTNFDGARGPDEDNNAYPLPGLHWNDHSGKLTKERGRKILPDEESSDTPNGISFATAHRYTHLTAGPRLQVVHSDEQI

SEQ ID NO: 999431 - protein, 389 aa, Homo sapiens
RNPTNVKNVAKLLAIPQTWLHHEITHTEEKPYKCKEAVTQTFKRLLRPLAKHKIIHAGEKLYKCEECGTALSRSSNLTIHKVHTYVERNLTKCEECGESIVTGPQALLTHKKNFQYIEKTEPFTMLQRLLAQAIYIMVPSNPKAKTIHDGLTTTWRTESPYHKWCTANGETQKASGKDQRTTSRDPNQTVKTATQGKHWYKSPGDRKEKTRSHKWYKHMDGPNAANKPQSHENPTDVHNSKPTRQRARGRAHEHEQPADTSHSAGQRHTSGHTRKRKQTQAPNQKLRQTKKRRQGKNKADRRERGRKTADPRKETNRHAKQAGKKESQIETAEGGTQQTSTRMNTQDAGRHEKHQKRQETASQKNRVTRQRRQTTGNKRRGQHSESKQT

SEQ ID NO: 999432 - protein, 68 aa, Homo sapiens
QRPRENDVTGIYKQRIEMEEGDYKEILDVGKDKTACECLKGPRIHPAHADCIDAGCEADNLMSATRTR

SEQ ID NO: 999433 - protein, 296 aa, Homo sapiens
MKEHLLPDGMNEVLLAIYKFFLKFFELNLPIEKGVLENQVYGDQGVSFFGNKEGIPLNLTIMCQGVSMKDILYEKEQHEGPKFDIQRPPKERRMDIGHGNWGEPFTRGQTWSGTSNNVDYRDTRRASGWIHPIPIHPGNLGVNAYINLPGEVTFHGRPFSGNTHEHLPHVKNTFCHFKAAAHHGAGPTAVKQWGVAQAARISLGYQVGIQHWGVPTRGGKKRNMGLTPSCVNVAEDLGFFHVWWLSQKRHTFPGEPLPKVTRGAIPAIPGHGGHFGGNERELAARLIQIGGKGGDG

SEQ ID NO: 999434 - protein, 111 aa, Homo sapiens
YNVAKEERGRTLMDCEFHKKKNRPVNLTFYRIALQKNTQPPGVVPQPTLSTLSTLGSFNTGKHQAQLCHFCVCDHNISGTNTPGIKTCLTFSRATIVEHNQFDQTPSYQEC

SEQ ID NO: 999435 - protein, 81 aa, Homo sapiens
MEDLETPRRNGYVGCRLDPLHFVAEPIFSQQVVETCNSSIVAQYGTLVNPVPSTTWDGHRGVCVNSRPGGEHCLSGALPGK

SEQ ID NO: 999436 - protein, 310 aa, Homo sapiens
MTLNTVVQRNTAGAFIRFNNRIIQTHSQTTPTQYDPVNRNMRLDHTLPNYTTHNPFNPYTITPINNNTNTMKEAPEKTSYNTTHINITTTKTNFYISTPQTLQHTNTVLTQKKYRHHNQLIMTLTLQHNTTYNHPYTQLTTPLKYDNPYNTHTRCHHTTTTATPKPTHKHHIHTPIRKKHLFSNTSSYTPHITPLDIPPKHTTRHTMQQHNQLIARYSESERIERAPNGDHNGQSNHATPSDQVDKQDQHRTVHHSQLLMSSTSRHTPHQNKNETTTACLTAKGARPVRYRTTSAPTLGGPYHGRSHQGG

SEQ ID NO: 999437 - protein, 113 aa, Homo sapiens
MGWMSDQASLCLRTFQKDKEMSLPLPKHQRSLAFPCGPCVPGFALLVDPKPSVHFPVTQGPLHSQKLAFGPYGWPLGSGLKCLGLVVAIKKGASQGLVEGPLEPLYYTLCTSS

SEQ ID NO: 999438 - protein, 228 aa, Homo sapiens
GLEATDVYGASCQILLHLAHSRQKTYTVLAHGHAFGPLIRRGQTLIYSQQIGSNLQHHTCEETCGVVIAPKTRPRTTPELATPTPYLAHRPCPTQEHFVPNETTYYKSKYLVAFRNFTLGAILLLGAATLAPHPPPFAHSYLHQKLDGGNSSRLFPNCWATLLGGLKTVSAAHAANTEHTAQRAYTTQARWVQHPLHYNRAHRMTQAHNLTTTRADHNISHRFYTGPT

SEQ ID NO: 999439 - protein, 78 aa, Homo sapiens
  misc_feature (24)..(24): Xaa can be any naturally occurring amino acid
QEGLVLKGVQQLTKTEEDPHVTHXSRRSERHSQHSPENMSHTYPTVESAPRRNKLTDYAIIKLPLTSMSLRIEEDRRQ

SEQ ID NO: 999440 - protein, 246 aa, Homo sapiens
  misc_feature (164)..(164): Xaa can be any naturally occurring amino acid
  misc_feature (196)..(196): Xaa can be any naturally occurring amino acid
PRVADAWGHIVLCAELTYTLVHRGSGTHGVYHVARMRATGRGENSNVLLNNFDSCSTGPFEDADYELPQSKLIVGVRHRPLKAGEVHPLIHEILGGGLMRCVTSLPWCSEASKTTCSNDMMFVMYTKYANERVRRRMGRTHAERTYSTQNNRGGHTDCNPGYEXNAQFANMSVLDAHTYTNGAYAARERKVARDLXYLSELHVVHILKRGASYTRTGRFVKRPYRIRHINGGQGGDMQQPLVPFSE

SEQ ID NO: 999441 - protein, 131 aa, Homo sapiens
MLSPVIICRDVGIANSACRIVLRVWVLNTRSGYSDTGVDKMRRTVDSICDLVIIMCHDGKSAVIELIELVLPRHNQRHMIFLQTHEKTLILTIGRPYHGEGQDTGVTRLVTKDDYIVGHLRGTGDPYLRYA

SEQ ID NO: 999442 - protein, 136 aa, Homo sapiens
  misc_feature (29)..(29): Xaa can be any naturally occurring amino acid
MRLSTFRVLRETHVGFLTKCVQYPAISNXLVETTPCARGGVWSVVPSGCLASRYKATHGGVDIPRTMRHEHDAWRVPSTDRQVEFYFSATHRKRVSYADNQTTHFPGYFMQGINTKHAVHACVDNNAFNNEVQTSA

SEQ ID NO: 999443 - protein, 298 aa, Homo sapiens
TGMTITLLRRDGLQTVHCAKRFDQKNNDDANSFALPARTPETFGQKQLSNHFLTTVLLLIVLTGLTPAIYWVVLCHELTTDHALERQHNSLALTSSFTRDLRHLHYQRSTYLITHNPCAKPPPQSLIHTSSSGLISATLLPALHPTPPCKLSPMRDLDTLATLGASKPGTNVPMAPTWPIDSAFIHPQATNTYLEPIQRIEFVSLMAPRLPGRAIPIGTFSYKRNTERRTSNLHTHSETITPNQSNVNTRNPNTVTHYSPSHHLYYAPLLPPTPTPTFTHYSSVNSNNPLTHTPPPAE

SEQ ID NO: 999444 - protein, 189 aa, Homo sapiens
MWPLYSQVAMVVEKTTDGRSYNGGEADELPKVVLDHDLGQGNNLAEHKLGVTHSTRRGTHAARGAIGHYVIARPYTLGLFTTWTDRHGPTELHRTSHRTNRRTGRGENQHARASRADNSAKSPGTVRAHTEETAQQPLSRAHNVDKVPLTARGTGVTYEGNTPAQDDKHNQHKENVEGARPAAQSSTNN

SEQ ID NO: 999445 - protein, 125 aa, Homo sapiens
MSYSCSQPTALCTQDTRLLPVALLVLQHGVTLIEHTRQGALGETSVRSPRIHLTAGHKTHTTTHPSPPLPLPRAQHQPVEQPTPTYAPNVTSLAQHTDHAHEPLHTAEDTQQPKPTKSPPILDPT

SEQ ID NO: 999446 - protein, 489 aa, Homo sapiens
MREISVRCSTSVAQWVTYLTQNRRRRVEQKLSARTNFPSMVEVHRRVRLKCCGVLVRPSYVRQAGTHEMVKVNSHPSPMHRHSSYQSNKRIANLTTHCMDLLDNPLTLRVPTTGQQVPAHFNWPITKLSTNMLQGIVRVDSITTQGLITNHVTPLHEVWALYLRLSLLYEGIANGPRLWRILNTRDDANATHTKGAPNLDAHREHHFNTRIISILICRQPRTLYRPYVSRKAKYPRQNYLSAVTSQDDIGLGQRMRRERATQPIVRQCTHRSYKEHTVHTYSHRLHAFCAAVTETHYAAYSSNRSFVPSLSPPAISAGHISEATQSVPQVALGVVCNTTNKAAGYHRTQRRGNRHRTPVTALSHMKVTYALPLNDLSLSSTGDQRLQIAAVVQIEATHPSYSTTSAHNRGRGASPSEVRNQVNRRDKTRERTPRTRTNGTTTTQHQEHRARTTKDKIGGIPPVAHIWQTLRRETRQKSTKKSETHQSST

SEQ ID NO: 999447 - protein, 45 aa, Homo sapiens
MAQYYPGTNPGHGGETWCEAIATPAIQSPLTPKRGIPATHNPQKL

SEQ ID NO: 999448 - protein, 357 aa, Homo sapiens
KHQMADDAWCSGVGPGPGGPGMGNRGGFRWRFRQMASCGPGVAGLCDLCVPVCLSACGARWECNGLRIRTWMPVTKVGPLGHRTMKINVPEEEIYLFSLPIKESEIIDFFLGAISQEMRFEDSCQLQKQTLLPASAPGSRHLYAIRGLTMGHVGQGVTVLHLSVDHRHPVVGIILAKLSHRPLLRKRAELGGTKIGEAAQKCPSDKVDHCRIVGSVLGTPSSLEAPGRQLAIRVFLHPLFAVSGMHGSIDCAWVVRIGRCFTTFPGAVGVETLAHPLGRVFGTRVQAFVNCSHFLQGNPEQGVNLVAPRSPSWKRDNLVIIPKEFCRYSEWSYTWNHVYGTKNPETQEVFRVKRRHS

SEQ ID NO: 999449 - protein, 147 aa, Homo sapiens
EYLEDTKNKGDVKKHSQIFRTIPLRLFVEKERDKEVSDDEADRPTDRPTDTNDKHDNHERRNDVGTTIPETCQMLVLTEDTKKQKDGDKNDSKKKIKEKYIDQEELNKTKPIWTRNPDDITNEEYGEFYKSLTNDWEDHLAVTAYFS

SEQ ID NO: 999450 - protein, 312 aa, Homo sapiens
  misc_feature (130)..(130): Xaa can be any naturally occurring amino acid
KLSSEPLPECRGGEAASGTEKWAGSRGRGGGELRPGAQAGDLCRGPWSGWALPGSVVPGLRGGWPCGLGERVRPVDGRVKQPLQCLVCAPVCWGWLPGWAFVRMWPRSRRSRGCPFAAHDAGAASCSLSXRSMWLACSVGTFNGGGHREWHNCRLERVVDFALDLFAGRVVTACVQRNLYFPRLGRLGHSGSPVLACEDDSVGCCCAMLLAVRGTVACLATPTGESSPRGPWGAIVVQAAQRDPLEGTQCRTGQKPWSPATQRGGISGEAGIQDDTRQRQARGGKVAKPLGPALKGFFVGRFSRKVTDQALG

SEQ ID NO: 999451 - protein, 144 aa, Homo sapiens
MDSGLHRLGAKHNLRGRDQLQMSSWLITGALPVFVAVTSQIQYLCARTTPSVNAEGARTFVGILRAVIPLKRPNEVSNALTIGLGGSRSEYVIRDRTAKWEHQEEWFPIVGVDPPKSRQCKEEITHLRGVGPFSWCVEEQLLPG

SEQ ID NO: 999452 - protein, 97 aa, Homo sapiens
MADLTRLLSLRKHLHVTLAKVAHSNLWTHKYFGHQRFTKTQYNHKAHNYTRTSHHTHGAPPQLETNPTGQRPDNNAASHRANPGPRPGPQNERPQSK

SEQ ID NO: 999453 - protein, 116 aa, Homo sapiens
PRVARGLGHAAVKARGDSMGERGAGAEEALRHVFVRKGEARGAGGSDSRVQAGALTRGCVFPRPRSAGCPVLAMRPHTRRQVSSKGVHSCETTARWGHRLTVLEIQGSLRSVDEPD

SEQ ID NO: 999454 - protein, 96 aa, Homo sapiens
TRKYEPERILLEFSYSSRTVVNTTVRWLEIVPEMAIQAWRMAMDVTEKLLLARFHCSVVYELVIYSKDIQCVSPVVYRTCNTVWYMLYSLSTDDYL

SEQ ID NO: 999455 - protein, 226 aa, Homo sapiens
GEPGNLAGVGTSSWSSQERGALGKCTISTDAGPGTAANAGKEGGNPGCGPVWPQYSPACFGAAGQGCAPGAIRGWAPVFLDREQSISLMSVGFLSGEARTRPWCRRGPKKNVLIKQFVSDCELGGAGLPGGGYTSPRVTSDELHGHHEKALRPYQPLGALVVTMPQAVSRGGREAAELTHSVWKTGLQGDGNRVENMSGFTCTHTALVVSTSVFSRGGGEELASSP

SEQ ID NO: 999456 - protein, 242 aa, Homo sapiens
LLSGGGPRLTSPLKKSDPVVSYRETVSEESNVLCLYQGPPNKHNRLYMKALAHSPDGLCRRTSSKARGVRPVRRLKQTRRRYPGPSKYELGRWPESPQRLLVAYEAQTAPWAPNILTDYTPKGSAVATTEDTRTTLVDWHRDSPPVGPPKERDALVDRGKNNSPDGVAALRTDTKERSNPLTQHRSANNKHKREKRRPKESSTTETSTREGLAPSYGRSSGIEPSPTTKPRPVGSQPIDNIG

SEQ ID NO: 999457 - protein, 103 aa, Homo sapiens
  misc_feature (53)..(53): Xaa can be any naturally occurring amino acid
MSLLIHRWLLTDILGEENLGEAVDSRSGIQTLAFIQPIVSIIGTLFNMNVPAXVHTHKRRQDLFTCGMETFQNELLRMTSIDMNDALVPMYTADVSFVSQVSR

SEQ ID NO: 999458 - protein, 217 aa, Homo sapiens
NFTLGIKKRGILGKWSLCPPHSSLVWSPVAYSPLPLNAPTPIKIACGPIHQFDAFTCWYLPLQTPFINVGVRNRTMRGRWTSCPAPHLKALMVKSPLCPTNGGLKPLYAVSGGSSYLPRGQAIVLFTCIRNTVRVLESYTTFLIYMVIDNRHRETGERAGRLANIKREFIPTRRERLPQRFYTGPISPAVYLSVSTQREWAPPHIWRKRKTCEYYLV

SEQ ID NO: 999459 - protein, 132 aa, Homo sapiens
NSQSGNQKAGDSGQRVLGPSQSHPGSGSPVCLISLLTLSTTPTESGGPAPSPACVSPQTLFRMGREKEERGGDLAPSPSGNLGRALCPQWALYPFPWGASSSRDTIVSQISTPVNKHYKFNNEVNNKNKQEG

SEQ ID NO: 999460 - protein, 109 aa, Homo sapiens
MRHMRYRRWCVYTKHTLVADLRGHTHRCCTRCGRHSWWQQETQLPFVGGETPILVVTHSSLTKDFSASKREHNLNVVTAWTYRGVTPTREIALRRREKLRLPEQSLYNT

SEQ ID NO: 999461 - protein, 188 aa, Homo sapiens
  misc_feature (82)..(82): Xaa can be any naturally occurring amino acid
LSPPRRQRWLRESAPSSRNAWVTRSQVLVVSFGRAGDLVCNSCPPLSPLLASSSVMINKGMPYNYPGPAVNDGNMPRSWPQXIAHRIPSMGTLEVHVNVVSNDKLVVVRAPFTNVNDVETRRLRFTGFPKYEIVDTTHNNCYVEMKEYFLKEKALTSARLQKYKCASLKPQDKYVCVPCVETLHWKIQ

SEQ ID NO: 999462 - protein, 176 aa, Homo sapiens
MKFWYPVESSRLWQGSCTKLHSFILPCIIMCAMWPEQSDKWPTADESKMDISSVNSEKMSKSTGQLPHFDPKAIDKVVQQTGMRFGSGMTAGDTVRRCQPLWNANGQMHGILRFCTPWVETWVNTKLACQGWGQSLRSWFRARQLSTDYAVFGHVKWELAVNFIRDNQNQRDYLTR

SEQ ID NO: 999463 - protein, 163 aa, Homo sapiens
WVSAALGWRRCEWQRGKAAQFREGCRRAASPQCTRHAPSPTGTLARAFPDRHGCPRGRSAPAEGAANGRAQEEIGADCQLNLLQKWKRSRKRQQRRHKSSDKQSAKQQKGTHGEQTGNTVPKWLTQETKKKTYLRTKPGENGKTEAESRPLIEGSEQETKPKS

SEQ ID NO: 999464 - protein, 118 aa, Homo sapiens
DAWVEISGSMTILFLCSSLLLFNLREVNINKNGSGAFENIRSGGPIGERGYPPDYCYVTQCWAPYSTGDCRLIYHMLAHRALISSYAAGPGPVGNTAYLVATLGVHQEHPCIALHAER

SEQ ID NO: 999465 - protein, 301 aa, Homo sapiens
  misc_feature (91)..(91): Xaa can be any naturally occurring amino acid
KAHGAQVGLQEATSRYHQKSLIDLSVITPVYDHCVPYRACPYVLLCRVFPKDLEETITRLSTKAISDAFRNVDRTVLENYELTPAESYRSXLSICLIRTVPLRQSRFNGLTRAMDRTEIAVTACSHVKSQMWRDQKWVSREAIDVRRERSGESYMLAELRYSRLSYTSIVPEQPRAELANVLGRLSTSESVYSGDLEDLPILVLDRLTFTKNGACTSMKLVRPGFKALERTGLQIPSDRHKSTTTFHAAKTEPGGYTYGSNWLMKILVRSNSDSFIAAIVPTTLSFPLNNAFEHRGPVIYA

SEQ ID NO: 999466 - protein, 285 aa, Homo sapiens
GSCCQCCLELELPGSLWSASCAGARLEPAPGTAIGGLDCTARQQAGHGARHAWMNLSIVYLEPADFLVVNNALGRSAVDRQRRGWETLTLQNASCRYPLPELADPDTCYGFRFCHQLDFSQQQGAAVALGLNKGKPPGKLLYKCCFTGKQRALLTQRALTLGNFAGKGAHNPMDRRREVTQVMPIAILAREHSHRLCLRHQNKIVAIQKCAFEQRDMVEKTPKKPRGLQQRIVSRYLWEHLGECTGNMHNYHGLLPEKELQFDMKKRREYKTGRTRVTKHNPRAH

SEQ ID NO: 999467 - protein, 72 aa, Homo sapiens
DAWVCRQNTGVVNTTPKSQEWETEKDSYQPLYVIGPRRFADIVHHLAVPFCIYTHAGWPLEQMRSHIDNTLC

SEQ ID NO: 999468 - protein, 107 aa, Homo sapiens
MRRITLGAESPGEGKSSGQTSPSILPGSQRSPSARDFPSPSGPQSRLREHSGLWSEWIVKSNDRIQGLLSWGDSRILQCWCNARDARLGQFDRGTQCQETPSGDGAT

SEQ ID NO: 999469 - protein, 406 aa, Homo sapiens
ELAAERVRVRAHLVITARVAQCDTVRTGHAAARATGADRGKPGGLCPIENELRVSGDTLYPPPKPGLSGGGAPEPLLCPPLIGSAITMTSWGRPCTVGGRLYARRLSLRQLTVSGPYLPCCVSTCRRYRRDASVQTQSTHFKRVHIEVVISYPVVRMVESCTVISPPNISVRFTLVDYALWNPLLQSPPEKMPGIERVTTFESNVCSKNWNQYRDGYLVRRLAYQRHLNVAKHHDVGARIFPTFRRGETPPRRSKYSTEESLRGQTRLVEQPVFGRLVYIYWGSDTSHLTSEAKRKVHEQSKTNRRIIFHEIGRRTRQALGRQQHYKKVERHLSMIGVLVVQKRSPSKKTPSGPRHKSRMPNSAFGNRVMHTKGGRYTCTFPPITHIERCFQREYIPTCLTQKPHC

SEQ ID NO: 999470 - protein, 111 aa, Homo sapiens
MRFVGPAAGACPWSFPVPMTKTRGGCPHQPVRLALGRAVLVRKAGSDVATRIQWAPLTPRCLRLECAMPARYRRTLYVVDNQSSGTQRNLSFIFAWVTSYNIFPISIVVHA

SEQ ID NO: 999471 - protein, 112 aa, Homo sapiens
MALPTSPPQAPGLPRCSRRERNTFQDLDKTAVYRNIQACKELAQTTRTGHTGDQMEGTNGYQHLGERCFVTNDAATILRELDSTASCCKNDCNGFLSLMGKSKKLEMAAKPF

SEQ ID NO: 999472 - protein, 126 aa, Homo sapiens
MLRSIGDNEHAEKKVGATEMARQESIHTDVLPFQAGISAIKATLCDPTVFTSFELTMMASPLENELPLTQLSPNGPSEVADRKDTHVGTGPLPRLPTEGPLMDTPETHPKNDPILLASLLAACHSG

SEQ ID NO: 999473 - protein, 251 aa, Homo sapiens
TKSQYMGTGRQTHINIVVFGHVIPGKSTTYWPSDLINAGGIRHKRYPLGNQILQNGMAAGDIVPTQALSSRVCHVVVWITTDMAGSVKRAYHSICILCLAEEIVDDPAQLLCRRIIDVPQGHMKILIHKPSDLHGTESQGLIVCLSVIVAAGGCARISRQLAISKVTRGMDPQYVMHLLGLTPLVWCITSTEVRAGAYTDKLCIPTAAHPLLGLALEITARNKGRNGTCSTVAFYHLLYTDVGLTYPRDSE

SEQ ID NO: 999474 - protein, 146 aa, Homo sapiens
VSRAPCEVGKRRNGALRWSCSSLWSVLCAVALGVLPGRTGGWSSVLRHHWTTTGENCVERETGLIEFYATVVPCLSKSSTGMRKRFAAMRETILRLLIANITMSQSEPGREWTVIYHYTALPTIYHLYDDGEFRRYQGPTGLRRTS

SEQ ID NO: 999475 - protein, 109 aa, Homo sapiens
VSGRRAGAGAGASAITARRAVDTVRTGLRRPATGADRGTPRLCPMKRSFCCLADNYSLPPKPLDIRGGAPKAKPNCPPLLLKGLPYNLCGPLFTQVVAPLVSARPLTPN

SEQ ID NO: 999476 - protein, 103 aa, Homo sapiens
SSIDFTYSQAILKTKTYAKRSHSQLFILHRGKSNFTSRHKLFSGHIRNARRCYSDYPRCIDHMKYSYLVCGSIHCLYISRYTTLISLFSDTDEASRLTMSKKS

SEQ ID NO: 999477 - protein, 33 aa, Homo sapiens
MQGGTWQKVGLCWSLSPETPGPGALNLASTETR

SEQ ID NO: 999478 - protein, 77 aa, Homo sapiens
MPELMPRLQIGTTRSTEKLPYSVEPRLSTGYLYERPPVRRRETHRSVGAQGHTPPKTRAATPDNRATKDDHAQTPRK

SEQ ID NO: 999479 - protein, 136 aa, Homo sapiens
TPPTEWCYPAWSGHDMSLLDMAQTWGEFRVAESSTITNEAVAASALEEGRVREDLWLGLRYAMSAHVHRIPVLDRLGYHSPHIPTDVKIDVCLDAVSSASRKELMEIQYAISGCPQLSGCSRCECLQAVLQIHLNP

SEQ ID NO: 999480 - protein, 155 aa, Homo sapiens
MRPVARLLSYVCEHADTWIPYLISVAAVRDMHCHRIIIIDRRLRLRYVHVTTTWLQDSHNRCRITGELQADARVSILVLVMYRWGLTILARLVLNSLTSGDLPASASQSAGMTGVSHLHLALYIYIFRDRVSLCCPRVVLNSLAQVILLPRLPKH

SEQ ID NO: 999481 - protein, 158 aa, Homo sapiens
GLQRSSNQQQPKEVSRPVISPASIPLVPTGPVKSAELDWRALWLLGALCGEDRHRGPWAGGGPLCGPWDGGGVVGRPDRGSTGRGSYTGTPFVQRTATQSARRGTRFYLRNPWPLGLYLAPKETFSYKTFSINKCPGAPSGREFPSKRVTQTVGQGLI

SEQ ID NO: 999482 - protein, 108 aa, Homo sapiens
MIDSPQQHGAEVTDKFKAVYRTADVCQLVTCYNACWGMAAREYRLHSSIAHAGKAGPEVIFVMPGISGILRHLAAISSKTSGRDNAGARSAREQPTFIACASCAWWVE

SEQ ID NO: 999483 - protein, 254 aa, Homo sapiens
MSSRRTKDLLQRVQWGSNVLVTPNPNYIRKIHREKLHTYRHQWLKLTSGDNGKLTDNRETQTFWTFMSRTLRRPCRLRRRRHAISSSQITEQRKYSRLTQTNLTGHDYSYLPPLLDTTLARDNETNGRTHGREQECRKALNLKGDTDGIETQQIVCLQPSRTCCNFEKPNQLTLTDLYHENLVAPHTGISTLISHITSKISFPLQPSGTPYPQRWTTKLHRWGNKTTLPGPTWDSEGFIGISRTKPAQQQITNG

SEQ ID NO: 999484 - protein, 124 aa, Homo sapiens
IAYLETTANEVGIFLCVLSPVFFSSPHAQDFPGTSDTQGSRSSFLVLGAAQDPGYSQEGFDTVTVKCAGTRNGFPQLNSNDRRVRKLTSTQHSDRRHCRYGGEVPPGFLAEAIQAFTLGLPSDG

SEQ ID NO: 999485 - protein, 202 aa, Homo sapiens
EWSVLCQCNVFAKVWSLTVMKPIYELFQSVSSNVTAMSLQWNLIRKLPPDCFKNYHDLQKLYLQNNKITSISIYAFRGLNSLTKLSRAVKDGSEEMKRTGQNRYLSHNRITFLKPGVFEDLHRLEWLIIEDNHLSRISPPTFYGLNSLILLVLMNNVLTRLPDKPLCQHMPRLHWLDLEGNHIHNLRNLTFISCSNLTVLVM

SEQ ID NO: 999486 - protein, 83 aa, Homo sapiens
DPSRLCANDMVLQTLAWHEFEAGGGLMCITFRSTSMPKQLGQRLVRMLFATQNQWLWGQSREPMALPSEAMTRVALLIFAIDC

SEQ ID NO: 999487 - protein, 325 aa, Homo sapiens
MPLKAPALMVSAAAWALPFPAWGWAPVAGVRPVETAGRRGGQPAMVMSRPLLVRQRVDLCTKYTTHCELAPRHGETPSANVLIGCPIVVALGPQLSLCAGWGGPHQQAPTEGAHQQGDIFFPSFEADDELALEPQSTLGGAALQKPWSKRNIFSPTDIIAWPMAKACVVTLMTVLAWHYPVCCHTQGIVSNPVWQHQRWNWRAHPDYSERWSPLRCEGQLPPHTTRQRLSIPRATAHPCGQAQLFPQSSVRRQYVSIDQQRYFGQAKTTLFLSVHNQPEPALRQHPVIFHVLQRPNMCDPTTFAGNTYGIPTSRTLLAGGHATDR

SEQ ID NO: 999488 - protein, 71 aa, Homo sapiens
LHWSSLTRYRGSFDFIYFIVNDIYECVIYLACSYATVYLIYLKFKAIYDGNHDTFRVAGFWWSLWEASLLY

SEQ ID NO: 999489 - protein, 114 aa, Homo sapiens
PPGRHRGRTRETSPPPPPKTPPECAKSPPTGLAALGGNSSPRRQGHQEDLWTAWVYEADDDRLNKVISELEFGKNFEDVHVPRVWASLPSDTCREWGCSRSHACPRLLESPCAC

SEQ ID NO: 999490 - protein, 260 aa, Homo sapiens
VAAAALAAVSQAAPASSGPSPSDPSPLLDPTAVSDIAGKMSDEFSLADALPEHSPAKTSAVSNTKPGQPPQGWPGSNPWNNPSAPSSVAFLEFQQIEKPSHGSLFGDTAHKQDSVSSPCLTAGPPPGPPRTLFLLPDHHVPQLVVLIQPQLCRAWPHRAISYTKYALSRATQTHMVHPQIQLQLAFRSMGIHVFWTLGARNGRAVSYSLNAISISRPISSISILPKAHEDSTNLFHGGTSSTGAWGPHRPYLALQDRIPN

SEQ ID NO: 999491 - protein, 235 aa, Homo sapiens
MHKYVAIIVRSAAIGSREGLCAKGDVNTIEQVAQDTNPYVHEDDKRRRQRKQKCPYKNTRLNAVETTMHRDESWRLEEDLTCAQTQEPPEGNNEKASGARKTEHTREEENNNERSNGSQTKRTAEPGNHPVGEQRKAPQPKTKETEDSKQFAPIKKEGEQQQNDRKEEGADQHAHTIREVKYPDSEKEGAAPRQERLDDARTETPQEEKEKIDTRQEHTEKTHNIKVGKACNNKS

SEQ ID NO: 999492 - protein, 340 aa, Homo sapiens
MRGEEVAQVKTPHGGGRGRRRRGSERQERRARQLASREGPGRGGERRKRAVERTSAERGKKTQGRAGAAEGQTVGRANNRTREEEVAGRVRMGDEERSNGQRAAAQSERRTKRRRRGGRSGGHKRRRKGGDGKRKRADKATEAEKERQKGGEEAAEKGKEAEEKAKRTHRQGGERRQDRERRQEKQKNVKGKRKRKREKERKEHRRNERKRRRKDSRTGERKRRGTKGTREELDKEREGEEARGQRVREREQERKEEDGRTRDGEEPRHGARQRRGRERHGGEERGRREGNRRRKARAETEAGESGQEGQEGGKRRRTREKGKGTRKSAEQGGAKKSEGD

SEQ ID NO: 999493 - protein, 169 aa, Homo sapiens
MVEKIIGHPLPSKFVLVWTFVFYQDVSVDIPVEYPKDRYSYMVLLVDVSMRVNTDCLEYLRMLGLVRCRYLQERLMFGLRYPDGCVAILLLVHLSVGTDQFMELSVVGVASLYWSQPIIFLLESDDDDHSSTCHSISSHLTSSCSKKYMDYIAQQVLVLRRPNRSLQQV

SEQ ID NO: 999494 - protein, 88 aa, Homo sapiens
ASSAEATVLLDVPAAPRVITRRCMPGGLASSGWTVARRTLRANTLASGLHPVFRRTVRGRLMVGISLVCTSRRVDCLPQMLLPTRSVA

SEQ ID NO: 999495 - protein, 288 aa, Homo sapiens
MLKEEQEVATAEEVPHNPGRPMSTVIHILRSDDLACLTMWSGPCSSTLFMNTCCLGFIAFAYSVKSRDRKMVVRRAPGTRLYVTTIARVPENILEPVIWGYLASHRFVLNHHPRCMVVPGPSDKIRQAVIAGPGALTTCTCIPGNIYHFHSSSLTSRRPRSLCTIERWYIHVKSSLALLRTVVPKARVLAFNPLILTQHWLHQNGDLANYNGRVLIGCALDPDRNTTIHTEIADTERTFGGADAQATPHETAPLHEHNQRPWTAAAAPIKNARTRRDIGGAKRQARRR

SEQ ID NO: 999496 - protein, 220 aa, Homo sapiens
MVCPFVRKHSQAKIVTKYVNIVRRSGKKKPSELVRARPVIHRSVIDAIPIPYGSPFSISRRKDPTESRPRYAVQESSRDNQHGSHENRNGDTSRTSRGGHLNAFETSVRIVSTPSYLPRRPQGGTLAKQTHVQRLKQNSARNRATITHGNMGKVTHANVPAESKVEVNQNAPPKRNRRHSGNRPDWQALGDTANELVAGPHDEPDTGDGRHMYTQRTKIR

SEQ ID NO: 999497 - protein, 183 aa, Homo sapiens
MRRTRLRRGMEASEWGGPVIRTPGALRSPQVVTEAGRFTHGSTLMKAMVLMRQPGRVQEIVGALGKGGGDRLQISQYGHAGFLILDMNGCPHQYLGAFILPKRSPVISDFDMTLSRFAYNGQAMPFFFNILDNSTIISEECRKELTALLHHYYPIEIENRKKTPRGGKPPGVFPKKRGGKKGK

SEQ ID NO: 999498 - protein, 142 aa, Homo sapiens
MGLPVTSTQKQLPWSAPCLNQRGESTKSNHFFHFHATRGATTRPTTTSQTRHRNLRTVLPNTSRPTGHWTSQNLFQAQLYPGPTNLVRTLAFPRRHGQEKHPIDNGAPTVPFVRLGNDRTRIAIAPAIASQFPPYALPCQES

SEQ ID NO: 999499 - protein, 134 aa, Homo sapiens
RPTSVSQAGQGPQLGPSRLGPKKHLKRVAAPKHWMLDKLTGVFAPRPSTGPHKLRECLPLIIFLRNRLKYGPGTQAKELETLKRKHLHCSGSLKSMARSELTISLPWLRIFHWGQLGSNFQAILDQGTGSRISR

SEQ ID NO: 999500 - protein, 117 aa, Homo sapiens
MKTTPKSHIMGKEKYDSNYRRNCLLDWDNDRCRRTRRIHVTRGMRDSILCRGSNVLYVLDENKLVKNGALSLKILGDNGVIPYAKGSAHVRSYWRMIDLRTSSECVEAVRGNTANVE

SEQ ID NO: 999501 - protein, 118 aa, Homo sapiens
MSCRFSLRSKLRGATEALSLLVHSYTCDTTGQRHLITTEAGPETTCGDPQTWDDIRTDRWTDQKTYEKEQQGEQPLGQETRGYQLTYIVNATKEERDKMVDHKDGAPPTYSNVNTASG

SEQ ID NO: 999502 - protein, 93 aa, Homo sapiens
GPDRRSRGSDLVAFNHARNEYGENKILGVLHRIQRLSEYVHFRIYSRLAYANSSWATHPSYESIIHDFMVNSCTDTRDASGKTIDYPGPEPYH

SEQ ID NO: 999503 - protein, 43 aa, Homo sapiens
MLWWGARAGHHNEYIEDTAAQEGCVTEENNRVDNTGAAGSPPR

SEQ ID NO: 999504 - protein, 126 aa, Homo sapiens
MGPTNTFGAVGHEITLGERQVYMARKRNGKIGDFNVPMEILENTRKRVGPAVTEDENLRTRRIVSPSRSVSPPIGPVVNGKETRLEKCALGRVKQFSWVVRWKGKTLEPFLSVPTQRNCSPPVFRL

SEQ ID NO: 999505 - protein, 200 aa, Homo sapiens
MVCSKKPTGARRKTGQTENHTRGHERHSGRRRQDHNRRQHPKPRKQKEARTGTIQITKAPIRDTNPHESETHTERRKLRGPLHGDASESEEVEQHNDTGHTPSHTHRSTRTSPRKDSNQGRNNNNGPNTQQKDEHATSYHTTTHREQRSLTKTATSSTDRDAETRKNDSTIEKRSERTPHDKAEAHDRRQTRTTRLQRRT

SEQ ID NO: 999506 - protein, 85 aa, Homo sapiens
LVELGAGGDARSLTLVVLRIDCLHERLQSTSLSCCTEWQDLYRKKLIDTSVRKRKEYSFQKLINDTAVDEDCMDQRLGDVTVLHI

SEQ ID NO: 999507 - protein, 150 aa, Homo sapiens
MPTTLTKHLSSTHPGLGQAQTLLVVPNNLLRATHNLGPKRRHLAPNGLLTHLSYRLFNTLWSLNVWAPFGLTARSPLNQRGLYQPSPRAHTHLFTFLKKPFKHPPLAGPMPSDGKQLYTSRASNNLSYHILSYTPPVWLTPLFTPPFVPH

SEQ ID NO: 999508 - protein, 93 aa, Homo sapiens
EASVKHIVSLSSRTFPHSRVSYAWVLVVTLEPQASTLIELATLRHGMCRYARIIASLFHDNSHSFQLSCYLMIRSPRHLYCRLDDAVIDDDFA

SEQ ID NO: 999509 - protein, 85 aa, Homo sapiens
MVGSQKSFREIREIVAFEAKDRNCTQLQYRPLIGLAKIFDRGRFEEIIVACTKRDDGNRKERQRCVGYREYFDRFGQLRSGGEWG

SEQ ID NO: 999510 - protein, 337 aa, Homo sapiens
MLGGSRARSVRATMRVRPMNASSGDEVMAGRDDGVSVWQPGRATVFMPPAAPGTQKNTNAPGIGGHTCASYARGGRHRTGTRYSPGKPFEGRSRQGHPWAVSSRLVPRKSLEGPGHHASAHLGAVKTGQSPRVIGRPPPGMTADLMKRGRKKRRRTCNGPNQKVPRDWPKVFQENSIAFSAEIVPSCPSLKAISERVRKPYPHETLPGGANNGFGETLGTYPRLGMAIKLAPYSTGKRGYRAGSQHQAWRRRKVPTGGHPTLVKLATTISTPLGVAHMGSDAMQGNKRCQAMLPGFTQHAIAPGTVTTQRQHNGPHHWRTEHPKQTALGRGTPPSIR

SEQ ID NO: 999511 - protein, 149 aa, Homo sapiens
MAAVVVAACGWRGTGGPAGGRSLPGLCAVRSRPLGLGLVYPGSMSSLPKWSHGDRGRPEGGQPDGKRGSGAEGRSSRANALSTNRKREQGSSCWGKGQNPRRGFRQVAALEEKRPVGDFGNSKPMLGGHYPGRRVNLFTSRLVVDNRKD

SEQ ID NO: 999512 - protein, 261 aa, Homo sapiens
MPLYATAVIHFYAYVSPNPLQVTEFIRITSAISRRVTHNAQNQRERHNDALAKPQGNLVSPEDRAPLKALIGHLFVQINSPLKGQDSPSNSGRGDPGTQEFRESVGPPTLEHTEPRTRSQGNGETHNVKSKPISPLRPHFQSQHKFVPVAQFTTYVTHIFFFHYFIKHTSFLQTFQIVAHFLQPHSYCATKSHLPPLEDAHRGHKPFGKCHQPRSTRYPYVGECGNDPVEDHQPDLTDRHRVRPPLVRNPGDDHSPTPHAK

SEQ ID NO: 999513 - protein, 83 aa, Homo sapiens
EISDALHSSISKILKKIQDDYMLMGEADDEKLALFHYAVTPEFTVRRLQYYSYSYNVNYRRTVKIRAKEHDNVYSVLRLPTLF

SEQ ID NO: 999514 - protein, 168 aa, Homo sapiens
GSCGGGGAGGRAGVLECDRLDALWLVRAVEPWSCWTLWALGGAGPGWASTRALTWRPVVCEAPWGSAWTAMGLGAPGLPKTGAGLSGGASTPGVGPTHHHKMAPAESRAGKPHKEIHHIARVKGTREHGDMEREKGDTQDEKDHGHIEPEENGPMEIGRVEKMKVKTS

SEQ ID NO: 999515 - protein, 207 aa, Homo sapiens
MYESRVEIVWRRIELMCRSEMVHPFNIRQHRDYRRLLLQLGIKCSAPSNTLYLSRINTLESSMCHSLVYVINVSRPVFTVSFLRPHQEAEQMPAPCSLYCPAETVKTIKTLFSRHKPKESKTLQTNKQKRVVAGHQQQGPQEKSACQDKPTRDENSGGANKKGKGWSQYAPQTGDPQRDRGASKQKKALAQQDQNNARGGNPEGMKQ

SEQ ID NO: 999516 - protein, 79 aa, Homo sapiens
KALLSWEMSARVWEEPWGLSRSGFAKRCSCVTRAVAGFHCISYDCLFEVERVIHDYMIINLDKAGITVRALKESCKAII

SEQ ID NO: 999517 - protein, 393 aa, Homo sapiens
DLAVLPVLLGLIPLVMHVVLLVSCLVVRRPMRKCCARKTLNGRFRLELVDIEAAPEGPRESYLIWVVNVIGQIKCFIHLYRGFATNCIDDHFDDNHAILLLKHTGSTLSHERLVLAIRDVGSATFLFAQAGTRHLDTLPDTGKLLKVLQKGSYPPWRPPRCLGERWVLVSEGPQQGYMPPFVSGPFSDKIKTEHENLRLRVPMQHAVFAQGRCGCANWGRPSFGHVYFKVGATQGQHCKGSRPWFAEARHVVGRGKVPRTGTRNGTEQGKATCLKERPCNTANYSVPHKRPWSVAPPSERRRRYSSQTGFSLAACLTASSYQNTPRLGRGPATGIGIATELGVELTRKRPAVAAAQRMDCNCNMQLGMSGTAHGSASASASDKQPPPSTLAKE

SEQ ID NO: 999518 - protein, 279 aa, Homo sapiens
MGKNKLHHKPLLDEAVNTHRRGSVASFLKSVRPRTQEFQTQNRCETLFPRIIKLSAVHGGVMFCNSCTLGDLRRCGSLDGHGIGDQPWPSMVKTAVSSYNTYNTKLTHGAVDARLWSQSTRELKGRRITVCTVRKVEVAVSPTIVHPLSLQPGRQSEAWSQKKKALFESDNVVKPQKANETARHWRRDHETLKKVLKDIIMPRGAWQQEGTNQCACRLALQEDTCRKMKEVEDSSPKKNDRREQTSRGGRNRPKGLRGDNIMELRKREQSQRGDPKSKL

SEQ ID NO: 999519 - protein, 107 aa, Homo sapiens
KSGNGVCMIFESLLHRTSASHINDDKQQLRPTFDTVPEVEGEKEKVFEPTFQMQYSSRDLPSHTEINTDRLLRMPLKRFVTVTSGESLEEQRESCCKRERLGIVQPE

SEQ ID NO: 999520 - protein, 104 aa, Homo sapiens
QQKAAGGGQWCAILPRGASPEAEAPGLTDRRGIQDEGVNSLLRRRGNCREEKQNRLMTKENVSRRCSDDPVRENGRRWGEFHKVGVDAKDILERLPVDVDMLYD

SEQ ID NO: 999521 - protein, 124 aa, Homo sapiens
  misc_feature (28)..(28): Xaa can be any naturally occurring amino acid
MTHNEQLAPRDKQCVHTDHPSATRRDTXHVQYRRAGTTARSRLSQPPDEQAGRTYGHNKAADTQDAPLGRITRWRPHVPDNNTISATHQAPTQYVPRNADAQLCTAQRTNQTASTTFGGQATGS

SEQ ID NO: 999522 - protein, 199 aa, Homo sapiens
MPARLHRTPELQRPGRRTSSAFSCGYGRLLEVDLKNGYGFVEFEDSREPDDAVYELNGKDALRRARDRRSTPGARVAIGDGLQLRKPQWWSVDTTHVGRTSGRDPTTDHLLRTRITGSLYEQLFLVGARAQDSQDLMRQRKRASNLMRTAHNGTDTNLSGCNVQYTLLPPDPDTRAFGPTLGVAPHIQLADILAPMERY

SEQ ID NO: 999523 - protein, 259 aa, Homo sapiens
AEDGRCAPRGPKSELTDVRESADPQGDSLDLESVCALYDMHVTCEAPRRSDAQSMDPRLRDRVYGTLYCCCPLMHPRKSRVMFQTVALCGPCLLVSRPCVIRKLGVVPTDTMCTAWAMGCQKGEGCGQAVVRNLWRHVLHTDCLQSSTRRAPGRHTGYRTHDSCRQLNQRVTTTRRESGHTNRHAREHLHPRDHFHRAHMGGPPMRFPGDQDTRGNGRRGHARDNHHPGRALPGPHDERGWQASKKGPAGWAPRKRGSE

SEQ ID NO: 999524 - protein, 80 aa, Homo sapiens
PDMCHTHYLIYVKASSSDYQPSLNIRMKLVKVKSNPSVPMNITVLIITREYSVESMSNRLSSSSSQNSALQLYLNPLVTS

SEQ ID NO: 999525 - protein, 169 aa, Homo sapiens
VRRLEICFTHNLLSSHVRGVGSRGFPLRLQATEVLSALVEFQPQFRVARYEYLKVEVARRPVEAADNLRSDSRCRKGRLRDMRRSEEFLLRTSAPPCVLEVGSDEGTLAVARNRDVMFPISRGIPNMLLSGEELTVIVPGRKFSLVNGPGYLGGSIPCFRIRPVCFPNL

SEQ ID NO: 999526 - protein, 102 aa, Homo sapiens
MVWVNNQVVIWVPHARTAFKASHGLTSNICVGDARFFERTKHTGAMIQTFHEIRDAGFMWFVDLGGNKCAHDLDSKLLELKVHVVPEELRVCSTGKHYSKKE

SEQ ID NO: 999527 - protein, 213 aa, Homo sapiens
MCEWPLESVSYSIPMAPLCHVTRSTRLVHQEWPRKPSGHATSSDLRNAQWWAVLVRGATVEGQKWQQEQSATALGPEALPCLPVQSPEASRLKGPPAEADLPRSLETLTEREELAREPGPGYCQVETRRGAAKWQPVLAQHRVALELLQASGRPVSHLGPIQAAGPHLEDASFGRIRRVLCDTVCPGRSTPMYWLQVPGSRCLKVGSRNRQVV

SEQ ID NO: 999528 - protein, 165 aa, Homo sapiens
SLATQSAVRSCETWLKYLYANDASLGASDDVAFAISTTRDANSAPGGRLEAVASNEIARMVVYWMVDMTEISWNMRRTPGRIGFQKVSDFASCGREFYPCGLHRAQISEAPSITESQNAFRNKAPFNQAAVDSTKLSTCDPQNTIRILTRHFWLATISDPGYLRL

SEQ ID NO: 999529 - protein, 147 aa, Homo sapiens
LSNLAAAEWSPAKTAGEKTQRCRSAINDGGNPRIHPSDIAASVDPWHVRFTEAVLPRGSSQEIRKFAHYGRMANFAGLLSPLSNSRATITKPGSVCPRRRYRQLLPLTRKCQCCPACSHEYTAYLTDCPRLHTIHKRYNKLSEVCPK

SEQ ID NO: 999530 - protein, 404 aa, Homo sapiens
AVRSSEEPKSERASTEARAASRSADPYSRACLPHCAGEIRPGLPGERAPAACDHLAALIPPTNRHRGPEARAEEEEAMSEAGEGHLPTSKQSIPSREGSATGRRPCRGTSARDPRRCANESLGWGTRVDAPLGGGGEPRVAQVGLTCDAKGNNDPRVEDSCEANGIQGGETRRSHPDLHEEAKRPHRSEEKKTGRDNQRVSRNKTRTGSRGTRGTPKRGPQPGQNARTEGRTCTIQEVKQARQKYVDSVPTDQVEQLTEEEMPHHGKGTCSELVATIKRRRTREQRSRETRNKTGKEREHNTEEKEETRDTGKEENPEEKRHKKNHNEEAEQPQPITGANNAGRGSPRYNTQIKYRTTEGTKREHASREKNQEQRKTHTRSKKKEEEIVGAPDENRDGNEPQQY

SEQ ID NO: 999531 - protein, 84 aa, Homo sapiens
ILEAEGGHYVSHVSLLNYNSRWWNVLTLDQGVTTLSSFQSLEAPLLPDTGVVQSVTNVTYLGLSKYPTLHTIPITRTHSTTHLT

SEQ ID NO: 999532 - protein, 95 aa, Homo sapiens
MSVEEDGYLPSVYIEIPGPEPFSLGLRGPYLEGLRIRGGLPMGSLSPRPMWWLIGAEVRVETAKAATRMRPWSQLWDPVADIRNAEGFRTKEPLP

SEQ ID NO: 999533 - protein, 246 aa, Homo sapiens
SLHCLHGGVGAPASAARDRAGSCAAGRGRRRLKRERDADATVGSRAAPGRPSLAVARPRPWTGSCGSPFPLGRRRPLKRVGNSCPGGPPWAHRSRPSLPPAGCPIWAFLPGGDHTTLGQHTGTMMRENRHRQGIREEPKSFYPHWKDYITRCLFQEKPPGRAPGTHLSWTKHTWVDPPRSVTREHYWSSHYYIFRPHPLIVTSAGENTTVPHFGPPAVQTPRTCGHISRGKFSRRDCDRRTRRRYA

SEQ ID NO: 999534 - protein, 190 aa, Homo sapiens
MIRVLEPLQRLYLWRPIVTVLSCNVLNGPMIPGIPPERANHLTESVPEGSIFFGWDTSSFCVTYRHRNFFFSDFTGYPVHWMSDHLAPCGHQRLEGCGEFPDPRPEDSCTLGHRLLDTNYPCNVLSSTNAIYGRKGFQWTENPAGYQVCYPPPERGRGASISCKAGQDAKIAIPRFLDYSCCETCRVLVH

SEQ ID NO: 999535 - protein, 463 aa, Homo sapiens
AKPSPKPTPPYYQTTLAKPCYPNKVKAHSNIATPGAIAYSTRTGATACNNIITESDNHSTGTNPIYRSAIKCNSTQQINVCQGSSPKQLKTRRRPARSYRKQQLNAERHPDLCSENQVGTALASESEAHEPYPEPWCISVVCPKEEDSLYELQACTSCATRDTQSKIHRVDYTLVKRVVEFPKQGNTQRHIEHHIGENTTLGIARRGTKTRLETKPRLRLSALKDARTTEFTRQGRLPSHQPRRKHNPYKKNPTQESNYSLKLPYTRHNIGETKDPEFKPPLIQEHGKRINSDDKALNGTTSRLESKASIRREVRDKYTPPVQGPNGHCSSTSQPWETEEPTEATQGTPSELAEGTRKPQRTQHTHATSNTPVTQRGTKHPRQHDNGTVRDHTKRGHTGITDDTNRWDDRAHTETKTHERPPGAERDDRETTHDRRESNHTPDDRRSASSRPEKQHRQHKSTE

SEQ ID NO: 999536 - protein, 139 aa, Homo sapiens
MSSQKGYVARSRPQKHQNTFSFKNDKFDKSVQTKKINAKLHDGRMSALYTKFLSGVSTYSTYKPLSKPNTVSSPVLHKAPVKDSYHTTVHGHVPVNLKFCAQMWQRKKTLYSMESPSVAQAWSAMAGSSDHTSSTPLYK

SEQ ID NO: 999537 - protein, 88 aa, Homo sapiens
YLVLYLNDQVRNRYIAKLVSEDMTDMSDVLSSKLFPIGHHQSDLIINSPAMHVYAHVLRSSLTRILKSLFVELTIIDRHYCVLVLSSI

SEQ ID NO: 999538 - protein, 370 aa, Homo sapiens
LPQKFFSSQDFSEPFYHIQTYAPTTPIRRALAPQQASHPLNPLEVPLTKTHPYYSPSGVSTHLSITNRSNRKQPNTTNTSQALPLSTHLSHGISSYYPPTSLRDTSSLPFTIIRTRIYEINIKPVEQQAFLTDYHVHYSAQTFLTHPASFRHTHYLTPLPSKTHSHKGLRKRLTDPELTGHTQSKRSAKQQMNPEMTIPKYHARRGRNHHSKQKQHKKNKSRKRKPKGTNDIAYERAAAGRRGAEGRMIPPEPTTPVQSHCYGHRKRPTCPKAQGDRTNEMDDRRETRDENRRQGRRRQQIKSQTKRQTLEGSNKEAHKHRTTTRSTRAAQKRKQTTRVGMYKNKDGEHTRSQREERSPRTGRGTQKRRK

SEQ ID NO: 999539 - protein, 134 aa, Homo sapiens
VHAVTVGCAEGYLLLIVECYNIIVSSCLLQASIADSPVAPAKFFLLIILAIIGAREQQYQTADSAEKLASWIKPSRSKPRARDTTWERNNLAVQNECRQRDGSDRDAHALDHLFDKWGRARRWYQNLRCRPQVD

SEQ ID NO: 999540 - protein, 251 aa, Homo sapiens
MGANAEEYEELMRMETSYGRSIGNSRSFTCFLKINVNFGIRRTTLILHGLTENSKGYVTKRRFCGRSSGVRQDFLSGAMHEDYKFSRSTVILRTSRGDLNRERRPTIKTCCLKKRVDNQRKCIPIERTLDTAHRKWQNTLVRVHYQPNCSQGQPQQLAQEFHSTQRQYTTHARTRCDSSHRKRGGDRQDTKQDQRKKEGQVRPSGGSLLGKKGSIYTKAKNEREKTDNARETPRYTTREASQSHAPQTRGE

SEQ ID NO: 999541 - protein, 271 aa, Homo sapiens
LSAENRHHYRYVSSKVTERQIGKQRRGHGRCYDSHRSLEIDMEYNFDLGTINAECRIRKVICRHQGNGILFKTGMPHKCYHGKTGRVYNVTQHAVGIVVNKQVKGKILAKRINVRIEATHVKPRLKTTRRIKLPCTTCDTDHTGNHTPKKETKTQTPDRLATPHRSRTTSTKNNIAKKRCHTGAQQTEDAPNEGETETAVLRQTTRGLHKHRDLETDNAQHRRKRPPREETTQDEDEENSYRKGKQRGHTNEGPRHNTAAPRSNAAAPQVG

SEQ ID NO: 999542 - protein, 126 aa, Homo sapiens
DSARRCISWRHLVVMPVACAPLIEQTRGLSIETGAGLGVVYLSGQSKSTKCRDTGSVKCLRQYGFGFGYSKQLDMLHGGIIGYVKARQRADLLAARRLASIGQDLAGLECFTQHVYRIQGTVRVRP

SEQ ID NO: 999543 - protein, 204 aa, Homo sapiens
MANKHKKRAGQETKTRRKTQKERQNETTRTGQSKRQRNRETTNTRHVRQAIVEGEERGDKEERKRRRGETETKREEDKATSTRRTPNRYKKQEQRGEEDKTEDRAQQKDRRHERAEKAARQRQSRKREQEQDSRANYTEKTATRQGTRREEENAKSSEEEQRREEARSKHPATTQTNKQETEDSHRGQRETRRKDKEETQSQKQ

SEQ ID NO: 999544 - protein, 189 aa, Homo sapiens
GKAAAMARSSGGGGGGRRRWCLLLLAPAPAVIRAERPPAPDEHCWRAGCALSLAVRVAGAEDVDALRMPSTTPDSRDTVNIELMLAQEMWPCQGMAPEEDGAAEGDENRNSMMRYWLWHTRQKEQIHLARNSTFEGAWLLMDSQRRYNPLQSNWEHNQASLFFIATKEWPLLKRPIRTAWGTNTTFRHV

SEQ ID NO: 999545 - protein, 68 aa, Homo sapiens
DEEEDEEDEEDEEEEAKITKMTMNEEDDDDEKLVLAQSNEYIWVYREHLSPPCTQASLLLKKEASLRM

SEQ ID NO: 999546 - protein, 70 aa, Homo sapiens
SFRCRDRAPSWTRIHAPGIVACASRSLYPIVAQPFPTWLEVRSIMIDVKTPAAFTNVAYSMGRYSSQRIA

SEQ ID NO: 999547 - protein, 345 aa, Homo sapiens
VVPALDTEPRWGSPSALQGPEMRQWRRHEGAGQPAGHFSARPDSPPRAGREILGGTIIRGLRVNPDTGTLTRRIERAAIAQGEPFLGRPRPHEITCQRSSKRYTPWELAPRTALDMPLYEHEDQTPGVKDTKKDKRIERLTDPGETSGRDVHRVKDNSLAQTPQHNGQLGRSEGSTTHSANETGETTHNAIVRENAATPMEKNTTPDEEYHATYKPSFDTQPPHHEAKMTHGNDHTDNSGISLNRDCGNPLCAIPPDDREVEQQSGSVNMRKHIPTCRDQHNSKPDARRFSQPIHDSLEDNSVLHEHIRRITHISPKITVFSERQPQLRGDNTLITTRYGHRTLE

SEQ ID NO: 999548 - protein, 91 aa, Homo sapiens
IVCPTKQPIWRREPTRVQLEVEINNRLDTVFIDRCSISDHVTSTVSDSQFHDEWMRDSSYNENASQLGISADYIGEEVSYVITASMMIHED

SEQ ID NO: 999549 - protein, 171 aa, Homo sapiens
  misc_feature (129)..(129): Xaa can be any naturally occurring amino acid
MREKIVIAVRLSHGTGRTHDRGDETDTSPGHEGRLGMSLSPSASVSKLGWRPLQGPYEKGHNPPLEDFLRKAHGWTPGSRTPMFNRTDAWYRHLVRTRGRFVKTKGITQGHGPLGGAPTHVVPWPGVRXTNTSKECFNESAVSNRQQCTSLHGKEVYPGGHYWAWKPVGSS

SEQ ID NO: 999550 - protein, 72 aa, Homo sapiens
YRSSVISVRGPSILVLRTMNVQFRIRIATVFMILCKLYNVYKKLVIKKRNPRKVRWTYSIPGKQAGKERIQW

SEQ ID NO: 999551 - protein, 113 aa, Homo sapiens
MTTGPELLPKPICGLDKQHLLLERMMMMKFQILWQNFDEASKEGGKLNGVNFLKIKTEEVLGAGILYYDWFLRKFAFMGSGEKSRSPNILRHKALGTLAGSFKFGYTQFNLGR

SEQ ID NO: 999552 - protein, 195 aa, Homo sapiens
MVWSYDIKLVFLVGCIVCERLTDDIYEIGDETIERPRRHYCHSSVLPMNLSTIPYRPSKVFSGTRPHSIGKQYEDDHAASDSEPIEISSIHFTARKVVLTVHRIRQTHHYDIVVHDDVVPLKVHHSHYVANRYQERSIVPFYEEAFIQLEFPLILMAIPLRPTQLKRQEFQFHLCIIYMSAFIRNFDFRKQFSRT

SEQ ID NO: 999553 - protein, 119 aa, Homo sapiens
MVIVRNSCVFVPLNTILGQEESDSLEGGMDASGLSEQCHRRLQALSSCKPWITQIDENRIEAFSMSSLKKSSPCVDPGILGIVQFTLESCLFQMKRYVEQGSLIRQSLGYKTLRWLPTE

SEQ ID NO: 999554 - protein, 106 aa, Homo sapiens
MVMGPRGQSVEEHHTVAHMCPYTVKRTQPVLSKVVKSWIHTSQNHFQTSSGDELTIRETESEVGLTVLGRMILLRLRSQAERSGLSHGVTFANTLLTWLDELVLGM

SEQ ID NO: 999555 - protein, 227 aa, Homo sapiens
  misc_feature (196)..(196): Xaa can be any naturally occurring amino acid
MNNSVCGQRCLNAHKSSRGSEQAKITHTTATPFFRRYTTQHLTIRSAVMDTHPHKEKRAQKHEPPHFCLRTRVRYGALLGETPCDPLHHPTCHLSMWPAPGLAPQEESVTVRRTTFRCDHILSLVFPIKAQNSPCLPFMTNYGCPLVDITLDPPTLYRAIYGPPVLGATTRARLFFWGAQTTVAEYLEDHRHGADXHIRGGVNSISTKRGQLYHQRRAARLVNTVSQ

SEQ ID NO: 999556 - protein, 416 aa, Homo sapiens
IEPRHSSMGDRARLHLKKKKKCSWAWWHDPVFPATWAEAGKSLKSGRQDGWLVDAGRFARHFPSLGATKEGKLPGLQRQKQQHNTRQRTHETPLYAFHTAKGILLLQVKNHLRCVYTSAATHRGAVASSHNHTNSTPPNTQGGGSTGRTKSLVCTHGGKTRAESPGVFTPKEPLFGPHNKHREAENKETPPLFILEPPLYNPPQIKRGAPVIGANKQLCVFDNNDNWVAPLLENDEDDHPTIVLATNTLRPVDLLLNTRTYNSHSVGEAQLHPTSRFNYNHDGGVTTHTCCAYHDSPHNNFVTPRSRHSGGPTTTPYSQCPLDVSRRQNKKQHTTCDRRALIERKRKFECREASKYNRAPTQLLSGQHTDRQLLTRGSSNNLHAPPRTIYEPGVFETTNISRRHIGNSLSHTPPPI

SEQ ID NO: 999557 - protein, 68 aa, Homo sapiens
MHVPWFVKSHQATPSFNCNKTTFVATVAGEPGKWLVPKAQRGGGEGAPMFGRPAPSSRAPAKCRVQRL

SEQ ID NO: 999558 - protein, 104 aa, Homo sapiens
MQRASRLKRELHMLATEPPPGITCWQDKDQMDDLRAQILGGANTPYEKGVFKLEVIIPERYPFEPPQIRVSLLSIYLPTHRDCWEESDVVRVIVLIQSATKEVL

SEQ ID NO: 999559 - protein, 108 aa, Homo sapiens
MLVGQKVIELLRYEDHHLGFSVNRPWIFLSGHFGLYRCILDNFAPEVYYTLARIVCEGELIVVNNSASYITQETQAAISSDIKVQTDYITGYSISAGDTLCLPYPTAT

SEQ ID NO: 999560 - protein, 66 aa, Homo sapiens
MLAARGRGVSSVTLPSRVGPPSFHPMASPCCEGTSITKNQWVVTDYAREYVHTKHEMGYCRCESTW

SEQ ID NO: 999561 - protein, 458 aa, Homo sapiens
MSQPKVLRSQRWVLSVFLARDSGSEPASMWKDEGALPYGVSPIQAGSTVIRLSWEYRGLVMIQHRSREARAVPVYLRMNHMEWTDVLRWRGDATMYEDDLPKVSWFACEQIDGVLQDGNRDSHYGRDFGGKQFITNLGYIYVDEKPNHSPAGPLGTIGTIDSARYFFYVQEKLCDALPDYTDNKCNRIDALNFINTIGFRTFVRRIQQELPKVANRHTRPFGAKRVRRPTDLRCRYPRVAFSKSLGPTCQSSRGDVGTTVYYSLILLIFMRLQREYGEDNCRPTWRSPSSLTWRASTTGKEAPQLFWNRGKRMSATGVCKQRGEQKTSLGRAHPAPHHSHRATIEGCTQRRDVKGLTGTAQAQPGSALRSGKYPRGGIRGVNMRALGHGLATPRNKDCADRGGVEHPKQRTRDREVLTKTRGVIRQREFGRNRGLAPPPQKTAWTSHTPQLGTHKEHV

SEQ ID NO: 999562 - protein, 272 aa, Homo sapiens
MKEEKEETGSTKGRSHEQQKNNKKNRSSNSIQTKTTSQEQAEEETTNQREERGEAKGKKKGEKEEQGEKTRGRERTRAEKGEEQEGGGKREKEEGRREEEQREEREETEDRADRGDEGRRERRRREEKGEKRAAETRGEEKRGAKEREKTRTDERGERRREEKKETERSKETEEEEREAKRKREETRKRAKEKREAKRENESEKGEEGREEQRERAEGEGEEDEKEGRERRMGERRKGEEAENEARKAEEEREKEKRGARGKRQGEGQEKEE

SEQ ID NO: 999563 - protein, 107 aa, Homo sapiens
MHIRAKERGKHIVSWKRSKGIEELDKKKRVCSASPTAKASEAGIRASNSIKHKRHRTATGIKHRSLRMHKGLGEAHGKIKDFRTSNKRLANADKLETGTLGTCMHDR

SEQ ID NO: 999564 - protein, 125 aa, Homo sapiens
MKCRPGRRAHEQRKRGDTTQSPPGIHGTGAARPGVDENNTGNQQKATGKRRGGARRVTPPQEGPERKKPERERRPGTQRNEQDTKHPPQQGEKRSRDNHKNRTSRTHPPGRGPDDQTRMESNRAK

SEQ ID NO: 999565 - protein, 161 aa, Homo sapiens
MQRGGIKVQDDCAAAFFYIERTTVLTEWPGLCFPICLIYRGLAGKERTCMWVKEEVAVEEVGWDDSEIYSKTKLAQGVLQAVMQFNQSCHFGSWLQLISSLCGTGTDFCSMVPIRPAFHTSSTRDKNTKTILDEWLPALDARNTVDYTTPPWSSRDPQEYV

SEQ ID NO: 999566 - protein, 203 aa, Homo sapiens
MGGLGAPEKVFKNHAYGGGGGTTDEAKWQHGVTGAVSPEEESAGHLNQRARGNFPPQIKKTAARGEKTSSESFVKHNIRKREGSSPRERSLYKRGVYLYHTERGSSQEAARSLQKIYQQYIIPRAPARPWGGGQTNNEAKNEKKQQGRQQPNDETNTKKGRSERAARRDQQKGTSKTGKTTDQKDNKQKPSEGQTKRDERTTE

SEQ ID NO: 999567 - protein, 84 aa, Homo sapiens
MVGFHKKKAEVSIPLTRTLKFLVIFACWTNLKKGQTRTRRGYSYAGALKNDCTDYAHLQGGQAVTYWATKAQIMTTEYIACKVD

SEQ ID NO: 999568 - protein, 304 aa, Homo sapiens
MKAEHLLPSHWLPEYSLKWTMKARNFVLLYEKRMATDGCCCLLWVTEWKGYVVRISVWERLNNGFPMYAGCLDPVARVRLLTVRKEVIPVEQTNGRTVRRETRKSVRGCIVDANLSVLNCGYRKQKERRIFLDWLILAVPRRPGGPKRASRIRKAFQISLKNDDVRQYVGKKALRSQKVRKLGPKLPKIQRLVTPRVLQSHTAGIALKKQRTKTNTGRGLQNYAKTFGQREMKEAKEKPPGTTLAKRRRIFLSAKLLLLSSESSQELRICGVTHINYTRVWPTKKQNRARTTLGRPPLHKKFRP

SEQ ID NO: 999569 - protein, 105 aa, Homo sapiens
MAYRKKCYYLVSGPDLSWDTGMMFSPANDCQGVQILANLNVHTDRLYNRASAILAKLAWTNSIPDKQLVKSLQWIIHLNLMEIVVNETYLNSSESYANKHVSDAM

SEQ ID NO: 999570 - protein, 125 aa, Homo sapiens
  misc_feature (119)..(119): Xaa can be any naturally occurring amino acid
DHAFHLSRCVFYLLIGKLLLLLALDHVSPKLSPWLDHVWSTHCATDVRAPEQNVIHAVARDVDLRCKDRACLLACCHCWGCDAKVLPPGTCIMRRRDVSGRSAVLSVRCMPGTDCVTLXMLTIET

SEQ ID NO: 999571 - protein, 134 aa, Homo sapiens
TPTQLAFVPIFLVGMVTTVLDAESAKRCTLASKGYVSRDPTRKGMANAPSWTTEACVEGFCELAIHYRANIVSNLTEAHAPCHLLGCLRESDSVICVLVRCGDPRCEDLVVVSSKYPGVIGIGQPILACTVKTD

SEQ ID NO: 999572 - protein, 203 aa, Homo sapiens
MRKRGLPSQGIALESSDINTWKGLGVETVVINHCGYPHFAGNILKNQAKIHIGEPSILIAPREQQKTFIQRHQLIYTVDTIPHGLGLGAWSPDSSLLRIEVDRGRTFSNAWVFIPIDIVATNPKEGNCPLFLELLQQHRALMEKHKAYTSVRAGFNTKTLGTFPNLEGTAPTQDTGKHDYSHGNNLLIKGEEASGHIYHFSQQ

SEQ ID NO: 999573 - protein, 176 aa, Homo sapiens
SRSRGGDMLFPSFSCFFSALTTPFLGGINGSPYRLEYAEQFREIDKERTSSKEPEQTTRPSHKRSTHTAPREQQTNGPERTDAETKHDKGRHERHTRAHHHSVKHDAAKRVKHSKRARITQRIEDHKGQKEKPINKKQAGGRMKRKLSQQEARQDSDTHRTTTHKREGEKEKKHEK

SEQ ID NO: 999574 - protein, 113 aa, Homo sapiens
ARTKRRNSELLAEAALVNRARLCGKSFETDGHHVEILAVAYVHVMHCEEWYRGKQQVKRIIEYEENCIAIEEQNFVDDAFWEIARSYPKAEQRQIVINQNPQIVKIMHGPSHA

SEQ ID NO: 999575 - protein, 93 aa, Homo sapiens
TERERREKREREKKKGRKQKEETREKEENREREQKDRHGGRGNERRERARRRESGPREGGGAKRRREREKEEKEERGHNEETSSKERREERRD

SEQ ID NO: 999576 - protein, 133 aa, Homo sapiens
MLTLGALAHRYGRTLDRHLTLRFGYHKITLVVTCPKFNEVAAQQKNLLADNGTDRTTIHWGADSNFGSSNNPSCGINTLANRGVRGNILPSVYHLRLSGGAPAQKERSSHYPRTKTPGGGHYKGKRDPGRPHL

SEQ ID NO: 999577 - protein, 336 aa, Homo sapiens
GHISSGYSVERLVVYSSAELKGSVDISGLQGSSIWNYTQVQKTCLEDMTPGPLYSSPEGSLYTKLDIIANGKLIWNMQGNLVPANISSTHGWVYLALQAAENANIARKTFFALKSRFIASWNITKFVCTTFQVAGTSGPLPAWWDEGHLNGLVELPYNGFLEHYNLDTLKGPLLGSPNTGTSHSTTLIPAKAQIKHCCTPRMRAFTRPTLLLELLPNTRSRLIYHQTSRRSAKKPVPPFSGQVRQLWPRFTTLALGGHLKATPNCGRFIQGPFLNVQSKVGTPLQVAAHTFNRGRGHSAATRAPTPQLRQLGAHKIQLSAGIGPAQGGSQTGFEHH

SEQ ID NO: 999578 - protein, 151 aa, Homo sapiens
MVLSHSQHWRSSRVTLLLNNEVIYCMAYSGYGVHLTPWVIRCHSQYIIWAAYDPEREPSVIMNDNLNFILMDCIGWAAVAITRVANLLLCMYAKDDRGLLAMLNGQGPGFACSHLAGAPHPNVASILTAIGRKLGVTRKSKCTICEAAWAS

SEQ ID NO: 999579 - protein, 208 aa, Homo sapiens
  misc_feature (52)..(52): Xaa can be any naturally occurring amino acid
  misc_feature (55)..(55): Xaa can be any naturally occurring amino acid
CSVTYVLGFLYPIIKIARLGTRVFLNNLHDVHVLMVITGDLMQSGSPRRDSXIQXYALALRVISTRRGRQAVRHAWVQFGTLPGPPYTLHSSLRRSSFAPAMNDGLWKEQLSHLLSGETGPSEKARRSYRSVSLNDATYQAVAGQRISSSDIQESRADRLSWGKNPKTPGKAANGPGRNKLEPRPYMRSFMTLRYMTRTEPPSSVTFL

SEQ ID NO: 999580 - protein, 184 aa, Homo sapiens
EDVLRRKSSGFPASTVLGRIPGCSFLDPRAGPLHRPSASVTLFTRNRSDLPHGAPSAALDAPRIYRLTRAGISYNRPAMTDIDVHASQVVGQELPSRISESRHLTAQYQNWKLYDILTFTCSMCLLTCDRRCMCALTELVPKYFRSPNLMQEREHAVRNCMNAAGTNEVADIFLQRYQGNQYCA

SEQ ID NO: 999581 - protein, 152 aa, Homo sapiens
MSKRALIVHVDCPLNVWQSSSEHGLKADGRNSLGKRFLQKNSMINMNVSSKSLESDGIWGEHDVDYLSLVRKNVTLNPDPNEIKQLWLCVKGRTTNELLKKAVSGEINDNAMVYNLLQRLFSLNGADNLNHLTLSLLTMTTLSECEYVGTMI

SEQ ID NO: 999582 - protein, 130 aa, Homo sapiens
MTRVEQYENPPHIPPAHIIALDHASSYLCPPVNTYSNPILRQQESSTEGRKTIRLASPGPRLPILADSGKTQRRGIRAGLRRQHKQSTGPEPDALPTKDTRGHEPKGSKMNRAHRNTHARQDKPGVPGTI

SEQ ID NO: 999583 - protein, 143 aa, Homo sapiens
MEPPIGPYTESSCRIHLGSRCLLYAKGPVTEFHHRQVIRILIARCSIGANTKEGPRLAVLDPVRIITRRALDIAVLFSHASHLASVGTSHIVTERKQVRGKPSNNLRIRSDLSALENARDDTLVSLLTPIDAYFWICLTGQLT

SEQ ID NO: 999584 - protein, 127 aa, Homo sapiens
QCVGPAEVCLLLQQCLDCATDPCGTLFLASDLLLRIILSACQCSVVPSSRARSPVFFGPCPRTVLVVSSLSCETKLIELPRGFSPGVSFATCSVVAQRGAKQRTWYKLCTACKCPPSLSHSRLLGPA

SEQ ID NO: 999585 - protein, 99 aa, Homo sapiens
PGVIPSCAVVLVEQRFFYLLSAFSSYPKLRACNPNGKIRRTIGHEPPVGPRTIFYGCELKADEDYPLQGGLNDEHEHQLSLQEPGHTVSRALGVAHNAT

SEQ ID NO: 999586 - protein, 477 aa, Homo sapiens
  misc_feature (118)..(118): Xaa can be any naturally occurring amino acid
VLSWRVLDKRGQPCLIPLMIYESDAAYDPVTPYSLADLLHYCNSSDDSKSHGTRCPLMHTIHVLQPAKRYQADSTAALHSQTTLHYQAYSLPPNRTCVAPGNSLGTIGTPIATADLHXQQRPSTKSPPRFRDASLPQGIASRIPNDGSRKRQPGLATIGTYTYPIGEHQFANLEPQHANRPLIDTTNTARFDTTSKAHQHNRPLVRERAKHFTRAPMMAHHAQAKRDTNEEQKAHPTIMDQLRDNAHSLSHSLADHDKTADATTRTPHGNNHHAQPQFGATTTHSSDKKTINTHIAKLTKDVTNNFSYDVQLPVIHRQERRAPPSSHGYNPNQFGSRHNKENADSDHRQIGRRTLGPDQHDAGTDSRHTSGVTTKSGNTKVAQRTKRDTTQAGRAPCSTHRTRYNESTNHKNDVYNRDLRATNKKAERIDQYVATVQKETYKDTRSHAHAHNRTAIGHTTESMTRELNQCWTNITQQ

SEQ ID NO: 999587 - protein, 68 aa, Homo sapiens
AAAELRVGESGGKFVLGRTRRVCGLGENASCKKQLKLEDRALQRDILQNNLQLETIITDMAKHTELAT

SEQ ID NO: 999588 - protein, 184 aa, Homo sapiens
MRDPNERPDEANCPQYVDFVCAKLVGRSIRRSTQMLQVQRSQSFLAKCSEEVEDLVSCYDENGQYLIRLMAEKRDKARFVIVDIGNTLYPLPKGGSTSKEVSIGSQMSPEEGSFGRIRSSFVRLRYLPSKIIMQNHRVAMFHMRDRCEGNWESMWTYITGCEIDKAGLMIEKAVKLKDDMRKGV

SEQ ID NO: 999589 - protein, 107 aa, Homo sapiens
MYTSRMLTQGLGVLLTRFNKFCWEHQGFRITVWKFNQSDTILYGVPWERERNTAITAKHMSRTNTTNGAICSGATGVSADPTPGEGTLFSNTRPVYQCVCGPADAPY

SEQ ID NO: 999590 - protein, 311 aa, Homo sapiens
SLARRSSCQVDMSFFKSLCDGNSTCTHLLVDALRGKTVADPGNAAYVLLLRIISILVETDLIQRKWFALWRSRRMLALSYHLSMPAQIQLVPIPLETVHAGSLDGTENAHDAVEGLFAKVHRGQIQTYSFLSMKFACPQILAGEIVVRALCKVVSADTGLDSSTVDEVPGASSSASARFKRVANSLHDLGGLRCRFGAPSAVIFSMDGPIGHEKNTSWGPSVGAREDKETFLVMAPMGISYRYGPPVKDTSAGRPPDSYNRYPVRIVAGVIRRSGGNPRLVYGWTYLGGLLVSLVLNDLSTVSSLGALGSS

SEQ ID NO: 999591 - protein, 113 aa, Homo sapiens
MCAWGGNLGYSGECSGASWDSRQFSVAQASRCSWETTGWPGHHGLGKFLGDYHNFFWRNGSSGSGPPRLGCRSGRRSGAHWEVSGPQGSMAILSAVRLPQVSVGPTGCPTHTN

SEQ ID NO: 999592 - protein, 77 aa, Homo sapiens
ERRKEVVCRMATAAYEQLKLHITPEKFYVEACDDGADDVLTIDRVSTEVTLQSRKMFLLQLSQDQYWYTGHNPSGGR

SEQ ID NO: 999593 - protein, 270 aa, Homo sapiens
EVVMVAPEAQVLSSVRSPDLEWYEKSEETHASQIDLLETWLYVQEPLKRFGVPFVQETADGTSGVAWACEPWTAAVMVHCVNYYIAVSCINGQTVFPSALVEDTLNDNLLSEQPFSPGRGGLLKKKPLGPPLDGDAVGECANQATGQESLDELSSRASWEGRIFCNRSLLGTGGVLDAPWVANAFKAPQGVLLHARLVFCVAPLLLLEPVPRKSPVCLVCAVLYLGPIFVADCLVAQLLAHSTPGHRRRGTGTRTLDKVVSPELSIECRG

SEQ ID NO: 999594 - protein, 34 aa, Homo sapiens
MARCPEKYLQRPGMSKALNAVINLALVLSAPTSQ

SEQ ID NO: 999595 - protein, 101 aa, Homo sapiens
RTDCGSGLGSVAAFALDPLLVRAPARVSSRPPVPGRRARGAMACRLVTLRPSRQWCVSREASSRRTHGKRAKSPAWWFLSRLGVVVFSTIAVVRRVSAVAC

SEQ ID NO: 999596 - protein, 215 aa, Homo sapiens
TERHDTSRSVTEVSPIDDNAENFYHMHYRASGYDAVDITCELSPYCCDTDELRHYRVVDSEALQGYEEKIRLTWTRYVWLDINGEDGLDSVESRKAPSLSRSNPGQRERLERHQMEQGQGIDISEAEVGSRSIQAWELLEGNRRGHYACPIEWTQQGTHDVGRQKRPRIQHIRSERGGSADRCQCHALLAYCSKIAPSGARGHEQNGGEKGIVTM

SEQ ID NO: 999597 - protein, 235 aa, Homo sapiens
MSKTTGLRTADREMRDRGKAQPAKGTSGTLDIITHMRIQRKACMSTQIANGRHTSMVDLWAPFRRKALAKNQDVSDGRPVNLTLTKGLNSRRYTPILYPCHGHPSEPVNDGDLSRNVAVLRYTDLNAQGNSPQIGGGAETLVYTQRVANQTKNMHRSKGYRSSPSGDNSAECSPGTVLIDQKDAHLGGKKRFRSRKGLTKDLSHRKMWPSALQMCERHALRGPPYLCEAPVKTPC

SEQ ID NO: 999598 - protein, 338 aa, Homo sapiens
MPPACGRHQSTPDARTNARTRHTPVKTARVRSKIAPICLTAPEVRDTPLPPLKYKFCNLTCIPPCQHNTTLGHQHEEHLLASHSSFLDTWAPDEKAATQNLRLTAPNNHHEPSLTVSLEAATRKAKETKGTQRTYRNRHTERRANDQQNPHHNGPPRYGTGRPTIGLGAHNRRSTADTDQKPPWQHTYGTGTYMGKKSNGSRAPTIPVTSKQHPDRTNKATNKDEETRHINAIGNNTVSPHRLRRGNSQLKDNDQRSHQNNGRTSSTPTAAHRSALTHNSEENTWRTERPPYRDPRTSNSRERRERYRRPSDQNSDTEHEHTEPREQRQQTQGRTDHN

SEQ ID NO: 999599 - protein, 111 aa, Homo sapiens
GERDGAGARAAGRVPTRLRRRRRLVGGMAAVVVAAAGVRGTGGPAVWPVSTGACAAVRSLRPGPGARVTRAVARLPSSAPAQGRSPSGGRRLARQGSGGPRAEAQRPKTFS

SEQ ID NO: 999600 - protein, 351 aa, Homo sapiens
EVRWRLLWWLGPACRMDDLLRCAPADASCPCALCCLLCLCLQCWHAWGGPRGRRAGVAVRALLASAGRGRLALPDIFSTAGPRRASARAGGEPAEAFRRDITGFFTKRSCKKSTSNPRMGSHYLHWNWSLTHLLDTNSFQENTYPFFNAFASGMATHPCGAWISPLGYTFTFWHTRQRPFGGILTFILARLNSHKLCIVPFLSPLGLNTPKGLYILTLLVGTLLGGVGDPHFPRKLDGRGHKNRYMNYPESPIFPSITQGTGLLFPSSASNDEPLLQILGPRLNALHNPPMAKSVACDTLSSTHMHELPNVFPDWQHNHSRGFAPQVFLVWKQQPLVFNLANLLSGLPGNT

SEQ ID NO: 999601 - protein, 216 aa, Homo sapiens
APNLRWSTSRPLEHQHLSPRDAARYSAADYDDEEETIMNQEKLAKLQARQCALVGKGTARRKKKVVHRISAQQMTKKLQFSLKKLGVEEESRGIEEVKYVYESQGTVIRLYRTAKVQAISGERNTCTITGHAETKQLREMLPSILNQLEVRTRLTSSTETGRSSAPNNSVDGTSTTCYLGAGMHWLTDSSTISWTTHCMRLPRMSAHLTLTSTFCT

SEQ ID NO: 999602 - protein, 267 aa, Homo sapiens
MADLEEQLSDEEKVRIAAKFIIHAPPGEFTEVFNDVRLLLTNDNLLREGACPCICSSYNLDQFTPVKLGQVMKEQVIDNRTWRLGNMETFSDPKNRICLKFDHSKEGRQLIQDPVKSTLQLNSWRTSVETALRAYVKEHYPNGVCTVYGKTNRWTANHYCMHRKPSVPSKNISGMVVGGPTGTLRVTPSTTQVVGILNIQVQIHEHGPLSASESYRYTKIPLTVVYLAVQTAKELLQIGEAEQLHTDCILRFPDMVTTHATHSADAQ

SEQ ID NO: 999603 - protein, 301 aa, Homo sapiens
  misc_feature (145)..(145): Xaa can be any naturally occurring amino acid
GSFPLAGSAEAARCLELAVKDVNQQEFVRALAAFLNKVRECCICPPKWVDTFNAGARHKELCIPYDENWLLQREHVFHSRETCTSGVGSWWFGSNDQRSMGDVERKRMSCPKTISAGGSKEDVGPAVVRPKPLGVGLKDGGRKDXRLRGRISGEASGDKERLVDRNPHATQVGKACQVESKATVSRPESNDLGGIITHWALRLRAKKQAGNPLDTKERKRPKKGPKRSPTRGKRGSTLRRLRSQENKYAKVKATRNDHRRRGRGHTAGDTRNTTEEDQRADPTGVRPETRRGGAPPKGGRR

SEQ ID NO: 999604 - protein, 99 aa, Homo sapiens
IRFRLRCERRRVYVREYQCQAPLPAIVPPPGRPPLRMIFLHGLGDTGHGWAEAFAGIRKFTYQIYTARMRLLGPVTVTYERGYAFMVGYYRAFTRFTGG

SEQ ID NO: 999605 - protein, 348 aa, Homo sapiens
MTVTHYPELPHGHINNRNKHQFTYPVAVPPPNLLYHTRPKYISGTITPNHTRPKHHYNYGEWLYTQSPMSRRAPRQQRPKTERRLRHNYSRPTTSLWQRRTHQRQSYANVHTHLVRTRATRPYPRRTQRADHTGSAQPTATRDEPRLASRRPHHHARSKAHVYHIIVNSHNPSHTTHTEEHNPEGTLRATRKAATYAHTTPTKDKLKHHTRLPTRQRSAQPATRTAQPRYRTPALNTAYTYKPNPPLRHLHVRSHTTYGHLNKPNRNTPYLTYKIAAHRDKTQVTTQRPANYKHDNNDKATQRKRDTTRQNQQIHAHTPPNLAADTQNNTPPPHHDQAAQTTPPQNTH

SEQ ID NO: 999606 - protein, 81 aa, Homo sapiens
LVLVKHPRLVIQSVLSSPLFLFEHVCVDRMQYESFLGTSLRIHSRVRLLRDPRGKGACVSSYSLPTEFDYQVSIWRRELEN

SEQ ID NO: 999607 - protein, 102 aa, Homo sapiens
  misc_feature (50)..(50): Xaa can be any naturally occurring amino acid
MTLCHIRELLRSCLVPLASSPSKLQRSGPSSNDLLGTGDPALRVSLSRLXYRILARWLLSLADLFVSSHWRKGRSSHDIPLGMFIRYATKRVSCGHSTRLRC

SEQ ID NO: 999608 - protein, 108 aa, Homo sapiens
MDFSSSCILLCLAVLVFSCLRLLPSGHLVIVRMCPRVWSKVSRVLSGRSPRPSMWPLLSCAIKRLVDRRPWRMPIFVVLRDSCLVQSFGHAWLLAFAIVHCRRRDISV

SEQ ID NO: 999609 - protein, 69 aa, Homo sapiens
GGLPEATFRMGLWLPVFSRAGVAGLSAWTLHAATGFNVRQYGNFEEIITMETKVHQRTSRTLTKSMNTW

SEQ ID NO: 999610 - protein, 106 aa, Homo sapiens
MYSTYSISLQDNYIIARIIQNDVLTVDQRSVAPSSEAQLPVNLGKGPRCNIHDITWEQIVKTKPIRELNRAGFTLFKPLKAKQQFLVYCEIDGVWTHGMDCCFKRD

SEQ ID NO: 999611 - protein, 195 aa, Homo sapiens
  misc_feature (138)..(138): Xaa can be any naturally occurring amino acid
  misc_feature (141)..(141): Xaa can be any naturally occurring amino acid
MAPGTHFQLRCKCVLQAAYDNDTVAVSLHCMNRCALVLCLHNTSIGVRTYRREIALEEKAYQMLPKILGEPRKLCTNGPSHAGILWKHMQTYRIAHRGISSASAHGAQRRYISLKSMIGSAYQSSPKGYQLKREACNXKEXYPNLPGEHWHRPNYGRELSFALWVKVGEPWELRNHGARLGITLLASNIGYIELP

SEQ ID NO: 999612 - protein, 157 aa, Homo sapiens
MGVSAFGAPRLGVAVVARSGLTGEPRLPGFKQISSGLSLPSTLGITGLCTTKPGWFLGFFRGTHNGLKGLIELAVVFEELAILFTGQAVVLQVVGSPHFGFRCTHQADGTSPVFSGNGAGLGTLELVNAIGLSRESWWKNVGFILLECLAQGGPNVV

SEQ ID NO: 999613 - protein, 147 aa, Homo sapiens
MRRQSSRSVSSIGLRRLSGMEWKIFKSLLVVRLPFSLQYLHAVVLFGQHHCHRDLSCISIRQLAYLPTETIVVGSDEISVYKFVSKIRLRVSLFLDDEDYCTMLRETPSVEHADALQHQWPEAACAIIDQWTPGARRLDMACRLANN

SEQ ID NO: 999614 - protein, 71 aa, Homo sapiens
FTILLTDRYLNTSFFDPSVRRKPHSSIQSSYYSIIYGHPVVSILIRTQDFGNNLPYCNLTIVRKEWNHLDT

SEQ ID NO: 999615 - protein, 136 aa, Homo sapiens
MIIVTRNAGDVVSCPSSVAASELLPSWTYCSCARVEYAKARYLRQNPARDLELVSMLGAWYPGSERKLVAPTEQEYIIVRTLKHHVPELLPELMLVCHFMVEHALSCAYPSGRVTVAAPVLYCGIVCGQSIPKCLV

SEQ ID NO: 999616 - protein, 120 aa, Homo sapiens
MDYPRCIRSFAFLMSIRLERPMFDRPLDRLRFELSDFDRQYVLESRSGLMVDQYALIHSVAQDLPEHNSNDKAIPITFGSSPLLSAIHYNTSSDSRPKRERSSTYKVGSIRITPFTSRHC

SEQ ID NO: 999617 - protein, 130 aa, Homo sapiens
MRTGLLGGRRACRQFIENQCSAAPGRRQYVKDTCKKGLSRPFEVSYRMCSNNMLTAVKQLALSVFRSMVSLVMVEPGNDRPPRLVRRLRCMIPRFCYHDRLSVAGNCRMCLVEIEKAPQGCSCLCHAEWM

SEQ ID NO: 999618 - protein, 95 aa, Homo sapiens
ELFSSVNPTRLWHNEVGNLYCTASFSSLASAYSRGVFRRDAQKSEVAHRFRDLGEENFNRPYGVIAFAQYLQQCPFEDHVELGNEVTELCKDMCC

SEQ ID NO: 999619 - protein, 518 aa, Homo sapiens
MCMAAVRFRSTGYIDERSMNSISEVHVNFVTSAFQGITEGTWIDTNRAGIAALQMRNRHRLIHPSHSVEQAQSSSAHVQCGRRNSKNMRGCKRCVSTDDTDHYPLGPAGMLMTCRITYTREACGFPGLKDSATRHNVANVATQHYEAMVDHIYAWGRCSTKKRYVDNPMGVHGHGAVVCGTGYIRVTRRNSPVANLPACRRPNRDEDSIRPITYSSTCEIQTRTIGFDRGFRTVHLTQHVHYRICAYIRCTRVTNHSWISRRGLCIRTSPLQIKQLDVTVNIHQEFDFSTSSLRDAPEQSLLRTDWGHMSPTRSLPTLDTEYNWHKAVYRVYKTKGEYTDRTSNNQAQLTETRTPDSRPTRNCAHAGIHTRGTYRAASPTNAPRETQHIGDHHTTPTHARPAQTDIRTKPKTATTNKRRQERDNRDKETNTADDDHETHEHRRETPQTEAQARDTRAQPHTKPAKTARRVGAAHQATQQRSGDSHPTSRRKKHHRRAVADRHRAPPPPSATRPTRPTA

SEQ ID NO: 999620 - protein, 142 aa, Homo sapiens
MPIEAPDSYNNYITRRLALMSCPQNLRLTKQMQFPDVYTKPLSPLHDRGYTTVKALEICGANNSYIAIVLAMSALKLFDIGARIYPIAPPVNPALDAKTEKHNAETESRKNETREREETKKEKAGQAGERKHRQNGEGEERE

SEQ ID NO: 999621 - protein, 162 aa, Homo sapiens
APQLQAPSLTWDSESTVPSSVSWGILLLAGHVLPGSLCITGLRSPQGDDCPEDRYNAIMIMDHANSSGQDHPHPGREFAHAAVVSVSCTLPCPTSELLSFVLPECSICYRLMLCSPWGPRLTLTDEISWRVVNLRTHQDIPEAQIHEGFQWNSIRYPSKQSD

SEQ ID NO: 999622 - protein, 66 aa, Homo sapiens
SPCMQDRSHMPYTDAVVHEIQRYIDLLPTKLPMHADPVSVKFYINYPHPQGSRSIIIIPDFCVCHK

SEQ ID NO: 999623 - protein, 247 aa, Homo sapiens
MRSRSEPLWPLGGVTANKTTMWAPLEFSITPGLFVVNMGESPGIMEMARVPQYGTPYCLDNQVLEDRLKNGPRSLKRDNYPYFQDSELVPLLTNFFFGQITWFRQGEVLHNFFSRNAVDTLHGEFGGPLKGRRAGEYNTLCVTNRVGLPNLHSETPWGALTNQGGRGPQGHSTRAHLRDTPQGGANWRRAVNPSFGEKDPSGEKGAPILLLHNTSPHCENKKNNARRRTQTTRTSPHDRASKQYTQT

SEQ ID NO: 999624 - protein, 110 aa, Homo sapiens
MTRRYAYESSPGFVNLVCPCELVIHGKPSGLRRAEPYDVCEKKLILLVLRMIVESCYTCSHVIQLWSRFTTAENVRSSNNEVSSSVDFRAYSDLSRAYSLFSYNTQGRDK

SEQ ID NO: 999625 - protein, 139 aa, Homo sapiens
MAPPLTPYGSSQYFFSNHLTIQGPPMEEALTNTDKNKQQNNERQTQCCCGGHCRPSERRVLQEHHLRRGSPGAPPMAHSAEHLVHRGGSTKKNTGGNKTTGRETPTPLKKNARRGEHTEAFLKQHHTESARAGAKQGGV

SEQ ID NO: 999626 - protein, 77 aa, Homo sapiens
VYCENYYHHHNMTVCYDDPNRVSLTPLRDSITDNVVRTIPNRFSSHNQSDDWSDPTMLHSRCIVIIVIHDVANSVFG

SEQ ID NO: 999627 - protein, 104 aa, Homo sapiens
DPPYHYDYQYSKSQSHEPVTGALSARRITGPPALDHCGVVICSIPSNGSLNSIGAYLHLIDISGLIYPNEVAATVTTSKSDDDRIGTIQKNRSSHDDMGVRIRD

SEQ ID NO: 999628 - protein, 172 aa, Homo sapiens
MISYGNQSGMSSLCLMRVARTGAAVSRQESLEYTVACYLAYNERWSLPVIVWMLVKRFSESGINYEIIVIDDGRAKMEEWDVLLKHVGRRSMGSEHELLAIVPPEETPVGDLRNLTYYSSDMKGMPRGMLSLNLLWIGDVLCNDDSQNVYFLDTLVRKAKWRDNMFDCWSLE

SEQ ID NO: 999629 - protein, 43 aa, Homo sapiens
MRVDSGPAQILGGNADLIGETAIGIGVGCHHYPVTSHIYMALT

SEQ ID NO: 999630 - protein, 108 aa, Homo sapiens
MAYIIRSYEYEKRVSRGVLHVSKASRIQSTSAITPRLAYSYTRHWAQLYFSHRAPSSMTFMRELMYKIIEYASGEDTIIWSRTYPIARCPIDSLYVRILIIAHPHMSA

SEQ ID NO: 999631 - protein, 132 aa, Homo sapiens
MRSLLSRRKQKTHHRRPRHNSFLCGARYGAPGRGEAVFLHKHQVGVCGARGAHTWGVTAQRRAHKARATDEQQTRAQKQDGVVKLHQNNKKPPGSKPKSCRRKTTKRNIERPKTRSKTTRGTQSERRKTKSA

SEQ ID NO: 999632 - protein, 169 aa, Homo sapiens
QVHDIIWLKSNLRASQYRCPSSPVTLGCLTSLMEDNFLDIRCQTENFPRTMAGDRLQIYERVCVKLRSHVNRTVFIYLRNYLHCREPRSLRCSKHTASVILTDSNLHDEHLIYHTLIRALCNIWFYVRISLVSLGILFAETHLQDIGHVQMHELGTLALRVVLFVHVTS

SEQ ID NO: 999633 - protein, 424 aa, Homo sapiens
MIAYDAHSFLGVRHAPLQLMPSLGTTCCLDELVSYEVRDSVPVLIDALMSELVVYLDHFVIAFELKRPRLSVRTCSISIMLQLFNASVCIIFVGHHSMIDIGYTSCGHLDQDFLRISTLTYYFRKEGHKADIYSMERTSPLKGLCYRRHIGTYRKEVMEHRDLLSNGFSKLSTFLGYRKPHTKRFTHDVFSEMGTLKLPWTTHKGLFSTHGELAPLCHRTRQHKLGGYAFRKAFRGGKAFRRLAKYQTLNKVIRPVVKSYLWAEISEHFSGGTTKLRGILVGGMRTTLLLTRGWFAFWPGISTAGDNFQTRFSGRSTGEPHRPVFMSVARPVWAKLVWTPTVVFVRSTGGKQPMVGKLLPTHLHFGRRESAKIRLFTGTLKRVKDRRQVSPPNIYWAYGRSKRDQRATMIGQQRQIVIRRGYNR

SEQ ID NO: 999634 - protein, 80 aa, Homo sapiens
DCAALLRDCILPRDMRMYSCGSAGTLLTSSYCASDVSLSRVEALRVGSRSSGSFSWYLGPDTLRLLPVMSVLRDPALRLP

SEQ ID NO: 999635 - protein, 70 aa, Homo sapiens
KKLSYVNLYYALGGKALVLDYYGSKMWASYQEFVWIIVYGIVDDGLRRKTKEFQVMLLVNDRGCVDTGEK

SEQ ID NO: 999636 - protein, 153 aa, Homo sapiens
MNRGDEQGEKRYERKIHLKGRTQNTHKEKTRTPTTPREKRETKDQSNKNTRTDKRGQNRDGRPGREQKLYNSREGNGDEGRKENGRKHKRNEEMNRGDEKTIQPRTNFTLDTGRNPSNQLTGRTRPRNQHISQGEATENKTHKQQPRTTRHDT

SEQ ID NO: 999637 - protein, 163 aa, Homo sapiens
  misc_feature (110)..(110): Xaa can be any naturally occurring amino acid
GSRPWYWITKFFVGALAMPNHLSKTNTQSETEVSYDRCIEMVLLNLSITPIGREVKKTTRMISIEATMPRVFDYEEIMLVVHNHTCPARVLVAEREDHAMCSPARGVSRXLEHWVFGKQKRANENNACCQRVAHLWVLLVGTSLWSRATSTSVVLVIILWVHQ

SEQ ID NO: 999638 - protein, 380 aa, Homo sapiens
  misc_feature (110)..(110): Xaa can be any naturally occurring amino acid
  misc_feature (155)..(155): Xaa can be any naturally occurring amino acid
TVLQTERLRNPTSLASSTPCRQRLRNGENVISAWLWGLLWRTGVLALSGPRASPNQTALDEENLIQESLMTGGTQPWSLRDLVLLRLTWTSAYQALLQGMYEAVKATLIXEVSSSSQPSGVTRHYQSLECFTLSFMGSPSKISYTMYRKIICIGXHQKVQTMQRRSSREGLDNCTAGWHFQAGLPASTHSKCKSERECKSASLGGYSGKMPDGQDGKEAKCKDLDWGPGLQRGSGMPQRRACNGACPGPGLCGRQRWNPLCTVAPSSAVGRPKRKGVQVQGGTLGLGKDNRFDLTWGGTHIPTGETSGLPWGTPWNCPTCKTNGCGSPGVEISPVMLSLKGPHDEGGSGPFWELLQSMSLDPGRGRPNSQSIVQHSGGTT

SEQ ID NO: 999639 - protein, 120 aa, Homo sapiens
MSGGPVTNVDCIRLPTVVWRAELGMCRSQSQHSVRQSYPSLFASPKSCSALINWTIDGKTSDVKSAEGVHATETTMERGGQGVAPDACPRQSLSEFPFIRCCKHFTYRPWGVISIYPSNV

SEQ ID NO: 999640 - protein, 133 aa, Homo sapiens
NWDVCADMVGTFTDYRGPWPRFKMKYWGVASFRPEKVEGVTTGIVDYRSTTTYAVQYSCRLLNLMAPVLISYSYRVIPVGPQTGLTPESCRQIVMACGKEELCLGRQYGLIVHNGYCDGRSDSKPFVRNSQRI

SEQ ID NO: 999641 - protein, 164 aa, Homo sapiens
MPSDFAHAQVAMETHMAKGRRVGEVPMDSHRGATGLCPKTSVANKGRLKAEAGVKLLIETRLEQLKPDIFLRSTCAHIDWGLGTTGDWGPRSVSKKRTNLGWGQWVGISPTKTKRGEFPLIKTQRDLGTPFWCSLRWPHTQQFRAWGNLTEASLGKRHTRAGHP

SEQ ID NO: 999642 - protein, 116 aa, Homo sapiens
MSQGVNRQLRRVFYRGDAMVHFEPRMDKNAREEAVWLQTGKGNREDSVDELNNNVEAVFPGPPLASLSVTVYVAVEGPCGIRGVREASEKDEMNKVYKYQLSTALQESGKVEAYYI

SEQ ID NO: 999643 - protein, 228 aa, Homo sapiens
QRFSMMGISSVDFTKSNLSRAHQNFLFIVTCPMEEDGTVHSETTLMAVKTLTEDGKDYDNGFWKFWSKNYGEYWLGIEGHLHFLTTQDRLHFDKSTLQIVEQISAVMHNDKTFHNVGDDKEVSTSLNIGEVLLVTAGDSLAGELVILRCSGGLVTTDIEIQHVGQSIMTTMTGNCADEDQSGWWFNRCHSANLNRCILTADPYTGIPDNGIVWYTWHVVVDTLKSVVM

SEQ ID NO: 999644 - protein, 105 aa, Homo sapiens
MLTLRLRRISTMNLSRCSYRICEYPKSYVAHVHSYRVPFRETMTSFEQLLQDRIKSIYNNAGKMVHKRGHLKLRERAESLKNINLLIKISEEIEEYFCTTTKTSI

SEQ ID NO: 999645 - protein, 132 aa, Homo sapiens
MNEREAKVRKESEVDDREKDTTRAKARERKAKVESKREGEREPAQGKSKEFERFYEGPLYRKGPLRYGKLISAIDFEVMKGLYLLGVFQNGKFLTLEVEFGIGEILRNLVLNGIGLTKVIRIQRIIGSIAIT

SEQ ID NO: 999646 - protein, 368 aa, Homo sapiens
MLKEVYTKGNRVSPRDSQLKHLKITLYTSNIEQANRSNIDRNNRNIEIEHFETPQNDRTLERNTRTINSSIETDRSNTRTSQHACNWQLHCTHATCMTVHDNANGCKCKSEIVTIMQVTHATECTWHMQIACQMHCNLNTACTHGMAKSNIASLQNSNATHAMQHGTDWQMHATMHCHQALPRYQDWHSTLDIGTLQTPPCRHCNNKSCKPWQARQTFQVEKMRNIASTGQQVNANVAQSLATMHTRHTIACPPMRQAPPRNSDQAQGHEASQTPATRPTEHNDANYMTGRLPRCTLAATEGHRTAQLQTGRQQGETQRKRRKPSKAGTKTAQGQQKARREKRTGTERRQTQTRKKHERPGAVNMGPT

SEQ ID NO: 999647 - protein, 107 aa, Homo sapiens
ETVLTVQGSETTGISDHHELVLDTPGNYNSLLLCSYMFSSSPMCYAYSLLSTRQTDSSISKMYIRYGVQCICHNLTLMVIPSSTFLRSIITPTIQHVTTTRYRHYAL

SEQ ID NO: 999648 - protein, 163 aa, Homo sapiens
MIQLTATPVSASCGLSQMHYSNATGLIPFQMVSLVRHHWKTENRYDMYYSQAHLYGTNEFGRGGPEVMLTSLGGDHMGVHPMGLFWSREDLICYELRLLKRDVMNRPFQVQVKVYDLELIREQYQLPSASKGQPELCRGGMWQLVSHELRSEKADYEELSYCD

SEQ ID NO: 999649 - protein, 121 aa, Homo sapiens
MRVLETVIRAGYDVSTWMKRLVHWFHSIDCYNTQVAQYPGINPNFLDHERLWSRSAAPQWSRITVMILGYLNLGHAYSTLHKEYRRLSHPGLHFFFYLCETGCITQEHSNTQPTKHWWDTH

SEQ ID NO: 999650 - protein, 134 aa, Homo sapiens
NSININKKDFHTKTPSEGHQHQRPKVDKSMMMRKNQCKKAENSKNQNTSSPPKDHNSSPAREQNWMENEFNKLTEVGFRTWVINSSKLKEHVLTQCSETKNFEKRLEELLTRITSLEKNINDLMELKKHSTKTS

SEQ ID NO: 999651 - protein, 372 aa, Homo sapiens
MTSGARMGLAVPHKCSPSDEVPGIREDLVETSYSTKRVTPCIVLSHYRFAGADVNCTLFESCRSIELASCAILKATPESYSLTSVMLTHRELSGVSGLGIENALEHSLRDLGRKIVRWRLSLFALVCRDLARPQRLREIYRVGTNRLRLWRAPIVVRITPNSKILTHINAHSHELTHISTDSGDVIQLRATFRETNITKLWARPFPLVATFLVVYLSGGVGSYFMVVGFLSMGCGPFKFPGQRVCFVSPFSNLVYFRYGGLPPPRCVPGVVVVREPKWPLKSRGLHLPPLFSLTSKLVCLVPNGNGIMGLSLWRFETVFDPDKWSGCKQRTLGTLARHVDAATIFRIAAELVFPTYKRGLPIRWQETAPQGV

SEQ ID NO: 999652 - protein, 181 aa, Homo sapiens
  misc_feature (140)..(140): Xaa can be any naturally occurring amino acid
  misc_feature (144)..(144): Xaa can be any naturally occurring amino acid
MNSLFGSIDVQPCSMKHYPANKVLTDEQELRMDFTSRKVCMLISSRFIYLSEVIIMHVCSTMHDFTVLMSWYCPITCHRLQGEIPISFYTQSRGGPQLPSVDMELLLSLAGISPSPAKGPNDRPMVGDPKEAHPCYSSMXDPTXVLNVSRKSIMNEVFNDVDGGSFQTVCRSINGRLIQLP

SEQ ID NO: 999653 - protein, 132 aa, Homo sapiens
MDRTYHPNTINAEGTDTNYCLDLSHEITAPSTYHGLNCIPKALTSCAQYALATCNGSAHSDSFGGISVIERRHARFTPRIHSQENPIVQVPNILLSCSNGHTVVCVKPVTQLALWYTTELQLLLRRPPPTDS

SEQ ID NO: 999654 - protein, 98 aa, Homo sapiens
MGCEQKGLYRASQGPWRSGSRSPCKNPGKKKDSEAEDSSRKRKIDSSGGKGRPPEREGLKETTREMGHRRDTQKRGETTTVGKTGGARRRTGGAEARE

SEQ ID NO: 999655 - protein, 125 aa, Homo sapiens
MVKLKSFCTAKETTIRVNRQPTTWEKIFATYSSDKGLISRIYNELKQIYKKKTNNPIKKWVKDMNRHFSKEDIYAAKKHMKKCSSSLAIREMQIKTTMRYHLTPVRMAIITQVRKQQVLERMWRK

SEQ ID NO: 999656 - protein, 136 aa, Homo sapiens
  misc_feature (88)..(89): Xaa can be any naturally occurring amino acid
QRAILYKRLKAASVRINQVRPECPCDSPNMRTSGVLNAGPYKQYMTYETRSEIIKKDKNIKSNNKIFVHALERTRRRMVVYEPQHLHXXRERGATPLVGQAYAWVAYTAEHPQGGNDLACPFEAEKGVRRICRSPR

SEQ ID NO: 999657 - protein, 373 aa, Homo sapiens
MGLTLRCSHNPPTRHGNWASHPLPRRSAAERRQRRGAPTESDMEPHLPHVKMEEKEREGTRQVDKERNDTGMTQSHTSPEKTPDEKTSRVNDETGKEDKSKTREQDHDNHAVPHQGGNREDKKRASNEDRKDPHVQERQRHRHKSNGSRPDPSARGADGKSRMEVRDGSRGTIGVEYNNWIRSHGSELAVQSAHAKTMNKAMSARRGQTARDVIDNADRQKQYAQGDEVDTEGRPEEGDLTHKERAIGAPKAEWITRQCEQPAESQGNETYRPADLGASEGDRRDGEAGKSTSTQPKGETLKERQEHTDQERETPKEKAPGHETEDGTDKRGHQRKHTPRHKETMSSYNEKTTAKPHTTHGMDTDSKLESAQI

SEQ ID NO: 999658 - protein, 84 aa, Homo sapiens
GLIDLREEREWPLPAVQSAGPLAAASRSSAGRPRVRGGDNEDSGGNSTSWCHRLMHCVGRESVFLEGLYGPPATNETSVYLERL

SEQ ID NO: 999659 - protein, 80 aa, Homo sapiens
VDHNTRTTTWQWPTMESVRYCEQWQSRMEAIAREAMHTSLTNDDLYSDSMLAAETHDPYGPLPPGWKTRCGFCRPGVLTL

SEQ ID NO: 999660 - protein, 140 aa, Homo sapiens
ISDHDGAYLSDFIKLMTEKKKKKKKKKKNKNIKTTKNNTQTRKKKKKEKETMWLAAAAAAPQRRDSLTPPSAGGGRRPQIDNKTRTTAHKMYAQKKRRLEQTNKRGGVLSPKKNKRPAGGTNRLWLINKPRDEGRVRESK

SEQ ID NO: 999661 - protein, 290 aa, Homo sapiens
  misc_feature (44)..(44): Xaa can be any naturally occurring amino acid
NREMWKELKKPPFVPNSTLPILLLQPQTLSLPALPLLTAWHLSXNQLSIFHAFSALSVTKHKLLLYILTLLLLCYYSLCALTTIQRCAAGLTPLYNSRTLGYHPSRVFPQLMLERGPPWLWSQQPALLTVTFSPSPLYLTLLIAGYTLSKLSPNTRVTGTFPCPLGSPTLLLIHDRPAAYIHLNATNLLRLQLNAEQLCNLCCAQTSPPHPSPGCQRTPRALYCLSNSLHLEQGKPLNPRQSDESSPVDSYPGHSLEWESPFDKLPPPRARPAIKLQASHACLKQQPNTP

SEQ ID NO: 999662 - protein, 405 aa, Homo sapiens
SQAYWLRLSSDSDLIKYGPIYASCTNLSKDKQLLTRANDSKLRRLYAKSDNARNTCEEQAVPISFSAITSMAYYFFPQLRLLTKNLSNPELLRLTSSLTDNLWTLQLSANHIWRMAGDRVASSFSPLMKSYTDISPSNWTQPHCSGPLLHAASHTSNGRDHTSQAIPQSLSFPPDTTPPWGLPTLLSQPHNVCRHNALSIYYSSGSRLLEPLSTYGQVTLPKITNRFLQHSPGLCRPSLGRTRNPPHLGPISSTSGQLAATLAARPLNIGWPIPPQLGDGQRSLLTTLCRSNRALDAYETFKFNRYLKPTTQQVFPCYREGGPLGHLSGYTGNFSRPLHTRQPYNPSLHNARGKWPLQELSIGGYDHFSRSLRHFSIQPHTNANPKITHNSSFMNTTYGELLPYV

SEQ ID NO: 999663 - protein, 119 aa, Homo sapiens
MPVFPNQRHNDNVDYMTNIVRRSGNRKPSELILPCQSSYVLIALRIPYAVLYIEQTGQLIAILLPLNISLGTKWYCTVRRYTELRRYVSRSSYLHYLRPLVPRKPGERYRNPCTLDKSQ

SEQ ID NO: 999664 - protein, 475 aa, Homo sapiens
IVSAEAKSEVLSRAVALLHLIRQPKLGTAYRARADTLQQPKRLAWQTSRTPIEQCTLTPTYPGTTLNREPEGDMVLYCPAVVGAEHGALPRAGKLRAKLVQLGNLLRPLEGQNPFPNRVNPVGPNFLELQPRSEPAPQSELKGQRTVDLTWKDRTIPPATYLEEKPAHQQISQPKFQEEETVTHAKRAPIKGAAKERGPKAPNPGEHPNIATTTRLGLTDPPLSYPPLPLGNPFVVRTKPPHNGTRHHAYYTSKLLKHGANKRETRLYPRPGALLNTCPWQRPPYQSAHKPLSPANPPPAHPRAGQRQPPTFGPPPLRTPGRRTHCATHTAPRPTTIGRDTPTRPPNHPHHHPARAPHPPRANARYSHDSPNPNAGAKRTPPPWRRTPQHDRANLPLGTRPKPRLTCHTNSGNGKSHERAGRNTPRSQNRETRSGPHLLAQLQARPATTYMGAAVRKRHAGKRTIHAHRYSEHIA

SEQ ID NO: 999665 - protein, 258 aa, Homo sapiens
DNTRDPAAKRSSLKQWTRKLAAQMSEADGREDCSSYRRVHKRGVEDDAADGHWITSWSTVEATYLRCCHGEPCTEADRRSLICGPARRDGLVKTLDVDMRMTWIGAGPTRPDNVCEIEEMFDRVVHPNTILPKKPDELNQSPLMLFGLALKALLCSHFTILDLLDKVLHVLFSLIEELTKDSELLRVGFHGYGETDFLGADLGVPKVQGDPKADLCASNGCYQATSPALVCFTQPDKVPTDIRRMQHEECVKATTMRR

SEQ ID NO: 999666 - protein, 229 aa, Homo sapiens
  misc_feature (160)..(160): Xaa can be any naturally occurring amino acid
NPFSKKAGSRALSSPPTQKGAGEEKAAAFCAGDSWARLLIFPGCFPSRVRSVLRLRKEPGKWSRPGREIILQRMMGRWYPERVTQQLFLVTLKIEALQCSHRSGEVVKRSRLLQTYSLEKPFGESPLRRTGPRLPSQTLDEGTVKSPRSNGERSALKRAXSYFLAGSACKQHVCRPDRRGTSYKRQHVELTGRTWQSLETQNSRTRNSIWHKTWADVENLNSQNEAELR

SEQ ID NO: 999667 - protein, 172 aa, Homo sapiens
MRGSKRKPVTHSGESLRNVQIPVNLNYITQLPGRHRALAPVAQAGTCKRVQAPAHWEPPMGPKQILSGPKASLSSGGIHRVHHQSKGPGLKLGGRYRGYERHQAGFGPGVGPRGPHGDRRLRESPERPQDGGSRAWPSRQRSRKKEQEEEVTTGDVEAAHTGPEASRQVCAE

SEQ ID NO: 999668 - protein, 72 aa, Homo sapiens
IVLIPPASHVNSAIDVLIGRLLRVDRLILQCNADVSRKNERKPALSEYSNEERRNLSCNRGHDIEQKGLTLA

SEQ ID NO: 999669 - protein, 103 aa, Homo sapiens
QLLRTHKDEAKIPRSCSTVNRPDTHPAIKPRERSAMDYYRKYAAIFLVTIVWCNLRCAPFRCLMMQDCPECDATGKPILLPAGCPNTSVHGLLLSLEQYSHFH

SEQ ID NO: 999670 - protein, 122 aa, Homo sapiens
YCRSSPLLCTTDIYVYIPSTLITAKIITTRLGRARMRVLTALKPMVLVASDIHGFVICCLMREIRATVIVLMVWAKAVWPDSVCNLQSSSYLLTNFHGCSYSVRNAVHVLDEEDSFSCVRMT

SEQ ID NO: 999671 - protein, 227 aa, Homo sapiens
FLKLTAFGNGDVIGPLGPIDCASAAYSLFLAWMLSSVTSKDSGVLYSSIQTRAMESPISMNCYVSGLSIPITDLLEVMNVYVDMTSGEEYFRNITCGASFKDIMDRIASVTGNWDLFLHSSYCHYNDWEISIPSLVKTRNAVVALGPGLTTIGEPILFTERQHELGIKLWDSEVPLIYVQQFNGTGFDNESSRQYLGLSVLLHKLPREFLPYAGGLCLLTNCGLLPL

SEQ ID NO: 999672 - protein, 257 aa, Homo sapiens
DYGLCFWQCDSLVSSEIPRLQNPVTAFQLIIRGLWKRAHALVHILIKRASGTRKTVQCAKCFEQTIKAQMPNASTSSSMNSGNEFEKEATFTSILNTVILLWSLVAYLPLLVVSDGIPYLSSSVGKTKSMGAFTSARLCVLNTKSPSSRENLWDFCGNYYKLRLAISKMLRFYPFFYLAIGSNLFVLRLRNFLQLAFKHSVGKAQTLMTFTSIFLRRSPIIPVNFPATSESITWGKQTGMYKSLSPWLLLNHVLTKL

SEQ ID NO: 999673 - protein, 107 aa, Homo sapiens
MLMICLPYGRYQYDVVAITSEIEPDEDDSMDILEILLNCKSVQEPFSTMCAFSGTNKWVLANWGPGRLMDGVTVQPSYGLGHRGTVAVVHIWCDTEAEGLLVYLPEW

SEQ ID NO: 999674 - protein, 163 aa, Homo sapiens
  misc_feature (117)..(117): Xaa can be any naturally occurring amino acid
DPNTQELSPHNKIRLTALFIDRRRTPLQASSDSDETSDHSLDDLPDPSKVTIQDYALANVTISSRRLRTCFSLNRPHLLADVYYGLEVSPYIHLTAKGRLQYVFICPLPEHIVSARXYIDAIDFSDSVEDLKHRPGILLLCNGIADEVFIRLWSSREAESYHP

SEQ ID NO: 999675 - protein, 161 aa, Homo sapiens
  misc_feature (75)..(75): Xaa can be any naturally occurring amino acid
MSEWTMSYLEWQCAIVISVKTWYCFARHGLATILHLDMMARLPGIHKNAFVHFIWTHRCVTRQTIHIPIVNPENXCLMSLYVSSYMPARKTRGYDGAWITLDSYVLVQYWINVWDTEKLYRLEFILNKLNCANDMKMDKVRSRQGDSNVTYQTRSMSVVIR

SEQ ID NO: 999676 - protein, 42 aa, Homo sapiens
MQGHGKKNRDMATEHHEARTLTTQTRNIKAPRNKQRSSGEDN

SEQ ID NO: 999677 - protein, 97 aa, Homo sapiens
VSLTPVVPALGEGEEGGSRGREMETILTNMVKPFSAGNAEIGWAWWREPVVLATREAEEENSLNLGIGGCRARIAPLHSSLAIDRDSVSKKKKNYQF

SEQ ID NO: 999678 - protein, 633 aa, Homo sapiens
PLTLICRKRGYTGTMHSENGLQNVRYGDKIIEDGESRTRKLRSNRSSPYTTIALADRNDIECELWRIATRADDAHSTVHRQILSYQPCQELEGTLKGPGLLYVGTLLLVLFYLGGEQIATFALLKKCRLRRKPWTLKEPLRLVCSVYGVGEDNPITVKGDIGYLYSNPSAIDCKRNGNAKSVALAQDTCWASYIDLLVAGSRHFLKKVQHLRNLRSIGGGVGSRPYGNFAKTLPNKHFGPQSFTLNVNSGLGVSARTFTKTTTKILIQHIEINPVEGGYIKKLSREETSDSLGRHTYERYHVGWDVQIQGLMLEIYGTRDWNLRTPRETRTPRKGNIGHQRQETARSRQRDVGLAQVVRTTVLHKNGTGLRHTLEDTRDYFNINRGSDIQENNREEAQRANKEKTQTTNDRHTRQEWAQETTNRNRAEKAYSHNRHPKRGARKKSDRTDTTNNDKGTNNYRRANEHHDEQKPRRSDAQDSEKAPRTITKVTTTTIARLNMREQTMNDTQRQNTHHKANTTYQRHINKQKQVKKQSTSQTQEGNKGPRKHSRGSTRGDSKQEEQKTHDGNRHKNRGEKTIAASSEHTNVTDDKERNANTHRTIQATQRTHNDDAQGKQHSNSQQDEHTRTRRKT

SEQ ID NO: 999679 - protein, 243 aa, Homo sapiens
GSSVLWPPSRNRLGIRGELQLPVVSSLTQPISISLSFWVSCLSLSGSLSEEEREKRTEDNKETAKQRKQKQKKKKKKKKKNRDGNERGDDARERGTQPNTTRAKETTARRRGARRQRRGGREEAEEKGAAKTEGRGQQAEEERRRHNGEEKKGEKNANARRSEGAEPQQKTTKRRPEKAKSNRREAERRRESKGGKRIEERDGAERTGGRERKRRQNREAGRETRADSGGGEGREERTHRRGQ

SEQ ID NO: 999680 - protein, 32 aa, Homo sapiens
GLRNRTLSRLLRIGVRSGRLLSCLEVHVLGIQ

SEQ ID NO: 999681 - protein, 79 aa, Homo sapiens
SYLIGVKSMIFFPQRLTTVYPECPDVNSDYPDAIHHMTTVLFISEGFISFFCLAAVIIDLIVTIEFDECLTAYECENSP

SEQ ID NO: 999682 - protein, 220 aa, Homo sapiens
MVTRSQVAGTTGAHHHTQLIFVFLVEMGFHHVVQAVPELLTSGDLPASVSQSTGITGVSHHARQGEPVRVSKLKNLGSDCMRAGQHSRRAHKACRLAQARPISLSHNSSCPASLLRCHTCIQICALPRSQHGLCTSHSPLISTYHLSTPGNHTNTHHTLTIKLLPILPLQLPNIQTPDNPPRTIHPIHHCHPTLDSNVYHTHQIIFPSAITTSISILPNY

SEQ ID NO: 999683 - protein, 117 aa, Homo sapiens
MLAIDAGTPNCSYTSLDPQNTRQLEHSARTWWKPEMQTCQARGSHQWDKTGLVCPLMGHHCATGAEDVTAFREPHPPKVVITVKDMTQSKPRAHSGAVRDRIMVFTPSAAYTGLALR

SEQ ID NO: 999684 - protein, 126 aa, Homo sapiens
MIVCVLGSSIITNKAQAAERNRYPDDLNPSSRDARSLSVCDSCLYGDMERSGRARKASGNNLEALTGPPALLWNDAHTTHATETKRASRATRNQTAESKATGTQKHTHNGHRATDKTTKPTRTQPQ

SEQ ID NO: 999685 - protein, 90 aa, Homo sapiens
MGTPEALDHQEPETLVSQDNADANARVRGPKPPWARSQAQRETKHGPKPSTTVLSRTYAENPYYEAVTTELKGLYVGYHSPTRPHGKPLA

SEQ ID NO: 999686 - protein, 140 aa, Homo sapiens
GSYGGGSGGAVAIPEPLRRSLRQLVAQVACVDAGRGTGQQFAASAPAARQQARRDAPRHPPPSAGPVAGPASADQIPSADVSPRRLRASEPGLAPKHDSDFKPGDLIFAKMKGYHPLASSSRRKFLMELLKPTQKRNYRI

SEQ ID NO: 999687 - protein, 283 aa, Homo sapiens
MGFLMKTHFSSPFWGLYHAPTNYYSANEEFRPEMLQGNANVIVTGAQPKADREETMRLSHSGRTALGARPIVALRCTGGRAPRIDIHLVPRTPGGSIPNMATVNALLGTRTATCMPTHPEPLTAPAHTPTWRKAEPLAPPYHGQQTAKPLSGLGPPNTDQVRKHRTSTIVGDKRNPLRDTLLGHSRSLPVTDTYPQRHKFPKTAVQSPCPLMFHALVGQDHYPLLALNEPTTMLPKMRQLIKHSTPPPAKNGLISPRPTIIDETTATPFVAHTKGLLQQDELI

SEQ ID NO: 999688 - protein, 327 aa, Homo sapiens
GRTWALGKIIKTHGRSLSMRTNTPPNETPPNFWTSICIGRRDDWNGDPFAGTSARDTVSELVALGSVTHCPSHMTSSRGTGPHVLVLTVADDYCAQCTIHNAFTGAPSQRTYANNQLRDMLVGAIPWGMSQGLLTDISFPWACRTSRLPTQRTTVELISLLRVCNPIGPAKGWHYQEGRITSMEVWSQLRLQHGFQTYSKTVSSENSHDGCVGPKLGRRSNSRRAFQSAPRVLLENAAYGNPTRWPSGPFPPLPLDLAFSTGAGEFGTAPRPGPRRHRFVPFRPCAVALQFPRTPLEVTAGRCLRLLTLTFWAPLGGYTPRQALLGV

SEQ ID NO: 999689 - protein, 193 aa, Homo sapiens
MFMVIKLFAQVQKKKKKKEQEQKCVAARDTADTTEKKTLSENNWLMEATQGDPTEESKRNTGRPTSGSPTGRKTRAQSKTARGGIFAHQNRKNRARERTQGKRLQGHNKLQEAREHPRGDTKTKGGTITLKTAREGKKQQKKRSQRKNNKAIQKSPTTQKGHPKPTTRKTHTPHETNKPHPTQTNNTHANKQQ

SEQ ID NO: 999690 - protein, 395 aa, Homo sapiens
MRKKAAASRETLWGRGGHSLTPKLKKRPPGGTTPEGVSWKQKFLQQWELLERGPTNGGEPLSHNREGDVPPKGRERSQQNHLKYLERPTDPCGVAQHLKTETRQQEHKNIKTKQKKKKERRATTEERPSHEQSDNHSTERREEGKSGSEEMRGTRGQSGREQGYARTKGGTRRSGEGAGENAEERTEEQRVERRKRKEEEREQRKRGRSEEKRAKTKAEGGQKQAQRETEDKADELKHERRQQREGNEGETGDRKRKQAEKTEEQGERHDTEEEIGRGNDGIGRRTAGEKQERQATADNAEVRAGAHDAAHKQTARRQAARSRSEREREEAKAQEDTTNDRQEKEDERGNGERQEGEKDEKGKDREQERRETTMKKEQREKNKANHEQRQGPQQT

SEQ ID NO: 999691 - protein, 103 aa, Homo sapiens
PREAVVNKGECRIVAALAAELVAATKDSEANWTTEEWKSGKRLDGKTRNALKRNKDVEITQKAVTDVTTGACSILLKQVRLLVLRRCKSSQGIDFFREQIEEI

SEQ ID NO: 999692 - protein, 98 aa, Homo sapiens
MQCPTNQHFYHTEDIARILACKLPEDNGASSSITCYIGWRLLENQLDRESSLPILKIDVEWAFFQVTFAAEQASSIHTPGLWSNENSSGWPINRQYTD

SEQ ID NO: 999693 - protein, 141 aa, Homo sapiens
MTRKRTQMKKRRKRNDTIVTPITRQQGRTTATHGSYNARDQPKQVRGQTTGIKRSGAPYQTREKEKAHTPRYHNDEEHAKPLNTVGPPTRQKAPRATQSDLPLSHLNHAELTDKHHGTVNTEQTTRTPTGQPNTEQTHKKP

SEQ ID NO: 999694 - protein, 193 aa, Homo sapiens
MTTWAELGRKWSGERSSGSSTLVSSGPCQRMVPENAGELVAHVSGALLMDVTTAGGPAAPPRCSAAPGTVAARTWRESTTRAPPCKDQGSTEKALGTPSQDFCPYPRDRPQVRTPSATYPPLCSLTLTAKSPARAWHGLACRLSHTRLARVRMPIARQHQGQPPVGQSSKSSERTRDRCVPRVAGGCQNTRCR

SEQ ID NO: 999695 - protein, 65 aa, Homo sapiens
  misc_feature (6)..(6): Xaa can be any naturally occurring amino acid
MTSQKXCWCLAPGTVRGNSPSRCGIDERHITSRGTKRQNTENNSSWRCPRSTWESRPPDRIRACI

SEQ ID NO: 999696 - protein, 176 aa, Homo sapiens
MQTCLLTKFHILPKDIAGTQAGYLIGRPNTPCPHWQVYPLPRVVCNTFHCRHGSTSNPGPMKFCHHVATHSAHGKYPRPSSSLSVHLTCGQLTGNDQAQGAPLEEQLTGGAHAGQQTGPYKTAGQGPSTPDKASAQQQRDGNNTCTDGRREQDRTNTPQVSGSRTQAHNNQPDTTQ

SEQ ID NO: 999697 - protein, 217 aa, Homo sapiens
QRVENSRGDRAAVLEAFLEPKLSSTGEDRASRRHHGAPLSPTSQSACTLAGASAHKPFNFSNPSWETPAHTTASHMNPAIKCKGKEVSLVKSAQNLATVVQGERVMERQLENAIGIKSTQARNSGRETIYPNASLLIQNVTRMTQDSTPYKSEVRSVNEEATGQFHVYPECQASISRKSNLLEDKMLWLTGTESGTLLGITSELGQPSECMEGSSIG

SEQ ID NO: 999698 - protein, 125 aa, Homo sapiens
ERDEKVARLAVPDSPRCRIPAQIREELQECGASDFQYTSRSGQRLRGNSTLAQRRRSEETVVDLHEYPPTEYNMKRLCPRHARRSQSYEGIGTSNRARVYMILTSPPWKEGIESHHSNFLRQEMV

SEQ ID NO: 999699 - protein, 70 aa, Homo sapiens
NSEHSLYGQSRMKCFGWNSSFFHRATAYYGSIITSDLVAEDPSEKPEIGFQNNFACKSRTIRSYSNFEQH

SEQ ID NO: 999700 - protein, 148 aa, Homo sapiens
MITPSIIIFLICFLAPVCPFPNTHNKTNLILIISVRSGKRRPSEPILPAIDPWVLIALPSLRILYITDEVNDPFPLTIEIILGHRQCVLNRYEYTDYGRTNQFNSYILPPLCLEPGDLRLLDVDNRVVLPIEAPIRIITYITRRLASA

SEQ ID NO: 999701 - protein, 242 aa, Homo sapiens
KQWYQPRVPITAGVRYQTREKEEEGEERGEEGRTNGRTDRTENTRRTRTDEPTGTETNERTNERRNRRTRRGEEDTTDTDTNDPGRPTDTRHDPPRHEGRRTTDRTTGPSDGYDEPETKNEDRTNGPTDTPREPKKRTTGTGNRTGEEERTKKTKDHGTRRRKTEPKNATYLGTTDRNRGKKEPRHPKGTASNQREGQTNRHTTTRTKHATHRSKEEKERTTPDRTSERKGNERNGNTNRAP

SEQ ID NO: 999702 - protein, 130 aa, Homo sapiens
GSELEITPLVSSLGDESETPSQKNNMQAKDEEPPCIEAGTSGKLIKYNKGKIVLAWDRFAKYHEMPPDIILQTGCLPWKVRGLFQVPRSYPKSSLLRRSYQAAVSMEHISEKVSPVRKYVQCKPKECVWS

SEQ ID NO: 999703 - protein, 102 aa, Homo sapiens
MARWRMLGDGYTDTTVVMTEERSSRPRDLGMFSPEANVQEGSGEIVRRQGRRLTLLQDYWSVTQADIEVSFEEQRGSSRTFLSYPISFLIDLMNYWRGGKRL

SEQ ID NO: 999704 - protein, 113 aa, Homo sapiens
  misc_feature (111)..(111): Xaa can be any naturally occurring amino acid
GKGGLPSVFARGLEVQVGGNLGLTCNLVPPGSEQFSVPRPPECGTGIAGACHHALAKFGVLRWKNGVPTLVGSGVALEASCEPRVNLCPPCGIPQRVLWGIAGIEPTRAWXQQ

SEQ ID NO: 999705 - protein, 149 aa, Homo sapiens
EAIINSLPTKKVHGPDELTAEFYRECTQRRQLVPFLQRTTSLKTNRISEGILPNSFDETSIIVLIPIICARDRTTTEKNFRPISLMNIYVKIAQINYWQTKVQQHIKKLIHHGSSQASSLGCKAGSTYTNHVNDKSITINMNANDKRPP

SEQ ID NO: 999706 - protein, 68 aa, Homo sapiens
AQRNTLSWIITTMASANTPPCAFLVLPALLPLPYTLLTTFKLKVYIIILTNSMWSLSKELAMESQKGK

SEQ ID NO: 999707 - protein, 121 aa, Homo sapiens
MPLLGSDLRCPESGYCTSSRIVGNVPLLGALLRYRSRELDKPELAALKYCRRVVARRGIQVPLKGWIGNSRQGELMQLDDPSRRNAVTGKPSAVVSPRFLSNTNRVGCYGGPVVVAEGKRA

SEQ ID NO: 999708 - protein, 110 aa, Homo sapiens
MRRGFVGQYVRASLRKVALRALRAPRGGETPRSRTRQTDGPLIYAGTSVTGATTKGRQPWGAPNCCAVREQYTSLNKGDEKDGVDTDNVTPRAETDTLTNKRGDTKQRAQ

SEQ ID NO: 999709 - protein, 305 aa, Homo sapiens
MVLEHAEPEYIIRSPAIVPEAMAVLPSIAEFLSSSTWAFRSAIMDDGITEGQRSIEIRRMHWHYVSLEDTGPTLQSALTERIHLLDSRRVRTKVVHDQMLTYQPGGLYQVGEYPLDEGYMGNSYVGKGRGIIRFRVKCKVERFAFTKGDWSYVQGDYKIEETGRSKISEVVNKWSVLTRNVYVRAMARENNLGEVCDKGGSNDRWIIRTNLERNKRVTKFDSKVLQKGDEPKKYPREERYLGEIESLKDYGKHRCITSYSTNRRASYGCKGDPLGPLVALPEEVRGTQQKVRLDWPMKNFALFPE

SEQ ID NO: 999710 - protein, 205 aa, Homo sapiens
MKPAGHVAWHKKRHLLTKLVGQKVPPRELKHLPLSQTKGGEQSMEQEKPRGQPGEKRHRGLVETEALSEDITCTKHIDNRETDQRGQLRGAPTGKQTAGTYEGTSHIATAAQMANMEHTDGNRPQPNEEPQGRNNHEGPQNTGNKHDRGTPKGDIERDTMRDPTKIGPSTELGPKPRENNRPPKGKHIRDRQKMDATASRNSRET

SEQ ID NO: 999711 - protein, 101 aa, Homo sapiens
TILQPNHSSLYTSPPASALTDFNTYFFTCSFDGTHSDTRLNNTDWYTRQTYYTPWSEGTRRRHLIMYDGLCSTTTTHTTLPFTTILTGLAFDTPTYGTLLL

SEQ ID NO: 999712 - protein, 109 aa, Homo sapiens
MKRKEKKERREKKEDRNKQNREREKTDKARAEGGRGRGEGSRREKKKRRQRQRGRAARGARDGERTEHKQTRKRESRLASRRERKAKNKTTTKTKRRGQQEREASEEGE

SEQ ID NO: 999713 - protein, 192 aa, Homo sapiens
ETFFAESRRGFHASTSAVDGSRRSFPLTQARAPHCRPFRSTIFYRDSSRCVPKVPSIDCVLAPDARQHEQNRRDRRVLTYKVQPAQWELSLAVYYSFVDVVADRIEHQHNQAESPGMGRHYSNPGQRVNYPWEGFSSPLLPLKSVLEPPSRCPHWVALRTFELWLRALGGTSKLRSGTSPEEWKTLYRRKTF

SEQ ID NO: 999714 - protein, 162 aa, Homo sapiens
LFDPPSAVEPGIKMQIFVKNPYGGLTITLEVEPSDTIEDVWARIQDKERNSFCDPSETVLSWQCAVRCDVLCLDLQCFIPWYVYSSSLPCRDALQCVELHEGTSVEERSLTNYLPVDRFRHYEKGTGSTTRSAPLQYYLSSGVIAELCINYGTAIRQTSCPF

SEQ ID NO: 999715 - protein, 57 aa, Homo sapiens
MLHPTPGGKDPKKGNATKRIPLAQACQLNARGQVYKKVPQGAGGYYNPTAAHQCSIG

SEQ ID NO: 999716 - protein, 144 aa, Homo sapiens
GGGGAIGRAVTVVCPGAGGSGYSAAGDGAEVTPQVQRPEAEDQRAAAGDAAAGPGVSKQAKRDSLEDAADRTTRRNGDSGTGDISVAEDWRGEVAARRRDIRIPDLHEAGRRGMNTPDSRGGHFFRIHTDKWIAKVKVMAICLH

SEQ ID NO: 999717 - protein, 55 aa, Homo sapiens
MGQKPRETREMVTRNDRDRHEDPKGTPRLREQHRMDKRHTLQDTNHRRTHRELLT

SEQ ID NO: 999718 - protein, 147 aa, Homo sapiens
AVAHACNPSTLGSWTICESGGSRPCLHQHVVTSPIFTYLYPENLSRGYWLVYCRGTVLSIPQGGFACTAEAGQFKLGKSPPWGTGAQHRNFGFGFRNRVWMQTFNGCIPDRHSIAYISDRFRTYDTSTTSNVCAAARHSCAESTQHE

SEQ ID NO: 999719 - protein, 214 aa, Homo sapiens
HDTTETEKRNRRKKDKIKKNTKKKETEKNKKQDKTKKKQNKKNKKTKRKKNKGEKERQKKRRKTKTEEEKKKERTKEKWKRRKENAKTQKREEKEKKESKKDDREKREEKTGTEERHRRKKEKEERKREIEEKREKKQSKKKKKQKKREQEKQKENKTRQKNKKKRKKKKQRKNKERKKEKRKRKEQKRRRTKKRDKMNKEDKKGQIRTRKRAK

SEQ ID NO: 999720 - protein, 158 aa, Homo sapiens
LEKVKLPGWISVRVPFRAIWQAVNVVHVTRVLVHVRPSRTRARITDVYHRHLIGKTLNTIRAYDLVLLCEVVCTHGLSSTGGMVSSRVEWTPSNTMTGRGAQVRNSDLEDETSSSLISDNESRNVNLHTEHIDLAKIARHKRSFMNKVHQRGPQWRYR

SEQ ID NO: 999721 - protein, 49 aa, Homo sapiens
  misc_feature (34)..(35): Xaa can be any naturally occurring amino acid
KHIRRRQRGAESRSALACAPTRCPAVEFNAPCPXXNPLTPPPPTPPPPP

SEQ ID NO: 999722 - protein, 261 aa, Homo sapiens
RLGAPGLALWRRSPLPPSLHLSLPGLMYRALYAFRSAEPNALAFAAGETFLVLERSSAHWWLAARARSGETGYVPPAYLAPPAGPGARMSSRPLTGPSRLYTNTAIAGLVASYKPGNRRWSPPESLIQPTDKKTLFNLQKAPFSPSKCCQVMTFNQPVDQPIGLLLASQGMPMAVCRTGFRACKHSLPQFLRHLEAQTGGPLNQNSYQQASHEASNPIKNGTQTKVKHAGRTRRSAPLTLAFIGETVDGTKSMPIGPSQGR

SEQ ID NO: 999723 - protein, 80 aa, Homo sapiens
KKHIKVLLAQVPTKYGCSAEKLYETCTISTNVWKLGSMIGKAATVVKNNRLYVSSSTKIHDRHCISETITFTIIRQGQYD

SEQ ID NO: 999724 - protein, 184 aa, Homo sapiens
KKSEDGSWGYRTPIYMPNRAIRLQAVLEIITNQTASALEMLAQQQNQMRAAIYQNRLALDYLLAEEGAGCGKFNISNCCLNIGNNGEEVLEIASNIRKVARVPVQTWEGWDPANLLGGWFSNLGGFKMLVGTVIFITGVLLFLPCGITIKTLVETTVNLLTIQMMLLLQRHDGYQPVSQEYPKN

SEQ ID NO: 999725 - protein, 222 aa, Homo sapiens
METKGSWGPAVERSAVQSKTQRVGHTRSKEYQGQRRHAQNMRWAPYDVWRDSVENRGYARKFQMRDPTAEYGPRKLGNRKDIAAVDGTSGRSSGDKRWNLKAGDTEGKTPHKQHAGHHSVTTLPSHRRLPTLGLRRLGSHTTSCGDNRREHAKRRAQADIPRRQASPLSEQHRRYHRRDARQSQPQRHKNGDKRRTREGQTNKNKTGHRGDAGKADKRHSRK

SEQ ID NO: 999726 - protein, 202 aa, Homo sapiens
LLHPGVSEAGAPFVSVSWLKDRGSEAGPGQAADTGCPEPHARTGAGHDLEKQDVVGLSQRGYEKHQECNIDVVVEKQQINVDCFPEFACMCVLNLINEGVVMRLIDKDASLAYYIARLDGKRLSTDVLYTMLVVGCCISERYAVSVNGYNCQYREVDEGPVELDELTRLRGLVVGRKTVMLLHLCGVFGVDCQCLGPFGKSS

SEQ ID NO: 999727 - protein, 105 aa, Homo sapiens
  misc_feature (71)..(71): Xaa can be any naturally occurring amino acid
MSCYFLITISRKSNVNDAVHMRYFIGPSNNSSLGGDTRRTQRGTREKLKRSRVEYAKRRTFNLWGSKHCVXRRSLARLGAPLFLKHNLCLRVGKNFGLDVGRAEW

SEQ ID NO: 999728 - protein, 226 aa, Homo sapiens
MCLTLPRWGQLASASAHAPAAASMPWVGPLGESEGSVASSGQCSHDPMSVCTSLRVWEEEKKRYDAVRMTLTGTPSRGAGDSGWYSQVMLGPYRHNMVNVDCKVNVLSYWWPETESLWVLDLSDRLPYSPNQYGGTGSSSKTNCKPFMVNACSLVSQIRASCLESGVQNAYIITLKDLRGSDSPLYNILETTCVGQPGPKEDADRGEAEPQKIPGQSGCEETSPYI

SEQ ID NO: 999729 - protein, 289 aa, Homo sapiens
VDVLWRKHQRREKLRDRESLGGYFSREGEEKNGEENEEPKEEEEKEEKKEERRTKNETNEQEKELRRTPDEERTNERKRTWGTERTDGRDERERNEHERETPNEHDNTDDRSDDGRKNERRKDTNDTETHRTNERTESDDTLTRKDGERTKDRRSDGRQDRRNTYRRTENDGDEGTTNGRTETKGEEPNEDRTGKDGRHDKKLREDTKRNATRGTEGKHGPNRGQDTHRPAPDRHRNLTDSKQRDTGTKGTHTHTSTRTGTEETGQDEGHATTTTSEHPRNGRSNSRRT

SEQ ID NO: 999730 - protein, 331 aa, Homo sapiens
MKKTTLNSTLHLIRLIFSSLIPSMHDMRITWGWFSSRIYNLCHHDHNHKKHDFGAGTGLPQTTQSLSTTHPGEWATQVAKYWSATCTLVVANSGGHAYWKWTPEWVQRHNALGKGKNSHPLTINNSHPCGKKNDQKRKFSLDNSQADTDSAQRKNSRGTPPQHVGGTTRYPRATREAWPHKSRTNSDRFTQTARNLQSAHHIRGDVNSQSNPQHSGPSETEPQTGPKQHSQGTSRTRGHTGKGHSPLRTQSSETRAGGRTTTTNTTRATAKPTDPTKVRSERHDKQDEVTTPNQHNGAQRRQRNTGPSGAHKNNATQTATYGKKQHVRPNQ

SEQ ID NO: 999731 - protein, 95 aa, Homo sapiens
VPQYFSCMGCCFSRAYPTPLRSAEDDVGPMENVTYRRSNMAGCSLELIFNQGVTVNVREVTNVEEKPYGRAIAEPVHLLTQSYKCVYSYVAGYWT

SEQ ID NO: 999732 - protein, 142 aa, Homo sapiens
MVRNGDEGSQNNATEKRTKRQARERERSGRRGSEEERDQKKKNRQKRTEEKRKKGASNGSREGEARRKPKERRRETKEAKQTQPSANARPEAVAEQKPQTDKLDRPHEKTEEAKEGSTAQDGQRKDKSNKKQKTTRINGSVF

SEQ ID NO: 999733 - protein, 126 aa, Homo sapiens
MVSPKGLSAAVGCCVRRCGVRGCCAPGSRDFPSCSRWEERQAVLVALTLPFLSECFSPWASQLLHVSLRRKTVPARIWLVGQHKIQSQKKSAKNASLDKSKRHVDMIIMACLPIVRVFDIYPVTCL

SEQ ID NO: 999734 - protein, 84 aa, Homo sapiens
SAEGGRTAAMSDSACFRNCLDPRLISYTRRTDYRAGRDPMEVALSSTLSLRQSSSYGRGSWSQGITYNMFLGTVTPDHCLEFTM

SEQ ID NO: 999735 - protein, 363 aa, Homo sapiens
RFQRYLNLWKRLYLLLNFKTLQTVRLATLTIQTQTPRKKTIASNAQCHSEPLAHRKLDYSSGLLTPTLHKTFCLATARTLNLGTLLLPHAANTTHESHLTQLLDAHRLPFPKPHQPPLHPLHVLLSLTRLANCFHPFRGERSDSPLTTHKDHRLCPLHTALPNMAHRQVQRSARSKPFNGISLPHLQHTHARRHTEKHTYAPCSSDFHKRLFQPKLLQNAPPLVKRQRPDTTEPIPAWDAPRHFCRRHLTTAGQRTPRPQTLQPNFWQTPTPLEKPHAWWQHHARTQVSPSHILPQRTPTRRLGLNSQALAPPNNFQQFPSSFRHNQPFPNPHSSQSSAVENRQPLWTNSPFLEHSTFYSDPS

SEQ ID NO: 999736 - protein, 200 aa, Homo sapiens
MVWQPCEQYIMKAQAYQTGKAHLYNITMRRQPSNTICKIKSQTPSCIRAHVFDELTEDDDDKTVYDLAEVKSLKQQRFGPGYLLPDTKAYGDRIDTDMLRLSLNIDPDAKVEEEPEDDPDRASRRHNRQTQSKHEDDDPGMLGKQDMNESTEDTGKTRNLSQLEHTRLATCSNFTTSSPIQGILVVATTPIGRHFHHSFK

SEQ ID NO: 999737 - protein, 349 aa, Homo sapiens
MYYCLTTIFKRSLLFILCMRLRGGANENGHEEVLTTSQDRIHAHTTTTTGYSWPVPDHYLLHRWTDETGQTYDSRFDRDVPLSCTDMVRAWVLILMGTAHLSTQNTYSVGTSDMVHDLYNVVSSANNPSNAQTVTWVIDASTYTKYPHGKTHKAHTARTPPKPKTKRKHKAKHPNPARTKHRPRPTHRRATQRKHDRPTDRAHSHESSQTHGPGGRAALALANRDGRRAVARTEGTKQDSVQPDGARYQPRGTAVGKASGRNGTPAETAHTRPPTPTTQLRVSRRHSTPTSLHSSIYSSLTPGDRHTRPDNPLAPREPSPSAQRVEQEEQAHPTHPQMAEPGAATTSAP

SEQ ID NO: 999738 - protein, 175 aa, Homo sapiens
MATRGRFGSVSVTMLMALLHLFGTVPSVLRATKNGGDMVLSRTMVTQVEWTLVVTYMTCEEGMPGDESSGRACESPDSSKMSPLIVMFTCSSIFGIDSSVMEDASSSARITYDPDLILLGRYYHVSSSSTRDIVLPMVGVQMKALTVLLMLVHDFSSKLSSTYLPKVNPRRGDTV

SEQ ID NO: 999739 - protein, 327 aa, Homo sapiens
VLPGRGRTAVAPSRASVVGPLSLLCPAVGDSCCCSGSSGSGLGDCPAFVAPAAPQMINAEGFGQGLVIIPTSPETEGDQRLAGTQCVPFAGNPMRFEGPRKRHQNAQRCLWDAAGGPWGSGAGRAGAPECHRRRQDAGYARSRQERHVASHRSVRVAALSYPRCRLPAEQWINPGVALAWDGHLLPACPRRKGTLSTNRWGETESRLAGTLRPVTRDTYQSGRPYIGKGGSNRLTSKPAPRPFTGMRHTMKPADARKRGTGFNRRHGNFKTLCGLWGHTTRGLTHRGRGGQPRRGAIQAQNTGPKMLCPVWIISTAQLDIRTAVGDI

SEQ ID NO: 999740 - protein, 109 aa, Homo sapiens
SVYGPRYETRSDVRGAISLINQYSDSDFRIAMSGTECSSSWYYIFILNMRPCRIKYTRETRRALSTNLFLLVVYASCYLTRNVLSLKIFSSNYLPNLKTNFSPLNLKKI

SEQ ID NO: 999741 - protein, 107 aa, Homo sapiens
MDQLIFFSNAHNLYLFINTMSVGYTKATSDHVTTQSIYAFSVYDILDLQLLAIQLNLLSFYDSVDIPATEYGNSHISYHTSSYTSPSYYTSVPYENCFQLTVELNTT

SEQ ID NO: 999742 - protein, 72 aa, Homo sapiens
MTGAQLYMDVTHQVCHTVIGDCAIGKAQAMLPKHRNLGESFSMERTLDLAVILAREVATNNLHSTCTKFNGS

SEQ ID NO: 999743 - protein, 117 aa, Homo sapiens
MHWKVSAIELDYTLERNDSKCQSYEDKASELAQSDKDNKSNLQTMNAASNKFVQQPSLKNNWLFPRKKKNLNSWQNKSEGLIEENFPGLARDLDIQIQEAYRTTWEIHHNKDHHLGT

SEQ ID NO: 999744 - protein, 304 aa, Homo sapiens
SAHPDVGGGGGGIRRSKAGTKSPTSSYVPKGRRRVEPFSAVREGGVDRRAECPELRLAGSFPEKAQAKAAGEDVQVRERHVAGLAAGEGFAPRPRWSGGSSRVSSQVLGASSFARSVSGSQFPGLEPVFVQESEEQVQVPVPKAPTAEVQALIAVILAEPGADPESAVTERGATGSTRRYYRVSFAVPVPVPEQVEHLGEGRTGGKGVRDRAGDSDNYDYEAHKRTRRITANGEGAKGPKGRRVARHKEPTQLSANVRDRIRIETLVRKISQTTHWRGKALGRHSTDFDVPRKDTRTGPRAKER

SEQ ID NO: 999745 - protein, 85 aa, Homo sapiens
EKSVTKCDMREKTIAKRIERPPDTYEETASNLKAKDNQGSIIMTVIEINTIDEILTLNAMWAYNARIQKGYMTGQYRIIVNTSNR

SEQ ID NO: 999746 - protein, 252 aa, Homo sapiens
MTERQEEPMECRLLEHLLHCHIRLLITLVKRVLHDIIMHSTCLTLSGETVTLFEIGSKGSPSVERRTSSYPPKTMLSRRGRNGIVSYRERLFRNRIWLSESLCMAYNLWITKETKRDWHPRIHCDIYLVDTVRLRRGPRYSVITNGAMQYQSGDREDQIVFLMQSHCDEFQTLFNTGEARRNPYKTLPPFTKKRRVHTELEGVKLALFPPFKLYTLKLDQCPTFTTQGTQKPWGRIKGCLKAFQLVNPKSEK

SEQ ID NO: 999747 - protein, 109 aa, Homo sapiens
VWGVRGSLALRRFFKRSLVSTRHRMSPVPFILEDRSKESQELHFETHAYKSAGTSIPVVSLVGCMQADGGPMDYIISEDARGNTNNVHFIHESIIAVCGMPKGFDCLSK

SEQ ID NO: 999748 - protein, 95 aa, Homo sapiens
GIHSFQLLLRVEVDENAYRCGSGMLYGQRTVKQLKRRHQNTEPVDPKERGTKPCSERHNGQDDLDVDDRLCVLKLNGERRVLCSYNVVQVIRFAS

SEQ ID NO: 999749 - protein, 108 aa, Homo sapiens
MPGDTHIRGDAIGTGHENARGGQMLAAEKDNNSARERGHYTPERAAEATTRTRMGRILSWGALPKGGHTGGNGRGKPSQRKPKPYIHTITMSLLGHHVCGIYHPSGTP

SEQ ID NO: 999750 - protein, 83 aa, Homo sapiens
  misc_feature (1)..(1): Xaa can be any naturally occurring amino acid
  misc_feature (68)..(68): Xaa can be any naturally occurring amino acid
  misc_feature (73)..(73): Xaa can be any naturally occurring amino acid
XASGRRRWVRRIKLEIMEFVNFLKNPKQYQDLGAKIPKGAMLTGPPGTGFTLLAKASGGEATVFFFTXNGSEXLEMGGGVGPP

SEQ ID NO: 999751 - protein, 150 aa, Homo sapiens
  misc_feature (70)..(70): Xaa can be any naturally occurring amino acid
  misc_feature (82)..(82): Xaa can be any naturally occurring amino acid
FDPRVREVTDRKLASVVLALRTRTAVTSLLSPTPATALAVRYASKKSGGSFKNLGGKSSGRRQGLLFWKXTMFMLGTWGGHXAIPPGTQVPMWVLGRINVCYAIKKGIVRYTKEVYVPHPRNTEAVDLITRLPKGAVLYKTFVHVVPAKP

SEQ ID NO: 999752 - protein, 162 aa, Homo sapiens
  misc_feature (6)..(6): Xaa can be any naturally occurring amino acid
  misc_feature (53)..(53): Xaa can be any naturally occurring amino acid
  misc_feature (92)..(92): Xaa can be any naturally occurring amino acid
  misc_feature (103)..(103): Xaa can be any naturally occurring amino acid
  misc_feature (111)..(111): Xaa can be any naturally occurring amino acid
  misc_feature (116)..(116): Xaa can be any naturally occurring amino acid
  misc_feature (137)..(137): Xaa can be any naturally occurring amino acid
FGDPAXANSRAPAQLGSPRTEALGAPRTRGTPAAPGQPPAGAPLAPPAPRGPXSPPPRLCPQGAGSRVQPQTRRGPWGRASPAVAATMEEPXRARSHTVTTTXSSFAENFXTSSSXFAYDREFLRTLPGFLIGAEIXLGLLVWTLIAGTEYFRVPAFGWVMF

SEQ ID NO: 999753 - protein, 151 aa, Homo sapiens
TGRGADERGHEPGGAEERGRERTAGGRTHTAGERRGRPAPRESGREAETGARKRPPADGKDTPPANHWLGIADGMGDLGTKQGSKSWGDSRKMRPGPQPWRTMRAQKKNLPAPPENNTSRIKQGTAQAPGLGAREPVQGGSAGAGGSRKVK

SEQ ID NO: 999754 - protein, 230 aa, Homo sapiens
  misc_feature (40)..(40): Xaa can be any naturally occurring amino acid
YNSISGVSPVYWQEQAALIQQPSCKSVSFQQMSGNLCIIXEASSAFIVVKLMPTIDSPISGCNITSISSYNATVTKLLQPIGENLETIRNQLIPTRRRRRFAGVVIGLAALGVATAAQVTAAVALVKANENAAAILNLKNAIQKTNAAVADVVQATQSLGTAVQAVQDHINSVVSPAITAANCKAQDAIIGSILNLYLTELTTIFHNQITNPALSPITIQALRILLGSTS

SEQ ID NO: 999755 - protein, 35 aa, Homo sapiens
  misc_feature (5)..(5): Xaa can be any naturally occurring amino acid
  misc_feature (14)..(14): Xaa can be any naturally occurring amino acid
  misc_feature (23)..(23): Xaa can be any naturally occurring amino acid
SPGFXVIKYVCVEXKGQCVICGXPEDAVVRVSIRT

SEQ ID NO: 999756 - protein, 80 aa, Homo sapiens
  misc_feature (40)..(40): Xaa can be any naturally occurring amino acid
  misc_feature (49)..(49): Xaa can be any naturally occurring amino acid
  misc_feature (53)..(53): Xaa can be any naturally occurring amino acid
  misc_feature (69)..(69): Xaa can be any naturally occurring amino acid
  misc_feature (72)..(72): Xaa can be any naturally occurring amino acid
KAIPYILHPALTLYGNRYHILHHPSTGIQSRTASTCHEGXDPVRLTALXTHYXMHPPPSSPLPLRFRTXGAXVISSTTKI

SEQ ID NO: 999757 - protein, 111 aa, Homo sapiens
  misc_feature (36)..(36): Xaa can be any naturally occurring amino acid
  misc_feature (54)..(54): Xaa can be any naturally occurring amino acid
  misc_feature (66)..(66): Xaa can be any naturally occurring amino acid
  misc_feature (68)..(68): Xaa can be any naturally occurring amino acid
  misc_feature (76)..(76): Xaa can be any naturally occurring amino acid
  misc_feature (80)..(80): Xaa can be any naturally occurring amino acid
  misc_feature (97)..(97): Xaa can be any naturally occurring amino acid
MNAIVDHNGAYMITVQLAICYVLLMYAHQQSPSYLXGLYTPYAAPPFIELLTLXRTRKRCLALLSXIXPSRAHDPXAIVXIGYRNLQAKRLKPALQXPYTLTPSVHHEKHS

SEQ ID NO: 999758 - protein, 31 aa, Homo sapiens
  misc_feature (10)..(10): Xaa can be any naturally occurring amino acid
TVLYGALATXLIYPTVSIQTSWTHNYRIKVV

SEQ ID NO: 999759 - protein, 33 aa, Homo sapiens
ADPTYGAMFDTAFSDDKTVITAYFSLSFYNHEP

SEQ ID NO: 999760 - protein, 38 aa, Homo sapiens
  misc_feature (16)..(16): Xaa can be any naturally occurring amino acid
  misc_feature (25)..(25): Xaa can be any naturally occurring amino acid
MIYTSWARSSSDGKPXLPIIACTIXFAAAYTKSRTIAF

SEQ ID NO: 999761 - protein, 216 aa, Homo sapiens
MGPQTLSRAAITLGGASFPRPQPLFPTTAHPAPPHSPPLTSATHHSLNPPNQQTPPRLPPPPPPTRAITHHLLPPYLQLPPAPHSPTPPTATHPLPPFPFTTPKPPPPHHPASFDSLARKLWRTYHNNSFHHQSHKQNTAGTRTIYTSTDASVANPPLSTLNSPTTLIPPDSYPPSFYQPHCGHTPLVNIVSNNSVPYAPVIPLPHNANSYTPTTL

SEQ ID NO: 999762 - protein, 78 aa, Homo sapiens
GQRMSLKGSRLLKKKGKLIILFSKFYDYHASLFSYYFSGATGADKDVRPIGGLLPQSLLTPWLDKDLGKTISTRKLWP

SEQ ID NO: 999763 - protein, 38 aa, Homo sapiens
MGNAERRVIRTTARQHDSREERVRGDQPHPAWGSRTRG

SEQ ID NO: 999764 - protein, 99 aa, Homo sapiens
MDSNEDIIPLCRGGTYQTLMAGKADNLKQLPESSWRSNTLKNYQTYRTQVKAFLSRGGYDTISNTEGLTMRAQWSSMPPGSVPIVGNTSPDSTLMGAGT

SEQ ID NO: 999765 - protein, 97 aa, Homo sapiens
GLLTVRQSRVYNKNTQRCKKASNKVMDIKLAHKLKLYLENLTRDNKNKATVCNTANNNRNFNFVWYFGVFKHFPCYLHQKLINRKIIPAYICVIPIW

SEQ ID NO: 999766 - protein, 160 aa, Homo sapiens
MTAVLDPRNVPVIYVVANIYENVNISTAHPLPVLSPASFLASSPDIGEDYDERVLASITTEILKSVVARFDAGELITQRELVSRQVSDGAYMSEPASFGLILDDVSLYTSDLRERSSQKRWKPNRWLSRNARGPDCVVAKAEQQTTRRPSFSAEGDSNAA

SEQ ID NO: 999767 - protein, 150 aa, Homo sapiens
VGDRCQSCLDSRKQEHALRNRQPPYQIDPDACFSAKVEQLQPDEVQDYTQTLTASVLNLTPVSLFWMARNRQLLAGHKLESSDMEVLKHIAEYCTDLCNLNTYSCMHSYLQNFSVFLYNCCNDLGLQRYALRYVSPPGFKKFEFTHLEDC

SEQ ID NO: 999768 - protein, 79 aa, Homo sapiens
VGERCLSCLDMRKQNTRFGIAAKYQIDPDDLLLGYSEQLQPDSVTSDIAQTAKCQVINLTLSALLDGQERSMLVATSLV

SEQ ID NO: 999769 - protein, 180 aa, Homo sapiens
MLMVLGALLGAEGSSIGLSGAFPREVTYGEVPRSDKFEGKFRQRAIRIRELFGPLGDIPGDDFPAEYLTLTDPLEKGPLAFLGSTPFVCSLCETFRRLPFFTLDPPFLNLVFPIYLLGSGRPLFKVLGASYGKRTIGSQRIGGPLRGSHNVWPPTFRAFCFEKVLGSISELFNTKPLRFQ

SEQ ID NO: 999770 - protein, 112 aa, Homo sapiens
MSNESIKFIHECRLRDESCLVHCLAGVSRSVTLVISIHHDQSSDFGLEDALNTSACWEILAKPNVGFQRQFQEFEKHEVHQYRQWLTGSTMERALCMDAEEAKNHAGRSGTF

SEQ ID NO: 999771 - protein, 88 aa, Homo sapiens
RHSSLSQSEVGLLGSVVPVLPVCPFWWRLLHQVAARTPVSRGHILASTLVHGPTRIAPNNGCTLSSDSLCAMSPQTPGDDVPVTFHPS

SEQ ID NO: 999772 - protein, 406 aa, Homo sapiens
AARYTVVAVHVGARPGAVAPMEAGSSGTGVARLEQRLADVSPPARARSGGPCGGSVKPDSRECDPGVRPGDPGPLLASRQPSAPRLGPGRRSPPHAFGRLLRVSHKSLSRVFPCLTSLLRSVRPRRLSSGWSHLLVTHGPPVPSGVHEEGLGRGYTRFGANLKWRTVARNPLASYFVFARFEACLACLGTPLRQHTLCARTTPAHADKTSTFVETAIITQTAVLHAPTTTATFLRRTLVVVQKAHAKTPLTQARLQHDFQHRLRPTLERASVGLGVRVGDYHINRGTGYTRIEHFPGPLGRLEKYERPPPWSTLPLTQSRTQITSSRRPHVGQHQHSNPDRKRPQSTPGLTYLGSSGTNGRNHPYRPLGIAYLVRPYLTDTALNGTITYEGVHLMGYAARHAVLIW

SEQ ID NO: 999773 - protein, 243 aa, Homo sapiens
MQPIVETYYGPGRLYTLIKYLQVECDRQVEKVVDKFIKQRDYHQQFRHVQNNLMRNSTAEKFEPRELDPILTEVTLMNARSELYLRFLKKRIRLWLLTVGRLHCASEEGKCIDAPECVLVQYSLKYTAFIDACTNAWMLTWSYTVTIGRMYFHDGMTVNRWSVALDTYENGPVLTSSMVDDVFYIVKKCIGRALSSSSIDCLCAMINLATTELESDFRDVLCHKLRMGFPATTFQDIQRGVTS

SEQ ID NO: 999774 - protein, 104 aa, Homo sapiens
RGVDAVYENVFPPGTQCFFTMGMWSIGAGALGAAALAIAWLANYRRSICTSPRKRALEYLEDYETMKNHLETEPKDLSIDNMCSYVENQCVDCDYCAVAVQAQR

SEQ ID NO: 999775 - protein, 36 aa, Homo sapiens
MFKRLPSGGTCEDKKTVSEERIGKGVQEMKGTDMVR

SEQ ID NO: 999776 - protein, 142 aa, Homo sapiens
MKAREKEAQQEHEHENREEPRTNSARNKKQRHTRGKQHQEDRNNQERDKTKLNTQYKETTEKQEKKDDKSTGGGNKSRAETERQTKQRTGQRDREHAKQTASPRNENTRTKTRTQQKGREKKKKAEEQEQSQQRTEKKKQTK

SEQ ID NO: 999777 - protein, 266 aa, Homo sapiens
LHSTGIKDLDFWLSEVEALLGYEDYGKDLASVNNLLEKASSCWNADISAHEDRLIGPDTDAGRSAIDDQRSAFDTSQVQGQEGHHHTGRFQKIKSMAASRRAKLNESQIACYQFFRDMDDEESWIKEKKLLVGSEDYSRDTNWRAEPEERSTSGWKQNWLRMRPAIQGVLDTGQEAVRDEQQAVGKEDDTAEAGRHVWWSTGKRLKQAGSCPESKTAGRSPWGNISRFVAQCWTEARRPGSGEKDERWWAAKITGETLDRPYQGVN

SEQ ID NO: 999778 - protein, 216 aa, Homo sapiens
  misc_feature (112)..(112): Xaa can be any naturally occurring amino acid
MAWLELQLARQLKVHILTSVSRTVRVSCSDAQLCESCHMRHGNVVGRDQEQPSQSMLAERTGGWITALDRGRQESVAQHLETKETSMSSSQAIQGYPYKTSSAVLNRARKSXNMYGGTPRSIHMPSSRTILRMRTLCVRASYPWFPPKHTPRGKWVKLGSARLASTYRLPSTLVVGENPAAGVSSLSESLSVDAGVPRGGTWMHPTRASYSAVSNV

SEQ ID NO: 999779 - protein, 337 aa, Homo sapiens
LLDETGPEVLQDSLDRCDPTPSGSLNCLTHASPTEVPFMYWSNSMLAWLLTWMKSEKYRKGGKRPRAIMPRGVSRELLDEQRACKSCRIHVDRCHSTSVQVGMNVPDLMRRRLQKKPEEQQEEGTRDAKDLASYGRWDKKLEKRTAGTSERERTQREPDDDARETYKRGHATMARDSMERSWPRHVAKTNVHERITLDAHPERRRVTRGYKRRNSKNLGARNHDRGTVSTVKKYRADYQTRKGKRKRQHRLAAGHTRQPQEPDGMQKPRGKHDTRAQRATNATQPTEHHNAGDQNGAKQQTGKKEMETGQEEKANTTQEERKNKRATTAEVNASAEE

SEQ ID NO: 999780 - protein, 156 aa, Homo sapiens
MVGRLETCTSAWYHSHPGYGCMASLAMDVSDSQCSISSSLEPFVSSGCLIHTRYNYPSGNSESWRVPGAYPEGPYKASVMKGPSEYQSIPREVKIGRFWVYTGKQYYALEVCIFEILFGIARLLELVWNKYWVNTSSSCSWLTNADYTSGRVFDSS

SEQ ID NO: 999781 - protein, 168 aa, Homo sapiens
METKIWTLKFSHNYFNIRLHLSFSMVFGRRSWALGTELSEIFAPTDLSMLLTYGLFGTDASRPRLRTRLTATHTNRWQQLTLLLDIHLTRTLRTLLTLAHLAQHTDSCLRHNLGGISLAAAYSLKLPITGVNSSHFLRASLAGFSLNDQTLLIKTDQFQSGSEPWEQH

SEQ ID NO: 999782 - protein, 231 aa, Homo sapiens
MHPRGAPSKGAPATTGHHPLRLLCIPSFLGRLPFAPAAGPPAPAVPPLPRALGAHPARPWRQGPSPARAHSPRGRPAPTTTRSPGPLLARAPHTPSPGGSSPTVAPCASASCPLCGTSGPGGLCWAPGASSHCPPPRLSSSTARRHPTPPVRGNTTPAHLLSRPRPPPLAASLAWRAPPVAPHVVTVVPSPKSLAPPPSSGRAPHHAGVTRPSPRPRGTSLTCGATPLSRR

SEQ ID NO: 999783 - protein, 347 aa, Homo sapiens
MGSVLAASAPWRAGYHVCVEVPRVCYADAVLVENNSTVTRLIYALFLLVGVCVACVMLHTRNWQEQLKRFLDFVRMTKVFVPCNILWLATNSCYIVCASASGYCLYSSSLFTNDQQLTQYHADSKTLHVPQLDFRLSLNLLQQLAIIIGALLHSSKELFTTAVRLMLGHWPRALLVLILIQPSSLPYLHSCTIPLDTGHPWRRTHTRQPNGATPKHAPLMHAFAHPAYSLLTLSACSFHLPIRPVPWSTNTQSSPVVQEKPRAVHQAVNNAPSCVGCFPVNCPYYWPNTIPKHLPQPKILALGPQLSSLLPAPTPTALPPCATSVPRDPQPHFPPPPTPLRATLSPS

SEQ ID NO: 999784 - protein, 130 aa, Homo sapiens
MSPELLIPLHVEIDPEIQRVRTQEREQIQDPQSNKFAYLHRLRCRYPRSKQNNGAGDQVLALLHGAGPELVVYTRNNLEPLFEDYLVEHAESTGWTRTFTEAMRGVRLGIQELRDTCRDLGGRTFNDPCY

SEQ ID NO: 999785 - protein, 97 aa, Homo sapiens
MTEQDDDAQPPNRPRGSKPGHDKNTKETTKERGRRRQDDSRHNTVDPPREPRKRKKRRGEIERHQNTSAHEPNDPRNKYRQKQKYRERQSKTQEHRP

SEQ ID NO: 999786 - protein, 349 aa, Homo sapiens
VTPFASILKDLALQVIQSAAKCSVRNIYFIWVTRSQRQFEWLADIIRAGCEEQLHHQDLDVCAASTIQSMLAEIVRTSWTTDAVRSVSRYFQKGFLNRASIRQAMRLPSPTFARPRHFEPFFNSHARRSTPKVRKIGGVQAVAPTGHDQNYTVRKTALIKHHQPVQEPGPHLLPTHLLRNLLKPLNRARVLPTDPKLDAGRFLKPQQPTSFMLPYPYIAWHCLRPLHPELIRETSSNAVCLPSVGPVSSSTPLVLGLQGTAPGNPANAVRQRMDANCAARADTLILKGGPVTKLERKGHGRSIPWNSRPGNQLDSPFVRFQNTSSQITLLIHLSDPLTRDQRSPTAGMC

SEQ ID NO: 999787 - protein, 212 aa, Homo sapiens
MLLFYVSLTFPSLNKHGEITKKKRHKFDHRDEPKDYDEKEQIRELLPQLQSSLENDIRGFIPPSPWHVERHVVFSDSYFTSCVCSTVLALYLRRMLAHSLDTSRHILPMVFTLRAGISRSLIDPSPILSSWVVSPWACVSMVHRHIFIYTSVGTRVLALFTNVCPFTTPRGQGPPRTTRLWRKLVSRIISRKPPLSPQRKLFPPVPVLEPIS

SEQ ID NO: 999788 - protein, 155 aa, Homo sapiens
HGEPRGVRMLLIRVMNGEITTRKVIDPTDSITANSQVKQIQSEPESIRKWREEQMERLEPLNQYTKQEAEWKEKAIKELERIEYEDRTEQQQENKSKQQEAQKKGRRKKSNRRNGPKLLKKNKETEEIEKTSQGQAIRMHRIETPVKRDWTTNRA

SEQ ID NO: 999789 - protein, 93 aa, Homo sapiens
QNRFRCECRYCQSHRPNLSGIPGESNRAPHPSSWETLVQGLSGLTLSLGTNQPGPLPEAALQPQETEEKRQRERQQESKIMFQRLLKQWLEEN

SEQ ID NO: 999790 - protein, 285 aa, Homo sapiens
SQPFNKRCTHMKAQIIRRVVHEEELEPRTRRESCETEENPALESELKQGDGWYPMRVNRALYQWLLRHPLHTQRRQVFQANEKVGKVMLRKLEETAPPHALMVACVTWRCLSLSSVDVNLWTPLWLGWMHVQSDDELRQYPQGDASRLKWRAFSHEVELNLSMIEHPKAYLLREVSHNAQSDMERVQVQDAVAGGWAYSHTLSSIIFVPAWLSSSTAGSACAHLSSLSHYWRQVCLSSHVCLLSRGRSCPTCSRHLPGVVSKSCEFGLTDHCVTFDIPHMLLALT

SEQ ID NO: 999791 - protein, 115 aa, Homo sapiens
MLIYPRAVPLTRPVIAHTAPHAILTGSRILPEYLGRNLPRRNGEFNDGIDLYDSMCSCQKSCAVLGKGLSGSSVIALPFNNPAYVDPGTDRPILRLPEGSMSGYSAPWPKAFTPD

SEQ ID NO: 999792 - protein, 117 aa, Homo sapiens
MQWGFRSLWESSKAAISYGLKPWRGRGARGTTVGDLLNPLQSEQFSHGQLSMGLGFHLQKELASIKDFKSTPKRSSWGVRGDGSQLRASLRCSGSSPFISSLAGLEQNDGSRPCCQL

SEQ ID NO: 999793 - protein, 108 aa, Homo sapiens
CAAASLCSPHSLLRCFVGSVSYPSLNYVVRRSAQSPGRPGSLVPLFLYGSGSGIALACLAGVVFRSILYLTSSSLAHLRCYNGSWAGFSSWPVFHNRVPCIPPGRSYW

SEQ ID NO: 999794 - protein, 389 aa, Homo sapiens
GCPGSGWTGWRSASAWGDQRDLGHPVPAPKVSKASHDPLVTQIIPHLTTPTGSVGVQRAFARHPWMARWAMQAQREDRLERDENDKAHVGKITRQHAVRPTHTDIPQVPGRKPTTCDPVTCTTKWTSECIDKQPGQRMRTEDIRGDPSTNPHEGNPHIDMPSFFTIHFRETIPQRHIEGPSPYWHPGQDNEGILYIANTPKGDIPGRPPKTHHSNTDRGPTKERTTSRQLAPNNQEHSPQIRTQDGIPKKVGSPHTRSPDAPTKNNPSPTQYTADDRGAQSEKAEWQQGTHKEMARGQQSPQQDVLAQREHQNRPRSHVKQAPESTNTGRLGREETHGRAHGPTGGHSRKSGSRAKTHSKTHPNNPRIQRGEQRRPDITTHHTQTYRDQ

SEQ ID NO: 999795 - protein, 340 aa, Homo sapiens
ARAQAGPKHTGRGASGPLILRRRTPLSQQVSHDTPLCPWRGLNRWRHREAPSLVRTQGPRRPPGADNSARYLQASAPRGVPNSPGVSGTSGWHDALRPGRLMTCLSMEGSASAAGPAKVAFPTLSKPSLCTPFEQGTLSYYGVIDIGVGVNVGVQPVGGVSPQPVAGPAVGTSLLILRCRTVPSSGWVTQLLVHLIYSVSVLPNRESGLEGPGPLGGPSCLAMGFCFLCLLRLAQGLLWDPGKFLRDLPRVPGPPTLAMLLPDRPATSYVPAGLQTPASCPPPGVCMVGSHWVEGPIDEAGPGSGTGGGAGPPTGCPGSAIPGWGMGSASKRVGSTVLQV

SEQ ID NO: 999796 - protein, 96 aa, Homo sapiens
MTQRHTGTTAPMNNREAEQHSGKQHTQRRDHGHPNATGTGNQNSNRNSTRRNALPSTDRSDHKLRCTRDGQTVNWRRETTVRVIAGQEQHTDITTT

SEQ ID NO: 999797 - protein, 230 aa, Homo sapiens
KPSMHLCLEYASLTQPMATPSRASSGAGDSVKLDTPESREALRRFIFNPLTSGSPVVPHQCQDAAVDTSSEDHHQGLRGEEGSSGRGRRMVRDAPGYRRMPNEENGGAGRLHKCRSARQEHKRRKGARAGSSAAHGKKHTCMGAGNDATGGSHHGRTARGQAYGAQLGKHDRMMHGMTACSIRKDRQEGPDPGMTRQPPPGTSLPRRQNTRAGPDPCTHISTPMPSIQGL

SEQ ID NO: 999798 - protein, 223 aa, Homo sapiens
FSLPSSSGFCACSFHNCFTAAYRLVVTGPYALGSAHPYLCVPRRVLLMRHPFSSSHWLSCLFMLLLPRATTSTLTGFCARTPITQVPFLSRSLSLVDGSKPWCYSINAVPRGCLTRYGLFSGGALCLMRSSLITSSHGSPVPDFVMFSAVDKFYAAFTFDALPLQANHRYLSEWLIWALQMRGAVFKMHAKTGAYTVVEAQYHRGAFKSASVTLSPMKHVCVT

SEQ ID NO: 999799 - protein, 125 aa, Homo sapiens
PHGIMVRSHGCLPNGKRPQPLRGPIKALNSVVTNKRHISLPLTHILMGNDQGDECNKFLVFVEILSATKDGQLVPRSASVYSVREDTSRDIACHRLPMFLGTASVLARTVLSIIATALLLRELFG

SEQ ID NO: 999800 - protein, 106 aa, Homo sapiens
MIQEALDLDGEPDLSSLEGFQWARSFPLFLVPGLARKRSLFWEQRDHGQSSFRRKASYSEEGTGKENEPQQKVSHSNSLRAGQSQKATMHLKQEVTPAGMPSLRIR

SEQ ID NO: 999801 - protein, 393 aa, Homo sapiens
VESRVPVYLILWGNQVGSVLTGWWCNLYPSACKNLANIEDGVLGKYIALRHYGAHAQEEVNEFHRCTEHPPKEIAPAHMTSTYQNGRRPESGNTPTERTTWGANSKGPHGECLHRYGNCADLLARRKLATSQSHPDRSSRSGHGTTAWMQAIRKTARGRQVDPKKSEGNSGDPHSDHHSHFLVKLTSWARLQVGARQLGLLSISSHGREEVGVCTRDTRGIEESERIMIFGPSLEETDPGGSSSMPTCPWNRDDVTHEARNSHHTYVVVLCLPLRASFIMLSGILTNAAGKLIITATPWRKGGEGNLIQAPHVRHAVGAMQARQQLLHPDNPRPLGMVVRSSPSESIGIVYTCVRKDISQQCGGRQDSPWNEACSIYGGRGEGVPENHAILWK

SEQ ID NO: 999802 - protein, 36 aa, Homo sapiens
MAICITGSFVGKLDYDPTEKHQITKGTRLSRNSYLS

SEQ ID NO: 999803 - protein, 329 aa, Homo sapiens
MGVHPLVFTGFVWESILGRLSRGPFLERGLSQGSHGIGALVAISRSGRPRPGPEAMAKALRLQCVGSWVKASWVLRYEVPLGNRRSDGKADRIRTTVEVPSWAMRLKGTGLEVCEHKAKSCNAQLLGLCLVERSPFLYWVQDCSLRMQFSMSIIRTERDGSRVPGSRREAAPAVQVLADGASTAAALGLYGHEANSLSGGYWGLARYRWYLVHCPPAVVLAALLLADSRDADQSDTIVDRTLLPPHHVARGHTMCSSLATDPQPAPQASELHGCYPVRLPTGISRSLPQVEGRAVPQASELCAGAVAMGRCCHAASSHRVLPQDTLLNV

SEQ ID NO: 999804 - protein, 135 aa, Homo sapiens
PPPSRMRGSSLWDGLDSSPLMARLCLCVPLWWGAPSILGLFGPIFCGTLYRIRNLWTTAWSSGEGSPFLGPGHSLFGVLKGSLSGFPPPVCAEDIDTLLGLNSRSEQQRLAAVTYSESLAPACVPFDCAHDESSE

SEQ ID NO: 999805 - protein, 111 aa, Homo sapiens
MFAGRSCRLLCDSPRRWFVDVLIASLPTCGLGSAVAVLRPSASRLTTSVWCYYGSAVASVCLWPSFLVLVLPGAPSRVSRVSIVFVVICVRDFLGPLRCRSLGPGCASGQI

SEQ ID NO: 999806 - protein, 290 aa, Homo sapiens
LQPPTLVTALSSPGTMASTVTTISDATAAAAGVSGANSARLPGVMPLLCFSSYVRVPLQGQWWPGVVHVEELAFGSRSLYGLGGSKRISIGGGSCAIQWRLWQAEPEAAMALVAPSSGLRFRWWMPALAWVWVVDAGLAGRLEGALEFRCVPPLECIQEGHRGIRRLLSPHQPARFDPVDPAVMRADGAVQQIQRPSRTEFASLHRQGVSSVDRENEEFWDTKWTLDCKEQGTETVRQNLEPEYEQYIKKLRRQLDSIVRERGRLGLGAEKTLHEPGWKELQEQILTDEI

SEQ ID NO: 999807 - protein, 234 aa, Homo sapiens
LLSRFGFALLCRFPLQFFLCALCFVLSSLPAPSVSSFFSVPLFGLPLLCVPHLFHPPLVSFHCPAPLAPPGFCWPSFSVWFFFVSLCFPLALLCVLVGLSLLCVLLSFRLSCPVPIGFLMLPLLVALLLILFCLVSTCLTLFVISWALAYFVSLRICSRCIVSHLVPPTFPIRLLRTTAFDLYSRSASDGYLHDTHASGHVRLHANAIMFLLKIPPLFESADDEMRAAHVQQVD

SEQ ID NO: 999808 - protein, 302 aa, Homo sapiens
SFFLGVASRSADVLFPPCVVVCPLVLSLASVSSVRPLVFVFSLVVSLVVSPSVLCLSAIVSLPCGCILLYITPFYVCFFSSVASVAFHCGYCVFFCAGGLLLGVPRFVLVFFSLSFLSRVPSSVFLGVFLSSVAHLCLWSMSYVSLFISVCFSSSLLSPPLFRSSRVFASVPYCLLALSYCDGRCCVLIFSPFGVETDWLIAFTRVLECPPFAALMVVGGHSSHVCLARYLYSLDLAPLGSRYCLCALLCLYLANSSIVRWASITWPLSPWGLVSSSAAESVHSPSSDGKSRFLVDRPLADP

SEQ ID NO: 999809 - protein, 99 aa, Homo sapiens
FPIFLFWFTMIGSYGNVSALLTFCGCFPGLLTFAHSPVSLYPFVGDPCTSSGVVYVQLPFDIGVANPGLAVLCSVGYLASSPQALLRSRRCFFVLAAMA

SEQ ID NO: 999810 - protein, 217 aa, Homo sapiens
ASYMCCCRLSILCSLFSLVLVFRNYSFTVHSGTICTPRSGYGSSYLPLPPLACLFRGWYCSAFCTSLCAFWVSIPLFLVCLSLVSFGCAFPLMYGPSFLFRLFVSILNLLSIYCVIPFTFCPCPSEFYCSCLSSFVCCYGYNLAVFFFALGFMPFPNYVFSLRNFPIISLMYFLPLSVNFSWSAISHLSCLFHLFIPIPYTFFLHYFPVYSTFFGYL

SEQ ID NO: 999811 - protein, 203 aa, Homo sapiens
EPSEMKVQMLSPESGLIYVREIQVVTYRAVPRNYDPGFTSFRGPTRIYKSFNMLPILERVFAEIIPCLRWMVTVMSVYCLASLPEKLSTVLSGAVMDRFRILESNSSWNCIRDNTSTVNGFDEEVLYSLFVGLLFSLLVMSKTVKQWNKMDWARAMDDDRRAITYNIRTRQCILGTWIIIWKRSCISATCGQHRRRFGMKLKN

SEQ ID NO: 999812 - protein, 415 aa, Homo sapiens
RIPFYLWCRVLSFPVWVCLPSLVTLFVSRLVLFSRLRGVLLHNPSVFVPSAPLFHPTFVLPLVCAYPILVFEILPPGFSFSILRSSLVLVGVSPFGGPIVSRLLVLSSPLLYDFSPPVPRRKSSRGQVHRRAPQIARRLLRLGPLSTSVPCVTLSTPHVLVSDRLFIGVPAMTCPVPCLPLGDFPRFRIGFLWISKSFESVRGLSWFSGPVSLPRLSTPRKFPRHSDVCRVHDLSPYEPTQSSLKMISVSAPSRSCPLRGTNHSLLRKHSWCSRFSRTIPSYSDCPHQMNETGYGHAYTIIKSRREAKRLEWNEETDGRRKSNGGPGMVHRNKKQLKPAQDRRFPRSEMLLVTQADHHTPSLTVYVSNSDLPSIMTVDGQRAQLRASQEAEEALRGSGEALTRNICTMAQNGSFQ

SEQ ID NO: 999813 - protein, 238 aa, Homo sapiens
PVRIAAVACARSNKNEGLDLINRETVHEREVQTSNADDAHSWRGYSFSHEVTELTVEVNPASPKRHRFHSCVTRHLSAHPSWGIEGEQCDYDHPLQEFWYSSNVIASNALFPSPYRTRFTDPGEAQESAIILLLDRSVLVTIEYDDTCEHGKLNYLAKVDFSEGINLTMLYFLTLHQLSRSWLCVYLRDNPLDGEASTSCARIFLELTSRKVSITTDFSCVTWPSGFSIYFHVDEAFV

SEQ ID NO: 999814 - protein, 126 aa, Homo sapiens
IPSRSTSGDAFTLLSPVAARFPGRYALKLRQAYRLSSPWSRVDETLACRQVRLQPFFEPALQTSTSCVSFGASSPQSFTGANGGTDWSNVAPWLIGLRSIQTAMTIAKNAQPTDTFPCLLLSDDAR

SEQ ID NO: 999815 - protein, 147 aa, Homo sapiens
SPFLCAPFLLFVCLIVTPSTVVGVPTSLITFGNSLLLSSSCCGAGFFTATALSVSVTYCPFVVHPLFCVYFFSHRPLCFPPCSLDFYSPWDTSALHLLVPINYVPPSLRCVPWYVVYAPRSRATCIWRSIGLPSVPPYVGTYVGVVI

SEQ ID NO: 999816 - protein, 111 aa, Homo sapiens
GASLVASLSYVPRFSYVFLRSIVPLSVGALLREWMVILFAPLGLSWYCRLFLGTHLLGRSTMTCVFRVFLIYSPTLTRACLPMFIFCLVTRACHFCVLLSAAYLRGRLPVF

SEQ ID NO: 999817 - protein, 144 aa, Homo sapiens
LPSHNNGTSSPEPFESHPLTVGSKQASASARKTPESFLGPNAALVNLDSLVTRPAPPGQSLNPFLAPGAPAHLGPCELPFQVNQPLPLTLNQLSGEPMSVGDQHYPLGLAQEWSPMAVASMTSAVPLSALGATWFLSDTTGPCI

SEQ ID NO: 999818 - protein, 149 aa, Homo sapiens
MVSMSFLSCSIRRIRWQETEKFCPTVLCIELGKYDPSSPNRDLHETVLSLQLHCDLNEMLSQIVPGEITMDIVFMSQNKPKCKQVFLFEFKMGCKAAETTCNIKSAFGPGTANERTVQWWFKKFCKGWPGAAAHTYNPSTLGGQGIRIT

SEQ ID NO: 999819 - protein, 209 aa, Homo sapiens
AKHELKGLHDHPVKIATRGGPHRKDPREERKGPPRLLRATVPATANPENMHRHTPPANVREDRMLVGTKACCIAQSAKIMECCHSVFSFNVLIPFRAGLGWSRQEMRWRLSGSPRQELRNHTSRYEDNSMSIGKRGAAFPFWAALPAKSQDEQSQAESYGAKQLLCASPQIENDALITIGPHGCNRMADPMGWRSGLLPCCHSSNVLSV

SEQ ID NO: 999820 - protein, 278 aa, Homo sapiens
FKAPHQSFQYDYTRTRNEYLEQDQTATVLRTYRNACRNDTWRVQHCTRDIPERRSYHWSEEESDRRTNDDLLDKAILRYCVHLYHKRHFAMMSDRRFYLDFLTTTEADDAACSQPIGHLPFFPKAYHHTQQAQRKKVHTEQAANCIQHGGKNGPPRQGGNGQCKLRNKVSNTGTISKAQGSTDRPEIAAADNAQTYPKRHQGHRTRRRDDHPNKTRQAAKPGLPTQRASKAELTSRDINFDVQNYRFTIKTQKSALTLGRPINNRPIGTYGQGRFSTT

SEQ ID NO: 999821 - protein, 158 aa, Homo sapiens
EDRQERRSTNEEAERSPQDSPTSGRRTSDQRRGYVPTSRLDCRCTVQSQTAAGVERGGLAGWKQHFPGKKRLRKGQRTEASCRIGECRKSVEDASLSGTMTHRTRDGGQHGGRNNGKTFNPGLEIKPRDESASTLGEFSSHATSRVKHGRPGSGHAAH

SEQ ID NO: 999822 - protein, 254 aa, Homo sapiens
MESRSVAQAGLQVSQSYRLIATSRPPRLQEILLPQPTRVSWDYRRVPPCRGLNLWLFLSNRWGFAMLRQTGVSDISLDLSVRSLPTPGFPQMVLGINKRCRRHHGPVLLLQFLEAHPLDFPPGSLLFPAVTLLHTCALLYTLWSDRVWAAHNAGLILQRASCSGLLGSPIYITLPGVSTLLNALWRSFADSPTAGLSIGDAVLRGVLQQPCVAYKSPPWGVLPGHDHGRGETLLKAPFGLNAPAEAHVFPPSLF

SEQ ID NO: 999823 - protein, 168 aa, Homo sapiens
  misc_feature (6)..(7): Xaa can be any naturally occurring amino acid
  misc_feature (53)..(53): Xaa can be any naturally occurring amino acid
  misc_feature (125)..(125): Xaa can be any naturally occurring amino acid
MLCEVXXCSHRRLLALGLSSRIIHNGSMYFEHDDIIAFRIGSPSDVPYTRITXREMEYHKSTIFCYFGIPGSTASDKVVMPWSARTGITPVPDAQHSLRSILLVVFTLKQVYWRRYYTTSSQQLXNHHRISQTLWMTIPNSRALYGNTWDPFPQTHDARSRKHTGIEW

SEQ ID NO: 999824 - protein, 397 aa, Homo sapiens
LRRGSPCYRHIVDEAVNLEVILPGPDVQVSSNGGISTAGNHRHGAMLREFYESSQSVQSVMTYHDTAECQHWILGGSTRICIECHLRTNSMVREMVINSSRRIAKGGLFVYRHTMAVEEHSLGNRPWRTPAIKPSCPYPSKRGPRALDDGAIQPQQATVLHPLGCLVTLSPRPREDTTRTASCGSHVHATLANHNKDPLPRTCQPDNTQRAPHSSNANGNTHTHRCPGATRQRAPTHASSQVRECDLTAPPIGAATTGPAQHMPHVEEHPKAQCHTRTAKARRPQRTALPTAAHHAAAHRDNSPARPPPPPPEHCKHRHPNGGPRTRTDHADPPHPAATRARPGTTAPPTATRGRPPPAPRQHPPPAPPRGMPPTGPQARHTAHSPAAPHTAPRAPP

SEQ ID NO: 999825 - protein, 181 aa, Homo sapiens
  misc_feature (135)..(135): Xaa can be any naturally occurring amino acid
  misc_feature (143)..(143): Xaa can be any naturally occurring amino acid
  misc_feature (159)..(159): Xaa can be any naturally occurring amino acid
  misc_feature (181)..(181): Xaa can be any naturally occurring amino acid
AGAGGTGFRTVGPGAAGAGGVRGRCEPIVDWALPGAPTLGGRRSGAGPSNDRYMLPLLCYQRAVSRCEPVPIAHSERWTCRCVCSCLTSGLASGYPYRAMIRLRPTGPWYRTSARRKDSVRIKGIAVECFTTPCXARQASDGXSEWHYERIDARGAVLXARNHTNPGKATEASQSESNASX

SEQ ID NO: 999826 - protein, 71 aa, Homo sapiens
ARTRFWKERRDGCAEKMPRGPVQTCMGWWWSVTGSKPSLRARTSVLTLCDISRRHERTCSLAVEVLDGSLP

SEQ ID NO: 999827 - protein, 228 aa, Homo sapiens
MAVMAPRNLVLLLSGALALTQTWAGSHSMRYFFTSVSRPGGEPRFIAVGYVDDTQFVRFDSDAGSQRMEPRAPWIEQGGVRSIGTGDTESEGPLTDSPSGPGDPARYYNQSEGRFSHRPEGCMAATWGRNCASSAGLPPVRPYDGKGFTIALKEDLRSWTAVDMARLRPPKHNVEAAHVAEAVESLPWRAHVACMWLRKITWEKRGKETLQRNGRPPKGILTHHRLFS

SEQ ID NO: 999828 - protein, 262 aa, Homo sapiens
  misc_feature (105)..(105): Xaa can be any naturally occurring amino acid
  misc_feature (151)..(151): Xaa can be any naturally occurring amino acid
  misc_feature (253)..(253): Xaa can be any naturally occurring amino acid
MHRFCCPLTGPSSLVSWMDANLVFPDGAGATIKMAMGWRCADLPALVGKRTTARLGWEGKGGSARVGEVTADSDVRMRGSSCNIHVSLLPAGSAEFSRAGFRGGXVTLCRCTHVQCQPGDGGESLAGTNERVVPGQRNTLVIVVLPRCAEXCRPGAQCRPSTEKLSEDVKNHAGPWATPSDEVGHNREDSIWCASVESTDLNCLMAVSQAVTRNSVVRFELFLTLVPNPYGAHSDLSPGVDQFDLRREIARPXGANTGTECF

SEQ ID NO: 999829 - protein, 143 aa, Homo sapiens
VWIRCVSEWNGPKFQERERKKEEEEKEKERVGYASDRRGMIWWWWKQWTSNSNEQGNFPPLPTRPEELVVPEILSSGMRMMKHVTGDDVREGWRCDGFDVLTEGRMTKTGRRRSEPSIPQTGPGHLKYNDMDDGFRLMKKKGR

SEQ ID NO: 999830 - protein, 225 aa, Homo sapiens
SSAQGGADARMRCAESVDTRCVYILDCCVRRVHLVRRKSRAGAALRLKLGQELCGMLHRARHATVSRSLEGTEAQVFKAKFKNWDDVFEVDYTRNAEAVLQKPGSLREGETDAEKKDQMKADLTAAFPAGKPPCRLAEEREQLMEEWNRDLDGMDGFRAGSGKKFARGCRKEEFGHFYTRGVVGLPLQEYWVAVEYEEEEKKDGPRRRMVECKRWRGKQPVEAIG

SEQ ID NO: 999831 - protein, 87 aa, Homo sapiens
MMLDDIQEKPFAQELKALVVCCARERRHDMIYEPQTGEPSDCHCIPYYSRMVVLHKQDSYDDAGRLSVELYWLVGGWASTSGSLSLS

SEQ ID NO: 999832 - protein, 109 aa, Homo sapiens
VEVTSSVKPAWHSLTHRRDAQGRQGDGKSNYFLKIIQSSWMIIRNSSHCGSRQCGLLKQMQQIRMSLRDEGCGADGQEHLMMRKDIRGHLDKQAQLWRNCCLISGGMWA

SEQ ID NO: 999833 - protein, 120 aa, Homo sapiens
MASHKGDDEEVVLSYIIYVVSSYVVRIPSSSCAESSMQQQQREGGGRVLHLLHNDEDQIIIMCAAAAAAKRSSNTAAAHEGGACCVDEKIVTTTSYYHPSLSMMIVVASKHSARQKKESS

SEQ ID NO: 999834 - protein, 84 aa, Homo sapiens
MPGYPRDMNLFRIPWRRHIANILVHSSSLHAQKIWNVTQTSMRPANFRGKKPGPCKAVSDSLHRVSWKLFHQLTSTPLQGRDMK

SEQ ID NO: 999835 - protein, 142 aa, Homo sapiens
  misc_feature (99)..(99): Xaa can be any naturally occurring amino acid
MKSVKVQGPRCYFEWYNNADGLDSDKIRRRNGDCEKGGMNYTLGGITRKLTVPVGSVDLGYEYAWYTLSALLLLADGHEYTFFLAKRYKLIRIYAPFEXRDLHDGPCVTYRYVAWSNQFHVIVLPYSHMCEVNMYGLVELLF

SEQ ID NO: 999836 - protein, 205 aa, Homo sapiens
  misc_feature (110)..(110): Xaa can be any naturally occurring amino acid
  misc_feature (155)..(155): Xaa can be any naturally occurring amino acid
  misc_feature (166)..(166): Xaa can be any naturally occurring amino acid
VVCERARLLRQVRASRLPGCPFPEYSLMAMSRPGLPGVYRADGVLQCSLNENLILQWIDLLNGGIPSVSHPSSVWQGPQAVWCVASSHQMDDDSLHSIALDYPEDTFASXVKTDQPAASLASVIERRIRPYGTDRNVNVGSDGMHVTSRVRTASXAVRGWAGCSCXWPANLPFRLHAPSKPLPMGAQAGFCRHFCSVPVSHVYLS

SEQ ID NO: 999837 - protein, 279 aa, Homo sapiens
LAYSLLLERQDVRGNVEDDLIIFPDDCEFKRGAGVPQREGLRAEVQGRVQSGVFFWMQEHKTDQDDGALPESQSEYLNKLPDALGHLGASGSSGHELVLPLVLSDGWRCYEPCWEIMKPQASVMQRHSGPRRGYGGTWVGAWGPLSWTWAMCQLTWWKQLVPPGDASSFLQTPGACRQQVTPVIHRTHFTRAYLQSLTAPASVTRVRKPGALEPQLPGMEPALAGSPTQAIQHERAPEHPGHDERTSRASRRQQVDLGSVLTPEIWSHLANADVQDRMF

SEQ ID NO: 999838 - protein, 262 aa, Homo sapiens
GRHGDDLRNTKTMEISEMNRMIQRLGAMIDNVKKQCAILCRTPLADAEQRGELALKDARNKLGELEEGLENGKSRDMARLCCVEYHELMNTKLSLGRGDRQFDRKLLEGEECTQLSVRRELGPVKISVVTSSVSSGYGSGGGYGSGLVWEVLSRRPRVEALYAGRVSYLEMLTTPFSKVERVLSRPRMMDSVVGGSDLLVAKHVAERAGGDRRYVQGAREQHGIQAVKDWSSTNSFTSRKGRLHRSLKKPCLAKFTGLSQGA

SEQ ID NO: 999839 - protein, 171 aa, Homo sapiens
MLHQGKHGSCASPVSLTYAIRTQPPLFTCVESLQAMVGLELGPGIPTLHISRVGTFLGSFAYAARSWTTASNVQRCGGWRPYHWSLNSLARAQAEHLDVILAHIPRHSSASRSASRTWLQLSIPSLAHVSRATHLMCARTDGVPRIFHMHETLYGQDRAIFPECSIKRWTR

SEQ ID NO: 999840 - protein, 179 aa, Homo sapiens
  misc_feature (91)..(91): Xaa can be any naturally occurring amino acid
GASPGDSHRVRLLFHHDVGVYCQSILTNALWAWMESLQLKAVCSGWIAACMEKKHEGTQYRTHGGTRITGTCGRVNSDVRVLKQRQRVPVXAVGLRSECHCTPDEREAFEYGRWLTRRVGTSYLGSKGVRHSGDHFVCWADLHKDEGVESCSRSTQVSLRIQPGDAHDVLVLLGIIDLV

SEQ ID NO: 999841 - protein, 111 aa, Homo sapiens
MRYPGDTELDDNYGYRSRLSRLNAECSSDSEEDEEDKNTPCVQLWMLRANKHQIKQAVNECCNDHLDCESQVTTRLISSLMDDERKALVYRLGFLTYECFGMYVNPKVGIL

SEQ ID NO: 999842 - protein, 296 aa, Homo sapiens
DRVRPASTEPRLCRSGVPSTPADQLTMAVMSIAARRRSSNGSGLCKAGFAGDDAPRAVFPSIVVAPQAPGRDWWAWVMKDSYVGDDGPMMSYEEASSALKYPSLSTVDRHQLGRQWRKIWHHTFYNELRVAPEEHPVLLNRGPPEAPRPTGEEDDSRVMFESFYRCPAMYCCYPWLCYRLYASGRTTGFVMDSVCRGQPDTVPIYEGYALSPLSILRLDLSVRDLDLTTSVKILTERGYGFTNTAMREIVGDLKEKLCYSRPGTYDPGDGHRCFQILTEERATSCLRAGHHHWQCT

SEQ ID NO: 999843 - protein, 180 aa, Homo sapiens
AGKSRCATPGYASDEANPMGITPIEYTATDEGAAKSSDDAAPLLTYTHEAASCRWYGTECSIETPSFNGLCWLMRLVHSFRSFMLQLCSEFHDMDQALQSNVPNLYDNDQWYMKNADDASRAALRALLGGELVSLHIDYATKCNASLHLRSNTRYYAPTFTHCFGCLPERATRMPIWLGS

SEQ ID NO: 999844 - protein, 271 aa, Homo sapiens
ALARALEEAMEQKAELERLNKQFRTGDGGPYELQGMMLGNEVSMTLGEVQAVPYEQQVEESEDSSVEKLDGRVCRPPRDAKAAVRRSTVQAMRGPVQSGDAAGPGTEHEPSENARRQLGPDKCAGDDCEARVCEARRQDSMLLRIADSGLPGRGKPGSLDAARTLGGSTVELVHNQRIQGTNADQIRLRECCMAQDEGLHCASWDDNPGPLAEEILARGRKRTSNETLKQSCEAEMSQVAGGTGSRGTCLAPGQHERDELADEIANSSGKG

SEQ ID NO: 999845 - protein, 186 aa, Homo sapiens
RTSAQTRSSGMMDTNLMTVKLSLERNSSERAKELTPPSSACCSADPSKCQISSERAGPWTVAEKHRLVVAVLKLCLQEWMPRNSFLLSRAPGLAAVRCTCAGPWWRAALPSFHADRQLLIIPPAHRLARSLPGLTPRDVVTCRVSMCSWFQAPPGSRGAQRSMPRRPGRTSRGLRPGRSMRNSDPK

SEQ ID NO: 999846 - protein, 98 aa, Homo sapiens
TKPERKSQAAPRLDVVATLLLHLSARPWFLGVLVCGAVELCVIAPEQKFHYQVMACLSTVINYSTARSTHHTAAVQFGRHAGIGDDKGLHKNGKHAFT

SEQ ID NO: 999847 - protein, 102 aa, Homo sapiens
  misc_feature (33)..(33): Xaa can be any naturally occurring amino acid
MAIEHRAFRMVVADGRAPSSQMQHVRITSYTHXKYTRTIGRQTGNSCRTSNVGARDHSAGTTLSLGDANKRFLTNSKAVSLFGQSRRRGALTRTACNGNEPG

SEQ ID NO: 999848 - protein, 132 aa, Homo sapiens
IRWRDVSQQSSLGSHDMGPSSFLPRKRRQSRAILMLKVKSFPIRWTSSNCRVHLISPSWRYTSVWLVTHIDAGKVDKAGHPSVTKKDVDERLDHLLEAHSKPMGESVGHIRWACHVLRNTPPRDVLSRGLIS

SEQ ID NO: 999849 - protein, 227 aa, Homo sapiens
  misc_feature (135)..(135): Xaa can be any naturally occurring amino acid
  misc_feature (143)..(143): Xaa can be any naturally occurring amino acid
DNAGSVGKIRTPVMDEPCRDLIVHSNRASMPMTGAGALGPRESQVQPGIPDSTCFSILVTSAPRHESQATHLHVSSWYQAAVARDWDGIVTWSSSQIHCDVWQKALWAIERHSRISSTLESHEGVGQRIDCHLDXNHRHDVEXDEEADVTTMWKPLGARGDAQCQDSCHARDDGQTIEQEANLMLYWQTMASLEDWLEPNPCESGEYTRPNIEQSGGRLCLQCDEQP

SEQ ID NO: 999850 - protein, 210 aa, Homo sapiens
MSRCSVRMVTMSEEVCDGAAAVRREVFPSGPCNYLASLPVFASPSEQALLEHPWDAVVQCLLASQDCVETMSPEHRKIVVASLQDDQLLIIILRTDCRGLEQCARVHSGQTSKLENLCVHVVLAHDFRLDSSILTHGVISEPVDLDRTLGVEIAMAQTFVGTIWCLKDSSRVAMVTLQFHVETAQRASRLGEHAAAKDHRVVMRPVGPGD

SEQ ID NO: 999851 - protein, 157 aa, Homo sapiens
  misc_feature (124)..(124): Xaa can be any naturally occurring amino acid
MKALIAGAPEPETCVRNEAHSYLTGDAPKMTRLSTCSSQTLQASSRSHGMAIVRPLKRCPHTQKRSRKGRMLDGARLRGTGDRTVNLQNDSHPARVLQSGYNASSYQQADEPRDLNEQCPPDTXEAVAVRASHRSGKNMGKRLNCLDNGAARYTALT

SEQ ID NO: 999852 - protein, 266 aa, Homo sapiens
MHTTNDAATGIAIVAMRQRQHAHSRWDSSRCSHKDAVKHRHTSNRTTGKRGTHSAQATALATQAASGRGPPLETTAGHHNTLHSPRQRSVPRIAATAGQPSSLLSPGHGTARGATTPPYHPHLTGHRQAQQHASRAHTAPPYSGHPHPSPHPAAATHRGHPKHPSQAHPSQPEGPTNEAQPDTLRSHGPRGLVANRPTPTSTTERRYQPRRRSVNTQPPPRQRPPVPHQGNTPRQAARKPDNTRCDNTWACLATSDGTRPTSRRHL

SEQ ID NO: 999853 - protein, 312 aa, Homo sapiens
TGGHVDIPCSTTPMDPQHLGCSTLTTDEPGPPTSHGHHGTPPMVTGKVQHEEAHGSQIAEQSRKKDDCRHHLVGTDARRQRRRHPKMAQPRKNHTDTRSDEEQQRNSRRRGSRQNNNAQQPRDEKEEAKDDRERQRHGPHAEQGEREHEREHERARHRSKGRTKTATEKKGSEKTGQPTESETKPRRTDSERRGTDDSTRGEGEREDRSDSRGGGAETETERSQRRDESRDGTKEKEDETEEAAEKRHGEDAPGQGEEETEGRQEAESRAQERRREKRRQRSGEQQAAKRRADSDRGHGGDREGRGRQRRRR

SEQ ID NO: 999854 - protein, 603 aa, Homo sapiens
MRLVVTADDFVLLALLTAEMSVYLCDVPFLCLGACAPAVVLLSCVNCVLCSRDDAAGCEHVPCMCSMQSHSVCHRTAQPFVLTCAWPLLCAPVRLPAVLSSILPCSVPLWMCYPSHCAHDCVTSLCDALCCAVPCEQQVVTIFPSGACCDVPASPSTRTGICSARMCNPPPTAMAFPGPLRTRDCLRAQGASPSGLRPPKTLKTRSCPYHLPGETPLCPFGAPPTAMGHHPPKTRAQPSHGRTRDGPTPQLAQASIAQPCLALPPKSCPEFALAPNTPLGFSLAPPALWPPHPFGPNEGPPLNFGEQAGLATGPVYPKPRGLRKTSVRPPGASMAPTATMGLCRDMRYTARRFSRALFDPKPASSRAHPFLRGKRVGRARALMRPLGPRTCRHPVYAPRPPPSAPRPPPSRYRAEGQAIAPSHTPGAPPQVMSGHHGHPDRLGGGAPPPRHIQYLLTRPECRRTTAVVAPPIIDPSADYLTMRPKRKTPGPALIYPTRQWHRQDPTLYDQAPTTHPLLFTPWSRPHPSLPPHTHILHTPPSPTYSYNTSTASTSNIICNLLTTQTRNQLPHPHLIFTTPPHPHQRRTISSPPTYRANTTTTAA

SEQ ID NO: 999855 - protein, 208 aa, Homo sapiens
LSGGEKALTADAAGVAMFQLNPAPFCLLDEVDAPLDDANTERYANMVKRMSDKTQFVFISHNKIAMEMAQQLIGVTMQEQGVSRIVAVDMDAALTMAEAAEMQDNNLVMGLLGAGVVFVLVIVVYNQWQIRKARRPEVYNPAVDETPRGEGWTERAESALGGERDETGRVEPRLEPGFSAKTHTPATGSAEPKPGDRSELTPSGDDAA

SEQ ID NO: 999856 - protein, 207 aa, Homo sapiens
MAEREPTAGAGGLQYARWRIEEERCTSRQPTSTPGHDRSIRGDRQERDKDDGGACEEVQRRHLLGRVARFPQEPEGPERLRCCDMARDPWVVHASVAPVPHWRPGIMSGRPWIAFKKQLVYVLNGGMVELAESGVFVKRARALHRAVIMGPRNEASHRGQYLFDVTKRSRQTHILTCIYDCEGDGLVAPRSRDEIVREVPQDFPRVC

SEQ ID NO: 999857 - protein, 86 aa, Homo sapiens
MKTPTLGDLTDRAEHLNGPQGLSDPPPQTTKEPGAHLNQRTARHCRHHTNETLRWDHTKRPSAEQGNCGTTHRHNAHTLRDKIIPH

SEQ ID NO: 999858 - protein, 351 aa, Homo sapiens
LFLTGRSANMQLNCRWTIKPVDAEIDKCCNPGPGGLTASQVRRFRGTLAWGLREEGRPRGARLASRTAMTRMVTDCVPPSRPSSEKLQRRENADGYERDTGIEWNVMSIESSTFMEGPRPIRGTLPWFVYQIGTLLQLQRGPNKSKKQNVRTSEQIVITCRENEYLFTEKLDETTVVRLNRREAIMASAKRTDGHYRARPMIAVGAANGQLLAVRLINGYTFRILLISCYLSTPVGIAPSPYYVHTFTGTDVALCSRLDNHCAPTLPRRHTLWLDMAPPCPTRLLAPNTNFYLASPLAGHTEEMYPAILLPRLGFVLPTGQPSIRVLVGKWDLLGLDFPPIRSPFTPSKHI

SEQ ID NO: 999859 - protein, 166 aa, Homo sapiens
MLIDWSNPDEQKHIACLIGTPRSAPKFGPSHLLFVYSLQTLPHWYFSATTEVKYINSRMHPLSITESECNISFHSLNDKSQGVSPRQSFVVNAIDFCVDNNYRPTLLGSSHATELHLRVVCAVLGEKYAQESDLLTIVRNGVSTCSYILSHDASSVQHARSSPVRT

SEQ ID NO: 999860 - protein, 88 aa, Homo sapiens
LNRELAEQKASEKQHITLALEKQKLEENAGDLTLTVAEMHENITEVKYRLNRIEIEDRMKSEMPWKMKVRTQLRRQAAAHTDHLRDVR

SEQ ID NO: 999861 - protein, 136 aa, Homo sapiens
  misc_feature (70)..(70): Xaa can be any naturally occurring amino acid
MTCMWSLRARRWSLGMYAEATYRKFGVLMEYQVERYDAHSGTSAYACWARGGNKTRRTMYHVNGRVEDSXCESPSVLGMLGHRNRPLGSLCRPDPPEQAPGAGRLVGPLVQREEPPVVFREGLPRGGLLRARLDRR

SEQ ID NO: 999862 - protein, 75 aa, Homo sapiens
DELELSYAKNGQDLGVAFKIRSTEVLAGSATVARHVLCHRAVQYDFTLWSEWNSHIYQVPEDVYFHSRNVPLYAI

SEQ ID NO: 999863 - protein, 81 aa, Homo sapiens
GDTRRSAVLGRADYRDLEGARSYVPDGRTQQNSSSAIGGDGVNLTSDCSQFVPWATIGHINMQERSVGTWIYACLLHTQER

SEQ ID NO: 999864 - protein, 75 aa, Homo sapiens
RRRKLLPHSLEAEAKAKAIKKAKKAVLKGVHEPRKEEDPHVHPPFRVVREDTCRRRVRHVPSISSEERSTGETRR

SEQ ID NO: 999865 - protein, 149 aa, Homo sapiens
MRAPPQSISPAPSWLFIPIYIWVCQKALSNNIISSGVLLFSLPRVLSRFVTRDAGRSGPRRPAGLPAALALPVPRHAPHIVLRRQPQREQPQTHLLNATNGRHISSAPKALLFDRPPYLFHRDMVCHTKNTPAAPRCGDTLQDRRRISL

SEQ ID NO: 999866 - protein, 84 aa, Homo sapiens
MNQEKLAKLQAQVRIGGKGTARRKKKVVHRTATADDKKLQFSLKKLGVNNISGIEEVNMFTNQGTVIHFNNPKVRHLWQRTLSP

SEQ ID NO: 999867 - protein, 266 aa, Homo sapiens
  misc_feature (60)..(60): Xaa can be any naturally occurring amino acid
  misc_feature (197)..(197): Xaa can be any naturally occurring amino acid
EDCLGVQEYSKLCLTSIFLLFLLSAVYLVPWSCQGPCWSAAKVSTRQSSWQWVKALEWNXRLRLSLMSRQKYVRATNLPTVKLVGRRSTMRQLSCGLLRFLRPRGEDASIGYVCFRSNMVEPRHVLAGALSLVGARCSSRVANDLITTSSLAGLLTLARAASVRAPREAPIAWNHFGGRRAGRDSRTVDRQLRGASXLAASALMVPLGALSFWFQRNEVSRTRRKGSWVRRVRAVTASHAHDASFKVTTCSSRQSLLLTHLVSESV

SEQ ID NO: 999868 - protein, 100 aa, Homo sapiens
RELGCRFCEALPDTRAFPALAGRAPCKVGNAEPRTRSAASGSPSGGRREEPGGEGPGGARGLAGAPAPSRVGSGQTEHKYAVMEEERRAQKDEGQHEARK

SEQ ID NO: 999869 - protein, 339 aa, Homo sapiens
  misc_feature (206)..(206): Xaa can be any naturally occurring amino acid
  misc_feature (208)..(208): Xaa can be any naturally occurring amino acid
AAVLALSDKPTACEAEFEYSHALHSSIVAASDSNGRQASRTRELYAFRERASSSIHERIISDVIATMPAYPRRDICEALRHVPTLMDSAESVRGAYAVVACVEPVKPAQKAADPWLGMWGENPIWYELCAYNLRLGEEKANPESIETHGAQGPGQCVRKMDFRSSQLRTRFHACGPFALKSRRQTRGQERQEVAQCALKRAYLRGXYXPLAVNCVPGWENRRHDAIPRCCDWVWLEGSESMSPKGCREEGTVHVHQRLSIAPPRCGPVQVDRPRGDYRRWRVVVDVRIRRDTLDKNYLCPPKVSSYLKQRGGALWDVCPILALGQFHGAAGGKEYTIWQ

SEQ ID NO: 999870 - protein, 247 aa, Homo sapiens
ASCRPHLLPGKPAWSPMANCDYSPVSGDKPCCRLSRRAQFCLGVSILVLILVVVLAAGTSLGGVLAVIDCVRDQPPMRFPETVLEAIASSITENSSLRLMTIGRRCPHARNSAMRFEEGCGCIMLTDQSHCPHCTSIRTTYRSAREFEASVEASGAQYPYARLLEFLLSAMHDIIHASWSRSWFYVEVRTRDISSPPVQDHLLLRALTLPRSNLIIGCCVGTSRPTSRTYILIHILAPKPVEDNGSD

SEQ ID NO: 999871 - protein, 279 aa, Homo sapiens
MGVQPSSSGLRSDVALRAHNPEFLQRRSWDAQEPKHIHEEEDAVQQSQASFSVSPLRPLEGSDGERYRATGRCYFNGPRQHERKSEPHGVIILYRFLILDSQLMKIWVWPISGASSVEETPSEAVQGMGYQGIEVTWDFREAQLLPAPDLFLLREEDSGGDQDRRASKVDARGLYRKLDLRALTPALGVHLRLIPYPPALPTFSRMRPWVCRALGVPHLGAGAGGPLFGPRLPRAKKPARSTSLYGVEDNASASRTREVSNLGDGRAHGDRQGANPGIS

SEQ ID NO: 999872 - protein, 179 aa, Homo sapiens
MLTTVRLWSWEVRCRMYEGTVSSGRAVTQSRMVVQMLNLGYCRELLGDLDGDSGVMERCISGGTCLGYEREYCRSCEAGVSMSGGWGKNGWCLANGVMKFLGRIGYRFLLHREALCNSGLTNGWTGRHSNVTIVPRLGTGLAVVGRLGADSRYFVMCGSLVGRKRNFPAPAADPCRVSG

SEQ ID NO: 999873 - protein, 70 aa, Homo sapiens
LLPQLQNFRPVHDIFGFLTLCYGCIRYPKYVYSGAIHGPVAERLLLACVVLDKASGSGGVPVTARLDPIR

SEQ ID NO: 999874 - protein, 142 aa, Homo sapiens
MISLPHWSASEIVIPNATHIKRCSPRVNGRHGQGVTSTGKGFPRSGKLPMRLSAGVLWPPNAMGLCARCSTSLCALSCTVALSAFQWNTLSREAHSNRCLDEGRPPEVPYGAARELASLEGRPCAESVLQKSLGCAVGGLGG

SEQ ID NO: 999875 - protein, 119 aa, Homo sapiens
  misc_feature (15)..(15): Xaa can be any naturally occurring amino acid
  misc_feature (51)..(51): Xaa can be any naturally occurring amino acid
  misc_feature (53)..(53): Xaa can be any naturally occurring amino acid
  misc_feature (96)..(96): Xaa can be any naturally occurring amino acid
MASIRKRTSLLAVHXKPDTCQACRYTGQQTKYENTHAHEHYSRHTHQLKPXTXDRSGSAYETRHVHAYVQVHANCKRMHTHIRVQLLIHGKLFHFXCTDLPIDPFAITNFQTGTNMGNS

SEQ ID NO: 999876 - protein, 111 aa, Homo sapiens
MDLGIQSLAEAVVVASQRLLQAAGTSTHVHHIVAEVKPLEAETGQEIRRTNAHGTSCGNRISNPFFVLRFLAAQWLNGERLADLRCHRIVKRPSTKKQTLIALAIGPGVFF

SEQ ID NO: 999877 - protein, 113 aa, Homo sapiens
PEKEPPKPEQVECRGALPCSGDIAHATCEANCTSLGSSIAGPPHQCEETMVQLGPERLGGRTSRPRIPVIQLLPGPVQSGILAQMPCCVSPVSRRGPGPHGGIIVAQNIACTA

SEQ ID NO: 999878 - protein, 218 aa, Homo sapiens
ADDEKVAAGWDTGMIPLDSRTWAVRDYQTHYRLKRRATVWESACYPGTGELSASVNRESGEVLRHLAQGSTDVLRNTACGCVPQHQLTRRVLSVPEQARYTNHLVYAPVGGPWVGLSRMGIPLRGHTHEIGDDRKDHIDRHRRRHHTGSDELHGIMYQMGQEGRNLGDVTITYRRITKYINTHLYKTGTQIQADMLRNGEDECSPGSPGSYHQGSVPG

SEQ ID NO: 999879 - protein, 132 aa, Homo sapiens
KAKKEAPATSVKAEAKAKASEAKKADVKGVHSHNKEEDPHVTAAFRRSEDYCDSGDSPKYPRKSAPRRKQALTTYAIYQCFRCHTESAMKKIEDKSITLVFIVDVKANKHQIRQAVKKLYDIDVAKVNTLIR

SEQ ID NO: 999880 - protein, 429 aa, Homo sapiens
LHIMDLWILSCFSSSGWCLKRFPGGSCMGSSDEVTLSGGVMRPHWSLAGVIIPKRRVIVWSQVTTTVTCHVRINVEREAVCVFAGTEYLRITNEEYAVGVQTSDRWAEVPGRVTGGVGGSALAALRYWKPRAERTLAVKQDALAARQAGRPYVRGLQPRGFVEDASPVLHARADVVISRGVIVCNHWPTRSPLDPLLWHQKCVPSGSLSPGWTIGMRECPCAKPIGRKVHGVGYRAGKPGARRRRKEKSTCGGVSVGARTEGAPFRISRRENRGKAIRRGKTPVLPKGGAPPLAALGRGAVGGTRIDAKEVCATHSRGQEHGVSQKRAGGVNAKTPPSWSSHHHRDVRSRAQPIRQQQEGVPRWGGGTGKQTTTGGVPPQHNTTGFREREKKRFARGTGEGGQPSGGATPFVEERFPHKAPTPKGKRKR

SEQ ID NO: 999881 - protein, 106 aa, Homo sapiens
MTTGSIRELGTAKPYSLSRLSDHDDMAAGHATADQLATQGDINVLLNRSNQRHSCSVLCCTYEMTVLWSRRPRSPVIPVADVQSCQATWTPGEYPQVREMRRKAKA

SEQ ID NO: 999882 - protein, 69 aa, Homo sapiens
TTKRREKKKNLLGKINRLLRKWILYAKCSLVLSVCLPMSPSPRTVRTLMSQIVSNSLSEVEAQAGERRR

SEQ ID NO: 999883 - protein, 241 aa, Homo sapiens
  misc_feature (47)..(47): Xaa can be any naturally occurring amino acid
  misc_feature (51)..(51): Xaa can be any naturally occurring amino acid
MVGMASPKISILLFSGALCLVPSIVERVSPLHIERIAYERITMLPGXAERXEGVSRISVSRSGRSVWNRYERRMSCRCRQEDLPQSPEDGSRGRLSDRAGVGRMYWDRNKRNVNGPLTVMYLVNSGDPAAASTNSETRTGSHTIQRMYGCDVGPDWALSSAGTRQDAYDGKDYIAPERGPALLDRWRDMRQAQITQRNVGGRPMRLEQGESLPGGPVRGVAPEIAWMNGKDTHADNVNPRK

SEQ ID NO: 999884 - protein, 42 aa, Homo sapiens
MGPFVESYGAPSVLVLLPVVSFLSLASFASRWPMIGVLLQFA

SEQ ID NO: 999885 - protein, 211 aa, Homo sapiens
YTRVHIFCGVLVVVFEAEPRSVTQAALQWPNLCLPGSSDSPASATREAEAGECLNLGGGGCSELRLYHCTSIQPGNREDSVTKKKKRTKEYSQSENYQGKGTTRPRDKPDENTVEEAQKERRCELTREGLQEAPRTEARNQKLAERPPESIVNGSELGGKENEWGHNAWRRGWHEIRTAGGKDAEENREGSVTTDPREKRRGEKRGTPERG

SEQ ID NO: 999886 - protein, 91 aa, Homo sapiens
MASRGQRMAHLPGLDPLLEAIDSSIGDAREVFSGPLLPGTWSRNWGVPLFPTLCGTLSFFLGAFVDTLTIWVPARALLPGGLHEGAMLPVH

SEQ ID NO: 999887 - protein, 407 aa, Homo sapiens
MPLTSDHRRGPTMSDAAVDTSSEYHHQGTFEEKKEVVEEAVTMAKPRPGALKGVDCQDVATNDVVVPSVRGELHGSGTIVRHNGSQRQATVHKDHTNGETYVRPGHMHRQTAGTHGHEATWTARPLQGGLKRRELPALTHMTRGPPLARTDNCDGHLVLSYTPTRHPKRQQRQRHILQQAKLDWTYQRPPVGRSANAAMERGTARRDVTYADGTQQGTKDAPTPEQGRGGEGDSNVTTFEPRMAHGDANTNAETKSRKRKLEPKTDKVHTEEEVHHNRGRDERRRANTAGTGRQGHAGTRTREKKRERTRKGKTSACGTGTRSDATERATDREGPDSKHQRPRQAKDSRDRYRMSRTTIPDKRQISRKAGGPGESATEGTPENKEGPNAAGQLGGGNSSKDEKETEK

SEQ ID NO: 999888 - protein, 221 aa, Homo sapiens
MSAAVTESIHSVLYPTQTRAPFSDTSNTPAGGMRYPPPSVGVTTKRNMVWHKQSATQRTDGPPKQYRSAQRMTPTHVHSNRSSGDHPQCGDKNTLRDARRSRAPDRWSAHRRNSTNSHKVSAAGRQHALSDQHTAAYPSAAEREHRQARTHPPQRDAPLIQIDDNTHFPTRRGTLRDTNPYPIDALSTAAGESTPTYTQRATQRAKQTHTLLVCNKRDTNN

SEQ ID NO: 999889 - protein, 231 aa, Homo sapiens
TILLNDPVSGEDAGWTTVVVHMAGLRCTTVFVKLQSRIKFLVIALKSSVGRMYACVPPNLVPQIRWPFKILCQTVPHRPLLVDLTVKRSGARGSEVIYGSIAGFHAVDCRLGEARRMTSTSLLHIHVAMIIASMSIIFLAADTDGMEMLLCYEDEGSSTSNTVLGALSFKDCGCLQWGEMPTSVAYICLQPDNGLGVRNAIEIRSVETGQLDGVFMHITMLRWLKFLCERN

SEQ ID NO: 999890 - protein, 184 aa, Homo sapiens
MAIIKKSGNNRCWRGCGEIGTLSHCWWECKLVQPLWKTVWCFLKDLEPEIPFDPAIPLLSIYPKDYKSFYYKDICTWMFTEALFTIAETWNQPKCPSMIDWIKKMWHIYTMEYYAAIKEDESMSFFTDMDEAGNHHSQQTNPGIENQTPHVLTHKWELNNENTWTQGGEHHTLGPVAGKRPVER

SEQ ID NO: 999891 - protein, 112 aa, Homo sapiens
GNSLAVWPRLDCGGHNHSSWLPQSPRPKKSSHLVAGDYSSQHTWAKNFFSWRETGSSYGAPRLGLQAPGATNGVLPGSTVSKGQRGQVCDRLWLPCAIHVPQTERFHNTYLK

SEQ ID NO: 999892 - protein, 149 aa, Homo sapiens
PGAAPLAFPPPPSQAAPDMSKPPTAQPDFPYGQYAGYGQDLSGFGQGFSDPSQQPPSYGGPSVPGRGAPPPAAAALDEGRYPTNVQVHPYRRYRGAGVAGQTQDPNCELVTITNLAASGDSTLGGGAGGGREALDGCGVVWTEVLNILL

SEQ ID NO: 999893 - protein, 355 aa, Homo sapiens
GDQHHGGLARTSALRKGREQEGAKQGKWLSPFSKKDGYDVKAPAMFNHKQHIGNRRVGHPGPEGNRTYAIMYGSSTGSGVLRKVQSVPGLASNGWKLPFHRDILKLSYLKDGIRGLKNRGAVHKAFQCELECYTAVKRIVLTTGSREIGRLNELDRSGYEWVKANITQNGVWTYALIRYVLNMEVEGLIEREDTERTRAKMRGINENRTLSVMSRKENQEQVVRGTIEARGHDTRKWTVDHVRVEPPRSGMGGQETTNWNMMERRNRLGCERNQIWPEAQETQGQCGRKNRKRYTEHQRGVGTQHSEEGRTERKPRQSGKRVPVRNARQKTGTRKTGDDEARDTPKRYQDNTAGK

SEQ ID NO: 999894 - protein, 113 aa, Homo sapiens
MWVSQYSRRVSLCGGPNMCWCTHSVGGGKRCALQALTKSAEKLWAVLYTAFIQAGVVHPRSDLFNRKCSAVRSSSKRPTRRRRQREQKKEETTRIETTMKNYRPKKEIIHRRQ

SEQ ID NO: 999895 - protein, 110 aa, Homo sapiens
MSLKSLFTPAVVSKSESPKEPEQLRKLFIGGLSFETTDESLIDAIFEQWWKRSRTVCVSDEIQEHQMRSMGLRVCHHYATVLTEVDAGYECKATQGGWKSCGNQRELSPR

SEQ ID NO: 999896 - protein, 215 aa, Homo sapiens
  misc_feature (109)..(109): Xaa can be any naturally occurring amino acid
RLWLLLLRRPEDAMAECPTLVGRQSLDHPDRLWAWEKFVYLDEKQHAWLPLTIEIKDRVTRFTGCFLRSGRLSVLGRPYVPRYPEIVPNALRAVSLWHDSEPCMVLSTXILRLLVSWLLYVYHIQDLTACEDMLLRAAAQMTDVWSVGVPVSFHLQGLMPGQPTLGDVVCSVSPFVLLCLWSSPPRLGSGRNGPDRRMSSSRVLWDLPVSPLCSP

SEQ ID NO: 999897 - protein, 221 aa, Homo sapiens
  misc_feature (37)..(37): Xaa can be any naturally occurring amino acid
KTPALLPLAGYLAPPSSLPLYCPWYDGTLAQGMRSTXIRRSPAACWVVPLHAGALLEILCRFDPDLIHRRLSEWNVKAGDCIGMTALWGGSPGSGGERALCAVVLWAARAACSPGDPGDREVLRLLRPLHCGCSCCPCGLQEMEVQAPPGTTIGHVLQTWIPSSPSSPSRMPIARQSCEWCGPAGPVAVARPTLSETRDDSECGPITWGAVRTPPCDDLGY

SEQ ID NO: 999898 - protein, 173 aa, Homo sapiens
MESSWEEDAWVHAGTCSACGGGCGEGSLPQPVAAVAWRPSRGWGRGARFWALEWVGAVCLPAAFCPGGFARLLEKQGFGVHGASLMFVMSPALRMLQEFSDVERAIETLIKNFHQYSVEGGKETLTPSELRDLVTQQLPHLIRYGRSTPHLSQYPDFPSKCSGTPTTLALANP

SEQ ID NO: 999899 - protein, 167 aa, Homo sapiens
  misc_feature (41)..(41): Xaa can be any naturally occurring amino acid
MEELPWLVIGSLIPSQAVLDRSSPKTVNGSVYWSAAWREQXDSWRYDIHIRYTVTQHIVFACRVEPQNIHAPGLKTDTLPKGWVNQPSVHRVQFEEDIGMDIQKAILSCIINRGTLLVGRERRLATTRKFSSDGLRSSVAGPPVEELNGTEVSSLATSQDPFRSNPL

SEQ ID NO: 999900 - protein, 222 aa, Homo sapiens
VVQDEEVGLPLRLALSHHHLRPGTVSLMIQRPAGPRSADSEPPPTGTAPASNGGPRLRESPQPNGTPPEAITSTAMSHPIQQSPALRRGCGHYGHHTKAQTTRTDWESTVSHDPSRQNTQEAHPRTAHNTDRRTKKQREDAKEQGTDTYKTQRRENPPSNMAWQPIEQPRRHTERPPLPENTPRSKSHTKTSMEERRKNTWQNKTTHKMTMDREGAKTEQGR

SEQ ID NO: 999901 - protein, 145 aa, Homo sapiens
RILQRLRSEIDHVKMQCASLYAAIAELLITSVGTMALMDAIEQAGQGLAGCPCDKGTAGLWSGLLEGDTMELDECQAGPWHVEIGSYSQAAGGLECRLNGERVGQVNVICSYMSTHRPVAIAVPAVSAVALGLGGGSRYSYGRWI

SEQ ID NO: 999902 - protein, 305 aa, Homo sapiens
LGRWPERIAGSVAAGLLAAWLLVPAMAAESWDAGAQCLCRAVAMKGKDGEGGRRTVGRCAAVKPLRKSPELRRSSNGARAKSVIVQLGLKVPCEVRCVPLLTACADHCMQHDASALGRAVRRRPLECLERGQIFVKGAAHYLSWVCNVPSLGGIGDAYASVPNRPKSCKTSYTMALGPNGRQAGIENFRGTENSPSAHIEHQRKNKKGCLVKHGNLTVMAGLQFQTREECKACTFLNLLQGSICRRGAVERRVSLGKEVAQAENPHNGLEYERTRTGPIWSVGPPRQETPCNLDGAKKATRYHIG

SEQ ID NO: 999903 - protein, 74 aa, Homo sapiens
EVRKALFKDIEMAQCFIQTKEVVHWLLGKLLVVVMRGGFDVNDYFPSCQLKLQMVVMASVAPVLADVHIGWQLP

SEQ ID NO: 999904 - protein, 321 aa, Homo sapiens
CPQHTRHSNLVCKVSDFGLSRVLEDDPEATYTTSGGNDPHPLRPSPEAISYRKFTSASDVWSFGIVMWRGDDLWLSGPTGSCPTTMVMKAINDGFPAPHYPWDLPSPIIYQTHGCHVLVINGACSAPHSKVRLTIVYILVQAHSCPCTPSGPWLTFDPRRVVSWLPRRETARDGVLPFRAVSEWLESIKDAARLRSRSWRPGVHLSHRHNVVQMTNARLSTSDRACGCPATRSALDYTPAGTSGPREPWWVIPILSLQQRPGAPYRALRMRCQHHVLRLSALLPCLGHLGDVNLHFSLLSFRLTRPLRRLSDAPLAPPERY

SEQ ID NO: 999905 - protein, 286 aa, Homo sapiens
QASEHISFYQQDARIDVTSLLGTMSTCKPDQFTSSSSMKGSCGIGERQSGSGSSRISSVLGRERVLSDGPQTPTGAVCLYSSRFSSGGVLRAGGRSMACGFTQQQSASVVASGDDTGGGLGCWPSDGGLGAGFGGGFAGGDGLLVGSDDKVTMQNLNDRLASYLDKGGALEEANADLEVKIRDWYQRQRPSEIKDYSPYFKTIEDLRNKIIAATIENAQPILQIDNARLAADDFRTKYESMNWACGRLVEADVQWPAPGGWTELTLGRMPGNADRRLKKEAGYLGD

SEQ ID NO: 999906 - protein, 244 aa, Homo sapiens
LLRPAEALCSPGTSNTTRCLVLLTPPGKQSHHVSSSRDVSFRSGGSRSFSSRLCHHPVLSPAPDLHLRDAGPGVGRKDGGFEQGQPCRVLVEWVAMRQSRSTLQSEGGLQEDIHQTLVGVQLQEPVRCWCWRRLWLWRWCRLVDSGLVGGGAWLVALGSVAERGVGGGFGGPGVSVSDLLEGIQEVTVNQSLLTPLNLRIDPSIQRVRTEEREQIKSLNNQFASFIDKAAVPGAAEQGSGHKWT

SEQ ID NO: 999907 - protein, 122 aa, Homo sapiens
PEYPVKLQIDPSIQRVRTEERETRSGPSINKFGLLHRQGAVPVRQSRILMVLGRQRVTLRAWSKGRPRTCLSARILRACLVLMQVNRDNTLQGESGLEYMPNRMCGETGGPAWNITSRDENY

SEQ ID NO: 999908 - protein, 158 aa, Homo sapiens
MGEKCLGAAADPVAWVLHQQEPEDQGSGRPHALGAGLNHHFIDLDYLLPDGSMPPLHTDHERPLVQDIFYCLFQALGHRDDCEQMAGHMMGATVAQGYNEDLEPSENPQECEGQLATPGAQTLDYPRIAGKKSLGMHTDTMKAQMQKATNKDKNNRIQ

SEQ ID NO: 999909 - protein, 266 aa, Homo sapiens
MAVMAPRTLVCYSRGALALTQTWAGSHSMRYFFTSVSGPAAGSPASSQWATWTTRSSCGSTADAASHEDGAAVAPCGYSRRVRDYWRRWRHVKVKAHSQIHRVDLGTLRGYVLTMSPSAGFSHRPEDVLACERCGVGDLALSFRRGLPKHSTALTDRAKGIYIRTLEKKGTLRLLLEPGEVEQIGRSRTEPKSIDVWASAGPQCVARRDPNLGKKAYSPVGKGAHVFAVCNVWLLPGNELPWGAKHGEKRSKHRCANGRNRGKAPP

SEQ ID NO: 999910 - protein, 233 aa, Homo sapiens
TEKTRGKYPHAKDLTHLKEYWNDPEWMKGSGSCGITLLNKGYEEEDRGGGTMKRKMEDRGGGPRIPQVQTGCGRLHQTKGSCFRKKAGGTFDSSKYNSPFLEAAGLSDRSTHLTLRQRSPSSAAPSTACSASNAQHTGHASTPGRRTAAGHQQPTAKRGTPAPPPSDPIPLTPTRDRADLPRAPRPGDRHPLTRPRSPRASPNRSLLGGPSNPPAPTPSSLTPTLFQRPEKKK

SEQ ID NO: 999911 - protein, 130 aa, Homo sapiens
MFPGPLVILGGMFRGKCVIARGSEKPRALLICERETPFLGVSAKAMDTPLVFVELQPGTFLAWEVATSNLLENPLFAPVYGLVAHGIEAFGVIPPFVTDDVIAPFGPQYSPCTRCYGQVSLVHPVLLFPS

SEQ ID NO: 999912 - protein, 178 aa, Homo sapiens
MPGLQGFPELVLVYTGTQCSKVGGRRCVCPPVSLDLAPGSPMPMEGPWHAGYASLIITYHRITDSMLGSTLRTSWHTLENNSVEEMICKMHVGDSRRGRKARSGVSYVPPQRKVLPYTSKVETVGPRESRRGKRRTRERKPKRRIARRSHGKDRRGTEDGRRDTRGERRGGHLGGSEE

SEQ ID NO: 999913 - protein, 106 aa, Homo sapiens
LDTEPEVLGMDENSMLIPIHVGGALSGAGPHRPHRLPRLCRKTESRRLPDYLAWCTQAQHACTGPRVPFLMELRDPVRSGRHSLSGKPFLKLCFSPTVKFILQALY

SEQ ID NO: 999914 - protein, 501 aa, Homo sapiens
AETGGHVGLYVLSMLIPRWAMERSCAGALLDGLPNMLTKQQVTWLPVRQAACMSDPAAVPIQDESWHQDAQCPASDQSTPERTMPSLDTGPDGLTKSLLSMLSPVNEAPHARPWLFLSLTAKTPQSRLAQAILEHTSFPCQRTVRPKPFCRAMHLRQALQHQGPLGSRRTGLAPRAHNTLGWPSSPYLLFPLNQLAPVAAAPTERNGGPFGLPFLTTPPLSPPLWSHHFVGLSHHFNHNSLTFRCYNGKGNFWHSILNPPSSPFQKRPYWDSTPHPRDNTHPPFGIPNQPTTTFWLSTQPLTTPKPFLGRNHIKGSSPYNDRIPVFPSLNTRDRFAPNLWAKALFTKPRVYPHLRAARRHHNRDAPSHYIAGANENKDLTQPSGTLLRSETTKGPPLKRANKTGRAQQNAPEDDQTIRGDAHIRGPAPGAPPQQPPPIIIYSGPPDRAARTQASLTLLGTYGNLGGTPPKRAPAVSPIYQADRHPQEIFDERAPRNGAYPV

SEQ ID NO: 999915 - protein, 70 aa, Homo sapiens
MCLASSSYDLTGSHLGPSELELMAEAAGATTIRWLAVQRVLRSRATRAQNRRCDMACVCGDHEHVIIAAD

SEQ ID NO: 999916 - protein, 326 aa, Homo sapiens
SIRDRQELLLRFNLAPLCVREPASTRTKVQPILAGVAPKASGLCGVSGGLRAICTSTRRTASGKCPDRGRRTKEKTQRTAVRLDLVCPGLAPRTRIRRGELRSEVTEPPIPRPDSLRPRDGSGCPRDYSPRNARRLRTGSLKQLGPWVKPHLTVALEGPGSPGPNEQDGKPGTQHCERTESYDTKYTTTDPRKTASNDCVWTKVRQKSHPSFQSIVEKYTDIKQSLPIEEEKILTPFSGKKLSEPRTSKTYGNLMAQSAKTHETANTGTRTQHTIKGENEILPRDKDNRHCVTNPPGNRYHEKNTQSGLIVHNAAPKSPLNITKEI

SEQ ID NO: 999917 - protein, 241 aa, Homo sapiens
GSSTGLEFRDVSEMMLRLLLHTDDIGGKYSHCHITNSPNVSPPLVANRRKSPFVVHRPVSEAMKGPVEKLASTWRYCSRPTDMDDAAHVSGKRIEASGSPSSPSGSCLLTGAMYLLIRWGSRYVDEARVSSSWPQVILATSVSQSAGITEHDTLITPFVGYKDHNFQAQPNPAEVKDVFLVPLAISCIHRSMTSIYVTRLGHRFINHIFEYTNPEDGVTYQINGMTETLQCWWLYHFGKKT

SEQ ID NO: 999918 - protein, 218 aa, Homo sapiens
YGREFGIEMLVMALERPPAALSGLARDRELGGSHSMRYFYTSVSGPAGEPRFISVGYVDDTQFVRFDSDAASPREEAAGAVDEQEGPEYWDRNTQICKTNTQTDRESLRNLRGYYNQSEAGSHTLQRMYGCDVGPDGRLLRGHTSSPYDGQGLSSALNRGPELLDRGGHRGLKNHPAQVGGGPVVAGSSWRTYLEGTCVGVAPRYLENGKETLQRRGP

SEQ ID NO: 999919 - protein, 150 aa, Homo sapiens
MVWHAPYSSFFSVLYLLISFIDIWRWEFSGAQRRGSDRRRNTTDIRLQTIRPSTEYQAEYSEHIMHIHQRISWDKHERTNTTTSTRLKYQREINIGKERQGRSSAHVVRAPRTQGHEKYTVKQVKDEKSQHSGTYKKHQHKKRVRGDIKH

SEQ ID NO: 999920 - protein, 145 aa, Homo sapiens
VLYGRKFGLDRVAPGAKSLAFAIQRPSTGRRQVTMDDDICRARRRQPAPACAMAGFAGDDAPLGRLPLHRGGAPGTRDVMVGMGQKDSICGQTSARSKRGILSPEVPHRARTSITNWDDMEKIWTPHRSTMSCAVESRGATPMTA

SEQ ID NO: 999921 - protein, 82 aa, Homo sapiens
AAFPSSESASNGFFILYMSASYSLSSTYVTYSAVFLLFIKPQIPLSTGHKLCLYFSDWQDSQGRSVYLHINGPLGCALQELW

SEQ ID NO: 999922 - protein, 137 aa, Homo sapiens
MAKKHLAGTILGIGYRVRHSGSVDDLSYRVHADSAVGKSPLTQYQVAPITVTSNLTGGYTRSQSSRDSDEDSSLAPTDQHHEGVVPYTLRGTNSYVRDEHSVRKDQEGANRLCKRGIGVTTLGRGISIGPVIPHELW

SEQ ID NO: 999923 - protein, 421 aa, Homo sapiens
DKAETEASMSHCIRIVETVKPLYRWNQALEKLGRHGPGCRIDLQRCVSLDAQRSKVFQEAFCGSIARAKIQDTVRYMSLVQKCPIGGTACFSILWVPQYSSKRATGVEQKRHTGLLHQPGCVAWPEEAAWEAGSKESIAGSEIGGAKPPPAAQSLAWRPIRDYARPWPLPSSRERLTSSLPATEIWPLRDLPGDIHFNLTTLSSRLRYTPHYGTSHESAGGKRLTPDHEGTLPIPYEARGGDKRANEAMRYRRVELVLGPKPLPGKANITARTTLLPFRQGHGVLSDVTEGLCPGKRPRTHSRFPPLADSKRRRTYAYGTISSHKGLNRDFALLTRISRTDGRLFNRQTPSAIAHQQNTSTLTAHNHSNASLQTADATMGTPNLSLDIDPHIPPVTLKDKTVELPPAGNKWCTRSSKIRKP

SEQ ID NO: 999924 - protein, 105 aa, Homo sapiens
MESTGIAKLDDLTGEVQFLFLTDHSRGQLLVLIVPYSSRNGMPNAYRGKNSVRLYTKYAGGPQRCDAPEGYYYTASLTASKILQQESLRINRHIYITLYHHLAGR

SEQ ID NO: 999925 - protein, 72 aa, Homo sapiens
MRQPAREQTHGEQGGGKPDGGQPTSRENQEKRDTQGDTRKGQATGPGQGDQHTQTRKKREPERQPPGASRNP

SEQ ID NO: 999926 - protein, 80 aa, Homo sapiens
PCVQRPVPSNHGYGSVWICVARQHISVDRLCALCVAGKSWFPWVQVLLTWDVFPVSRHGSVCVSGVLRGLDGARGMARRD

SEQ ID NO: 999927 - protein, 294 aa, Homo sapiens
MRSPRWSLTMSSWLVCNSMVCSMGTDASLGVACLSYPICRATPRRPGASWWAWASKDSIRGLTEAPEARRGIADSLKYPIEQWHRQPDWDDDGRMIWHHDLHTTMLQRGPGGAPSAADRGPPEPQGQQREDDSRLCLMTFNQSLAIVRGSSRPCVSLYALERTTGIVMDSGDGVTHTVPIYEGYATPHTAYPAVLDLVDGTDRLPHEDPQMRRGVPVSPPRTTREIVRDIKAEAVLRRLEFEQEMGKTEYSSFSGEEPKKLPMAKVIHIGNERVRCREALSSFLLGMESCGIPK

SEQ ID NO: 999928 - protein, 382 aa, Homo sapiens
NNLSAQYMMLPGMTYLEFGLTTEFRAGGSACATPSLTAAEGIIGSSAIIINDSKSQIHKDQPVHVNLGEELGVGGRVEEIINVSLRNESFVLWNVPGIRCVILASMCVLHERARCMERAHWCQGPGWVTDISLSWRWQCLDLHRLYGECNDYIEFDNFEKKQRENGYHGWDLRKDTAYQAGDGPQSILWALLELNLAALVHKRKFDGGGTFYDQHVLRNFLHTPRQFHVFLLHPSKNWGRMVLIAVVDWVTRASKRIGDECNSRLSHFASVSNSPSSKWAEEHRGETHPKRFGKGCNGWGQFERFTYLVLETRLQAGTWAFTGNRMQEALRGMPRSPPTGETNKFRVRGSVELLQLKGGERAEGNPWLKRPELADSVSCGRF

SEQ ID NO: 999929 - protein, 291 aa, Homo sapiens
AKKPIEDARQQTAYLSSSNTISVLHHGPESSNRLDLGMADSTAQTDDNYRSLRCFWKRIGRIAVYISTSTCGKRLLQSSKHLAPTHGKPLRSTGRALESRLHIYAHRTSVVDTEHQTQGLGHAWDDVTRCDHELNSEGACIHQDMVPSHGMVPVRRRVLNHSKGYPSDCAFLVTIIFAIDIWRHRDRLLLIVGSTDWTGSNTMESQKRLPFLIVWPEAIGWNPASTCSSSRGGPFILLLVVPAYQFETPNVVLFHPRMIQSGGEESPHVKSSHARYPRSDIQSSSRELVAG

SEQ ID NO: 999930 - protein, 145 aa, Homo sapiens
  misc_feature (88)..(88): Xaa can be any naturally occurring amino acid
  misc_feature (95)..(95): Xaa can be any naturally occurring amino acid
IKRFLSVCSSRACVLLPCELHGWEQRRAAQIYESKESLQQLVCGCVRGASSSTLRMMTPGITMVLCTLGAPLLSNGDYHCLVSDELVXQPPSTGXLCLVGPIAVVHGIGALESCWSCIHSQDSTQTYPNRQIGQAHIFRSGRSPA

SEQ ID NO: 999931 - protein, 147 aa, Homo sapiens
MGRTTIFRRDTPTAERSTTSCKRPTGGREGAESSARPSMRSGGGVLPHKERHEHHSITVVFHCGWRRLLTKRRPPFVSLVEGDEQFSPRGSTPLLLMKTSAPSPRTHHPLAQVGTYLPTPAGAMVVGADKTGGGGKTHATGAAAFTK

SEQ ID NO: 999932 - protein, 305 aa, Homo sapiens
MTSSCVVVFRLEQLAECSPGYRSSPSTGGYVKRAPLTPILEAEGDFWMSLAWFLAACIIVLVYSARSGTSPMTKLGELLLGFLVSYWSAPGRLHVGATLWEMNARVCLHPLLAPPMGDCRDSDYDEMKGSLLTAGAYAINGGNPRDGYVGSNAREGSIKGLVQERGVTPMEIVETSSWCPESWDPIASIRHPVPETTLNDFSGTKILPSRGLPVQWKYAKRGYSGLFFNCSGSIADTQVPPGTGQERSHTHFWNEGLEERLTLSKGPDLCSGMVGREPIIQETPQGSCDGVITHLGEYVAVTATR

SEQ ID NO: 999933 - protein, 121 aa, Homo sapiens
MGTPLALYAFVDCCDPNWLPNMSRTTRRVRPKAHKRGVGHDKRGSHFRGYCPEASSTFTAQFLVDEPVYRARGPMRLNNAGWKAALLKYHPRTSRPGIGDGCPYREIEGISHEDRSCGCYL

SEQ ID NO: 999934 - protein, 203 aa, Homo sapiens
MTARTADHIGGKYTLGFMSDREKLDQHEENRRRKRQDEEKMQDRFEEETERMTANWEETFMSEESAGIQETTEVLRQDAVTSLHQGVRRYGGGTRIKYLHEESTDNLSRYPPPEIDIGATAAVPGATAGDIDRASTATEAAKSKILPESGHPERSPGRAAGASEGPRTGGLRAPTGRRLHGGQNEKDGRRDLNPVFPGAVNIR

SEQ ID NO: 999935 - protein, 237 aa, Homo sapiens
TSQVCRIKPGSTRMTTFPKAPGDHSGQSPWGRKPVGVPGSQTWRERSHREQGRPSVGKGGYADKEQTVVPLGQRLHSVPSEATTEGPSYQGSGLPTTSRGAIRPSSPGDPPSRVAMSRRGCGAPYLPDCSQGSKNNPQPLIQSQQPSRDSSMSSTKEKIAIVVLTPTYSGVFWEFSPLTRFNSFIGFSLLHASPVLISSLASYLVTVTSSPVWSHRPHPSPTTFTFNPLIQYAGFGR

SEQ ID NO: 999936 - protein, 80 aa, Homo sapiens
AHQPRNYTLEGSYVYKCLHHSTAARTRYSKLGIMDKSHSLSVFFSKADSKTHKGSCMDRDQLYQLVEQLKDLVYRCSAVA

SEQ ID NO: 999937 - protein, 222 aa, Homo sapiens
GCLAFYDPCVGEEKNLKVLYQFRASCISDGTWISRGPPDSQSSPTGSIQMDKLPRTRVSVKGQQQESFFAGESYQSLRKIDTTTPAHADVSDLYIIIIEGGTIINYVKDMQDTPAFEGAEGLGLEAAHTWEPDCSLAHGMFSQGSVPGGKGYGPDSAVSRAHVTDTQPADTVVLGWVWRCLWSILPSPQEREPLLQSTLNMGNNLKSRQASRSGSLCCAGFP

SEQ ID NO: 999938 - protein, 263 aa, Homo sapiens
  misc_feature (60)..(60): Xaa can be any naturally occurring amino acid
  misc_feature (96)..(96): Xaa can be any naturally occurring amino acid
VEVDSAADDDRDALGMRRECRSDAMREPIAQHAALVFLSSAWVPLKAPMAASLTRAGPCXSECEASRGPIGLRAEASTVWKDQRGRCVCSPFGWLXKMCVESCGAPGFRAMSSAVYWSMRDSGSRKRSARMMCWHRLASSGLSKSPRRRGPVKECDRQFVLLSSPTTRERALLTKAVELCFQGPRSDGGILADGLKEGSVDSSPGKAGRCRRLQSPGLGQAQVTFTFSRFRSLVVCCHVGIWSTILGGLRKGVWDRALLLAAC

SEQ ID NO: 999939 - protein, 178 aa, Homo sapiens
CDAIVQPAPHPPSTVTVPSAASARAQAPPPLRPSPPAVPSVQPIVKSVLHRHHRTPQHCSLWSWECPEEHRGHHVPAEQGRAKEAPHASRSFCTVASRTGIVPVHQLQQAVPFVGGKQEAGDSPPPAPGTPKANGSQPNCRLPSAWLRDAPPASPRIPHMQTRHSDDNMQHAKRKEVE

SEQ ID NO: 999940 - protein, 113 aa, Homo sapiens
RAWDRRNQRGIAMRREKGRGDGPITPRKALRDPKVAEKDLHGQLRLGVAQAIVDDRSEEADLKAPGRITQEHCYTGQWAVTGEQSSALTGWQRTRSLYPVASPGWVVSPVFQL

SEQ ID NO: 999941 - protein, 243 aa, Homo sapiens
VQHAAVEPKYDCQEHSLSNPRKSIGHLKATSPGTNLRLATPATPDLSGKQLTDQGQGVPQDTWSLSTVCRHKDVSNRYKLMLCTAPPTVSTHVQPMEQQASGQLTYYPKSTCERAVHSHLTAMRSLGSHNAGEYARMVAITSCHFPLSVALSANRSWHNSLNGMAPRVFIYGQFCYTKTFWAASKCDVRPGHQWEPGKAATPEPSSARTVPRAYTKRPSHGKAHSIRLSTSQHTAGTWCYRKN

SEQ ID NO: 999942 - protein, 69 aa, Homo sapiens
QCALWTMVPVFHCNSIGLVLPKSTTVFLFRLFDVSRSRLYSNRCAVCVPMASSVRGLAERNSLPPRSLL

SEQ ID NO: 999943 - protein, 116 aa, Homo sapiens
MLASFRLSRILDSIWLCLFYLWCFLLCCFPQSSMPPSVCISLGCLCSDDVFLLFVYLSVSSLLCFGHLSRTVLYYWCVLFLLRLSRLRKSSFLLLIIDYLSADIYAYYFVSRIDFT

SEQ ID NO: 999944 - protein, 68 aa, Homo sapiens
LTDDRLVIRAIPCDLCGARHLHALGYNVLAMHQVITCKSSHFQSVGENGKSASEHAVEESVNGISNAS

SEQ ID NO: 999945 - protein, 204 aa, Homo sapiens
MPAPESWGSHRQAHAGALYHWSPSMKQQQGHVISILVTAKVPTLHAHHVFTGTMVGLTSFSGGTWLELDGNTVYTRMVLFPWWIPAHLADAKLGSIGCITEMAFTLESVLSLSPQTSVHMCSLRRLVLSSMDCLCSYSAVYFEGTERGIHSLWYCSFCVLHSYVIKNGVPQRREMAFPACLLCPDQSFSEGTVTLTLPAQPMYT

SEQ ID NO: 999946 - protein, 289 aa, Homo sapiens
FIDKVRFLESAEQGSGHLEWTLLQEQWTKTVRQNLEPWFEQYINIPSGGMLCQHRWGNGGRLESELRNMQDLVDDFKNKYEDEINKQYHWLSNELVMVKKDVDAVIDEQGGAEEAKVDALMDEINFMKMFFDAELSQMHDVVSAETSVGPLQWDNETVNLDLDRRSSLKVEAQYEEIGKLEPGMKPSSWVSRPMYEELAVKTAGRHGGCTSRQVGQGMRSAEDVNRMIQKAEKPRIDKCQEDEWLPNRAETPLGECRACVGKLGLKGIARETRWVEAGGGLRKAKAGPW

SEQ ID NO: 999947 - protein, 278 aa, Homo sapiens
DNSSIDCRLSLAQTVSLLSTQRGGAGAMGWQPPVCCLLRILFLSRGLWVVNLFVAECAPGRAIIPAPVYPTWGDLSTRDFSTVVLFLGLRGMAIVEEGMVHLAAVGWHGLRRSSVSSLFTRTNAGLQCFALLSLSSLHSGTRSGALSPIPCRGASVDIEDRSVHPVPALRRRAPSKSDQRSECLHHDFRPMRLYDSQAPLWTVRCVGEGVKHSSIRTVPPVHLGLRSIAAMCPATQSNMQEELPSDSTVTGGTTRWRAGFASKFVIKVVSCVPSSLAP

SEQ ID NO: 999948 - protein, 323 aa, Homo sapiens
QLHLGTRAIQNLSPGMQPSTANRTGPKVGWGHRLDGFPPGRPSPDNLNQICLPNRQHVVYGPVGTVAISPAYSPTVISPGLRPLNCLEIGEFPRACHCAQPSTKPPRCVPNCVVGGSNERDSVRPRFSVKTRTPLVVCIAAQGGGSDSPSVLQEEAPRADTYQAPGPAPSHQPDIVHRVLSWPYPPGVATLDRYQEHLPILRRFRLCATQPCQLSDPLERELLALIQLAEGVPALLPPGEQSHLYMEGLGGYPDKYCDREYSCEDPAHLCGPKPSQPYTRDEWLGRRAPYPHYDREFLDHWRSAKSPQPHGATLWNPKSSHKR

SEQ ID NO: 999949 - protein, 147 aa, Homo sapiens
MGEGELQRSLCVPACDALGGNWTPGRATAAGIPSAHNIGRTSPGNHVPFQDIHQISQNTRETVAGEGMITSDYHYLTLESVHRIGTTPGRIEVRTNITPLRVGDISPMATKEGTREGDFEPRGHQELVPQADTRNLTGERVRLARGV

SEQ ID NO: 999950 - protein, 100 aa, Homo sapiens
MGVAKYYDSSMLKWAALDGATSKEARCNGNGRPGPINIQFQRPTDGLPGTSCAPNLNVAQGGGIRGARNEANAPFQGWSMTAKGDFRECGYLVANFVVTS

SEQ ID NO: 999951 - protein, 76 aa, Homo sapiens
LAPVEVSEGSAAEIWGQITGVGLFLCLGESPVRMESLPAIDFYGFQEEGEQDGGDVGLMVFGPLYTLENGCPGYPS

SEQ ID NO: 999952 - protein, 148 aa, Homo sapiens
  misc_feature (64)..(64): Xaa can be any naturally occurring amino acid
QSYRTRNFQSIRSRMQEHKSDLKGYKAWCCSTLPEPAICGDSVEYGYSVMMRRNEKLASRTDGXAYSDVTLIKWLIFEHKKEIAFSDPTPDGKLFATQYCGTGQFLVYNFHYWHRIARTRQILAYTTRRLLLHENGLVADFNQELGPF

SEQ ID NO: 999953 - protein, 316 aa, Homo sapiens
MVARGEYVAGRKFGINVTKSRVADGMNDNVILRCDHENQYALMDGCLHVGIKGKTMADSPTSQRSLNILSYSEDDKTGTLHLEVAIQISNNMDMKPTNVSVSPRCARETTNPKQVDRRILEGASSNVATDAAWIEAKLRYHPGVAVTAWRFGLNYYTLSRFKRKQTKMTFWEVTYNTVCLHNECRQPRIPDDTPWKNTQKYRTPPGHATEWEKPGKAEPSQIRTKNDHYHANTHAHEMQNSKDIEATEDKIGQGNNQVEQNTKTKGTTKQKNNTIRRKEYTAKEGPSEAGKGKQSTSKNRTTTNKETNNEKTNQPE

SEQ ID NO: 999954 - protein, 89 aa, Homo sapiens
MSLTDRGVMSYSEGMCLSCLGREDWLSSAGAESTCASGGPMQCMCGPTVANTINERHVEAEVKLASPQNQDRGANLGPPWNLGGLEKGG

SEQ ID NO: 999955 - protein, 255 aa, Homo sapiens
MDDDIAALGRRQRLRRCARPASRATMPPGPVFLLHRGAPLGHHGRDGVVSGSERIPSVGDEAQSKRGILSLKYPIEHGICHQAGTTCEKHLASTLFSDELLCGSQSEQPLCCCPSAPLKPQGATADEDDPDHVRDLLTCPGMYVAIQVCAIPVTPSGRTQLAVVMDSGDGVIHTVPSLRGVCPPPCQSVRLERWLDGTLTDQLMKILTERGYKFSTTCEREIVRDIKEKLCYVALDFEQGWARWFQSSLENSLKC

SEQ ID NO: 999956 - protein, 208 aa, Homo sapiens
  misc_feature (183)..(183): Xaa can be any naturally occurring amino acid
  misc_feature (188)..(188): Xaa can be any naturally occurring amino acid
MGSVDNMVWPAGVLMQEVRNRVIAVVSYGGGLWFLCSSDRIHWRKMIRATHNVDGCEPCYGPDIVKSLLYGSQIGLWHKMLRVVTAYFAMHATALIYGESDDECVLDEIHVGGCENTYLDLRKDMLWLEYYFVVFLNKTIWEQIEAVMGKRPCPNVLFIRTSTRTAPYQIYATTCKYSVVERXDHYSXSQTFAGIQVIDGGLTAVHLG

SEQ ID NO: 999957 - protein, 299 aa, Homo sapiens
ITMRCCTALGPAMGSLRLACTELIMDAGWLRLGLSPAAVWPAAVGAAPEWAWLVALPVTGGGHALVALGRGSCAPEGPGEPRQFICNECGKSFPGGRLLNIHQRIHTGERPYACPECVRRFSQKPNLTRDLRKHTGERPNPDRTVDGGFRQKQNCSSTMCTHLPGAQAEPMTQHAVRADEGRAALSAHQRAQDVAEADVRAGEPGDQTQDEDIPGIGREAEEIQRYPGHRDALLSARGQADLDWDNGGDRAKFNFESEVREENSQKGVRRQTITQEFKNGLNGPNTCTEMRATDKAERP

SEQ ID NO: 999958 - protein, 427 aa, Homo sapiens
  misc_feature (61)..(61): Xaa can be any naturally occurring amino acid
  misc_feature (160)..(160): Xaa can be any naturally occurring amino acid
  misc_feature (180)..(180): Xaa can be any naturally occurring amino acid
  misc_feature (309)..(309): Xaa can be any naturally occurring amino acid
AGGAGPGALHGRGLMLHGVLCMDGPSRSKQVLLGRDGVVVVIAVKSIHMIVLVRLNSARIXQGCERTLGHLAYRRGRYCTATQSTLRRRTARNHRSVAPADRTSYWARPSSDGTRLLHEDTPMGWPWLDAGCVTQMVVSDSGIPNRPLAEQRKHTQTRSXACTVFLSPCKAVRSYGLRRXTLKQRKKGFVDAICLGGGLPVWAYMRDSGVERPWGGIVKTNKRAQEFGTGEPLNPPWGGWAQAKREEATIMSQEQTQRDRGKYADIKHKGGHQGKIPPRRRGTFRHWNMAPVHNKGGKQIGKRVSQAYXTTATTGLAGKGKQGKTQRHILGKQENAVLEATDKRSTGEVYTYRNMGNRRQGGGAGITHLGRTLHMGRDDHARNYTQQRDNLELRIDLCQHAYTKVGRTTLSGRRPAAAPPLLPTLHT

SEQ ID NO: 999959 - protein, 195 aa, Homo sapiens
MCILCTIYLDASTDVVGLAWNGSIYMFQAGIPVLYGLLGMSGIPIGGAYTGVPGLATGRSGWVDTKLVHGTILSHSECVHGTLDGDFGRVTVYVGELELASPWYCYTLKHGKGLSKPSDSPFSRLAGQSSTVLPSFRLAVGFLGLMRVLPTGPCGVPCELAQTSIKPIPRLGKGARHPYSSVQSDPANLRALLEE

SEQ ID NO: 999960 - protein, 54 aa, Homo sapiens
EEAGGGTGGPNGCPWHDYRGQFLMELQGLEQEVEPSRKSARCHETRSDSQPWPP

SEQ ID NO: 999961 - protein, 108 aa, Homo sapiens
MTPGGGTSCSHLRLGVSEEDAAEPIRQKHEENSLQKRRVRAGKRRASKSRLPVEANLEFRQQLKAVRRQSRVVTRPYDHWPIKVETLNGRRQEGACIARTHVRRHLDR

SEQ ID NO: 999962 - protein, 135 aa, Homo sapiens
SSPRPPPAPSCLPGLRCGCLVETIPRKPLPRHLLVSPISCSVSDARPPGSVGRLAPRRMSLAHHPCVRSPYPPRECFHLYHCDVIENGNRTVFPERNRVSQFIRVRCRFHLTRRTARPIVSPGYDKHGGVSPQLK

SEQ ID NO: 999963 - protein, 31 aa, Homo sapiens
MEAAPTRRTESPRKIIAPQGATQNTQLGSHI

SEQ ID NO: 999964 - protein, 59 aa, Homo sapiens
MERFVKKYTGSDRNPVESCVRCEPVQMGEFPNLHFGTFREEGAVCQLQLIPKFASGSHK

SEQ ID NO: 999965 - protein, 377 aa, Homo sapiens
MELVSGATCWRLPQMRVPLQLGFLGREQVSSASWGTVKMLPYRMTLSSLVHLTAFLGYKAGIDSHRCGQCRTGLGSKVNKKRVEVEGCDHLYEDSQPMVGLWRIVRLTWDNSASEDLREPFNEHVFCLETTSGEVELQRTGSISYYSNIGTKHRNRNDRAHLTKLLATNMAQDDETGQERHDCADRNYNANDMKHKDHLSQRVHNSPGSIHFRPPTNTPNESRHAPLDVSHSLDASRQKANRAPQPPLNCGRNFPTGLGTPVECSSQPWLRSPGTETSTSGHSLEEAPPRARTRTRTALLWIRPNDQSSPFTPVENFTHPQHSLYHLGVSNHENCNGTLTFRQQHTNYTCDAIVPPHMWTKTRVAITQHNRRYQPQK

SEQ ID NO: 999966 - protein, 186 aa, Homo sapiens
MGIGGRVSGPSSLCPTAHVGVWAANKGCMGCIGAQKYKWGWWCRHGREENAGWDNSCVGETPVRRGDRGHSQRVHDRGDTARRVGERHSQTLFLGGDQNHTRVETPYSLWGPKSAAEDTNERLLCGKSYSGVLTQSVPHFVREGGGGRPPNTRGVTSCSVESPERYSAVRHKIVLPPKYASWRQEE

SEQ ID NO: 999967 - protein, 113 aa, Homo sapiens
FFRRSAVAFLCRLSAPTRGLSWTVVRPCALAAPRAVPPLPRVPDGLVAPSPGEQKGVGGARRSGRKWNERDRRDWSFDNWLRAMCDRRGCCWVDRTAPQMHVFSSSIQIRGAP

SEQ ID NO: 999968 - protein, 77 aa, Homo sapiens
AAFPHALGTRCLIAIAMMGHRPVLVLIQNTKRDFLEEKFQNLGHTVNWLRTGSIARLLIRNSAFGTLMLLCTDRTVH

SEQ ID NO: 999969 - protein, 118 aa, Homo sapiens
MCIESNPVHVTYMFHVPPVRYSFFLVGCVHWVRNSDTTHGCNGWVYMALSVYLSPTTENNQYGRLQTDIPHIYMYMRLILRAAQNGLAEEKLLDVSVFCVLHECVSVVVQTVTTLHQL

SEQ ID NO: 999970 - protein, 152 aa, Homo sapiens
AEEQLRADHVFMCFHYNREDRADLDSESLQLSGSYDDSSDDRGASPYVPHKESPELLAIHGPTQFGRRVVFRDEDVMRRSESRLWGCVASWTPGGQRLVMPGGEGTVKFDSSSLGCGPKMEVYQDVRTRIDCYFRIVYVSVSWKDTDRDRED

SEQ ID NO: 999971 - protein, 111 aa, Homo sapiens
MAPIRPVRNTICHRFDVGYPRTSFRAPGVELGRCVANKGGDDVRVLRREGTIGLTYQECWSRKRRAVDRDFLAYLQRQFTPVYISTNRIPSGKTLHGSGTTAKWHHFRIVS

SEQ ID NO: 999972 - protein, 109 aa, Homo sapiens
MTVTNSKEDRQGAVYLQKSVSNCAPAQRSNSRLGSADRSLLQGSAMLAPCANGLECRLVGVIILLGVMTGDDSLQSLHHGYGVVPVDIWCLSIEGMWFAPHLTEYLKSS

SEQ ID NO: 999973 - protein, 179 aa, Homo sapiens
MAAKVKVGVNGFGRIGRLVTRSAFNSGYTCGYSLPTQVDLLTYDLQTTMVLPLFQIMISNPMAKISHWHPSKGWHEPGMLLSFQHGNIPHSANLSQRTPTNPFTNNSTGGGPIALDAWKYPLRGSLTWGSSSQPNPCEQRAGAASIFASEREAHKGVHPFFLGPPIHELDCTPQLLSVQ

SEQ ID NO: 999974 - protein, 188 aa, Homo sapiens
TTPTVTTPSLPQKVGSPHSTEVDESLSVSFEQVLPPSAPTSGGWAEPSRCVDPGRVRSAFPTRCVTCALVVTLLNFEHRKAVAKWPPGTWRPPAARMTCKCPVTGIGQVGWGPEETPATSVSDVPGPPCLTRIPVPLVPRCRQTHDEDNRGLRSPSPQTLCPEPSTKVHAHHWLNQSSILTCHEHPVS

SEQ ID NO: 999975 - protein, 258 aa, Homo sapiens
TGASSAGITRLAYDGKDYIALNEDLSSWTAADTAAQITQLKWEAARVAEQLRAYLEGECVAVGSARYLENRDSETLQPRGTPPNDHSCEPNNPNLLNHGRPTLKVAGPPGAFLTPAGRIHNLTLGHAGDSRTGTPKLPGTTGGFVEDPVPSKGDKKPFQEVLGARPVALGWPFPWQEMNGHDKLNRSIAPMVNRGTATGVLGLEMPPYIPIERFADAQSFPTVHKRSTQVLLEATWVRWVLGTVPLAKLVATSERTGG

SEQ ID NO: 999976 - protein, 269 aa, Homo sapiens
MPTPVNKAGGKEWWLRPPAVVTKHSRLHKRGESPALRRQAKCNFPVVGTGTIHVPKEYPHPLLVQEWPLHIVERMQAGIAAISRNQSCLVRLPPDRLTSFTTVLPWYASRISHNSGLSLLDCDLSKVRDPEDQKTMRDERTEHLLGTRVARRKSTGLHVLIREIVRNPTADAALSFRSHGRLIHTFNQPCVGSNQAQASGVEGGEFDNTDRCLIPSRSLGKILTLALALAARSQTLRRVPIYLADFTPIATSNGHTTDGRTACTIQTAK

SEQ ID NO: 999977 - protein, 274 aa, Homo sapiens
TTAFRKPLAGYKSLRFWGSVGPARVHLVGQGAFQSTPGSPRCLPAPSAHFTPMRMTRVLRHRHHGHRCLQERSGVTESSPASKGTRIAPKKDTIRTRVHIIGDHSEQEITEKTIRNTKSNMKTRRPQKAKKTHEMTRQNKESTTKDGPERQQSNRHESHNGHDQDEHTYDSSKRTQASQEQEEQRTERITQQKENRDNNSSNETAQRSNERHRRQQVETNPGAAKNKDRKIKTSAPKRNRDEPQSTRGHTDAREKTHTTRTRRSNTERAKSPNK

SEQ ID NO: 999978 - protein, 336 aa, Homo sapiens
EASHTLFPPDLFGELLASSELEATAERVEHCEPLLWRMPAPVLVVLRYLFTFLNHLAQYSDENMMDPIQPGLCASWPTAAYLVPRMCAVNLVCAAEERVNQLGADDSYVQPDGSSRTHDLCCTETTSTQTVQWHPDYPAMLHLEGDSPRLDDAWRGGQLTPERGQPKMPRTRRTDLRGGRRTACGTAQALHRSRRRNTRHRKTPRQEEDQYTGQHAKTTGPIEGDLRETASAKATHGRIARGTSKHTKERRYPQTKNTDRVTRDHKHRCDETPNGQSTRHRHTRKPGEHRTPERRDNHRRTQENRRGQTKRSKKPPNPAAGERQEEKPTGEANHDD

SEQ ID NO: 999979 - protein, 210 aa, Homo sapiens
KSHKSLLYERNKVVLYIYLQNRDLFTVRWRPVVLVRDRQRVVRRREQPCLPVARKQGTPAGRGAAKAWVGEPASVFFPQVETVVSIVAGWEWNPEFHAGPVEVQGRMLEFEPRNILGLTHRVLGVLWGKLCAPRAPDAVRSCRGEMSRGSQLAGPDSRFQFVGTGHVRTLSGLLIAAGPGLLAGPPGLAQKRPHLGTPGLEHLQELRPGP

SEQ ID NO: 999980 - protein, 43 aa, Homo sapiens
  misc_feature (36)..(36): Xaa can be any naturally occurring amino acid
YTGTVGFLPAEFGSWTGLRIYVETIHVKRTPHDVIXGSACTSP

SEQ ID NO: 999981 - protein, 36 aa, Homo sapiens
MQGNPTMVSLPHEGPAASAAWGPHVRCSALVRGMDR

SEQ ID NO: 999982 - protein, 441 aa, Homo sapiens
  misc_feature (163)..(163): Xaa can be any naturally occurring amino acid
  misc_feature (398)..(398): Xaa can be any naturally occurring amino acid
WVKKPADFIGSGGRGLRSSVGGRVRFLLSPSHRPSVACAGWWRLALCGCGLPCAQVRGGYLCPVRTQWCSRCCLGAWRRAFLCRWLSPAPLGEVWAGLSGFGRRSSGFELDHHETTFCRVGLRPGFHAPNRSLRVRIQLLSCTRRKENLAGAFSKRFIGRPPXRLIGARAIYSPLFVDLRRNTWGGRQGLPDKPDPFPLCGREFARKEHVGGAGLSPSLTGRAEPRRESHRGLKHRGKKPPMCGRNPFFDISRKKLSVFLSTHLRGCLWGERRFGDEPRPVNAAEKSTAPKGGVVLWADTPSLLPTSGGAKSKPPPFVVCLFLSSKEVLKEIPPACGLQEESPFCWGQFLGRKTTLCTHQVILVCVPPTVVAPMFFREGCAPKMAASTQTPFLLGNNXGVPQTGFRGEIFIGKVFTRHTQPNTPSLSTEFTVGEHTFWGVN

SEQ ID NO: 999983 - protein, 211 aa, Homo sapiens
AEPGDEGEPGRSVTGAGTHEVASRLRDLVLPVHPDTACPMSHVSRAGGHQRPAWLQRCGPTMLHACRVLRTTSFFASSMWHEMRCSSTLEELQNDLRPDLDGASSRCRFPCSSNRLYEAEAGELATSVEEIESTCCLARVWMVAEVLLGSMNISSLFLQRAMSFALEQLKAQANARIPRVLCLRCRKLRAARWLPPAAVLKDMIPTGDAAA

SEQ ID NO: 999984 - protein, 64 aa, Homo sapiens
MAEEKNDRRKQNPIPPKARQHLPGHHRSETTKDEHTRQGSDVPTSTTKRGKWVPARDYPIPRPP

SEQ ID NO: 999985 - protein, 119 aa, Homo sapiens
  misc_feature (13)..(13): Xaa can be any naturally occurring amino acid
  misc_feature (22)..(22): Xaa can be any naturally occurring amino acid
  misc_feature (32)..(32): Xaa can be any naturally occurring amino acid
  misc_feature (46)..(46): Xaa can be any naturally occurring amino acid
  misc_feature (67)..(67): Xaa can be any naturally occurring amino acid
  misc_feature (71)..(71): Xaa can be any naturally occurring amino acid
  misc_feature (78)..(78): Xaa can be any naturally occurring amino acid
  misc_feature (94)..(94): Xaa can be any naturally occurring amino acid
  misc_feature (113)..(114): Xaa can be any naturally occurring amino acid
MQLLDQRKIGLLXAASRRSFIXAYTVLDGQDXHRNNGVGVQGEKRXTGFVGEQLLRHQRYKKCLKRXGGKXFNRQSGXNDRRGSMNKPRLKWQXGKPGNTKDLVGKMEQNRQXXQASNN

SEQ ID NO: 999986 - protein, 35 aa, Homo sapiens
GEDVSSDSAPDSAPGPDSQATPWRGAQGVSSARVH

SEQ ID NO: 999987 - protein, 348 aa, Homo sapiens
RFPGPASAVNSRALGVSRYEGEMEQRCMKRAIRGGTAVSNFVVSGYHLRGRRVSRPALAIFCCALRTRLPVVTVHLAPVGVGFCQLRRPSPTTWSPEGEASVRCQYLGGTRRVVLWAEEGGVCQPGSRWDYRLDGDGIGEKETGVLNGEESPMNHRVSGDSQESVTGRESMGMRRTHEMCWENYGNLPCYYEEDSIVAQRDLRCAWHLQHHVVRERFVREELQFHTIGTLRWNWARKWWPVWRGRDKSFGGTPDPSDPENEDGNFATGRSKGFGRPATKPTLEEKDSRGKGPIVTGKLFPKKAIEAKNFSPFLQRRALALPWPQETFPCFGMGNTQVEFSSHVQTNAS

SEQ ID NO: 999988 - protein, 352 aa, Homo sapiens
  misc_feature (143)..(144): Xaa can be any naturally occurring amino acid
MTEVAPCPIINGPNITGTQSSDIEGFYPNLPTEGTSSSSSTHLLEAQGNWSWAWGAPFLKSPVQKTPQSVWPSGRQQAVHSRKFAPPGDSRTGSTLLSGESLWGALPGARQGSGAHRGAAEYVMPPIKSACTSLMSTMAPEYXXGCALLSYILSPSTVSATLFFYDYLRDNGGTHPGGLQLYKGLTFPRGNPKGRLKSPAENMPAGTRLAQRIYAEVFFRTHMFCKATPQSCGPKTTGAPQGLKAPPKRKEHNHGVWFSRLFSPGGIDKTLISRGLRIAEECFCGNPPVIVAPRVVLFDMGPPDIIRTTPLMLRTALYSLGGPPHGVVHPGGSSPRKTPLRLSSSLPPGGFP

SEQ ID NO: 999989 - protein, 120 aa, Homo sapiens
VQAEVVSDGDKPLLRNRSKGNSCYAKRLTAFCPSPRDLWNFELERNDSGYLAEETSRTTRAFKRKQSIKVGKFAGDHFGILRFNDWPIGCDRKEKPHFLGRNSSPMQKFAQVMRNVKSPR

SEQ ID NO: 999990 - protein, 66 aa, Homo sapiens
VPEQHGPLFAPNACKKGGRVVIEKVLDAACVHIDDIRLRNELRASRRPWDDLPIIPQVIEAPGNQE

SEQ ID NO: 999991 - protein, 282 aa, Homo sapiens
ENKMYLTPSEKHMLLKVMGFGLYLMDGNVSDIYKLGCQEENESYPKVDTVSLSSVQDGCHRCCGRLSSRIGDSRQDTIKSQCFTLEENRVQVDVQPMSSISPQVQYLRADVVQIRDDHIRFISELARYSNMEVVTGSGLDSQKVRRGVSRALRPTLRGLQLLSKWSAHVMEVYSWKLVHPTDKFCEQGLSWHREEYERATRYNYTSEEKFAFVEVIAMIKGLQVLMGRMESVFNQAIRNTIYAAFAGLRPGDAAVSPAAGGTEEEECPHQVLQAIRKTICDW

SEQ ID NO: 999992 - protein, 239 aa, Homo sapiens
GYCEYGGVKGEARTCLRPGGYGPIDYKRNLPRRGLSGYSMLAIADWNPDLLGLPWKHNEDGTVSAGAYEIEDFRGVAIALFAYCYRAVNHRSDLAYALRENLVGDEAIIMKDCARLPRWGMSVFQTIRWVPPLIGELYGLRTREEALHASHGLHVVHVGPVPSGHLDPRGAPPTWDGIKCFLQDRVEENEPKCLNDTKNFVGDERSAVEKGFHKPMWRGGPWCVEMGKVEEGNKMLCHK

SEQ ID NO: 999993 - protein, 85 aa, Homo sapiens
IVTMAVLMRVWFDLLSRVLSGVDSQDRRASVLGAGPCAHASDLGAYLTYVRFTEGCCFLFRHSWRPWEKTICHQTFIRFYDEAYP

SEQ ID NO: 999994 - protein, 135 aa, Homo sapiens
IDALDPDLQMYYNEGTKFRTWTQSTGCDSLLWNMARGHGLPTHTRAPTSHDMHSIAVVKMIDERHDMPELSMADVKFSFQCPGRMYAPAWVAPEALEKKPENTNRTLSRHVHGCSASVGTGDTGGYLADLSNMGD

SEQ ID NO: 999995 - protein, 105 aa, Homo sapiens
LFHRESTIIVAVETVELIAVRIMIEFHNNIYIKGWVQMVHRSVMPMCFGTAEVGESPAGTEEFKTQPGQHDKYPIMYKVLQKINLGLCGMCAVIPGYSGGQGRRR

SEQ ID NO: 999996 - protein, 108 aa, Homo sapiens
MVDTGQFPGAIGKQGKAARHGTVKSTLGIFTQRWGNLLNRRSAPCPSILGLQRLEEATEGQLRKQGIVAGAVDVLPPELDGHAGRADSIGTCGQLVGAKYLFTRMERF

SEQ ID NO: 999997 - protein, 276 aa, Homo sapiens
MTKDRWCESSCGSKFSRLYSYESLQRLGRKYVPSKVAEQLEVAEENLVLVTLREEGDSNEDLDWYQIIAAWLDVGDTGGWPQFNEQGKPEAQKNTGTTPARGSFDNEKSYRRTQMACSPSHSLTDNARSHSETNKRRSMQQVLPFTGTQYQQELCRTLLAPGLASKCLGRRLAMDFFQGTISANPTLHTQKDLKGPENNNKTNHLRHKEDNTTAQSRPPPPGDPAKNELVPTPTRAGGETRPPRGGTEETQRATKRALRERSRARRQKARRATHQN

SEQ ID NO: 999998 - protein, 417 aa, Homo sapiens
GRRRWSSHCFPAFPQMTEGSRPLLTQTLLLEHRTSPTYEREDNPWYCWILETNKVNTCSYSEKEQKQHNTITVPNEKELTRRQGKGTQSPPAQQGGQSRGTTTTAENKKTQERNKQRTQPRNRNKTRKKKKARHPSKEENCNMQDTENRRSTQSRNNAEKQNTETRRKEAATQNKKRKKKRKRNNTRKREKESEQRRRRSDEGGSQEKKKNGQDTTKHNKEREKHKRNKTRAGARERQERRKSQQERERKTTGTRRRKAREKATRTTKRGEKDREGEGPKQKTGAQKHNTGGTRTQGAEGHGERNGRKGQRRRRKEKAQAKNKRKEGSTDEGSTTADTVRDKKDRETRRKTPAKKKSTTSHKRGREKGQSGEGESAPRRREERPTEKQEVEEESEPKAQQDRKSGNDQQETAPEREA

SEQ ID NO: 999999 - protein, 131 aa, Homo sapiens
MVWSAASYTWSPSPPSSGSEGCYLSLLELSERVVSVLLLGSGFRLRYLHPCVCDGVFPGLLSSLFMRHLGPLDKVVTDYVQWGCLARKVHKAGVLALSCFEPLLGFCYSQLSRCGRSAIADGMLGKALTLL

SEQ ID NO: 1000000 - protein, 75 aa, Homo sapiens
MTRIAHDTFYCDGYTLSLTTHTLTYTYQLGLSTGLPNIQWTVRSDGYSTAHPRDIAMKLYTPSHMLPIAVHICNN

SEQ ID NO: 1000001 - protein, 140 aa, Homo sapiens
CHLKVQLKETDQMCRLEISSMASLWLLIKTWNQRWSVLTAVDEPMEWVSLDRMVCFLKVTLGLIRKLLAPALCKSYRQVGKLYPLEIRIPAMNWTEYGLTGKNHPAALQSRQTFYEACEHMTSDQTKTASSPDWAAHVEL

SEQ ID NO: 1000002 - protein, 70 aa, Homo sapiens
GSANWFSYEAHQFILPGCAAQQVTKKYDACSNDERLLIAMTYNLSSKPKYSLKDLTGGIVGVVMTCHHQT

SEQ ID NO: 1000003 - protein, 114 aa, Homo sapiens
MDIWSVFKQNDGIILNIRAYSHGQLIIYQTLSNYCTHTTPTTFVEQMSMNYSIAIALCLYIGCDGGSSLRTERIRKHTVLVKSYTKVHRMSMGRNMVIKHWSPPCTRPYNAHQP

SEQ ID NO: 1000004 - protein, 210 aa, Homo sapiens
MVLRGSHSPAPGTVPPRTLKTRADTRCNVRRSPSRNGAGGKAHHGAEGQRLQATSEGARERVAHPRKGPGRTCAHRDYLPTMPHHSGIAPPDQSVTRYLYAHGRRSWNRPPQRLNTSPAPTVKPRQQRRHVPNTKSAATPVDTAHDAQRSHCPEAHTSRGHHVPGYPVHHARTSAPRGGSLQTSVETRAAPLHEPRNRHSRRTLREKTRP

SEQ ID NO: 1000005 - protein, 343 aa, Homo sapiens
KCRKILIRRSLDIDEIVLVVARLEFQRFSNWLTESNNGKEPSRGINRRGSCSVWCCCPGWCALWLTQGSCVTWYCLTDCPLTLGLDVCGRCLDRLLISNGSTVVPYHEVIEILSMLLSDLSVCAVVGSSGCSCSGVVALASVCVRASVRPLRASSVALVSFVPSLASFCGGPALSLVRSSRVMYVRLVRGFRLSGVGCFSLLKRVWVSPGAVLLAARCFSLPRALWLPALCRGVSFDVISFPPLPGSLLTRLPTARLAHPPLPLLLRSAPRLPFPPRWRLVFSVCCVSFYLLPPPGLLAPPSRSPGFLASRLHLLRAAPPRRLHSRLLHPLFSLGSFAAPFVC

SEQ ID NO: 1000006 - protein, 299 aa, Homo sapiens
  misc_feature (129)..(129): Xaa can be any naturally occurring amino acid
RARLLVPASDRRTGCFGYVTSQGRTAILSRSERSSLPGAAGLPLRGCGASQLADVRSPDLKPEEQSCTCAEADHRAPYQDNYCVTVSAELPALGIIVTLWTTGLSRDHVPRAWPPSQNGDQLLGCGVPXERQAGLSTRLSVADLSMLAARMSEAAGAKPSSHWRGVAGASSLRRCCRALADGSRGALWIAALKKPACSRTSECRGQKYEGTRDIRLSSGACVFGESPQRRVVTEVGKDAPRWKHPPYHQVGLVEVGRLAPISRFARGDSMGSQARPGGHHGIHPPVGNTISVQMATLQS

SEQ ID NO: 1000007 - protein, 263 aa, Homo sapiens
SIFTVCLDADHAQVSEDVYRTHLAGQMLHGGGSRLNSRNSLDSDQVRLHASVAGEKMASCVDLLYDDMLLREGPPIVIRSETMSVDVQRMKPAAWCGLRMGARCRMTTRKLRFTQSMPSRINVATIEKAKQNLQIIMIQDLDITVMVFHQIWQRLPQSRRSSARDAFIQMALELAIAYKDLRTGSVPAYEKCLPDGMFITWGRHTMTITTRLASVHSLTVGQWHMALSSSVTEAPEGWTLSGEVPVQSPTGGYQPTRAILSGK

SEQ ID NO: 1000008 - protein, 280 aa, Homo sapiens
QERQAAAGAVTGDRAPFPCTLLACRSSSVGSHASFLLDWRLGALPERSEAPPEYSEVVADTEEASLGGSRSPFHAFRMEPDMSSVKARYFDYIQEFRIAAVIAMYSVGRYPETQSWRDMRPRCVDLLYRDRVPRRGTMVCTPDFSATMTAEGVLLDSRADLPLTVDSKVGEPKVSSTCGEGPIRHFSTMENRGGARLDSDLPGPLTLGGIEMPSAVSERLANKPVVQEQEVVLEVPVGASQSGRSRARHREIQVSENPEEETMQRVRSPDRKDEKESLRD

SEQ ID NO: 1000009 - protein, 144 aa, Homo sapiens
MDPCRMEWRARKLQRDMIRSLVHGLAWDRIWGFTRIGVHYVRGFDGPSWGCSMGAPGPFRNVYVLGLSYVLLTAWYLAYAFRLGPGFVGHRWGPVGATFTPITESRVHVPPMVTLAWRTQPLSTEALVVFGAHGGPTGFDPGHY

SEQ ID NO: 1000010 - protein, 162 aa, Homo sapiens
MSSEEGKLFVGGLKFNTDESGTGKTTSGCFGPISEVLCVVKDRVDSSVSRGCGFITFTNPEACFSCHEEPGTESLWYGRLRIRVGFMLGKSVSGNQRTVALGPMGVGRSYSRGGAGTRAMGVGTVFIDSLTWRGMDMDMDVPETIMAETRVVLIRYSWRKLT

SEQ ID NO: 1000011 - protein, 310 aa, Homo sapiens
YGPDPRAMAGYLGWDPEQAGEGSALIRPGAMAALMTPGTGAPPAPGDFSGEGSQDFPTLRSEPIAAPGSCSCMKRDGGRLERSGHQGLRGRCGEWDAALGRYRIGALLYGHPTSGSVALWSETSCADPWSLGSRRAQSRWPWSSRPGCSSDALCDTAFRQGGCVVDDRSTAGCLATLPLGVHCGLQRCRMITRTWSGSTQVRHPWSKLGVIFRGFNCRVQSPEQYAECCWTYAGCCIVGRSEQLVPAEESYMLARDVTAIRGTACHVCHRLHSQYRNVGGGACPVWWWTLSSEGAAGFPNEELARELGKT

SEQ ID NO: 1000012 - protein, 197 aa, Homo sapiens
MCKPTDKEMLHRPRRTLTSRSAPDTTEQYRPTPALRNEDTTRRMTRQGHKGDNPAAELQRGTTRRRPGRTPAQTPDGNTNSREQTPKQENNHKKQVNNKNKIKHKGRCRTRTTRQPPERTREKAQRKTKKKNEDRGRERTTQNKKSNSKKKKNQTKQKQHKDKQRKAKNTKAKEEQRKKRNKTRKNNNKNKAETAQE

SEQ ID NO: 1000013 - protein, 148 aa, Homo sapiens
  misc_feature (44)..(44): Xaa can be any naturally occurring amino acid
  misc_feature (57)..(57): Xaa can be any naturally occurring amino acid
  misc_feature (106)..(106): Xaa can be any naturally occurring amino acid
IQKGDEWHLHAYESAELVGGQCWHVPALGLCTSICSYAWASIFXRFYLCRTESYDSXLHVFVIHFTGVGPFRKPRGGGKQRRLVDTLDTDALELTEGPCKHSRSRXAHAGFFATKGVSQRENLGPFRAQIFWVVSDGIPYNTGPKPPL

SEQ ID NO: 1000014 - protein, 100 aa, Homo sapiens
LQEVLEVEEEEVEEPVDLPHGEDIMDDGGYSMNFNMSSSRGPLPVKRGPPPRSGGPPPKRSAPSGPVRSSSGMGGRAPVSRGRDSYGGPPRREPACPLLG

SEQ ID NO: 1000015 - protein, 156 aa, Homo sapiens
MEAAFLLVITQLKTLFLRCEIGDKGQTETHGIVHGRHRHPPGCTVGIFLCDGKQLATRVVLYPPFPGRDGPRPCAACIPPLCHSTGRLLVMFPALALMPLNSHPAWYPSLLDPVLTLEAEPYVSRPSPSPLSRSNSKVVVPRLRFPLRFVEIGIMC

SEQ ID NO: 1000016 - protein, 135 aa, Homo sapiens
MASVVSASAQVAGSSSEEEDSGKTGTGLQAVSGLPERPGGSSVCLYAVSPERGGGRGCAESTYREIFFMLGHKNCALNCLPRAAGGQLSFHWCCWAARLWDMGALCAPDLCAFLWPGRFTSGQKPLDTPGLGLPF

SEQ ID NO: 1000017 - protein, 168 aa, Homo sapiens
MCTSIHGYNFHMMMENFINSVTVTHKGESAVEQYDRFQFRASSPVEELLTMQNDEGNSDMLVVTTRKQAFLELKKLRKVMKEARRSVLKLIAVLEKKITAQLREQVGEWKENLGMRKKDVTNCKQNKKGLTEVTLKLTNGKVKSCKKRFSDATSKAHQLEEDIVSVTP

SEQ ID NO: 1000018 - protein, 167 aa, Homo sapiens
QCEGQVQQARARWRTPGHVFLRIHSFQDLSSSILAQSRERVASAREALDHMVEYVAQNTPVHVVSWDPLPLESTEKAPRRRRSQGERERDSMLWPLSYTLHARALESSIRGSISTLHFLSRTPPSSSVLVHLVKLKALKTGNHPVEPSLSLSESWKKPVLSLTLSVM

SEQ ID NO: 1000019 - protein, 355 aa, Homo sapiens
MTGKKPRFRHITESWPVLTLASRRTHHIGNPKTFTFRVTSTPPYMGTLPHAPHAHYSPGRKTNTNTDRFYRHPQPYTKHIAANATFHSQIGAQKRQKQTLAKRTQLKGHPTSVHTFSPYPELLYPTQTNAHGPPNNSPYKINITVVRSIGPEPNQRNSQKRNRTLRHPNHAQRPPPPAPRHPQLYGPHDKQAQHPKSTPPPYPNPTPKHTQTDNNLRAHRQPLAHTNNDHPTAWAPATVTPIATPTTTPIHPRHPGKTSHPLWTNKHLNKDATLWRNDRAKNNHICHPQHRRPNGTTGKANTTTHNGPKHDADQQKGQTNKRHEPHETKHKTSYGPTEQKSRNNSPTAYPGPPTP

SEQ ID NO: 1000020 - protein, 166 aa, Homo sapiens
MWKGRQQVPCEDTIHTSVFRVSLKCVLGKNPKDSKPLSGGIAGQGLRKKGILCVAQIRTAEKLGQNPLLCYCLLCPLFRGGFRGGLCTRRPPYEPGTVEACQCFPFETPELAFFPELRVPLCVVQPVPVWAGGILLPCGNLAAPRAPGLLRKTTGAKAKLGNCANP

SEQ ID NO: 1000021 - protein, 116 aa, Homo sapiens
MSIDEEWIKKMWHIYTVEYYAAIKNDEFMSFVGTWMKLETIILSKLSQGQKTKHHMFITHRWEMNNENTWTRGGEHHTPGPVMGWGEGGGIALGDTPNVNDELTGAAYQHGTCIHM

SEQ ID NO: 1000022 - protein, 136 aa, Homo sapiens
MPPISLLKHNKKSPLLQFPTSSSSPSETTSAWTLVFISLSAFLSNIKQISEEVPNFPTFSYILLSPPNCSNLCLLPSSKVASTFLGMFSATPHSQYQFTVLVCFHAADKDIPVTGKKKRFNGTCSSTWLGGLRIMA

SEQ ID NO: 1000023 - protein, 413 aa, Homo sapiens
  misc_feature (93)..(93): Xaa can be any naturally occurring amino acid
  misc_feature (126)..(126): Xaa can be any naturally occurring amino acid
AAGWLLCESGCAFCSARGPGSRAAGHRASDVNVGRAGRQGDCVASALGAKRGAGGARTAERCQECQLVDLDIIQEPPNRTTPVRSGTLLTRDXEYISSVSKLGAIDEDASRGSSFMTSVTGLARVXLWPGLGRFDRDDCCRGRMRPAPTTAGGHWYSAVSGLLVELASSYRSPNLGARSSCPCNREDLDRVEEGSAFCRGPGLLEYVNRNSLGSEQPHEYYAYVTQVMIPGIVAIIRLPISSGWKTTTPMRRKSTHSGASPGRRSEAVVLCELRVRASFPRADGTRPCRAWGLRFGANVLGSPAKAKQGCYEANWTGMLQLENAPKMGMGPIPKNANASEPQALRANGSYGMGVKRGQQGPKARPCGRRQDGDPERLQKGFSVTGFHSSKKNSIQEKYPWRIVTLEDGSPMNK

SEQ ID NO: 1000024 - protein, 111 aa, Homo sapiens
MPFQGVSTNGYTRKSNLTWHKVEVQQCLLDRRAPNSRHTGLPESLASQRALLSSNESIRRLGTPRRASARELPLVSVASTSTLHETMPPGNPQGVRIPHSLAHRATNNSIS

SEQ ID NO: 1000025 - protein, 40 aa, Homo sapiens
MLTREEKANIRMGPTKKSQTWSHEEALSDTGISPYLYTLR

SEQ ID NO: 1000026 - protein, 66 aa, Homo sapiens
FLLLALSSEPVTGVAFQKPSFYMDVSALESRGLLRRQTQGYTQRLTELSILSYLSHQAASALCVWV

SEQ ID NO: 1000027 - protein, 189 aa, Homo sapiens
MGELYREIDKDRREIRGAKRMTSLVAGDPEASRVTISMGPKKVVDAVADEAGSELEVNFYLNGQEIGAFVAEQKVEYSLGEESEAPVAEGTPPSEWSCTGSWEKLLKEGSSNQRVFDWIEANRSEHADSIQQVKFRALMTVVCYSAMILETPLRVDVAVLKARAKLVHEITCVSEQKELQALYGLQVRL

SEQ ID NO: 1000028 - protein, 324 aa, Homo sapiens
RGRCIRAEACPRCDPLRRYTAAQSPPSSSPAQARPLHAYRVVDGHHCAPARMVGHGGPACALGPACDCSSSGLRDVCDRDPVSTGGGLTSKALGSARGVPPERRGSSWQGRETEGADSAIPVGKPRSSAPPTVYKDPNRRWVKDHRRCPVEIPACKPESRPGEERFRRARPPGFPGRGQLTASPRPKASRFRGRYLRAPWAIMPPVASVITGTSRIPPGRDFDMGRTREVGLPWSLQTGRGQRAGGTGGLRPVDGSMTRIKPSPPAAKGSRRPTVSPCVGTCSVCDRNCVDACQSSLVHPSRLALATRGLVYGQLLGLSARPGK

SEQ ID NO: 1000029 - protein, 269 aa, Homo sapiens
  misc_feature (135)..(135): Xaa can be any naturally occurring amino acid
RGWDHGTWNPPFTPLERPWALTQTWDGVSHSLKYFHTSVSRSRPAGSPASSLMGYVDDNPSSLQLSTRRRRDDPHGWCPRERPCDGAARGHVVLRTVEITCGVHGYTRHQIFRVNLRHAARYYNRGAEAAVSDPXSVDAMAANCGPDGRFLRGDEQVRPTRARIISRPVMMDLQLLDRGRNIRRAQDLQSNNVKLMPLRAGASQSSLPENDTMTVEWLHQIPGRRGKETLLHLEPPSDTRDFSDPISDHEVTPAVLGPGRLPCRRSHVT

SEQ ID NO: 1000030 - protein, 208 aa, Homo sapiens
VTFTVIPPVAQATVNFRIHPGQHSPRGPRNSRRTLWLITESSSMFECLYDPLPVSPSDDEDLVLPDMLRPGPIHVRSFHGMSHYYMDPQCNTYLSVGQKHQELRHLTSFYHKPSIAALALLQRFIPLILLVSSPDTTSKRQSSGCASEIQSLVHAYETHVNISSLELELQELLIIMTHESLVFLTLHKLLRVNGGLLGLSAMPDPSGQ

SEQ ID NO: 1000031 - protein, 67 aa, Homo sapiens
DNFHQMAPKYIWDQKGFGSCSQTHNSTKPTSQAQGSFHEPLNNIALNFNLFFSFHLLLYDSGFSVHG

SEQ ID NO: 1000032 - protein, 248 aa, Homo sapiens
VVFTLGVFSAGSRILRHMRMTLECVTTSIYLSLSHHGKSSRLLGWLSLSWAFDRGRLANLSSSVNDKMEELTHSRAMVNLRALLLQLAGLRESLCGASVQTAHPLRRGPFSLRGYCADFSRSLWYLMPRGGLGLSRSGLRPVFCTVVLRSTLVHVTFYNQLGLDICGSLVHSKYVTFQPRNVVVLTRIFERLLTSVSLPSLLIHRLASSLGFRIISRYAYIIDACLNVYQANRATELLIRRSLAFCWK

SEQ ID NO: 1000033 - protein, 185 aa, Homo sapiens
LTSNTSETFSTVYIEQTPTIVPYMLECIIILVCLHLDTCYRSWDETMMLLYADLMRCTSAGCTMRADTHITEITSDTEWGMQYNCPTMPNEAAFPFYRLFNDSLPATFRDYMLPGFPGTPRPTREKSVRIRIMEKMGGGGVGDGTHCRKEALLILEEHHGISEELPRVLVRMDTNAATMGEYFAS

SEQ ID NO: 1000034 - protein, 103 aa, Homo sapiens
SVSASWLPPHFFRLAHSVSASRPRIMKVASVACIRHCRRGPHAARFNGLANDRRRGAARGGALVCLSTSVVHLALLPGASGCAACSCSMTVLMACRLCCAWSY

SEQ ID NO: 1000035 - protein, 96 aa, Homo sapiens
RITRVQEIENILATTVKPRLYYKYKKISWDYRRTPLHLGDFVFLVETGFHHVGRAGLELLTSVIPPLGSQMLDYRRDPARLHQACLFLGHSEGQLS

SEQ ID NO: 1000036 - protein, 181 aa, Homo sapiens
RGQVRRRLVRVGLGPALPRDVKYNKRVGDGQRMPVRSAGAPVPQLPPHAGSAVVHLRLPGADSGSGPMAVCSPPFTCGPDEAGLTVATTRCSFGAMDGARGYLLNRIWGCSWRSYAALVAALPEGMRPDSNLYGFPWEFGESVQLLWDLFGVFSFVFVDASCNSRPRSRPYCGTEYEQACF

SEQ ID NO: 1000037 - protein, 69 aa, Homo sapiens
FIAGQSMMYRTDVVRARKRVCWEPWVIGLVIFISLIVLAVSALALTVHSCEIVIKEKTYNYYTHIVIYN

SEQ ID NO: 1000038 - protein, 41 aa, Homo sapiens
MGKRGKKDRYPYGPVFPRLGETKRNSNAVMSMQRKDLLTFD

SEQ ID NO: 1000039 - protein, 320 aa, Homo sapiens
  misc_feature (91)..(91): Xaa can be any naturally occurring amino acid
  misc_feature (103)..(103): Xaa can be any naturally occurring amino acid
  misc_feature (143)..(143): Xaa can be any naturally occurring amino acid
  misc_feature (250)..(250): Xaa can be any naturally occurring amino acid
SGESPSDAEMRVTAPRTLLRAVSGGQRCLDPRAWVWLRYVLVMVILAYARVFRWRPGRRGSSRLHLDVGLTAGRATQIRWSVLIGRSVRRXLGGTGRHPMAHXGNYSKEGGSRVYWVTLGNDELMSLRMERSMMRLLRRGRRXCCGSLCGRVVSIRAKQADRTRALVETQLPQYEMVTGLAGPIERGRGTVDGSSLTRAQLSHCLGRYLSLGDRELHMPTRGDRRMNPGSLSVGRLRDVITCQGSTESKXDGGNAAEVRVTVLEESTMHDKCATLRRGNDACELCLRQQEALETRRGTGGPSCEEPTGILRKMNRLVNPR

SEQ ID NO: 1000040 - protein, 110 aa, Homo sapiens
MRARWTSMHAGGVAGEGRGALVTWPRVPGMEVYGRSDGPLSSPCRAALAPTRRLPCSEIISFGAHTCMSRWWGGEEMTVCLTTFLVGAIDTYAHLISSSPLSWIHGHVPW

SEQ ID NO: 1000041 - protein, 181 aa, Homo sapiens
SGARRSPAPRPGGDPPREGLRVSAAGRLPRSHARHSCLPLPRAPEQSAAFPRAARLSPTSLGCRLVLVRPMGNAEQATLQAPTMFARNLRRRTTRASPDAASCHASSVTTGASLNGTCPTVNRSMVDDASTNDLAPRLPFPIGERTPKICLTHVLHDTYVTTNQTMRTHTTFSRTFDRLPA

SEQ ID NO: 1000042 - protein, 255 aa, Homo sapiens
MIRGQLIHYWINPINGNNATRVERNCYKRLAHDNLLPGTHFTHRDCPNTAVGMGLTLFYDHARRYMWGPFTQKDVSSAGVPKNSGDRTKGRKHSTVDHQNPKVRQRRPDDLKVIVAENNTFDILKEKQPRQIVQGAKHQQGHVDSGPGWKHPRGLLINKHRPPAASCTTQVFGRRVQQPPVRRGEHTKQQECGPHSNKAGGKSQRCTSIKRKNAGNTTKAPQTPTTTGGHTTQKAGAAAEQQNGKVKAGSKSDSI

SEQ ID NO: 1000043 - protein, 258 aa, Homo sapiens
AGDVGGWKSGEPATADLLARATQRRGSSTVHFSTTEGKYCVLSTCVVRELKASSFWNLNFNEAMWAIKCVCEQQQQSSSNVHLESMVHMCRQQIPLQGGNLFDPTPRNQDNLHRILDSVLTSSTFAAERHRTNRDNTSITKEDQQTQSERETEKSVHAPKRGERTHRNQRGERARDNKTRPNATRVGATEERTRRRRRESELQKRHKRRPYDTPRHTPRTAENNEAGDTTGDVGGAPTRASSKPQPRNRARPAGQTSA

SEQ ID NO: 1000044 - protein, 138 aa, Homo sapiens
MATVNSLYVTFHIMRGPTVPGLAGATTNTRAQMDVPGITIRARTYTQQLVTILGQADTRAIEYRHHRVPAQQAQCAQDTRARMRESLRKNGPISEYRKLQFTFSTTQSASMLNYRHTRRNIPYGSKQQTKIQQEHKRK

SEQ ID NO: 1000045 - protein, 103 aa, Homo sapiens
MNLLLPASCPTNIRALTPEQKKELSDICYRYRDHLARAILAADDVHWEQFAKRLKSIGHRRTLEENRCFYRELLLTDDDRCEPLAIAGCHPSFHEDTSSQTGG

SEQ ID NO: 1000046 - protein, 177 aa, Homo sapiens
MTDRDKTTERGQKEQRKKKTNRQESNEEKTHAKKNKPRRKKETQKETTHEENEKAREKNETNEQEAGAEREENREESKKTQRTARRNTTENENTTEEGKRGNRQTQRQKNERKQRKSEEQNQANKERRRTEGTKTKKKKHRTRRNKRKEREHEERRKKEKTQKRRRKTRQRGRKQRS

SEQ ID NO: 1000047 - protein, 220 aa, Homo sapiens
IRLWALQLIFSVHASAPVAMHCELPEDMRRMRNVHQGGDNRSEFKDIDGDQNPEGPDRMLPCGGPTQAVIFFLRSSSNPSSCTSSMSCTTVSPCSGLVKLQRLVLDPQHMWTSFDAPRAHGGRLSSHDVSLTLQGVWRFAIHAAMSLEIVSVCCNSDTWFLAKITRIATFNSTCARSLRIKEKDSMRWDEANLVARAVMALDRPAFPKRQEILTLELRAI

SEQ ID NO: 1000048 - protein, 88 aa, Homo sapiens
HSLVNTRSAYHSGIQSRGSPSQFLVLIIINLSGTEEAKRSSRFSFGRHGSYGSARSCIMVNPGLDPLSTWKCESLHFQSCRFATGNRY

SEQ ID NO: 1000049 - protein, 185 aa, Homo sapiens
SGLSLPSGQEPDPRVCVSARPLLRTGGCPLPSYGATMGLTGQLWSDVPSQREICTRRRSYPVARSGHRRTGLTAGEATMLRVVGNPSDGEWGTAPMIAQVSEVKVEHEYAFRERDNAIVTYMKYGDLANAWMHMTAACMNGNKPSDDCAYARTRQGLAQAREFARLEKMFGTMVTKRDAIWWDCG

SEQ ID NO: 1000050 - protein, 114 aa, Homo sapiens
MSCQQSQQQCQPPPKCTPKCTPKCPAPKCPPKCPPVSSCCSVSSGGCCGSSSGGGCGSNSGGCCSSGGGGCCLSHHRRHRSHRRRPQSSDCCSQPSGGSSCCGGGSSQHSGGCC

SEQ ID NO: 1000051 - protein, 85 aa, Homo sapiens
MSNKYNTTKVLATIVREKRLKLTCNRPFNYRMHSADFEVVRCRACVLFGGIRTEFSAADMAPVAVSPTGYPGLSSWAFACDRRVF

SEQ ID NO: 1000052 - protein, 199 aa, Homo sapiens
SGTGKMAAHHRTEHSRRRKVQVSYVIRDEVEKYNRNGVNSYCSWIQQLNRLIHRPVVDSTHKNMDVSTQHDAKIHILASTGTTKLDLALTRPLAPLVSSTRGKTINSLAYFLDNDQHTPVLGKAHPHGATIRHLYQQHFNREHQLHNAHLTGFQKEPINAIYVPPTRELNIETLQNDHITRLGDHGTKTGTVLTPLLAE

SEQ ID NO: 1000053 - protein, 67 aa, Homo sapiens
SGLTRTHTRAQEAGGRAPPAPMDAPRRGAETPGRASRSGRQPRISGQDKSEYPLTDKHEPAPPPAPP

SEQ ID NO: 1000054 - protein, 271 aa, Homo sapiens
ISCSSPYKLRAVQDMRPFSNGVIGQPHSPIALISPGSHRCGAELHERNAKGFRPVNGLSSSGPSAFNLQYPGGSEDVGHYGDCATYRGPKANRVLRINLHRKIPQSNSGPGVFASHAKVIELGDISLYIILLIRRHTSSLSFHLVPTYMRQCSVYTSFGYKNKVPAGGWFVTMNFGVHAIMYNLLHLLKSCTTVKAPQDAAHAHHQSLQILQMFVGANVSDPHCTSGGRITDATPRWNTYSGSFILYMTYFILFDHFFCQTYIRPQGQSKT

SEQ ID NO: 1000055 - protein, 142 aa, Homo sapiens
SGAACLSRTAGYVIVSSVSWAVTNEVDRGAGQMPSTEEAYAQTLHRGFRADIWQTKLFSEHHAHKEEQHHEDPEAGAAHGPGRTHRTTQEMNSVHGDEAQATDGQDADTHEGTIRTCRSLCPHDTAIPHEPQLPKTVNAEWI

SEQ ID NO: 1000056 - protein, 68 aa, Homo sapiens
SLPLIPDDEGRARSVRFSCDTVRDEKALMNSKRTPFCLEVPTIMTCYLIAAYGCAHMCILDVLRLPSR

SEQ ID NO: 1000057 - protein, 106 aa, Homo sapiens
MRGRSGLSLAVGGGISVWERVGGGRHSGHEPAGTHELSPDLGTCKLDMPGYKGQSRKIGHLGQVLPEPKDKGLFYVQDSDVEPSLGIFSWAAIWITWGPHNGPFPN

SEQ ID NO: 1000058 - protein, 74 aa, Homo sapiens
KKLCELQPEEKCCVVGTVFKGSCPLQSSILREVMRGAATWSPSSRSDVYTIHPDETELVLEDEVQRIITKMAAD

SEQ ID NO: 1000059 - protein, 128 aa, Homo sapiens
MADQLTEEPDAEFQEAFSLFDKDGSMATIDQQGSGDSDEITGTEPPLKQDAARTHDQSRWLNDGNGTIDFHGSTCPMIGQKDEGTQTDEEEIKRGRYQGSFEKGDGKWIKEETKEKGSSNDETEGEDE

SEQ ID NO: 1000060 - protein, 188 aa, Homo sapiens
SGGGPYYTMTVDDTVEKADNTREETRRQEGLMLGGKVKKGKLDKLTMLQEGEEPYGSRISLSVVQRNLTGIPQSLPVYTSKGTVQEEVLRPLKSNIENDKRTEKVLATVTKAVGGDKNGGTRVVKHSQNCLDIILLKMCLEKTVETTGKKALQVRHVSKLLKTQTLPPGTHTDQSITGRHRGNEGGKT

SEQ ID NO: 1000061 - protein, 42 aa, Homo sapiens
MPQPAERRNHTTGNSPSAPAAEKQKRAATTEAGTNGQREEAG

SEQ ID NO: 1000062 - protein, 63 aa, Homo sapiens
MLITQARFFLPHSHRDTSTRPLDGDRSDPNGTLGRGWIKKMWPRGTRERTIQDKNCSPNGLSD

SEQ ID NO: 1000063 - protein, 387 aa, Homo sapiens
MSLHTEHLLICSTNCVQARTCTNRTRVSDETSTYDSIAQTLAAPMVDNVEAWLTAQRPSWVQEATRVCTSNSAKIQEALSEVPAQHNLGSEFNKTPTTWAQSRLGRYDNDNQDTVSTTEMLVLPNSSQSFYYQHYSVYRSKAFAPSALLSGATLGPYWGYRNNVLPPRILCHHIYVFDLMALPIGIYGRVIEHVDFIRNRVHRIRGDPLILGNVAGEAIYWSMVGSTWVYDDGELTVGEEALNLISYGYTLRVVTEYRSPYIESLDAEHTSFTEFYTKHPVVERGPTLAEHSRSCQIVPHVHLHHDGPSRNITYEHSGHGSRRDMGNRAANPRASRAQHRTQRYSRHNAEDPRIPTHNEPTPPTHTRNTRRQTQPTQQSADKRNSTQ

SEQ ID NO: 1000064 - protein, 331 aa, Homo sapiens
MSMQDMQDNTYMMATLDVKLRPSCHNSFRTHMDSMEAHERHDELPLVSTLAYPLRMHNTHTHNTPTDDTNEHQEKNKTQTRTERNTRPYTTRQTMKETQNTTKSKEQATTQNNKATTTQHNHKTLTTQTKKKGNPTTKQTHTQKTTKRKRNTRSKELTDETMRTQRTEARNKNQQQQEDIETRRTQQQHTTHKENTNNDANRDKSITSKIEPQFTSHSPRTPIAERTITNQHKTHNIVNKNKLNKHRNRTATKRHTQRHKKKRGKKHKNKEHPTPRSQQTPKTKDNHRAHHHTHQTTGAQEHHNPKQLSKAKNKTGHTETRRKTKQQPQNK

SEQ ID NO: 1000065 - protein, 153 aa, Homo sapiens
MCIIRPKSIQFHINTMNDKIKKEDIDEIPHMPCFLRFESLWLDIVALNDHCTTEVVHVPLIIIERNSGLIHTMPLRPRYNGFPFYGETNATTVMQATDLGISYHKQCVATLSLPTPTATQTQHNTANTCGTRTGNKARNKKTPGQVETRTFHA

SEQ ID NO: 1000066 - protein, 233 aa, Homo sapiens
MLRMDQFMYPFIYSSKHFQSASHGPCSDLPSRNTGMNDRSIPPEQMGLMSIEVQDALPHISEKYFVPKSQKKTKNSTRGIQSHQKIALMILTQLRYHHHLPRIRMGRKAREANVRMAGTCKLQPGSRNDTAYIYVDAFRQGQTERWRHTDERPREGTWNRTKRTMSMCEEVRDNGEPTNKRRDIKRKRTGKRARTKKKGAIKSPRIKSGKGTQDNKRKREEPINGQNKEKKKQ

SEQ ID NO: 1000067 - protein, 98 aa, Homo sapiens
DDAMLGFVGRVVACSGLRGRAETHPFRVSCPQLSSYCGPLQTAGPSCQGVCGANISFAQKQAPCTGRHRGRSLAAVVVASSFDEGLSPILRVPWNVQG

SEQ ID NO: 1000068 - protein, 267 aa, Homo sapiens
SGVLCVDRGGGAEAAGRLSPARALCEHWWCWWLCLLALWLTLLGALVLWVPPALSALLLELWSCLVRLWALLLCGPGPYGWLYGAVLLSCSCAGMRRALSWPCACCVLSALSLRPEARYGAFCKGAHAAQLLTFFDLAWRLRMNFPYFYIVGSVMLNVLLQVRIEWAPACGERLKALAEAGCQCPLPEPGLGRRHEGSWASGEGGGGWGGSDPWTQTYADRAQTCAALSPAADISPGAHGIAQKRTEWAHAIGAPETTMGSDEPGAS

SEQ ID NO: 1000069 - protein, 71 aa, Homo sapiens
SARYNITYQQPALASQSAEIAASARPPPRLGSEEQYLTERRIVWRCEEPLCLDGQSGEVRSLYSVQSFDPI

SEQ ID NO: 1000070 - protein, 353 aa, Homo sapiens
MNVVYSIHTCGYPTNADLILLTVDGLMAYQSDITRHKLDSGRHDPNYIPLVATNMLLVPELLIRYHTYTNTRAHHTHPTHCVHTSAKAPHSELRIRAAPRSRAPPRYLLLDPTPHLAHFRALTRKSSTVGGNARRDDAPSPTCNFMPRAYAGSKHTGHTLPMSPATSRQLYARLRPHIRPHTAIRHWTTHTLHGPHRDTFTITWSVVTHQLGGFTTTIWRYPRIRRTTTANPTICQRDASRLIAPLQRDQRHPPLASAIIHRPPPPERRTACLHHSTVFNGIQSTPNTPHKQTQHTFANIAGYWSLTFKSASLSVTHLNTRYSSDTIHARNHSYYNQSYPPFTVLTPCTTNTV

SEQ ID NO: 1000071 - protein, 96 aa, Homo sapiens
NREHTPDSEPAQADVLVSAALSQYVPRCLLSSLLVFLLTSSFFHVTFQDTVISSPQIISFILCVCILFNQYEIDKESSLPLWDRQNFLNLVRNHVF

SEQ ID NO: 1000072 - protein, 234 aa, Homo sapiens
MVVDHKTLNSFDRQANREYRVPTPISTEVPLLSLSEVTLISGASYHSIVIERGGASPRSLAVYSQCLLLLNASSQHGVNHIYLEPAPCAASLCYLLIVMSHLFSSGGLSSPDGMVVKHTLWCYNSTMLLTTNPYLMTYSALRIHCEAPKPCCMTACFPQPAAERCTLCSDHHHISAHPITHDYAAEPPPTPCFIPSPLINPSHRRVLMFSGGDVSAGRFLLSAVADEFLTLCLF

SEQ ID NO: 1000073 - protein, 173 aa, Homo sapiens
  misc_feature (135)..(135): Xaa can be any naturally occurring amino acid
SGLPKWQPPVAHKCYLVYRGDAEESKRSSAYDYRTYAVRRKRDGFSSKMKYEKDTCYKFERLVDKAKRELGVIRRAGPHWPTVFNLIKLDHGRIRDDCLERSRQSPWEPAHRVAARTYFSIHSRDLSWGLPKTQXVTSRPILRWLIRGGEREYKARCSIVHVCVQGVSERRNC

SEQ ID NO: 1000074 - protein, 97 aa, Homo sapiens
MRWDRPGSRVHARPSGGGLIIDMGQADAAHSSRTLGAAAVATLPLCRHRFTRNNRLCWEPPQPPTRPPDNENQETPFGSDRDRCIQDIAPSKDSAMR

SEQ ID NO: 1000075 - protein, 395 aa, Homo sapiens
MALGWLTPCAWCQPRAVARRVLHAGSSQAASGPWRRRFEATGQPCDALREQAAVLPPTLSRTPEVQWPGAHPGAAHTRSCRPGHGDASAVPCEAALALYTMLSEAGACGLWVEREGRTWLNGAGPAWKRPVGTLEGRAMQRFEDPWSLNIEHPLLVTKFTACELTLPSMFTEQANPPRLKTAIVNTQEQLTTGGSQFSAVMADGKKAALTSALSIPELPLIVHVDPGLIEQQTTKVIEFTRSRQDLAAVLALQRQSLAGTEPDLEASADPGWAKLTSKTAKCALLRAQSPVSQWPSRPGYTGSDRAGSTSGPRNSRRRTTETAGPHAAACLANNLFPPLRETTTGRRHSGRYRTSSPSSYKPRDHLAREKASLPQEVTQQSARRAREPLSRQTNR

SEQ ID NO: 1000076 - protein, 297 aa, Homo sapiens
AGLSLIYGSAENRFSSRSISTGGGGCSSSHKSETLLRSNRKQTGFLTEQQTTPWQESFENVAVCLPFRCPRCGDIPDLRTLVILEGPSGASVTATKTEPSGHNCRLFPLPHKTLDLVTFHQQLLTHGHDTMPAARRHRRVHSRTHPRVHVKPRRYEVINTEHFPTAHGKPTYDSARNTTRTSMIPTCCTQPYTPAHTATPHTCTHPRTGHCGNHATRSIPQVLNKRSHHHTAKQHKITPPPITPGTLDTRHNKPTTSLPKSHNGIPTRSLRTNHAHPDETAHNTSHPQTHTENVPQN

SEQ ID NO: 1000077 - protein, 393 aa, Homo sapiens
MATTATCTRFTDDYQLFEELGKCVKKTSTQRLQQPEIINTKKLSARASPANYERCGSDYVDLLHNIQHTRCRPPLHQLTDSCKQRASHVSHRWLPEPLLNPGPRAQALPPRTRQPLRLRHPTQRNANLTSLQTPTKMAPTPQPCASLTRIATHRSTHGASKGWSHNAPTEVSQTPKGPTHASPRVPGHPPATTPGPPPPRTHRTPPPHAPQPPSGPRRPSGPPPPNGLSPPSCTPTTHAALAPPRPPRRIPTIHPPTRGPHYAPDTLPPGAPSPIHRAARTFPAEAQRLTNTRRAHTETAPTRPHAGPVEGRPPPHREPPPPDEGPPARPPQPPPPPHRRRPTNTPTRAHPTTPPCQTAAHTPTANHTPDNTTPQRPPPTQKPLRPHTRITPT

SEQ ID NO: 1000078 - protein, 445 aa, Homo sapiens
MSPEHDNRISRDWIVRTTPMYHSYGVTIDLRPSAPFPTYWHTSLAPPSGQLAHHRPLRGHTSTNHSGRRHRRLYILLGTLLPRRPSANFIISAPHRNIALLHATSSSVTTLIASLSRRRPSPQTPLQPTPSRARTLLAQPRRAFNTAVSANTNAQTRRADHLPRRTPPRHHTARHTADTLSSPPTDNHPTHRERDIGNHRAHPHSDHPAKATPPAAAFPPPSRPNPGGAHIARRKPTTRTHTRAAPIEPRTLAHLPRRPQPRPRETPTLDTISPLNERLARHTETPPTQAAAHQRRHAAPRTTTPPHNSLPRRPRRTPAPPCGRTLTRGQHSHTRQPPTPAQHKRNTTENNKTKYVGSPPEPTPDRHHPRRPPTPHPHEFQTTPQRLATPQPPIQTATRTKREQPHDRPTEHKQATRATEPPRAVPTPTERNLRSRHPARSAPRI

SEQ ID NO: 1000079 - protein, 146 aa, Homo sapiens
MSISGERPGRLYSERWSRPQIGVFPRGMLTPGSCGGCMVVVLSTSPYRLDILGHIYVQGQSLGYTDLLIKETEVGKPGDSGTGYGGLRYRAPRTGSQQGHTKGNSGHEKEQVDEKTDSVRDTNLETQSRDMRGKQRPQYRCRGGTE

SEQ ID NO: 1000080 - protein, 167 aa, Homo sapiens
MSAPCCPGRGLRDRELRSLGAVTIEVLTSELDAASTEEAMPALLRIRAIWRSFPASAHKEDAHLRPRAGAARARQPPAPPGMFSYRREGGQTASGPRALDCALATARSLAHASVWGCLATVSTHQEDPRTAIWELPPVSDGPSSIALGFLSSTGHARSPVVADSDDE

SEQ ID NO: 1000081 - protein, 221 aa, Homo sapiens
SGARPHTRRSKLGAGGVPASSLPEAGPAPPRPRVAPEAPHQRRIDPGLHRGAAHSSAGRQDMTQHRADTAQILPQDCYPPQGHGDQGAQTSTYGPEATGNRLSGVEIYMTSRPPKAEWDDDQSIEQAVRKYQIINTRTQRELAATLEIATNTEYKGPHWGVIVEKPHSKRERQRRTRQTVCETTIMQENCKPQMLTLGVCVADLSEGCDEWMNDAKGQKEG

SEQ ID NO: 1000082 - protein, 101 aa, Homo sapiens
AELISRHEEESNILKAELNKVTSLHNQAFEIEKNLKEQIIELQSKLDSELSALDRQKDEKITQQEEKYEAIIQNLENRQTKMVSSQEQDQTNQLHSDTLNL

SEQ ID NO: 1000083 - protein, 141 aa, Homo sapiens
  misc_feature (83)..(83): Xaa can be any naturally occurring amino acid
SGVDVGFGERIRMQAWALMRLGGATASRRARAGRYPGVAAQGRTIYGTDESRPVMGSVLCQATCHSFRRHYDPVCHVAADDPXQDQLDSAFLRTFATLSLSSSSLYLRRGTPLGSPRRLGVERQLPLEPRKLVVGFRRGAV

SEQ ID NO: 1000084 - protein, 205 aa, Homo sapiens
ADRCLLGEVSPVAAATDGVSEAAAEENGGQRAGMQGAKTAAWDGSTVWVGRGGRRRTLCQLLLVVGAPGALIGQASPGTPDDGHEREYRRPAERRCSESPRDCCAGPVWASAEDLSILTGTLWRAADLRPAPNGVAFHLQTPLGGVGSTGPYGTLAVELPRVLVPVLRVVCVRGPSITLRRGVPAYSCTIPGAVAGALFILHARF

SEQ ID NO: 1000085 - protein, 131 aa, Homo sapiens
ERSHFMRTGVAVTVGPVRSLSQDDLRKPIPKTNRWRTRRVETYAFQAKNMPSWMSLFSSSTFYSNKEILLRELMSNSSDAVDKIRSDSLTDPSNLDVWERAALLILIPNKQDRTLTIVDTGIGMTKAALDQ

SEQ ID NO: 1000086 - protein, 72 aa, Homo sapiens
RIDPVSPQNRGRRVMMCEVARLSPGHARAVAGSGSSGSSFGCCISGCRCIRGFLRKLRADDERMTELTSSHD

SEQ ID NO: 1000087 - protein, 66 aa, Homo sapiens
RGATPYNSRTVMNGALVKPTHIIVETMMWALSGRRGRRLSCCLLTLDSHRTRFTELYICTRIFFFW

SEQ ID NO: 1000088 - protein, 99 aa, Homo sapiens
MGRNKQSQGCEQLKKTLGISRAKLVFQAADPQNGGGLADDSQSRKKFLEMSLERVRRVGVHPWSGNTANWGIIDLHGTLNGLWITKRENQIVKFKTLMK

SEQ ID NO: 1000089 - protein, 137 aa, Homo sapiens
MWNGLSAGLIPACRASSVTSLGLNGDFLWVAIDRHDLVRLYDFIRMRVSLPNGDKENAANQAPVSLNESSTLKKALNFFLTKLTSISWSFGVLQGEFPGAQRQQTRAPAGISAQRSCPIDDSTDKGLETNKLHCPRG

SEQ ID NO: 1000090 - protein, 113 aa, Homo sapiens
RPQVLMMRLGLMPHIPTLCESYFSSEIYYSLSADGYKKLVTGHTTADAMFHNMLRSYARSVERPRAYSGIPRFAEKCKLLVPQEQIATPEGTQVDEVGRRSVLVRRRQFVNIA

SEQ ID NO: 1000091 - protein, 185 aa, Homo sapiens
  misc_feature (17)..(17): Xaa can be any naturally occurring amino acid
  misc_feature (27)..(27): Xaa can be any naturally occurring amino acid
  misc_feature (42)..(42): Xaa can be any naturally occurring amino acid
  misc_feature (51)..(51): Xaa can be any naturally occurring amino acid
  misc_feature (84)..(85): Xaa can be any naturally occurring amino acid
  misc_feature (108)..(108): Xaa can be any naturally occurring amino acid
  misc_feature (146)..(146): Xaa can be any naturally occurring amino acid
MGTGVYSYITCILSHSXLCSRIDKMHXCGDFEELPESRGSRXVYVIGIVHXRIIQLLYVTMVEYTPNVATPNVIVDATRYIQIXXGLWVNRGYLRYTGIGDKVIASEXSLPYQDIIRDAEESMRTMDTLHQYVLLWNARCSEYSTXMYGVHSMYYISVFETSIDKSYCYDLPWTSYDSREPSWVS

SEQ ID NO: 1000092 - protein, 148 aa, Homo sapiens
SGEAGRGGLGCARRRARGDLGPGGLGDRRSDAVVRPGRVLGGCVVLCCVQCALPRTPDSQGLGQRGCHGLLWGASALRKPRLWQVHTMTPGRGDEASPLTVKTAAMECGWTAWPTRAKGTLTGTRGWSPGIIHGILTTMENRKPVAPD

SEQ ID NO: 1000093 - protein, 241 aa, Homo sapiens
  misc_feature (97)..(97): Xaa can be any naturally occurring amino acid
RATPSGAAGEGGSLGAGAESAGGGGGRAAGGRQEAAGALVLLLEKGLRGVRLRLALSPARDWGARAMWRCVVLIVLAVSAWVLETCGRDVPLMKTGXHVECACCGPVTWAAECWPAVLAVLAPCTTMSLLMCCSPVSRSWRSKLTILNDRGLSCMLTRLYNINEAMDKFAKHVADPKAKPSYLIDKNLESAVKFIVRKFPAVETRNQQSTACTTTRPQPSETLNNLALYYFTLCRCYGIKD

SEQ ID NO: 1000094 - protein, 50 aa, Homo sapiens
RVACVAPGAADGPERPAPPAPPRAAPNTTERSGENPRANRRDETRQSSTN

SEQ ID NO: 1000095 - protein, 69 aa, Homo sapiens
SGFLYRAAAHGSSRSALELRALLGPRERWGAADAGCWGGGWGGDGRTRASCDAVHISGRGGLADVLFIS

SEQ ID NO: 1000096 - protein, 254 aa, Homo sapiens
MWYSDVWSNLETLVKQAECPRGMLLCGSRDSRELDISCGERTSTLAELNDMPSLPYVNPTIIGSTIAHIDNESGPAHEMGERKPQRERREKRKAPQESYSDPTQDKIDGSPRTPRRAPPRYIITNRKGGELRAPLDTQRLGCDEANSIKTRNRPKLTAYDRQGDGTQRSKKAYSDKVTRENGSAIAAPKRAGRPISGRRHDPPIDEHTPHSRKTTTNLAHPLGATENEEGGSAPRTGRQPTPTAWHIKGESTST

SEQ ID NO: 1000097 - protein, 233 aa, Homo sapiens
REKCPDGSPGHTRSAGASGIGMAVSHRVGGRLGSNIRNKCRQGPGSDSVSGNSPFEEDGPGEGRLVCGRHVVSYPTRPTGKRNWLALWLDGTLGYQLRMRQRRTEEDRDASSIFKCPVTLNDPDQSAHDCARHPEGQEPRVAVLTVNLREGGRLQHSCDWRAKDDAPSVDRQALPEAKVHTLGQRHTSAVPTTTYESGRPTYCTSKGDVWSARYYRTDHTQALAMTARDSAGQ

SEQ ID NO: 1000098 - protein, 183 aa, Homo sapiens
MTARIGPEKQPEKTKSHHGKYTPRKTKEMEHAYAEWRGQNTPYRGRRVKATRPARANRAADQATTEHEPLHTTDRAKTQQGTTHSDRGSGWSMHELHSWCTISHSRPQTLEQLKFQNGEQTFKCKTLDKYARPILPADGNSLSMRVGKHSSLNSTHVHPIHVVQIIGSSIARGESLPTYISLT

SEQ ID NO: 1000099 - protein, 167 aa, Homo sapiens
MHWVIPVTNRPRSDADVMGRRVSQMEPEVCRSSWNGDYFAGELYLDESKQLYKEAEASSGTTVLSILAQPALGKPVRDVAAKAKAVGIQGNLSGDLLQSGGLLVVSKGGDKVLLHFVQKSPGDYVPKEHILEVLGISAEVCASGRLRCDQRGVQGRRRRWAPTDLGG

SEQ ID NO: 1000100 - protein, 169 aa, Homo sapiens
MAVDACHDRELLGLDDRRRTGPAGEWRTGKPEGACVSLDETRMKHCYSRLRELVPGVPRRHSCLCSGGNPDMVCHQTINSLILTRYVLCLGHVPGPPGCVPNFPIQGMPRSRDRAEQPWLRMLLGPSELPIASRNSSPLLRSNQTAGARSGTCRSPTTKGAFATDSAVS

SEQ ID NO: 1000101 - protein, 315 aa, Homo sapiens
SGATSSACAAWISVAARSGRPGLPWRVAPAAPAAAQRRPGNCPAAPGADASKTSHRRQPRDVVSLPARSLAAPEFSSTSVLIYPRWPFQLTQGRRQGLAAARSLSQAECASSRICDWKPLIERPVINQEERDHNVKTWGFQKRLEANGCIAGQARIGDLPNRRGTKECFGVAFGAPGGSGPGLVQDLGHWVLYAMDTMAFPRYSGLRRGVDIHRAAEGHPGQGQVAKREPVAPRYLGPQEGEHQEAGEATGTGTRRRGAPGKGPPTATGQGERGTPKQIAGGARDQDEDTQPEGTTPYTPACEGPEGTVTTSKAQ

SEQ ID NO: 1000102 - protein, 152 aa, Homo sapiens
RAVWTRVDRALCDGGGGHRPGCRPVIIVAVCRGVEQPGDGWTKLRQRIVKRLCVARRMAERDAPSQEGKEALEQCRRPKVRGDRRTSVGTRTLVLTGLTLDGSRDPPRRRSLSIRAEQGSQVAFMVALQPPSRAQSGQAPVGRNGRQDWQSA

SEQ ID NO: 1000103 - protein, 103 aa, Homo sapiens
MIVALHSSLGDSARPCLRINKVCDEDVHTLYANTVFFFFNLNSRGNKSKTRVSKKKKRFNLTINLSMGSIQVCLAGGVGATCAHIVAAYLGRQEGRRTHLEPH

SEQ ID NO: 1000104 - protein, 82 aa, Homo sapiens
AEFAVAEETPPQIAEYIAGFHGSVCLIASLNIQVCLFDELIEKMQQKAQRYPGLAFVKLRNNTSMRTRERFDALLEFRMHCS

SEQ ID NO: 1000105 - protein, 141 aa, Homo sapiens
RIVRSGPGCRRDGPVSGTSNWLGRVRYSPTRPWRVANRYNRITEETSIIGANSPLIKAESPCNRTVQFICATREIVGLVDSEEFDSPITYDQTIRCHVWRSADTGSMSESTGIGHEHITGPFGYLSDCIVLVVCNLSNVEE

SEQ ID NO: 1000106 - protein, 355 aa, Homo sapiens
AETPCGAWDWSVVLSRFLAGRCGRRFLGLTCLLVPVRVGRVLLCLRHALCSLDGEREGLWARCLSRVPPSLDRPEGRCLFDACSHGCGLHLMPAGDLQVCGPERAGDPVDLPCILGVAPCATEMELSEYVGHSSAVPSFDARGERKRETRRLAVPNYKEFSEPCDVYAPMGQFHATAILDANGGSGGRLSMVQCVFRNTSAFSSGVHRGGTNRGVGKQTGFVESTTAERIASRHLMCHDSCEVATCDNYNIPRMPLDADPKAHGTRVALAPYEHNGSRRYGTALMNSQPRRTRKSHRLYDQVNIPVREDETPKEDYPTNGTEQPKGLGNARTPQTRTQSVAHERGYQSSTAGTGN

SEQ ID NO: 1000107 - protein, 180 aa, Homo sapiens
MSSGISPDQCIAFTLCGGMLGVLDRLSFTDLPNAGRNLCPREGLHRFARTGDLHPDEIHEGNDVDNEDTHLRPRLPGGEKGTLRSHSGQRAAKRGPSNMTMSGLDAEHRDIDLTPGCNAYTIWQTSGYQEESGGTWTFTVQWDTEGYAGGVTRRRLRGYQLSKNIAGVDSLESKTKGGEC

SEQ ID NO: 1000108 - protein, 134 aa, Homo sapiens
  misc_feature (101)..(101): Xaa can be any naturally occurring amino acid
  misc_feature (109)..(109): Xaa can be any naturally occurring amino acid
MRGSRGYGLEGVRGVQGAICSDTLWAGLEKSAEPGPDSNDIFQIPCRAPTNGSIEEEFAVIATSGNRCVTKRFVECHAVWPICDRRRRDIIAMRNPAGIQXYVRRLAMXHKQEVGYRNHVFARSHNTMLRIDEK

SEQ ID NO: 1000109 - protein, 103 aa, Homo sapiens
MRAPGMRSRPAGPALLLSAALPRSGRVGASGPASAPLHFFTGRAWILGRCRPGSTKPRFGVFIHWGVYIGDRLGQTRWFWMGHGQGEEADASNKDSRRRKKTQ

SEQ ID NO: 1000110 - protein, 162 aa, Homo sapiens
SGVGSSILPGAAFARRRRLRRGLSLLKYLVGQKRWYRGRVGSGRAVLHTWVSLPRAVCSGSFGPVGGCGAAGVACAVRPGILPVMEAARRRPTAGIAADAPFHYEGPERMGKYRTHGGRKREGLQPAMPGAESHISRPQTYRPQHGYQNHLSRDRKLQVPRK

SEQ ID NO: 1000111 - protein, 131 aa, Homo sapiens
AEKPVGRAGLDGLPIRKPRTRAVPRRFDLYPLSSNTAHLTTYLGSRTLVRAATLILLSEERRALIYAYVLVWDVTNELDFWCCRRTDASDVTDWSVLHGNSRVESMSERLTEVTVCMVPSSMIVRRVVRSM

SEQ ID NO: 1000112 - protein, 139 aa, Homo sapiens
EREMEWWCVSNLMVCNLAYSGKLEELKESILADKSLATRTETSDSRTALHWSMLSWILSEIVEYLQQLWSASELITDDAGWSPTSYCGYCWPGMRLYKPFWEQGAQVTAVNHNGCTSRYIMQLRVNRHEIAVMLLDMRG

SEQ ID NO: 1000113 - protein, 37 aa, Homo sapiens
MGRLKAAHTDTPIRSPVTIFTHTPRYNVYDHIDTSAY

SEQ ID NO: 1000114 - protein, 151 aa, Homo sapiens
  misc_feature (69)..(70): Xaa can be any naturally occurring amino acid
AAEEQGGDAWWGLTSEPGDWMLVLVLGDLSQSQDRWREQFARLRNSTKTSWSAQRQSISIIVSATRKAXXPKGVVSDYSQASLGWKMFDSREEEHVSNDVKSRHVIHDTKREVVTSPDSFEKWGPDSEWIESGLVPVGDDNGSCLYAHCST

SEQ ID NO: 1000115 - protein, 306 aa, Homo sapiens
RGTMVMAEGTAVLRRNRPGTKAQYIPHNIRADCSEYRENDGDEGEEPKERRVMWRGRNQSEEEGVKIESIKWKNEWEEDKEGEMEGRKKEKGEGEEWNGGREGQTEGEEEDRQWRAGEQLKRGAEARGRGRAGESGARRRKQHRRGAGTGEGRGKCDRRRATIETEQETKGEHTRRKGPKGEQRERKVREEGEQGRPQRENTGTRHAKRKQHREKQQDETIDRNGEQSRTSQETERERAVVEKRGRRRRQRAVGEKRSRSEGERKDKPEESGATGQKRRGGGEGRGEKQRRGQRRRTGERDEGGNE

SEQ ID NO: 1000116 - protein, 376 aa, Homo sapiens
RLENALLTMRTVATVENSLGLKEARSGKLAAIRCSDEKDSTWKGFIHCTKEHDSKCRKFHSEVFGGLHSSDKESRYPNTRSILNDGSRDILFLASANGQAIVMRMHMKNSLWHGTSSGSLCPLAAGFRNRRFLTCLGGRQDTSGYLETQELMKGYLALHITPVINRWYRNSNDPNDREEAYSFKHTLHVSPANEEMQTFASETAQTESRWEPKVHTVPCYFPYTRLADNRAVNGGADAYMEHGPLNDWVAVDWRVGVTHHVYPTPGKTVDRPPGTNPEQRGHRRHTSTLRALSNSGVPPIGRGPKPQDDLDRPPLGPHNTEERRKNWGHKQYYHVVTNSHRMAPVSKWCWKQRPSVNDTQRGRPQQLGEKSHYDSW

SEQ ID NO: 1000117 - protein, 99 aa, Homo sapiens
ADLSRCVMSSDIWCAVTRVTSSCELQLNGRMKVMVSQAKPCNLEEPCEKVAFQNVPDGRGGILTLRSTVLDTLGKRTVDTYSCACYIHNPSVFKIAPTV

SEQ ID NO: 1000118 - protein, 154 aa, Homo sapiens
  misc_feature (120)..(120): Xaa can be any naturally occurring amino acid
MREEWLQCESFLTFLCSWRVPRTDRALCWYRSKPLEDQDIKGTDEIYVTLPFIAQNTGNSMSTVRLRDQTTRLCGRTNGLASNVRLTKLDLLGEPILLVARNITGHRNARGDNSDHGHPXIQTAATWCVYRACASYLASDYYDFLCPGNPTQIY

SEQ ID NO: 1000119 - protein, 352 aa, Homo sapiens
SGEPEVVPGLAAVPRLTGGSQDVGRRELAGRDRGAGVYGSTPRDSNPLRSTGSHYPYDLTRFWHCVRRTRRAPRGMDERVIGAREGSGDNGLRTDLRASFSVATCGAGSDGCSSHHRCVIAMNRCSIQCRVDEPDSPHSTCGPMVAWGCARILCSCLELASSYAIVHQCTRGMRKDYGLVPEWLRYSRSACLEPTTLYRADYGVVATEREVLSRIHEWSIEAAFPEQEECTMNDFPGMTTLLERKTFAELRLTDLPCCCCHRRVLGANPRWIVDLEMLLALGSEVVVGVTVGQGTNGYSCVVPWKSPDWGQLIAQQQAEQGVASGIPFVRHYSPVHPSVRRKHTNISVTRFL

SEQ ID NO: 1000120 - protein, 85 aa, Homo sapiens
RESGVQGAEETRLVPRHAPRMATSGDGACVRWMLGAELGPRALLIKDVSAFSPSMYPMVSSDRIIDQPRINHLSFQPEGSCVYHR

SEQ ID NO: 1000121 - protein, 111 aa, Homo sapiens
MDRRGGDVPALENSVRPINAGLLPRTSGFLGDPMDEVLTMTLGGVSKKPELGDEARVRGVPAVALGTLTRAGGSTKCMGTPTQIQYDLMLTLSNEEASKGWGTIQGLSSKS

SEQ ID NO: 1000122 - protein, 220 aa, Homo sapiens
AVLPSVSRGRLMEAPGGRRRGGLQCGGPEGQSAPEARLHFRVARFESWRQGVNAWDAGPFPLPLLAPFTIEFFCETKLDAYDPYLIAMSSIYLVGKVERAGTMRIVRDIDRMCTNQYFNAREVSPWNWTPAFWELRDSIVQCERSHAESSGFQVSFQYCTASSLLPVPGVPPEAGLNRQQLADGPPCCRHRLGPAAGQFTMGRCASDFQAQYIAVDGSST

SEQ ID NO: 1000123 - protein, 271 aa, Homo sapiens
MSTRFGIPRCLPRETNQLACPATSVPNDLEGDLTGRQLCLKDIHNHLLSKLKHVQQEWLFYPCRITSHALDDTEKYYSEISNGRSLETVESSNAILVDADMVGKANLRFIDDCLISPQEKDPSVGCIVGGVFRDYDRDASLRNRVQFFHNIVDSRGIASRDHRTRQFGRLEGNLRDPVEDRQSFNKIRSCLRLLLPRLVRHQYLIRTRDPLLKEYTSENLRISDPGGYHFRTKFPGSLAHTKARAKNFRKGFARLPSLIPRKVVSCKGRKP

SEQ ID NO: 1000124 - protein, 190 aa, Homo sapiens
  misc_feature (99)..(99): Xaa can be any naturally occurring amino acid
MVGLESTGGHAEYPGACGHVSLRRLSTDLAHLQGPGEMALSCAKLFHGLDGAWRGYCFHGSCCARVRVSPPMAEWAWLLYLASHGSRCALGWSPGTRMXHPDEVQLVLNHSHAREHAPKKTWKPLESNNVALRVGIAHAKDLRRARKVGLRAGRAHLGPERSQGRLGGGPRVSRIRKANVPLISIDRFFP

SEQ ID NO: 1000125 - protein, 70 aa, Homo sapiens
SGVERALLWTTRHTTAHAPDGSCTVVAHAVRTRLVLAEPGSIARNAVILERLGGDAVWVLGERQLMTLIR

SEQ ID NO: 1000126 - protein, 158 aa, Homo sapiens
MGTEYDPVRGTTQGKMQFLLLTLGEQIFKPARQSLTIAKLPPRAGAVYIYVQQLNQDPHFSNLISQKGFFQLAQPSKIRYRIYETPGHTAFSESGTSPLKSSAPGKGAAKRHREFTNPGNVQHHLTQPVQRNPHAKESPLQHYGTIGILRTTTGHQKS

SEQ ID NO: 1000127 - protein, 84 aa, Homo sapiens
GHGHAIGLDLQAEKYENEVALRQAVEADINGLRRVLDELTLTKADLEMQIDEPDEELATLKKNSRGGNDQTFEMCPLVTVNVPK

SEQ ID NO: 1000128 - protein, 282 aa, Homo sapiens
ENVERWQGPVRGPAGQDLGQAVLDSMATQCPCLEKTLPQLLAKSDASCENLWWCTTASLALYRSIGRVRELIAQARGGCQYRSRVPMKFNWALRGAACSTPNVESCRPCLPTLPSSSTMQGALEPEPGAGLPEGSHLVMYHGARRHVPTGGTTWACVVLPLTHEGVHRWGAIDTWRLDVLSALCHVPVTIPIDATLWGRHVRPASYSTLDLGTSSRFLANHCPAQQMGRTTSIESKDTPKGVDQREGPPWGQIGGLASKPLTVTRNRTISSTRFLTGSRGQR

SEQ ID NO: 1000129 - protein, 102 aa, Homo sapiens
RSGAQEETEEGGPERARAWRPTCRSGRSLAGLSASKSSPWATPKWGKAVLYKRYCETQDSCLNTWQQLELTMESQRYTSETEKSKLTSLIWLDIPSIYEVTK

SEQ ID NO: 1000130 - protein, 69 aa, Homo sapiens
RTGSEEPRGMEQFPHLSFWQDLGNLVPDGCDYDLPFKDLEIVPAAYRGVGDDQLGEESEVKEMTIYYHM

SEQ ID NO: 1000131 - protein, 352 aa, Homo sapiens
RTSAAMSPSVGWKQTRTPSGSPPMRLRFPDMAQVYYMYHITMVTPKGMLSLADQRLLRTIFTLQHTNAHSMDSHSMADSSAHNGRADHSLGLSCNPRTDNMTQIQPSGTRSTGAHLPAHSLDPGPRGTKMPHWRHTSPPPTQESSMKANPEILESQSTPYNFTLNNQPMTTPTYATHPMDTQQGLRTLPSRPSNADKPLRPTTPHQPPPQLTRMATQKPPPPKTKQTSQTHTEAHPINPTADATPTGRQNEKHTIHRTIPPMAETTPHTGTQHYPPKPPHTAPPPPRPNPRATTPTPTHHHGNNIVIPLLPHNLTRTSNVHPPLHTFLYISHITSTTPQSTSSGTTTTQHID

SEQ ID NO: 1000132 - protein, 71 aa, Homo sapiens
RSEGSGAKSRTMPPASTTTDRDTPLDPTGPTAVGTWLRRQGYRTPSGSGRWLTGLQVSSNLRGRRRIIGPA

SEQ ID NO: 1000133 - protein, 48 aa, Homo sapiens
SGLRDKAPGDEEVAWTAGAHTHTHTQPVSQSLAPNLHSVNPIPPAPRA

SEQ ID NO: 1000134 - protein, 162 aa, Homo sapiens
LSGVQCEGALVARERPRGPRAADGWRPRPEAWRGSLDGGRLRHATHDGQVHTRRRQARRHGFFSPAMKAENKPHGETGRNKKTTKPKSKERTKREKKGESPLTKSKRVTRSQATCRHSERAAAKRTNTPKHCGRRKANPQRRPAEPQHGTTAKTPPRRDSSP

SEQ ID NO: 1000135 - protein, 144 aa, Homo sapiens
SGGAPGRRSRGGGRREAGGVGPLKRLPPAPAPAGPTCRPRLATPTYPAKVRGHAGSEQSKPMRAARPAAVLTRRSSWPPRRSRGSMRFKNRFQRFMNHRAPANGRYKPTCYEHAANCYTHAFLIVPASWAVPSSIGCLMTAGKR

SEQ ID NO: 1000136 - protein, 353 aa, Homo sapiens
ERSGFMRSRCWLCRWSCGGHLAKMPEETQTQDQPMEEEEVETYAFQAEIAQLSVIDHQDTFYSNKEILLRELISNSSDALDKIRYEHGLTDPSTLDSGKELHYYTLYRTNKIELSLLWILELDTEHRLTMINNLGTIAKSGTKAFTGSFAGLAAAYSLMIGQFGCSVPHSAYYGLLTTSNCDHQTYTHDEQYRSGHSQPGGSFPAARTDNRVKPMASLEPTGLSYHLQTNHPTDYLAQCNRMNLNGAICCTSTTYLHLYSATIPPFLPPHSTTNATRLHFTAQVTQRLHFTGPNATREQPPPTSELTAHYACRNELPSSTSTRPPRHPCSPTSPTPPHQHPPNTHPNNTPTPH

SEQ ID NO: 1000137 - protein, 274 aa, Homo sapiens
RGGLARSLLGRQRSAVQRTEGPTGSCALPLSQESPEARRPASRSGHEEADGGAESDCCSPEARWSMTERWCMCRTHEDKDYLSTYQSCPVYSLVGQIASCGWRSISAIAPVGSVTADYHVHNTTLKSYRSHSMVARITHSGTMGRSSPRSHRDRDSARRHGESDTRELYDEPEQGNVTRTINCGDSDALVTDVKRKLLLKVYPRTLFALGGRRNWLQTEHALRTGHIPWAGGKGPGSMVKFPVYINSKCGIEFQTGCAREEVCRLHTLGRRTDD

SEQ ID NO: 1000138 - protein, 86 aa, Homo sapiens
RVLHHHCDGIRFRDCHCAPSACPGPTQDPQAGLCTGQEGYPGTDHGLFMGPHLLFQVQVKRTNLKVEVTELQDVECEEWPRGSSSN

SEQ ID NO: 1000139 - protein, 243 aa, Homo sapiens
  misc_feature (72)..(72): Xaa can be any naturally occurring amino acid
  misc_feature (230)..(230): Xaa can be any naturally occurring amino acid
MVASRRAALWHAILTDRTLPDVSVAASGPARTADPGPWKSQCGMFCTSGVTGALTDESNDTIRMFGTDRNEXCCWTRSGRVIRAADIVLRQSRLWALWALETVWLRVGLVAILLPGVWATFEGNFGSTAETVYGWKAHSGGLAGGSLHILPRGKKASESLTPGLRPSERPLGLAISLAQAPPGLALTGQKRICTQRPRNREKQNCGSIKWLNSGYISQFHFRRERDLVHXRELPIATFRIPKA

SEQ ID NO: 1000140 - protein, 111 aa, Homo sapiens
RVRSGTHSSRRPPRARSRGRSSSRLLRSSQRLSCSLCGSVHLRHLGLQYRVAHKPFRFVPLVYSSLLRPEPDTRRRWWTVETHWCTQARAWSSSRRTRLRTIIGPQANEQT

SEQ ID NO: 1000141 - protein, 118 aa, Homo sapiens
RIAAVAPVGAPLSRVSPPMELWAPPTPPLPRTLSGAAPARRNRAAHVQRSCRRSQEHLCPRLAWQQCSCGNRDNVRVILCAGVPWSRAAVRAPPGLSTDTRGKQARGTNPAQNPTMPP

SEQ ID NO: 1000142 - protein, 59 aa, Homo sapiens
MVAPCVGKQGRFYVTQTCIGHERTRVYERRRIFSTNRTTAWRRVPGELRRCRKLKEQHW

SEQ ID NO: 1000143 - protein, 255 aa, Homo sapiens
  misc_feature (84)..(84): Xaa can be any naturally occurring amino acid
MNKCRAHESQELGTSASYEVWQSRAPRKSDGGIGLEVLLATDGHEEAAPVCVPRGWTELGIRCCSVSGRVANMVGMDGLDEDEXKSAVLSVGHREKQTDTFASHTYFAFARKKLSHKTYSKDIFYLDCWNYANAASLRVIVQSSCRTLHLVFILIHLYLGAPSHDVVAVKAVLSERTPTRGRQDPRGHGIMYAHEHNKQSNAKVVLRQKGALEGLGKPGVTTGGEPDENGVTGELIPREKAPISSLQNDVPNMPV

SEQ ID NO: 1000144 - protein, 341 aa, Homo sapiens
  misc_feature (98)..(98): Xaa can be any naturally occurring amino acid
  misc_feature (187)..(187): Xaa can be any naturally occurring amino acid
AEVRAPVRQREETPSQCSQTPSVEEAWRSSIQDCDRYSNNRLRVRRLSSANARLILSVLVGGRMVLIGKINVHPVDIRTTDNTRIIPYRAIHWYPDMXVFEQLNGESNRFIDSVSRRYPIVPTSGHVSFSTTVATWANERECSRPTEFNGTRAWEVLTAQARDHEIVTVYLKGSVVMMSSRDCGSYXRQLRLQFFGKQSALKSAENNTVRGDWRIGTVFRAVQATKLVVFHQQMRRNSSQLLSVWSIIVIWGRNSSNTMFWESLFNWKGKLEPLACSRSPSNVVGMGKNLFLAPLGGKVKSKPNGKMPAVNFKPIPEGKRNRLGVWNQQKGPMGGAHMEYG

SEQ ID NO: 1000145 - protein, 109 aa, Homo sapiens
MLSGTVIPRRAVDCTAHHEVVNLEGTKTEECDHLLIIGFAARRLASRGVASEWLACLSAPGVSGGLKEVVHRQNYCNCVGFCAKSYHEEVFLRNLRLREHRCIEDLPRA

SEQ ID NO: 1000146 - protein, 104 aa, Homo sapiens
MSQSNIISFTYDTSSIRDCECLRHTSFMWPGDRTGRPWVVHQSELRGMVRWNVPGMHRTLDARSIPLYSVKNTWNCDEGKELLIRPPFITGYLGEFDGYSSVTT

SEQ ID NO: 1000147 - protein, 199 aa, Homo sapiens
SGYREREHLPSQRPRPPLPFSCRDLERKTAEVKDEILGCTGTNRVLRIPSSEERGCGERYGPDNLGQLGTQHVQRSSAGIRTEKSTNSTNIETATERKSVRREESTLDLTAEVDENARAKETANEERCKTSYKDHMGADLALQPDRRRISNMHTRTQGARANKCGEQKKELRRNTQTLDLKKTTKAVGTTAQGTKPTLE

SEQ ID NO: 1000148 - protein, 174 aa, Homo sapiens
SVVTDPASFWLATYRYGGNKMIARRALAPDSSGQSESQGGHDMHRQLVVMDSHDRNGDATEHAQLLDHCRDFIAPSSPRGIDVRFSQVISVLDRFYTLLSRFWYSNTMMSAGSFALEPRGVSSSKNLGKTQRETDNSLSSSSSGNFDHYDFQAIKNPPLKEPKQFDGKRIPRGE

SEQ ID NO: 1000149 - protein, 139 aa, Homo sapiens
  misc_feature (71)..(71): Xaa can be any naturally occurring amino acid
MAWPNVVQRWVSCMSHVQLIIMLYVFAASAFIQCISLHPLLHRRNIEQMSTVTYLLSSGPQVTFNYVSMSXPVGDLAAGNHVVPPVQRKRVLFLEHTGIPVYPRSPVCCGPYSSSGSLADQVEVCEWVLVYYGHVRLLR

SEQ ID NO: 1000150 - protein, 72 aa, Homo sapiens
AGTNVLRGSWSVNQLTSFGYTAKTRNQRNVEDKYEEDIMVICLSEYYQILDPLLLLLPYHAHGNWPISLSLS

SEQ ID NO: 1000151 - protein, 131 aa, Homo sapiens
MGFSALVHLSRYDVGFVQSMATVCAIFRSCKEDSLCDIVKMNMYNRYYSPTWCNDAKDDFVVSSFTMDRTLASLSEWAYDWESLRGPLGNLITRKRKIPVQLQLGINETGPYKKLRWKRNFDIIFWNGSFD

SEQ ID NO: 1000152 - protein, 125 aa, Homo sapiens
MPVGVCALSCCPSCIDRFFPSVTTIPRMCPEASSYRRDFSDCVSGIASCDVLFRGNGSAKNRRVAWAVHRISRIISCDFLVAHCWYTNGDGNITVIIPHSHGIELAKNVDKGGYDRTMNPTNVHW

SEQ ID NO: 1000153 - protein, 177 aa, Homo sapiens
SGGENPYASADLQMFVRSVGTVVAFTLAGAGGAQPGLCWAPRLEPGSTQSKTLMAAVFHGNAFMKYSTAFGYIAGGLLAAFSRDHRAWVLGLVWYGSVPSDSEKLQKRPSSAQEYFKKQYETSQESFVDLEITNPSSASITKVSMGVSDSSIPDRTYKAILQKYCINIYSWHQGQFT

SEQ ID NO: 1000154 - protein, 80 aa, Homo sapiens
RGVAWRTGRGRLRAQSCNMCVPSGHPGAELWVLPSCSGMEVTPCDGSCSFPGRTQDPAVCVTLLLYLGQDLGMIDADELR

SEQ ID NO: 1000155 - protein, 108 aa, Homo sapiens
MMNNNAREDRIEIAPYAYHDRHSLVRATREHAGLTTTVYERRLSVEQPKDASRRQYVRGNPGEQIERALELTGQSKWDRYKGATRITRTLLERNQAGLTPRVVEGPKS

SEQ ID NO: 1000156 - protein, 186 aa, Homo sapiens
MPECIVSVFHTTGYPEDLIYHVDHRCSLTPETVNTPCILIQSNTANVFMLESHSWDMGLGIGQTRVAWIPSMCCFTIATRPLVFAAIPRVPISCSSMQKNCDQERRELRVVRSNTARCRFDKERREILDYHDKKPGMRPQNVLPQSSSYIVPTKKSGRNLVQPPGASDSRNKCRQHLFLNSSAGKT

SEQ ID NO: 1000157 - protein, 149 aa, Homo sapiens
MNRHIDTSIMQSALLRARTRASSLTPTASTVGALVGHSRQGIPKRMLYHALEECSDSNATSYDKFRSNDSGSSSQGEHSTVVFHAITELYPCIRCGPDLQQARAPGCDMLLGLANNRSTLLLTGFPYYSIRVQDGRLGIHTVRVQAILS

SEQ ID NO: 1000158 - protein, 190 aa, Homo sapiens
MTALTIATIALDFTGHLAVGLLNQRIRIRISVVESPIGNFSDLDRQPGGKTCLVVACSVSCFMGHLGASLAPNGYCLLHACAEKDAGAPWCMPARIDQSAEEVQYRITTHWLPIREEAIMPLHRYVRMASSFRTCYSFERESELSTPGVAFIKPSSYPMVHLNYAAITSQVVWLAAWGPKVELSGDIVGP

SEQ ID NO: 1000159 - protein, 104 aa, Homo sapiens
MSTIRKEGGRCPDRYRRLLRCLAIRHEKNSKHVTPRQSRQDDKHRARGRHVESPMAKRHVYHKPWAEERDAQQSKGQKLLDRQSPGLQKGLLSNRQHKGAKNGR

SEQ ID NO: 1000160 - protein, 37 aa, Homo sapiens
AEELRDGCSAGGSGDAMYAADELLAGRGWRLRGLSRR

SEQ ID NO: 1000161 - protein, 71 aa, Homo sapiens
MGAYKQGGKHTEDNHGRCTKLGSNKHTGKLRGSNICKTQRAETGPHKSQRVAKEQEQDSDNNTTTHRPTKR

SEQ ID NO: 1000162 - protein, 111 aa, Homo sapiens
MAAAVRAGSRSGTACVLGRCIVFAAEPRALALGLETMPDRDVAAGCDKLLPLHYDRYTSSRSGWIRIAHSVKCVGGDRLGCDSYTTKSHTVSEQEAGMGMMYSGNVETDLR

SEQ ID NO: 1000163 - protein, 200 aa, Homo sapiens
AECLERSPTCCRGGRAETAEPVPSAAHHPLRTQKHPVMDDQGAGSDRPILGEQAERYDDMAACMTSELSKELTFSNEERNLLSVAYHQCVGARRSSWRVVSSIEQKTEGAEKKQQMDREYREKIETELEISAMMYCLSLDKVLDPQLLHTAREQKSSICTLNRRLRTVTWLQVAAGDDQNGIVDQSQQAYQEALEISNKG

SEQ ID NO: 1000164 - protein, 112 aa, Homo sapiens
SGGVRESRRSRSCSCFRCRGGRLGVPGERDPRRVSARGAPGLNARSGSRGPELCPSRWRARCSPVARGAVAGASSGLVARRLASGCYESSDCVVCTSRSLTACSARRGYCAD

SEQ ID NO: 1000165 - protein, 368 aa, Homo sapiens
MRGRSHAIPVWLCRLVLCGHLTKMPEESPDPRSTDGRRRRVETVRLFRRDRLPSLDVDCIIKYLSYSELQSNRFMTERDFKNSTQHAIGPQIRYCISLSMNPEVHNIRAHGDTEKLHYFTHYTRYQHQNRSRTSSTLSGAIPLGTSDHDPTWLDDIESNLHAFGSTKYTKQLLGDPTQGVLNEHMTSMHGLELARIILLIGSRGPAFRAVLGTPLNTLGVLLSWRLGLRTDHTTYSRLGYTFRLPTTHLQRDIATRTAEATPAHLPRKRYPALTRQQREQPTPPLPPPRIAKRATHGHRNQGGSRQAPTKIGAAYQERTDKHTHTTDVQSPPITRPPLAHNRTTETPPHTLGTYYTICATRAHPHHRE

SEQ ID NO: 1000166 - protein, 182 aa, Homo sapiens
RKWRCTQCGKRGERWSFIRALHKGSAAAPARPKETVRSEYLSGIQAYRNPPTWAITWEPLRSWVRLQDEYDSVLYSIVELHLLLRFPSKTPAVLRIELIRSDMTAVLLACGIKPENNIILFQQSQVSELVRQGRVGSLSCYGRDYPRVTTLYISGRQETTKKKHDGTVGLLTYPVLQGSRPF

SEQ ID NO: 1000167 - protein, 343 aa, Homo sapiens
SRGVDAWDRSACRSLGAVAAAAAAALELGDAGGLLRDGSGACWLLLSSGARGCWPLLGPGPCPWPSLVVPEPLVPGTRVLAGENALSIYEPPRARAHRAMKRGREARAESGATDGGTAGRPTEEGAGSPEGCTPQAADRRLHPDGVPRVSLTSRPEAMDARRLGRCRLHTTCRLSPDQGLADDHDSGCMVWTRTDLIVPRRLAIPLEVQTLYRPLVCAEVLIGPQWTSRPTDVHSASLRARAPPSGVPVRTIRLTQGSRSAHMNLTPHVGQTQVPAWTEVCPRPIGTGSLVNAARTDPIPPHCEDHRCQYTERPGNHRRDAYTRAYVLPLSLYPLHRSAHDST

SEQ ID NO: 1000168 - protein, 102 aa, Homo sapiens
MLDSNKDTQLYKYISAITLYVGSHIHMKSSTMINELPELTKVPTVTLLCTVPGLTSYGDNKYSTQTALHNNKCNTGTKHKVHGNYHSQTAQKLQAQQDSTIL

SEQ ID NO: 1000169 - protein, 105 aa, Homo sapiens
SGVGHPSTEFCPREADPSRNASPAVRLLSCQHAHEPTDTMKIRYTNTHIQIEMPLTHLSNEPSKHAPPASHAHHETDSQPSNTTHNTLTNPTTQQDNEHNTQQTT

SEQ ID NO: 1000170 - protein, 110 aa, Homo sapiens
MGHAPLLKTTDFGEEKAADTDLSSPVTPGKREEKHSENIYRQRQAIKQCLQKAKGDEALTKSYPSSNEKHEPLKKAILNKKERTHHRSEEEDEKRMGTTELNQKQGITGR

SEQ ID NO: 1000171 - protein, 179 aa, Homo sapiens
ERSGSLDDGCGAESCGCAQRCPPEEAAGPQASRDEEIGACGDSRSAMDPHWPQELLSDETIMHCCDKRKVKKNGGMEGAGGVISYSMRMLSSCCNDDMTVMTEGHNRLWKISNKQQRAAPPGLEACVSQSGPILRKSRPSVSHSDVLIRDPHEWLKYRGLNKVILSTELFVPDALVLMN

SEQ ID NO: 1000172 - protein, 130 aa, Homo sapiens
ERGGGAGSVVDAVPLLVVRRAAQCGGAGIAHSAPEQQHAACSSIGGTPDRRSPALDARQPISSLLIFLPSDRTMDDQLNEEQIAEVQGSLLPIRLTDGDGTITSKRNLDTVMKVTGSEPTDAALAWILIN

SEQ ID NO: 1000173 - protein, 508 aa, Homo sapiens
MLAEGKVKLRWFYCPFTSIKQARTYTMGILRAFSCLKTDAAQLHLASFSLEHSLSEQTTELDSSFSLYSLFVSLVDLNGLLRLTSWPRNCHFLPGYRQRRTLSSQPRTSPNLANPNHFTLAATVTGLWLFPLTNSWLCHTGPPWRRNLLTFSFLGPSATGPSSIHFKPHTFYASTPPLTKPPRTLAGPTLRNPTCHNFTRGVATPGASPRKRHAINPSSPFYKVLRPHTGISACKPLVLAFNPKQTYANLTHNPNAQLMGVDLPPFGAHSVGEPKLNLCRPTALIKRFTYRSLNLIAPSSTPGGLLGPKPAPNASLHIWPPQLSTTRRTPNTRSQPLTTDNTLGDPARHHFCSHPPRFAISRLSLSRWARELTPAYPLSLHLRHPPTFSRSSAQPLRAYTPRPLHVLDIPAAVLLPAPSVRPPVPFPLFRSGGRPAIAPTAPPHPRGLSYAGALSRPLRGLLPLVARASFSSLSPPSPASGRPPAPRARPPPHSARLLPPASLSALSL

SEQ ID NO: 1000174 - protein, 114 aa, Homo sapiens
  misc_feature (68)..(68): Xaa can be any naturally occurring amino acid
RGYDGPSGGDTVWNVRVGLGLGVGDVELHRNAWLSNALQHEFDEKGVDRVTNDAGDRCACVGRFDLVXPSLAPVQRGTPTGWHMYANAASNRAIVRVPPTAGRGLGADQCLEET

SEQ ID NO: 1000175 - protein, 46 aa, Homo sapiens
MARHRSTDAPPVIHDVVLFTHRLASPSGPNAHNPVRLPPDNVSPLL

SEQ ID NO: 1000176 - protein, 201 aa, Homo sapiens
AGAERVRSRLVPVAWPCARPSSPARCGARHGGKLSLERLSNAIDQERPGGVIPCGGTRWGDQIGRPPVSGLDRGSSVRLEDLTLRPSLCCGGKTRATVSEALADTECNQHHLWKQSDRIRDTRRYKPTSRRLNGHWPSTGAWQRAREHAVLVAFHENEADSGLTYGIQEEMDSRLGLRTCTDVCPNMCAACTIGNTNRKQR

SEQ ID NO: 1000177 - protein, 157 aa, Homo sapiens
SGVVRTKGKEEKALKCGVSWCVERGGPRAEACALPSILPQWIMPSGGMRRVGCCVSGSDWCCVPGDQEHACLISQNNNYIAFNTKLLFLHTSNHRTVPLVLIITLHQDDTPDQTQRDRICRSAVTLSTPIDHLKRPHTITNITRFKKSSYLKRSEKQ

SEQ ID NO: 1000178 - protein, 336 aa, Homo sapiens
AAGCRLVLQEGAWPDADRFPAVPRVPVVPCCLRAWLLLACPLSAGCAPAAADEPSSADGGWETLSAGRHERPQRRPFRHRLFLASRRCALTLLYPYVSTRPHQRVMGIVWLRKSAALKMADGNEDLRADDIAWASLQRSYESMDACLPRLSAAATDNRTADGRPHVRLGAATRSNSHVTSDHIDFSLCPRGTHLLRSTTLDDMARLEHTLNTCTRDCPSFYCSTDPLARLVARAENRAWPGNLVRHADHPLTQATITKSNLLPLARVHSNGPYHDEKAVQLRVNTTFGFAVKALSAPSHNHNRAHSHEGVLRAFLYPTPPTHRSPTPVTATRTKPY

SEQ ID NO: 1000179 - protein, 323 aa, Homo sapiens
SGVAQPPGQSYSTSSPINIVVSSAGLSPIRVTIGPPTVQVHQSPPSPIHAAERQQSARTPTVVATPSAWSTRPSRYSEAAREELYAHGHTYQRPGSLAAGSRASYTQTSMGTLGPELTGPEQVDQNKHIDPIYEGPSLSEAPYERSHADTEPGGPHCRPDTERGLNGKEQKNPKHYTLTTAARHITPWTEAQEQDRANAPRKTANNTGTTTHKRRTKPPLYTTTGHHQAPPDQTASGQPLDTQEEDTSNTDNIPRHRNTTTRSQKGSNDPDEHSHNEQGHEHEDTHIDTRQRQDKRAPCRNKDYQTQQSTPQHTRTAHATTPT

SEQ ID NO: 1000180 - protein, 153 aa, Homo sapiens
  misc_feature (118)..(118): Xaa can be any naturally occurring amino acid
  misc_feature (147)..(147): Xaa can be any naturally occurring amino acid
AGWARRSSIGRFHLLSLLSSGARASVAAEAPVGEEDGGVFTGGSSLRTTMCSSQAPECGHRTDGASRLLEAFPSSWRGFWTAEASWTCRCICLENGELVHEFEMDDPNRTENLVSRRXYRLQSRSWNTGLSHRFVVHMETDVEISLXEWRDDY

SEQ ID NO: 1000181 - protein, 263 aa, Homo sapiens
MFDVALKVWASSSINYHGGKKVPVLYHTSEQANIAFAFALSDVRDAHIDQERMKLSGTWERREKHALAQEGVMKGATHYPRVMSWNTANEQDFKGDINPMEWKAHMRHTNDTGKVIHNTHTRTEGRCQNPRERHTTQVCLVRTSPTEDGVHQRPNPARMEARHETHLTNSKKQTHRTGHRRKDRKGQQDDHTDPNRTIPHKGETTTPKRAADTPGEQSAENGTPRAKRPETGGQGTTRGGPASGQPRNKQRHNNNEQKKAKQR

SEQ ID NO: 1000182 - protein, 277 aa, Homo sapiens
  misc_feature (208)..(208): Xaa can be any naturally occurring amino acid
MAFKAGRATVLTELCAERATVRTKYLTPTTRITENSEGAMTETKSAPRRTSRSKGLHVERIFSTEGVHPYDEVTWERRDVVQTNWRTGDVVFEQRGVEFPDFWSVNASTIVTNKYFRGALGTPAREDSLKTLIDRVVNTYVTTGRKNGYFASDDDAKVFGEELTWLLVHQYFSFNSPVWFNVGTTSPQQVSACFILSVDDSMESILNXYREEGFIFKVVLVAGLNISRIRSSKELLSSGGYGFWSKSPLCVVLMLSTGTINSARHSSCCKKGRLDNR

SEQ ID NO: 1000183 - protein, 348 aa, Homo sapiens
SGGGEARRHATPGWARTGEASRYLAGRPATREPVCVGGGGGDYARGDAAAGLVQDAEQSAAAAGAASWARGAAVSLRCWARWALGDCRARRLRRRWFRTHTAVAEARWARHGGAHPWRRSHDRSSPLRSRLLSMDSVARTGMLVQDCRTRSAEEGRTTKLDNRRHIANRSDMNGYRYDDVITAPLQYERIIEPSSLSTDIDVGRLIRSLRWVQADNSVTVLSTLQCFTLENPKINITFMRAHMVYTMGVDPPGRAKDGFSKTQRARNRAPCKGSQPGNTADRSVTNTHHPRTAHPTTTHPGTSTNDPGNVHEPTRARTTTRLSAPDHTRKPAHDGHQRPTPHTEHKPQ

SEQ ID NO: 1000184 - protein, 206 aa, Homo sapiens
MLVPGWSSEFRDLRVIQHTLGLPKVPGNYKAVGALGLANLDGNNGDSALFATLQVDGGNTLRTMPHLELGCLPTPLEGPNQKGGTVYRAFTKGFHNNRVTFLLGPTPDTWFHPQVQHVVTPIVPYKHATKHLHRRATFHTLVADEQLAPGEAAHPKRAQNNARSVDMGAPNSQGYQFYTPTSLRIQPPSVCHGERTYRTADSPNIH

SEQ ID NO: 1000185 - protein, 258 aa, Homo sapiens
AGWLACGAWRPTGRWLRGLPPRPGLWVQPWLAAGDRKGRRKGGGRSRHAEEQPTMPLRQHGLLDPTDRHARLASPSGGSGVLAWAASDRDDGFWPGGAEQPGFPEKLSKLKMPPDPDPAEDLNIARARHYCSRCLTKPAARSPTCTSTRRTASDLGVFLLKSGTSIPLQLTPGMHGMLKGCCTAPVRIRMRWNKLEGWARLGNRPRDLDQPEQARTEPDGLQPREREASADGRAGYGRAKSPRQEDHAYLNERDKLTD

SEQ ID NO: 1000186 - protein, 103 aa, Homo sapiens
MAWRSGLRRRMPRAGSYVHSSVQAADSVAGGLGELLEEFSRTQYLGQGWQPGPGWLYTVERIETEKSWSCFGRDYLFQRDSKTQTWGYLVVHYPRQHTVFLEY

SEQ ID NO: 1000187 - protein, 246 aa, Homo sapiens
RTAARRKNRAWLCLSRWGLLASVGSDNGILGLAKSDASRTRVPRSRSLAWQDELEASRPLPGGHVACNQCDQGMLLVDMCTLEGWAPAWCDTIAVSVLSGIGVYSFRWVTALVKTHETLLIYDVHIFNAVSLSLDKAVPRERLPSVWQAPVCTLQCSYGRLNQSSLDRSAVLLWWRADMTSERGLQLLLYAFDVISTHKWFMITECQGTVPGARDGHSGCVLGKIMYIFGGYDAAGGRVEPMTFTS

SEQ ID NO: 1000188 - protein, 206 aa, Homo sapiens
SGGLAASTGSRSAREQAGWRGSGRMKLGPGRAWACCCWRPSPGAAVEPITWDCLAGLPVLYRRLYCSAIAGERSLPGGLEGSGRQLLDSICKENHLKLLVGFIKTKPRNSHALPARVDRHRKNFVSKIMQKYYEGGLNSDYVTCCGHMTFHMLQTSLVQGSVTVVDSRQRECLCEAPSSYLMNMDKMHAGLIDAIKPFLDYYDLVD

SEQ ID NO: 1000189 - protein, 80 aa, Homo sapiens
RVPLLVRSCVLLEKRRSDFRIFGLICFAAGLLEFAGGPLQTLFAWVSPAEAAEHLILGMADVSCLIVSSGSFVSEGHPAV

SEQ ID NO: 1000190 - protein, 202 aa, Homo sapiens
ERVYPLVDSSRAGPAASRRAGVGRRVSGHERGGRCTVAFVGRELLAAYGVVLRGKSGLRLQSAAPCVDVRAKWPQRLAPYANPRLTCQGPDSDRAGPRERTWGGLGGRRLRWEQEAAFAEFSLDQKRSRLSVLRSGGTSPEWAWLSESAVYRRHRSTGRANMPSSSDCKVIVCQSVVQRWQAGGRGFLCWNRMSTEQVCLPD

SEQ ID NO: 1000191 - protein, 434 aa, Homo sapiens
  misc_feature (143)..(143): Xaa can be any naturally occurring amino acid
SGPAQSYDRQPAAPAPSRVTQSQRTPRSRKAGRPAAATGPGEPAETSATQHEKKEEEDSGEVIQGDNAATRREKAERRRNTRKKHTEKNARDQERKNDDHERSSRGRQRMIATSRETCSERPSSGVITEEIYKAEKNKQASEXRTHASREARSREPRERKHGRKKNEQLKRKRPQKLSARKQYQHSHDDRKIRGEKMQRQSETNPHRGTGSEQTGRAKQRETKGGKQETEERAREGDTGQRQLHTNAQQTQTRRETKKEEKDEMRTEQPKKREHENREQKEQQKKRREKNNRVTSNTKETGRHSERGLRTPTRDSTETSKRTKGQTYETESRRQTETCSREKANRQQDEEQQIETPTSGRKEQTRTERTQQRYIRTAHSHRQTRDTRRPLPHESTRAQLAKHSRDTRAQAAEHAKQYRGPRNEETARENHNQPG

SEQ ID NO: 1000192 - protein, 127 aa, Homo sapiens
MGSNSSVAPYHELERNGSNYAFVPLVKYANYALSFHLCRKDYLIALAESHVVVPGRRTRIGTHLVTEDNTQVIDAKCNSHVNARIFDHTGGSWHVDRHVNTSHTCNVRAGHISTGAPIGFLYHGAHL

SEQ ID NO: 1000193 - protein, 135 aa, Homo sapiens
MHVEKSERSTGRMETHSRRKRADESKEQRMTEQGEKQHSIQAGTFMSKGQSASKAIRIHMVKQIERMKLMATPQDPRLDQPTPVKTLHKSIFKSKEPPRITSTITARNRQHDRVHPNNSHTTHASTTAPNHSYAT

SEQ ID NO: 1000194 - protein, 223 aa, Homo sapiens
RVVWSYGGGGQRAVDPDDGHPVNVLLLSGHAQCIRPAEAPAGTGPGTLMVTHALTMEGTSPEACDAGGLDPGAASESASGHLSPEEKALRSETEEDRVVSSDCRRSKRRLELSELEQQVVGFRRRGTQKCIARLIQTFMRENSWACNGESGVETDSLWDGWRWWLKRRRKTRVHCCEGTLDGGSDEFQPAVQDRLWRALAGSVPGRSESNTCQKIYTMDSGGI

SEQ ID NO: 1000195 - protein, 348 aa, Homo sapiens
AGHHRASLGGVSWRMWLGAPCSCGRDECGWRLAGSGCAGGCDGVEPMERRFHGLLLRNLGTSGVPCALSAQHPEAVMAEVPGPLLQDTDQETYTLEDLEQLKSGLQGRHPQRNRVRRSPPGSAWFSFLASPQTSWSNENLSYIEHIFEISRRPDPTHIWWLTTSTRCADTVSEADELETTKLTRNPQVQGSTTDTYPAAPLRQETHSTLGSHQRTKGLEQRRAARRTRRGRAPSKATQPPSPRYTHKSSARDRRGREQGATTRPTPKQHTKKNAGASPYPHAQPGVPEWRLVAVETPQRPRPRPRPNKTPDAPLHRPRPDHTTEQRDGPQPTPPPHRAGRRHHRTPDP

SEQ ID NO: 1000196 - protein, 56 aa, Homo sapiens
MQRVRPWAIEPTGTATRARGVHITSGMRSTEAPGLHPVVDIRLHGSTRHLLHPPHM

SEQ ID NO: 1000197 - protein, 286 aa, Homo sapiens
SGLNKRPGLLGGRRGPDSLAEQPPRLRGEASMLRNLSTTGLSRPFYALLTRTVFNTLPQQQAHLDLNVFVDLVSLSWWNRERRPPSLCRQVGMQIPRFCYHEQVVLLLATLQDAALLNIEKAPNGCYAACAMPVNDTGWQYPNTHSEHIHTEPGQVCMAVLIQPNPHMRLSSSCDQGRCNGDLQRTSPMHVRHTCIGSRIFSQRATAVPVGPHPDTIGAPHGYQTTSYSTTRLATYTWLPSPCNFTRLCKRDAPAPGSTTSNTRDNPIQPAGHPDILPPLGHPPSL

SEQ ID NO: 1000198 - protein, 118 aa, Homo sapiens
MDDDMLTSLKDPHHRQYNGVGKVSLGSLRFDRMIRLIGEFARNRYGVDFKVKTNFEVDGNKAKFAEYGILVVNEEVYERLTSAVIIEVHRGVNISSHECRTQEAAYICQTGINGNKCN

SEQ ID NO: 1000199 - protein, 319 aa, Homo sapiens
MLSACARLLAGRPAAWPPHAPMGVEYSGSSVGRDHGMRVEGYHHVSRLGPFAGVTWLALVVHVHTRDVVPWAQRRPKNGHGYLLLKVIKGIDGLLELLTLTCKRMLGGFQIVGTFATRQERGRFDERRVQLLDLSGMHTYPRKPFLLLSLVKGIASQRCRAKAQDCLDLLQFSWKPEVAERARPYREANCHARAKGPRSARGAALVPKVRLMGIRRTVFCATTQVLGRRCVALGGSSSASKHRHARTENLWLRGFKGRIPCPSMVLPWKLAMCDLSWTRTSEHIAWGGCARSWHPKGGKYRWVGIGGSQCRVNPPGGSS

SEQ ID NO: 1000200 - protein, 298 aa, Homo sapiens
AGGDTSLGGTVSVAPGGTEENVELPVSGEYGDYSLDEFRTALAGGAGAVTRRRRSGDVPCSAAERLGSAAGRWAPGAAEQASGDPALAQGLPGGRWGGPPAGAVLNSGRRGTGPYAEADHVSPLGPRGRPQGRVEPSWVGTRLIALNLNMIMNMHVASYILDYPNVAFTELAPTNNILQIYWEPGKSNLREECADSGDAMYVGKAVHFGRKGNCTRSHDGDTKRHGSPTTTRTQRAYPNYPGNITSPPTHSCDPNSHIALRQSPGHIPTPTESVRPTPQTATKHWIDTTAPNLRNNTT

SEQ ID NO: 1000201 - protein, 156 aa, Homo sapiens
MSAASPASLHLGRTCLGVRLLLSSGQEHDPEPERDDFRRPISNVSLGAGDVPPDGHHSGHQKTCEGRNSWRCPVLIVSVVTYYRASGENVVMRAYCLTELSELVIVNVGKHEQTSCIRYPRGNPDVEEHVLQIKRTVQSPHFYNFQGHATYIRYKW

SEQ ID NO: 1000202 - protein, 263 aa, Homo sapiens
RVGSRPGRGRRPLSHRLSRTAEVPPSGTPPADPPPCRTSSRGRPTHVGVQAPAVAAVASIHACQERAESGNTPVVHASSGTEPMKDGAAADGARCSSTRPRVRQPSRACTVATDALEPIRKAQTADIASLDERRPGTGDADLGRRARETSHPRSNHTPTRTDSPADRTHPKAHHTLLLLYTTERDCGEANFKPMENHTRDAPGPVPWHGTLTATPEGDSNRGKDPEYNNVVGDSHQPTLKGAQAGGVRPNTSRSKSLCGGRDS

SEQ ID NO: 1000203 - protein, 190 aa, Homo sapiens
MSTGPHPSLAVPTGWAGRWELMEEALDSISRNYALPISSRHMRQYLGVRLVHIVILDHVNVSQVCVKLSFELTWMAGKRRWASSGSEMVPRLVVEVFEGTSGYRCKRKRPVTLYCGIFSVDIAVSRGYAWVGYSDGSGKPIEQEVLLYLAEDFLDIMGQPINPSMSKSTQEEMIRTWQFRPSNGMNSIAR

SEQ ID NO: 1000204 - protein, 248 aa, Homo sapiens
AAFGGGGGGGGGSSAAPLNSLRARVGTTVRHAGGRSGRDRTVRDTDARRDQRDRTRAYTQYARLESNRVATGAIIQEQEVRRIQEAKQSGTTVSKQVHRQRRKPRTRGHQKTSRGQTKGPPHEDRTEGTQRELSHPSNIMQRRQQRHNEQAYKAHNEKKQTQKPRQTKYSLSGNILPGPRQHKPVSRTRTPFTIRPLTTINTARMRCLPRKHEGTETATTDTMLETADDMRREASIERETQHQQTPEM

SEQ ID NO: 1000205 - protein, 458 aa, Homo sapiens
RVLSAQAPGCPRSPAHAPCASSSVGPAPWIGHMSSPASVQASECSLSDSARGWPRAQHSERQPLSRRNPQRYTLGSRRQGVHAATRKTPRDLRDTCRQSPEPSSAASTSTPPQTGRTTQRETTRRTCGTTATTRGGHTPEDRQPQPERAPAERERPQQHQSHPTTYTIVDSEKHTQDGTPLRPQQPPTRPATSRREHRTIPTSNAHPHAPLAAHHHHNNTGQPHTSPQNHIQRTTQSSPNHAHYAIRKHHTTHSETAESTTPPDTHHSHRHAQPSTHNNPKLHNHTTSTRGQPRTPPSKHQPAKPQQSTPHAANQYAHTHPCATPHHVKAHAPTTTATHTTRYRQTPHKQHRPRPPTDRPHAHNATEKQNKQHTKEGHHQTQTSNYLKTRTTRGASDTQTTDQRPDATTRVEQQTTTTDETDETPWGTRTDTNDNDACTRASDTSHAMQDHATYVSDG

SEQ ID NO: 1000206 - protein, 126 aa, Homo sapiens
AECCSPAVIGGEPRLMRVCTEACITVCNNEERGPGRRCMRQLAKDENSAPVRKPTKSETVICFHNGLPAFRRPGAEGCSAMDSFERIDRAQHRQRRVRNFPAARLPPMCVDPSPGGTISRASRAPY

SEQ ID NO: 1000207 - protein, 213 aa, Homo sapiens
SGFGRAVFVSRLALAQELVDPSPLLASSTLRSPWVTTVQQLPVALMICRSLGTHRFQMTGHTMECMRKVASYAGVIRIHRRPMAVPYICFLLLTSVHSVNSMPCRAVGRLFVIPLIHSLGARLNSKVIANRPRHVSLLQSDATRSSTRGSTHTLLTQCVKRSRCETCLQGVDAQVQARAVHKTVRPCITIFVLIVEARILGGTTLLASVYWTA

SEQ ID NO: 1000208 - protein, 189 aa, Homo sapiens
ERQLLLLRDLRLSQTGWCGLGILLVTSPAKVPQRTLTRRMGRGVLAVMYFTMTATTSQRMVGVQEETEGKKALDELTDRGGKWSDHKLSLDELGRKFPRWTCPKSLHTTQAWLSDISGLEAWAQTALNTNSPQTHLTWVTSSSLSKVSTGEVLPSIAPWNQPRYTIMISQSPTENPKACQWEGLTPSQR

SEQ ID NO: 1000209 - protein, 202 aa, Homo sapiens
RAAVVSGVGGGSRQLRQQLRQPRRPRAHTRRTWDVGAEDTRWTNDAPEAGSRRRREDDTENSRDEKASTQANKSTQSSNNRTHRHRREKPTTEQTPTETARAPERRHGRRRGDERRPQQGGANERTDGHGKQTTQPEPACDHSATRPTGTTRPTDEPQKTKNPDTTPRRRPDPHATTEHQPPRSPAQHATSEHRATNRNQDA

SEQ ID NO: 1000210 - protein, 186 aa, Homo sapiens
MHEDLIRYSYGKFLLQAFVLVSTVTLMLTHVKVTCLHEREPWRQVYSEIGSGVRMHQPLSQCGATETGQSRMRQSRGALLSRRCNNMTAAMKDETGLRNLMMHVCAAIIRRTSSDIGPGYWAMRSITAEIARSDRIIGEGLIPCKAENLMKPTTCNKDAGSGLVCPPGSPPNAAGQIVLMLLMVIL

SEQ ID NO: 1000211 - protein, 160 aa, Homo sapiens
MNDWKMETHTWNGIARRSGRSWNFKINENPLSRKGEYNEKKKNSKGKNQPGHNDHRDEHPLYTQNREHSQETTREETHTQNHNNKITTAPNKDKANEKQTTKTEPKQRHKQNNHKHSNNTQQSTTENQHTTQTATNTQKTNNTKAPQNSTNNNKHTHNRA

SEQ ID NO: 1000212 - protein, 106 aa, Homo sapiens
  misc_feature (101)..(101): Xaa can be any naturally occurring amino acid
MSANGRSGANEEILRGFNTKLDEPFGMLRTREDTLCKDKQKTVSVPGVEHEARVPKKNPQVHRHVSRELNFSSIRIKWKNSAWNKKFTSIGQCLEEWFFEXWLCDP

SEQ ID NO: 1000213 - protein, 229 aa, Homo sapiens
MWQPRASGSRPWPRSFIVALRLQVQVCFILNEEVMRDGVPRSAWTICGEGTPPGQPGSWKVMVAGRVEFTFYSKKRVDGYVDTESKFAEVMVADIKDRLGLMDKCALKAESRDLESSRFSQDCFMSRTRTEELLVDNLDLFPDVLVAVIGGRDCCPRVFASERGESVCMCLPRNAYRPVRSRPVPCVFLHIIFAYAHVCPQYVPWHVGGTVPLRPSLLMGTAKRGVCWV

SEQ ID NO: 1000214 - protein, 107 aa, Homo sapiens
SGSLPRRTPDLCQVRSAILVPSSAGPCPDARGILQSPFSAAPSVRSGHHGQVEVARSLGDSSLVPLSLAQIDLNKPDRFAGVFRRGEYNVSSYSNLIVTGGSLNHLA

SEQ ID NO: 1000215 - protein, 129 aa, Homo sapiens
  misc_feature (93)..(93): Xaa can be any naturally occurring amino acid
RLVVRRNTKLGDDAGVQWGGPGALVAPGDGAKPAGCDVPRGALWSRPSGYSGGHEGIGRTRGAGHGEPRPARGSRRHKPRTKGRWIASYNLEXGAAWFYTDIGRINVLRGRRFLSCICVPLARFHRTSE

SEQ ID NO: 1000216 - protein, 251 aa, Homo sapiens
RTEVQSFLAGWLLIVWYIALALLDWYSCLRLALRVTGEIQDVYLLMVKCSSMRKLGGRPCHQSGRACVQKRLVMTPGSHELCWVKSVSDGELNGLKLEDEFVERIYEVDVELNLMEGHLAILRINQGRMHEVVFSDANDSGPPPIQLMPALMSALLLLLPRMSIIESPRNEGRLLQRDSERRGDGDSMYPRSIPCRRKSQCFSAQYAMVRSSKARVPITIMPCGRDHSQKSIPSQRWNLTEKGGKNLQRGG

SEQ ID NO: 1000217 - protein, 74 aa, Homo sapiens
RVGLPRHGAAGALWRSAGDALLVDFLWSSRRSWPRQSNQSIEMHSQVEDTNHAEEPFLHSGDRGLTWEVDTLDS

SEQ ID NO: 1000218 - protein, 86 aa, Homo sapiens
SGSTGRQEARSKMAVNQSHTENRAEPSSLTVKVSGSGLRMWSSAFPQRSEGSNVFMVERQEHVSHFAYRVIFITSCSISDPDVVLL

SEQ ID NO: 1000219 - protein, 135 aa, Homo sapiens
MKPAGLGVGASCEERAGGDARLGGLDSEWGAFLAPPPRLVGLGYYGGMTSNWRGGPPRREHRTLATDRDWGPRRPRRKDVAGPLMLDQEFEAGEAASGAPGYSEGGGRADGHIRWSREHAWGRPRLYAGQQSTGG

SEQ ID NO: 1000220 - protein, 110 aa, Homo sapiens
RKRRGVRYGRRRVEGVLATRSDEPARERCRAWRQLRKQRSLLKLTINLSFCRDVFFLEWPRCPDVGNVTAYPVEVAIELRGEIYEISSTSFASILQNAKDIGYQSISQEH

SEQ ID NO: 1000221 - protein, 88 aa, Homo sapiens
  misc_feature (30)..(30): Xaa can be any naturally occurring amino acid
MASRVLREYSRPSLAARLAESARQVAPYRXLPMPRDEETEHEVGDDLRVREIADGVSWMLDEVTKYLTLRMYLNCCCDSTEYVVRIVG

SEQ ID NO: 1000222 - protein, 131 aa, Homo sapiens
REWMRSEWLGWCWRAVSVPAGDSPSHRFAGSTSSRAGCLTGTAGPHCAFPWGSVNLSSNLIGNPCVEGIVIRRSLGRRAIVHSSIEFPLLKQNCNANEHVRAVARASPHDSILNVCEITHSGETMHCARVD

SEQ ID NO: 1000223 - protein, 73 aa, Homo sapiens
SGVLQTEPRRVCAAACLLHSGLTSVNQQQATIEGSMIASIRTRRPSSGDDTLRKIKYTLREDCTCQNEHRVFL

SEQ ID NO: 1000224 - protein, 117 aa, Homo sapiens
  misc_feature (28)..(28): Xaa can be any naturally occurring amino acid
MYDEIDPVEAFHLKYSIVYERPGRYDQXWTKWKIIMGMEDQNYVGFEISRYKMLKQLNCVTLRNIVSFTCARMKNGCDIAIKVIQTRLLVFAAEEVLQYDSRRIVLDSEDTYRPFYD

SEQ ID NO: 1000225 - protein, 275 aa, Homo sapiens
SGQWLLPQAGGGRHGGVSGWRRGFTTTVVAVASAAAASIASAHEPELQLPGPSVVCQHARCPRSFSGACCKHRPRWGCGRRRTDRTKGSRAERSGGGQAGSCAYWHYPAWGRGTRPDLTTMKHCVYAGTQSPSRRNSDPGSESHTSSHPARAVKEDALDDSGLSAKKGRQGSEEPEVTPDGPTRLPMSWDSPWQGFAKPTISEQRVGRREPRTAQQVINGVTPRRTGKARPGCTPSPKILHSRDPARDNTGTTPRKTRGPENPEAYRANNHPGAS

SEQ ID NO: 1000226 - protein, 222 aa, Homo sapiens
ADVFGSRFRDAASAALRAPCAGLLRRRPPRWRARSPFRQLLQRHPGCAPSPSGCSAVLRRFRAAAGPPCCGSLQCPMQPVAVCCGSLHTDGDKACVDFLSDDTLREERNNSRSITISSHKMSGGLRTLEAEWDQKRNLSAESLPGKQIHGTTLTTIYQQHPTKHLMREAGNPRKGRQVEEQEPETDYQLPNFVVWKFIKHCMHGKKALVWHCHYPAGCTLDK

SEQ ID NO: 1000227 - protein, 417 aa, Homo sapiens
ADIDPRPRSNMASSTVSLASPPAWHYSASSGKRPARSTRGPPVDRANLTTGPIHGARATPTPRDCTRVLRRESRDCTMSWPPPPANSRSTESVWLVRQLFVSHFGGTSAVGNGHRRRGPGEPLSSTYCGAGARWARRLARRDRRDHRGGDGAGGDCRVAQKRRVPNLDELRASAWVNVVSDERQGEQSPGVLQNAQFGIQAEGPWSPGYLTDEEVLDDENPFAQLLSGGRCGSFVSGSISSTRADPQECDDDTRDTVFYPICACHTPQDRPLATPEEADGPTSLHDALKPTSGAYTGEKRPGPHPTRRCHAPDPDSGEDTPKRNRTHQRTTNQRGHGTSPDPDVSNATQRHQSETANRRSEQTEQATKGHNKSTTQERATSKRAHTTVPDERRHEDPAATTKTSRTRRAHGRGRAPW

SEQ ID NO: 1000228 - protein, 91 aa, Homo sapiens
RGSAEWLASVALGMATFSRPGWVHILLVLHSPARECIVSRFDKHVTVGAQDYAKTPYTHKRTQEDTKRQTLRPWEVRSYADGRPSLILTFD

SEQ ID NO: 1000229 - protein, 209 aa, Homo sapiens
AGCSSLGRSGSCRRSGAPPALLKLASLPASCHAPRTTLETGGDAGCEHHRREGSARTWLARSTPLTHRLSGKHDGSPQTGFSVKPAARIPGHHPTETHAAPGDWLRVDRGHGISPRRTGSQGHLILQTGLQSPSRPTKRAWAETQVSQSHSHRVVFDNCTDKSLAGKRYITFVTHDVKVALYERRVRGQGKAVNHSLCARGPMGFPSVP

SEQ ID NO: 1000230 - protein, 143 aa, Homo sapiens
MVDPAGAKIGNGGSTLCARSNVWKSYHGDNMDILVTIFINVTLMNGRKKSSESIMLSRIERLEDDLTDQGKREADRTIGTIFWYLGYMCHKMQLCDEAFSKVNLNYRNCKMGCLYYINVCMCGGKKSHIRTLMLKGLRPSRLT

SEQ ID NO: 1000231 - protein, 113 aa, Homo sapiens
MSVRRAAVRHEGVSNDRMNVPIVARMRGAMKTGTRAARLTCLNGTCPKALGLQGLDEATDKAWMKTTLPDGRNELGRGLMHGTKSSAWLPQCSMHSLKKDEGRDQLMTRKCAA

SEQ ID NO: 1000232 - protein, 378 aa, Homo sapiens
  misc_feature (296)..(296): Xaa can be any naturally occurring amino acid
MEMDMPTFMAKMFADSCEQWETNGPTSLASGHFTGSNVEDRSQLTVLAGMAGHPSPFRNYGDGTPYDHIDQQVTLGHMTSLSPPVCQFHEYISNNMKRGSYSSDGDDESRRYRVDQQQSLLGGDSGIMGKPRNASSPRNEDRGFQVRIRYSVGNEVPEGKAVFSSKCLVAGTRRTRRVRQNVPSQGCCQSYAGRMASKYRLTPSGQRYTVGISSQVLITYPPKLEQPEITCWPLKSSALHLQSSEELRPSTARDGGNPVWESVHPTWGTGNSRLGRYARDNVRRPNSFLQYFGNRXPRQGLEGNPLSFRTNESEFGNGKYLFNRLPLRAETSKFPMVFASRHVFKLFPMANLVVSTNPHTRDHLSGVPLPCGNGERNS

SEQ ID NO: 1000233 - protein, 205 aa, Homo sapiens
MARVGAGLSRSCWLRLRLRTSARSPWGLGHAGALRSLCRFVILHVTKGRESERDYGISLREIGRIDEKRGQYFFTICRSSLRWIRNNGRIERNRWNNFWFMKGVSSVPLTSTDMVFTGAKDTVWNQQELLDSFLSLLTDYRTALTMLADPWGDTSIHEHNHEVANMARPHRWYSAHLYRSTRLLTDYAEKRQSRKILACYRRQDF

SEQ ID NO: 1000234 - protein, 177 aa, Homo sapiens
MEHKRRTGAVVTGQSSSFICSTRGALRGDLMNTWVHAWMTTHAELADVIQTQIMRTRRGIVGDGETKEPFRMTGCKYSVPSVTVRGGRKGQVVMIVHNWPRIVQRVDGQDARVLVPDFACLGKEALGEGKTDTGEQPAVLKMDTGVTTCLRIVPSWRVTSVILELHLSAREDTVHVA

SEQ ID NO: 1000235 - protein, 230 aa, Homo sapiens
MAVNVYSSICDPDENLSRHDHACMGQQTPLDLNYTKIEQLCSGARYCQLHGHALPTVCVQLEESEVPGQKLEHEYIHNFKVHATPRSSNTDWRVRPHSIPSLRNDTSSADTGTRPTDPTLSSISRRLPPQHPLTRTSHSMAKAITHHPLPARRAGAPHGTATPHHTPYTPSGQLTNSPHTNNLPKRTTPIRDHHATVTQKQSEPRSPPTTRHQPNTTLARNQQAPAIEAN

SEQ ID NO: 1000236 - protein, 94 aa, Homo sapiens
RLSRKAQGVESTAGEKPGASPGGSLDSHWVSSLIGSVRYCTARMDRLSGISVWISFVAVVWDNVIPSGGLKGLVDKLQALTGNEGRVSVEEHQA

SEQ ID NO: 1000237 - protein, 139 aa, Homo sapiens
SGLSGGAQEEEEQEQKQKRGPELRAYAGPVSEMPVRGDRRVSTTERELSGWLRDPSAWTELAYGNRYTVTLQHLDSNKRIRQLQMSGGSTTNPTYENGENCLICHFLMCSRSGTCMMALRPSTMTRVVMVTWNTHMEGT

SEQ ID NO: 1000238 - protein, 110 aa, Homo sapiens
MRLARVSMIQLVIVDYHQMAEAQCVHSTVDHPSIEGYVSNLGPAAITVGPRHRVIASSRHELRSSWKHWTNAKKRYESGRGGEPLVDHRSSRLEWRASSRLERRFQKGLE

SEQ ID NO: 1000239 - protein, 103 aa, Homo sapiens
SGGETGEESAMRGEGVYVLGGADQEYSALRVGMVSDCVHVRSSDVDTRHESDEFNGGGYKRSIQQIYLYVVFMASHMLLQTRRSNVYLRSTYNWDIGNVLVES

SEQ ID NO: 1000240 - protein, 163 aa, Homo sapiens
MVSRFKYIQKAGVETTIFIQGEIPKARLMALELQTNPDADLSQNVPSRVDCPATIVAVKAIQNSDRRTRIGTETWARANVSSYGSIIREAYFAKETRATVDQSVFTDAWLMRSSQKVVDTRIILARDAGRISLAERMAPDRRYLWTKSTLGHLNAPRNTSNRG

SEQ ID NO: 1000241 - protein, 136 aa, Homo sapiens
ERGRVAIIVAAARAAVTAETHPLPLLAPLADLSVGKKSRSLSGEAPASCRRSFPNDTGRPGRSLHGTRLTAACPPSLSRRGRRRSAELSTSQQSVQTPDHYRHHTPTASTREPVVSRDGKREASVNRQKSRKKALA

SEQ ID NO: 1000242 - protein, 226 aa, Homo sapiens
MPLKLSCRVLMDEISEVEVEIAEQSVTIKTMLEDREWTDDTEMMTQFPLANVNAALLTQGHSVVLPITRMSLLLLKMMRTKISCTDDIPVWDQEFLKVDHWTHFFELILAANYFRHHKGCLMLPCKTVAHYDPWGTTLLHAAFGQIFSTSVRDSYGLLLSALRRKRNGKALADVVTGRNCCHTPLAELLLTRSPPPCYTGSDVPGHTLAHPPVCVRSVGSLIYLTI

SEQ ID NO: 1000243 - protein, 160 aa, Homo sapiens
REGDLVGTGAGQQPCEALTQRWGGGRAEMGGVCVRAAQAEMEWGPGLKTGHGVECCLGWTAGSAVAGGSAESATPHRRPGRSAAQQLLDAVEAACQTADSMDTIAACEEMLRQLGSEEPGARLMAGTSQTNHGGSTHQTGCLRQEAAFHTGCWRMELRSP

SEQ ID NO: 1000244 - protein, 211 aa, Homo sapiens
MSAFFRQSGEVMSGAEYGRIGRDSRSSASWLGDDGSVNSGTCSHLTGIWIHTVDPRYNRNRRAARAGWESTTRILLFPTLVLARIREYLTVHYFTALYRRRLGRSRRSTRGDWQSELCEVVYNGIRGQARMVKHILATGEGPSAFNTPSCVSWNPSFMGIPVGYPSNKARGLSGTTRTARVGSRGRPLSKVTGLLPQKGVLKDPYDGWARA

SEQ ID NO: 1000245 - protein, 140 aa, Homo sapiens
  misc_feature (110)..(110): Xaa can be any naturally occurring amino acid
RDADSSSEEEEYENMIVCPRIRNIIRTRKQHEQLKVNIRYYRRTIHAVGLASVVGISLGRYLVMTVGIACIMALSLSKRIAYQHVSYIYEAGLSASRALVLSQQRLSSKXRYDSTVKREKIILWKASSLLSHIPNVSSGS

SEQ ID NO: 1000246 - protein, 117 aa, Homo sapiens
MGRLSPNSGRLMVEPPCQLRSGCSSVSLRDVEHCRIPMFLMDHFGMHASAYEPVMLSGELCGYRTHSLSDLQDVQTMSYGNAGTVTKARSGMQSGVEDCIPLLWSAGNSRDGLSWTE

SEQ ID NO: 1000247 - protein, 209 aa, Homo sapiens
MGTTIIDKESAPSRGNVSYLRGADPSLAVGDHKMKMQEELNCSFLARIILRLGIQTSVEPVFREDCHLKISCLYIRVAIVLQGYRPDLVTSSLVGECSASEHMTGARSERGSEGLPEACRVPMNARSMKCLRAGHRPGSPTNEIRSYFRHSRTWNNEDSSSGVSYSEPLLGLDRFNGGGSFTRLEAPDGTGKNHKLAVNGGEKLLLGLN

SEQ ID NO: 1000248 - protein, 270 aa, Homo sapiens
  misc_feature (183)..(183): Xaa can be any naturally occurring amino acid
MHMLLRGSRANIRVSMTGRLRAVMTRLLGYVDPLDPSAEWLASSPVIFNPLYWNVVARLGTEDPLKLSRGPSDPRYLAFYSLSITILLHEAFRSRIDICYHCYVPMLSQSPGMESRGHSHVWAYMSWVLVAPRTWASCSCSPVFFALGFAGTFLGDYFGIPQGGESDRVPFNILDNPCTGEAXAIPGLAIMHASPGPAPDGAGGLNYIMALYKKEPLTVRIYRQKAPGPQEELIELQQFGEAWTSSWLAKWRPGQGDWGLRSKVARGGCQ

SEQ ID NO: 1000249 - protein, 70 aa, Homo sapiens
SGEDGVLMAVRRRMFRVGHVVLSGGLAHGPVPLVIDSRGRGTPGKSTLAQQHRPDGSAVTIVSADSMAGL

SEQ ID NO: 1000250 - protein, 221 aa, Homo sapiens
MIAVHGLLYNGSGMCQYHGLLLGDDAPRSPCFRSQIVRAPQADQRQSMDEQLAPKHAILMLDQGAPTNNAWHILDPVEVTPNWSMAIVDENLETIDVITDLAPTSHSYDTETCSVGPREREPPEVSVVHPERPPLKRTIGDERKGGTYRIVQDVFLLLNEPFNHPPGPLDIEIGQIAEDRVLDLPSSCRLGAASRAGAVCSIGSFDGMTRRSSPNEQVSTF

SEQ ID NO: 1000251 - protein, 124 aa, Homo sapiens
  misc_feature (14)..(14): Xaa can be any naturally occurring amino acid
MYHMAEDELITLQXRHYSKQRRSTRGKSPYRVYWRSSCQVMPSHDLPEGFDKNGDGTIDFREFICSSVPSPSRGELLMHEAVTGAFNMYDLDGDVHDDPVEMLEIIEDIYKMVGTVIMMNMNED

SEQ ID NO: 1000252 - protein, 548 aa, Homo sapiens
RTPSTSRAAADDYLPPTYLHDDRQNYYTTYRADTEQQGAYPEPHKNNDNTEKNTKRKNKQTHTTNKTHHTTKREHTSTQHTPTTTTHDNQKKTTHKRKTRKTPKNQNNNKQPHNTQTQNNRTKHTQEEDNTHTKKTKTQKHKNHTPKTHTKRTRKKKPPPNTTHTHNTNHKKKKKQHNHHKTNQNKKTKHKKQKHTKTKQEKKKHTKKNRAQQKNKRKTMKEKTHQHKQKNAREQEKKKTKPTKHRKHQEKEATNQKQKEPKTTTTTTQQTTKKNKNRHTTTHTDKKKKHTHTTPQPRRKKQKKNKTKKQNTREKQDTQASKTKTTDTKTQKKRTRPEKQTRTRTPTTTTTKQQKRRTPTQTTAPKKEQNKKERKEKTNNIKLETHKKQEKPTRQKTKYTTRKTQRTKENEEKNTKNTHKESKKPRNKTNNSTDTKENKTQTNKSKTKRETQQTNGRQTNRRNEKTHKPHKTTRQKPQTTKQQREKKKKTGQQRKTKENRKKNTTKRKQKQRRQAPETKQNKTHNENPQKEQEKKTERRNKKRTKRTQ

SEQ ID NO: 1000253 - protein, 129 aa, Homo sapiens
SGSEPVADWWLPERLAEVGGAGTWRELSICQGGRKGAASPTGCTICRVRESSGERKDVVPVKSSFHHLYFGMSTFAHTSNKASHLMLNPRTNKGMAFTLPRTTNAWSSRTSISQNRDTRYSSLTDFIDT

SEQ ID NO: 1000254 - protein, 115 aa, Homo sapiens
SGIRLRDETTLVLCVYEKKPNRLNHRVTDDSVRIEQRVVSRSHEDYMLQRGRQSKISGLAFRWITVTKEESSTGMRENGLTVQCWLEAESISTERMKAPGMPTGRGRKNGRRQRH

SEQ ID NO: 1000255 - protein, 277 aa, Homo sapiens
MAFGKSHRDPYAHLRGPPHRPKDAVKAFAQQTGISHTHTHQSITTANPNFTIVHFHCTMLLCQHTVGHQVIPVISALVAQHRHILSHTAATFQLTGRSLANPTAITTLAQSQATISRHQQSFANFKFKQLGVPQEGISPTVQGFVVHRFTCSQKSKHKQQVIHPSRNTVGAYTGNTGGEVIHRTAFTFHHSPQATGQSTEAFRTTHQAYRWQHQRKRKVGPIPQNTLPCTTFQTRTIRQFPRKRQNFTVGISTPSLNQLGHIDPKRESAYLDPIAPL

SEQ ID NO: 1000256 - protein, 158 aa, Homo sapiens
MEVTAQHVCGSTCDPRILTGGENCTRPLLQRIGRAIRQGPIPAQVGTHDVYGRNAILTMGTLARSSCIRPFPLARKSYQITRAEDPTGQTILRSLLWEGTQFVFGKEFRRTAQMPLVSPHRGKLIRGKSFELTHEEGSDKVDLQTNPDVGREGTETRV

SEQ ID NO: 1000257 - protein, 380 aa, Homo sapiens
SGGVADSGWSGRPRRGESCTGPLRGRRQHVGTSTEFERQLIRRIKLRAGTEVESGIGSAEQQASLGAVDRTDAGDRSRDRRIPGTQRKTRFPGTWRQTQLNSVGTLEAHRERRHGVTDFVSLAAHEVRRRRSVIYWDVPNPSRDFVDTTSNTRKYAKYRWPMSKVVAGSRVCDDRLVSLRATQAVYPRDRVLGCGLSETGTEVTPMSSVRRPWIERTTTWPLDGSPYRWGLTVTPCLGKFYMQRKGQWTVEYLACQRTHNVMSALGRVGLDPLKGTHWDITSNGGISGPVATTLNTKRIRRKGSRAVLSGEACPLQGCGTQELNAKGVIGAFTEWHIRSFPTGTKIHIKTIPGQRHLQRTYPSPGFTWACVHEEDPITDL

SEQ ID NO: 1000258 - protein, 262 aa, Homo sapiens
MVLEAECEENRERGSWATGTPQGETGTRGRKTHGKHRKRMMCHPRYKHKNNEGTRSTPGEERGEITRGAPTGQQHEEYTPQRDQTDKATLNKKSPSITTAVAGDTRTGIQRKEHVENVGGKHKTNHIRATTHTRRTPWRTEPPERTTQHTASAPRGHRKRQTKRREPRTCQHRRHNAKTKRPKRRPTRRTHRAKETHGKPLGSSADAGTRQHRATSRGTVGKSASGEDSSRDTAPLARKGGAHDASHKRADSAEGRVDATQP

SEQ ID NO: 1000259 - protein, 68 aa, Homo sapiens
RAAAVADLNLEGEKELLAPGDLPAIAGNGWVNHGIARTESQHVILLQIAVRDPYIPHIQELEGPENEE

SEQ ID NO: 1000260 - protein, 225 aa, Homo sapiens
SGVCSPAPAGGLASRLTSHPPAAAALRGRSHSLETGSLALTVGWTERGLSGASKEQCPCMYKGMARQENGKERQRHNEGGFQTASCPARACSDSPFHYSTADCTANATPIGHIEGQGETPKGSGHHDGATPTNTGTSDGTTRFPQAEKRVPIARNPAHIAIPQAHSTAGAQTWRHTNPEQQNSPHRRTNDPNRPPGPPPTADNTAGQSGGDSTEPTQPPLNTRAN

SEQ ID NO: 1000261 - protein, 75 aa, Homo sapiens
SGCDRKVKHASNSWLVIVFLILMVARQGLELVWSKKDLSGRCVVGLCSSSLALVEHYGHRKNGLNNRKKLCRAGQ

SEQ ID NO: 1000262 - protein, 326 aa, Homo sapiens
MGAPGTTGPQLEVQSTSTSCHRDDSSRIRPVHQRETRPKSRKYQQAIDEMDGGLSEDLEHERPDDHQLYSRHVLTINPHIHDMTDETTQQTTTTRDTQESHTTDPRGSKACSTRLSMPKHYATEAHILSHRDMKQIGQYEQYRDMTYGAKQGRGSTMNVRMITNASRTVMDAENGNSTKDKKNIKETKCEATHELDLRTDQGSEEADMRPQRREDTTSKHVQTTPMRSATVASEDPDTTENAKGGQFAHASRKRAAYERNNKQQNQIEEDHNKKTQRKDDNRSTSPSRTKQNRPHHVDTPPIKKRLGDTTKKETPNRKTRNNNKLG

SEQ ID NO: 1000263 - protein, 178 aa, Homo sapiens
RGGLGAVRLRQRSRCRRVRDALNLGNYVTQHSGLERHLFHHGTGKFRIETQLVINKFIRKSSKRCYVRYRESGSLTYEEFLRRLAELHCLYTANSGFWPGHNLFSLRYNLGLIPLLIGKLVVRVRLYQRLNTQRSAHSKAGHPRTHDVEYTASLPTTLVNDISKSTQTGALGPDASTY

SEQ ID NO: 1000264 - protein, 227 aa, Homo sapiens
RGSRVGGPGGAAGCVAVAAGTAVAYGVRLGVGKGVRNSCILRETLCRTSCPVRGPTGCVSCACLADVTVWGQVLVCSCGAVLGLVCGAGWTPACVPRQLCGLSSIHLIATAPVDPAVSREEHSDGFLAQCNVDSKQRAKSRREEYLQMCWVAEPLASNRNKRRRTPSSKDSSAFWLLTPGRRLETYQRLMKSSNSGKIPADAGRFAYGEAFQSEYGPMIPLVAFKFP

SEQ ID NO: 1000265 - protein, 244 aa, Homo sapiens
MTVFIQICHGKYYILTVPLDFCLNIAKLLMDHERESARVSFPDDYSLNVLSHRNNTLGQRSDYLHTDTASLHTRDAKELSLPHGTNRLRHTLSSLASPNQERTTLTRQHTPMKLRYHQPLLLRRPKPAQDTSPRSVPTNYHLECPHTHCAYVIHILLQRINSRHACTHTTWHSLRHFTTQKPLARSGHPTATSDLHSTASKTTWPTKPYEYTGPNKHGHMTPGTALDNCTLATPSRKTLCTTPN

SEQ ID NO: 1000266 - protein, 375 aa, Homo sapiens
MTNAYARGAHRAHDTPSNTRDREPRRARTTPWCAPGAQENTDDDREAHHRPPHHTHAAHPTADRRKRPTQNRPRINQHHNHRPKRPIPAIGTTKPSRLRASITTRPRGTVEPHHHDASNHGTHDTPHLTHTANAPHKPNTNHPPPRTTTTPPTTHQPDPRPRPPTPTTTTKHQTDTGAQNNRTKTRRRKHHHATTAQHVTRVQTEAPDATTTPQHTHPYTDNEQPRTPAPRANHQPRKQTKQQRSKHTHTDAPAARNKHQHDNSTDRQTRQNEHSERQQNDEANDRQQKKQQQTTTQRSTKDNSSTRAANNAPTHRYDARQSTHAHRERSPQPRHRQNQTSNSRATRRRQTAATRPHQRSTRHTTPRPPDHHHPT

SEQ ID NO: 1000267 - protein, 69 aa, Homo sapiens
AEEVVSSEYEMAALCAVAPAPRTVHEHTVSSEDGSESMDNAEKTHVSGLISVVSIPQVAEHGIVKASDR

SEQ ID NO: 1000268 - protein, 50 aa, Homo sapiens
MRGFCRKGTLLEWIDLVGLNTRKDTSYIDLNDVVYDLGEGICDEFCAGWN

SEQ ID NO: 1000269 - protein, 134 aa, Homo sapiens
AGWLPRLGRIVEPAPLAQDLRPRLCPRGVHRPSLRSPMDALPAPSRLGPASAAAARCALPLLGGPEWTRSVLLEACCADWTPDGHVIMKGLLVMPYATVILKNAGWCTEQVACSSRSSLAGSVLHVPRAVMLWS

SEQ ID NO: 1000270 - protein, 299 aa, Homo sapiens
  misc_feature (209)..(209): Xaa can be any naturally occurring amino acid
ERRGALRPAVRPPRSALVALAPPGGRSLRGVGGPGADARVARDRCARGALVRVSAVKVTAEGLRGLEAAGGSLGSANTDEKRDRNAGEKSVRRRSGTGNCTSGPRGRRQWTRKGPDEGKQTTECQRDRDHNERRSRTVFPVCTTGVLTPAYFSEAFRSRACYITGDRDRGPQGNCAEDSRLRTTNNKSSPKGKAPRCHRASRSATPQRXEPQGKVRTTRHMRAKRGTGTPSQTQPNGNNPRETQRRRARAKGRLATTRAPSGQHARVTLRCTVARNRKHAPHGHFVKPKKRTPGPQTHQ

SEQ ID NO: 1000271 - protein, 143 aa, Homo sapiens
AGSKLVRLTNLLKSYGTRHWTIELVGTTEQCRHLCNNIDKQADNNDIDRNGYDRRKRELFSQSAPAAADQNETRCATHRPRTKTLTYRIDAGGRIHQLRTYTCEDETVSMMMHTMDITWGNVENQGQKTYRQNKYQETMTAPI

SEQ ID NO: 1000272 - protein, 270 aa, Homo sapiens
SGRVRRLGTGIWAGGREKHAVMAATSEGEELMWTLCSTVRKGIGYRPEERGYSFAQFMAEQVNEELLMVEASEQSVNRKKVSTGDAKERWSWYCRSGKISGIEGYTPRAKIRIGLSGNGLCIELSVLCIKEMPHWDAVIKLSSRTKQHWKKKPGHRYRANAVQTSQVCRIPSSRMKFRDECGTNGTGTSRCFKTCEQENKSQTSDSTMILLTGRRSDLAPRDLTFTKTHLDDTTASKDDPPSPQRNLTYVDQTPTARTGASGTNHGTDTT

SEQ ID NO: 1000273 - protein, 231 aa, Homo sapiens
AEVSRPRARWSGNPRGRGISGLARAGPARLDAPTRGLGRHWGTLLPRAYKHQRRQPDTARHHWTLRNGPPHAEARPPAMTRPWETWERTKEHNRFAHGQTGNAKGNRASSACHKAEWHTHTHTTENEHRRDRRRHTNGYRKGKTRHEQGNSHLPGNPRRTRARRAHTRLGPSGHGKHTTPGQQTHPRHHAARHTAATRMGPKRRASPERNAELTLNQRGQRAHEQAIAPHR

SEQ ID NO: 1000274 - protein, 72 aa, Homo sapiens
SGGGLRDASRAACVAPTPHSITPQAGDGPGGGCVVFGSGVAESEGTHGVLSPHVRLWDGIMGPIDINDKYSC

SEQ ID NO: 1000275 - protein, 257 aa, Homo sapiens
MDTFVGHIPVTSRVWRDVGMIASARVRPWSIASWRMSQTRQSVEQQPDSQQAGHAFAGAPNKRAPASERLESHRWQLAQAPEAFKGARGQQQAAKRGRRRRQAAARRRSRRNNESNLPLSDMHRHPQDTTYEDATRPRSTRGGTCLARPSLPQGPNAGPPPQVATPPKNTKTEDNAQPKTQPQQHNANGGTETRPIKNPIREQTPTDGDLGARTTPRGHQATRHTQGRHPSAKHGPHHESPREPGAEAATQQSADAE

SEQ ID NO: 1000276 - protein, 56 aa, Homo sapiens
MTLNLWIPIMDQYAYHFALDVIVLPHRFISQQAGTIECNAQLLEFRILKTKTPIHD

SEQ ID NO: 1000277 - protein, 158 aa, Homo sapiens
MVHPWPPGSHLGTLLRAYFPKRVWLEPNFSLSSEPLRGPWFPTWESRGHSHRAWVLKGGGPQKAGNISHVALETSQDPQVSPHTWVLRVGQPSPHQGRVVPKCASGTKRDTPPVSWRQKRTKGPTRLPLDRGTPDEHRRRPAWSGMGPGHQTPPSDNG

SEQ ID NO: 1000278 - protein, 109 aa, Homo sapiens
MTGLRQESRSTGTLYRVSPQGPSRRSSFVDLLGAESEGRTRQTCFACKPLPTQGGMNVLLDNLGSLDAGTESRDICDMRNERLVVSTQITGIPDHENIASKVDVPEDTD

SEQ ID NO: 1000279 - protein, 195 aa, Homo sapiens
REKVSVSKMAATLPSGPSCSGGRDGQTRGVSMWFVSDHVQEPWGAVANIRTGAEEVACKCEDRQSGTIYYVKIRRNYKCTRSAKAKPSCTTWYRSVQHASNGLSVVGRQEEQQDHVTRGVTGSAQGAPKGHTPTHYKQHAAKHAQGTQRRGQRHPTGPRKGKSSAPAQTRVNNLGPPQCPLQHTNGGDQGISHNA

SEQ ID NO: 1000280 - protein, 147 aa, Homo sapiens
MAFNISRGPAAKRELRIIQSSETERESRIREDNRSCPAPDTWPHLTKESGCNASIDRSASTGTRQAHLPARDAPNHKAYRHEPKTVGTDRRFGATDTLTGNDGIGTADTRNSIAVTFTRARRPEPLTTEPFEGGAVTMPGARVGEFS

SEQ ID NO: 1000281 - protein, 90 aa, Homo sapiens
MCPDGDWVVKGNRVQTRNRPGLQRRGTRDFGLHQMPGSPLRRPYSQRVPIGDVQADSRQRMAEASKAYTNDITMVHDRSSWARRDSFYSL

SEQ ID NO: 1000282 - protein, 206 aa, Homo sapiens
ERGASRQWSHLRGSRRQLEGATAPRPIMAEELVLERCDLERGDQMGETTTLDNQCREKLRGATGAEPMSWHEPVATWRAVNYGGLSVRTGAAPFRWSMTGARRLCQEAEDQGAQDLTSYRRVTDETERVNWNRPPKVGTQGRDLTCLSAGQAAKHARPERSLPCGACMRAADAGRVLPTGDLAQGHSLPVWCWGPTSNCVATCKRP

SEQ ID NO: 1000283 - protein, 103 aa, Homo sapiens
MRRFPGPRNRAHRCTLACVHDRTQRAIRTHDDDDPPMSSRRQQLQPPSTATERTMWMTTIENHDGRGQRRQEGAMSAHPSRAGVRQRIRQKCWTEEMLISDET

SEQ ID NO: 1000284 - protein, 201 aa, Homo sapiens
MSLQLESVPEVAAESVRQPADQHEASFPADRRPRHRTRVSDPVTERSRVVSGPPERRQNSGAGSGPLQSTDRGGRVNGSEYPWLAQGQNMQSAVSLLARSLARCITCAPMPVCSGSSVRVQHRGAEYMRWSAKRGSQVQRVTNFHTITRVGQAVVERAMGPGNDCGSDVKKGDRKGPKHVYTKKGEPEGRDAGSVRSMGEG

SEQ ID NO: 1000285 - protein, 134 aa, Homo sapiens
MDVVSVLQLEGPDGSMRHLQCENLTLNPDYSDTELVTRWLYIQHSCGCPPKCHDPGANSEEELAYDRMPTHGGRGRQGPLPDYAPDAKTELKHASCRRDLAHLLTSNKDCGSIILLLDGGAGLLGETQWVKRLV

SEQ ID NO: 1000286 - protein, 74 aa, Homo sapiens
SGWLGATLVEGRVCRERELLSSTVPELAAGCVLQLETSMDRSFHVLSGGRHGAWRSWGIREECGVYGMHKTQRE

SEQ ID NO: 1000287 - protein, 87 aa, Homo sapiens
MYNALNELEHDGTLERAQGTGACQPNNRHFCQLPLQIEEAQEGDFLVLQTGFCPAGYTHFNGNPPTKSMVNIELQVEHCLHRYPRMV

SEQ ID NO: 1000288 - protein, 42 aa, Homo sapiens
MWKDEYRDYIRDNDGGVKKRRWGAWSKGVEMYITIRDVVKVE

SEQ ID NO: 1000289 - protein, 89 aa, Homo sapiens
SGWRVVRRSLWPELRLRAGAPADVSRWLELGELKHMVMSFRVSELRVLLGFAGRNKSGGSTDAPGQWLCTLLKSSCAPSVQMKIKELYQ

SEQ ID NO: 1000290 - protein, 262 aa, Homo sapiens
MLWPGMPGDAAPVLNSALLLCVHATCDVASAHARRSVACVWVMWCVDVRCCVEGPALCHVAPGAARRVPVSCCSHALLLEPMPGGLCQCLLCRNVWVPWLCICPWAADMTSLPLGVKSRTDSCLLGNAGWGDGLCVPCPRAADRWALAGTGIGGAGLRDVGAKPKMLSPVLRSCALSAVGRGASVGHGVSQCNAQWLPDVYDAAHWAAPFRSGPVARCRAEVGLLWRLRPTEEAVLPARGRFSSCGEAHQWNVAARFVFAAE

SEQ ID NO: 1000291 - protein, 107 aa, Homo sapiens
AEGAIRRETASHKKPPDPETLREICFLLKVPVPPVHCAVSLILSPKFSWQGIDRGDIYDWGGRGSGRFSIPKLQVQDVIGQCVAKIAPTCMLEGCAPGFEPMDCAQS

SEQ ID NO: 1000292 - protein, 102 aa, Homo sapiens
MMWAAAVSLSSMSRRLCNPAVLTSAQCVPIRGMAVAAFQACTPTWEWCTWGLAGLPECCPGGRNGRSDDDGLVRGSCDNKAGVENELGGPRRDKAPWEKEVP

SEQ ID NO: 1000293 - protein, 74 aa, Homo sapiens
RSGLDVIAGNERVAAADLVTVRLYPDCLLLQGLHDYLTVYYVRPLQLWPFLHMKRSRSERLSLENRHDFKVMSH

SEQ ID NO: 1000294 - protein, 87 aa, Homo sapiens
ERGSSLETLKADRLTLTRIRGLRASEADGHGVGAELLYNKSEYLETVARVRGYGILLFPSLRCRLRPGRRSQPGPIARHNRMIPVGH

SEQ ID NO: 1000295 - protein, 119 aa, Homo sapiens
RRYPRSSSRADRALPPLCPVNVPALVAVPSFQRAKAESLKFSVVNKAQRESVGKPRSGGPKPGGRPNTNQPVTCQFPPRTGDAERPANGTHNSNTHRTPEHHERGTRQTQNTAPGTKRE

SEQ ID NO: 1000296 - protein, 326 aa, Homo sapiens
MVAVWAPCCAGLPLLPAVLVLPCLPLCLPQTIPAPARIVVNDVSQDCVPRLGPGAERLRTPGRRWSRCCLPHSGMDQCVTDGGASLEKVLEQSSSRLLGQTCAKRRDLRGSRHSKLTPDVILTGHGRNPLQEGQSWPTAHACTLYPRGEQHYTNYMRLSEPTRGGPLVTRHEHVTPLGIYPLRCSQNNNTFGGRLRRKPSTRRSKESQFCKPRTHDGCYLHVAVFGGAATPMAPQHFWQASHRRRTFVPTPIDDVTRAKGQALLGGKTQARFHFAPTRFYCGEPDALLWRFPVMFATQTSHGARSIWTQQRDVNVTAAWWFRVVVT

SEQ ID NO: 1000297 - protein, 99 aa, Homo sapiens
  misc_feature (24)..(24): Xaa can be any naturally occurring amino acid
MVRGTKRDDLSLLIRTESGVDSPXPSVEAIEGRLAAMMKCNGPHDSPLCRHCGLGLSRPNGNPGCGGLGLRRRGEDPNPLRDIRRLVVEQDSPADMKEE

SEQ ID NO: 1000298 - protein, 265 aa, Homo sapiens
AVLLDDDWLNARLAKEGGRHVKIVVSFQEEMTWKEDSENATISYLIGCIGSSVARRSGMCSNGVVGGLCNRIHHSMSTQLSQTRAEFRQLVLDYVLSEKINAHETRSETRGGCIAMVGVLMVRHDEHRVNLQVELVQEEGYVNSHRRDSGKLLAWDAHWSYTLNLPPKAPDHWPEGLDRCTRKFAGQLGKTNPDTEEIQFIIVLGTHTKVVYLHEEINNHAFTTCVPRPRAVVRGRLLNRVWRFSGQKGGTVREGFGMQETGGHL

SEQ ID NO: 1000299 - protein, 76 aa, Homo sapiens
MPAFFVTSVLLLLSLCSSLRPFFCHAIPYLLSVCSAESIPSVCCQSSHSCGSTPSIFQAICPNINAETKPLSPSKR

SEQ ID NO: 1000300 - protein, 119 aa, Homo sapiens
AGKACRELGALWRHPACGVVWRGKGTRGMPVLKRRKEPLILANRRSGAVGAGRMGEADLHHGDVGDDRLAGQQNEFRVRCVQNKRSMELPSYCAARAQEAQKDEINTGNPGRVWECTSK

SEQ ID NO: 1000301 - protein, 75 aa, Homo sapiens
AGEALHPESVWSVFANSPDSSLLRCSNTEGRHRKVDNDSNTQFETLSLWSAIPILWTFEKSNSLNMAGVVLDSSP

SEQ ID NO: 1000302 - protein, 208 aa, Homo sapiens
SGRALRGRPGGRACCLPRCPVRRGRRAGARGDPDSPGCCAAAALVSRGPQGYVIVELRSLGPTTKRWTEELEAASTLRDGNSPEAARRNPRESQLRGPRETRVYPRNIPCTPNTKGGREKTGQNKLTEEHTGREGETKPRAHGGDPRGPGSDPPKTTQRQQRKKVNNDNNNTRGRAKRGARNHENNRRQQTTEKPNARRDTNKQQMKH

SEQ ID NO: 1000303 - protein, 264 aa, Homo sapiens
SGWVDGFFFFTVCVCTGEYSFICAQFEREYYKFSQHNPPFEAPNEPAPPYRAPIDDGPPAPTDAPRASKPRDEQQPTGTRRNQPQERQYDHSRRHTQPQPHQEKHPHEQHPGQTQPHWQSRAADRATLRHHTTHETRNDRSSRRSEDAHQGSPRDEATSTRPTQAGAPDQHGRRASVRPQRRQPHTHKQTPTDSTRNTAHPHRPRTTHTDRQHDQQKLSGHNPAGTRKPTKPSNTDNTYSPRTATKPGLKTKKQHSHARADSPH

SEQ ID NO: 1000304 - protein, 187 aa, Homo sapiens
RSAGARREGLEGGDWTCGEFPPKRQKPPPHLELRSGKRLTACAAAGAHLAQHARPGTDAGKIPFCDAKEEIRAGLESSEGGGGPAEARSRCGAAGQEHRLEDCRPDELAPLVGPVYSLVLTPHKPRPITLTLGLLLHSSWHALGVTVVPIDCGATRSYRATADSEDIPGCQTTPWITRMSILRVVQD

SEQ ID NO: 1000305 - protein, 203 aa, Homo sapiens
RVQRAQKIAQRLSAPLLRELTPRSPRPPLAPDARTSWPCLCLEWQAVSLDVNVRGRTEQDPGRQELQRSITEMKRLEEMSNMSQSSGVQLTTLQNQKPKQKGHEDDSQGKEQRTGTRCCDYRNSLSSCGETPKDRHPAITRYRVHRNLNNRCETSAVLQRSAWTQSIEQKWDALVNQAGGDERHCGKRHRGTFTWVNPSPLSQ

SEQ ID NO: 1000306 - protein, 196 aa, Homo sapiens
SGGAKENAASLRRRVERLEDTTVIHVESQVPGSPGPNPYPPNIRVPVEVPNPGTSQTVYESHTCHDELRVSVVVTRSAASGEDILALQSELSSMLCVRLAAVALDCRNLVPEIAETQITRQVDLQTFKGTHVVDMELNVVYIASFGALRCNQRGGYPLGNAPGRNLPINWTYRYPILARNVEHPTIRGFHQGCQQW

SEQ ID NO: 1000307 - protein, 234 aa, Homo sapiens
RGFRCQVEGRKEGAGEWASDSSRAEVGLGSQRELERNLLGQRQADCSWLQLIAGTGSSLPYQWTSAKTRLPVHLHCGPTVPRHAAAVIMANIFGRLLKSLIGKKEMRMLMVGLDADGKEHHPIQAETGGRIDNKIRLTYEVQMMENRWSTEETSDLTVWDVEWQENDSNDIWRPASTQEHTKGVEYEIGRPRNRIGGRRRYTMTSTGDRSRACRQCISGRDRSLRGMQCNDPSA

SEQ ID NO: 1000308 - protein, 104 aa, Homo sapiens
MYHSWTSEARLVNAIRSTWSSTPPYVYLSMVSAGGPKRWLGGRARVPGARAVGGPGVWPPAGSPASLRPSGRMEAARRFPRTSLAQESRGQLGSSRLYPENAPS

SEQ ID NO: 1000309 - protein, 131 aa, Homo sapiens
MESCQAREKLLWTAAGSGHYSRRGHCLGDIIPTGAMAVSASPIRVHNKRVPSQECKTELPCKLIARYTACRRAAFGNGMTIRVLRAGQERSNVTGEAQHYSSQVTRSVSQQIEGVLHSTYMRFYRRIRAAR

SEQ ID NO: 1000310 - protein, 152 aa, Homo sapiens
MACVLRFPLRFGWELGARDRPSGRGLGDRVPLAGLSGILLPFLAPCSIETASSHVAVGIQSGASTGCLGAEEGRSHGLPSVARSRVCRCHACSFAMPRDPEDAVLTGEVLPQAPWLFLGQQANPDCEASSRCPLTPGGRLTCYSSGTSTQGR

SEQ ID NO: 1000311 - protein, 161 aa, Homo sapiens
AGWARVDVSMGHSSFISRRHLEIFTPPGGGGHGGAAPELPSAQPRPDAGGDFYLRCCGKNGVYVDGVFQRRGAPPLQLPRVCTLHGSRSTKHQRYTFTALSSEKREKQEASDVSSARDSTDHTIIDHLNPLNTSQHTHTDHNHTPHEPNHTPRNKPETTHS

SEQ ID NO: 1000312 - protein, 244 aa, Homo sapiens
MRRLNRKQNFNVLGKTTSRLPYPNALPDDATVDDLSAKWTATALHLNKHFTTPYWRLTYTKKFGHIIKLLLHRTPHCDLTRYSTLSRKDTTTPRTITPYAPPLYTNLYTYLPEPNFTPLGSGTTEDHDGTTLTCSADSQSNSSLPAPPIPHHDKNDKWRNLNHISLAPDHPGATSHPIQPLPKRTARTQDLTTTLCHFPYTSRKHPKHTRPAAKTKRQRGRHKANGAKWPIRANARFGNLFPNG

SEQ ID NO: 1000313 - protein, 268 aa, Homo sapiens
SGVGVLRRCRVDAVADAMQLTVKCAAVAWRVQPAGARVTELVSTAESSCVSMKAELSHVRQHAVLLFNGQGPWQTGKLTLGLYASGPSPSSTYVVTTPWTKCATRRQCECPRVLGRRPAITPTESWQDLILQQVLAPPTSVAGMTCTRQVGPRQPSLHGVGINRRWIPLRFDLTRWDLTIPTRFGPRPGYPLQHSPAKGGTLDAPTLVTAKEGLFPHHTHTTTFPSGKSPLIAQPCWHPEPTPQRAISHDYATLELAPPYNPDWLPLR

SEQ ID NO: 1000314 - protein, 106 aa, Homo sapiens
MRATTSTSYKRRYVETPRVHISSVRDGYSTISAQSNSSYSRAGVIPRCSVRRSLLLQTLDSSMPHVWTKLAREPRVPAHPATTSQSIRHAMRRRQLHAPHLNRIRP

SEQ ID NO: 1000315 - protein, 70 aa, Homo sapiens
SGTPGRSRKQPVSRLQAVVAAAETAGPEVRALLRVQKTGAFEDDERLYRMSQSHTSDSASIEIDVQGVRH

SEQ ID NO: 1000316 - protein, 230 aa, Homo sapiens
MSPAAASLLVPGACASGAEPAAQSQDSLSMRWAAPCGRKEDGAAGLGAWCWMPSEHPLLREAGPWETESSWLSYTRHLDAADPVSLTAPEQRTRKRAGLHTRAKRDAKKNACKAKSPLIDQLASNADGTRSRRISKGTVVHTSTRVRSRQGRWTSSVSFTALDPIKAHLKQRGLPLGWDLNIYLDVPGHKNVALPWPCKTGCPEYGGDPYCSHTTLSIVQLTSAQLAHIM

SEQ ID NO: 1000317 - protein, 209 aa, Homo sapiens
RAALDPGRESQRSYTRGRATRSRQAGEVFPCAACAVLQATGSVCTKQRTEPAPADRRRQRLPQSRVYPRALKEVHRSLHRGPRRTVQWPSRKNAKSSGNRSSKRHPAAVSDRVSVQGGSPRGPDRDQAWRTHNNGRKGGLSGTSFFTVVYGDFIAGRWTSVVCNVWFDLVDYEEVLDQSKKDFRYNLSEVLQGKLGIYDADGDGDLDVE

SEQ ID NO: 1000318 - protein, 177 aa, Homo sapiens
MIPRNLVGHRSHGGPWPADNREQERDCERIAHRTTGGSRTFIPNQIQPYVSGIISAHNEWPPIALFGTVGKAFPCWDIVHLSKEAVDFHWRNLLVSWTTDCWTNRQRPIRTRVGVVGVARPHNLPVNRKAVGKGRMHSMGSPLVTYTPYVPGTRTAVGTTNEWNANPVGVSPRRTVH

SEQ ID NO: 1000319 - protein, 138 aa, Homo sapiens
MDLYDVDGVASTRNPCFPGAGYLPRTMAPKGKVAREEKKQIFEAEQRDSEVSTCGSYWWANAIYCLVTKVLLLLICHHFGPGWSWALVTGSVWGQLPLYRARWHEQQYSEDGDLMAWWPWNLNMEHGIGTNTLTDVES

SEQ ID NO: 1000320 - protein, 143 aa, Homo sapiens
MVRTHVACSQDGSRDRSERRFGPRAFARAEAGRSLKEGQDDGSVEPRCRFVVAGPFGEPEALLAPPFGYCSDASVCAFYMFLYECMRLRGSSCACIRRFADLKRKTIVPCPPEKEKPGGLMHRARRPQRTGNRARKVRPTYKR

SEQ ID NO: 1000321 - protein, 146 aa, Homo sapiens
RNGDRAWCCCMAEGCGKKGWSSAALLREDVTSHRTLAPVPLMDLHRDTLFAAVLLAGSQQFIYLGVLVSIFVISIMENSIYWRNSQPLNEPTHCQVPREFVFHSHAMFPSLLNRTHYYPRTTYEITIETHFAKSQRPNYVQENKLE

SEQ ID NO: 1000322 - protein, 227 aa, Homo sapiens
MGVWNNSLAWPRESDKPWASGWFQAWCISQYLNFPWKFGYTSEGGTAFLPVDDKQLLLLAIFTYPGAYLTSPDSDIHVLSIVVFGPVKLTTHLTQDSQNAVVQPGAPITQVWISAPPYTLRNLDPSVGLRLFLTGHVPSSHVGGTFLLNFRFLEIYPNLKRLLAPSSFFVSHIWPRTHHLFRRLILTKRHILYTPLPPATTPSTLILLPHNPPTHHTSPQPSPHPTR

SEQ ID NO: 1000323 - protein, 720 aa, Homo sapiens
FGSRPGESRRRRELGERAQGADDSPADRPPAPRARLAVARSRRVPCPSQARRQRAPRQGSACSEGEQTGYGAINNPYQQGHRHASDGSTEEGQRPTRNMGIGPQRENQIHAGIGTQGKEITGKHKAGWHGAAGNAEEQPQPRQGTKEQTNRRREEHLKRPHQKQTGEHKRKDGNSKQGTTRARTRANTQTQTTTTQEEKQNEQGARTHQKRRNREDRKRNRKERDHKAKRRRRKKRERETKRKRKAARGRSRPEDRESTERRATQRRNNERKGARARRRRAGQRQATREDEKSADTPGAGHKAHQRAAKNNTTSPGNRARRTAANKATRNHGPGRTRHEAHRAGRQEERKRTNSGAQRQAKERKRPDKRTRRKHKDDEEKQQRQRHGSKRRKTGKRKTQEEEKATDRAKNKQEQNEKEKGKKTREKQGGERERRTDSDRPRRRKTQETNAKQKRSGKRKTERGRRKEGEEETTETHKKQKNKREADTRTGRERGRQGSDREQNRPQKKDKRRSKDQQRKQKQGKEGKERNEKSEGEERRDEEGKRRNKKKRKQKRGQGEEAEEREKRKRETDKEKRTTEEQRANKGRDKEREGEKENERNRGEKRRGEREKGEQEREQKEREPGRRQRRTKRAQSRQNKKREEQGHTRTEERTDKEQRQRKAKRQRKRDRHEGQREAEQRATRRRHDERQRTKEKRGERRQTRAAEDSKREGDKKGRAAE

SEQ ID NO: 1000324 - protein, 104 aa, Homo sapiens
MTPQIADCRRHVYHAESALPGPRCTTAGATGKTYRFCSQRNQTHRSSLHYKTTTDLRISIENSEEALTDPCPFTTEGAPVLTRYFTRNQRDIYTVTGSTGTRHD

SEQ ID NO: 1000325 - protein, 263 aa, Homo sapiens
MNTHTNQHAQTAAHTKTATQNAHTTDTNDHDNAPRTSRTEMSRRERATTRRSDTRRRQRTQNGGERARRSSPPTPGARRGGRPTRTAPSRRGAAETRTPQGQPPRAREQHHNTEPRAAGHQHGRASTERNTERTQQKSRRRTRETSATRWSTLCVESEGIIGLCALSVRVVNATFAFMSAMSGPVSLQMAALCVPMALNPRARTVNSQRALYQTEKGGCTSGDRLGDLSALVCSGVSCHQDHKPPLSRIDNENNKPYLHRPSI

SEQ ID NO: 1000326 - protein, 101 aa, Homo sapiens
MVPLLLTEQHADMAFSRTFEVGGWYTFWTCWNVQFTNRVWQPLVACSSCLDVSGKTALTLKLYCHLGGFTVNPLGPDRLHSPWSMGHQVNRLPHFNTPNHV

SEQ ID NO: 1000327 - protein, 66 aa, Homo sapiens
AEHLEGMRRRQRGVLLLSMKPQQAPVSGKVFILARLASHVCTRCQFHDQMFPGGAARTGLIWQQFE

SEQ ID NO: 1000328 - protein, 147 aa, Homo sapiens
MFARTFELAPSWREPLRLTTNSSMNPHYHGTLIHTQDDPDINKRRGEDSYNNGTNNSNLYTRHVSKPHSERARPTGIANRGQSWATKVKPKTDPGLRQKRGQEPAATQTKHAMFDNLRDDTPTTSTTRSACQQPASTQTVHKMSQSE

SEQ ID NO: 1000329 - protein, 173 aa, Homo sapiens
MAASKVKQDMPPPGGYGPIDYKRNLPRRGLSGYSMLAIGIGTLIYGHWSIMKWNRERRRLQIEDFEARIALLPLLQAETDRRTLQMLRENLGRRRPYSQRSVPRCEKCGRSRVLPQNPVCAPQFDRRMLYGRGTTEEALHASNGFMWYTEALCPPATWIPDPPHWDGINALQT

SEQ ID NO: 1000330 - protein, 132 aa, Homo sapiens
MKPQQSAGVRKGVSFSETTVSGTRCQFQTKFLAELENRDGYGNQFESIQFRTRKTNRLCRSREARRPVISRKVCLGSGRNSIVPSSVCMETHYEKVLKKSPMYIQEQTDEDLCSTKGSSVTDPYVSDGLRVS

SEQ ID NO: 1000331 - protein, 399 aa, Homo sapiens
RGDEQPGAQAAGSGRAPDKSYSCEPCGPRARAMTSPCWSLAALAVAHGRAYGPTEHRWHARAPAGLRDTLPLNATFTCETRVAQSPHGMRRQLRVHEMSRPVNGANNDSRGGFNPARAIPRGDASHAGSITVTVSTREPTRNAPADVLPLLTCARFLHSSTDKRGTHLAERKHKLCERPRVHTPWDIRRTQHAWLLRHGHGQRSHKGSYEKEPRVPRQWERFMKRNGLRTHGKFGRLLPEVKALESEDTKATLETQPRRTMGQTFHSYKAAPKRHLDYLTRRTRGPIGSRHTWTLGPTELDVMPTSATPTHLRDYATEHSRKPNKQQPPYHNPQTQPSNSGDKTPTEPASKPNRHDHNHRTHTHPTDRTQTCAPRTSNPMAKKQIKHTATNTGTTGDIR

SEQ ID NO: 1000332 - protein, 500 aa, Homo sapiens
MAVEIARYRGGKLKKEPEETDRTAGARHALTVRYWVFEPHNNGAASELKWYEIALQGEIGTVQTEFAQNLTHWDGLATSSKTEIVDAQSIYAYSQDTVPNPRVRRSRTEKREQLRGVPSLDGKHCAQRYRWNCVKHANPLERYIHEVSLQRGTSRWVARPATDLGIMGRQRLNHAVGKHLATLHHIADVGNPHPIGIHAKSRPIADHALFPQRSENTERATANVVRTVPCVCKRPIYAPDHVHRAPRATSRERTLFTLRRDTKCAELVHYPAMFAKLVSTGAPDFEQMQPAAAFKFVSEQACSRVNTSVDPARLNVDIPGPTSGKDSLWNQRHPVATVMPTPQYSQAAYTNALEVAMPAEKRDSPSKARCLLERIHKHTVLRTAAVGHDAKDLLAAPSEYLITRTDRNYTTNNLTTRQKHRATQQLLSHTNTFGPRMYDNPPLNLSYKRVKTTHYLTDSYSHSDDSLFIGHYNPTPLRLSNILPTENPTHTHTLTPNTPP

SEQ ID NO: 1000333 - protein, 416 aa, Homo sapiens
MASNHVVSASPSTLARLDVQHWQVPAGSSTAWNTDIQPDGHDAKGAKSTGGGDDSVQTALLHDDDRGLARCNVPRGHAVADTTWETHDGPFELTPFSHYGDRSRPGLLCRPVEAILTHSVQSSKQLAAQFNLNDARRGYLTNNVGRTVGIQLDPPLFGTLTLTANALGPNQIGTGSSPRGTIYEGLLSQRDVVWVRAAHIVITLRVTHTLRLGSPFGTTDTPFAISQSHLLPTGKSIPQSLIGRAYTCPTVIKPPPVEDAAQQEAPPTHAQLQRGSRHAPPLSKRPAANCTHASTKELKQTTNPLGTEHLRLDTMARPHSNKESEGTHNRNRARKNLTRKHGPKDQQRRQTSHSRRHNIRTRPGSQNRPNEQLKQHPPQYEREVNPNAVAPNQRERLTTPTYTRRHTPPRTATAQT

SEQ ID NO: 1000334 - protein, 314 aa, Homo sapiens
AVVHPSARLWCSGGGFLFRAASSLPFYTSPADPGDRPPWLILTAADRTLGNQRMHLGLRCYACPAMPDASSTEILTMTYCASTWIPKEAVPTQTPTTLSSARQSHGHRTVDVAQDSHGETYESYSRLAFESGHRKRDKGLMHTHIQVRSEHPWTCTSVASPDILHQMCALNTLNSAHGNVPLGYNSRTNTAHIGSSHMSSYSHTHAPYETMKRRHHHLIAASAMAVKPLADHLNLSQSPHGKATPTVVNTTWQPSSHPHTERLRAKKGNRGTRLPFDHLSPPHISLTGLTATRALPVTATSHIFNPQKTRQIHR

SEQ ID NO: 1000335 - protein, 154 aa, Homo sapiens
MNSLLASTTEYSSVAQAGAAVAAISAYSATSDSQVQGDTPCLKAPEYAWALTGTPDNTPTHNTTTNHAQRAAVTPPLATIATKLPDLHDPPSTKTPPQERGNLNRTRKPNATQASRETLTNDGSTRKPSTNSIRHRNSGPAEYNQSTKTPNEHT

SEQ ID NO: 1000336 - protein, 74 aa, Homo sapiens
MCSCLGKILRRPPVVWGGQHWEELSLRCLHQTGTHLGTPPPSSSNVSNKVHSPDPSDDGADTPLDTAGMKREDR

SEQ ID NO: 1000337 - protein, 251 aa, Homo sapiens
AEPPDLQPPDLAAARTRPTARMSQLRLLPSRLGVQACEASMAMTHDRTRLFGMASSRSSEAHRTPSQAAKVEGGSRLHWSEMYFAWLRQHPLELIRHKLRGDTALSQREQPSRRDSPLLPGLCHQARRNPHIMVVPMTAARDASHGRPKLGNTQGSRGQNTYGKAREPNPGALVDERTRALAGAPYTSNPAALHPTDAHPQDAGENPPPWGDKFFMGKLATKTLGHQLRIVGLAPVTGTVWKSTPKPQVRD

SEQ ID NO: 1000338 - protein, 165 aa, Homo sapiens
  misc_feature (5)..(5): Xaa can be any naturally occurring amino acid
  misc_feature (50)..(50): Xaa can be any naturally occurring amino acid
MGVRXGHFVGKAIGRLGKEKEAPKYHFEVPIAHMVATYYRCDTEHLMRPXHRMRKDEALANIVSDVCTENPKSPFVRTGNWLFSCYYLIPSWGSLGGKSEIPFVGSSVLQSYITMAVALGAHSCRAFGLARRPNRPMIDLVNTESQPQGTETSKSFPLSFHRVTL

SEQ ID NO: 1000339 - protein, 411 aa, Homo sapiens
SWGERGGGEQVCCWAAPVTCWGRGLGGSAWGREWRKVPGHGARQPRCSRSKSPALGQPPAAAVAATICCCFCARSPPSVSLAGGSPVRWPSAPGSVPMVARTTAGRLKPFYLVTLRHTAWWRTRSHSSLSTLSTREHASRRALALLAGPRICNPLASFAKNYGNRLINAIAYQQRAKSPQWEAAMGSRGGFPTGKAGQDWWPKHPQATPKRNVDPLSRIDLDTMAAIPEEVQAHRLGALNGACRSLYATADEHIVTKMVEQDSHHGWALRDEAQRRDMAQYTTETRIPWPPRTAPKRRTPSRESETTDTGRGKKNRASQTRTTNANHTAQPANTEQEERPSRPTLDRPENHDEQRRQGWLIEKAEGISQGWAATKTRRAGGTGRRERPQHSDNTAATAATYSQEGSVTHTR

SEQ ID NO: 1000340 - protein, 58 aa, Homo sapiens
  misc_feature (10)..(10): Xaa can be any naturally occurring amino acid
  misc_feature (43)..(43): Xaa can be any naturally occurring amino acid
  misc_feature (56)..(56): Xaa can be any naturally occurring amino acid
RAQSGLVVRXGGAEFFARQNCGSSLRAAGSGSVRSARQWPKDXPALGEQNTSARTXSR

SEQ ID NO: 1000341 - protein, 355 aa, Homo sapiens
AGLCRPVQGGLPYSLQYALKASGPLKFTIEGSAVTQCVPALGRHGEIEIREDRGWLPGGHVLAEAFPPLSTNLCSTWFRRRPTTVSRPPSILRSIRMLVGFFVRCPGSSQMLSVEAANRRMPGRTCALELGSQDESGEPCEEQDDGVADRRAVGLGFPGTLRGAVFVDAVQLWLCVGLGLGYCAECHGQSPGRIALSLHTIAEALSLVPPILYYFISCLGSTLERCGLRVRFVRSLRLNMRLQTLGFIAIPCPLLGPKVSRRSGLTRFIGPAGQPGPSVALGKFSLPLLARGCADLEYPLAEEQTWRVFWTFSARAGEAELIFEAMGGLGPLVVEHGKVLAGRGTPVGTLESGKG

SEQ ID NO: 1000342 - protein, 268 aa, Homo sapiens
MSLAGGRAPRKTAGNRLSGLLEAEEEDEFYQTTYGGFTEESGDDEYQGDQSDTEDEVDSDFGPLDCTGIDPIPVSVAERKKDAKDRNTRRCSHQGPITEPLNELKASKGQHPGWLALRRRDEEQQAPTATYELQRLTALTARKSMRHVYQLTHTPTNVPSGTGDGTAHVNDGDNGAPLEPATNPRTERAPGRPQITHRRSTFTGQLEDHLTRLARLLPHEARVLQTREAAPGPTIPYSSRDHRPPPRHPRPGRERALNAPPPPPPGRS

SEQ ID NO: 1000343 - protein, 286 aa, Homo sapiens
SGGGAAGGGGVCRWAECLRWTRAWYAPAPTTGCVYADLPEYLVPWLDCAGRTGVVCRKWHGRCQWDRVPDGGMRRSTDVLPGGHASVTRHPVVTVLGTKDFHRADMTTVPCVEVQTSAGIGSRTGPCILKSSPDSGGYHVQQSMLTLDKRVLNDLWRHTTLDLSQRVCNYALDYDEITYNLRGKESKFLTEFQIRASESANLAVGLCEEVLPLAADSEIPCIHGEKELLVYHSTYDFTFSACLVSSELREQWPEWTVFGLFGSPDELGITLVGYLAPESGRIIYRL

SEQ ID NO: 1000344 - protein, 119 aa, Homo sapiens
AELATLRGRNAAVWNGQVPAAGVPRQPVSGMSNPSAPPPYEDRNPCTQASALGAMGSICLQEVSATGYPQPGYGHPAGYPQPCSPTTRCPERTDQAWTMTRDEREESDRPGPAQWHEQD

SEQ ID NO: 1000345 - protein, 125 aa, Homo sapiens
SGLSPHINGHCPPRQHLLLWAAPRTGAHDGEVRTVEKRETGARGQGAQERPIQTAMLKAKGDQRPGIQGESSASPVSLGLILSSIKMRNRGLQEHGGSHVESPLCVEPRRVPFLWAAILGVAPPV

SEQ ID NO: 1000346 - protein, 99 aa, Homo sapiens
MERSHSLRRITIFRNQCTTTALHTRGTYRIHIRTLRDSSRPENAQRMRPHIKTMYEHAAHEPLTEAYCLASLTTVERKHIQQSRTWPVRYHAVTKRSNA

SEQ ID NO: 1000347 - protein, 107 aa, Homo sapiens
AGGAGPELECMWRDLELTAGHPLYTGVQADSSASASRVGDSGHGHMPQDLPAGGPSMSTDMGCLFMRCRPMTLTLEWLGLRSLLCEEELYGVNAELSQLQIYRDALS

SEQ ID NO: 1000348 - protein, 78 aa, Homo sapiens
SGPIMVDPDLRYPSVLDRGLLQLSVNVDALRHLLSTVQNESYSCNIPVDCQSAVLCVYHCEVVVAESTHASNDEIPAP

SEQ ID NO: 1000349 - protein, 385 aa, Homo sapiens
MAVQAAEGVSQRRPPCTRPRSISGVFSRFLVPARGTRRRKQANHPIANDFMGRRTIASGDIATTADGRQIETGINRLRDAGSRHAETMRAFDPAEQSHGAKVAVEGDGQSVRQSTHRKQRAVPGHIHAEAAHHSPNDQCRQTFHHIKTPQRIDYTQGSTGPEARSILRRWQQDEGNTARIMEKGSQCRRNPESPRSARRRARAAGNRRPSGHYRVGSRRQCATLMVPRKRHWHCGGTPGHNEWVAQTIKGPMESKLPKKTPEGHIGGKETLSPGRTGQRTVRTPKKNARKRGSHSTEGETPMSNRQGGTSTTVGTPDHPEGTRRGHTITKLRECITPRGRAGAPLKHYSTGRDWHNQINNTEVTKRGGHTMRRYPPPERPTPKRQ

SEQ ID NO: 1000350 - protein, 69 aa, Homo sapiens
AGGCHRAACPTSPVTGGCMKTPGVLGGEGSGAMQVAEPGACGALAAVLRSCGPILIDCRYMSEVIANDS

SEQ ID NO: 1000351 - protein, 125 aa, Homo sapiens
MVVNPQAPRGHDTHDKARPVLYMALFLSDVKQGEAAYSDPWDHCRVVASGLCRTYALHSLSMGIFPKELNDQDRRFGSRHRKGIGQSGKCKNRKGGLVDSIVVGYFTGKAKKNGSEWQGGRLTRH

SEQ ID NO: 1000352 - protein, 50 aa, Homo sapiens
  misc_feature (16)..(16): Xaa can be any naturally occurring amino acid
MSRIRRKPFDCRLTLXDTWVCRPMDGSVDAHHRVTRADGCGYPDGGQGEL

SEQ ID NO: 1000353 - protein, 108 aa, Homo sapiens
MAVERNLSLLKQDSSWAAQSRKRVKPSNCVATDEGRLMASRSDRRVHVNECIAVCHEIRICADLSMTDRDVVVESPIQQGTLMRRRSDKNKYVIRDRRGIKKRTLPSK

SEQ ID NO: 1000354 - protein, 236 aa, Homo sapiens
  misc_feature (3)..(3): Xaa can be any naturally occurring amino acid
MRXHDVLTTDLTSPSPHLEEFLRSWMGENSHGTAGSKVPEGVRLTEVVVDIVRASLIVHRDLSTTGRYGETKTTKGGHTSDALVLARDPRHAPAVDVGKYRCLGTVIVVAELRLQEFGNKWMEAGTNWPWPNSPRWVCAVGSRGEFSHCEKSWDAVAALEAHPNADTKVGYRVAPLYPVIARCPVGMDTFMARMLERASLDLGDRDDEREPMAEGLHLAIPWDRLANVDTQISSTK

SEQ ID NO: 1000355 - protein, 105 aa, Homo sapiens
MGESVFVAWNELRWWDLATRSMNDRQHERGRRGEILDDKLSKTDKWSLDETPLESSEFLNNSDSYIDRWLLTPCCVCMLINSCETDLDPVAWVSEFGAYAVRQVH

SEQ ID NO: 1000356 - protein, 154 aa, Homo sapiens
MTDRLMALCRSVHSTSPVPESIPAGEHVVVSGGPVVALVRQPAHLRACEVMDNCELTLIPNSCVPTSEDSLVMHADGHAGILRSITSCRGDRDTSWHPWFQEAHWIPDDGDTLRDPGSHYCPPLGLEARYEDLVQGLEQDGPRRRSGKLPLQEK

SEQ ID NO: 1000357 - protein, 77 aa, Homo sapiens
MSVLSITRMFQVEMAVGRSPDARGSIRTSGLRRVSRIIKVHWAHLRPNRKHRGGPQRQDGYRLWGSEMALRNGTEGL

SEQ ID NO: 1000358 - protein, 113 aa, Homo sapiens
SGAAAVAVADRGGGGGSPRWRQLATSEMAETVADSRRLITKPQILNDAYGPPSNFSRDRCEQPAIRVVGSCRGRFTTYEISVLDRYLPIFNADKKIYVLDRQTTVSFELAAEV

SEQ ID NO: 1000359 - protein, 111 aa, Homo sapiens
MCTDIKSQENYTDPQQKEATTYTPHESTRHEISHSNPKQIIAKHPHRQGGLTGKTKQTHHDRHDHQPRKQNEARHQNTTRENTRTITDQDTSQITQTNSQTNQYLTPHEIK

SEQ ID NO: 1000360 - protein, 254 aa, Homo sapiens
MGKVKVGVNGFGRIGRLVTEGWFSNSGNTWILLPSNDAFIDLNLHGLHVPISFHAMANSMAASKAENGKLVITGNPITIFQELRSLQNQSGAMLAAEYVVRVHPGRLYILPMEEGWVLICMGGAKRVIISAPFCCDAPMYVMVVGTYEKYDDSLEIIINASCTSNCLAPLAKVIPVTSFGVVEGVLITVHAITDSPEELWMALRETVCSDGRGALQNIIPVSTVCCRAVGQVIPELNGKLTGMASVSQLRRVSG

SEQ ID NO: 1000361 - protein, 85 aa, Homo sapiens
RAFSPPSSPSSRLPAGTFSRCRWDPVVIDHARCTMSPLRKGGDWRCKTDPQSIGQIWNLTGTTWYMSEIARMLGNTLAVTLRDVL

SEQ ID NO: 1000362 - protein, 138 aa, Homo sapiens
  misc_feature (27)..(27): Xaa can be any naturally occurring amino acid
MTIVFTLFSFRGGVLAYVFVPGLHTEXGGYVGDFQRRELGPEGLSPGLVPWFGEHALCALVPCRPIASLFDWAACCRIAGTVLGILNSPIRPRDAFRALVLLKGSLTLNFCRGPMRGYMENSSVARLFALSHPCVHKH

SEQ ID NO: 1000363 - protein, 35 aa, Homo sapiens
MDASIAKASSRRGRVRSVANGVLESFASITLCMGS

SEQ ID NO: 1000364 - protein, 239 aa, Homo sapiens
AGRLVSPVRMSTTRVLLHLTRCPLLLCAAVPVLLCAAVAALSARPLRRWVGVQAGGAPGAGALMARPNSMVVEHPEFLKARERMPGLQIWRVEKLDSGARAHQPLLETSSPGDAYVILNHSAAEGTGNLQYDLHYWAGQMSAGTDEKRGHGRHLYRASWIDYLERPGATCSNLLKVQGLSKSGPTILQAYFQGPGPDSYNDRDGVPIQDFKPPWLPNTTLACVPQDSFPRGQNVGRHRS

SEQ ID NO: 1000365 - protein, 149 aa, Homo sapiens
RIETLSGFAYARLRRSELSRVLPCEVCECVGSIREPSRRQLVSRSTSGISDSNPYPGPSVEPAELNESCVPRIYRTIAEEGLARSVLCAVGAVDARRDCAARSGHRDMMKHFDRRRRLNAGSAQIVYLRNAFGPCKSRIGIPSEWTGNR

SEQ ID NO: 1000366 - protein, 131 aa, Homo sapiens
  misc_feature (124)..(124): Xaa can be any naturally occurring amino acid
MLTPREFQNLLLERLGILRGGTCVSQNHLMEIPTRWEAIAGQNWKMSGNPGTGRQDAMVFKKDQFRGWQRPFLSRNRPIFGAPKILVVPLFPQTGATVGFDIRVNVGSPLHKRGFALGGTGEPXLDLWGPP

SEQ ID NO: 1000367 - protein, 177 aa, Homo sapiens
AGSAARRSTVSARALRDLSNLVPSRLCPSPGDARTPRQPSPPPASLHAIVAALSAASQSVWRASPLRLPGWPRIRSASPEGWPLLRAGVWALLCFSGRASQLADFLIESIDFSQRYSQVDPLTIAMKQKRRLHTFDVHVLVQSYLGHLCRRILLVLIDTCGHRFLVGPQRALLTYTS

SEQ ID NO: 1000368 - protein, 265 aa, Homo sapiens
ERAHCHRPRDWLGLARPRALLLGALLLGRRSPQPPASTGRAPPPWSRLSVGAHCLAAAAEPGSPAAAERARASGPLAFFYLGQPAPRCEGAVLTETRPARRCDELLRLRAERGGGNPPVTMPEVWKRGRSTRQERRRNILTKTTFLLLTNERRTSCVLREEMVTSLAPQRTPNKGGWSHQGHQDRVHRGQNRTLLTIAGNHHEFVSLVKGPWPGLERSPSRRPSTLSFTHVEKAVLRSYTGADCEAHAYFLRATISRPLNDVVNE

SEQ ID NO: 1000369 - protein, 125 aa, Homo sapiens
ERVGGVRSRAGVGGVLGRACAWGRGGARQLTAESARGLPGPPQAASAPNLGPGDIAMHHGSSIDAPGACQPRYRDSAQIHSIGTYSDYLTDTYTDANLKTTAARNRQEGHPIRHVGTTTRLRPKD

SEQ ID NO: 1000370 - protein, 231 aa, Homo sapiens
MEFFPFPVHEDSVGGRVCGKESQKGPRNPSVPYNPPPDTLHTHTGFSETHTKKLPVRGYNSRQTPNYNVSVAEILTLPQTDSLNPINTQFFTTEAPKHKHVYLRTVQPKQKGHFFVVAHLGLPGAVTNHTHRQADDSNNTSSKFSQRGNITMCEAYPIFCTPYIVTLNPGGFAAQPRRGGSWGGTRGEKFSLGPMTHFFQHHTRHTASKHTFSHNELSAPPTHNNHNTTAT

SEQ ID NO: 1000371 - protein, 108 aa, Homo sapiens
MVDTTASFYLDVLDREVRATFRTIGREGDEGPKPYSLALVDPDVTVLDPVYVKRLTEDLGDTFDGCHVRDKKYFLNKWSRNAREDIFSMNSLEQMGQCELDELFVDIS

SEQ ID NO: 1000372 - protein, 102 aa, Homo sapiens
MAAAGYPGCGGAGSWGRSALTDGLGDLRSVAAGEAGERRGREAPQCQYHGMMWPHRVSSLGLMEEYVAEIFVRKLCPHNVQVCLASDDVRRSVSILMASSQC

SEQ ID NO: 1000373 - protein, 122 aa, Homo sapiens
RGSLVIYSSQRLVPDFIWLLLAELTESSVMEHMRLGFSEIVSAMAVSGRWYRGFARFAGSLGAGSADHVNTAPSSVSEIVKWTHVENEAVCPRIQRRRKPRNLELCICSQERAGLADGVCLP

SEQ ID NO: 1000374 - protein, 76 aa, Homo sapiens
SGAGRGGGDGDCRLSREIRVLLTEMERLRSSTMAQEKNLCKAMLGLVLTRAHNSQGTTRNNRVDNEQVIEIHGMYR

SEQ ID NO: 1000375 - protein, 103 aa, Homo sapiens
MGYLLSPLFSPEPLCLHSIGNTVSHSQVQAAKANELKADSGETLNPATHRLAFHLGRRQRVHPPVDFPCPNGKVTRSYYKRETTDILSGHAIKSCTTDDGTDR

SEQ ID NO: 1000376 - protein, 183 aa, Homo sapiens
MCVQSHDKPGDINDRVSARKTLFLTNAKNTRGTERLIKNYTYVAVHRTVNQACTQEQVLISNTAHNTAAAEATTAAMLHTNTATQLKPHNEYNKTHRRHYNDAPNQREAKQEMREPHMPEQNHQRKKKKRVTMWRSQTRTNNRDTHTQRTPQIAPPYNQNATKRQLETHTEQERHTSGANRNS

SEQ ID NO: 1000377 - protein, 77 aa, Homo sapiens
  misc_feature (66)..(66): Xaa can be any naturally occurring amino acid
MRLFQKSDDIQSRVEVLTDSWQAWYRTKLKNVGMPSCGRTCGRASRSRTLYHREKCRDYEPVDLRXTECALGGPVIH

SEQ ID NO: 1000378 - protein, 150 aa, Homo sapiens
SGGAAVRGHDQELSLRQMTGSSFQDERMPTEACGVGARCTGETEELPLVIGDSYWCQVQQRSYHCLVLAPVSLPQTICWDDTCRPVTHGRHLPQSGPPETSTPSLSITQKFQWAPRVPAVNCVPSECCRNEDMQDLGFGADDKTRKHSQA

SEQ ID NO: 1000379 - protein, 82 aa, Homo sapiens
SGGAGVVLLREEEWSRGDAAAALTMSFLGGFFGPICEIEYRSSMMGKPRKMAEMNTVYDGKVEKHYLFYDGESVSGKGKPSL

SEQ ID NO: 1000380 - protein, 162 aa, Homo sapiens
MPLGDNREVRKMYGPRGFAYAARHATSVTAVMGGPLVVFKFYSGNTRKRPLWEIDKSLFANFEFCYQLGTFDFHSGRQPQDNVGPWVFWAEFRLLAQTGKELTTEEGWCGLHPGKGTAVVDNQRLRNSKIRPVWRLAKRLFRTKGQHYSREWLTHPESTPFG

SEQ ID NO: 1000381 - protein, 233 aa, Homo sapiens
  misc_feature (131)..(131): Xaa can be any naturally occurring amino acid
RGGRLERPGSFQLNKVRHKADYSSRVQLESESQTTVVLVRVLCTDVWYGTPFASLVATESCVLVWGGIVFCGCGDMKALNWRAVNSKVEDLFLQENYARLVSTSSVNVIHAVPRNVYLLEAVVYILLFLYXVRTTHCLVLTGLRTSDRTTVRQILGDYKTSICGKGLSAMETGGQTGEGFQRPSINAQYRLERVCHSCGKMARTSSTELSQGINYVPENVCVAPGVSLLVLCM

SEQ ID NO: 1000382 - protein, 207 aa, Homo sapiens
RAGFFACNHGNFEVCPTIYTWEQELHLSLTGWKKWVSNEGGRAKRYASQRKELCQSPPVPPGCKSRINGGTFTYDSIVQFHGSKVYEPMVTGPAALAPEGSGWCNAQGCEPLRLSQGLMIAPSKSTMLALPRDPGLLITPHAGVHVIQEPGTQRQELLDPTYMFLFQGVDELGNPSYPYAPGQCTTHTNAHLYPNTQAPSQVYGGVT

SEQ ID NO: 1000383 - protein, 238 aa, Homo sapiens
RRGFSNTSGLQRRSLPPLPRLQTLKGDLLLLLLLERSIAHSVSAGILRMARPAYPSVVPRPAPISQTAATAASACRLRATSGSRADTAVQARAQRTLRGSLGLRGRRLTSVAAEGCGGPGWIADIGLDNRYGIDREEGLDCGYGDRIGDMGLGSSGGQGTGQVKGDQGRCLLIKSRLVWESREVTNMTVYGFRSHRGQTGPWATIDHLYTGSGYPNPGNRNLQKIHKADCTTGEARAN

SEQ ID NO: 1000384 - protein, 308 aa, Homo sapiens
AGEHFDGFGLPGVDYWVSPMLDSLLSLSPFSELVPLLLAYYSTYYNYLYYYLLYLLYCKDYFYKPIYLPIYTLVDHHCDYFCSTTTTTTPITRHYRSTSTCTHRREGTHTKQQGDSPKREYTEQKRGRDDNAGGSHREKEAEKRERQPEKGKPQKYAESSHHERHRKRETRRDTATHKHETNRQGDNRATRGSPRSENSTHENDTPKNHNLIAEKRKTRAQTKAADDAAKKTKKKNAKGRKRPPNENRNTTVTQEGDDDKTHNQRHNNKTQNSDEKHRTKHREKTKTKRKTKKAQKTNAQEKTQKREQ

SEQ ID NO: 1000385 - protein, 72 aa, Homo sapiens
SGPDPGPQMPTRIGPDTAHDLRSYPYIFETNHGEASAHLQRFYHSLQLTDYNEWTNSVQGSERVSTFGYSTE

SEQ ID NO: 1000386 - protein, 172 aa, Homo sapiens
RSGAATHAARAREDHQRPEPQSEAWLPGVCGRGELSTCEGLAGAGSKRVRGAKEPQTVRRQALAKLLRAPAPSWLGDSRWVSETGASGLQRNEHKMSHWYPLVLQWSIKVRITISGLAGTMPKTEDSSHGPWRYEPTSMEAHKMGYRIPFELNGVCGVNRTASNQTESVAMT

SEQ ID NO: 1000387 - protein, 238 aa, Homo sapiens
ERRGWCWNLPPQCSRRSVLMLPGSGRDKTRPPVLGKARVSWLGVALSDEPCRRGPVDAVGDCAWSLGMPAGFAPGVSVSPRGARGSSRGGSMRAATLAGCGAQMTGHLRVLRLPTRSYPRADMQQMGCICVFAFVGFAMLTTGTIKVPVQLTSEMGCDECFECGPWVSFAWRFTYQDALVPMEQNPLLGQCPDLDSPLDLARRIGTYFAVHFDIFRGRKLIGQIACKLALALVFVDRN

SEQ ID NO: 1000388 - protein, 99 aa, Homo sapiens
RVVENGGARDPYVVEGLLRGKPSGRYELWSTDLPGAGAGRRAGLLRMSYVLGRGSDPNSFLSHPMGWTRVRFAEAVNTVIIPRGTRGLEASEDVYSSYI

SEQ ID NO: 1000389 - protein, 151 aa, Homo sapiens
AGCGVDALARWRGAGSGKSTSNVSTFDERPFSVADMKRGQARGCASSTAAWYSVRRRCSVDELMRPKLSKLPLSAAGNRVGTGVTLREMCMKNAHVTDPSGGVICLVIIGDKIRTIGKTTHLQTYRKPAGLDVYAGFVPMRTKKRPKGLKG

SEQ ID NO: 1000390 - protein, 231 aa, Homo sapiens
MYCSELTLSDLSTESLRELSYGRRAAVELLVVPVQLVAEPRLQHSAASRWLRWPPVAALASDLHQGWCCTTQRLPYSLPLTEALGDSADLEPRNWLGGKHAKRTLANNCLRDLVSNPTLDEAKFCLSNRRHEATGEGHIPPLISSGYTCWGGASQEFGQHREHDDLKHTDFDLRSQLTRIEVTVYSCRRYLTGSTECEPWQSTPCNSLDDPPNIRERKTGLFLAELCAVIP

SEQ ID NO: 1000391 - protein, 175 aa, Homo sapiens
AEFWEAAVEGGWWLTPSLALTAGRYPTPGTMFPAGPPGTDILRHHPMTCKIAATGGAETDGREGDMRNRRQHPARRSPPMRKHVVIARRYPTVPQWTCYTEAQAARTAPEHYNGCQPYPTITQRDTLHSTIDCATNNVATPQPFTHSATHTHLTEPHPTDARRGHAAPPPPRTDT

SEQ ID NO: 1000392 - protein, 220 aa, Homo sapiens
AEWGRDAELCASPTQARSLPGAAAGFRRRWLGSGEERHQRAPYGPQVRRGRAVRSRTSSSCLKPAGACGRREATTRRGASSRVSRCGRRSSLHLLARDRLSRSASLHSLRRSSRACRQADGSTAAGTEHKGRTPGGSEGVPPTAVWCSEPIRPVHAGQAGMLWAAPCIQAIHSEGPFELTDTSSRCPGLQQRKKAPALRISGNALPCYEYNNGLRRRHRR

SEQ ID NO: 1000393 - protein, 78 aa, Homo sapiens
RLERMNQVELNDGRSVLYGYSVYDPVCCLLSVQFAPVHNFVLERAIYWLSDSGIVASVVNCALEYIDIATSHYSMAYR

SEQ ID NO: 1000394 - protein, 96 aa, Homo sapiens
AGGLDVSYLAWRPGIAAGHWSCKWAQAWSFQDRQDVCSLHAWSSDLPLLRGPLRVALIRQLEATEAFLSPGAVPSRRRNQVIVDEAPTRWNRNAGS

SEQ ID NO: 1000395 - protein, 111 aa, Homo sapiens
MLGVDDYLTGILHPERPMEMVLRPSTKDPGRISRTSVVPWRVVAGEMDAGKDQHRAISIWNRIVQASIWVSGNTLLFPERGIRRTLTVADKGKPEEMASHVEIRSSRLMQK

SEQ ID NO: 1000396 - protein, 105 aa, Homo sapiens
MRWGMGPEGISYVERLKATVARVFILTLKIRQLSMASIHQRGNEHVSKMRGQPRTLTNNRCFVLEVVPREGKQPQLSCWTQKDDLEIANGKHEDEKIDLQKLLVG

SEQ ID NO: 1000397 - protein, 113 aa, Homo sapiens
ADWSDRSRLPPDRRSGCTRTRSEIAELCGKLSAVVDLAIQIVQSIDISTGYRLSSACMTIVLRTSTSPEDIRLNRVVAVEVEGKMVGRTMKVTVVVTQLIGGYARPAEETRGR

SEQ ID NO: 1000398 - protein, 121 aa, Homo sapiens
RVSGSAKYSREKGSSARWELVVRIPANVEKPGACPGLSVSSHRRVNREPGPKVVRICKLTLLSPWQSYRKSLQVSQMRRELHVDSRRLMSLASLHARPHLDTLVRLACKAISKIKEGTLQR

SEQ ID NO: 1000399 - protein, 121 aa, Homo sapiens
ERDGCSPPFLPPQALAVVLAAKCRDWARQAEVVGDCAVFLESPRTSSREREGSASNCARRTKRQVRYLDKTQTILGFVSLRHSIHINKLEHKHDSLSRSDMAKENPKVNISQERSNVTTIR

SEQ ID NO: 1000400 - protein, 91 aa, Homo sapiens
MGRKRGPEQYPSEPVGEKHGGNTGPEGKIPRGETSGGTPPRANNRGQRKNTHRGNHWGKSKGVRPGHGKNTQGHDSGKKGQAHQNRRTKRN

SEQ ID NO: 1000401 - protein, 78 aa, Homo sapiens
MCRVPTNATTVAPVLEDTYTDEVTLIRRQNQLKEEAKTFKSNFFSNFSSVGTNIQPESITLGPTYLATVNSSDSDNGT

SEQ ID NO: 1000402 - protein, 273 aa, Homo sapiens
AELLPPAAPVPELRLSQFPNPPLPLPDKPRYSPVETLDLTHNQTSFLLPPGPPSIGVHDSPSGPRRLSTEGNAKATPGARFGHPSLRGDKDRLERTGRRRRQNSVTETKKKEPPETARDTKGRSMETERARLYGHTQGQRPQRKATANILAQPDPRFPHERRPAEDMRGHKSRRRHEQTQKTARAKEQKGNSTTRQKYAHTPKHSRLANTTERHTEHSRHTQTSTTKTRNTTGHSKRHQTTDSSRTTPQYTHAGRKVHTRTPNRQDSSYRRAR

SEQ ID NO: 1000403 - protein, 49 aa, Homo sapiens
MYRNRAFVNRTMNSDVAVTSWLPWELNIKEWELHSLNVQLRMGQERIDK

SEQ ID NO: 1000404 - protein, 80 aa, Homo sapiens
  misc_feature (61)..(61): Xaa can be any naturally occurring amino acid
  misc_feature (65)..(65): Xaa can be any naturally occurring amino acid
MPDRERLGQVPGFIPYNACPWMQGFGVTYHYRGSASLFYQIGNVLWPYHCGGLHIQQWIGXCDHXSWKSPSSRTTANLLT

SEQ ID NO: 1000405 - protein, 121 aa, Homo sapiens
RKGRLILQNRRTKRTGVRTLAGWEPWLGITTHRGRVIAPKLQVAERKQDEMTGRGRESADVHAALQTEDSSRESTGRRAQRKQRTEGGCRVELPWKRAWMCTRGVGRNELEPMASRQRPWA

SEQ ID NO: 1000406 - protein, 61 aa, Homo sapiens
MPASGGTETDFSNLFARDLLPATNGEEHTVQFLLDVVDILLTYVRKHIRSLTKVLDYHHPH

SEQ ID NO: 1000407 - protein, 248 aa, Homo sapiens
MAAVSAGCNSGVLLLLLMAVTVPSRARGSGCLGRDWCARGWRGRSRGRGLWHWWGMLLEHSFEIAMTCANFRKRGSLLWNQHDGTLILSQRQTQQKEELGPNPRMWPALNGLYRVLDPKATRGPVMGWKLVGYVSILCTLSESWWESHDVGPRDPCTVELDGPASGCVGRDHGRVTGTHWGGTCAEEPEERCDRHRCDPWETMLHKAKPSISHELPRPRTRPKKATQGHHEAQEKGHHGRLAAALGTD

SEQ ID NO: 1000408 - protein, 213 aa, Homo sapiens
RERRAGGRLGNRGAGCSLPHNIRAAARGGKPSSRDPDGVMELDGRFSSIDNGSTARGGSTKRVEATADSQRHKQTTDRTGQREREGAKDAKTRNRSESIRTHHTQTTRRQTRGPERMRDQTPSNTGTRPPQTTEASERATKVSTIRHQAMIHRIQERDQHHNETPESNQSKSQTTEPSKPHNRYTHTEGETHTKKKPKETMRGRSTPAPRSDN

SEQ ID NO: 1000409 - protein, 140 aa, Homo sapiens
ERVLRWIQRGAPTRGEEVVPGRRQEEEREHERGAESSRPAVLSFLEGKGGGGKVAPLEGQRPVARGLSQVPAGGAHSLAFHRRGHTLVLVSSRTLPPVRALPVPSLPRGTSRMTGQPVPMLPGYLGGNICRRTVDALGSE

SEQ ID NO: 1000410 - protein, 283 aa, Homo sapiens
ADSSGDEAESPSQMKRSKGIHVFKKPSFSNKAGTRILRTKTTKPKKENDIHRPEHQAQTKKHNNTTDDHVKTTLTSRLTGRLNQMDTDTDRKKKNAKFRTPRRVAPSNMSDTKNHQNPHYLKEISVLDMNCTLGRRDSNALDIEYETMSALHKARYYPDVNGYSEITDTEEQVNGPIEKQRRGTSYQRRLSTTGHTMTQNPQQALGDLASPEQTRDHEPLPKEPGEQGATPSNQRNRLEATSKLKLDDTITTTTGETKHTQPRPDHRQRKHKEQHATLAPTKR

SEQ ID NO: 1000411 - protein, 199 aa, Homo sapiens
MTSKGSGTVWPVAVSSGDQRWGSLTVWCRPIGACVSHRDGTCCLTPRGDSVVYRDVLQNRFRPCTRAELARRSCSCEASPRDSWWCGTDPLGLLQRLPGPFLCASDEGPSLNMAWIRYKLALQPAGAPGTRVLVNDYGRGGTAEPLEPGDPDLPFLDRVRCARGGLAWDRPSMRSKENRVQNSYTGRGRAEQMFTPNRP

SEQ ID NO: 1000412 - protein, 87 aa, Homo sapiens
RSPAGWFGWSGGLAVLGEGMAEYQECRDEGSGRIWPWGAEAQAGDEGYFVKDIKIWASGNSDTLYLSMVAGLHMARDDAKEQERQGH

SEQ ID NO: 1000413 - protein, 148 aa, Homo sapiens
SGDEIFPVPDFPVDLLRMIEGSQDPVNDHKNGWSRSTCVSKDHWLQYAFDRDHYPRTITRMDYVSAEHSWTGEASNIQGMDCLLADESSKAMRLWTIHTRGEMCGKAGLVDDFEMKYIALTVPVPEDTSIAQVDAEENRECEYLVLSG

SEQ ID NO: 1000414 - protein, 119 aa, Homo sapiens
MVAPATNPGFKISKERYWRINLQMEFSTLNLANYSQKLMSRAHRPIKLYWRKMVQKDKAMANFRDGDSFYKFKNSPNGVHIPHHHKKIAPKYGVLEGISWAKQKNLMGIISFNYTLPKF

SEQ ID NO: 1000415 - protein, 141 aa, Homo sapiens
MGRALSGPTLGPRWRLAGPPNRTRSPQLCSTIKFRRTTAAASPRPHSARRTRTRSHEHAGQPLDANGQAPADQDPIKGNTARHPSAETNPTTEPATRRVLASHHTQGSNKGTNPVPLNYNYGALPTASERKQAAAHGDNER

SEQ ID NO: 1000416 - protein, 64 aa, Homo sapiens
MHRREAVRWPYLCLRRYGYDSSSSPLRVAAECQTGQGIFAFKCSRADEIFNLLQDLMQCNSINV

SEQ ID NO: 1000417 - protein, 80 aa, Homo sapiens
AESYLRRESSGFAGSTVLRTEPGARCLTRWVDLDSPPSHHIYRTHRTANWGLAGLIAPTGRWSTLGRADSRCRQYISARQ

SEQ ID NO: 1000418 - protein, 250 aa, Homo sapiens
AASAFNSWFENAEEDFKLDPVRCNSLSRNQPLCARPIDAFRSSLSVCDRLIFNHGWPSWTAEIKSFRASLQATTPGCTMEAQEENDELRQEVGPARPTPCTSGSKRPGHTSSMGPVVDESGTLESQFEATKRSTRKFRATENVSSTNDRGPGGRHGGRPSSWTHKYTDAQHREASLQQWDQLDQLGMRMHHNLEQQIQARNTTRVTDRGPQRIQHDVIDTLDKDKSGRLNHQEFKSCLRSLGYDLPMVGG

SEQ ID NO: 1000419 - protein, 261 aa, Homo sapiens
RKRNQAAFLSIGVNLKPTGNSQFFPITAQLKTLINKYYCAVSCHKGRVEGTVPFGVVRFHSNPHAGTASPARTNKPNDQQAIEQRRSEDKEEENSHKTSGKRHESLHSESAGPRRRHGDVNTPTAYTDQEGNITRATASRPKRRDRHTRRRTRRNQAYTNQAKHPNGHSPQRHETQSGRRNKSTDRQKPPHSKDQTAQQTTQDTRPHKSCIRNVKDQDDKIPEEQAAGTHATRTRHDTRNTTSTTRRGPMPREQIAKDLKH

SEQ ID NO: 1000420 - protein, 305 aa, Homo sapiens
  misc_feature (96)..(96): Xaa can be any naturally occurring amino acid
MEWIGLEGEAIIDNIFITMYRMDDSYIGVVLSNSYSMYYCALRKSDMIELENVMSHCLMKLYRWVRDNNSDGNRRFIMLEEGHIDEKQRHYSHNSXFRHTSIALNEPLKLTRRDRERNSDCNARVALVRRTQEFCGQAKEGLYYQWLCRGKVNPVICRYENHHGITSEDTVVLPYNTFETKKAYLGKEGQLPSECVTALTFTHPFAFRITKYTSSDGAPSPEARKLELRLAPSRRFRRCVATENSKSRMEITVWLFEDYFGPIFLGSGNHTFQGSWAWFNFLDVGVTYINVLNTPAPYRCNSYHE

SEQ ID NO: 1000421 - protein, 257 aa, Homo sapiens
ADFRVAAVPEPEAAVAHISASDPAAPCSFRCWMGPGVTPHWPACVHTHVMLPLPEPRPAARLCGAGCPRRCLPRPLAPAPATGSPTCMAPTCAAVPAQSTSTPMSWAPCKAEDEANQPFCAVNMKEALSTERGKTLVQKKPTKYPEWKSTFDAHIYEGRVIQIVLIAGPAEEPVSEVTVELCQVLAERLKDTNGKAEFWLDLQPQAKVYDVWFSISMERRALATHVLCADEDDGQRPNRVTRPGSHSHQGQNPLTSR

SEQ ID NO: 1000422 - protein, 104 aa, Homo sapiens
SGVKQDLGPWILLKKGSHGREYGRGTDDKKKGVLNAVSHAWGAFPYASLIADLSCSMRVSPVSVAARAMKRFLELINILLNAYFVDGKNCWRHYWMLSPMIEIV

SEQ ID NO: 1000423 - protein, 184 aa, Homo sapiens
  misc_feature (45)..(45): Xaa can be any naturally occurring amino acid
RILFRQNTKWRMTPVQRGGPGALVCPEMGEPTVASCVRFQASGDXGARESQAGGTGDLGREASASSAEAKALRHNGSGCLVHQVRACLVEGTLNDPRFPWDGDSTHRCVHCPDVTEIMTIDFEYSFAEGAVLSIGLKSCLERIELHRWPGKATYPAVTLGARQHPEGFQNGHFLVCGSLRSEVA

SEQ ID NO: 1000424 - protein, 246 aa, Homo sapiens
  misc_feature (53)..(53): Xaa can be any naturally occurring amino acid
  misc_feature (60)..(60): Xaa can be any naturally occurring amino acid
MAHGDLPTGSEKIWAPREDVAIEIECAEGTLTWPSRQHTRKRKTLEENVIDRXAENLCQXHADTHLSDTARIENERTRRFGYIHVGSTACAGLTVVDTCNLETTLDVALGRERCWYALACQTCHVGRLPLARLQDYVIAEKYNWQLRASCEVGAPRGNRRLLGTYGKDMSGHRGDSRGRKERGGKQPRRSIGDNTSLHARRKTSRPREESRVRVFGRELRTIPACNFTPIRAQLNADWTYSRMSRA

SEQ ID NO: 1000425 - protein, 213 aa, Homo sapiens
RVEAPRPQPRPEGPADARLESARMAGAPAAPDGLPCACVLSAGERGWWQLIAVCSAACGDVGPSVLPRQHHPSILAPWPHWDERKSRPVPTLEAQPGGTPPGHGGHRRYFTHGTGPGFILVPSWDRNGMYAGPGEPWAYITKKAPRPFIPNAAPKWRFPAGFPWHPGHAFSPRGTRFYPSFGNPWKMETNPSQQFPFTTATKQWCGPIMCQVQ

SEQ ID NO: 1000426 - protein, 124 aa, Homo sapiens
  misc_feature (51)..(51): Xaa can be any naturally occurring amino acid
MPEDRARMCLHGNVRFEFYASMREGRAIGTDSVFDHWDAYRQPIGLGQYLXRYRDNVGWKRNIRDQSLRAIDNSAIAHRKLTNQGIKPNSCDKRTSIRIRITTGNLHKLLTNRTTIQPGKDLIA

SEQ ID NO: 1000427 - protein, 119 aa, Homo sapiens
MRETMILTVIRKKHLLRTCLGELFSELAELDKENYEKFYEAFYKNLKLGYPRRLQLTAAACLETACADHTSQSGDEMTISVQSMFHRMQGRHEKSIYYISGESKEQVANSGCVERVRKR

SEQ ID NO: 1000428 - protein, 187 aa, Homo sapiens
SGVTTCSRPGEHNLPRSPGPEPDPSLSPQPGAQASPPYHGRMTQDMRNELEEMLGRADQLADESMESTRRMLQLVEESKDAGIRTMVMLDEQGEQLERIEEREDQINKDMKEAENEFDGPRRNSAGFVCVPVDKLIIKDAYIKSLEATNQDGSGVAVETARVVDEREQMSISGGFIRRVPNDARDNE

SEQ ID NO: 1000429 - protein, 224 aa, Homo sapiens
MQNVVNDYSEQLLTYVATGHRDFQVLVARAIGEFTEQLLTINTNYRGVNVDSSHRYFSVRTDIYDMSTENTLQELQPWQFNSHNLTFDGRTCIPGLYYRATNNHLVSSSKNMRRTRTSETQYLGKNHFLTPWSGHLRHGVHRAAKTPHEHDIRDYHYTTTILNHTPTLDLQATNLATIGTTPRTGHRPPADATTGERTAAPPAQPHHPRRGTHRQRDHTQRSPT

SEQ ID NO: 1000430 - protein, 85 aa, Homo sapiens
AESDWKERAEWLCGSSSRETVWLLLLDGCTELYVKHVTIAEFMEKLIHYLTHMMVMELEHTKDHWDTVTLEISWSQNSHRMQSYT

SEQ ID NO: 1000431 - protein, 148 aa, Homo sapiens
SGLTGMGGCSDPGLPKGVPQQCLVAWAVTLSLKQRNQFFWAHEVAVPCSAEPRVAEHASCNSILYADSVRGPVATSLALVWRLPWSQNEARESHWVPDLPGTGDRSPNMSTYHYDFLHGNERPPGNCVDGIMHLTRPASRLMWALECS

SEQ ID NO: 1000432 - protein, 217 aa, Homo sapiens
MVGGGGGPEDRSADDLIQLAYVPWPFRAIGVYRVEPVGHSVNEDGYSVPPAASPCHVARPQHSLLAGCSSIPFSHFPSSLILFFSSQFSAVHIAIARGNLDSFTLTVALARVGAFASNMGLYKARTVPPLSGRHLTFHSAGPRLAQSGARKEGRSVTFDLESPRELGRHLTHIAISKGGFNPEVEKGNLRHRYNGKEDTRIGAMRIKDREIEFASEE

SEQ ID NO: 1000433 - protein, 207 aa, Homo sapiens
  misc_feature (154)..(154): Xaa can be any naturally occurring amino acid
SGVTSLPRAETDPHTISLCLRFPIFAFSARPIFSVGTLAASRELPTRCHTRSERDCHLRYVYQKHLQLDERKSKIDDVWCDDNCGVDTVGQRSRGNTMTRKGLLLVRGMTEPVGHARELSSAWGGFLANSGIAESVEGSIVRHERTYLAGKYIXQEMWVHYRGLSGYIGLSCRIHTIISVSGCGVVIISTGDETLGREHHTTSLYPE

SEQ ID NO: 1000434 - protein, 96 aa, Homo sapiens
RGLTLAARIARRRMLGYRSPFSFIRNPPLWTKNDLLLYVYCTFIMFIKNVLKNALFHDVLARVIRREHAKSAYRVEAANRPIFLSSLLHSKLVADA

SEQ ID NO: 1000435 - protein, 319 aa, Homo sapiens
ADLPAGFDGVMSHRKFSAYSRHGSLGIPASESRSQHGSRGKGDDELPLEDCTRTMLGASSTDLPGIARLGIDFIIVLGSRQAGIQGVTRRTVVDGCEHLKKTARHGGCGALVRATVEERTFDVAPDPSMICLLRDAQFLWMNWRSRRVLLQNSGHQDLYAHEGLYQCYSSKNMAGWTDGKNARLVARTSVKRLDEDSSVTEVSPVSNCPGASIAPDFSVLTPRNRMGHPDGRSQVKRERHLLARSKSGLVPDERLDAARVPDGILEVIMGPRNAVLTPDVNRRVDPEGAIGSYKRGSTKSLGHHRQMGCHCTEPPEARR

SEQ ID NO: 1000436 - protein, 687 aa, Homo sapiens
SGGWQRAGWRRRRLQARRAGLLAVRAGMGAPPGVLALRLQVFLACPATWLGLSSRSDCCAATTLHTHAPMRPQTTHSALHTLDHGTSAFHLKGNGGLVTQAAGTLAVKAALATHGRSLLRGLQTPRTRAAELAPTLLRFPGPSLMARCAHVATWRWHLLRCGPSIAGRRHTMFPRATLFPFRFPFSSPRETTLVGTLAKAGRVGAAFACACTTGSAPANGTPSFTIWPESRNSFLLICASSLPVILLKGRSPNHFPLWRRPLYSPPRTSGGPNVPLSCNTGWPTTLWSHSRLHPISTTCAPIPPRVVGRVASFWRVSYSPKPTQRGGPSFWISSSPVVLAPTIGDSRYKPPVIPPPLCRTTLHAFGQTLSQASARAFKRSGGGRYTTCAPSHRNNCVAGLLLGANSGALLAEIPRPRQRASRFPQVLVTHPLSGRKPCPRPLFGSGPPHYGRRRAQRYGRPNRTPPTRATTPGAAQLGDDTFLSSRHPSAHAVPPPGDRSDVAPPLNMLMAATPYCGAYLRQVQSIPQRARTRFMAHVGPVIISDANPCEHVSSSIINAPRSAVFVGDETYFETPTHAARMADIPVLGERAEPQTKCGFGVNRHQQYFPRTQTIYGPAPPYLSNNSHLCAPPFCDHSPYFLLRDSRCRRDFPPRPFASYTHLHTKPAVPRDYRYHTLRAQNKQHISC

SEQ ID NO: 1000437 - protein, 195 aa, Homo sapiens
SGSILIPKPGKDTSKRRLQSNNFDEHRCKNTQQNTSRPNLAAHRNKQNKKEFTTIKYGFIPGMQDWFNIYKSINVIHHINGIKHKNHMIISVDTEKAFDKIQHHFILKTFNKRNIEGKYFKITRAIYDSPTANTILNGQKLNAFLLKTRKRQGCPLSPLLFKIILEVLTRAIKKEKEIKAIQIGTVKIKLFLFSR

SEQ ID NO: 1000438 - protein, 68 aa, Homo sapiens
  misc_feature (48)..(48): Xaa can be any naturally occurring amino acid
AEGANDRGEEARNAGASTSWVGTMDGINTIEGVNGKHPKFLTSQEGVXMYALSCGTDARLRDKIKLVR

SEQ ID NO: 1000439 - protein, 256 aa, Homo sapiens
SGVRGSDRSRRSDEPMLAVTHAGDMHILPAAGPAILREACACYQSRSTSATRHPVRLAVCADTPMCPGAGPTQRPRDNSKQLSWIEQKVSLIQALRLGRANKCDRLIRHHDYWTEGRHEYWERENDARNGTDLNLTVVTYCIGTTPQYETPVVQGTKLCILGIDDDRGDGELEELILLLAKRRRLDNHRMRGWTVPPQFARKSPLMCLLAISFWKQSTVESKTVTTRLAHAFVERPYNERSKGAEFLWGPDLKTKW

SEQ ID NO: 1000440 - protein, 183 aa, Homo sapiens
  misc_feature (113)..(113): Xaa can be any naturally occurring amino acid
  misc_feature (121)..(121): Xaa can be any naturally occurring amino acid
RALRPPAHLVRVCIARDGCLGRHGVPEARKHNVLRPVVLGLPCSREPTVSCAVTGGGAGAYWTDGACGCLYASTWHVSLDSGLLGTSQRRKAPEPRAVGLTLEECGRLSMAYXVNRVEHAXQKTRNGSGGNGFDGGTGLTCDTENGHIVVGWLLWTLWIGKKGHLVTISIWLCRLTEVGWNRS

SEQ ID NO: 1000441 - protein, 96 aa, Homo sapiens
RVVGVRVSVGGLVVVRMACRFYETCIAETDDWSGDNRMHQTCLDVQETCRSENEQAVRMRREDECLSGMTKRPSDWEHEPGFHAGHQWVWYSIGCF

SEQ ID NO: 1000442 - protein, 306 aa, Homo sapiens
AEFGAFLRRVCGGARLHRGDRAWQTPDRAEANQRARERLGPARRPRSSPFRVPAALDQVSFAVCHPRELSRLTFALCVYNLDSLGDLTAVRSYSFWLNPQALVGAQGGRMSQWLQNFSSLTQNSWSRFTMLYDDSFPMDIRQYLAHVVRNSKTGSTLPMMSHSATIRFHDLLSQLALINIVASLTADNFLLTSTNIRDKATRTLQDNFRKTQSRCLRLIYSCLNGSAQDKLPGTTPRALHQASVRGTYSQHHQLMFRPQPKRRFAQNRPDTCEQDKVLCYEACTLQPPDTHKHGHNDSPGQLDKPK

SEQ ID NO: 1000443 - protein, 77 aa, Homo sapiens
MIWNGSMGGDEKTLREETLKGNFSGRLQSWRHSYEGNRSSTMIIMNEVWPYALKSGEVIFIKSRASKSAFSGLYLYC

SEQ ID NO: 1000444 - protein, 162 aa, Homo sapiens
ADVGTVVGAATAVGSSCVLLFVRGERADASARSITWGDHGPRHVVRTSSLACPPVSYVPCLILLEDLRGLRHVYILMGASDARGVSRKVEYRVTVIYDRQHIPESALRLQRQLEEVTPRRVCLRWIACVYKQCLGYRFLRIDESNAREEACQNAVWVELSVR

SEQ ID NO: 1000445 - protein, 103 aa, Homo sapiens
MMYLPGPHQSTAGDVAPIIYKIREIADGLCLAVEGKMVTEDRRYMDDSLIGGKCLRYMSRGRRVPKAQVTQLDVYYLVCERGIICHELTFQQIEGLARNVHST

SEQ ID NO: 1000446 - protein, 197 aa, Homo sapiens
MSEVRLPPLRALDDLVLGSARLGGSRIHQQTREQMSDRAASINKPPSNVPNQTTVLCFGIGLALAGLRCGPTSLLPPSSSAWYVCGGPLAMHGCGQSETRDELCAACRQYATPVDVLPWPIVACRLASVVLLGRGRRLLTFLFSIAGPVLLILVHASLLPALTIKNKDGEREIESIGLKRTPMGLLLEALGQEQEAG

SEQ ID NO: 1000447 - protein, 350 aa, Homo sapiens
RVASTGKPYSAGGCGAIMLSPDALNESHAYAAEYVNTEHRSGADGKIPFMTIIDRCDWMVGPETSISTLVRCLQRKWLIELHTSIRYNRDETRQAPGERALVRVRVQQLGRTPSSILLARKLHDVSTLKPIWNPPIYLALYLETERLTEASRSRTTRIGPQKFSRAAAERLGSHNALLGAKQSISHPAHSQTNPLGRSPKTLWTANAIPRGPPSNVEGPLERFQTFSLGRALGLETDFATQKKRRRTSESNNRDGQRRALGMPDARLKPPWSNHTVLTPLTWFPPPGNTEKHHIDKRFTFSLTMRPPGSGSIPERVATPPDGRTIQRHLRINCSSLNGATSNMSNESTQP

SEQ ID NO: 1000448 - protein, 109 aa, Homo sapiens
AGITVRRGAGQCSSAMGRSAVEPCSNRIPGRAAGAVWVALYAPHADWCKASMKHESRFLQSEGHSVVLGRDACRAATTPSASENRRWLHRATIAMIIEALSSFDWFTPQ

SEQ ID NO: 1000449 - protein, 105 aa, Homo sapiens
SGAVAQATAAVDTSGGGGSQRAARNAGNVRAGLWPARGYGVRVVQCWAVGWACAVGVLSAASGCGRLRTRASVQSCIRARLHFGVSWLNRQLASRGRLLEEALAC

SEQ ID NO: 1000450 - protein, 137 aa, Homo sapiens
  misc_feature (137)..(137): Xaa can be any naturally occurring amino acid
SGVLEPRTELVAAARGARRQVGGCGAIERARGLAFMAWEVAPGAPLQVAENMCAFVERVQVAGRTFRPCVLLVAVGLPLHRSWAWAMHEAEGSGVNSVELIKSIGKFSLGFYVTLHALRGSPLGAVERHATDRGASX

SEQ ID NO: 1000451 - protein, 537 aa, Homo sapiens
  misc_feature (296)..(296): Xaa can be any naturally occurring amino acid
RVGERVYLWRRPSDYLLRADGDSADSGCRVNDLCPVPRFYRRDAIQASEHYYLHRDREWTLHSVWTYYVRFRIALEEKLRPAVVWVTIDARLMYTGFRTECTKRALTCEGSASRCIYCLGPTEHQTIAEEKSLSELIQSQRERGISRKEIMRRKQTAIAGMNRQGENVTHLRGKPQVVELFEMASARGLNVFQRVKRGSTKSWGPYDFIGRVPRVHVDEPACEKSPIILLVEMNGIVLLLATGKAGLFKKARYCGLEMVWYRETKSPRGGIAKRKGRAEIHGAGIRGHEMEGSARXFFPECGRVCVLGGKATIGGCRLPGRPFGFQGPEVGAVGALGSLEVEAPGRFQAGGAFPQPSKRAQGAGPGGPTGGRQGPAQTTGKWTHIRVTINDLPGVVDTFCNTLGGDARERSHKYGNHPRVTNMGERSGPHHKGDTITKRQRRKGGGSDDQSQAWGSAPGHKSGPPRDNIESNRVVDKHPSTPTRGSNNNRVCYNTPATAMSNTEETKYDDKEATIHPCSRRNENTTAYEWNETEKEE

SEQ ID NO: 1000452 - protein, 166 aa, Homo sapiens
SGGGGWRRQRHGRRGVAARTEVGRVEAGGGRQCCVELSEAELKGGLTRPGSSLVRRCSGVVGWLRMERYSRSRVDCVADGWTRGSRGGTVRCLYMGVGGDPRTVYPPVVMRAWARGVARGVWRSQVSRLMAVFEEVVQDGAFEGTSFSDAVLTKLFVEISPELPSD

SEQ ID NO: 1000453 - protein, 182 aa, Homo sapiens
AGRGCERELHVGGLTPSEGAGGRFVLVLVGVTEVYALQAAEGPSGGDRPRMWTSLGTIRAPEGSTVRRVLTVWVGAGQGVRGESAKSEEALRVNRMKTAERERGDAGPRLRSASRSMRSSLEAEARPSSHVSCGIGNVLWMNAAWYYTGQLKSNGGIPKYMFQSGKVAKGGHLRKSRLQETA

SEQ ID NO: 1000454 - protein, 94 aa, Homo sapiens
SGVSVGTRSTEISSGYTCQLGGLQASLRFLLLRADGDPKWTRSSTIVAYLCETYSHVARGRSLLSIFAGELHYLYRWSDRTLYASYTGLRVQDG

SEQ ID NO: 1000455 - protein, 125 aa, Homo sapiens
AGGFPNLFRPPGSRSLEPGRIGCNRIREPRQDSRPRASPLVHSRAPQGRRQLVNAGLFNVRVLAPMNWEAQWKGTEPQEDWMSESGSIHSAHHSIRPVRSVVTGKRWISYELDSRVTQVWTHKER

SEQ ID NO: 1000456 - protein, 265 aa, Homo sapiens
SGQSVSPRRWVGLGSDGHGHRQNERSLARPTDVARTWRREHRASQEAGSCRQWYKGLHQGTAPTRNPQLWYEFNELSTAKLLSAMVTPSKVVPELRLPHLLTSNSDGTIDLSGASVIALSVSSRGRLEQKLMWAFIMYVPGTVNGLHHAGSDYAVRSCSAIYIDAYRADDEVCREELSRPRQREDGRKSSANWTRIAMYWHGCPCEEIQSDGAKGDPSSCVCCSASTACASRVLMRTPGFPFLPPFAGPLPVLRFHVPCVYLAGG

SEQ ID NO: 1000457 - protein, 227 aa, Homo sapiens
RKSQKQIKVVGLDVCWPRRREALECSSRLLVSVARPCALLRGSSPVARAPAPDHGRRLSLIQKAKLARAGRASTTDHGPACNERHVTDAWAPDAVQRGAAICSPWTYKNVVGGRRSAWRVISSIESEDRRLRQEVCSVIEWTIGMHKLESEAEIICTTVLEWSGHYLLANATNPEQYRSSYLNLKGDYFRYLAEVAVLVLIEFNRLAHSRGAYQEAFDISKKEMQPK

SEQ ID NO: 1000458 - protein, 138 aa, Homo sapiens
RSWEAGDPYRTSLLCRRVSFPRPLQAARSRSRSPAVEAAIAAGSPHAGPEARRATFDGASHVDAMVKADFLTPLWPRTEGKNGRNPKSGDEALIIPLQRRRPRGTAMDYSDVVPVGHKEDPGVGALCFGTMHFTACTV

SEQ ID NO: 1000459 - protein, 122 aa, Homo sapiens
MPEESGPKDRKLNKSRSTEKTVGKLLALKQGCEGADRCNLSLSRKTVSVEGFREGVPCPKTIDFGSSEAGEDTSEDEKAKVKFIIKKPEMFETAIKESTSSKSPPRRSKVHRPNVNTTCIRC

SEQ ID NO: 1000460 - protein, 228 aa, Homo sapiens
  misc_feature (206)..(206): Xaa can be any naturally occurring amino acid
RGMLSAVLLRRRRDLAALVRHARAYVRGRAHGTGCRLWALTRCPSPSASPTLGDSSTVPSVRQVDVPTLTGSLRHPGGPRAPQLQVLAAGAGRGAAEDGTTRPIYFREQRFQIDSERRLFECSLLAEVGRCGLDHVGPGGSQGKLWRRSQAELGGEQLIEAHRGVRRSRSEYEVQRGPGEGPGVGEPAAKVDLELLELDVVDERDXQSRAPIEKSREARKHEEDLRRR

SEQ ID NO: 1000461 - protein, 253 aa, Homo sapiens
MQRRLRCVAGRAGAARTRAGQGAPATAPAALLDAPEPPAGPDSSMPEIPHTNGAWTYSRVDDTNERTRMNTTGDHDKDHQSEGPEHNGKRDQEPRDDEDYHGEAATMNGRKRTEQGDWRPRARRRKMTQEGLESHPEKSDPTRPINRYQKQEDRQTSNMKTKTNEKKRTRRRKKQTRVPRRTDKRPGHDELERHLPSTHAEHKRPRTGDTRNKHNGTHRQTRKGATHNTGEQQGEDEQTDTGDIEQNSRPTHG

SEQ ID NO: 1000462 - protein, 304 aa, Homo sapiens
MAAPRGSGRLRKGASPGQAAQTPAQPCTHRRPRQPAQGRDGGEAFVQPWTSPMDDGYVSLDSHLPMSCTVRDVMITSELSCSVMKEVNELLKLNPGMLFELNARQIDTVWHLPESSYGRSRSERIYIEEMKDISVNKLRSTPESYQSLGIIGEVIVDMCSEIHRKELELSWLIFFKSGMQQQLSLTWQASDNGVDSRQSKSYWRYAEHAGCGSKFLTRRIVKKVTVNGCWENQKRNPFRKLLHTGEQSWVTEMDTVTDIWREDSMYQEYRHSDPITRMGQINRYRKTVLREFIHAVLTKDTYEK

SEQ ID NO: 1000463 - protein, 281 aa, Homo sapiens
SGRLRPSVVNAVSSTCLVVWPQPARPFPLALLLCSCLAPQHWSLPISFRPAPFNSRPVPPSQAAFTTGTCSVHLARTQHLRPSLGALDGLRSHLQASTSILCWPIILSLQTAGMPTKGHHLPFTDCTAFMHHVCKCVLQQPTGTQGGIPGPTLCIPSAPCTAMAVAGRNTHYRKQHCPPVRSKLEHHSAGQQLAHASARHLSSTSHRSIAFLPHIARTPQPDGRMRDYPTRRSTTTPRGPHTFSILFTCSWSPFGTYATWQVFLPCDSFFPRPTHIDCSYA

SEQ ID NO: 1000464 - protein, 291 aa, Homo sapiens
RGFGPCTCDSRPRSPSAPPGAAGPMAPSRLQLGLRAAYSGISSVAGFSIFLVWTVVYREPGTAGMGGLAGVLALWVLVTHVMYMQDYEEDLAQGAARLLSVVGGPLLGTICHRVRCRAPFPRDWRSHRGQSESLNSTPTQATERSSRRSRSFSVPFEVEPFRAQPSMPTGYRADLAEISILREFLTQGVRVSAAMGGPEDLDSASEMWERLLGIALVSPRTVAENTEEDEVVSQEAVLGVPFDGNLSVVEQGILRCCSSSAWAEGSLRTCSIDSGSCAALMELLKYSREKG

SEQ ID NO: 1000465 - protein, 124 aa, Homo sapiens
MRHQARSAQVAELVHHNFLLRQRTRSNLGNNNLFTLESQFKPSLGPVPMGDTGNLGLRRSPFLQLCTYKLDPQHWGFVITHSRAVEPHTGQGFGNGKGARLGDSSLNKPGANEKRDFLTGKISV

SEQ ID NO: 1000466 - protein, 227 aa, Homo sapiens
RSICGYPEHGYLAGYTCTSVSARTSGLPLLGDETQWLEVHHVYAQDPCQARSWTLAGIPLSRIESLHPRKGLFRVCLVAQWVASTGIYEVLELLVTTDKSRYSGEGVCRRPAESTFECENYVRLPWLARNCTVSEQEKIDKLSDLRVDWKQTNKSKLLGAKRHFWGCPLAVCQSIGADGEGGPPVTANIADLVANSEAHPGHVGVAFNVIEWRLLMHVQSSLRIAGV

SEQ ID NO: 1000467 - protein, 117 aa, Homo sapiens
MLGLPQIRARTDYVIEEVKSTWSVRLESGIGEFRVSLKIIKTQVYIVWRYKSVACVQHLGGELGLYFFRVELGTICEDSDSTRSHDRCCEQYEHKCSLEIDYPDFYMELVSVEKRRL

SEQ ID NO: 1000468 - protein, 84 aa, Homo sapiens
RRRTHTRAQEAGGPGPERPPWTPPARGAENPRVAAHPVRRATPRDLWTGQDSELLTQHTARDPQTQCQDNCGSGDGNLLGKGNT

SEQ ID NO: 1000469 - protein, 316 aa, Homo sapiens
  misc_feature (199)..(199): Xaa can be any naturally occurring amino acid
  misc_feature (206)..(206): Xaa can be any naturally occurring amino acid
RGGLTVRGRKRTAAAISWRRRDGGGGRAWKPGRRQAHHPGSSQDKGGVGKSTQSSTETWPWLLAAYARLSKVGILDVVPVWPQLSPRMLWGRMGQGHVGYPDCELARVEQPVAFLSTVAVRAISALWSVGAFPAGRKCGSMAVVLDEDPNEETLLGVKTKFVIQTCVPWVGTLESTWLGVTTAAPWGNLPMYAQLGPSXYESSMQXSLNSCHTCGEPLRSVSALLAHQETEWYLVCGEPLEERLKSSNLTCNGKTVALLELNGEFVGESMSEVFIWPLHLATEVHPCVLSPVGRADRVKLGPQDSAVECPFRYGSP

SEQ ID NO: 1000470 - protein, 166 aa, Homo sapiens
AEWRRRWRREAGDNVSVQAQQSPGGGPRRHGQEMPDRRYGRRAGMPRGAMERRYRSLSDRGINIVQDELEDARVYTTRVRMDTSRVIEPCAGSEFAEWSDFGSFIRLYLSDIHVPIAIFYIFVTSTDMSEHEWKVYENMVPGGELRRLCMLTSFSRCGTMTMSGEA

SEQ ID NO: 1000471 - protein, 105 aa, Homo sapiens
MTISTDSSSGPMVLACMRADSSGGSTSDGHPASLEGHGPVSWNLPTIRGSTAIALRKAGERSMRRSGARSSALYRINVGQRQPGCAAKCPGPAVALVHPMRQWAV

SEQ ID NO: 1000472 - protein, 185 aa, Homo sapiens
RGGVGFRALVRRWCCGGCWSGPAASRPQLVERLSHVAAYPQRAAQIYGLRTAARRHLLVARTRTRRLQDLSAGLRWAPLCAAALSDLADAFTQSSYDRRGSVGPLVGQHQVARGALDANIIILGCAGTGGRISFSFRGSTDVHQCGGVLPGTARGLRIPTGIVGPSRHRHAVRAYGQTARSVEVL

SEQ ID NO: 1000473 - protein, 322 aa, Homo sapiens
SGASLSARPGRKRRWCWHLDFVLGWTTRRGPTPSSEQHAGASALKDPATSWTSLAERPHSAAGDDSTAPCRSTRFHPYPSQTPLPRVAGRLPEASSPIPRKTHACSPPAGSTPHSSYLPTPARDRPVPLHRRAPRAAPLPTRLPRLSPCRPALTSLAHHTHDFPLLRVLRATHSSRPLRRPRSCAPPQPTIDPLEAFSGNAPIPPGHTYAAHHLLTPNLRQTSSLLPGCATQFQPLVRSARTSPRTAPARPNQTQFSGTTPPAWYTTLWFSKHLGVDTFSRFGERSSLMPRFFSQHGTPFLGPIGTALAGPISNTPVVGNHW

SEQ ID NO: 1000474 - protein, 128 aa, Homo sapiens
RIIPQSPASRGSRARLGICSVVLSIVSSTPLGPSSPHISLTSRLSIARANWPCARLMRAAQLAPCWPISCARCVRGPVEVHEGWLLCPWTGTQSAAIGLREGPSLKNAYSVEKESEESSSCTVVPENS

SEQ ID NO: 1000475 - protein, 373 aa, Homo sapiens
SGSRAVTSRAARVYRCSCAASRALPAPRFGPRMRVLDSPAPIFHRSRHGPRACECRCRGRVLLAPRACAVLSADHGALSLGCEGALTAHCGCGTVQQLLASTYEPSNTHLLAALASHPRPASNMLYRQCTRPVLRWMSCAYRAHTQVDYPGCSRKAPSACVTWADAIVYKPGDTANAPLTLQGLIAGHDPLSVHTTQPRLASWSAADPATRGLHCATAFPFPWHTVTPNAHLASPLNTANGALPYRPGGPFSRAPPNFTPCVRRNFRTFNPNAQSSVSGCRPWAPATTKTPWRRGRPALHYGLREPKRTSFATRGARPKRRPPISGPFTLDQLVNSLNKHFHNALARSTFRKPAGHYAPCGSHVTIGHSLGVY

SEQ ID NO: 1000476 - protein, 169 aa, Homo sapiens
MTMDKSELVQKAKLAAARLSDYDDMAAAMKAVTEQGHELSNAREQICSLLAYKNVARRPPLFLGVISSIAQKTREELRRSTHDGHKSTVRRLEAELQDICNCTVPPPVGHTYLIPNATQPETYGCSTGQLTGDYPTRIFSDSGHPGDHKTNHCVEPPSTAYQERTLTLT

SEQ ID NO: 1000477 - protein, 255 aa, Homo sapiens
  misc_feature (186)..(186): Xaa can be any naturally occurring amino acid
MYALFLLARLLGRRLLAGPVLGAETNAPGARELWCQELSNDRLSELRRLSEARALQTVWETKAKQGEHCPCAWRAILRKTVRHSSSLLWIIACRGTNGHMNGRQDPVALYVGRKDTADVALRNTRRRVILRSMQKEISWHFAIIPWSMPGRVIEQEIMRRVLAEMVLVIWLLMLLAESSCAEEQPXAEAEIEPEEHGCESEYRIPRMLGPSEMKAGMDSLSVGQEVPIISFRLVHQGRGRRNAMPSSQKGIMGDS

SEQ ID NO: 1000478 - protein, 582 aa, Homo sapiens
  misc_feature (273)..(273): Xaa can be any naturally occurring amino acid
  misc_feature (296)..(296): Xaa can be any naturally occurring amino acid
ASAERFGRSLGGVGFSLARPARSSSRQRERGRGGSGAKLALTTFGRLALTTKQLRPHTQSHEPALAYSYHPRCAQKAPTRPTTRMGEQRNTPTQRKHTRPPPSITRDRAACTRKRHIHSTVNTGHPGETQDGADLFSTQGTLRFSLLLQATGSATPDAIGHPIPRGNTTMDPLFPSKGEFRGLERGERKLQTRSNGEPFFQHNNPRNPRGNAAYNSNAKDRSKDPQIFPEDIWTRSLGPNGSKRGTLKQNRENTAPRIKPPIGRDVSERALPXERFFQGKTSRPNFNTVPKKGRAXCGTCALGPPAKELSSQNSQGNPLLKKQGETGGKTEVFARKQQPRNTYAKKIVGATRPRGEATRAACPKEILQPQRGHHLVGRTPTPTYPRGPHPGARQNHFINPQEGTQRAHKSTNNEQNAAKGHPPDDYNNNRGQLCAETTRAGGSTKKRHHYIPSPCTKPFWGGSPREATLTDPSDEGALKHEASCNTSHNACFYHHCGGLSHEPTHKTDLKTRLLSSPAETEHHTILLNNKPISFSDDGAALAGHKPTQICNWYMHINPRLPDDERAYITHTAAEKTEEQNAF

SEQ ID NO: 1000479 - protein, 470 aa, Homo sapiens
MAPATQPTSKQPGPLALNNHGGLWHHRLASAYSKLTPFSHPTRALLPALPNVCKSKRGGKPVSQYYTPTILGRSLKLMGNALMFPTLANNRPRPYIWSQVGNNAGQPAWAPTLKLAKLSPAHTPLLKLTGPTPKDTAPTVNPNPNPVAHPERPPQTKARARTLGRPEKPPRGPSSDTHPSTHRIGQNSSTAGTTQPAKHTVPPKKDKNTRTFSTTQRFLATAQLKRYRRQPPVCPTPQTPNTTRTGTLGNVATTRQHNTNRTLTLARRPSARLLATPQPQGTLDQRRRANLPALAVNNPPFPFKAPSRTRRAYTPGLNAPLHLYPLQTLPQPPAAQHGLLTKPSARPPTTSRSRGAPHPQPQPSSRNMRGPHEEPPTSPPLCGGAAARLVAAICGPPCRQHTRPHLAADLQQTTGAPRREQDPNSSRAFGNPAFRQQHPRKSSQHPIRRAADHDDTPLGVIGQSRQNAAK

SEQ ID NO: 1000480 - protein, 269 aa, Homo sapiens
SGVLGPEPCSERESSRTSAKISRMTYYLDLPRLKIFHCINRWALRVFHKILMRLVASPGYETARSVSRPKLKKTLAQTSDIRNVVVVDGVRTPFLLLALHIEDLMPHDLARAALTGVCIGPVSLKEVVDYIILGTVIQEVKTSNVAREAALGAGFSDKTPAHTVTMASISGNQAMTTGVGLIASGQCDVIVAGGVELMSDVPIRHSRKVRKLMLDLNKAKSMGQRLSLISRFRFNFLSTGAPCGSGVLHSETMGHSADRVAAAFAVTRL

SEQ ID NO: 1000481 - protein, 394 aa, Homo sapiens
MVTIIRSMGEGVLPMPHEDGQRGREPEESPTQHKRCLSPWNASGMTHCSQGHQGMDTIDWTGRPAYYTLVNADRRRLGDRELTGEMKSLGGREKMPSGKARPFMRRDIRRTPGPGQLTETSDRTSVAPVTGASTTRTRRGGDVPGNAVVATERRNYAARQRSTGGVESRGQRGQDGHVAPGQRLRKRKTPLRYQQYKAMGTSKSPSYSKAVPLVGETCGVGPQQWAAAKGTWAKSKGRHRPAHDRDRRMTWLRPEGAELHDPEEVIPTGQSSLGTRRPQNTVGKEEGEKSMRTDTYEQCKKGRSQHAMWNQTGTHKRTKEGTIPKGATTAQKLDEQQEPRLETCEGTTVSEGKPQNRRERQHQHRGQAMRKGCAHSGAHQQEGRHSAKEMRIDT

SEQ ID NO: 1000482 - protein, 336 aa, Homo sapiens
  misc_feature (205)..(205): Xaa can be any naturally occurring amino acid
MKHSPGGPDVGAQGTPEREPRNSQVALTTAHQPETTSSPPTTQGLLQEQQHQKRCLGRGIYTRNADSILTVACGQEKEFRDVLRKRQHLQFSADVERDICVVEKGGATRHRQDLNMGQLGRKTEERGNMLYYLVWETLWGCNTWLCEENNEREKRQMLAGNIDNSPSRIVHQPHTAGNLPMLRDVSLVMLRTTCCVDDDSNPAGXLWGEQHTPACGSTHGGGHNWVGQPLLVGRLWEPLLSRTDKRTTRQNEALSLRHATHQCVGTDVRNTMRAEAQQAMQRRRRSETASPTYEHRETDSRRDREARKQQNHVHRASTRCECDDRARRETGRGGRG

SEQ ID NO: 1000483 - protein, 228 aa, Homo sapiens
SGFRAETACAGTRSCNAPLTDTATGRPWRPEMGLLGRRSYWMVVASVDACDLLLSAHTLVACLAAGVLPCRLTCCSRTQYKHLVNDVLLKNRLTDTYGCKHLNNELALGASPRYSIERSLHMPGLPFGNTGRVCSSVVARFVELCNILTAALTHHPLSAQSGGERLPSLALLAISCIAVSCWLREMDTHGSRECPDTDVTDDTAHAVAAARDEGRITRMHAYTVTNAA

SEQ ID NO: 1000484 - protein, 202 aa, Homo sapiens
AESHPEAGRERSCGAAWFSRGSIESISCVVVSFRNAHFNEQPRKVVWHRCTDMVGLGGYLPSRCAITCDEPPNVHWGEEIEDGKWNVWTDRHVSIEDLPEGGAEIGKSTDDEWHTMCVLSVLLQEIVGGMCLHQRLNRYLYARMCPLKRPPAYTKHRTNSQRQNFARRITGAAMRRGLSELLYSGGDACGWVPGKHRGPSTK

SEQ ID NO: 1000485 - protein, 321 aa, Homo sapiens
SVAEEVQQPEMAAVLERMSDSRCPSTASRSARTRRSGLWAEGAPLLAATCCHRPLPPGSWSAALWRLNVDACPEPGEAAAGGRGGGGAAAGAAAGVSRLDGVVPALALRFFKEKRWHKAISIPTLLTEQIDSFVARAITQVLIGPILIPDTCSWGSDFFDCVGDLTRQDQHWAALGKHVYTRMPCWTFVKLLTLGVAISFQHMLRPQTSTPAEQDTPTGPAAPPSRTAALTTRTPPTPGLAPAPPPTVPATPHPPQASAPGPASPSHGTPRLGPHTNGASRMCTQRTTARHNNIGHLLTQPHNSAPFTFPGSRCHPHSRTP

SEQ ID NO: 1000486 - protein, 669 aa, Homo sapiens
SGLTQSQPPRRPQMPHCCVISAHPSLSHMPTHHTTTLHTSRDKHDKRTHPHRHTHTAQRPESNGNANASDYIHTHTPPHQPKFTQDKKTTSTTNTTHPTHKNHQHTPHHHTNPHTKKKNTTPYKTINTHLPTNTTTIQTTTQTIHNTTHINKQNHTSTQPKNEKQSRQKQAELQTRGNDTETRNGRHTSRDKPQHTRNAQHNNEDTPEQETATAGRGAEPTANRPQAQRLPTPHDATNQHRRQARGQVNGHRRRRTTHATTHNKRPGRERQPRPTQQKRRAQATRHTPPRDDGELRRRKHATRRTRGATGRGHARSTAMRDERGTPGPLRPTTRDGLIAHPKAGARRANKNSPMRSRRATREGSEMKQTQRGGRVQSGNGGGEARTARRGPGADKSERRGRGHSAETRADRQIAKTHSQTTGTRAEPTRHDHRTQRDISPGAQTRGEETDASTQNDRPCDAKGAADRAPAQVNEDGARYTTRASGTRPPSAEAGKNPATHRETAAHTTHPTSDNEDSRERPTEQTARKERESRRTTQRTTTEDSEEPLEAQSQKPASEERSSERTPMHQLPQTPHQTTAATARQNHAQAAHGNNVRGTSSTRTRSEKAGATAERESAATVRAERHRGARGLHGRTTEASETRDEETARWRPRERGKTNLGTQSSAPLAP

SEQ ID NO: 1000487 - protein, 254 aa, Homo sapiens
MSSPWPGYRHLTWAPPILCVGVFQHGNGGDHLPRTMDNRTTPSYVAFTVLPERLIGDAAKKPGGHESPILDYHHSTAKQADWTDIFEDATVHLGYETLARSGMAERGEAKPKAASRATRGQTTDLLPKKRYPPWSSRRLKEIAEAYLGRQGCTSAVHNGPGLSSHDSKPPRPPQDDRHQSPAPHCACAITHTTPTAGPANRPLRALEPPTARMTPPPREQQTVSSLLRPLHKSRPFSTAAHNTLTHTQALAQST

SEQ ID NO: 1000488 - protein, 254 aa, Homo sapiens
MHELDFSLTACIAIRPIHYYPPKLYRDTALEPFIPNAINDAYQYHLPDDCLAPVERLSCEKLPFSKTARVWLQHIRAYVRLWQCFFLDAATAVNSCHDPSWLPNSYTQWLLAKRALPLHVEVPYLIDGNDTYILTPVEIARYYARSPSNTASVTPHNITNIVRVTTLCENQRHIEIALMANYPRHRYFATNFIDTKPPAHFQCIVPWEPTDENNGTLCSLRGDEPPEGQLAHLLGTLETLCCDNKQRNQAQFAV

SEQ ID NO: 1000489 - protein, 179 aa, Homo sapiens
  misc_feature (27)..(27): Xaa can be any naturally occurring amino acid
MDTFLLVLPYSSRYTFLHTKGPGRALXQADESLLPCMNCTGRMRLEGKLAVPQLVARVRSERFGPGEENRIPRRIGRFHDRNVDVDVTTIKRFQFARFRPSKRYCQLTVWLLSTFLIYAMVTCSAIGPASQNAPRRQTQDEGPNLSKIGPWLVAQKSSEDYGRTVFSITGFIHSVTGQA

SEQ ID NO: 1000490 - protein, 71 aa, Homo sapiens
  misc_feature (43)..(43): Xaa can be any naturally occurring amino acid
  misc_feature (50)..(50): Xaa can be any naturally occurring amino acid
  misc_feature (55)..(55): Xaa can be any naturally occurring amino acid
SGQAGKMAAAGAGRLRRWCASAPAAAEPPPARPGAVWPRARTXYHKNGCXNHYEXILETWGPVWNEGGKKG

SEQ ID NO: 1000491 - protein, 99 aa, Homo sapiens
MAEYGTLLQDLTNNITLERSENMLNVWPLQNGKRPIPPSQNNDVEDDHYMAVPAFSFLESHNKLDKDNLSYIEHILSSNSFPLPRVPLKPLTSTYCVAS

SEQ ID NO: 1000492 - protein, 309 aa, Homo sapiens
RTPTSLLERWAFAGRTGSHELEMEPLLLAWSYFRRRKFQLCADLCTQMLEKSPYDQAAWILTSNDALNRHTGYTEMTLTVTTQRRNLPATLMLDDNAIASSSTPWNVFETPCELISTGGPSQAVQANSHKPAKTHYSALPSSAPSTALQLRKAHAHSLATQATPRTTPQETPPSHPAPPLITHASPPAHTHSRPTPQPHNRAPVTQCPSPPKDPLAMAHPHLHSTTLHPYSALGTFLTPPTVHLPPRTQPLHTLQAADNRSLLLLYRSAYFIPSASNSQSASTSRTWFLNGTLVSQFLSATGILLQASL

SEQ ID NO: 1000493 - protein, 251 aa, Homo sapiens
MREIVHIQAGQCGNQTRCQPFWEVSPSMNTGIDPTGTYHGDSDLQSGPHSLLYYKEADRVGTVCPSLPILVASRSLEHHGNSVSSTRSSKQPDANRTQTYFRIMAQSGAAELTGPKAPTNTGGRRASVDSLAPRHAGYPQRRQRDLVTACQGYQLTHSLGGAHKASWQWALSLSAKIPTSNTLIASLNTFSVRAFTQKSLNTVVEPLQATHNRPNKGTKYRLTNKGHEHKALQNIRPPAPRADHTNTREPT

SEQ ID NO: 1000494 - protein, 165 aa, Homo sapiens
RGVAVVVAKVGCRTRSSRTWNNRGRLRDPGASLVAEGEAEEESDFDVFPKFSPLPCQLPGGGAQMYSHGIELACQKQKEFVKSSVACKWNLAEAQQKLGSLALHNSESLDTEHAKAQTAVSELRQREDEWRQTKDASSSTKTRQMCLWSTDAITHGMLSNYRYEL

SEQ ID NO: 1000495 - protein, 41 aa, Homo sapiens
MTGYSSVRGCDCHLGNFAKATFDGISKDLQLLEPRTLERRT

SEQ ID NO: 1000496 - protein, 235 aa, Homo sapiens
RAIASWLLDSSAVSLALLVQIGQDVSLVDPLFVETELCGADTYMAPHRHGSDNPGALVDRRAEGIEKQSARSDVSAPLMTKPSDEEMLFIYGHHIKAKTHLLGPEPLYSNWYNVALAVVGASYSRSQMGQRLADLSLAKCTTCIAGNFMRTRMSHVSVVQSTKVRRELHTRRTIRGHYRRGAGHVGYHLWPSSSSSHENLSRQNGLSFFVVLKLPGRDIVRANFRRDTNSNPHVR

SEQ ID NO: 1000497 - protein, 122 aa, Homo sapiens
MCDSQYRKFHKDCLKVKRGKARQSYHSPHIVERISNSTRICLNQLEDILEVPLVPARQYRHTIISKLVSPEERRKEVAVIGGKGQKRRKTFPWKTKPVNTLDIAASALENLGTKYLPRGSAR

SEQ ID NO: 1000498 - protein, 69 aa, Homo sapiens
AADVSFVLFFDCNNEICIERCLERGKSSGRSDDNRRELGKREFRPTFSQQSQLIDLYEEMGKVEKIDAI

SEQ ID NO: 1000499 - protein, 297 aa, Homo sapiens
PAARARATPAAARAPAPALAPPSRPRAPCALCRRRPGRCGRMRGGSPGPRLGGSLAERRRPARARDPARVGSPREAAALGPARPRPTPGPWTQTRPRHLLHAPAPTSAAPPMTSGNGNSAIQHRRHCPHRSGDEYTHTRPRVTSPTLLTHCYRHGFVIQDRAAAAYPRQGRSYRAWLAHSRRRSMHTGVPGLKKLTTRHASRPITNCTYGAMRAQFRSSAHPHSKTAAAATPPTSSTSDASFLARTCADTVCLTIGFNAVHGPITLIHMRRFRDPKCYTPRGMSRNPAVPNYFPLFP

SEQ ID NO: 1000500 - protein, 139 aa, Homo sapiens
RIPLRNHHGGWAPCTRILKHLEGASEVSHRCSVQWGSGPRCVSGQPTPRFQCVAREAKPEPLTFLACKLSVHALSEEMECNDETGRLADLSAKELRNPVRCHTAASSYTLVVGMYILNADIGELASVAINYSLMGELVP

SEQ ID NO: 1000501 - protein, 90 aa, Homo sapiens
MLIDTGSMLEFQLECYWVLMLGGILLSDYTVRVIDVESVWQSRGTGVSVEAVDPVFQATMWALLKPDRKAEMGEVGITVPGLGCGFWCGY

SEQ ID NO: 1000502 - protein, 119 aa, Homo sapiens
MSDQEAKPSDLKTVSGFRRNGEYTSQNLPQVDLRPATSDLAGSPVHKCNMTITFIKETQSNRYLSQRQGAIPMNFTPGSLVLRRAPGAHCMSESPIRPKTADVEDSGRDKKKVCTVKGF

SEQ ID NO: 1000503 - protein, 337 aa, Homo sapiens
RATVPPCRPAALPPCRPAALPPVVPARGAPSPPPPHVLPCVVERLGYNMLGMIKNLAVRKLYETWPWQVLTQRGQRKKLPMTERACEGGNICHSEEVTDKPVRMRLYGQAMPNGRKVCAGAPMTTGNWRWPMTVPILISCVPQLNDGSLPQELTSLVPDSTTNFHTRDPPAPSDNKRSSIEANGKAITCLSHCQHRALTCHSEPDPRSATKPPVLRASPASATATYRGPHPPPHRQTTLPMNAPTRQAHRSNRLAERHQRPNEANNTPGTSSLQCPQHTAGTHAHRPSHAPARHKHPHPPPLNARTRHPPDHRLAPPTPPLRHPTTRHHDAHPPPPH

SEQ ID NO: 1000504 - protein, 251 aa, Homo sapiens
MPQGTQEDSTGPLAEPASTTRTAREARGPPNRTGYGDSAAARPQEWQPLQDGRRELPGAEPALEVTMEHTQAEHTSLGDQTSRQSVTTPGPKPWQPPQKRHALELAPPHTYRNSLRDEHHGHPERHFPRPSWGTTDGHPRERYRQLLTAVTRPRQTTTRTHQSYTDMHTRTVHHPKPTVSDQEAIPHSVMHRLQTNRANDGQAGGAIQTAGWSGVRSSSHRLPRRTHCKGAVSNQGEHPTCTKRRFQRLMT

SEQ ID NO: 1000505 - protein, 328 aa, Homo sapiens
MVDGRSPNQLAAAASMCAAAAAVTEDREPQHEELPGLDMPCVRQIENWLRVGDELSTAGRRKLVPCGECTGIMQLWMAYRACGRGPVTPSTFPGCINNATLFQDDDNTRRLNWRDWWKARITVLLPAAAWALPGQLVWSKSMASHPLNRRSIELPNIQKVERCTQYEPAAVSGHIDSGPNLTLYQFQPLPISIAPRYLRTAREAGYWWTAPVTDTSGFGPMNSDRLFCMACMTHTITGSRLPPLDKLVQSLGNPSSCTNPRYTKHDFAPFCLPLAHQNVAFVLVEPPCGQILGSDLRRGHTQKGTWLSPHSQIAALCTHALTSSGLHL

SEQ ID NO: 1000506 - protein, 395 aa, Homo sapiens
AGRNVGAGLVVLAIKPEAVAEAELAGLRRRSVDEFHWIPMNLVEVFSACLFFRFTYSCLRDERSPQSARSPGTRSPPMRKTGGSIDMDLTYYVIKMLLALRWVYSIHGGEFMDVRGKRVSISDSQLLLEVKKTFKVTRDSENARSHLRETCTIAWNAQAQSRTSAWELIRRAQVPPTLVEVISCVIDQWYEKLGIAEVSHARPAGWYGHIFLTTKGCNGLDLTDILGYILGVGRIGWSRANINRFSNKGTMKECARREARSGTMFAFKCSRTAKVRSTEGFPWRNITCGPQVYGSAGVAEKDLVEFVEPRPVNISKELEGGDHRKGRVANYGPVGSPYQGKKKTKTNFPLNFFEENATVVAKGKVPIKTVGTQGRFPKERNLHCGNCHFLEPGRK

SEQ ID NO: 1000507 - protein, 70 aa, Homo sapiens
RESVEPLAGPAWAPYRRGSTPLAGQMEDIKLEDSLAPGINVGLSSCHAESLTDDRHSDDRLLMSFITYGA

SEQ ID NO: 1000508 - protein, 76 aa, Homo sapiens
SGSLAGDGGQGLVLTGCVFSAPIVPGSVALGPVRYRGCNPRSKYCLGAPGSLEMGSLTLVADVGSYDSSLLVGCWQ

SEQ ID NO: 1000509 - protein, 115 aa, Homo sapiens
MLLVGSTKIVIWEVSKVSVAVVEVTKAISLLPLPVRWPASQCFSLLLPSSRPYPFWILAPVTNIIRGVIPKISLRSCPWITAVSAYYGGLDRPLVEQLEAALTPQGPFPGHDKYD

SEQ ID NO: 1000510 - protein, 200 aa, Homo sapiens
MPKRRGTRKILESDHSNCSYPSKRNDCRSTWFTVAGTKKTQRIRTIEANEVLAHGWLGETEWTTGPWLVMGPWNPFRKPPREKAFLIKAWALPELEIPGTERGPFPSGLHNPFYKFPWDNGTLFFKGPSYPNGLRKNIVGSLSRGSTKGTKPVGKNRELSPSSPLIGVWSRHPITWGHYDGSVTTLYGTRHTKISSHWNG

SEQ ID NO: 1000511 - protein, 71 aa, Homo sapiens
SGGNPGCSARSEVMEIPGSLCKNVELSNNAQNEGNADEQAQVGDQDHHVSRKKRGQVVGSMRWLSVVALVW

SEQ ID NO: 1000512 - protein, 203 aa, Homo sapiens
SGVGWTAADVGEVRGCKRAGRGVPWRVVGVPGACPHGTQEWAWPAVPLLRMPCGGWGGRWCLLAPADWALWTPHAACDAGCPVALQACLSPVLAAVLRLPPVAPTFAQVSLCRVPCVFTLPCCSSLQLWCLRLTVPCGAWGLLRAAGPAWPTGSCNSLLVGAYARGQTHGSPGPDLLRHQDNRTQAGTRALGNPRSGDTGPCR

SEQ ID NO: 1000513 - protein, 354 aa, Homo sapiens
RAESACRASGWWRGSCRPLRARAGAARESWACWRCNASARPAAGVNGLAAACPVPGASGAVSAAKCDLWETLRAALGTRLPDRLGLGSDWRGGRSEQAELHSALDACEGAQEWKLASRGPRIWAHVTEFLKFGHKSNEKKQNLVRSLDDRWPLEHHELEQSPGEQALQPGSILSEDEFYDALSDTESERSLSRLERRDKQRSFCTSDGGAFGAGRTSTRNVRTKSRLVVARECSRPSANQGHHRKRGLPSPTGLAQDELHFRLVLAAIGSERTMANWDSGDATTQRIDRTAKGSTSNMRPSLRVSPRRRPLTLHIHIGVREQRYTVEVTRTGASGATVFVHSVCGTDCEIQRCA

SEQ ID NO: 1000514 - protein, 102 aa, Homo sapiens
  misc_feature (54)..(54): Xaa can be any naturally occurring amino acid
MFKEDHSLEHRLRGVREDSRKYPDRVPVIVEQVSRPPPESLTIDKRKYWSIMIXHSWPQFMWIIRKTDPSPFPFPDNRAIFLFVDEDSPTVQAPLKPVNLRA

SEQ ID NO: 1000515 - protein, 428 aa, Homo sapiens
  misc_feature (141)..(141): Xaa can be any naturally occurring amino acid
MWQAPSHGSRRPEIVYCGAMKATKYRVSSASQNESYDEMKFHQSSAVVHSCWRVELTRWRTGVSSGTWIGVRPEEMVRFSVYMERIEWRMSSGETTERANAFMTCMRRARPSLTARHLRLRELKLTAPVERVKDASEGELXGNAGRPHFFQGYDLPSLMGVGDTVPEEIMVLCWGAPLGVHFFRLNSYPSVDPLHCFVGASTQGIWNRLLAGFLCWHIPRSPAGGRLRRLLIPSLILCPPGEILQQSILTKTLAYNGCTRVGMYPIPIILAVCSRLATQFDSFPPEVLVHPPLGEIFCAGGEHNSSQAPFKRANFGFSFETVVAPRPLRRNATGQFNDGIWGGLWRFSFGFCFGQKRFVGYRPRLHNQTLRTLEIISAEVGNFDNPKQNTRRHDTRYFQSSALGEFARTQSHRGALWKNTLYYEQEGE

SEQ ID NO: 1000516 - protein, 118 aa, Homo sapiens
MGFNKTASCGARWATYDSATISLPIPSQTKGELVDASTMAKDVPRRPRNTLFHAICLETVQTSPSQSLFDNRFLLSRFLSDLEVESHHGKDKGYVGMESGVLHQHIRPRRIRPMRTVC

SEQ ID NO: 1000517 - protein, 355 aa, Homo sapiens
SGPQLQPAEARRTQPPEKPRSRAKPVTDPPDPVSPSHSPATTMAEARRHAHALEEMHATGLTSWLMSRWKAPVVCCNWLKRVKMLVSGLRLMLADTRRTTRIVSNQGMQPIIQTKNDEGRLSSKHFYTSISGQMLMAFSSCPCQHSLNQVDAEQTNALVGTYITDRQWLRPGPTALANVVKCDSTQGSQMRHQAWRAHFIPQRYPEIDAPEEHMDTLGIENTAYKGKGDDGGTPSGEHHNHGTHLGTPATYGATENDIERAQRHVRPTHSDTGTSIGRKRLRQRGSDTEAQGHDRKERATTPTNRCNPKREWTGDERGRNRWMTPPHGSATPTSKVTASGQENAQEQAQTSRTST

SEQ ID NO: 1000518 - protein, 107 aa, Homo sapiens
MGTLDVHTDLRVQLEFPIPIVHSDLVSYRAVRGRSVAPHVREESSPLVKMVTHVPGEVQAEMLAVSVPGVRWDRILQLSSAKSIVKGIIVSEYCPFRVSQQGIACMT

SEQ ID NO: 1000519 - protein, 94 aa, Homo sapiens
RDGRFGDVNESLSDVLIIGVIAERRGDQTSSSDQYRLIDAFISSDDSDVDKRTQVIWVKCRESVHSELINPKGLRNGHCNRDTSPCIDTKCTRV

SEQ ID NO: 1000520 - protein, 269 aa, Homo sapiens
  misc_feature (92)..(92): Xaa can be any naturally occurring amino acid
MRKMSLGLHLGSGQLDALSVVLVCTHNQTLQVSLGKIVKLKNMLKVRRVGMEMEERWGASQWLGILGDEGPRKVNAGSEGEARIELCITLVXGTSIKHGLRGRGMSVGKPLGGIRIKAHPRITKARERALETEWSSQRCNVGHKAVQGETGLGPAAVNLDRLIRRKNPKAGFAFEHEQVGVPKRTRCSSLTPGGSWPRVGPESILVPHRHRLMVLKGGHGARHSATTGTHMVHVYGLGLDEYVHWGTREVRMCAWGNLGPATGRNTVKA

SEQ ID NO: 1000521 - protein, 117 aa, Homo sapiens
MVEAGVDGLGLLLLTRTLVCTQGHNTRQGSRRGKTQESKDWMDDDHRAQWPLQQAGLMQRCATLRDSKNQKTTRNPPQNNAARAERIGNTDLERYLERILDQDCGQGTGLNRPGPPP

SEQ ID NO: 1000522 - protein, 147 aa, Homo sapiens
SGLAPTVAGSQTQCGGRQGMGHGGAREGGTGSAGPSRTGASQFGSAAEMLSGTDSSAGRQCMGINECTAGMDAEPQVAKGKPGRAGMENSTRTSGSTCAVTLKRSHSALQEKAHVCSLGSCNSPGGEHWRLGDGSMQLLVGWISRAW

SEQ ID NO: 1000523 - protein, 122 aa, Homo sapiens
SGLLGFGLAAVCLTAAEVVWLIEGGGFCCFSYGGVCDGPESRPRQSGRRVPCRRRLKMQYATGRCSSSRFVFPEAYRRGVMSEYMRGYKPVGTQTFRIDGENYLASTRYIRTHTHLSCQSSN

SEQ ID NO: 1000524 - protein, 338 aa, Homo sapiens
SGVGGLTLIQPREGDGRAMSAVCLELAVPIQTPGGHKPMRPRARQNDGRLEEEGTAGACGGEQHVDEPCASGCSCCVLETLLAVAQLGWPCGVCVLARLKGHQEMHQVRMHLQRRGAMMRLSGPDETCQAGKGTRAVLPLPQVPNPLNSRIHEAEEEAIQLVPGGSALQSDNASTIHACRFYNTALVGPHKLSDVVSVRVFPGVTPKRVPETNPMGRCHGILVAEGPGISPLTFGRHYALGKLRGCCGTEKPASYVVGPTGSHTAYRNSPRTGETEDTFGCNPGIQQVSRHSSLQLPFPCNPRMGLARKGRRCSVPGVTSQVHWDMGESREAHAPGHI

SEQ ID NO: 1000525 - protein, 91 aa, Homo sapiens
MRWNHDDFASDYFAYGRDYFLSNGVTFTACQVDQQRLVSMSDGCDLDEGCQRATEFSRCCTSQSITLPLLRTPSDGPSVGLALRGTLDLSP

SEQ ID NO: 1000526 - protein, 77 aa, Homo sapiens
MCDDEETPPGVRQRLWAGEGRFAGDDAPRCCLTRPIRGPPRDQEVLAGMGQKEILRKVMKPQSKRGLTEPLRYTIEH

SEQ ID NO: 1000527 - protein, 175 aa, Homo sapiens
MARVPPRTRGWGARAGPMGPGPQRPERRRPACVSLVARLSYAVGHFLNDVRVMWFTYLLLYLHSVLRLQLPRAGLLLLLGRWRRAVHTARGLRGDRAASCCARYGPRKALAPGRHRLRLLSFPFIFSPCLGCGGGTPEWAASSITARHRDLPVWVGLHTDFPPQPHPELVTTDHE

SEQ ID NO: 1000528 - protein, 118 aa, Homo sapiens
MRLLVAPLLLAWVAGATAAVPVYPGMFPAPSVCLPDPAWYTAPLVLQEATTVDWNDYSCRSPTGTPRGTTGPCSESNSIVRVEQVSWATGNLTELDCPESFRMPRLGFPCLATVTDLR

SEQ ID NO: 1000529 - protein, 67 aa, Homo sapiens
MPWTKRHEPILANGSRLDCGGLPESGQACRHTALNHAGCALPSVLSCVNFLSEASVWCLKAAVFLAS

SEQ ID NO: 1000530 - protein, 467 aa, Homo sapiens
MAGKNRPFHTRAYRAFRIEISRSRRHELFQINDHRDMRSIPERAMHCSAIILCVHGTMPGDAENMSVSITSQHKHNARRLRRNYSPARLALAHRMRGKGHDAKQSKAHGITRKDSPCTRQSRSKPISHTFIEATYASKIETGPTRSARASVADAPAARRHPVACTLGETIGHRTETHTHGRRAASPNDCVLRVAHGTRPHTSPTHRSGRRARPAHTYHPQGGTTSDTNKRRHSHSDTRTRPLARATHTPPHRTRPQLQHKRIAPVGGRPWQNRKQHTPLDNPNGGPTLRLSQHIHTLKQSTPIEPHLPSAHPPTTAIPAPKSIPRPATIPAPRHAPIHPFHSTHSPRSTPAQRPLTSSGNRHRTHDPHPPCDPNTPTHTTRAATAGCRPPANRPGSTCSPRTYTTHPPKPQAAPTSTPHRTLHKATPPDRPHANTPCHSDHPPHHTTPPRPSPPNHPNPPPNSTNPA

SEQ ID NO: 1000531 - protein, 243 aa, Homo sapiens
AALFHSEAYSAAACAAAMSLGDSLKSSRHIVAEILNSQHRWAGKIALAITGIKGVGRRYDSCGVEETQTLYLTNAGTRRTITEEMRNENVWIHTLCRIHASTKIAQTGFLNMTTNVMYNGCDKISRQDAYDQMARGTNIARVKTSESTEGRISGRHTRGLRRLLGPTCPRGRHTKNIGPSWCRNRAVCPRRNNLCTDLLCIIRYVYTIQKMYMKIVLPRQISQITGDNNRRGAPEARSRNLKR

SEQ ID NO: 1000532 - protein, 227 aa, Homo sapiens
MRSRPVGPALLLLLFFLGAAEIACVWAQAPTPLHPRLDSSLDSRPLQSLVRRSQVYGVFIHWGVFSVPAWSSEWFWWHWQGEGRPQYQRFMRDNYPPGFSYANFGPQFTDCTSSTSEEWADLFQAAGAKYVRFDDKASRRLHKRGRVLCLGTGTPKTWGLIGIRVGNWENGHSGEREYGYGIYHSLLEGFHPVYLLDKNNGSKHSILSVQKTMPELYEPWLTAINLI

SEQ ID NO: 1000533 - protein, 297 aa, Homo sapiens
MTLYRIDSTTTHITVGAKYSYTQNNYTDFRETRKPTVANSSCGKKDSTGRTKPKAVAARATQTRYRLTMHESNTAKHMPGDMAANGAQNTEELNERRPNNKQPNAAGHHWNPSVTPHDQQGEDTTVRKREHPKGLHEHVHAPDNQLDTKEIGASTNGAEHIGIDTNTHQGYQNPCERRRPNPNEYTFVTADELRSQGRKNHNKYDFGAQTLRGQHQNTTPDDETHNLKREMEFHPDQHHTEEQANERSPRQQTLTQKAEKHARSPNAYTVRHTTQSTTVNTQARVRNEHIYNERKQH

SEQ ID NO: 1000534 - protein, 48 aa, Homo sapiens
MYTDNTKVGAHNTNVGPQKKTDGHPEWCNKRSDKRRDAQQTTHRRQAQ

SEQ ID NO: 1000535 - protein, 137 aa, Homo sapiens
MDVVLCTTSNGIDERTSTSEGFPKGWTEIYSLDDTADASLYSITLRKSIKMFPLDMMDGLLAFQNSRLTDSIITEIALVGIKRMSLELGDYESGDDAQYAEMVHVSDIYRALSVELVEKNPPYPHGAHYHVDKVDAS

SEQ ID NO: 1000536 - protein, 199 aa, Homo sapiens
  misc_feature (50)..(50): Xaa can be any naturally occurring amino acid
AEAPDQAEGEQCQSTAKKVSFGKSERGKPVVMQKMLTESRDFVAARGKPXGALSLDPVPGFYQICPERNRGSASQNLLSRTVWHFLTAKSRPPGGVTQGELTPPFGTGELGPRDSGENTRGRGPTSGTLREEELVLALSPGALWGIGNSASRCAICGHRFGQLGPMAIPVCALGLGFGPDRRTPQKTARIGRTKATRQQ

SEQ ID NO: 1000537 - protein, 85 aa, Homo sapiens
AGIGVFITQQIPLSHRRGALAAGTRGDENGRRHEQMRIEEFPRAMTPRTKRCAPQEQTRRRYTEHTPIQATKATTTNPEPPTQTP

SEQ ID NO: 1000538 - protein, 124 aa, Homo sapiens
SGLGFFGHLWSSREVVAMKVKLCSLTGYKNLPRTRKVVYVQGPYRCKVSPVSRNSRRKIARSSVSPFHKKDESFVLELTRVTVSFLHDMERAEKTATSCGKEIFRQEREKPRAKPSCKFSRRCT

SEQ ID NO: 1000539 - protein, 100 aa, Homo sapiens
  misc_feature (54)..(54): Xaa can be any naturally occurring amino acid
AGGRDRRTRDEWSRSGSAEKWEYTEKGPSPEETIQKLKETRVRYLIEGIPGIFXSQKIPTSELDNTTPTRNVIGEPTISMTSVLLRSGYWRMRRNIGFRH

SEQ ID NO: 1000540 - protein, 149 aa, Homo sapiens
RVEENGRGWQRWLQIQMVMRRVWWRWGGDWRYMSQQSSMEDCEWPEQAAVDDQIENLCEMLEPSNSTTCDGRCSKSLAFVVREEKLLAMDQVVDGNIGALDGDQEMSIERSTWHRIERIALQIYSKIEIHTGSPRWIGTVCKGGRMSVA

SEQ ID NO: 1000541 - protein, 121 aa, Homo sapiens
MPTAVTRDTSNIGDSRHNPLRVERAQEAQQMDETPLRASAMTDTHNTAHHIDSAMTHARNAGRREAQPDGTDRQDRSAAETARQHRTLTGGPSKRLQNRTGERDDVDARSSAPSITALWRG

SEQ ID NO: 1000542 - protein, 93 aa, Homo sapiens
RSAPNGRAAGEINELVTRVLYIQSQTVVVPRCAYVSQEQHSDEELARMTGCPTSESSGPVEIPDHTMTPDSESAATIVNCLRRLSPCFSLQVQ

SEQ ID NO: 1000543 - protein, 210 aa, Homo sapiens
MASAGICCARRLRASSLSLPYYHARCYERLGKSAGADRQCWWLLLNRTPGAGGPFSAQVMRSLRDMKRVLSEHCINALCVTQQRDAGACLRTLTTRICTMVVMYRDARQNLILFSTYLEDILSKRLPIILKSPSYPRMKFTPMNGSSGPGRLMAGGVMPGNFRWIISTSITNVFNPIDGTEGTTNPALGIRCTRMIQEGYRSTRSFDLRL

SEQ ID NO: 1000544 - protein, 83 aa, Homo sapiens
RGFILGGTQKMSNKQWPPLASCAFIVIMLGSRGSLQTHTSILRSCLQAQPSPGLVTGQPLPPAPTMLSDLLPVPSPAIPITMA

SEQ ID NO: 1000545 - protein, 696 aa, Homo sapiens
  misc_feature (671)..(671): Xaa can be any naturally occurring amino acid
REGERAGPGLPAAGSMLGGGRGHAWLGQVRGGMPGARGWSPADWLVLLHAAAMAAWQHGIVRTIDACGLLRWAFAQSSRTVGPITPNSTSIAAIQRLVTPTGTGERHCTHYPSHADTWLVPALTLNWALTVSHCTLAVLWLPGTPTRARTLHNVCHGDRTRDSHIHAQKRARARLPPERRRTPQHADWRKAIPTRLATPRRQEFQGLHTNIIGLIKQTRALATGHHSSTNRSYGHPFVRTHGAASPFLYGIRTHSEGANTRWLRRFQEERTTKGGSHMPPHHWRVDSPIWPRGANELPQLRGWIPFPICEQATRNAKLRGRKDNPPRTGRGPTPHRQRSRQEHVTPTPKRRMTDTRDPHRPTHEEGPRERNAHTRRMQIRRQHMYYTHRATKTTQPGVGTPNERATATMVRARRAHTVPHTVSVRNTRNKMNRRDVQESSDNTGSGYAQTCHRRTATQAPRRGGARTTRDDYNESNTTRQPAQRRVRPQSSRAAKPQPEAVHERSGEPASFDGIKTTHTQGSNHLSPSKTKIGWPRRKEHSEREGWGHPRTRRVHRPHPRAHQNTWKNRHHRGADYRRRHVPSTPRQNVGYGALRTRGRGHTSTPRVDRINSQPKQDRRMRKTMCRRSAEQRQTPLPRDSVAHQTQRERSDELWINTTTKLSRRYAPRRPXQIAQTAIDPQIMTIRENKADSLHTT

SEQ ID NO: 1000546 - protein, 119 aa, Homo sapiens
RAELSRKLGERRRSGNYPGCAAARQLIPGPSHYAGSAPHRPVRTLVKRNNVNYMSSGGHNPSAYYRTAIDTKGCIEKLALQVDQSWSKKQMTGENVYIRLSLQLTERPRLMQKKQGHHY

SEQ ID NO: 1000547 - protein, 86 aa, Homo sapiens
RSRFAFPSGEQAIRKAKDGCSTSTLQETMDERSSADVMRLSSVGSAAGELPPVSLSSSTGLSRAHIHGPELKRGTTGGLSRTKVKD

SEQ ID NO: 1000548 - protein, 186 aa, Homo sapiens
MEIFPWTNRIWEATVYTIYKGESGATVRGTLAISVTSHVTIARRGFKAFCKWVLQASGKKKRWCGTQKLIGIPTVGWGKKTCALKAEDYTDRRKPYTIYLQEEKIMNFFTCGKGKEGDTAPKRVYGKDRTKPNVGWLDDARETLDRIGFGWAFGTNLVKHTWLKGEIVVFPKIILSFGNLASWFLI

SEQ ID NO: 1000549 - protein, 147 aa, Homo sapiens
AGAEKEPPGPRQTVSGVGAGLGTRAGPASCSSSGTRTALLAVYGEGVHGCLITDVTVEAPVKDLEDVVKSTKIIIGMLRGHHRSWCAVMLVAFYKVCCKQYQTPQSTMGPCSTGGDHQPWTEEADSADSVVWRGRQWSPRAQVGEWW

SEQ ID NO: 1000550 - protein, 273 aa, Homo sapiens
SGSRVFSSSQCPAYLPSPLAADRVLPLTDRVALLSSRMIFLLLLLLLLPPSLPLRLIMPLDPLRQQVPALHKEVQRCSVRTFRPLTRHVTRVVCSGTPILTLGRLSGLLPPEQRYTTRGARPLTPHADTHCTLWHTRRWDRLYRSTTTPILGSAKHLATIGIRQHSCVRVEVRNCILLPWETVYVEPAIAAQHQQGEERRGAKQQRDVVAPSQEEVPTERSTTGTQVALDRTRDHSWNTKRTLTRNAKTRPQTRARTGDPLSTGLVTRTAWYQ

SEQ ID NO: 1000551 - protein, 101 aa, Homo sapiens
RGAVSGRVLCEESECVELEMRGAYELTLEDGGEANEELRADASPRASIRAFLRAWMRCSKGRAERGDSVTRALLNDTIYQENDELVETAIHELKRIEKLSR

SEQ ID NO: 1000552 - protein, 73 aa, Homo sapiens
SGVWHRGEMETKTVITCLKSLLIIYSLVFWITGVILLVASAVCGNNVTLGTVVLVPLIDREHQGNVYRICGSS

SEQ ID NO: 1000553 - protein, 123 aa, Homo sapiens
MRRTSSWRHHRFYRAESAGVGPGREHAVAGGTEDPSMEPLRGPTSRRNDEHQKSSVCEPLVHNYPTEAMLSVGPSLSGAVAWFTSKARTGAATQSVGNFGSIGTDLGRTGGIQARQRRCLIRT

SEQ ID NO: 1000554 - protein, 79 aa, Homo sapiens
AELALVSPAPAACPPGLVASALQRLVEQLKLELGVDEDQGSHHGSCMSLQTDTVSARYACEDAYCWWAVPGGSNPFRRA

SEQ ID NO: 1000555 - protein, 131 aa, Homo sapiens
  misc_feature (3)..(3): Xaa can be any naturally occurring amino acid
  misc_feature (5)..(5): Xaa can be any naturally occurring amino acid
MHXTXWTDDSHNVTYRIVTGASSTIDPCSSFIALGAGIDVLVALYSGDALCVQKDQGIMGGRRSIILCIVAVIVLDHAVVVELVHRKEGSFISEHQSSLYGRSAFLRYSAVSRTYRVPGYSYYFLEFTTLG

SEQ ID NO: 1000556 - protein, 37 aa, Homo sapiens
MDTGQANGDCPHAVRGHDGPRGPGTTPETATTGTTEN

SEQ ID NO: 1000557 - protein, 225 aa, Homo sapiens
MPRLLAGVPVAPRSPLVRYFPLLTTPNPEPVSAEVTGRQGGPKHDVPQWTAGAAAYWVRGAPEPPRARGALGRPKKAPRAAARPSIGAGLGADGRPCAVGCAYGAIQPERTESTVCPRVTPENRQRRRSPCWLMAKRLATKRVHTAKCTHGPRKRTRRTSARSPQSSNTGAAYRRRKTSSQKRRPTHTQRNEPAKAARGPSHDYSNCTHQHSEADACPGCTQTPE

SEQ ID NO: 1000558 - protein, 274 aa, Homo sapiens
MAGSRLPRQLFLQGVAAVFMFAFASLYKQIPGLYGPEGILPVKEDAAGPQGQWGAGSSCGRPRRCCGKRRDWRLDTGPEDLDDCMTPWLRVHIDEPLGTPVLAWRPSVTDQTLSVIIACVSEHRRYTEYSAAEGGARDVTIVIVRCGSSPGLLDDWDFHGAWLGGVRSLKAKPSLAGKAGPTKGECSAREPMSQRIDHPRSELVQMAACSSTRCTPSGVVKLTSQLTCSGGGSADLNSTTTETQLPSHARLSGSDNSCRSGCTSSAVVDTFLIE

SEQ ID NO: 1000559 - protein, 193 aa, Homo sapiens
LTEDTLRWLKKIAPSSDHRVRMSNKMVLQGLLGDLLHSPNRGANCLSRVRAAYPTCGCSVDWLVQQLAARLLACGGLGRGPAVMQDLCGVGPWAPCAAALSDLETAFTSGRLRARHFRRPASVWLIIHGMPDGALAQTFNPGLCWGRGRYAYSFRALHVASMWTGSVPGHCARHSNPELVIVWPADIPLHNEP

SEQ ID NO: 1000560 - protein, 232 aa, Homo sapiens
  misc_feature (131)..(131): Xaa can be any naturally occurring amino acid
  misc_feature (157)..(157): Xaa can be any naturally occurring amino acid
SVRSRRQGGNEEALKSAAGKQLSYRHPAKMISSRAQTGQYPDGLKDIVARRELGRAVLGNARPCETINNVLQLAVLFKELDYVIEGIATMDITRSWINSEVFSQDEEYERSGSGRKRNHEKNIRSVEQRTXEDNSRVGTRKSSLTQYGERSTRHETXDIVLDAEHELVSDERTMPVFTSSLLAVRRHLSKREGKIGGRFFPRRRHPVETSTPPIITTVQQHVSTMSLRYVPA

SEQ ID NO: 1000561 - protein, 167 aa, Homo sapiens
RVQRAGRRGDPRNVVAPADSALPPVLGDACVPDHDGAAQCRPPGSIMLATTLLGASCGRSAGPLVRCRRDPYRRTVTQSRSAGRPARPFCCVLCSGLSRQSMDGSLKHALDARAATIDTNWRTTRAYVGSVPDARRLRLGVRPTPRPRVDPQAFVREQEELVVASQA

SEQ ID NO: 1000562 - protein, 204 aa, Homo sapiens
  misc_feature (143)..(143): Xaa can be any naturally occurring amino acid
RSGGSETARWVERVFLEGCDKVGARCLGMLLLLPSRREIYCGVGAGCRLDLPKPVRMGTCSLTVARSAERIQARVEVCSNAGLQVRWVPVAVLTSCAISTTLALTRMRVTVPVGVWRELLRFHCLISSYYTFTVVFRALCRSXTMRTGETQNSDGLGHYGCGRNNTAEERRISVAARRITLRKTPKDSWVAHMVMVEVILYTQA

SEQ ID NO: 1000563 - protein, 157 aa, Homo sapiens
RMLGLDACELGAARLSERLLAAWRLCGAGGPSVDCIKEGVGSGLAPDATMGGGIECCVLEVPGSRWGGMSPLENHSGMLETSVTDEGDLAQRLLMSGCRAWEPTWPTRCPAVTPMHVLAKCCKGVTEGLGTRSPDQWKQGRLAGASCVPMGSSFQQG

SEQ ID NO: 1000564 - protein, 83 aa, Homo sapiens
MLVTMSVRDADPCTCCGLSQGSDDRPAEAPAGARSKNRGYAATLPACQRVPARQDGRLENAERRRLHPRVWHNAWPPETPPDM

SEQ ID NO: 1000565 - protein, 30 aa, Homo sapiens
MVGGPCVWFGNNVVRVYFARDPDVCFDSRI

SEQ ID NO: 1000566 - protein, 268 aa, Homo sapiens
AAVAVAPLRGCCPVDPYHGGDHLKIPPHQSVLSGVSVYNVALRSVFKQCGEVLQSLEGTSDVIIPSPSISSLVERIGLASVEWGGRRTSEYYTFMWVTLPSDLNKKSAKQQEVQVKTLTTCPRMMSISSSAMWMRMVWSGEQVLLCNSGQKMRKTSWWLPTQGEVAEIEQHNKELCHENQELKDGCISLQKQNSDMLAELQKKQEELETLQSINKKLELRVKEQKDYWETRAASTEKNKTRRCPQTSEKTGTPTWIRFRPQLSLQRQN

SEQ ID NO: 1000567 - protein, 264 aa, Homo sapiens
SGVFSLAAGPVPELRLSHVPASHLGPHNATIECVESQQKHHWNEHRARRAKAMCEEGELIGTSMAVVLLYATGPQSYSARDTQTATDAGRRQRSQGNEERQQLIGVPTWTKYVDTAAENERQHWRTPPGHRSGANREPHSRHRKNTVAPKTLPEERPPNTQPAAHDHAHYLPSKSIGGPTARNHSTIANAVRRDNARPGGTPAIEDHADPGRPKGTLTKAKHAPQSTNGDPPRAKRNGVSHRQAVPRRPGRQAARRRTGASTTG

SEQ ID NO: 1000568 - protein, 124 aa, Homo sapiens
MVGLPERLCSPLLSRVIASEDIWAPAPPGPGRPWAAASTRRGMDKTLLSLILYCHSGSGSLVGIDNKIEQAMDLVKSHLMCAVREEVEVLKEQIWELGERNAGWRGEWAVRAWQPEQWSLPPRG

SEQ ID NO: 1000569 - protein, 132 aa, Homo sapiens
EFSTEVKAVKLRRDRIVVALDSMIKVSTFTHNPHQLHVFETDNPKASVSCPNSNNSLLAFRARTRAMCSLWTGSREATDILHTRCLSCDQLRQDDDRKDAYRYVLWIIRLRVQHISALHRGPIWFRPGMLFA

SEQ ID NO: 1000570 - protein, 116 aa, Homo sapiens
ISARHPRVSVDPMCPSPLKPLNQAVWPGSLQANKSPTSIELLGLFLCPLITTQLFSDYLAWSLILLSSPDLLWLYCLLSYNSTSSTSPVIAQLGPQSCRSSLCSTTPTCPRDCSVT

SEQ ID NO: 1000571 - protein, 212 aa, Homo sapiens
RRKTERRESRVGGSTSGAKGRGGTLVGADEEGGLSELVPPRTRPPSRLGSRCLLERLQHARKREPSGRRLAQGGPVGCNQAPWPECGTRARGGAESADRRQGLRANTARRGTADELGPGRRRAPWAPEQQHRASYVFGLTAELCLDGSSNTELGTQRHSRSFGDNTYQVLRKLRTRCHIGRKQNLREYTDELGPPSSRYYALLELVFPHKES

SEQ ID NO: 1000572 - protein, 105 aa, Homo sapiens
  misc_feature (95)..(95): Xaa can be any naturally occurring amino acid
MRHNLLVCAFAKTVGKAQNYGWECLDFSRYRIMCVGFAVGLGNGNFRQSPCASWREVMPLPCSVWLHPPSDKTTDEVNPVPHVWKMQEDQSSHSXGSVNIMGKLA

SEQ ID NO: 1000573 - protein, 235 aa, Homo sapiens
RILSSDAAVAAPARRGGKETPSAGGKGVYDSGGRWGSTGERDGNKGDTDETAGQADGAEGRRGGPGARGGPSRRFLGPSLPVLPALQNPGQRVSLSRLILHRLIPDTLRDSASYSAQDRLPSHDLLETGRPHLTRNSAGVLPHHHDGSPAPGSEGVPSTYRTQTQGEREPETGTPFGESLYGLKLREIAEAPSGARDAPDEYTRGPYMRTPLKRPSTCKGGRDHIHREYCPATTK

SEQ ID NO: 1000574 - protein, 249 aa, Homo sapiens
RETRRMLQKRETVLLLRTFQGRRCEIVREHYCRSCVPCHSPRLHHSPPHCRPRWETLCLADVTHLPCSLDVGQVVAPYISEILALSCGCRRHPIQCMARTSPSFPALAARALKHERPAEHHVIRSQPSAPTHPMRLSTGIARRSPRTHVTLPSVSDVPPVTTLSPSPTRRPWPDIRSPHPQRARQRNEARRYPHGHRTRPEPPETPQTQSAFISHRPRHAWPPRHPPTSTSHTGQREPATRPPNSRAHG

SEQ ID NO: 1000575 - protein, 66 aa, Homo sapiens
METIDVAVLNHFTFHENCGPPVKSQFSNYAGPGLDHGFLIPFLVMPDYTKPRGNSGTVPSSDGSHE

SEQ ID NO: 1000576 - protein, 134 aa, Homo sapiens
RGYLAASESSLVDMVTVMGECRGRRLVRFVPGVVFVCVWVAVLRCHRVASGRRTRSSRVVGALLADILGIRGAYVLMRALALEDETPLALRRSEGVFSTSESCEWTVGVNAWCESNGRPLVCGRGETLGWYGMP

SEQ ID NO: 1000577 - protein, 200 aa, Homo sapiens
SGAIAGTSVPQANKAWQFPPHVNELAGNTTDLWQAESSRKPFDLSTLGSLINGDETVLQKSGLQSLSVLASVNRRIRSGLSLCVSCLEYKGKKVFERMNSLSLVKKSKESESKALKKADSVVDALECQADETWVRLKADGQLERTRHLGSAFGSQENLTVEDNDMTHWSSTYSTYEACDNIKEHEIDTRSTVLMATLATR

SEQ ID NO: 1000578 - protein, 72 aa, Homo sapiens
SGFCSHFRPRTGGSAASAEGPSARGVWDGVGPANQRLEYEWKPDEQGLQQILQLLKESQSPDTTIQRTVQQF

SEQ ID NO: 1000579 - protein, 108 aa, Homo sapiens
MIQRASTLARVRCRGMAPLMEHQFPLVRFVPLLRRNPTTEVVRPGALLDKLGGEAGPMTVREGDTWELFPKSIVRKLWWSTLHLVRPIQLWITRWFFEKGSPPFVISK

SEQ ID NO: 1000580 - protein, 40 aa, Homo sapiens
MRRHSGATQSKALAEVIPFIFPSQRKMVTAQACALTLSPE

SEQ ID NO: 1000581 - protein, 70 aa, Homo sapiens
RSLNDDQSTTRTYMCRTSILLSILVLGLGIELLELSIKIRAYSSVEWSIYGLRRWGFPDIGSCHLQRKTT

SEQ ID NO: 1000582 - protein, 254 aa, Homo sapiens
MKRIRNDGPKTERKNRTKPKTKEEEKNPKTRKNTTGNKREAKKNQKAPKRIKKEKKAQHNPETTKGKDSNDTTQNRTKKRTETHRKEREKKKKQKAKKHKNKKKKQSNHTKQNQEKKRQKKKTKKTKTKQKQKGNKEKETDNEKGKAKEKQKQNKDEKKRANKKEKKKKRKNKKEQGKESEGNKEKKEDKRRRENRKRTEKEKKQEDKQSKERQKKRKRAQTGTKKKGAKKRETRERRRKETKRKRERHKQIKD

SEQ ID NO: 1000583 - protein, 67 aa, Homo sapiens
SGGDSPVAPWRNAEDGRKLGPLKNLQDESEEEESEEEPKTRMYEEAYPSGVTEYDFKRMQVAVMTDP

SEQ ID NO: 1000584 - protein, 213 aa, Homo sapiens
MKRLLAAAGKGVRGPEPPNPFSERVYTEKDYGTIYFGDLGKIHTAASRGQVQKLEKMTVGKKPVNLNKRDMKKRTALHWACVNGHAEVVTFLVDRKCQLNVLDGEGRTPLMKALQCEREACANILIDAGADLNYVDVYGNTALHYAVYSENSLMVATLLSYGAVIEVQNKASLRPLLLAIQKRSKQTVEFLLTKNANGNALMSLNAQPSCLHM

SEQ ID NO: 1000585 - protein, 206 aa, Homo sapiens
RAFFLAFPAGWGPQPRPDPTGRPEGGGSLVRAGARGPPPNGVTDHPAFLRSWSSRDQWGVPFGGARPCNWWIFLNRFGGGSAALGAGERSWLELLLPLRSALSCRSAPGLPRSSPRSADALPDAAPRAGPLPGAEMKVLGHRLELLTGLLLHELTMGGLQELGFPEEKPLLRGQDAHRAGELRCLPLGCDTDWKDMTSEITLRLLD

SEQ ID NO: 1000586 - protein, 168 aa, Homo sapiens
SWGGTRGGGQYRYLPLSSPRLVAALAELLLWRELEAGVMVSVAEKESARGDWLRGSSSALMATMYGTADAKLSPRQQPTVCREASLVVCQALGLKLEAEYTPFLGKYRPYMWVRCCQTCTPKSWESLFHRSIADLGFCNVILAESAAENHNGYQGAWAGIWQASCLYS

SEQ ID NO: 1000587 - protein, 194 aa, Homo sapiens
AAPTPFLFLNRHVPGSSPDSLDYYGIGRVLTAGEAGKRILGRKAWLGLRRRILHRDLLGNVILFYYFLWSWLYCRAGRRGCSRPGRTCGSLKAPYRRQPRAAPQPGTWCRLPRTLSGKRRRPIGTRETVTLLLEADSSQASHKPQTSPQQPTPREVPQSIGSLDSLAVAMGRYSSGACPLVSQASDAHFMAQQG

SEQ ID NO: 1000588 - protein, 137 aa, Homo sapiens
MPAPAPSVLFSGASQAKPSADTEQRLPGGPQPPRESARHPVSCLPAAAQGRRERVMVTHRHHPGCGHLPPAVPWEDRPLLCACGEKGGVIFLLLPEHNSPPPALSGVSKVPPDRLSGHCLFLLYREQLGRSNPQDRP

SEQ ID NO: 1000589 - protein, 210 aa, Homo sapiens
  misc_feature (27)..(27): Xaa can be any naturally occurring amino acid
MVSTDLIALARTAVSNSSAKALGVWRXRCRGNSADVPRARGCQIFVYPGHNRRVGTLGRAGHGAICTPLGGEVHSLRRHALQNLGAIVPPVGRNHHDNPPPIAVLDRVAIEGPVAPCVAFTKVLERGFGTVFLKLAGIPVTYLYPNCGGKLWELAAGTPLDQQRVSAHFRKSLGLLETPRNSEWKPKRWGPHSKWGNTKRGSKRLFRISL

SEQ ID NO: 1000590 - protein, 235 aa, Homo sapiens
RKGYRSPGKDGPGSGAEPSVVRAMDVRRLKVNELREELPAPWSCTRRGRQGPECCLSGHAGGGGGRRAVTTSGTLRRRSHEPGRPGHDRTRRCQWYEVLNHGRNPEFYRSTRKDQSNITDKIGRHELTEQGDHRGTSWKDPTMPWAYFVTKTTEEIEEGKYETATTEDHAHRKDVCAYSQPLKQDLLLSPSDGTRPRAEGVSPRSLRHEGALFVGKNTARQEWLLFETTWKDGLM

SEQ ID NO: 1000591 - protein, 232 aa, Homo sapiens
  misc_feature (66)..(66): Xaa can be any naturally occurring amino acid
  misc_feature (82)..(82): Xaa can be any naturally occurring amino acid
SGGSSSRAPGVGPRRPVDGTLVPIGLAGLISNDSELKFVVDATHSDVGDTVETLMITSGKIKSVIXVVASDRVRTVLFHSIXTQCFLGSPFKTRSCETRIHDLSRIYGSEDSVGMLGVYSLGRWFRYGKSLDGPMERDVTLTSVEMSSLTIRNHTSGKASRSSLKPRSLARPFAQRRFWSQSSLGRVGLYSSSLAGVMYSTPYHPVLQKTRYDSGKYWASETYLTHALRSIY

SEQ ID NO: 1000592 - protein, 307 aa, Homo sapiens
SGPLSLAAAGAPRLVFTALRPVLIKARRCDPVTCKNLEVHTLHAATAPLDTPRTLGPLTIYGTVTHIELTRLDATLGNCPATTCRTTRHFYYYDDTVTCVTTTPYPRHTLRSYPLAHFARIVYTTTEPALHPWPSARTRASHERHPCDHSLTLNRTLDRTCAHEPNYPDPTGFTCLLPSTFSSWPPTQHLASIETPLHRPTHSHTYTHNCNTYPYCASRITHPVRDYPFDIQLKPNVSTRPPTATPVNTRGAPRNFGTRAPPRPLYPHGPPPHMANPPTVHPPSIYTKHRRRNSRARLPPDHVGISP

SEQ ID NO: 1000593 - protein, 81 aa, Homo sapiens
RELRVLRTGGQLCVSDSGEINESDLSNSCLADVASSRAVGNEMCLGMRDMAVLDEMTPYSYYTEIHSLWLPAEKYADMIDK

SEQ ID NO: 1000594 - protein, 319 aa, Homo sapiens
RVLNIRGSRPDPDRVWGLREAERCDGVVLLGLYFLSHIPITLIMDLQGGDGVRALPKLQRLERKPVCTAGSGSKEIHNTSRVLHGAPRPGYLRYFLIIDQQLQVYSGVPYLLPSLATVSAFLNGWINGGGNIPLIDSRKSGPTNLSGDRYLQSGSGDGSPYALVVENATMDFGGKYARVDLCLERDITCGVTLTVCGHQACTAAGTSYWEKYHMSVNYMKALHDIHVNANDAMVPSWGEFPPDTTLDSLFYAAYILFLMASGLCIHTRAVLNAGRKQRLNPYNVAYSYFNLSLPVPISLNCSSTHSVTPAHQLHMPNTL

SEQ ID NO: 1000595 - protein, 111 aa, Homo sapiens
  misc_feature (100)..(101): Xaa can be any naturally occurring amino acid
MRLVQTMLDYYVRSDSTTTIDIIYSSSKTDMEPVTPSSTGTLQWYRILRTNCKLHKYVTTRIIYREQISAYRISLEENGEGRILCKVTVISLGCCALSRXXMISLSIGLNT

SEQ ID NO: 1000596 - protein, 247 aa, Homo sapiens
SGFSGTSWVAPGTTVSPGSFSTATISPGASRTTGAAPAAETTTSLEGGGTTGAEIKSGATSGVPGSKTGTAGVPSATTIAPGSSNSEATTSLGESGKTRVETITGTTEGKTLAAGSAHTEATTFSGGSGSTRAGPLGGASGTSGGYVPGRETEPTTSIEETGTSRTIFKTVGITSAPGRQAGTSVVAPSTTVAPGSFSTAATTSPGASGMTGVRTTSKTTSCLGGTGTTRTEIKSGATLEHQELRQI

SEQ ID NO: 1000597 - protein, 259 aa, Homo sapiens
MRVGGGDRVSVLLLRLPHLAQRLAAFPAYCSPSRSPQSVTLQETALQSPRPDRRTNDPARHGLLQPHSTFTEPPEGRGRPGPADRSPRPHDDPLAPRYTEGVERPAGHSSRGRDSEIHADTLSSERKSRTPHDTYPAKAPTRTKRGRPRPATQTLCSVPDTLGPPRATTLPQHQLRRHYLSLAPPPATTKAHPHSSSTPPPTPPYTGQQQPAHLPPPPANWPSYSLAPPTPHRHTKQSTHTRTRHPTRAAHQRPPTTPP

SEQ ID NO: 1000598 - protein, 149 aa, Homo sapiens
MDPRKKPARPGFYVELQRLSGFGGEGDYERDFNEMNPVPSAFVLSSSRVLVTLMVLSLFLKINMAAYSPASQTLVQPSGKWRKNYLPTGIPTRSPGVLARFATQIGKNTVCARGLKWTIVTKKSRDFGGLVAENSVFYKQPCSTAGLPV

SEQ ID NO: 1000599 - protein, 212 aa, Homo sapiens
SGVHFRYYAAVTMGAALVRRREAADKLFAASLHGRSPCPILGSVVRDWRSPDRRPRRPVSWTSLRRTNRDDDLTAILHVPHDTDEKAGTDCVIPRWVCELKTNLKTPRTTGEHIGAEDTAVTAGKPIHDADNGKADRLLRRGDHELGHKSNNCRTPPVTDQACNLRQSTNTPAEDGTADTAARPRYAHGSDDANHNGKQQAPSSPGNIPPIQ

SEQ ID NO: 1000600 - protein, 186 aa, Homo sapiens
ERVTQVSDALPSCGCWLCSCLLIPLHGVSLASPAVCPLVDNCAPVPCSLFVVCDFADASSDACLVNAVMECLSAVVACGWVMWSWCESWWLMCPGPAWPWLIPLGLMHLTPLGDVSAPCWALVAPLVMVRHPMYPCNTGCSGVFALALVVHNLPLLTPLLCTPNSCVCDIARDILPGRWPLCLGPI

SEQ ID NO: 1000601 - protein, 224 aa, Homo sapiens
SGRICIAAKRDSNMVSQRNRSPRRERRPFPVPHSPGEEKRTRRRIGSDGLGREIGGRRTHRRFPRTTTGWLRGAHRTEHRLQDRHVSPFVELHRKTTTMTGNRKRSNSKKRPRKGNRRRIYSKGKPPYEGANNQLTERYFWTLLEVRLGFWPSCSTSTKEGYTTGVHGRLGAMVTRDCPIKMVVLKKGEDSYDGRYDCTVGTEGWNVLAREHFWRVIDFAMHQY

SEQ ID NO: 1000602 - protein, 395 aa, Homo sapiens
RGRRRRWGCLGSYLCLWSSRSALVITQHIALFARKYVLLERPRRGLETRSGGELRGEAHHAEEPARTRRSGEITGNQDHYCARHSRTQGPTQSTAPGTDRSSDKHSVTVTLQQHQEEHNGTTTKTNMSQHPSERTPQAASTDSRRMTCRTEHRRDNRGDADTAQQQDDTAGTRPPSHQGAVNRAGQPTLRLRTATRSHPPPTRMANTPSGSAHDSLACGTRRQGEVKPDTRDLPAFGTDCNRKQGRSNRQHTQSKQEKHQKTGKKYQTRKTAYMDNAQESGQAPNSQRKRRRRSTEQSARPQRLEEKIPKGRRDAGTRKAKAQPEGSRDAESNRGWTAEATNSGTTSRGPGHRQQRQRDRRRQHRIKRTRTARREHPHTHHRRHHPHRHRHHQTQ

SEQ ID NO: 1000603 - protein, 248 aa, Homo sapiens
MGMPTVPVRLSCSAPGSAYSCLVLTRRQHAQRASAAAHCKEAKSPSNATLLSAQTAVYVGLYSCNWMFPVSLYVTCEFSFTLTYSQRGDLVLRYNVSNSKRHSRNYAETQKRRKGGPGRRETGKRGEKGPGNDASGPRCGARVRAAEPLGPQAVVTWVATLVEAEELLDRRFGGPSGEAAGVVAESSLSSSRRLAHGSRVPDALAVSAAPSGAPRIANSRLQLKGRERGWVSGKPFYITGSDAHVRSE

SEQ ID NO: 1000604 - protein, 110 aa, Homo sapiens
MSGSTYSSGVTGPTNNLYPYSRPWNHIASMYRPRHGGLYFSPNKSWHTSTRVHPANPSVLPVLCQVYGSRKRNPRQAGSFHYAASTTSRMATSLLCARHYQRVHRPTGGH

SEQ ID NO: 1000605 - protein, 200 aa, Homo sapiens
  misc_feature (80)..(80): Xaa can be any naturally occurring amino acid
  misc_feature (164)..(164): Xaa can be any naturally occurring amino acid
RITGAKQGTCKSHGEAILKPAAYPLIDTYKMSLVQFGTVVLVPKGTWVSRESNLRERLADKLLLTSLDMHDITVLVTAGXTDEGDELEDAISSCGIHDLWLPRTLKDYSTLGQPMAWCQHASTGHTSRHYHDDCLLNILIRPEATHTNTTPVEMPRIGNHETLXYSLTIPRCRDDGGTHITTYRRGTTRCALYLNEASRL

SEQ ID NO: 1000606 - protein, 280 aa, Homo sapiens
AEGETDAGADRAVRPSAARRPPEGDRASLAQVSGLRGHRALMISVIAGPPSAHWNLDESDLTLQNLASITREGRSSPATSSQDAICLGDAYWCPARDASLNASVPEAGPHRSEMISAPLGRTSDIISAMLDEPDTPLGTALFLNSQVGESDDKSLDEQRSSSVFQIAAAVYQGESPGLAKRSQTGRQRGEREQQVDMRGLPAGLGPVRTRMPQSLPQRNEKGGPRTNGAPRRLSHSSLVVHAPDERTANCRGRGGDAEATAREEGRDPGGLGPRCTTRTR

SEQ ID NO: 1000607 - protein, 306 aa, Homo sapiens
RAGRRAVAGGAVLGLVVRSVPRPDPPALRPRSSSKKEPMRPEAFPAARDPDTCHPLLPLPVHACAAKRQCDLTPVLAVPVSAGHVGPCVCSLCLDEPHVPPVYPMASALRGGPPPDVTEAMLTEECSCPGLGPSSPSGSAVDMITRRSLGYWYVNFQQPADAERALDTMTFDVIQRGKPVRIMGLSADPSLRPNVELAQHIHYQIWTNPLHPKALYDTSSAFGNHPFLLTWLADDTLVPRATRFVPFETHEAPAQAIAHPAWPGPHDCHRIGGRFSLPQHASRPGTGPTLRPLPSHSGTHATTPHR

SEQ ID NO: 1000608 - protein, 110 aa, Homo sapiens
  misc_feature (12)..(12): Xaa can be any naturally occurring amino acid
MGECMRGGGWSXAAAWLPCALGRAMTMRNGAVGRKRRTRRGPQVHRRRGLGGAEGRPDVTDGSPWRKPTLFRPSCLVKSVKFLGRPSPVVFTLLGLYSWNTRLAWHQKPQ

SEQ ID NO: 1000609 - protein, 267 aa, Homo sapiens
MQSGWGTGPAVPLQADLSKASGPPYSGLPDALLVCVFVNGLLWLTIEMGVWVELPLLVMAAARRAGRCRSYLAVVIQLANIGPLLVSLLHQFRPSCAFRSAHDLQRLARAWEIRQPCIHRLPVTLGDMSLRGVRGIGHAQRVAFLVLTFFLALVDCTSSVTFLPFMMPAAPPYYLISFLVGEKDSVGLLPALVALAQGSGLTTCVNVTEISDSVTKPCTHRGQTDIEAGSSQSFGCPASPAMEAALSRLESRYLPPTFHPGLLPPPI

SEQ ID NO: 1000610 - protein, 77 aa, Homo sapiens
ADQTFRGPGDTGSELAISRGPKNIDVVRTMWNMYGADMTITVTKVIDFTLEVLTIMGVLGRVRRTDSVLGDALTCQN

SEQ ID NO: 1000611 - protein, 242 aa, Homo sapiens
AGGAASSLMAAPASVMGPLGPSALGLLLLLLVVAPPRVAALVHRQPENQGISLTGSVACGRPSMEGKILGGVPAPERKWPWQVSVHYAGLHVCGGSILNEYWVLSAAHCFHRDKNIKIYDMYVGLVNLRVAGNHTQWYEVNRVILHPTYEMYHPIGGDVALVQLKTRIVFSESVLPVCLATPEVNLTSANCWATGWGLVSKQGETSDELQEEQLPLILEPWCHCSTDTCPTTCPKCCVLGTS

SEQ ID NO: 1000612 - protein, 172 aa, Homo sapiens
  misc_feature (84)..(84): Xaa can be any naturally occurring amino acid
AGVLSIERAGTEAAYRRSAGGCNPLTELAASVCARASDGWVRRIICHGSMQFYDIPGSSGALGRTLRCHDLCCYARSLTASNRXGELSTKGATESDGCAEAPRLGSGELKPQPPQLALSRDAVGLNILDVGESRQFTCNLSEYSPKIWYWSMMYRRVLLQREYTMRLVTEST

SEQ ID NO: 1000613 - protein, 217 aa, Homo sapiens
  misc_feature (104)..(104): Xaa can be any naturally occurring amino acid
RAVDLGFSPGQSESKPGPQGGSCPCESERSCDLGQLEGLWAVASPGRRRKDAGRMSGGSLRPPAGEPRRGALEGHWDAWVGWVGERCSPEMSESVMGESHHSHXHSIFKAKSVTVDGFEYLHTADLTRPVECLTHVDSPWRTCDAVGEVQWHGDGSVYTTEGVLAEEVPEIGHSAEGGLKFSRPPECLRHHDPCRSNGIIRGKGTSGGACTVVTDNG

SEQ ID NO: 1000614 - protein, 113 aa, Homo sapiens
MSFHNSGLAAGEKAWEACSPDGRTMQDSGIYRRRLTWIEGNARHHRILMPWLGYRRNSSGEFLLEGTVGRIPVHIRFIEAGETSCRRKTAVGDIKKKRLGSKCCPGLLYFLMQ

SEQ ID NO: 1000615 - protein, 146 aa, Homo sapiens
MSCTIRRQQRNFGSKLLETRYTRGQKFHPMENSNVLETTRTPVPLYTSDRATPTLRRASVHTSQLRLIPATTHANIFAPSSHLQSPPSHLDKIHEYHFGTRPQPGHQDHKPRLRTTRHTTHTPRSRPHLPAHNLTSSTAAYHHDTH

SEQ ID NO: 1000616 - protein, 446 aa, Homo sapiens
SGVAAQTGQDVGRKGQSCPGSQVRGGRGGPSGQGQGTGQEADSSRQRRGTHETRRHAKQRVQQHTKQTNNNERQQKDKQRTQRHKTTHKTETTNTTAHHAQNGQNTGEVERIREEGEKERPNTKTQKSETGKHQNTKERSTKQTENATRDTRTTQETTKEGSNQRKAERQEERQREEKRLKGERETGEQQAERNGGSETGRAHEQPTGRQANERAAETRRRANQGTATDGGRQRRRGHHAAEAREAEATEEEEERKTRSERRDVTPRTRKTQTRPQERRHSGTADTTTGRAKGAGPKPERASRAEERTQATRHKEASRAEPPERKNRTPTRRRTGERKTQERRGSTDRRTRRTSRKRTKRRNKHQGRGPGHRGPKREKGEHRRQRRKQRGKIREKTEQREVLGAQECRRRQTEDTHENRTHRAQETRGKRHKEQGHTAERGADKTT

SEQ ID NO: 1000617 - protein, 136 aa, Homo sapiens
MRMLETSRILRPGRMICNESGELACEWSACACTVDSALWMLLNLWTRASTASNCSIYMCQDSRGFSPHYSAQVLVPFLLTYIAHDKFPTVGSGRGNNVGRAVRDRRLCLVEKDCGKEVEGLTIIPILGDPGKIHST

SEQ ID NO: 1000618 - protein, 231 aa, Homo sapiens
MKKQIQTDMKARMGKPEHDERQRLTKTNKSVQHDSIVHYTESHDRPTVKATERRPQDWPTTNTPTKAAIMGRSKWIIAQRGPQRAMRKPRKQDTQHRAGHKHTEANPTHHPPKEYTIQVKTTNHKPQRGQTHCPPNTEHANQIRKTLNTPYHTGRTTPGPSAGQLPQRTAGGDTSSPVTHPRQHPTRGPPKRGRTRQHSIGPRHRPHPHSAYHPTPPHPQPTEGPPTQTHT

SEQ ID NO: 1000619 - protein, 74 aa, Homo sapiens
RGPGSGEAGGGEGRGGAPVAQEAVPGARRGRVRGEGAQEAGEDRGAGEAERGTQRCCRYRKPGTKERRTTWQTT

SEQ ID NO: 1000620 - protein, 315 aa, Homo sapiens
ERGGHGVGRVRPEEGLMRRWRCPHRMCPRRPLQATVQRSPVASSFLSSLLGLSSGHIFCVSGQSTQPPTPCPFFHFQAGRVSVYRWCNTANKVIASISAPKIHRLPLSTARSDARGYPWRRHLNASRSLTQQLADCYAGCCTVARAGPGPMSQSSLGLLTDSCGPLTDSHEGPVDPSNRSDQCYVRLRRLPGLRHFTHCIATHRGDLVSLVTVEPYPNTEDSGTSEERRPSRPWRLQDFDTGPNTHRISAELSFHRRIRAYPYLSSNRYFQLHPATPVAQTTLLVDVTLHLPLRRYLRLSSLSCPLREAFNRNPT

SEQ ID NO: 1000621 - protein, 318 aa, Homo sapiens
SGPAVSSSWGSVVAMLVGQGAVAAVGPRVCHLRGGAAAELAWGRRTARRTSWWAAVCFVKSDVEIKLLAHRDKRCTPSMATLKYQTDCAPNNGNLMIPLYAIKGDFILKIEPPLGCTFSEPTTSGAPCAMESVTSDHSGGDIELLYFTGFSAELAKASHYLKASALEHLLNILATHPTWAVERRQANTVACNQLPKPHAVHVPLIVCLATMLSGLCRDSRRGDAIRKWVEQSMRLKHLPTRLHDSSDSRAPTPQSVPPTLALRERRATRRRAGPGGTVLGKQTRATSTTDRDTVQQSTNNGGQTHQAHAVLANTDNPA

SEQ ID NO: 1000622 - protein, 145 aa, Homo sapiens
MSQPNEDGKNMTWTTQQEAKGPRKGDKARQRRRNYNRRNSKRTSDTDWVSRRLKASEAYCKVNNARGEEEIRVGRSWAANSWANEQIERDRNSRTMPNNDTTKIANGVTDGDGGKRQHKNRDRNRKWEMEKTKVEPGQFKGALDI

SEQ ID NO: 1000623 - protein, 271 aa, Homo sapiens
SGGVIEAVSRAFADPRGSFTPAPNLPRLGLGRPSMLALGSTSAPYLQLLAHVRSADSPRTIEPQAIVTAGPSSPRSECMMPTGEPVCLHVPHLCKELLARDTVQVELIPEKKGLFLKHVEYEVVQPAASSPSVYQDEYNDFVVFAGRCSCTSSAYRYGACPATQAECLGAVTGDVHSEARRRAREALRQPGGAIAPMFSEDVVLKLFLSFSGSDVHEQVKGVSTVRRGRIPELVSWIPGPRTSSQLTSSQFAISRELIRNIYNSCHKAPRQ

SEQ ID NO: 1000624 - protein, 220 aa, Homo sapiens
MGRPVLRAGQQLVACGGPRWRELHAGPCAMCWWLGVGLPGPGPPDAGMGCCACAACWVSADPWEAPTSVTTRPDLIAWSPSHFSAASAAQEDPELDSDKDETGAYLIDREPHLLWSYPQTTSDHGKLIITKELARTNACAGRTADVLQHRVPLCALVNAPRDYSGQLRTELHKGPVTARVPESCQCHGKKEAFSRMGVARMVRRAGDFRTGYEAFGNSSL

SEQ ID NO: 1000625 - protein, 208 aa, Homo sapiens
MKRPEAGGPEMSQAMDVPTCLKRKEPGRSLRIKVISMGNCLNVGKSCIIKRYCETRFVSKYLATIGIDYGVTKVHVSDMRHQSYTSLIWLDILFFYEVRNEFLQGHTGCDYWSMMLGRNDSFDALDAWLAEMKQRALAPHGNMDHYLLFVALWPTNDLTCNQTSAVVELTSDGRSLRLSRTRGPCYLGTLQHQTWPRPSLITVQNLYI

SEQ ID NO: 1000626 - protein, 179 aa, Homo sapiens
MDSLMLPSCSLAPIPSKYGFPTTDTVMPIANGVRLENGDNGDWADSVARGPPTTPDIDQKGRRGISDGRTRRPNSDTGRSGPTEHRTANPTDEQIALSTVKVNCNHEEGTELLITPAQTYRARMDPNRGRQGGGLGGPRKRQGASKDTRPEAARERGGQTETKAEDGRVRRQKDGEAGT

SEQ ID NO: 1000627 - protein, 172 aa, Homo sapiens
RILADAGATTRRSRHAGRLTVAQRGMCMSVSGAERELVKTFEGTMRVCEAFIVTTQGPVDRILYRWYVDVLVRKPPVNLKVTCWVLYETRLYEIFVAHNSPQRARNETIVPLSKIGYFIEQGVIDRNHPVAFIDADVCEQVRLDTNLVILKRKRKQHAWDRRYWGDRTPIGL

SEQ ID NO: 1000628 - protein, 116 aa, Homo sapiens
MIPVGYKCSAYPNAAFSRWDLVHFYPPLRTWVERDWLMVRHEEGHKLLERTLVLELAATRELDHGRGVDAKRVRLALAPRVACFRDHQTVVKGNLLHRLPTWPGYESSPRGQIQNN

SEQ ID NO: 1000629 - protein, 374 aa, Homo sapiens
MGVSAGAAGAVDSCTGAGAWGPGIWPMDTLVSDHISSDVESSIPLVGSRPLQATIYLPWVKCTDVISDTSLYTSLTDRYETCTNYGATYPFITVPLSTIQHGQVLTTQPRVSVKHAHREVDGGKLRADAEWLSREVDDTCVPWAPGGPHMGKSYLGEEDTVVKSGYARKIRGPSRRMESLGVEPRVEDGDHKRDERRPTLAASAELPITDRTGAGGVGKRHRATTEGAKKSQEWKSENGEPTAHEARKRRQREGTWAVTSTATGAGGGKERDNGKVKGTDGREAPEEKEKMRRAGRKQKTGRGKRTEMGREARERKDEEQSEGETSNKRGTHVKRLEQTRVENRGRQVGGRGKRKEQNNKRRGGERRARDGRRN

SEQ ID NO: 1000630 - protein, 203 aa, Homo sapiens
MRLARIKERLETQNCEIPASKTSRRAGWLEDTFTIDERLCSPQLAYKLWFIVRWTSELINTAYTNVLLLRQLSAQAEKWYLKGYRQTSLTLETTAQLIRTKLPDSRQQHEITSSNHTSPIFHHAHQSQTLAYHLQCTRATQQTLPHTKRQLGNARPRPTPGRTSARHTVDEPPTLPGPQPPLDCTRPHHDHRPAHTHTLDHAP

SEQ ID NO: 1000631 - protein, 208 aa, Homo sapiens
SGVSGVWAGPALSPAPSPTAVGAGEAPTGAMRLNAELTCLCQTPPCWLTKYPLLLRVCVLRVNDPDGAAAPRRPSSAMILAPLCSGFHPGTVELLWHCRPSVHVTRHGWLVPALLVDARIPTCPTAVVAWKRLPAERIVRANAFPRNGISSWQPFGAFEHCSARVPLGRPFPRGGNQPASHGPAWLGCVRNPWRRFHPSGARLHAHEM

SEQ ID NO: 1000632 - protein, 318 aa, Homo sapiens
SGCGCAACCGCDEAGGWSLEEEGWLATTTRKTPRPGAMELGCDCVVCVQPARRVLPGAMRSHVDIHWVSHEKCVGAVRTLGGVLATGAQTSPNPMGPLRRVAASTSAFVLRLAWYPRSRTLAFNPRQERYGVGEPRSNNVERINVSEGVYSLQTRSLFIHYLIEECGRKDVRVTEEKNFAVPAPQDHRYANRNLVEKGTYIGVAYKNIYGNDTGAERERLLDQRYTCLGAQEKGRGRHRRGNPSKVSMGERGKGGEERHQGRRRTGRGKEHKGYPDMRGRPVHRGMDHTQTPRDRGGHKTAEEKARQTRPEGTWEVGR

SEQ ID NO: 1000633 - protein, 421 aa, Homo sapiens
RGGACLCCDALAVTCCGLAGAVVLWLAAGCHCELDVASVALCPAVHVELLCAVHDNCVLGAPVCAMRAAVCCLTLGQWPVCLCGCCVLAILQSPSSLPCDVMCAVPAVRMPIDVVKLTFVCDGPETSGVVILMPLVVEHHCDAVNNSHISLNHVRQTVQSKEPDGDTCALYHPRMDAEGLGLAPLEMDGPRKQVDRSAVTRNTGAARSRRTPVERVKRVEASGPLGSSNGPPSVVERNVAETAGPPERNWFLRLKGHSIRVGVKRLVLARDDSYQQRDLGQSLPLSGTESEIVAHLNAPCLGRDTSSHLGKEAVWADPDKVGLGRRATSYLPISRLPTTCKALEQRRRATGRLVYLAQRNSVVPVRPRINGSKVNRLIFSGDPASGHEGEDGEEASGKPFAYFPEDYSIAQVALISKCGLQ

SEQ ID NO: 1000634 - protein, 172 aa, Homo sapiens
SGGDLTKIIYDSSKSKQQIFNVEGIAFYWKKMPSRTFMAREEKSMPTSRASKDRLTFFLRTSEASNFKLKSMLIYHSENPRALNNYTKATLPVLYKWNHKAWQHICLQQWFIEYFNMTVEIYCLEKKDSFQKLLLIDNATGHPRALMEMYKEMNIAFMPANTTSILQPVGQE

SEQ ID NO: 1000635 - protein, 314 aa, Homo sapiens
MGEAEAGGSLERQEFETSLDTHGPHSLNNLGKIWANVHGVYNNKIPGYSGGCRDANVTSLRSTEVHGLVHSLADCVHTTGTPPQHSASPQGERKRSPYITNKQYAQVPADQHPRQRPTDTTTTDTKQQQHERSTTNTDKCKDYTLIHNKKYEFITIRKQKGARSTSIREARTTSAKTHNVTRDDVRLREHRADTKYHYTHTKCSADSTTVHHFNHATPQRRTKRRTLSKSAIKRKQGRAMSNNLTHRMRLSRPRKPYGRASHAPMETESQRRDNHNPPHINMNDPRRALTQTTTQQAHIQHNGTGALPKTRHRC

SEQ ID NO: 1000636 - protein, 136 aa, Homo sapiens
MVRRRKSRRLFYPVNTSSQGHRQRYFQEPIQLKSIQLTCNRCCRWSLTWTNLMWSHKATSPSTSNLEEEEVIFPGGCYGSAVETRLCLGFAGANGDKRDIRGAICPGILGMGRVLVRRVLSGVLYDARTGDSPLVF

SEQ ID NO: 1000637 - protein, 254 aa, Homo sapiens
SGARYRQYVWWLASSVNLNLSSRQRLGADVRKEGTWWLTCGEGQVGHAAWVPWPHRARRRRVSAVPQSRRGHQASRCVSGYLVTQSDGRGAGCTRLLEESMLAPSEPGTPPSLGPVHGGLRVGVGLPRTIPTSPVFSRSGPGLDARYRGARRGARRKSVTGGEPRPRLLEFPHNTWSLQVAGKELFGVEFQAAKRKVYERPEGGLLLGGWELRKKAAFGKEGSTPLWHYNTRDLQKYLKQRWVRIESNAVIPKR

SEQ ID NO: 1000638 - protein, 51 aa, Homo sapiens
MTTTNNIDYLKYTTTAQKTKKQHKHKHNRTNIHQHNILTPHQLTTIESQHN

SEQ ID NO: 1000639 - protein, 90 aa, Homo sapiens
SGADGWRGPGREPRKEEGSPDNGVRRAVGHGLSPPAGRNGEEDTTAETTALKEELIMYSSQGKSGRADTVQGHMGKYQGHSGGIRSKVKA

SEQ ID NO: 1000640 - protein, 225 aa, Homo sapiens
RRKSVGTVGCSLVSGDEAGGLVVTAVGTLAQMLCVPAEVTGVGPVMLELVMLDGLGMPNGWAPTPEDPVPWDAGCCRWQKTPCMQPECPSGTDEQMPGGRCLSVTCTHDHHAVHQDARVRHAVCCWARYSTEELRESYRMPCRNADTGSSRERAAQACSRQQCAKPGRNPQRPHTRGDESHTLALEPASGTQFHLCQLMKRQHPNTLAARVRVPLSWDKDAHLTT

SEQ ID NO: 1000641 - protein, 150 aa, Homo sapiens
RRGARATRCRRVPPPPYPYLVTGIPSHHPRVYNIHSRTVTAILPTSYSWIEGETVHVMQRYGVQWRTACHAFPWDIVSWHIITHSTIYETSYMPVYRSAVGRERPNGNAPQTLLGRPDVCSLLKGERNDGPRGVLTITDDKLQSILSIKW

SEQ ID NO: 1000642 - protein, 199 aa, Homo sapiens
AGLACLGPAEVGPGGWWGELHTPQEMSLLLASAPLVGLAVNRLWVRSGLRPALLSVPVVCRPPMEHWNSRDSWSGRRDHAGAKRAQVRVQRRWMQRFGQRSQNDEYYSDTKRDMPKQTTGQQKLPPAAPQAPPEDDTGTVSLKNHRGKEEDFNDDSSGRVWRRPSIRCGGRSVSRSRLPHDRMTSQEADWFPDIISGPE

SEQ ID NO: 1000643 - protein, 157 aa, Homo sapiens
SGGYSLADSSGVPQRDGLRASRPQRAIHGWKLLEEPRCQCAGMASGRATPLQSPLGLTLSLPACPALPEQELAGRVLCVRGHVARSTMRCESVMVFHDQVSITRPGSLWPIMDENLGRLGMTSSIGIESDRRINLNAQFGMSSKCEISGHYYFLGPV

SEQ ID NO: 1000644 - protein, 130 aa, Homo sapiens
MPEQSIVEKPYHRVFVKPKFSKWTTDKVFSVFDYGLYPCCVQSPQKYEIPLDCMRLTGGEISFYVAIPRSSSALLTDSTFPTQGTCHLTHCYGNIFSQSRVPMETSWICAPWHLTSYKGTEKLHEQYPQY

SEQ ID NO: 1000645 - protein, 370 aa, Homo sapiens
MPRWWKWADARWCCSGHAPHLCECPSGCCPCEWMCVLATLAVLMLRCWQPGRTALPFVCPCDPLLSLTLALTGCICAPVPCWLYCDPGCRMDLGLGSLLFCTPVMKSSWGCPLWTGYWLPWANGECRDGGPGIGEQRADVVALADVETPWEPGKRRVRDRAGMELPHRGPGYQRTGSHQLWVGGRKPQKAYNLPLPDARDPILGITADTRKTGYSFPKGGKPFPCVPTPSDGGTSMPGRSAHASRTSQRTCTGASTRTGCKQPMSSRPSRDAPFEPLSETPEPMGQDRTPEVPFPPGRLAVDPGRTRKTARTRSDRGNTERPDPPRREKPSQQNGTPKGDRRRPRASTPGRTNRTARARKRSGRAVHDAH

SEQ ID NO: 1000646 - protein, 159 aa, Homo sapiens
REGGRAGQVSGCALGLEGGGGPELGLLAAECIAEPRCTEATTLWEVRYKGGPDQETPFSRSGGGHGYAVPTDSSLRMTLKVMAEGAPVARSQHDSFSCERMAWAGAPAWARRSDVSVVAGGAASRDLDLWGSGLEDCFQRLHVGVIREEEKEETVEKKH

SEQ ID NO: 1000647 - protein, 236 aa, Homo sapiens
SGGAGSLAARCASAPQALWQSSIVDYYEVLGVPREASSEGIKKAYRKLALKWHPDKNPEDREEAVRRFKQVAEAYEVLSDAQKRDIYDRYGEARAEGGCAGGRPFKDPFEYVFSFRDPAEVFREFFGGRDPFSFDLLGNPLENISGGQRNSLGSRSRGSDPFFSAFSEFPAFEGGFSSLIQDFVPLAPWESGGLSSFCMSYGSDGTGSFKSMSTSTEHQLMVTKITTKRIIENGQE

SEQ ID NO: 1000648 - protein, 254 aa, Homo sapiens
DAECQPVCPARTLSAPSLLACSVSGPTPQLGLEMQLGLPALCLRLWLCLGLLDGLVTWLLHDPSRPGTSRRSHDVIDTGDMPVQCPALVTCKPLDVVLVPGATVTAAMPRGRQRSMRWDHWVVCVPVNLGAACHDDRPSARTCQRVGCLDLAPKGYTCQPEHPVQGYRSWLTNKVTIPGATGHFGRAPTRRGTGTRLRVNWIACRVGRIELLEEDAWPRSAPQFETQRAHWEKHGRHDGVQRHVGQWALPELLA

SEQ ID NO: 1000649 - protein, 157 aa, Homo sapiens
SGVCGPQHPIPCPPLPWAIIARPFTFCRILLEWRECEEPYTGNKTENLSIIRSSAASMASAKGVDASNIQVEFIIQEFSPRQIDHAKELIEEEIEGPLMCQVRSMAQVVHSATSLVQLGALSPPWGTLTNRGVQPREDFRTALLASAECSLHSIKQD

SEQ ID NO: 1000650 - protein, 325 aa, Homo sapiens
MLMADGLPACLPAVWLVSLLCACGCAVPLSGYVVLALKLACLCDDLIVRSRVVLCTPRRSTARSAPTVYISTDIVVRKERTFDSHFSGLGFGHCFRHYSPSHSFGPVSGITRSNVNGSGNFCQATIFPKGAAWSRTQSGSRHELEAQNAGYFCDVAAQVSPPLYSIGVATVAPCEWRHALSQNTRLAALTTRYATRLACARQEATSQAHTLINTRYSLCVNADSATARVHTLRSAPDFEGRVIAPLARLRPKVTARSSAIIDAWAFTGDNTEMGCIPVGHRPFAFGIPTCQAPRGQTENAVEPLNAPERTAGSAAPTVLHSGLTA

SEQ ID NO: 1000651 - protein, 126 aa, Homo sapiens
SGVCAQAPVFLSVRRPYLGRSAAVVRIQAERPDRSGRRVELTRGGGGGDSNRGTMPDVEGRSVTQKYPGDSEEQVLIKHRNLRNPHRRRREAALEDRPLPPVLFWYDHGSELGTSRLTVDRVCPNA

SEQ ID NO: 1000652 - protein, 123 aa, Homo sapiens
MVTLKYAPPTYTSIWFAWTVDPDSSHSARVDSMAEWAYEERSAKRSTDNSSFVNSVYTYDQLMPTKDTSCQISTVGQNCRQIIECLHEILLLNRKARREANVKFEERYNDRQRTSGSIQKLRF

SEQ ID NO: 1000653 - protein, 109 aa, Homo sapiens
RVVLNGSQPVGGKAAGLESQQADMLRRSVQPSEVLVQWQCVTSPASTADAGYLIAGNLLAMGSESGSGGQEGQVHVLGSDVMWHDAAKCTSPLSNSDGVWSINPTSLTC

SEQ ID NO: 1000654 - protein, 176 aa, Homo sapiens
MPKSRQKHITIPGDQHAARTRILPALVFTQRVVEGPNVDQAYSPMDPKGPDVRTSLHSRVGNGLRQHSTDRDLKPCQDPWDIDTLHNHALNNTNTVPRPKGARKQKKSRQTKGKANRKMAHRTQRASTQKPKTRQPHKAIPHSQNGIKLTKKRKMDARTGDTIPHMQHANNTTNRT

SEQ ID NO: 1000655 - protein, 308 aa, Homo sapiens
AGSKVPVCRTEGWCVSGGSRVLNISTSAPARLVMQLVPPDLAALPWCSCCLQSLACEHDPAAWLGGLVSSALHDNGFQWREHLVPLAMGQWTGLEIRARVSAYSPQWGLSALNVVPVWSQRLGESSRTQEVGESVVLACWKYADQSDDMKSSLDCRGTGVKSNSRNGHEGRIVLAKQGDTVGHSAHMAHRALMPEATGRARVNKGWAMHLGGLLMLSGNLSYLREEHKTHPVEGDVALVSRHRVVHNTWIRERRTVTADPERNGEGTGKNAKGIHAYGDSRTKGSTDHYAGGQVDIPERYGGEQTRHR

SEQ ID NO: 1000656 - protein, 170 aa, Homo sapiens
SGALTAFAGNMEYTVSVTVHACVRRERSRTYTLRYESSRKARATGRDGVCAWIRRSRWLPPGVFVRKPAVPALTLRASCGYVCSVHVACQQLMRRRKHKCFRSAKSHGGRRGFSARCTLALMCVERYSETTWDERLSRDGGDRKQNDANKKLRCSSNRYGKIRNGDTCED

SEQ ID NO: 1000657 - protein, 30 aa, Homo sapiens
MELKYRNRPYFITLEKSGEADCMEVPTSKD

SEQ ID NO: 1000658 - protein, 229 aa, Homo sapiens
MSHMPLSSQHTWLFTLSPAPAGPWVGMGIVCRNKLEAGLSYQPPCNSGWELGAAGSCRRLEQQRLCGQAMQALRREDGSERKREREQDIYASTGYEAGAEDSSEIHSGSSVLQGNRPCCLEIQDGSRLDRMQPARQEAALQKRQRGRAGRNDLTVKDATGSRKANETGKAESQQNQGSEEQPGSLTRGRPRESRPAKPEPGSEGPCQDRLEQDQTMAPETGKNAKTQET

SEQ ID NO: 1000659 - protein, 188 aa, Homo sapiens
MDGHPPTSNPKTSTNQEKRGRDRHGTTDRRTWQKGKKASRNRKQDRHESIKHQITETTSTTTDKKSLQREDRPNGPCTKKDATEECHQIEIAQEQAQGGKGQNKQKASMTNGNAHATRNRDSKRERNRRVEDCTPTPDTDTTHIGDRDTHREHADNTADKAINPGKERKEDAGGTSARREEPQKEKQN

SEQ ID NO: 1000660 - protein, 107 aa, Homo sapiens
MADRLRREQRPLGATDEHDSIVLLPHDPGGHETRLIVRMSESTDVVIARRDRGHNATRNGYGPVDRTWWQTAWSAALTSHKCDVRRSRRDLDAGAAVQVACVTETER

SEQ ID NO: 1000661 - protein, 52 aa, Homo sapiens
MQRCPLSSPLHFPCPKRVVSYTPEILTRSFTRAATCRFITRKTYVRSLADGL

SEQ ID NO: 1000662 - protein, 229 aa, Homo sapiens
SGGWLESASQTEKVGGRSREGDVLKSSESITEENQRKPVVDRYQVRYRAYMARAFIRRLRSVKILLLDTGCRNCTILMESRRILQTDHGSELPRSMDPQKLKLGNHDVDPEISHVNFRMSSLHRRSRDPIQALRKFTELCHTVAEARLHCHSSKILDMLADGADHDLHAPLSSSVLVTDERCCTQLHMTLEDPDYDQYTDRPNDTLGLVAPHSHGPGHIIVAATQILDH

SEQ ID NO: 1000663 - protein, 323 aa, Homo sapiens
MYSTTTLRMQVIGNVGDSSCLISFTQACRSEEENQTRKQTPAYSRSAVHTVGTRQITTAKELLIDAQLIPWTKLQRRLRHMNPSSEFGRLPIPGNTLIGESRKEGPTQHTPHTHHISPTIGADNVAFTLHKGDQPSTLAQAPTLTTPWVKHPTLSWRLGSAPSKHTHALRISAQTFFSPSNFQDFYSHCNHFSVGQLAQSHQLVKAYGKRAPGARMSGLWRTLLTTHEGMAQTYHPRHIDLCTQLPPMRHFTPSGYSPKPNNLSTLAVYSQRPHSPLASYTCALGKPSFYIPTGTYRSTHTSRADYKRPGETLTRSYQWEPLM

SEQ ID NO: 1000664 - protein, 71 aa, Homo sapiens
AELKLANWDDWRMQALRQRRVRPAPAVWTAAVAALMLRRREFTKRQGDALVKKMGTDMGRNNGCLYMNDEK

SEQ ID NO: 1000665 - protein, 146 aa, Homo sapiens
MCMTQNSVIAKRTTYLPKFGMLRKLTGHSLYEQITWQLNAVALYKITSNMIFNFEHLSDLQIILRHKYKSTASKQISKPRDHEGNNRYLDLQKLHSDSKLEELRNTNSVLDPKPPPLTEAQKLGLIGTPPAPVSSDDWEKVKRALC

SEQ ID NO: 1000666 - protein, 41 aa, Homo sapiens
AEWRSRAGRRQQQRAVPPACALSADGSLEEVCDSGCLYGKG

SEQ ID NO: 1000667 - protein, 337 aa, Homo sapiens
  misc_feature (150)..(150): Xaa can be any naturally occurring amino acid
MAYSGAGGFAQTVLVDILSLAEKTFIPVCGILQERSRADASNGYVGPFHDSTGLSGSTWTGGMAEDVVDIYVYSPSHESRYYVVTQLLQLQVPTFTNFSLSEISTSKVLEDPMLALFLAYQGECFLTRQDLVKRMHRPNGIRTHGIAMPXLRALHFRHSLQLIAETIQLVTLNPAPAACLTIEQQHVLDEVDRNREIRWDNDTNPSRQLYLSGPAQECPGYEDERWALLGEALSEIPRYNVAPTRFALMPMRKNGGLHFARKPSNVGNTGVEGNASPEDALRHTAFKQRKMPWREIPMLGKNFGGGFPRRFKGQRTLLCYTPNRVDSPAQPKIHSHD

SEQ ID NO: 1000668 - protein, 153 aa, Homo sapiens
SGLRIRKLRRRVVRPRGGRRAWEGPGWDGKRYVAAGPLWVMVVPELDWCMWPLSAELLPCDERIKCMWCACAAVLSPSCMLGMVVCMPSFPECFQDWNGPMCVPLMIAPNHSGWVVALATWPSWMNVWCCAPGADHRGTEVGLAVSVAALCLA

SEQ ID NO: 1000669 - protein, 250 aa, Homo sapiens
AGWGSSPSRPSAQASCGSADRCRADWELARCVVPCKAMVVPGEAAEGGMGLRPGRQRGSTAAPDSLGFPQTHHPEHRLRRTCRITREPKEPQDAALTLSDRIRRDSHTATERTPLGLLQAMATRQPPAPSQRPPNRGTHISTPGHERHPRQRGRTGLLDHALRQNQQPQGPDKSQAPAQLPTHDHSKRPIERTVDPGTTSNYPRHTDQRRTADNTTADHPHDPYGKNAQDAGPTSRTDTIAHPTIHQPWH

SEQ ID NO: 1000670 - protein, 118 aa, Homo sapiens
SGSLSKSPAVFLPLSFLFVFGNFSFLRIYQPEEMKVLSFPTSLLHKWRNKESCCWKDSTSVDEQSNSRLSPLAPVSLIQTGRSPMKLRSNKGQASLVIKHHHCHHHNDIEMTQKCSNF

SEQ ID NO: 1000671 - protein, 110 aa, Homo sapiens
SGLGPHLGKRRSGSGSCQGGSSVQTLLCAPCSPDPYPSSPDGAGRAERAPPPTITTGARWQTACLHKEQERLLVISTCLWNMTRNSDLTGSISSLFQTLTEHWTNKHTFR

SEQ ID NO: 1000672 - protein, 319 aa, Homo sapiens
AEVRAGGRLRTANSSGETFLFPLSLRTPWRPLPMQTTHACAVRVKRKCARLMYCCLGQAAARAALLNCIGCVPLSCYDALVLSVVTPSSPGTYDTSARCDGRTAIQTYLKRIRANVRCYAAHANKLYQEQSAIHRQRPHILLHTLHRATDRDLALETGTARAIAPIGEEHDDTVQGSAPTSNMWAIHYKARTVRNDALHQQHPKVFHPQDYRTCFRRTQHTDREAKAKTKMFATSVSAAFTIVPKLLTRGKPKSSIRPPESTILGTDAPLAHRNNTTVGALQQHFLAQVSTLSTKTRDILTLFVFNRTYKTARNQLANY

SEQ ID NO: 1000673 - protein, 253 aa, Homo sapiens
  misc_feature (110)..(110): Xaa can be any naturally occurring amino acid
SGPRAALVLQSCGHIQGTRRSLGWKPGVRGAGSPDGPRSHPDELLTISKGKKATLLRIVREARLARKLPDSGRRGGYGIPDVSPSIIPGIPFSVLLSNYRRSAQYNETAXHWLMQNSIMNLRFSRALTSGMVYRSLTYKFYLMPDRSDGGRSIIVGTDKGHECLLRRHRHLSDSQASSKLGTCLCTACVNIRSYRIVIHPRELDQGWRKGRSRSCPVGVTADPASPRLGETAGRRPGPRSQPGHRCRWERASP

SEQ ID NO: 1000674 - protein, 92 aa, Homo sapiens
MSRALVFLGLFTGPGGVKGARSILEPCWTQLKSFYDARVLCDVTIEVVSAWERAWHGRLFSCNRDGARQLRVPTSRACSAGGMYESQQASVS

SEQ ID NO: 1000675 - protein, 205 aa, Homo sapiens
RAARPARRGPLRGRRPCASPSAALGHQCSTGDRLRGPTVDDPGRSRACCHWCRGAREASLIIHGPRRRQAHGARALGSLGARLLRQRQMDRPGRPEQGTNAEDPRYFSGTRLDWIVRHAVSPFARDDVLDAFATPAFVIHDALVGLGGSDEGRICGKAGLPDLSRLGEEVLASCQVERLPVTWTLTEILVEAIHGYVCGLGPYVA

SEQ ID NO: 1000676 - protein, 304 aa, Homo sapiens
MSGAPWIWMQSACLRGCREPTQWVPTTCKELKCVCGCPESAAGVVCLSKKMASGDSQLWSECVATLGHRLHELAPCPVLCLRYLARLLDHLCLPQLVVSGVYAVLTAVCQALNHEDWHISKAFCTCPTLAYHWPRKGPAVTINHKKHLRNTIGLCPLPSHARNGYLHPHWLHHALAVDTPEYGNATHALLYYTYTYRRPHGPTLLGTHLMLLYVTQTKPCTWALFSTSGLLKYTLIYIWAHLTRGNCTLVGYKPRHQLTCTPNTPAMVPLRFNHTASPYNITPILSHPRTYYGSGRNILLLPKR

SEQ ID NO: 1000677 - protein, 154 aa, Homo sapiens
RGVQRLCLFVCVSLQALFMGSPSEVRRAGWYVDHRRGGRIGGASVCPGVEQKEETVSVDLVEALKPEYVVSLVLGLLSRESVRRMVAVCEVGRRMDWTQISAEERTLASYCNDTRISPMTPEAVKANLEDICDCENASKPQSIQESTWPYNEKF

SEQ ID NO: 1000678 - protein, 200 aa, Homo sapiens
MGSCSHVTGLYGLDYSNDSARIELNLTREETGKANVDRELKEGHNGVIARTSQTIADRVPIQRVLPNENSRKVCDRDSPTVTNHMETLRKTRGSAPPGSKTDLSKYAQTRAEREKTPHGISHTKSTSGNLHGEHLRNRPTLVLNKQERVSQTYPYHTQAVDVSEKLTYDGRNGNRLQGVRHDTYEYKDQPGIHDNIDEAE

SEQ ID NO: 1000679 - protein, 173 aa, Homo sapiens
MININDRQHYPDGCVEVRGSKPGKNVQLQDNEIRGLCLKSVKSFSDQRYPTRHLKHHSKYVVTSMDNTMICCELFEYGGFPPESKLPVAWWTMWTGETRVMGDDLPHYWPTQITDILRICPTIYRGNHECASIKREFMDFMMTVKEDTTLQSMERFHMTVFRLCTIAGIVDEK

SEQ ID NO: 1000680 - protein, 102 aa, Homo sapiens
SGGFPEPPVAGLRGLGRERRGKKRGLRFGAFCQRGRTCGLESDCTPALFLQVELTAFRNGLLRLCWEALTVLQRTHFCLFLCETFRSCLHQVLYKYTGFQTF

SEQ ID NO: 1000681 - protein, 218 aa, Homo sapiens
SGQPPKALMGALGGGISHDRRFRVLVPPIVIMGRQDKNPRLPDPTPHVHQSHQETLVVARLPRSELVGPTDLDSTSAISRVAKVNPEKTQNLPEVTRQLGRQGRGQNPGYLQMPRSTSVSCFSQEYRSNGLPRELQDKQRRMHLRVDYYAWSHPIVEGSMVVGSPWWMVMGVLPLEGPYGPPDWLEGPDGHTQIAGMYHTSGTQGGHYGRRSTREAHY

SEQ ID NO: 1000682 - protein, 55 aa, Homo sapiens
SGASAPQPAPSTSPFRNACAARSKVRLNFEAGLDALPLPINADHQEERRRKETVK

SEQ ID NO: 1000683 - protein, 78 aa, Homo sapiens
MTARTKRLYIARANATIGTGNHQPGKRPTSHNPKHKKQTVTQQPKTSTQQSEQPLGDQNDTERNIQTPTPKNNGDTQK

SEQ ID NO: 1000684 - protein, 37 aa, Homo sapiens
AAGAAERHQGSSRRSRRRWAEEPETRAGEVAAAAERE

SEQ ID NO: 1000685 - protein, 148 aa, Homo sapiens
AEPPPPPPPQARPAGAAESSLGEGGGRGAGVGSEEAKRGGGRGAQGRPRAINGRLLRPGPARPTRPSDPVAPAGEEGQTHRSGMTNHVAVTQGTGRSFFSDVQYLRDMQPTVDSEYQACRETTGDIEESASEKKTRLRFGGNDTSVDE

SEQ ID NO: 1000686 - protein, 122 aa, Homo sapiens
SGLGRVSALGGPLWALGRRGAPACCAEMSWVPRLSCGGSAPLWARLLGWRVVPFWESTFRQPPCAERDTDAMIIPQNGGVAQETTTQNSRASKKTCQQEEHELKYEEIRESADHQRWLPAGN

SEQ ID NO: 1000687 - protein, 338 aa, Homo sapiens
ELWDVCYRGPNTATAVMCVLMLSCGTACDVVLLLHRMVTPVGASAVCMCAYCLDVMPEPFDLCVTDTCSVTQYVPTCVSLCDWMCDSVSCQSYTGMFTWMCYITLKHEAVAELENEAYTVYLARCKAQRASAFNRRLGDQSYTKYAYEPVGSADVLVGLQFALENRAVRPLCCPGAHTIERQLQMMRTRRGGRSYNASLNVREMHSEDGLQFFAFGVVAPERGLSTFVVSSVRDVHAYSRVNFKLLAFRSSPWGEEIEILADEREGRTQRDARFELYTSVKAVYVSYHRQTHSIVHHPKRCKASRYYENGYSTRKIGRGFHKTHLFVDGQLRRALYEY

SEQ ID NO: 1000688 - protein, 36 aa, Homo sapiens
AGVRALPTASRQCGGGSGEGGAEESKEFPPSLSGTS

SEQ ID NO: 1000689 - protein, 154 aa, Homo sapiens
MEFGCHVLVTTRGPYMAAKSWRCLWASHGAHECALPRLVHSARASFRGFIVLVPLVNRVKHQAGKPGREAVDTRRRAVEIRIRTTQRIPRLGSVLEEVTIRKARKQMVIEVDRRAKSVRRNPRWHRRPTRMDERPQFTIRVGMAIRVELGTFGL

SEQ ID NO: 1000690 - protein, 105 aa, Homo sapiens
MEGPMRLDPRGLHGPEVFALFLDSLNDDLLQMLLYPFAHMRYTWRCPSQKGRADGAHKELMGPLSRAEQGTPQARIGIDEHRGRVGMPQQTGKKHRRERQASTIG

SEQ ID NO: 1000691 - protein, 121 aa, Homo sapiens
MSEPSERLNNRKCNHEINKNDRVTEDINDKQEEQMNIDRIQSNRKVTYCHTMKHGQAKPSGRHNRRTPGFPINSRYNPERTAWMTEQDDKHHQTREVGARRQERGASTSKRRHGRQETNNA

SEQ ID NO: 1000692 - protein, 268 aa, Homo sapiens
SGAGGWVVVGAAAAEGQAGALRGRPAQPSPAQPSPALPCPCAMTLRPAARPPAPHPCSDSTHPNLARRHSQSSSPVVRENGLQHPCHPQPCPTLEPRDQGTTSVDGTGLTSTAPSWTTRVGSSPGDHARHTETALGARPGNIHSHAHTETNRSHAAVYTVLPDDPDVSTAKTVTDGTFARNMFQQDLPPKTQTRLHWWHYSLTTHVSVKHPCYQGRDLLTLLLKNVGLYAFLQPDTSSQLERTTESPIPDERTLAWSDEREHDRRKLI

SEQ ID NO: 1000693 - protein, 340 aa, Homo sapiens
MSSDETRPKIRGDSQWANEFEKMTMEKQKELNPKFSCSVVGGEFYELTHNVQAWLLRCYARSSFICWMAWLDTRARRERPSRRSFCPTHSGRDGLTFGPPVVALSLTCGHKWSTALFAMGLDARNPEHRNSSWITSLEKRCDAKSDVWSLRASKNVEELKIGPKDARLRRDPTGLASRSHWGIWHVKCVFLVSRERNPTRAVFEQLVGGHVSFGNQNTFACENASPISSARILTDCTAAEQRNDRDYPCAVREREEEIRCDHGFQGHECGPKAVTPRGRSSNGVQTWAMGRRWTHRRARVIGTGANLHGAVDPWGRATSGVRKPHGGDWSHTSMRTHEDI

SEQ ID NO: 1000694 - protein, 183 aa, Homo sapiens
RGGERAGRGGGGGVVSCLLSGGPGRAEPRCAAATPGSCLRQAGCLVPRGGLLSPRSMVPSRRTWNLGATPSLRGLWRVGRAPEPEPGMARPATAQTARTPPFPTQPVPGMVDEPGRGRNDTLESCRVTRYSSVARSAARTYLVAQCRALSVDWAGRRKPPRDSTCSLRGRIDLKEKLISRPQE

SEQ ID NO: 1000695 - protein, 125 aa, Homo sapiens
MGLTLEETLCMVSLRNSSIVRLTEVEPYNTLESPPSKRECLARSFDREKRTSFPSPKTPGPVVRSRELRVPRRRPSDVASKIHEVLPCEPLGCALSCMGRSMRCGLGLPLVTASLSPGNHKSLSV

SEQ ID NO: 1000696 - protein, 135 aa, Homo sapiens
MAASPHTLLLNAILTGLRRRLCWYLEEKKLYRTPLTSSYIFSGMSISSGLHFRHFSVPQYACMSRRAEQKAQPSKVKTPSQNLVAIIHFLAYKTSSGQAKAEIYEDETSLTAQPIFVQKAKLNKEVDRTRARLGN

SEQ ID NO: 1000697 - protein, 110 aa, Homo sapiens
SGVLLSARRWRLRPEAWGGVAAWAGCWPRRLPLLGAAGSAGGIGVSCGVVADAEHALLSDVTEALSERVMVRGSWAQGEPSGCRARDLMQPAPCAWSRVREQVHEGANGT

SEQ ID NO: 1000698 - protein, 209 aa, Homo sapiens
MPRHYTDKPHMKHATTPMRAVTHQRPLTAVDINNKRQNSKKRNGMRPEPPEIRDHRTNMRPQLATDSIIHRSIGKTPNSSIHPSTTGMVTHSPEKNEETPEYTKEIAQARGSNRTDDTRMPQLTLSRTTTKLDRHQKEKTTSRDTKPLRRDTTAQRTKPHGQSTKLTLRNVGDKLYSVIQRIITLNINISADAEHVDQDNNADTLTTQT

SEQ ID NO: 1000699 - protein, 116 aa, Homo sapiens
RVGFDAEPGAVSVGGGVEADSWCSRMSSWPGMPGTRGGVTRCLHLIDEVHRGSTTDRAGDPCVVPCVGLVIRGTPSEQERRHSEFSPGAWKNADTIATRNLQDLYRRIVYARSILL

SEQ ID NO: 1000700 - protein, 138 aa, Homo sapiens
MSLMDEGGAAPDHRYAWSIQESVLMHLATRVRELTVYDTVLSVAVQMDRCRVRRERVTCGGKQILAEYSLVVRDVPRQPGAMCWYEEVKRLYDTVPCVEVQTLSGTRHEQVICDLNFSHSGYQFAFCSKDCTVKIWSN

SEQ ID NO: 1000701 - protein, 223 aa, Homo sapiens
  misc_feature (153)..(153): Xaa can be any naturally occurring amino acid
SGRGAPSGETQSDGNPGWVAGARTSRAGSAPGRLAPPAPVPCCCPASVAEVCRLLGRREKPRRALSTGMIRCRHMSVQCVPEGLTCPSRPCARSISWQTSDPRTVALSSRTHANVKPNIPVFMTGKDQTQYRCTVDLFSIGRRDSPYPQGNRXKLVVSCEWSLEWVSSVGLEWTSLHLVPVTIHCLSMWVSDLVAHWACIWDVTVYLLQMRSGEIQEGLIQYD

SEQ ID NO: 1000702 - protein, 112 aa, Homo sapiens
RESDSRRARPQPCPGLHVPLRPRRARPTLSVVLTAPLRWRAGLTEGPAPPPAPRKPGFRERSLGSSVVVGDGRRDLASTPPGNSGAGRRHAHGRRAPALHTASTPHPDFDPT

SEQ ID NO: 1000703 - protein, 166 aa, Homo sapiens
  misc_feature (133)..(133): Xaa can be any naturally occurring amino acid
SGASALGAAEEMASGSKASVPADSFRTHQPGQARRKVRLRLFSGVHGGQARIREGAPGMPNAVGGGLPSRPVIEGEKVGASETAMLLLQRLHAAQCRGYSGRGGGVRTAEDASLRVHVPDWMRDGGAAPLSPXLAVSAGIDVAASLARDDEGCQLYLRGKWHAKDV

SEQ ID NO: 1000704 - protein, 119 aa, Homo sapiens
MTTQRLLLACRVDRPISLCGLSHAGKDLMQSWNDAGRRQCWNDISGKTEEVSSTVEMECVPEALLSIHTTVRARHDIPDLYRAVLGGGTSSSHLHNMRPVVLSDVDCGHVGAVRVTHVS

SEQ ID NO: 1000705 - protein, 199 aa, Homo sapiens
MRRAFELHREVLSDSLTEMVYFSGYRDGGPTLLRDFVEVFTAVEAQSVASGLNHRNYYSAQGGGLRQYRSSSPTALPRAILLIVSHHGSLPHGERAMGQVGAGDETVSLEKVVGTLAFRSHGHPRRGNRRADYGSRWPFVVSHVVANECEPSFPKQFVEEAIRREFLNSHRLFARNTRRTGRSPTPATQGPGSPSSGTL

SEQ ID NO: 1000706 - protein, 104 aa, Homo sapiens
MPNSDGSLVDAPRVRSSTRIRRGYLLTAETLTSTKDLVFTLCNVETGIDTFNGLGMPPCLFTQYTDDPRLLTSSYKRIVRSYLTPSEALAQEYPSLYVEYSIGV

SEQ ID NO: 1000707 - protein, 113 aa, Homo sapiens
MGDARHSPLAAPISCILSEVIKEMGESLPALVVVCAIGALREGLVALVRVLSVLIWKNRVWQGPLYSLSHVMSPECGRKWSSMCMTSQGLDLWQEEPPDSVLGFPVHLLACTR

SEQ ID NO: 1000708 - protein, 300 aa, Homo sapiens
SGVARLLDRPSPGGYVPEGAEASGSRAPWRAADNWAEAELSLSSTTEFQVTLQLCVTVTCPQSESRPSEPLGPRHVPRNAHSQNQNYDAPRAASLAARRQSAPISTPHYPPRDSGIGLSSAQRAPTNCAELAREATTRHANSTPRDGHRSIDTLIGKDFPNVPPKLTEPHRETTLTPTAANTGPHLKSEKPRCRSHMAPSLPDLPGTSRRPRARVTVKCDDLAVEHGRATTQRPWRLYPRGNHQTLRNFSNPPTDSRHGQTLGTNPRGTAGVQPLETRMWPLHLSEQGEQSLTVERGQER

SEQ ID NO: 1000709 - protein, 408 aa, Homo sapiens
RKSPPDPEAGWFHLSMAPAAASPSTSPFRRCESRFHSPGLAPRECAAYSVHSALLTAASLTARARLPRGPPTDGCSIHSSPLHPSATSRTLRCGRPPLSCLRCCTPTGPRAPPPASTPRPRPPPALLLRTLRPAPCHCPPPPPQSSTTTPPFPNPSPPTPPTSAPLPHPTPTHPTTTPTPPQQNTTYPTSPPNHSHLSLTPQHKPRYYTRDPLEPRQVTRANYTAEKTLCLTSKSRSHRAHPTEAKATARSILQDPILLAYAIRSYLHQLYELKRDSTYSPEVDLSSLQHYISFYTPPFTFILTSLPIAPTLPNNPQTHHIAHSPSPPTTHPIIASSPTHNNTTQHITMTTLPQTPLTLSPTNPSSHTHITTHTPSPYHTLTIPTPHTTTSTNNQHPPNNHITPQTPP

SEQ ID NO: 1000710 - protein, 105 aa, Homo sapiens
  misc_feature (45)..(45): Xaa can be any naturally occurring amino acid
SGTTQGPPERQESGADLQGLEGPGHRESGHGRRDVRFARRASAEXSFRTRADSHVLSSAATVMEECRYQESLSGDVNSGDMSPPLRSLDGREVGEIRIGSCWTWS

SEQ ID NO: 1000711 - protein, 118 aa, Homo sapiens
RGQAWRSQTYKGLSREGSENTSPLHAHTQALSLSLCHTHTHTHTHTHTQTRCSTIYQSEACGDRVERKRVVGWWYGGCVCVKWVCVSDTREVRRQWVTCRGLSSCVQRSRGREGLRVS

SEQ ID NO: 1000712 - protein, 188 aa, Homo sapiens
SGKGRAAGGKGRAPLARGDMGRAVTVPGEAAGAMLQCHAAVCAKLGGVAVLRLERSGTSEQPATARRAWLLLSERGVPLLPSETLDRLEESSASRSGFRDKSATVSKEMISDTFTFKKKHRKRHIISHRAKRMISRLSYRGAGSQYKLLGRSINKMEADNGLRKEQKYENIKCDGQWVKMREKKRLIC

SEQ ID NO: 1000713 - protein, 133 aa, Homo sapiens
MSGWRAGSGCEASGQSRDPGFGGRWKRYCDRALRTSGRRLRKGAYRRVDANGEAHRTLSQSKNGEKPSSLLTMEDTEEYCLFLIPDESGDSDNTSRRFCAEVRCERIITRFALYAWSPYSRRRESSLVESSIV

SEQ ID NO: 1000714 - protein, 199 aa, Homo sapiens
SGAERQRRRRRTRTRAAAAPPNRERKHRRTKKKKKHATQQGRKKRKQKTDKRHTTNDHTAGPTHTTEDTRQQEKRTKHRQRQETQANTQHATNKQEDTKEKARGRQSDKGDERRERPQEERRRRRREQESSETGERRQETKGAEEKEKEGEEIGEKNAKHKTGRKKKKQKRQDKATEREKKEETKKKREKGRREKRKED

SEQ ID NO: 1000715 - protein, 465 aa, Homo sapiens
LECAVRAAWLVAACWRGGGFCLLVCLPVVGLRGPGAVMGPAPEVPGALHVPATFSMRTCWRAHDCLLLWCSGAHTLVVYMRLRAWLPWVPGGRGQRWMDFGQLLLIDTQMAHNWSWRSKTHCPGASWPTCSAWDQRVASGLPMLSISTRFYPGQRAQAWRTAVAEGTARRQLDGDLEVMRLKWCRGKGGKAERRRGGCDDMGDGRKGGNREVTGMRSAEVSSSHAHYRELDVGGGQRRAVDGEANSRRPMAKRGRTNRNPQGERHKGDRGRSPRERESARGNRRKEYAQQRHRESGPRKQAKRARTGQSTRPITGGVSTTTSETQPGRETRREASERTETTEAEHNGAAGDPRERTTQQAERRHRARRRKRERREPAGTGEEATQYWPRGEQKRRKERERPQSTPASTPALATQPSSGDIAADKREKRRRNQRSTREASTDERRRTRRSRRESSAVADAKGGERR

SEQ ID NO: 1000716 - protein, 57 aa, Homo sapiens
MGSLFEGENSRSQRPEPEDAIFAQFNNGFETTQGEPPVRIQNVLPLAQRRGEDGAQG

SEQ ID NO: 1000717 - protein, 408 aa, Homo sapiens
AAGADVVWAVGFHSFRRRQTLVVARGAGWTGLALHLAPGYNGPTQPPQRDTENEGIYLGDRAARKTEKEDKNRQRARRPRHEDMRTEPEETEDKQEPEARTDAQTHTQRPGPNTKTTINGQAKHWHPDPTDNRKKPKTHLRAKTRKTPGNADPSAQGRHRTRKAHKDNGKTPSTQPRDRSQRTKKTTNEQATTQHNHRARHNTSRRGPQRKPGKTNTQRRAPVRHQDNNIEREQQPQTTMHSHRKAPQNRNRDQQRKDERTTQTTNRSITTRNNQRHKKTTDRNQATTKRNKQKDKRRTDKRQQTRQNNNTEEKATAEEKRTARGKGTREQQKDRSNKQKREGNSEPQRKKEDTEEEEGKKEEPEASNEGNGENEQKQEEEEKQSERRPNEKERETKKQGKQRKNRKT

SEQ ID NO: 1000718 - protein, 212 aa, Homo sapiens
MVSQDAKLGRRRKFVGALLKRPFYQCRKKFQVQCGHGFSHKTLFPTCYWPCRKALEQHDSRGLMSRRIYCKVLLLGAKFWPQGDRVIGQGAGLSQHRHGRAFSACSSQQSPKPARSVYPPDNPFQISLQHLGEFRKVPSIVASQSYAADTVTGKLASPWEQDLFRCAILWEESESTNVCDKDGDLSGNGCYANNLGPTDMGLGGPYPHSVND

SEQ ID NO: 1000719 - protein, 64 aa, Homo sapiens
  misc_feature (53)..(53): Xaa can be any naturally occurring amino acid
MLQIYDSETLARAAVGYPYKGKRMYSHYADIHVVTSYNEKQLRTNISRNSSLXSVPSHRKASAT

SEQ ID NO: 1000720 - protein, 104 aa, Homo sapiens
RRKLECGGANMAHCNLELLGSRDPPASDFHLAGTTGMCHHDRLIFFTFQREEGESHFVARLVSNSWAQAIHLPRWPECWDYRCEFFLLFQRDSLTSFGVTQKVE

SEQ ID NO: 1000721 - protein, 107 aa, Homo sapiens
MVMGPLAAGEHGTASAKTDKAVGDTDQRQDDSTDSKEKSDRNTANRNREDGRKRRKAATRRNKPVKGNTNPKAGAAHPKETVKSTEKNDKKQQKRGEKEGTPSRGNE

SEQ ID NO: 1000722 - protein, 239 aa, Homo sapiens
RWLAGGLRPAAARPEVGAACPLPGGRPALVRATSGLFLPGEEQSRPPAVTRDADAHRTQPDDPSCRVGLGREPHTQIQHPLNSGGCIMEHHDLHHPNIDAPSYLRDEGATHSGPDPGIMSGTQMDHLSEPHQTHQNPRWTSKTLWHRSPRSYMGSRHDQGRSRRDSTTRDDATTFHIPMGYFSAGKKSSLLGSNLMTPHFFFILKVISRSYPWKGHQDYCKTINISGKISLHEGGALGR

SEQ ID NO: 1000723 - protein, 156 aa, Homo sapiens
MLPCSLDYNVWPIRFQLKTDPAKVPGAHTGNVGVSCFTEQQSVGNVGVEHEKFLYISCPGRRRSGVSTDLNEVKTRQNKRLYVIDDGRGAEKKRGPWAPGKNVTIDGARDSPGGGQQYSRDGNSMRTSRADENKERPRSKKERLTPTKVNKQGSSV

SEQ ID NO: 1000724 - protein, 282 aa, Homo sapiens
SGPGPAAPARTRDPDTHEILQSSLSSASWTASDCAAPRPENQPNIRSKEKKNKSKKKTRHNDKRETKKKNKHKDTRTKTKREKNNSENTKLQETDDSETERDKSSTADAREQREKRESPQKRQTERGTRRHTRRVARRNSRRRSADTGRRTNSHAAGHVKAGHAKPANMSARTETRPRRRATRHRLQHTRRTPPRSSRSETRHRTTGGGNTNETETTTRPRAHQQKTRDEAPNTSGTETPKLHKPIQATEMNRNAHPKTESRNSDHHQTDKRKPNQRTNKKE

SEQ ID NO: 1000725 - protein, 75 aa, Homo sapiens
AELPDYQHLGCYSKAHSDERRKKIKKTITSSLSLKLLCRMSIYRVISLSASVLIDVTSCAQRIVLVNESQCGLID

SEQ ID NO: 1000726 - protein, 221 aa, Homo sapiens
SGELRAEDLGRRAAAWSEADTWQQLVSSPGGGSNSWRRDQALCQQACPALHQLTPRRQTLYIHYTLLVPHWVARYDYSQRADSSATKSTSITHRQQNPCTARGHLRQPSIQLARHRRFGTARLQAFEPAAKSLQSKEDNGLTTETAHTTGDTAQTTRRHWDWNPQRPAQPPPPPCAVQIDNTPHTPMNEDTTLRSQLLPPPTPIESTSGASSRNPTDRRQP

SEQ ID NO: 1000727 - protein, 91 aa, Homo sapiens
AEVWRVTLGGLSAAAMACRSGLCRALNVGGGLGSLTCRDALRGLRMEDAEAPLGGQARRDARELPSASSVSRWRNAVSVLADLQAVEGLGP

SEQ ID NO: 1000728 - protein, 136 aa, Homo sapiens
MASRDVRGPGRRGHSPCESQEKHGENTERSMSGSRFENTQEVMCEAETRDATRNERNVGDDRVPVKPHVLGRPEADDEETGTQKGTLPDTVSRDKDFMGQVNNNEHQPPNYSTDSIQLRGTLGVDQHVEQESRRED

SEQ ID NO: 1000729 - protein, 266 aa, Homo sapiens
ERAFSARCADFERLLPVCAHSQRVLKKQVYRPTGIPCTRAGDLVFVNDFRCYAHLACRLNQTIMTSGPTVYQSVFHSGSHETGLPEIPKRLFPYKECKDEVRQAQQEARLSAAGAVGNSKTTPWSRPPICPLASEKGSGDGPWPEPEAAEGDEDKPNHAGGGGDKLGKLDDDKPTEEEKGPLKRSAGDPPEDAPKLTQGGSPEQEEEAEAERAAEAERAAAAAAADGVDEESPFLVAVENGRAPSEAGAGLRSQLSQRTRSSGEED

SEQ ID NO: 1000730 - protein, 201 aa, Homo sapiens
MSPSGAGEARERDPLHEFYLTPIDLSSRPAELEEKGPARNCARSVSEDHRAGPTGAAAEGLAPGPPALLLTDPRGPTAAWPGPGDGADTRQRGRRPPRSRAPAPESAVVRDPARAPAAPGPDPDPSPGQATRPDQTHNSGPKPTPHNCNPPIRNTDRALDCLGRPTTTPLGSDTKPGWRTTSADSTPCWNEPQPLSPPASV

SEQ ID NO: 1000731 - protein, 166 aa, Homo sapiens
MSNSPKQNGPIKKPFGCNNLRSKFGPNPHGGHEWTESSMFRGQGALAKIDSLLEFEEDNGVYSRKGWFFHRRGKIWRLIPIGEGFSYSIRCLRKMGMSKCNRDLASGGGPIPLGARAVCPSEEEQVSSERNPPLKKHPWKSSGKDSPSELERNWTGKGKLNIERVG

SEQ ID NO: 1000732 - protein, 134 aa, Homo sapiens
MTTAHGEHGRSETRHDKRQVTESRPHVPKRMISPNGIPERKNSTHRRETQGAAQRQGATTDTSTPRSYTSNKKSTQRRDTERQGETYLSNRSETRDHGNRQGADKTYSHTTPQNDRTTKPTPHEHHAHKKSRED

SEQ ID NO: 1000733 - protein, 186 aa, Homo sapiens
  misc_feature (44)..(44): Xaa can be any naturally occurring amino acid
  misc_feature (57)..(57): Xaa can be any naturally occurring amino acid
  misc_feature (72)..(72): Xaa can be any naturally occurring amino acid
  misc_feature (117)..(117): Xaa can be any naturally occurring amino acid
  misc_feature (119)..(119): Xaa can be any naturally occurring amino acid
  misc_feature (125)..(125): Xaa can be any naturally occurring amino acid
  misc_feature (127)..(127): Xaa can be any naturally occurring amino acid
  misc_feature (130)..(130): Xaa can be any naturally occurring amino acid
  misc_feature (135)..(135): Xaa can be any naturally occurring amino acid
  misc_feature (164)..(164): Xaa can be any naturally occurring amino acid
MDGSGSRAGCNGETDKAFLRDLSELLGMDEPSAVGHDSVQVLRXHRNYDTAATLEWXRWCAIRYMKFPHIAXSTTGGARYTQHMVYETATCYVSLSCEGMQSMCIARKTQQVVSAMXWXRKRIAXTXFRXASSRXIIVGTNQRSRQLGKQSLAADVTTPPSLAXAHTVGPKAYKLAYVHLRLTNWR

SEQ ID NO: 1000734 - protein, 87 aa, Homo sapiens
  misc_feature (83)..(83): Xaa can be any naturally occurring amino acid
RSGGSCSGGRLLGVEYPSAPRDPTPLSVLLRAPAYLAPRRPMTTNPSTFKVSRSQAAGIAPDVSAVVQCGSDPIFSYSVLMNXDITT

SEQ ID NO: 1000735 - protein, 102 aa, Homo sapiens
RVAAARARFQKRHRGGGSGGGYTGLGQNQKEQTNDMPSPGGSKQNKNATHKRQRAGDQTHKKEKTGRPQATHNCTREPKRIRDSRHQNIARLQKGPREPRPK

SEQ ID NO: 1000736 - protein, 119 aa, Homo sapiens
RLVSNSLPQVICLPQPLKVLGLQVCHRARPRWEYFYGHFTYGRTVSLTIEQLAQLGAVTTRIPSSFGEPHPTTGPTAGQDRVLLPPSLSWWAHGYVAVSSFTLRSGPNPVWSPAPFSPS

SEQ ID NO: 1000737 - protein, 152 aa, Homo sapiens
RSALLAEEGRRTLRSNVLSVLINACVWVLTASITVYTPTMILDGWDESLILTTPAESYWLPLSTYSSDNSESREASQLILAVLSIVTNSNTGHWTIDSSLSRVHEDGSAANTAYAQKMRLELVPSPGTTWFTLFHSLKRVTRRICDTLGKPR

SEQ ID NO: 1000738 - protein, 137 aa, Homo sapiens
RLCSSCLFGTDGVHARKVPALLDISSTYPPSDARREEAKGKRAGLWLEIHARECTRADMSWPLLVCQYDYTHTRHYTRNEREPTDILTSMFNGRCYKAICDRYEAAGFERLRQMLDFYLFSPPGINRWRLDCLDLFD

SEQ ID NO: 1000739 - protein, 102 aa, Homo sapiens
MAGYGSQQWQHARVPFHTVEALLFHSLGPHCFYELEHSPQKSAASLLKPGDHEPTGRNEQLQTRHLKSCNIAARVRGFILEVSETKNPPIPDAAPVMEADMM

SEQ ID NO: 1000740 - protein, 419 aa, Homo sapiens
MGRAPGCVLLLLAALLLRVLLLPPVPCLLEAASLAAALPVLPSSSVFLSPACDGDAAAVCDPLCMIPAWLPSAQLSLLALPACLVLCTHGSSPFVFPVNCHGLVPSPFEVARCHVVLPVWLLAYLACWRCLDVASLVWLPVVAVACNVAHLLPEMVVCAPIVPQWEQPSEGCAGISWHPIRGDAMSALKGLFSHGQLVVNPWGRWQGGTFMWANARISQGFGLFGPFSVNFEFGPAVVGRNTDNVPPGEWVGTKDMARVTRFYQIQTHKDVGSRYLDRGHTVIRTVVGGTRSGDRPTSHRNTDPGGTQVVWERNSPDRATEQNWKTAPEVECAQTKRSECRGKVGHQATVFSQLLLVVNDARSTWWGRPKQRITARTEFGEFIPHQQWQFRGGERDPADVSVPFGIMGVRKRYGESAYE

SEQ ID NO: 1000741 - protein, 151 aa, Homo sapiens
MILASRRAWVPFLTLLAPVLSCLYRNNSPSRTSDEARPGATPTGASRLTINRQSPRAPDSLQRELTLLLALGRASRIAPTPPTRETWGTDPVNGGGTRHVLPLTSPSASHTPQNYYTFPPCPPLCRSSAHFVLTVHPHTSLPETQHTALCN

SEQ ID NO: 1000742 - protein, 252 aa, Homo sapiens
AGCLLRGGAGPGRGPGRCGDAWILAPPGRLPWCPEEAADAPGHGPLSQDVVTWEPRPIACGACGEWAGAPRSPEPGMASPAAARLLDKATVALTGPFYEKTGLGEVEEHGRWRKDNPQVAEQVIVVNYARLAPEGCKTSHQTLVSSVHRSAVRQLELETVNLRKGPRPIGTLILENSTLDKGYEQQSRAQADVDGHTLVRTRRGPQGDDVDSPEDWQEDTMDGYRDGGSTGPLRHEEANTGGPWLAVRWKKM

SEQ ID NO: 1000743 - protein, 371 aa, Homo sapiens
AGVNGNLRIRGRAVWGTARGRGNRHPTDVLLCRTPPRTRSESTWRRASGSGAGDERTGLPGTLARVRQNCGTRPACSSGGSRARPSAASTRSGTEIDGSRRRNYSMEDGDTGRALGDLEFVTTIAPPTWRSKAMDPPVVTSTADNCSDHIAVPPKRLVDPLDAWWTHHGTKLWKTKPATFLCHLVIPDFQSIATLMRLSTLRSIVAQTSTPVTYGELRIQWCAPGWYNLPVGSDKVPTLCSQATLRNFDHGPTTGCRIYSAHHTLGHGNWGPLHLGRATWPPRVNSSYAPIAMLQTNLANTMGAHKTGPTYGAAIIDKLATGPTLPPRVAHTHCDIYPEPDTVRKHAAYTGHHILHTYACVYDVTTPSFST

SEQ ID NO: 1000744 - protein, 46 aa, Homo sapiens
MRHAHRPRPQRPLPRHEAHTTALPDTNPHTGQTSTDTAHKKTQPGY

SEQ ID NO: 1000745 - protein, 103 aa, Homo sapiens
AGCIGAGPAMAVARVVAAALPRPRRDTSEAGTEVVADADTAWVLRSGPAAMEDFICDLVTTSGSESSEEAATTVAGRWRDDAEPCKTETPARMTRRDTETGDI

SEQ ID NO: 1000746 - protein, 220 aa, Homo sapiens
MDEGRNNEGAADQTSTRNDEAQKTPRQKQKSHSGTRLDKDSNKTTQQPYSTTQRSNEKENKQEETQAHTKRANHEPTKRENTQIATDTHQRRRRQTRTQKKRTRQRKRKKTAQKQRKQEKTTQRTQDKDDTREREKPTTTQQRHSEKHTQRGQEDRRTQQQATTTDETDPKTEQENDKEPTRDATKRKGDRQTAHKRHKKRSNTQHDKNKHGNPKKPHDE

SEQ ID NO: 1000747 - protein, 253 aa, Homo sapiens
MGSQLGCGPRRRMSPGERSGEEPFENGQNGWLGPKPCNVVLWSALVPLGGVQRQSTCGFAWELEGGAIAFPLGFVLLHFACGGNRAHRIGDGDGAFECGAKSAVSRFGSAIRRIRGGGHRPRHGRSRHTRRSEADPNRLVEHQTKVTQHPLRQLIKLYTFTANFADSDLTNLADTGGLGHVTTPRHGPMCLWTTELCVLVACGTPVWRHRADLRGVRLARKTVATIIVTDLGCPRIRVTNLYRPARLEANLQL

SEQ ID NO: 1000748 - protein, 57 aa, Homo sapiens
SGGRGSSSAQSLRPARALLARPRMSRDGDDKEMCRAGDFKAGRLILDDVHGWGGSLA

SEQ ID NO: 1000749 - protein, 157 aa, Homo sapiens
SGLAVVAGDCSSEGQWGRRWQGRGRVTPAGTRKKKWPGGHLSHWLLPGSSTDVRDDQPGMAGYRGCVWYQRHTWHKGSYHSTLFIQIDKAFEILSNWSLIGRFYSCAIGIVPSSVVLTSYQVMSRVTLIWAVTHSVKEVQSEDGVLLFVMAWTITEI

SEQ ID NO: 1000750 - protein, 119 aa, Homo sapiens
MCLGQTRMGYCSDPMKEINMPVPDGGACELEGDCMTVSHGYSVGLAWQRRLLQYRSIDQCPYSCLKRDGSIGSSSPDSERKLGSVRDLDNGHNAFYEVGDCLPLQMFAELVWQFQIPEG

SEQ ID NO: 1000751 - protein, 129 aa, Homo sapiens
MLIEVLLGIVHRKGPDWSSTKAGARWGRSRTGVHGSGEMPLVKTLVGRQKFGQQNSHIRETSLSSTDRGHILPEVPHIERAAWYSLSRVGVGATGLTPTPLWDSPPVIRQGGLNFHQRLVALLSHHGGP

SEQ ID NO: 1000752 - protein, 142 aa, Homo sapiens
MTVKTYRQLLLLEQSQLRMLQHYTVIYLTRYISYEQPSSPKHDMATESEKRIKQDKVSTTQQRKKKAKENMIDGQQSSTDNTQQQQQQQRKDQKHKRDKTKNTHNAKQQRHNKTQHSTKKKRKKTKSKKKGKKRQSDIQKNT

SEQ ID NO: 1000753 - protein, 66 aa, Homo sapiens
MAKCNQRSSNKLALKSSFRDLCQCYCNFTNCMPDPWQDRGRYDTTLNAQMMDQRRERLTFDSSQCE

SEQ ID NO: 1000754 - protein, 210 aa, Homo sapiens
RVAAPPAAESCYRRSSQATPSSIHRTHPIFTWHSPFSIHLYDSMRQTKPILAATDLISHPITRSRGRRIDPMRMDQHIDDTTYGHIQEQSHKEEDIQQLIERDTHPHRTSAFHTQPGDTHHREPQSHNTDKPPPGEDHHEGKATAAHGGEPNQMDPPPQRTQPRDEYTTSPPNVSQVQTQIQEEATETEKRRAQQEKGTYGQAHTHAHEH

SEQ ID NO: 1000755 - protein, 83 aa, Homo sapiens
  misc_feature (79)..(79): Xaa can be any naturally occurring amino acid
ADILNGWLRIIFNGNPPSRPGVVAHAYESQALREAEARWITSASFDDQPGQHGVNTVSTKNRKITAQALACAMPVSSQXTRGS

SEQ ID NO: 1000756 - protein, 191 aa, Homo sapiens
SGVGCVCVRSVAEAAVGRLGRMSRWTRAATPLLPDMPGLPDLPEPVARPTVLACRARCACQWQACVAGTEFLCEGAVTTSYYQVARVRAPDSPVEHVLVLRSSSWLYYTVPMQWRCRQLQGTHRPGPAPQTSPHSGYQIRRPGSKGTAPDEGVMEANDPLNHLDLPCDTQLDPLLRPLQTMRGLPSPGFVH

SEQ ID NO: 1000757 - protein, 70 aa, Homo sapiens
AGMLPKLDDACVSGLSFFFSSPGRHSVGVCSLAMPLAISMLASDPIRYSRQHKLSHFAFILAYHNVELRY

SEQ ID NO: 1000758 - protein, 189 aa, Homo sapiens
SGEFRCCRPGWSAMVRSWLTATSASQVQVILLPQPPEYLWDYDTHHHGWLILFFLFVCSVCLLLLLFVFLLETGFHHTGQAGLKLLTSKDLPALVSQSAGITGMSHTPDHTTYEQTSDVKLGRKAGVRTAHETQTRSRPVDAKATSYTERQDDENSTEALIHARHSTTHKTALEHMRTLSTQKVMNQTW

SEQ ID NO: 1000759 - protein, 187 aa, Homo sapiens
RRFFCQWQPAELPLKIAGHEFRGYEAIRRDVCRHSPGGTQLLSPRDQTRHYLKVNIGILNPSPDGHIHDKQKTLVRRQRVGSEEEDEAPILFCDLRRALPATVVLGATVILLLAASLKILRALSNLVPHDVIASARGRVVTSLLPEKLGKWYWYTYEFYDIYTGLTSPCISTGGLLAHDEAMLPIVT

SEQ ID NO: 1000760 - protein, 33 aa, Homo sapiens
RPSPRGRAQPAAPGRGRLTNRAGDGWIIDVSII

SEQ ID NO: 1000761 - protein, 194 aa, Homo sapiens
MPCQHYLRKRGILRTTYNSVRADSGTTLWGSFANNYETLSHDLLQITLLAEVIFCKGQAHKVVVRVILSSKLCDPALLTSARIHHAQKGTFSFTAARNTLQLELQWLLKGLVTQYKCREHPPTGNFLKNQSPGCGHVDKRLCQTTTVHRAQGVGHQLPAGKHSTGEAAPAQRSQQLPTALEAPNPSKNNGRLHH

SEQ ID NO: 1000762 - protein, 176 aa, Homo sapiens
SVEVRRPRTRAQAWLSPGAGPAPPRGAWSPPHCQCRRLSHHDDHARIGEVHSSGAGADISVREHRDSTDSSLSRRKPGEQESACPMHIQNTRAMTEADTENGYRHVDSHRTSKSTRHEKATHARRWMKKQGTIPGNHPRGTTREPRSMPRPKGRTRHIGEGQSMKRTHTEVQVGAP

SEQ ID NO: 1000763 - protein, 246 aa, Homo sapiens
SGFLTISGRRPWSVARKVLDLIGGERGVEEPKARVCEQIQTIQSKKQLDLTRSLEIYIRRYDFEGLHHTSERMLLLILAAAWDLRMTIYFVTNDKTKTGVDKNVSQSADTGARKFPDCTRRASYNVPTGHTVGRQPDVYSCEDEEEELSETHWVALKRHTQRQQALPIEFQKRLEYTFEGHDILPDAVSTVSPLSIPWYSLDTLVDTVIASGSYKPNQGADAIRPTGIPQKELDERRFARGPIQRH

SEQ ID NO: 1000764 - protein, 150 aa, Homo sapiens
SGDRREKAPRVSTSTGRKGRQKGKGPARLHVNRPERQTAREKAPRVSTSTGRKGRQKGKGPARLHVNRPEQADRREKAPRVSTSTGRKRQTEGKTPRASPRQQAGKADRREQRPARYPRQQAGKGRQKGQGPARLHVTQDRTRQTEREKD

SEQ ID NO: 1000765 - protein, 82 aa, Homo sapiens
MADRAEMFSLSTFHTTIRAGLRPPQDISLEEFDDRTILICRSQTDCGLGLSYDYRATDEKDKTLTGGARSQTGDRQLRPAQD

SEQ ID NO: 1000766 - protein, 118 aa, Homo sapiens
MDINNEAGFMKAKLAEQAMMRYDDMCMPLRRRSVSMNKELDIDPMEEEEVFLSVLTYYKYCVDKDVTGRINHVDVVRLNVIEQRDDRKCGLMIRHTAKSGLEEVAEDEEFDDGVVNDD

SEQ ID NO: 1000767 - protein, 138 aa, Homo sapiens
RRGGSGTARSAGGVARAACVCAPASCSGDTIRHENLWILSNMEKNCICVKHTEQELSARGSYLRCTFLRDTSLSSSEHGRNTAGGAEQAPGTPEITSSLCCRNRSSDNDARKAHSDENTYDVTGTVLLKKCMAGKYGP

SEQ ID NO: 1000768 - protein, 297 aa, Homo sapiens
ADWGKRPRFRRVPLKWRPGGRCGARALACRGAWELAVCAAVKGAGPRIPAAVLADVYVAVLMTSGPPVHGSCVRGCADPVIRSRRNVLACGNLVLAGLLVQDAEADVCPAGSKYACAGVIWHANFAPTCMERRMQLSEVLLKTRLHTNRALFDNEEKHDAASTLQHSTEDFIHSGVSANPPWSILYLLLSLSEDPRMAAKQGYLAMLRHLRQDLTKRCPLNPLPIMPGPQSLTRELTRIESSTVRPRATLPELGQASGIYTTLACVSSVAPRLAPESTHHTDSLQSAFNEYDDCLTN

SEQ ID NO: 1000769 - protein, 255 aa, Homo sapiens
SGEAGKSGIEEASIYQGAFLLLHPMMEGGRVKRGEEAVPGILHQLTNLDLDDGLSVEKSVAGQREQCGQHETTSAVSRHSTASHSSSHDSRALKADDSKPPGHCVAEKTRRTPAGAIHRKLKTCMSMTSHGLGPDTLRGWRVAGKQTELGRKDLTRTDGRLLGLIDAHGDLWSQIESNEVSRTSHAPRLMCHLTFTMTDIAQCSAERCIWTSSWWYDWLIPNHWSLPTIEASAENSMYNAIDGQEVRDFYFHKTY

SEQ ID NO: 1000770 - protein, 335 aa, Homo sapiens
SGGAEGGGLWPFALGSAVRSEWERDGPAVDSVWTTPVEDLTVRPAVHELVLLQRTDADRLRLASVAYVHYTLVDRIHASPVDGGSPIDGRLPESQTVGAQRMLTQGTRDADRELTTDGRIQDGLAGGRARHSEHGAAAKHSKTRRPATAGQSEVHRSNTWAHDAPRITATSRSKLLAWGHTNTGTRVPYAGINGATYSRWVYQIVALPINLNVVVICTEAQPWPEHNQEIISTPKKWSRRHWNFASSWSYHRSAQLGLQSLGLHQTYGTSFVSTTAARQRCGGTTVTFHMSSNSLGGQDTARFTRQAHKLVHQWPVCVSQPDARALTSLVSLYPG

SEQ ID NO: 1000771 - protein, 113 aa, Homo sapiens
MSVNLSSVHSQPTELLRVDISRFIPCKGHILNAETQTIVNYFNIFFSVEIPFYSFSHYDAFSLTLPIKSFSIFTPSWAISIQASFVFVIILYNQPYFIFLHYIWQIYYYYYYC

SEQ ID NO: 1000772 - protein, 439 aa, Homo sapiens
AGGAAGAAVSCLPAWIQWGAALLPWELPPPPLRGLPAGSVSWFYTRPVPGMCQVLLHVVLLSPPPVLLHGYDTSVATVCLSPVIPMHTWEWLTGVLGRRLACVSDRCVPTNNRPCYEITIAMNAARMEQGEALKGCQLPNQVFRWLARCTTKDILVGPGWFQGPREKNRQASQKEHGLTKAQSSPGVTRGHEKQSAGQPVATRRWDGKPLRPRTTLHGHRIQEVGQHPQHTVEMTPQEFDRGPTRESDTRQRRWGQPEKTTRRTLAKTTRAMEAPKPQRDEPYRREECTPTEGDKIQAGGWPDHRVPHLSERRSETRKNDVEPATVTEQHADRAHPWYKTRRYHQASAGGTGSAARDKGTGGRVTEYLGCRPNMMAHGVHHRRTRGSWTRHMDMINQRGYANHFGREFVPQLLSQFTCEAAAGHLQKSIDFTPTGPAFG

SEQ ID NO: 1000773 - protein, 430 aa, Homo sapiens
SGLECAIGAGLCWRARLSEPLVACTYCLLSCSLVPGPSAGMAVLGLTAEMLAHVSSEACAADAPGSPKLAVLLPHHAPVNTNSLGTQCPPVTPDAGLPAGEIQNGKKQQTRKEGLLEGKAHRPNGPGRQTVNELGGGSYPHEYYAEDAQLILFLPCKTHLNAPQREQYLRYLVGTPTNALRRERSFYAHGLASVVRIPDAKVGQEPSGLAYPGANKGSQDAVATYAVHGDLQTKDQAHKSVLPRGYTRTKLRILHTEKGEHQVHPQADYVSRAVPRNTHRPLWPAYDTNVGIASGLAQVRLSRNTGTVTLNTEHLPYLNLPGVAMRARVHWDVRDVVPPIPDVTPPIKRVMARMYNATHSACKHFHAEVGWKARFHQASQVGSCECNVSVGWTSGINGAATNTVCATRRAAPSLRCVPTWKAAINMSSNR

SEQ ID NO: 1000774 - protein, 83 aa, Homo sapiens
RICTRRVTGRSRLGSRGLSEEVAAVTGDGGGRREPRAARLGGARASSSDQYPFQGTRSFKESELQPGPAPSRVIFFLCQELHL

SEQ ID NO: 1000775 - protein, 192 aa, Homo sapiens
MDPFRPSFRGQSPIHPSQCQAVRMPGCWPQASKPLDPALGRGAPAGRGHVFGKPEEPSTQRGPAQRESVGLVSMFRGLGIETVSKTPLKRDMLPSGRGILGRGLSANLVRKDREELSPTYGIQKCWRLGTARWQRPPLVGVGRLDRREFRCVFITTGNEQQVVSAEKWTSLPVPSAHRPGVPRSCPSHQLCP

SEQ ID NO: 1000776 - protein, 182 aa, Homo sapiens
MKDEQVSTMISQAYEVLSDANDNGNSLQQMEANTANYTQAWSRCAATQAHPWTLFDYCYTLRLSAARIADDDNVQRVTTLVRLPLQSYFEYTPSDTHLSKLTVLAPKHPPWPPWPDNTPREDIRTNYHSARHTGYSTATCDTHQAAHNAQQPRPGYPPTHATHVVPLAQMRPHYTRHLRIQR

SEQ ID NO: 1000777 - protein, 236 aa, Homo sapiens
MGTDRIIGDMKSRLGGGHKGSQSQTFIQPRRDPLRDKASEKAHSWTTQGETASLVVTPPVRQSSQEEHGESSNVTYVVEQKKDRSEGKAQGVHRDATRGSHVTLSPGGAAVIPIRSTWHRKTANSGENKGATRARKHRHISIGAHNHYKRGTTIRGKHPMYEWIETPWAYNPNWGSIQEEGTMKGNKRDHMRENTEKHNSSGTVEKYPRGDEIPPNNGAAKKGYQEKDPVGKPPPS

SEQ ID NO: 1000778 - protein, 149 aa, Homo sapiens
SGACRSGGRGGRGSGGARPSPNKKKKYKQKNKTNLKTNTEDTQHHNTKPHETQNSDHNEEDILQNKTNAGTHNRPPNTTRRQTETHTQSHEQTGRKDKKRKKETTKISIATHIKEKTESATQNTIERTTYSNNYNEQKQQHREQARDVG

SEQ ID NO: 1000779 - protein, 190 aa, Homo sapiens
RGAKMAGVQVSEAFATRSEAFIAHRGYCRRHGYRNDLAETSRRPPSRGYPPSVGSMSSHSKAARLRRIERWEATGALLAESVDEKLRILTQDAVYEVQWFTQQTFAHVMPDARGTSIFDQGPLFLVEVMARTSAQLEPEPEPEPEPEPALDLAALRAVACDCLLQEHFYLRRRRRVHRYEESEVISLPFL

SEQ ID NO: 1000780 - protein, 73 aa, Homo sapiens
RAIDVTPGPCGLPLLRKLPHAHTVAAPVISRAPNQSPPDTDPRRRRSSLTTAGAQHRQGTQNQHVWTANTSDN

SEQ ID NO: 1000781 - protein, 121 aa, Homo sapiens
RSGPGPVGVLVPSWLTPTPGTLAPRCEDDFNYGQQRWPPPPCTSEWRYSEKSLQRVLSLQVLLTTVTSTVFLYFESVRTFVHESPALILLLPSDLWVGFLALTLNRHKYPLNLYLLCGFTL

SEQ ID NO: 1000782 - protein, 116 aa, Homo sapiens
  misc_feature (100)..(100): Xaa can be any naturally occurring amino acid
SGRTNWLVNQQGPGQYEAHHSGHATGLRMDDRHRFTKSSQGLEGRTLEELSLYCCKCCGPACNRNVRGTNRSMPCNNEWGLITSVIGECVRRTEWETPTXYPSMGDATETSIHMRL

SEQ ID NO: 1000783 - protein, 249 aa, Homo sapiens
RGADSLPVGGRLGESTWGETVEEVKGTLGDAPRGYQGSNCTVTWSGRGYSQVFYGCMTGSGGLGLLLLALASETILWLVCAWDLWTALVRYVDKLDKVLDELCVRMHQLWKQIEDSGHDYLEFQWIDGLATGETPRRLAQAADSGLVETRATQECQDHHKEKRDKRAIENQLWGSHGATWMPLRVSWSTPEKQFMSGLHPECDETWLTFDFPPEFYEHAKGLWEDEGVRACYERSNEYQLIDCAQYYWT

SEQ ID NO: 1000784 - protein, 97 aa, Homo sapiens
RGVAPGMRTRNAAEASRNSQSAVASQYFIYARKLCAVVDRRIGGADNDDIISVQLKKTSEVDLGKAVVKFSACRLNQCGGEDQAHVTGARREETRHI

SEQ ID NO: 1000785 - protein, 404 aa, Homo sapiens
MTTSVPNMQDVVEPQMLGVINVSNAVAYRVVSQGQFQQYAEPIIIRRKLICGFSFGSCHLVLQMILESPPRFCLCLGLHSADVHSGEMSQAGENHSGKEMVTTENKHGEILRKEREPNTGAKNRPGWYKRHMDEYSSGRESRTMAKRGARDAYQTSVLHQHISRGRRICNTRSRREMTQAGEYEIQPPGGVSIAKAGTTRERVRTAQSKIKGTTCVVTHKSSIIQIPVTVGICPPKGEAENVANYKLNFRIPHVLCHSDDHVGFILILPNGVDFVKSVLGDSSKGCKELLSMSSNAKVTNTNEAITQINEKASGEDTPKLYLTDHGKCNVGEEVTARRATNQLIARHRSFALTKRGHTENIERREPIWRLRDDLQKEPLGDIRNDTKLREVTHENHGRTIRVAR

SEQ ID NO: 1000786 - protein, 221 aa, Homo sapiens
RIFSPGALGCGCEKGSKGGRRRKGRASRPRWGQESEGIAGEGEEHGAGSLDAGLTGHQVLDDLPGSRMEGQAEVHRITAVIDQKLETHQDTWDRVAGITLVEKLGWARNSLSFLSRSTRCGKYVVDTGREGTDRLWGSTSTRYQFVNLIEDARLIGGLRVPKPFREGPGPLQHDVRLKTRDLDTQTGQSVGLGNIGRSLTVAYGNYSCGMITIRYQAAQSL

SEQ ID NO: 1000787 - protein, 128 aa, Homo sapiens
MLEIVYGDEKDERGQFSEYWPGGQQTGSYFGDSHFAEELTLEPTFAGPWTCQKAVRNEELRGMRNTLLVLAGPRKNARKTLDEVPGDEPHDGTRSVTPRQDTLTPLAKPWRQDWGFQHPWHRPHNATG

SEQ ID NO: 1000788 - protein, 134 aa, Homo sapiens
RALSSAVCSRAPGSRVLTVAHARRAERRAAGSLGCTRAHPFRGRAPRLEAPAVRAFAGKRVGYSMSHETYFMLKQVKMAGFLDNFRWPEVCTVLDLGVTMTGNCCARSDWSQVIFVVYTAGWIVIDARVLRCTR

SEQ ID NO: 1000789 - protein, 141 aa, Homo sapiens
MSEMLAMNTCPQVGIRLTGEDLTPLHEEYCLTRGFHELDWRDIVVQSVDEALCALPLRTQSFVGILHTQTCACSKAELHAQSSIYAALQTYASPSRNLWFCGTMLLASKCNVLLNPCLGLCVATTHGLTLLWDLPAIAPRR

SEQ ID NO: 1000790 - protein, 148 aa, Homo sapiens
MEGIRARVPSRCVRQDSADGSDFEGTVSATSKEPLESPWRHARCIKAIEVTHRTLTSTPKGNELASRPRRLVSYGDAFHLCALVWDLMSEGLGDPKHKLPKKLAGTCVRRVQGTYSQDFRRRRRNCIQWLLEDVECRCSTYALGSLRC

SEQ ID NO: 1000791 - protein, 102 aa, Homo sapiens
SGLTEAREADEGCRCLGRRIPEGVVSVASPGPRVPEIGHRRARVCVPRFPARHSTPGARGPVSSAQSLCGIFGVILILSMLPRTRREILETLIKGLQILEIQ

SEQ ID NO: 1000792 - protein, 77 aa, Homo sapiens
  misc_feature (56)..(56): Xaa can be any naturally occurring amino acid
SGVAGVLLRRENGVPRRRQEHGGPPEVLYDETEAPDTLLFREHSNETDMKSKTHDXLGRVDWERSSILRRGIRRLCT

SEQ ID NO: 1000793 - protein, 249 aa, Homo sapiens
AGPGVSARAAVRAFAVLPLCELACGAPGRAVLMAWKWVLLCARVTPGHPWLHLVMPKWLLLLLLTLAGVPSLLPGELIAKMLQWTSEFWMPALLRGGPATVVVPHVCDQEAELGLVTGLLMPGAHVGYQCSAYTGPLLAVPQDLYVRLSAQAYPGQDRTPLELERRCCPLRHQDPLQSVADILFARLDPRADVVQALHGRCSHSIEAYTGHLRLVEQAHFGTPCTHLECAWPQLGIWTSGPNSKNGSTQ

SEQ ID NO: 1000794 - protein, 69 aa, Homo sapiens
SGVTDELTGLTQRQGSRGSREGLGSRAPRGPPARPEFCERQTLNREKTADSCRTTYKPNNCKHLYVRGC

SEQ ID NO: 1000795 - protein, 161 aa, Homo sapiens
MSHTRPRPSSATIALDRERRPKRDHGPMDQPDRPRRCDCPGNPRAAGAPGDALAGTDSSGTTDAVKHANEPRPLYRALRGARRHADTNRHPETCQAASNDRGPKALRHKKQDDNGDPRPASRQPHAAKRRTQRTTNDGTEQRPDSAGRKTRALTPKPTDRQ

SEQ ID NO: 1000796 - protein, 193 aa, Homo sapiens
RRSPVGFTQWDAARGSAWWSCTASPDAVRPHVTQALGRSMGLGVSGDKGAEASSEEASGPAAEAHGGGGGSGMAGCHGPRALRLLGRQRKEPLLEKSQHSESCVTPRRLRLTINWRRALVRVADQAQCHIGVGGQTMHRRATRRGTSDDMRLSAQSRTGVCPVSLVVSRHLTAHTTHIHDQRLSPQGYMAWDE

SEQ ID NO: 1000797 - protein, 81 aa, Homo sapiens
REVGRWRARSGGGGGSGHGKAEPPKGVVINDLMINLDASSHASAHPPVETQLWDQTSSKDRCQNTKASSSHEWYKGNMMKD

SEQ ID NO: 1000798 - protein, 127 aa, Homo sapiens
MEGHRIAPRSGHAWAPSGSQGPRYVYRLGISSTTCSSVPGPGESFLRETCSGLPSVAWCTWRHRPCVNHACIAAVTLWAPKSSPRQRRSSGERGPCVRRNRGAVVFSSTSQEKTYWSTGGHRVLLGH

SEQ ID NO: 1000799 - protein, 39 aa, Homo sapiens
MRSSALYAGQSLANDEFVTAELGRLDDAHRQMRRPLERT

SEQ ID NO: 1000800 - protein, 325 aa, Homo sapiens
SGSSERAVAPGARLGGSAQKRAERRGGARHRRTRWRPLQADRTATQPVALIYSFILPLGAFPQAHTISVCLGRSLTASDFPITISSTFQAGRVQCRSAGKRANKDFIIILDSQGSPHSPIKHRRDLTDAAYHGGGLLNASGALDKKMADLLCRHEHVAVHGPGPRRQHPGLMRNPDETRSRTPQEARRTRTGDVPDGPDAQARLSRSTDCISQARAHASRATSPTEPTLPGARPHNRTPRRHICDTSATSHDARSLRSKVSPPGHPLTREPVRRHLTRPTPRTGGTPLGDLHSRPQQPAAGTQDTHTPRTRQSTTGHLQHGTPHT

SEQ ID NO: 1000801 - protein, 203 aa, Homo sapiens
MSGRSRGRKSSRAKNRGKGPRQGPEFRPAPDDAPRDPDPSQYQSLGEDDPWRHTRAGMAAGWGGLEAAASAQLLRLGEEAACRHPHWNCGLALLARAAWGPLGQAAVQARPGVRPNLSRRRLGADTVFVGTGGNPWERPNKCPPRWKAGVALPGMMAPESLVAPRGKGASGSIRLGGTRSKDQAAGRGRITFGSQAWRKAPER

SEQ ID NO: 1000802 - protein, 69 aa, Homo sapiens
  misc_feature (8)..(8): Xaa can be any naturally occurring amino acid
RKSRPEPXEGAGTATLIRAQMAQWEMLQGHLWNEAPPDFQGDRRRGQRKGRVYKPSAGANQRARSTVAT

SEQ ID NO: 1000803 - protein, 121 aa, Homo sapiens
  misc_feature (79)..(79): Xaa can be any naturally occurring amino acid
  misc_feature (94)..(94): Xaa can be any naturally occurring amino acid
RIVGRGAGVGKMAAPSLLNWRRVSSFTGPVPRARHGHRAVAIRELMIIFGGGNAGPSLGWMLASVYKQRLPKSRGFLAXAVEKDDIASMGCAAXWTLSVTGTMNYYVFWGDTGFDTTWERT

SEQ ID NO: 1000804 - protein, 145 aa, Homo sapiens
  misc_feature (59)..(59): Xaa can be any naturally occurring amino acid
ERVLQVPGSAPPLNGAFQIRRVPEVGGRRLALLRLDVPVGRDREPWGTPKPCGNVPGLXRPPPRKAKGKAPGFGRNGGTGQTDTGPDAGFPRPVSPLLATGPGGREKALGGPFLDKQGPGGGAPPRGQTERPPFSPPLGPPPKTS

SEQ ID NO: 1000805 - protein, 111 aa, Homo sapiens
AVGLRGSGCGRWCRGGRGAWERRPRPMPRGAMKGQGRDDTDGRAATAWGAGLAEGPEKTPEARRSSSEHGQSSVQCGRVSTPAIGRLVIATGAAADHPGTQLALARRLIEP

SEQ ID NO: 1000806 - protein, 312 aa, Homo sapiens
SGLGLLTSRLRPAGHAGPGDVLVDVLAVPGLALCPAHALQHAGRLLMTFGSVTCRSCRWPGVCHHGPGGLAPGSAMTSPPVFSAHGPGAVWLLDACADVWPFPAVLPSCTVQCDWCLLCALLVLQVAQTLRAAVATHHADGVTQCASECVCLPIATYQYSRARVAQKDCTGLVRDRGRDGRRSVRGVPPVVCPFDLRLHCRRLHRTALTCWGPLCDPWGPANAYSDQAQTLADSLGVASTERHCTPRIRHSNSGAGFRNEHGLPMSDPRGPSRSEAGIEDRERGPFRGRQRVPPDPERTKAQGDTNSLEPSQ

SEQ ID NO: 1000807 - protein, 178 aa, Homo sapiens
MKRINHEARKNSPMTACTMCALVGNRNCSQKEEGGSYEQLITSDDIRIPSDSPLNEVKEVNNYLLILEGGELCLTIPHGTCVSTFNRSLLRVQCIFCADETLSPLQLHAVEKQLDRKSAIPCNLNILGLDSRDRSRLDLMDALVRTLLSKSTLVGWTHMHLLCYCERMTDDRTFHDRC

SEQ ID NO: 1000808 - protein, 209 aa, Homo sapiens
  misc_feature (73)..(73): Xaa can be any naturally occurring amino acid
RNQQQCAKGPGASYADWTKEETHSCTMISYSCLVPIAHYVREPPTSKVPEQSQFQGQSGGRASVAVVAMGSWXQDVSCAPSLELSRWSTIATSRDDQRSSLRRLLGPSVTSELRGGSAWRHRPRDGFPLVGVASRPMRRMRRGDAHDIHSHRGSLCHPNRPERRWRRPPRGDGDPLGGFRRHRNSRRSPVNFNVACGIVEVKVHNRDLT

SEQ ID NO: 1000809 - protein, 100 aa, Homo sapiens
RVRLVPAASAAWQDGLLACRSGYDVIRGPLPPGCLRKRYSRATVRDKHVRCSVTCAPGGRGGRPELNATLLGFPNVMKLVSTRTTAERAPWRLMVHLEVQ

SEQ ID NO: 1000810 - protein, 144 aa, Homo sapiens
MANRTTRCPSYWLYDYQVTPERLSIPPGIPLLISSYNTLLNYSEPRDETFPRLRSRPTSPLKQFPLSTPPLPTSRHLPPTHATEDTSSHSHESATSALANPGHTRATRTSLRASTLGTTPTHDHVPTRAPNTPEQPHTQDTIHT

SEQ ID NO: 1000811 - protein, 202 aa, Homo sapiens
MLWEAAPGGGAAGAEGLGGGSAPLGSTELPGLVWKCDRFVPGLVSVEDLEETQILGGGDKAERTRCIGTVQARGAGLLGGNSEAWRIDEEGGCGPCEVLAVAVPGVEGPLKVWPQLGTLMFPGWPFMRVWPQLGTLMFLVWPFTAGGRGVLWGEAALRIRASRHRGVNEPGAAVSPGCGPGCWGGAVALKPHDWPGELAFLF

SEQ ID NO: 1000812 - protein, 128 aa, Homo sapiens
MILTAVEDCVYELHTRFVVSQLMFFSEIEETRVKIDKISEHVEEAKKLYRIILSAAELPVVLTQDRSETYERWSRSEIRQRGAEQRPEQTEGALENRILKEDEVRSSADLRIRKSQHSVLSRKFVEVM

SEQ ID NO: 1000813 - protein, 198 aa, Homo sapiens
RRLSCGVPARVGAVGGASLLRSAGCHRTTAGRPMAVGSRSWSVARWSLGLPPHVAQAVLPRGYRRSQRRSVFADIRDCCGGDTREVGLRAELNSGKREQRVELGVNLGPLTRIEGQYGYRANPSHKLKKSKHAQCPEEGRGGRCVVLYSIPAGKRTASAMGDMMEEFVYKVCEGRWRVIPYDVLPDWLKDNEYLLAWS

SEQ ID NO: 1000814 - protein, 176 aa, Homo sapiens
  misc_feature (93)..(93): Xaa can be any naturally occurring amino acid
ADGGSDLLAGAMARGWSSRSASAKSAATNVLTMNGRSAERARCRQPAQHGPGARRVFGSGARVGRVRWTEELARCSGGPRYTSVAVVGASRGXRPAARLRYRLARDNRRWLRAKGPRGTMAEGSWGSSQGSAGELGSFIYQRPRARVYVRRGCLPAEFVFPACLVRRPSRVSSGFP

SEQ ID NO: 1000815 - protein, 264 aa, Homo sapiens
MPAGYSRRDCEKERDSSRKLTRCHWATCFRGRTGNGARVRSWFLWAGIAFPKAATAMGLVGNPHIGTANRADGHEFPGAGRTASPPAMTNAWTVTGWGKPFWAQWPAPCELSLQDRIGRPPSGITPFDSNALGRYAFGHVGVRSIAFGNFRERHLRGRTNWRVPRKTDKGAGAKEEDYRAIGVKRLSGYSICGYESYTHDEEELLRASPSVNYSPHPEAYLREFLHTVSPTWTLCRVPTREQNNLRDLDKKKPVIPPVASAWYV

SEQ ID NO: 1000816 - protein, 152 aa, Homo sapiens
MLKSGLQWNDIPSEQELTEITTGMLPGLASLESHNKLDKDNLSYIEHIFEISLPSCPTHYWWLTTEPVVLKISELRMMLDTQANPYPQCQGMYKDIIRQPSEDEIIKFGSPTEELPEQGARTRQAGWTFIRPLTSPILQEHGATGTPPSTTY

SEQ ID NO: 1000817 - protein, 382 aa, Homo sapiens
SGGSAAHRLRRPERLPLPSRALRPWSASSHAILVVPLTFRGSVALEAALVGFTTSRTTVVTGLASRADLTDGARQLTVRMDENRDCSWCVHAGVTVRCEENRYLAPDAPEVGPLCRKRRIYAWLQLRMAYGVGILIYVPSPQGPAKAGVSGHAGYNIWIHNLVHAEQEVLGFSTSEHTDHCTTTKGQRTGNSLVAPHEAGLIPTPQTELRTPPTAEDSRVSNKGRFKRTAIRRRDAILAGGNAIWTWWSANAPRRTAYTTRVSLRQEPKPIIGFPTLGSHGTALGFTQSFPAGPPPRHLHCPRTRRPVYHPKLSTWRPDPRSPTRIPLNLSGFAYYSHPISHPDAGNNKSSPPSSTSLVDRKPHGARDTNPENSGLIDLGET

SEQ ID NO: 1000818 - protein, 67 aa, Homo sapiens
  misc_feature (22)..(22): Xaa can be any naturally occurring amino acid
AESCCKVLSTKGASAQHIPLSXRASSSSHTEVMMPLTRICFRYSTGTLGLWHERMLVVTGCGPNAKR

SEQ ID NO: 1000819 - protein, 112 aa, Homo sapiens
SGSCVWRLGCKEVAVHNHNTTAGGRRRRQRRFLSGPGGGAAGSKGKEGWAGRALAFRAPCKEFGRAGANPGGNPSNLDWFPGIRPTWFQRNNVQAGGSRGDLGIPKQARGFS

SEQ ID NO: 1000820 - protein, 363 aa, Homo sapiens
RVFHNLRGLELASRTTPQPPAPPPSPHRHLRRMHSIEGPPPFTDTLRHHLHILGISVTGEEAIIGFHCGPGAAAHGGRWRRRHAAVQGTRTSNHGTRQGAGGTQSTTDHRLHPLATHQPSIAIIIRWRQRHRRTGPLYSEQAYPTGHCTGMTQVRHPSTDVANTRMTHEQPDYTVDDRTPSWNKSQRTWHLHHKPNRTHPTLQPTLVCSARRLAGAQDQGHASKQTPWHDERTTAPVTDDPPRRMWWGRSHTNHHKHPNQLRCPRRHTPHTYRNKPNKRTKRSHIRTHPFTQLRMEDPRPTHTATSVQAAWAAPPATRPRRTAETRTTETYGPKGRTHTAPNSHIPRTIRRGTQPTPPSNSNL

SEQ ID NO: 1000821 - protein, 308 aa, Homo sapiens
MVESCGAPVLKVYEAGDSRSGCHHFLVLLMTLVSTQTYEQKGERKEKEKRGEKKKRKEKREREERRTKKKEERKKKKKRKKKDGRQREERDEGRERGRRRRGRREGRQRGKEEREREGRARGRREGAGRRGQSRTRERKEEEENNREERKRTRRGGERRTEKKEKKKERNKRRKEKKERKRRKQKKEQRERKEGRGRRREEREREKQEGRAERKKERRKGRKGEGRREEGRGGKTKKKKREKRKREEERKREKRRKKRRTRKEEKRERRRRKKRREKKRERKEREREQRRRRRNKRKKKKKDKKTGKE

SEQ ID NO: 1000822 - protein, 133 aa, Homo sapiens
MVEYSDITGGRTEAQCRTQLGTTEQVAQVARATERYTTNSTDTIGVTQSRALWSTKTGQKNSIYDNKPRGYAYTGAQTSALRIPNVQKPGESKEAAAQNPHAPRLAQDTTEVPVRREDTPDDTAESKANNTSD

SEQ ID NO: 1000823 - protein, 130 aa, Homo sapiens
MANPINGSDHDNPGLYADGGCRKMLKELCQRRHEGAGRRNSSSGEPIIVEALSRGETASRGEMRSERDVFVYPGRANDHDACKEDPCSSQCCWHDVSHPCRGAGARCGKCVNLPRRSVNSVMNVGRLTEE

SEQ ID NO: 1000824 - protein, 64 aa, Homo sapiens
  misc_feature (27)..(27): Xaa can be any naturally occurring amino acid
MGSRTCVEYMSHWDSLLCARIGETLGXEAKQCTDMVCNMGLVTIGRAPLCIVTASHSFACQWKD

SEQ ID NO: 1000825 - protein, 92 aa, Homo sapiens
MQQQRKLQITKKQHEELKTVIFQCYEYLVHIKDALPRDPTDAAGGGSDVRDPREKASDQTQVWTVPQVARRYLILVSPAVSALPRNKTFVLR

SEQ ID NO: 1000826 - protein, 182 aa, Homo sapiens
ERCYLSVTTDSERAPYSLIVPAPAALAVRAQVGAGRVTWQTGTADRDREEAHVTVAPSCACPYATVYGGRRDRHRDTAEKGTRHRITGERITRRRPIERVERPGTHEAAKDAESHDREHNMVLNNETVIQGKQCVIERGKEKNLQWSSSFNRVVIHTHKRTYGKEKTHNNEKDMRATRRYTD

SEQ ID NO: 1000827 - protein, 197 aa, Homo sapiens
SGVGPGSRALVEGGVGLLSPRSWRKRQWPCEAGSPVPTTPRAGGDDHDFPGPAFAHIPDTGSSACHSTGGGRWNTVHPRGAKTLRLGALNPDFGLNRKQEKISVFPFRCEEQTSDTSNGLPRGNRVPSMPKLGRHVYVFMRYRFDVRPQRMGQTDHESVTSGLAVKHEASYKRAHQRAFVPLTTSSIPYYDIGPYWY

SEQ ID NO: 1000828 - protein, 173 aa, Homo sapiens
AEWELKKMACLGFLLPVGFLLLISTVAGGKYGVAHVVSENWSKDYCILFSSDYITLPPGPATTPHSCPCMMAPRHPGARVRIPRQQCPAPLLPSQRQLPSDHCHGHEGVNIARFQQRIRLGWRQGQGCPAGLLTREPGHVRQQCLKTCTLEPQDPPPGPLDKTSLIPVGNGPL

SEQ ID NO: 1000829 - protein, 88 aa, Homo sapiens
RVTPSERPLVQREEFLLLSQTLSLSYLTHQIPEIARHGFTYCERRSLGNQECNLVACYLPGSRDATLLPPTVNLTDEHYCAGTVSTYT

SEQ ID NO: 1000830 - protein, 306 aa, Homo sapiens
  misc_feature (51)..(51): Xaa can be any naturally occurring amino acid
MRVLFYCVTRNECGANVSHTQNTDLGVLDQVRSSLESFSGLDYSVRIGASXSNCTCIARGGLGQRYPVVALNPAVLTAMLCRLSMWQGGHNAPENSYVHSIAKTLPKDSAIPQSTERLVQLKAVPVLGTHWKRPQADLGLGLPERQGAALRSLNDLSSGHGCSQVRPRVFPRTMDKGLREFCTRFQKAKYLKLGRVTSGREGEPRPSSRSPVPVTQVFLVGPSESQAQIGTPRLCKPPSDYIGICQMSEARGCLFAMGASWITQRLSRWGEDGTWEERGEKVLREEGFEVPQPKKALSRRWRKGYR

SEQ ID NO: 1000831 - protein, 186 aa, Homo sapiens
MAPPSSLCRGSAGPGVVPGSFKLTADVSGRIRYPRQKVNLGVGAYRTDELPSLGFALVVKKVEQKIANDNSLNHEYLPILGLAEFRSCATRLALGDDSPVTQGQKRVGGVQVFGVEQVHFELVADFLSALVQWNETTKRHTCLCVLSNPWENQKCCVYRCWFDRRSVLSLLGCTTKRGLDLQGFLN

SEQ ID NO: 1000832 - protein, 76 aa, Homo sapiens
SGLPWRLCTQPGSPAWGVQVVSVAAVASRGASHVLVNARMGTRKNKFMHLVPCETHRVTLLMNDSTIRESDQQEST

SEQ ID NO: 1000833 - protein, 122 aa, Homo sapiens
RSCASQTAVWTALGVRSPAVPRRSARGMVSRSLLGPCVVPAFSTEILSYAQRVGLRRDAAVLRMAVRCAWLARRNVAAREGSKLRVRGVENRGTEKPVRKSFAELAVPASRHSGVILHVGKM

SEQ ID NO: 1000834 - protein, 249 aa, Homo sapiens
RLCSRLPWATAEARQTGGSAPSMVGRYEWLDSQPATGMCSRLWSLMAGESSREEAAASVTCLLTVDGTTLGCLRSRILRCPFPLNTWTRRGKCDSERSHVNTFFKELNNESKSLSSCREYRVDLAAVYTLGKHILGSLLDYPVEGNMPNVNENAGQHPQMAGSWIEPTVDELDQMMREAETEAPEGTEERGISVAHLQRSDHQNKPAYHLRALLQADDCRSMRELYEVCMKEGYADKKTWLRIGKKQDM

SEQ ID NO: 1000835 - protein, 238 aa, Homo sapiens
EREGQHGVQCLKRRACAKRGGSCSPTDPPVQRDEEEETQTRLKMRTEDRLTDHADKDTHGLTRRTDGHLFDGNVTYRHSEELTIRYQNYTRLTDRTLNEPLLAARYFLNGSYETLAQTPYTDLLKFNRHHIEDVVIHQHNVTVSDRTAKTMTIGMTDRRSLGNNNAPKAQSTHAPDNGVPQGRRYETHTNKARSESTRKHGETQKPGAKRRPKERNTTGNTIKQENQQPKTGRRQNVA

SEQ ID NO: 1000836 - protein, 40 aa, Homo sapiens
AESGLMALRQFGCVPGSAHVWSAVHSTQHTSMFDLRYDNA

SEQ ID NO: 1000837 - protein, 429 aa, Homo sapiens
MSNYVGRSFILGSQSCKERAADNSSSQTMGAAQQQALQTDSLPANAHSNSNASIQGSKQPGQAQSFASQSQATCFQQFYKAQHFRSQYITNNGGPELEVSLRIGHHLTVGHCEKNHTQLTQWILYATKGSHKRLPTDIQKPRGVDQSGEIPSQCFNQIAGNKLPATQGKHNKQAPGQTHNKQAHVLIGPHISGTSRRSIGAASQPQFKSISYGNAWSQLTFRQTQGKSRKIDDNNGPQARSNFAGNWPPRHSGNGHSILTIVPAGRFQNMAQSTQENRQNTTRTRAGYTRQLANRITVCGGHPHNDTQLAVAQHHGTAQRDNRPYVGQRDGGDKAPHNSGGNVGYPSGINTQHRSKTGTQDHKAPGGKPTGHYDHMVRPDRTMTGYHFTYRGRRKPALATEKMYTRHNNTIAAATGGKPEQKYRQHRTE

SEQ ID NO: 1000838 - protein, 188 aa, Homo sapiens
MTPQRTNNKTTTEEKKTRRGSRDEEKTGKRRDKKERRGDDPDGARRKSNGTRGIQTNTATSQHARYKRAVRQERHQQTDEKTAEIPARTREQRDDQHRTRRSNQQEWGRAKGRNAKSGKPRSGTKRGKTWRRSQRSDSSTRNHTRGAETGDGPTGKRQAATGGTHKRQQDENHVKSGEEDKWESAREE

SEQ ID NO: 1000839 - protein, 104 aa, Homo sapiens
SGAARLLPSPLRRRCSSLRPAHPPLDLPPTGRGDGGGGGGGGGGGRGGRAPAERCRRRGTRKYQVEGRPIGRHVLLLSSRSIMAEPSGVARCTSRHIPTQAAPV

SEQ ID NO: 1000840 - protein, 156 aa, Homo sapiens
SGGDFNPLFGRLVVMIRTPLSASAHRACSSQDSRRPTPDATCSPRAARVPDALRPDGICGVMLLHATVCCLLRHARNPRGDHGRVVPAETLSTTGLPPGLFTTSGVSRSALDIPQGLTYAQAHPQKPWDLRRSARMARDARVVPSSWTGRQNDLHP

SEQ ID NO: 1000841 - protein, 174 aa, Homo sapiens
AGPAVATCSDSERLERGVGGCRVFGCVRVSSPGDGRRRELAALWTSVGDCGVVAGVLWRSHNVVQVVIIARAVAWRPAGQQTFLHATVCLEALDENERAAQQLTIPENGWIGHILHLVGISVMPGTLQLCIWHYAKGFLFANNEFFGQEEHSASKHRIGFCLLMAFYVCNKGMP

SEQ ID NO: 1000842 - protein, 162 aa, Homo sapiens
RERRWQMRKSETLERGVVAAESFGCRRVLSWALEWRPELALSGSILALGVGGFTRDPHMSAAVSSPRQVGLGGTDGSDDIIAGTASSSQRKDKGGVNSRIPRDRLETTYRPEIGPRSDATGTSFSSAFSKSLPIAKSSFLDKNVQGLELPRKECVRMIPPFA

SEQ ID NO: 1000843 - protein, 82 aa, Homo sapiens
MAKRMTTRDTRTSPQAGVPDAAPEQVTGYALTSRAAQEIALPPPLARPDRSHIPKTKSDPHQVHLSDTEAAARKRSPKRQDP

SEQ ID NO: 1000844 - protein, 258 aa, Homo sapiens
FALHTSVAPEARILSDELGWSAASLSAGEAGACLLPSWLPAAPSLRALALWSCGLPLLLRATGWPDAPEAVPSACNDDGTLGDAPVEPAEELVLLAVQGCCCLPLGCLKLLKVESLARGCRPPGRRRETEVGRCKSDQTRTELDCCMTFGTALREAASPEPTRLPSTVHWWEAEPGGKDTVEDDSEATIMSLRVHTLPTLLVIRRQTGLQGAAVFADDHTWLCGPVASGVCPTVCICATDIVRCTNKNLSKVPGNLAD

SEQ ID NO: 1000845 - protein, 181 aa, Homo sapiens
PLIRKMDRHQAHTRSERPIRSMSGRQSLEDTEGTEGRLRSATKKNFLITILDKMNCFAFGGSEFFIPEGIQIDFEMPTFSATITEWYQEIKEGWRTTGTVYRRAHLFPPRKKHLPIIQNSLLHLVMILSRTFHTYLTWATRTSTINNSKMRRFSRNSESPNEMTLNTLVFDQRDLVHTLDS

SEQ ID NO: 1000846 - protein, 222 aa, Homo sapiens
  misc_feature (83)..(83): Xaa can be any naturally occurring amino acid
  misc_feature (87)..(87): Xaa can be any naturally occurring amino acid
  misc_feature (90)..(90): Xaa can be any naturally occurring amino acid
NLLETQYWAEIRRPIRVGLLYYTFEARDDLNERSAGWCWGDEAVRAVRCYGKTDTAESSSATGRRCFPAHHELPVVDAVSLSXDQEXYPXWRRWNSCPVMGNGVGGGASALTSGIASSPDYEFNVWTRPDCAETEFENGNRSWFYFSVRGGMPGKLIKINIMNMNKQSKLYSQALAPFVRTLPPGTLENAFEPATLNDRDAVCVILCHRSWRAVGHTSSLLY

SEQ ID NO: 1000847 - protein, 69 aa, Homo sapiens
GPDMARDESPALLQLPGSGWDKDLDRPDTRGPSFKGPTPLLALQSKAGCPDSPTPPGSDPRGMPQTRSS

SEQ ID NO: 1000848 - protein, 133 aa, Homo sapiens
LRDGGLRVGASLYSVRRRLLRAVVLWLFLHAVVGWLRAASPPCGGWLLRGCGSVLLLHAGGWAGSSRWAGSCACFILLSEQAVLSLWPCAVSNGCQDAYWSAVSYACGILLVGCAPEFASSNDSDGGARHGIH

SEQ ID NO: 1000849 - protein, 73 aa, Homo sapiens
  misc_feature (73)..(73): Xaa can be any naturally occurring amino acid
MEDKTELRPSTGGKAGCEHGMHAGRLGRRMAFRLQSTGQPSKRTSVNQQTWTEAKRLMHPPGWPKSSDAHVDX

SEQ ID NO: 1000850 - protein, 94 aa, Homo sapiens
MRPLGDSAGIALPLRQAATCTSIIRPHDDPQALEPISVSQATRESQPRLQTTRNIKARTKKKHWDNARFPTSPPNGTYEARRYTLEKDLTSGGR

SEQ ID NO: 1000851 - protein, 353 aa, Homo sapiens
MPETRGMELMEDYNFVFKVVLIESNQVWGTRPTLSLHGFSATTEFKSTTRAPSTDRGLSSPHPHCRCCGTDCLSKAQNLCDIMLWPCDRATAAHSALRRYLHRWLHVSVASPVCSSTRRPNARRTVLLSVLTRMRLTATLLLHHCVATSRRLRSAHRILRVTPTTRDPPRHTRAPGKMPHLPAKRHDIAYRRCTSTNLGGTLVTPSPWRHQPSTSLLGNIRNPNSALHAYRRLLEARGTAGKKTHSSRPTRSLAPNRASSLNRCTPQCTYPWSSHILAPSHPFTLGSRPVYDPHYVTLGETTSRQTHYKHPLGRRELTTTAHSLLSAIPSYRSIETLLVVPRRNNTLRHLDTL

SEQ ID NO: 1000852 - protein, 168 aa, Homo sapiens
MNVSLCRDVVTLKDSRGSPVAVRTGLNQTALTDSSMSAVTPWSPHPLASRHLLGVIHICGWAVGRRDPTGVDQGISLTINAKQHGGLPERECGRGREWDHLSARADMRGTCTYQGRRKAGMRQTRIKKKESLTPRAWTGSQREWPDTGPRGHTRATRDPDGADGEEKP

SEQ ID NO: 1000853 - protein, 426 aa, Homo sapiens
MNQGTPPGAEKTQESIPAVALVELPIDKRNNETHRRGRNISPPRKAQRKGHKHPEEIARAAGRRNEAPRTTRRQNRTRRTHRGGQTGRSDRQSDEAQVEEGMSTFRRQQQETESESTGYTARAGRTRMTCEPRRPPHESGAATEQRGTHSKDEALQRHVEQRPADMRARDRKAESRRAETQHPSTYREPKDRRETQSTQMSRREAHDERTQARQRSDNATSKTEETEEADMAMIEQAVSREWVRRGRERGAVSVARERGRTPRERAQAGWSNDKQNRRSVEEQPQTIAQRGGAEATSTGARRETQEKRRLGEETTEERGGGEQEKTKQTEKAEKARGTQPDGAANTQEGAERRRKTYGATPGKATGAREKREYSAQRTRREGAKEEAEAQVGESEAATSETQETKSADERTEENEEREKAERERAQ

SEQ ID NO: 1000854 - protein, 269 aa, Homo sapiens
MTIDFLRPRGEGAEDSRGVKAVSYKTAAADAQGSQVPEVTRNLGRAQKLTKLPRGGEHKLIQEQIPDPYKKCTRCSGGHFHMSRARDQTDTQNGQTALADWGLNAQLYAQNLKGLKHHLLAHAFCGLDHFGMAHRARDCAWVLPEAAPCNCLRVKLGVWERRRGARPCLPFPRNGTTGVPLGLGQADTEGELAQRPSHPYQESKPGYHTGMGRQTRKGTRQGDTRSFPSRGKWQRTGYGRPGLNLYGWEASTGASHGAKTQRQNQYAHQ

SEQ ID NO: 1000855 - protein, 172 aa, Homo sapiens
ASCITIVRLQEVSSGVIFFCGLPFFFFIFYLGTAVVKNPEGTWRGASALSYHSFPSEFCDSEYGQSVCCIGRLPSAFVQMLWPSQWPGKAYRRGGSLPETWKGPKPSPVDLGGDHWALSCDVAKEHDVQNTFEEMEETFRSSKFLGKCSWYYQGMVFYVRTKLEDMVSTVSY

SEQ ID NO: 1000856 - protein, 196 aa, Homo sapiens
MGELLGFSVYASREKKGIVIGNWKDNEWPRERIIQYYGPATWAQDGSGDTEPIYMLNWIIRLQAILEIISNETGRALTVLAWQETQMRNAIYQNRLALDYLLVAEGGVCRKFNLTNCCLQINDQGQVVKNIVRDMTKVAHVPVQVWHEFNPESLFEKWFPAIRGFKTLIVGVLLVIGTCLLLPCVLPLLFQMIKGL

SEQ ID NO: 1000857 - protein, 324 aa, Homo sapiens
RTTEDTGLCRVLYSCVFGAEKSPDDPRPHGAERDMASPVQGKDFSLVATCRRVNSVRAACMLVTSEFWPTRMERCSAANLSDEAVPLHEAPRGAFRLAAENPFQEPRTVDVAEGVLLDNGVLPMVLDAQCEPATWLRGHRFRLLTRLRPLTTVRLRGSPGDQLFCCVADLQFEGILIRYPCHIGQSALVLNDQFVQGLAGRSSDAALAPCDSSLGWCFCWHGRGYDTTGMTERFGISSPIAGGSDVLLYQDKWVTEALPKGGWQHGGGGPAVLRLVEPQNFLSLKAAVFSETAAVRQHRLVLETHFSNPCQPIVLELEELLELT

SEQ ID NO: 1000858 - protein, 356 aa, Homo sapiens
RDSLANICEIPSLPKNTKQKRKKNYATVWWWDSCSSRDTQEAEVGNLFDPGEAECCSELRSHDHCVTSSCEATVVENPGLKTKKTGCGGGGVLYYVLLFLLLPHHTTLLSPITKVGNYTAPLVGYHLGGVRRLSHSHHIIYIVSWDKTKKDNKTNHRKLFREEKEHRPFWVGHLRAPELYHINLAPQRGDTSRHSPGIANTGVCFSYTPLLLKPPQDICLDKEACVIPQIATREISQVQSTRPEIDPGGNNLEGATYNELPYIHTTPLAALLRVVSLNQPKCVERDMREHPHHTEGGRNDPKQRLRGNTRPKRERLRGAPNRKELKQQTATTTTHQSTTRGEGQVPPSEKEETSTL

SEQ ID NO: 1000859 - protein, 252 aa, Homo sapiens
GTGSADDGLQARTGSGPPTAGAGGGGAAPMRGPSWLRPRPLLLLLLLLSPWPVWAHVSATASPSGSLGAPDCPEVCTCVPGGLASCSALSLPAVPPGLSLRLRALLLDHNRVRALPPGAFAGAGALQRLDLRENGLHSVHVRAFWGLGALQLLDLSANQLEALAPGTFAPLRALRNLSLAGNRLARPGARGARRAPACCAHSACRTTSWRHSRRGCWAACPLKDALHLPRQPLGLRVRAAPVCAWLRRQPLP

SEQ ID NO: 1000860 - protein, 95 aa, Homo sapiens
MARPSAIGAHVIAREDYARCQSCRTTRGTGVVRTETSIRGCVCPSRPTPSDCAHAIVAAHAPVNCRRTETLPRIAMAMSLGGVDSAARVCTRRKH

SEQ ID NO: 1000861 - protein, 107 aa, Homo sapiens
MGNPSVLSSEHGSDAKVFGAGYPRSVQAMTVSDCVMSNIAKYGCITVIRDTANGSDQRNSEKQLSNRKNKKQKGGSRMTEHKSTEPGSGMTGKDTHPRGYGNRQNMG

SEQ ID NO: 1000862 - protein, 256 aa, Homo sapiens
  misc_feature (158)..(158): Xaa can be any naturally occurring amino acid
MRALPTEKGTANMWLGSRGSGPHFFLPFPPFRTVFSSRPSTFPVGGSCVFLFFVESQIQLVGGDFQKAEDLAKHPCVALPNYTKTNLLRVAVERTLSPVGPQGKIVTNTLLCAPPCEPPWLCTCVSCGPVSAAGALISKVFSYRKRLSFCVWGLSVSXCGDAAVGSPSLCAGGEPPRENVSPRGVAPSTKKGVASGALSISIAAGHDTRVCVSWGECGGTYFISLCAPLYLCPPVSFTPRGLQRSPPCPCLFLFTL

SEQ ID NO: 1000863 - protein, 101 aa, Homo sapiens
DAVPQPFSSEPLATPRPNTSYLTPTPHVSWQAIATYPVNHYHEDEKLYLVYTNLPTNSRLTYKQFTATELNHISYTLFESTLIPTLPYHHPMRATPGHAYA

SEQ ID NO: 1000864 - protein, 492 aa, Homo sapiens
MDHGLQAPRVERIMCNAVHACTAKTPAQLAGHMQTHLAGEPATHDPGRRTTSQKPTHAEGRPHGTTRRIRAGGHSPMRLAAACQLVPRKAGKTSLAPGHANGNDPAIPHKKLARAASPLHQSGEQERRAISPCSKPSSRHHAIIHFPPKHRVADERLSHTRSGRHTAESQTARGANEHRRTLKDRYRHYRGDPNSPSHVHPPRTLTFYPATANKTSHITYSRRAYTPTHRQHRTDPASQKATHAPTTRERESHKQTHTTRLGPTAHYQRQADTTYPSRSPRPRPNNPTTSHDNLPLPQLASLTTIQPLPSQLRSTTLYGDDPPTQPNNSHDTTAHHTRHARSSTAPTQTQHRTCNDHAIASAPKSEKDKRAQRGHKHGKARTHQQRHHRAIQRAAASNRPPTSRAKQAPRQDGSTTRTRYDPHKRQRQDSTREQKHRPAQRPHTDHGRSDGHYPARTHRSTQRTSAAETTLRNHPCPMQQSDQVGRRAPTPP

SEQ ID NO: 1000865 - protein, 125 aa, Homo sapiens
MAGELNEVMIANYLGKFTNNQRNTGLHFSFPRGHDLWLWASIQIGRGQGLHSLQLVNYVMRPCGYTRLLILEHDGLCCPEQAVHGAHVARRLAGKFNARALLCATRDLFAVSPMCPKSPKSLEPP

SEQ ID NO: 1000866 - protein, 218 aa, Homo sapiens
RAMDDSSVRSITKVERAAEGVQATEDYDRPGIRGEAVMIDTMLVLEGCRPIEDLVMRVSDIFMDTSYAIATALAALDSGRSLSKDETVSMFLRAPVVGRRATDDMHITPRWEGRQHFEAFFRWSESVAKRAWQRIETNSAQLTHVVTATIAVGYERDRLHVGRLPVAHLAWQAKLDTLWAPEVLEAPPIVELKSVWLKFCELGTQEAQSPCAIGGRNG

SEQ ID NO: 1000867 - protein, 268 aa, Homo sapiens
MRVMARRSPPPAALGRPGADRDWACSHSMRYFDTAVSRSGRGGSPGSSQWATWTTRSFVRFEQRRPRAPKGEPRAPLGGAGRGRSYWDRETQNLQDAEAQADRVSLSEPCRGISTNKSRGRVVTPSTRMVWTCDTEETRTEAPSSRGDMHQDPARNERAKDITSAMETKDHGAPWNRRWQTAASESTSATVGTAARAGGTKLRKPTLEGAIRAVATVAPARINSWNRTWSYGRSRSKAAASKRARRGKRGVEPQLLHFSSVIMEGQHR

SEQ ID NO: 1000868 - protein, 305 aa, Homo sapiens
MNEVVYAVTIVDDTTPVVWVCEAYVGVYDEKPSSKASAIFKTVLAEHVSDDKCYEACIYMKSGLKSKTEGLYTKILPRIIAQDACDAQERHAWKQGLQHVTAQIVPSTRFSTVVSLGTDNSQYGVRWLACVASRGLIGPYLVCEIQAERERTVAPRQAETGSRVKSGLYSDLVIILFVNPIGVFGVPVIRTSRIPSWSGQGGYKPKRGNMRLLISEDLAMFGMTSLPIGQAFVSPCHTSPIRAGPAAREGWACLFERGHLCKSMLLMVGPYRPVGAIAGFGRTMRGLTPIRTPASIDWTFETKTQ

SEQ ID NO: 1000869 - protein, 82 aa, Homo sapiens
TGVVKTIPYTFQLGIGNRLISNTCRLGWITYYSGKSTTTGHLIYKCGGIDKITIEKIVRREAAEYGETGSFKYAWILDKLES

SEQ ID NO: 1000870 - protein, 189 aa, Homo sapiens
MKGCLRNQLVAHRDSIATYWAHVSCSTAEQADGAGLKTLETWCNIETIARFGSGPLENRDDEPVCVETPGVSVQDPSVDSLCGRCSTRDYLNVNPWKREVKVRDVLRDTIEGKNMSFVNDLTGHSGMGRTDSFQRFYSKWQRRDYLLLVMEGTDDGRLLEYDTVTRKVNTVSWTTLRFPNGSPGCLLQK

SEQ ID NO: 1000871 - protein, 69 aa, Homo sapiens
ERLGSSGSVHLSLPKCWDYIDVNHVGPMPKPFTFYWALVMIQTDSALKKVGTYSVCAGPSAYYKLKLAT

SEQ ID NO: 1000872 - protein, 302 aa, Homo sapiens
HLHHHLPTTMGVTAVTTRPLYPTAAPHRKTYPQPSYNQYQTVCPGSGTSTIMNQRYSGPPYYVDYDYVELLRGTHQRWYTYTVASVTQRAHTDEDTIAGPIRHNTSDHDLQRTQSIRGHPRQTYTEGMTDWNGGYNTQEELTQPHTKTNSWTPPPRVHEGRRLPHLAPQSHVREDTKGTLSTQHVGTEHRTKRLHHKWDSDNRHHTTLEHRDTNTDDETSTEDRYTQTQSNNGKTTLQQNTHCNANTLEHTGPLSQVTTSQQPKEGPHKKQNHSNTARRRPHQSQNRKKRHNNSQQIKHNHT

SEQ ID NO: 1000873 - protein, 255 aa, Homo sapiens
VECDINGLRRMLDELTLPGADLEMQIDRLKEDLGYLKNEPRLEEMNALERPWWVDDVNVRDGRCTCAWNHEAAILNEMRDQYEKHGHETELSKDAAVNGSSTEDRGAEPRGGLAIERAGAERAIEEISGGSGCTYGRSLRDLTLLGPRLSMNSIPGEQPGRRPQGQLLAMQLAPVSSDADWHAWQEQSGPAPPCEHGCHAEPGSTRVLLVRARRGLEQEIATLPVVCMEWRGRPTSSVLPVRPLDRQSSRDVTLL

SEQ ID NO: 1000874 - protein, 316 aa, Homo sapiens
RSSAGRQVTQQELHLLTDKWVAAEVHPHPQGGKARDVCSHPRTAAGPLFRAQDEAGQSDLRKQNKVTAKDGLAPALQAPEAALKLPGLLQAPLQGWGASQPGVCGGSLPRQTPTPGCLWEQPDGTRCPGSELPTHPSCDSERPTQPNGHSPEAGRGREGHHFGTFPRYCSLGTGDRGHSLFPRHPGPCLYANKPTSIHICLQATGPFGTRPALFTSCVLEADGHSPLGWQGLNHTVVRTPHTGAGRHTRLQGGGSKAATPAPALVPNADPADRRTRLSAYGMNGIQPGLISQEQPGWPGTPELWCLPVPSVPACPK

SEQ ID NO: 1000875 - protein, 276 aa, Homo sapiens
VAPSVLPIRTETSVKNCGDANNLMFIPSVGPGYIDTSMRPWNNHNTRKRVNGKYYETGLQGVPDSDGREIVSITSFNEGTEGTQIEKVHSQEETHRLYWDYLAHRAPALSLELTLAAGLGHFNRDRRTEQLAHDEGPCNMGREVPECPLTVGVEDATTCGGSSMRYCTTNQSSPGSEVSRWVFLGGPSGMGLCKHRARSSRRVAAEVALLVMGTVRGVARLLEALAPGQLPDPEEHFHVTPSSLEADSRLVQCSGLPSQRTLGRVSGSGLCMNPVP

SEQ ID NO: 1000876 - protein, 69 aa, Homo sapiens
GFAARTAGVVKTSPKSQRLGKERDSYQHCRHGHVGLRASPPATGQLIYISAVDYDEKEPFEEEFEKGGC

SEQ ID NO: 1000877 - protein, 72 aa, Homo sapiens
VIYSTIFAGTLIRSAKARADFLPEYGLEHKHARLMIRSSEPIKEEYRSIATRRLPVKYYPHSNAKPASDNPF

SEQ ID NO: 1000878 - protein, 154 aa, Homo sapiens
  misc_feature (8)..(8): Xaa can be any naturally occurring amino acid
  misc_feature (27)..(27): Xaa can be any naturally occurring amino acid
MDVFLPFXGIDEHATVGPRLSECSNGXLVMYVYGVAGADDARAAAHCARPRRSEEQTCDVVRAVIGADAYILFQIIISHCIAPDDIPLRESQEVAPQGGNVQPENIDRQAGTRRNTQRPPHPWTLAYEDRDTPRHTGENKTPHTEETEERERLA

SEQ ID NO: 1000879 - protein, 79 aa, Homo sapiens
AFNGRSPSEGSPSKVWRGTPREESEVSGACCSLDAGRSPVSRRCLPRVGCACGGSRGALRTHGSDCFPDAVKTGHPMAF

SEQ ID NO: 1000880 - protein, 118 aa, Homo sapiens
NLKISARTPRVPHNSSQSKPITEQTPWLLLVLGRLFIWPVCLTGLWGLCSQHQNFLPATFHHSSLPVFWKLSDVPGFAGPAQDMLSIWDFWGFLQFITPMCNSNQTEMEDVNMNYWRC

SEQ ID NO: 1000881 - protein, 110 aa, Homo sapiens
MIYRSNNDNAECPSVFPVKQGSEHAKNYMHAGFILNAEYTLLCSSCVETVITWACYYDLRKKLAPRRSNSTPDNSLMIHIRLEPTVPLICIKVVSFCSTSAVFTSVLSWQ

SEQ ID NO: 1000882 - protein, 275 aa, Homo sapiens
IRLWKYALDMQSEQPGASEPHDLPDSFLSFAELFSYVLQDRAAKGSLGDPDLALRDLMGVLYPKGSGKWNGPCSCPESPGDSAQFTKALVIILQLLYLLSESGVHPQPGSPEAPDSSTACFKCAPEGSRTASSPSAHGCETNGPPQTVGRYPVVLDSPSLHVVKVLLDCGADPDSRYFDNNTPIHIASQNKCPAIMNCRCIEAGAHHVDATNAFNEVTAYRAAWTEECLLTHGVPLQAFNYVTLQCLAGRALDKNKIPYKGFSPGRSGGVHSKLY

SEQ ID NO: 1000883 - protein, 139 aa, Homo sapiens
  misc_feature (92)..(92): Xaa can be any naturally occurring amino acid
VVAAAGAQRGCAFFAVGPARMPPPQASPAQSLRLPHRKPEAVIPRHTCPCFAERVAALQVGSPTGSPMISHDKAGMPKTSRLPCTHGESKQXSCCCTTKPVWVVSSYLVRADVQMHVYATNIQYQITQSLWLSGQSHNL

SEQ ID NO: 1000884 - protein, 226 aa, Homo sapiens
MAACRVPPHDPCGEERSAGDCASGAFQAWTLSSDAAFGQSSQRRVWLSLVGRFMRTAIVIGEQALAEPSAEAWTVLHSNALILGYWFGRKEGAQGLDTGPWEERSRMGEGRVRIRSEEFVTQCLSGRHCEARYEASQQHAGTGQRSQRGLLVGGPPAFVHGNVQVWGACRSRGVTGNRAGLCPSSPSQAHWTPDLDMICHLSKAFDQSLLGFLATMCPSYRASVPS

SEQ ID NO: 1000885 - protein, 274 aa, Homo sapiens
KKPSGRNHELLKGLRAELKKAQESQKEMKLLLDMYKSAPKEQRDKVLLMADGNARLTAEVDELREPHPGIGGEEIDRESKKIADEDALRCIRQAEEQIEHLQRKLGAIKQEEEALLSEMDCDRSRLLRTCRNRTGRLLQQLRDTDDANLYTLMSERIKANQIHKLSAGLEKGLRFEASRVRGGSSSQVDAQLADLVQKAGTDKGAALPGQPRGVSGDRTLDRCARPSPGDSRKRTGGEKPPSLAEDLKVQRGARARLRLAGDPALLARERAAVR

SEQ ID NO: 1000886 - protein, 192 aa, Homo sapiens
MVLLAALLGVERASSVDVLLLLVIREMSNLYCLAQPITLLLSQDMLLRDCFLLCAGFGNCLVTFGHMPGARPGSPVCPIPEGVKCCCGFHVVHQAVVPKDGVILVSSLSMWAASGLGSGRPARAPYGRFDPLGLGLTGGLPCRWSPCLAPWPACLGRLSGVPERGAGPLVHLVVPPVAGDCECPQSPFLVVP

SEQ ID NO: 1000887 - protein, 97 aa, Homo sapiens
DRTTLLSPRKPAPRPTSGEDGATGAPWGAVCPLRHRPQPAGGQNEATRDPASDSLAGRTRAIEGRGATTLVAFDVRVEVPPRTVMTSESELHVPAVS

SEQ ID NO: 1000888 - protein, 73 aa, Homo sapiens
CTARIRDRDFRESYRHIEVRLSTKNYVNKRAPVDNTTSCNQHETNSGEKCEKIYTNQSVSVVSVNQSCLNKHL

SEQ ID NO: 1000889 - protein, 155 aa, Homo sapiens
MGSTGSSMLRGRCGEQDPDVPEPQAHQEKGGVTECAQSSDTQRRNLIIVVCVGFLVLMVVLGLVRIIPFTAASQGPAGSRASSDPKDPDLFWDDSALTIIVNPMESYQNRQSCVTGGFGGQQEDEDSSDSEVADFPQQRRKTHHRDPPTRIRLHL

SEQ ID NO: 1000890 - protein, 220 aa, Homo sapiens
LVRSDFGIEPLQPPGCRSRSPAVEAASRRPGSPAALCAPYDPCVALRGLPQAAPCVKVTFNSLLWPRRRPRRTMPKSGEEALIISPDAVTVDCKDPDDVVPVGQRRAWCRCMCFGLAFMLARCHSRRSILVQIFSHFNQMTLYYCGLPYITDDVILPEPSADAPAALYQTNLTDNIFKSLKGQKTLTLISRCACPRARPIVILPTYVHERTTNDNLTDLL

SEQ ID NO: 1000891 - protein, 261 aa, Homo sapiens
MGPNIYPWERSEELYLKPKPENNLDDGPHTVVDPYERCCRCGKHCGPRWRVSTSFLVEDGHHHHLRALTHNMRVMKFSVSPVVRDGRGGQRTPADLTQAGGGAEAGMANAPSPWLQMHHRGARRRRTLIRSGARPKTCNLRRFCPDTGPLAPTAPPHCHSHQSNDNLDTRLRIFRFTRQQNRAPVQTMISNHACIPGPILPKVPANQHPGRSETRAPCIAQLQQTGTTRPPVSRSATDAIGTRVRRNQFPTLHTSHFKRAV

SEQ ID NO: 1000892 - protein, 107 aa, Homo sapiens
ALKIYGFVVRTGIVPKRQRQLVAGGPTGVRRARRRSSGHCVTLSVVGEDESSSLCRPQGWNCIAAISRLTVNPSSSRRLRAHSPWPHASRVGLRLHGMHPTRPANLM

SEQ ID NO: 1000893 - protein, 115 aa, Homo sapiens
MRPGVSWSPIPLRVAHRTALEVHYICSSYVLRAASPLFKYCAPEMSSPQSVCAPILQRGDNPAHQCETVVSAPMKRTPHPGRPNKTKRLFPPMYNRGRSFSLTQRRGRPFQNSVP

SEQ ID NO: 1000894 - protein, 188 aa, Homo sapiens
MEPVGSGTLSSAGSPGGWTLNHLSGPGGLIRRDLTLIDAVLCLRLSKVSMDLSHWSVIDFVDLLERQCVTHMPYRRDVDHYKALANSRVYDYGKVHVTALTRGIASRGVMNKPGDFLEAFTQGSKTLGQSSNTSLKIRGFRSTDAPRPGPPAQPCARTLVKALPTFCMSCTRRGCLIHLVNFTYEQRL

SEQ ID NO: 1000895 - protein, 275 aa, Homo sapiens
YPGFIKIFPDITSEENKSNLPTAHPQNCDNQINHFGTKIGIIRGVAGHRFLGNMKSLPPFWQRADMETIFARGILVGQWNEPCPDHGPTPGMSGHAANWTWAGSKEKVNFQEEPTRGTLRGQSFSVLERCVCKIIACVYMPHASGYLQVNTAWRKATYNTNELIYISGATQARVTGGVGGTPTGQTREAPSTPLDIRNGLKHPRSPNQERNKKNQCQQHQRKTCNSQRARGPDQQFQRRITPTKQQDTQSAQRQNTIEPGTTDRPTTATNHRRGT

SEQ ID NO: 1000896 - protein, 151 aa, Homo sapiens
MSLRGQNLLRGGRTVSSPTWGSPTIVVFDVSGGAGKQAPRLIHSGWGNGEGKRGLTVPVAIVIAHVSRHDALKVCARWVVPIIKHDRFLCYAYLRHQGGNPGRIEVSYDMSISEHFYLRAEKIDSILNGLRDGASTVVALFTSSQSPDKMT

SEQ ID NO: 1000897 - protein, 83 aa, Homo sapiens
TASAPASTEASSLCRYLHVPSTSRRAASPWYDDISPGITSCDNWLPGQCARVQAVEVGEQNVATPEAYYSHNQFRSGVVPKCH

SEQ ID NO: 1000898 - protein, 140 aa, Homo sapiens
VKQNQLSYRRNSKKQQAAGLRCIVRLSALAEYNIVYEVKNINNNKKPALPKPIHWDGCSLWGWGQSSEFLKTCLGDCLCSGCCNKSSQAAGLKPRGSSPHCSGGWNLPSASEDGAGRALFLAVGDAFTLCTPRGLPWPLW

SEQ ID NO: 1000899 - protein, 226 aa, Homo sapiens
CCSLLFPVVCVLRSCSFVVVRSFSGCVFCLLLFLDVAWVVRRFLVVVVLFVCAWFVFVVARFLFVVFVCVLCFVSFLLGVVPFYLVSWLVFWCVSRCFESRVSYCCLLLALGGVASLVGLCSPWCGLCSSLFAGYFGFHPFLGSCGFPWCLRFLLGPLVARGVLVCLCQDLLRPLCTSDMYYDALIFALLGPCTRLVLALCLVFVRPAVRGVMDIDWDYCGTNACD

SEQ ID NO: 1000900 - protein, 157 aa, Homo sapiens
  misc_feature (20)..(20): Xaa can be any naturally occurring amino acid
RRQWRGGKRSSKSDAVFCVXPGAAVPTFRCRTHAGLGKGPSSCSADGRPIEKINRNARGALGPGPGALFGPSRRGKPPATGGGPLAARGFLKPTSLFHPWGQNATGLDRWPFNQMGGKRPCGPLNLGAKGPMGGFGGHFFSAYRGFPKTGNRGPLPP

SEQ ID NO: 1000901 - protein, 227 aa, Homo sapiens
MSVTQAAKCDRKSMCTKPVGADMDYKFGYKLIQDYMKQGAGSIRMSLDDYVAQKARLVPYTTAGQKSCISMTLHDKEGAEKVADEVAQHNSGTISHELVDHMHSIGDTEYEDADCTPCFASATAVGCRTLRRTQEQRMAHKTEYLACEPRGTQLPDEWIRHPRKCSQTCPWAHRDIDGTTRRDPREQRWLEGDRLSGGNHENRQEAPERAQTQEDIRDCLVKKPNKH

SEQ ID NO: 1000902 - protein, 296 aa, Homo sapiens
  misc_feature (126)..(126): Xaa can be any naturally occurring amino acid
  misc_feature (181)..(181): Xaa can be any naturally occurring amino acid
MCKTDSRPRGPADRTWLLPCARFGRALPRAGTHLQGCGLTPCGWTRQRAFPPRTEARCPFGSSPCALLSQLRGPVGRPGPFLHRAPSSLWPPPEGLTRRLCGQVLLSWKRPILSRLCAREGCVGCXPHIPAVFHLQCVKFRGLTCSVQPTGAPQVLAVRDMFRRIICGSQLLIPPSWSGCXEPGYIKKLLPVWPLFPLCGWVRTWTCLGLPPGGPAQVALSQSVSQVNKLPLCTILLTPQRVPTRGKSFSSKSVSGSCSLLLRGDIYKGALQIPKTERANLGGCVPPLKSPARQGL

SEQ ID NO: 1000903 - protein, 141 aa, Homo sapiens
GVVAPAPSLYAPWNQQVPDKETEEEVMGTQPPVVAGFTIPMLGYTVRVLTVSLVLLLDWAMAFILCPLTCPGECEGSTGKLECCLCLPSQWAVLTAAPHPYRWSQEAGRVGEGKIGKTGRPRPRQNSLSSLHFWSPVVMCL

SEQ ID NO: 1000904 - protein, 410 aa, Homo sapiens
PPARLHLKPRDSSLLVNQRPVLSLVPANGRCARAASGSAAPPRTPPKVSPRLAGRMGRASCRGDCAAGLESNNGAGSVLMDVCWWPVVEAAGSHIPAQVERSDNYGDDHRIYLIQADCVIGGSVGGEGQTLVYMLPDLLQRIAMQVQLLSSLRTSTTCVLLSTYGASKSIECAMEAHTKHARVMGNNKGRVLEKLVHTHRIHQTGAVGYTSALPLGANRMPGVMTDTIHRYMTTRRFLREKIPGNLGVHANFVDVRSRHPLSGPVRKYAVEYSRAGPKVVDIAREVDVCLHPRFDTQAYLGRNNQKGMAYLCDTAWEAFAIDCGSETRTHSVSEGAKARSIREVKDICAVYPQETLGDPHKEGSTRRPQGSGAVKANPRNRAKRNRGNGERSSKCGSQRKPPPGNTSWRW

SEQ ID NO: 1000905 - protein, 108 aa, Homo sapiens
LLAIGYEEEACSPMWKLKGLVSSDLIQDKLKQSMPLWGIGVNHLTGTCLAQNGERIRVLLGRSHCRAVLKAIAVHRYHYGVLSATLAQFDPVTKSGHSSQSRCSSALG

SEQ ID NO: 1000906 - protein, 130 aa, Homo sapiens
ALCCMSRGVKTTVHPRQFLVWTSEIVLVSFYFGRIMHESFTFDRESCTCVATEPPARHHMYGKMKAPKGLTSRAQRLRWSQLQPLLTNTVFSLKATKVYQFTDEDTIVNTPQTHDVHALTISSHCQTVDF

SEQ ID NO: 1000907 - protein, 112 aa, Homo sapiens
MKIHPRANETYRPPAVSPRCLLYGTPCYYVWRLLIRHFNALHALTEKGFNSPKSSQGWRPVVVHLYSSPWGTVRFTLSGDYPGGYSLDPLEMIWSVVREGAQSIIGVMYILI

SEQ ID NO: 1000908 - protein, 329 aa, Homo sapiens
  misc_feature (69)..(69): Xaa can be any naturally occurring amino acid
  misc_feature (196)..(196): Xaa can be any naturally occurring amino acid
MAACEDWPTPVNTSMRAATRRLSLCWETGGACQKGSCYWAMATGLFRQQSTKGWTTLVDHIIRSSDLCXGHEMIQCPPSLPCEPFIASNSLPHAQAVLPHVHFSVSRAICRIRSVCGVGNQPKTARTEMAWLAKGPLYSDQRPPEVYPRLYTYDSIQYPRQQNPYTRRVPDVSIQQGVVTNESHPMCVRGLERKPXSTPMTEAFGATSQSTPISNPENFAIDTHLRQIYLTRILVGYSISCFKEIDCHSSALRNAVNSLVPLWLRKYSISPSKFGSYSPKRNKKSRQYRNLVTPIARTHEFSRWGIGTKVACKPPGTHKGMAGKAEPCV

SEQ ID NO: 1000909 - protein, 234 aa, Homo sapiens
  misc_feature (227)..(227): Xaa can be any naturally occurring amino acid
GLRRPMNFGWQHRRHAFTPRIFPRCFHIGPDKRPKVGFAHVLHTTLGIWIAPAMTVFLGNDERLKACPPFLGFSRAHWPFPRFQTRSVPRHCPPHLPLRENVDPHLPSTLPATEEWQHSHIAANRRGISRGRPPLRTHLPALMSGLTHIGGNTVLSKRDRGDSHNPTAVARDSPITLSRFFLALLACCLWGMTECGDIHAFPLWKVGGVLDTGSQTEENQSFVPVSXLSPREKH

SEQ ID NO: 1000910 - protein, 320 aa, Homo sapiens
VAHRIHKPFERPFYCGPRRPQIYELVAQTVVGAEKLVVLSSLRTAGSLKVPCALPLALSPGPARAAPENPSSAALRTAMVAERRLQLMPGPRESSVTSGPSADQAPRASSLPRPFGKWLYPEAAFMLSGRRKTMGRGLHREWGNGVPRRPATPSPARTQEIQENLLSLEETMKQLEELGGGTFAAWDPSFVSAIGGNICTPSLASTLRFPTQEEPMLQEGERMGREDVRDHPHRHSCTAASHTPRAVDGEGAVGHDMGEGPDSGLLAPVIDDLVPSLHSCPLTWGISGLHSGGHHADPGHLRYCLWGHPSTPYPECLRSD

SEQ ID NO: 1000911 - protein, 234 aa, Homo sapiens
VGRGGRGTRAAICPYPLVLSVKPMAPLFPRELVSLLPAVNGPTSILANPLPLLYAAPSPGSLVTFVYVTIVRLSRGREERKERDQSCPKEGKRSSYEEGQKQGRQRSSYLNYTVGMERSWGQALNIVRTLRICTGEKVQGEQEEEPGGPEADERDGVIRGPGLSEAATRALEVLLGGGGMQPDVPLPSSTPAPAWSCLFIPLPHDRRSLWPMALSSCSCVPCMYPTIHPFLLPA

SEQ ID NO: 1000912 - protein, 91 aa, Homo sapiens
MIEQHRNWPRSWWLIACNPSIFGKAKDGQIMRSGDLRPSWLTSVNPIFTTYAPKIIGARSVGICSPSYFARLRQENSKNPGEYAGSELRGP

SEQ ID NO: 1000913 - protein, 290 aa, Homo sapiens
QGRGSGALGLNVAPTLCSVWPLCCTEEKWPCEVQSVQAMTRALWQVSANSLGEGHAVGCAVVSGLQCVLLWVTHEKPSGEQCPLVKPVPPYKRLDVWANGHEPSLRWHRWPELRHKLEALDYCLTPGRHRALTLACRAPRVPRTSRELPCQKGHHMGHRSCKLSGAGRALPWLLRARGVRATGGRQEGHQVQEGNTDSDADGTPDNDQAAQINPWAENKEQEATGRQTKKTTQRKDTRHTLAPKQTQYAEIGATSTECTRGRRKARRNTTREQVATHRESSTPTHKRHSD

SEQ ID NO: 1000914 - protein, 287 aa, Homo sapiens
GVREKPMSSIVSRRHPVRLLVRECPARGTSASAAEFLDDGGRCISVLKNYDPQKDKRFSGTVRLNVSLPALMFSVSCPCGGLMLATVTDGKGRGYPPTCDILMAAEENSTMNNTNWSNECWPMKYDAFNGLRVSDQADSTESSAQVYNEGQEQFPSLLTHNENTGGQQWMRRSPQLKFQMKKVLCLACSLLGHVHDDRRVKLVEYTFTWHVNAPLDVHCSTKNWQNDPADLSIIKKHPWCNRAPRRRTLQGDTCTNSYYVTTDNKAHAPEPLRGTQKKACRKPELAH

SEQ ID NO: 1000915 - protein, 58 aa, Homo sapiens
MVACSFRQLNRWIYAREDPQSIQRAWVEGKSGPVYGAWSHAAGVLLRTCPDPAPLLSA

SEQ ID NO: 1000916 - protein, 175 aa, Homo sapiens
MRNTLTVQYTTRQENEKTDNDEVSTRNSEGKRSSPEPTTRETNHGNTARANNESHTTKTGGDNHTPLTQRGRATTKQASRGEVTTPRNNIDRHRRSSEQQARKEKRHRHNGAEVERERTRNAGKREERTTAQNDTGRAAQRPATSQKEEESADNEEEKADAAQGEGKRDHKRKDR

SEQ ID NO: 1000917 - protein, 37 aa, Homo sapiens
MKEERRKQQGRKKYDHTLRERTKNWYQKRTTDGERDR

SEQ ID NO: 1000918 - protein, 231 aa, Homo sapiens
MQLPEQGLGLLACNKRHIETHTENTTGLLGWELRLPDGSHDLPSDPRRVGPGTLVRGARYAGSGNVTREPTLGNAIPRGGPSEERQGHNAQTREGTAQRGPQKRSRSEDDKAQKNNHYRTGTQNDDRTETKLAHYVKEAPPNGHKITQEHWRAIASAPQRNGELRGRGKNPPAGDKARPRRNKHGLRKHPEENDEWTPRTAQPPKTQRGNNRRTGQRLPPTDIHANLREKY

SEQ ID NO: 1000919 - protein, 141 aa, Homo sapiens
MSDNKTELGQIRPSAVSLIHTEQTRMAGTRDTGARGYHRRAAQNGHRHKEAQLVGRTKGTFRCGRKRGRHSVGRARKSPRRAVTENLGRIGQPWERPELEKGRTPNIRETGTRKDTHGEASAAKGAQALLKLQHAHMGEKR

SEQ ID NO: 1000920 - protein, 322 aa, Homo sapiens
MHHIVSLTVGGEAPYLPGVTGPGPTPGLPIDPMRRGVEQVRTLFTRTWETKEEPRDLERRNRGPERASPDNHTWTPEGSKCRKTDPQSDTTQKECLIHTQKREEEQSLDRAETTTSTETMCNQHTEDKAHPQGGKAAAHTIKKQQGQKKETEKKEQRKELKQTETNTTHVSRQVETNIGERNLTNRNPQRENKKWGDPPQSNPTDTNDAGKEDSEKKTSKQQTTQTPHTRTHKAKQQARRDKRSTPKADNIRDGTHNKKTDQPSSTKQTKATPIEATHAHDRSTRERGDTTFLRTTTTHRRKTPHTNEQKRTTSRNRAKAEK

SEQ ID NO: 1000921 - protein, 256 aa, Homo sapiens
TDSERTHHGAVSCRQDQGQGLTGVRSVRTLASMVRTPCERMFLSFPSTRPTSRHFDLRRRAHAQVKWLDWRSKVAQSRLLMLTPVKGTVARRCPNCSCPGPWAELHGVTKLRVDPVNFNAPKPLTAGDPGRRLPAEFTPAVHAFPGQQFLGSVSTVLDLRNIVNAGAVAWLCFVAAFWVVRPVGLYPTLAIAMTVTSGVDRVVHTQFLMLATGNEGGYWTITTKMPIRAVMDLGWPGSLTDLLMNISTERGKWFQH

SEQ ID NO: 1000922 - protein, 204 aa, Homo sapiens
MKSLEEEFEEEDAESLRKKHEEEDEEEDISIWKSWKTWSWAHAGGEVEEGPPPPPTLPPALPPPESPPKVQQNREPEPGLLLERGGARDGGGAWGRNSSYLALKRSPPRERWRGKGQAYGRAPPQEFVKKTPLLPTNPVEEETEDGSDEGSPHQRHLQKKRWRQRQSAKLYQEKAQDDTAAMLTKLHTSVPLMMRSHNPTEPTH

SEQ ID NO: 1000923 - protein, 90 aa, Homo sapiens
MGKDSQRRERQPTGGPQPTEATSQHVHTGDTTRMRDTTHKTGQRKGITTREGNRAGRKYNTGEVREKRQHKANVEHKLRSERNHDKKEKT

SEQ ID NO: 1000924 - protein, 251 aa, Homo sapiens
GPRDWQLHCGARSDYEDTKQRTGHHGSSSSSCAWCFSALRGPPFTGTHPREMKKRDQRTILCRMHTVGTAQTRPEGTLALISTGPLAFQLGPQTENIFILPMCSDLLMSLGHALPVGTGSSYQKNAMDLWNGTVGPSTIQKSSRRSELHRGFQQTPSGTQTSPEMAIQHEPRNDLFNELVVDLLDYLIVSAMKTLYLADTFPTNFRDSAGAMKQINDSVAKQTKGKIVDLLYATLDSTADVIMVNTIFFKS

SEQ ID NO: 1000925 - protein, 332 aa, Homo sapiens
PPPTKTDGSVTLDNGIIRVKLDPTGRLTSLVLDGLWQEAIAEGAVGNQFVLFDDVPLYWDAWDVMDYHLETRKPVLGQAGTPGSGGTEGGPCRGQGMGPGYRSAHNRSAIAQERIVRETLGDPICPDSTTEVHWHEDHKFLKVEFPASRAEFPGPPMRSSLGTCSDLPTTIPLGNWARFEVWDHRWMDLSEHGFGLALLNDCQVWSVSARTDPQNSRLLPGSLKAPDATADTGRHEYTYALMPEQGLLTGCWRYPSCYSINSPVDLTGPDPEASKLMEGNKPRDYNQRTEMETGKKGGSRPQDRTRTGADESPGDSEQGDMRAVQSNWDQGK

SEQ ID NO: 1000926 - protein, 112 aa, Homo sapiens
MVGTVGSQLLGRLRRENRLSTGGGSCSEQGSCHCTPAWRGAKLCLRKYEYYIQNKRKLQAREVHTKQTKKHVRSHIITKCLKSSDKYKMPKAANESRHITFGKTDMKITAYF

SEQ ID NO: 1000927 - protein, 307 aa, Homo sapiens
AWIQAEGARLRVSRLVGERGGPHKIQIPSARLVPQVTERTSISSPCTVPHTYEGDPPTKLLQRRMLRYSDTIPVQSCVWSRERGVVWWSAPDPRELHVCTLAVAVNRTVAHHFPRLLYFTGQQGGPGSSREQVVSHGDERPAWLMSETLTPPSHNFGADYDWFFIMQDDTYVQAPDLAALAGHLSINQDLYLAVAERVHMDAGEQAQVHVMGALDYLLSPESPASSAGTSGWLPRETFSVARPDEWLGRCLIDSLRRRLMYHRPRAAVSAHLELGNNRDPEKERSSDFLSAFAVNPVLEGYLMYRFP

SEQ ID NO: 1000928 - protein, 264 aa, Homo sapiens
GPRTHQFRTHWDYRREPPHPAFFSGGGGDRTSCLYSPRPGTCPLAPHSGASPCHILLPSRAVPTQHCLPAPRALRATTPRAPTTRYYCPPPPPGASASPRLLPPASHAPRALLHPTCLSAPPTLGVLTQHPPSENPSSQASHETNHLHGTTYTHKHACHPRQTQHPSHLEATKPTAATPTAPTTPHKQHTTRFREHQTTPPRTPNTHMADQGGRRQPPVNRAHTHQAPPLTAPTTSRNPRPTARMDNTPRPSHKPPPHNTGPAP

SEQ ID NO: 1000929 - protein, 165 aa, Homo sapiens
FSELGSRNAKELAFRDSWVFVRGQEVCSNKSPFEQHVEELVSTSNRGTKGWPEALEHGQAGIPAAEVTASYHGQCHGPGRGSAMTKGGTLRLPERTEAEAHTPEPGQERSLWPNTSGLRGSDQNVVSRWLEGYRGACKEGNQQNAAYDNGKHQRYPEFLFVTLIP

SEQ ID NO: 1000930 - protein, 136 aa, Homo sapiens
MERTAACVSWVYLLKPDGEHSVGTEHGLGQSTANTFWVNGCASYLSRTLEAFENSKYTNARGLRHPLRGKQYRASVPLHYPFNAATIAGDTYMVRVWNNPLSQTTTIMWLETPYFCNFREGVDPAELANGSIKVLK

SEQ ID NO: 1000931 - protein, 128 aa, Homo sapiens
LQVLSVRTGWMTKLPAMALSLELPSLMDTWVLEAVACSHLHPRSAGPLPVDVSVRVVVGEPTEVQVVPGRGICSGSSPSCDSAFLLSPGGPDPCLWAPMYQLSQYCHCLYGVCRDAWVWSAILTLLHR

SEQ ID NO: 1000932 - protein, 135 aa, Homo sapiens
GRCGPGPSQPWETLRLTVGREYSTAVVVRLQARCRARERMLREARGRLKAPWYNWDAVAFLTSRQTWHIPCQAAKKALSWIPATSAADAGVQSEQRASWLAACCSLLHDTTRCSHVVVPWARSETGTACGVTRSW

SEQ ID NO: 1000933 - protein, 60 aa, Homo sapiens
MTSEEAHVRPSSQNTITTQERQEERYRTPRTRKQNHGPKPTKEQRTRRNRTPHQEHKTNQ

SEQ ID NO: 1000934 - protein, 308 aa, Homo sapiens
MMMSVIRVRPRVYDLVTHDPDCCDMTLSDQGATDGEPRRIEGSGRYENTSNYPPAEEQEYHECAMMFSGRIEMASGPECIPMAMRGRAFGLDTQTEWTKKLTGRVPERYGCLHVWLKLLYLKTRCWPNMASRAGKGTRDVRPKATTGDTTQQVQTHLRPFDSTTQCQNVREKANTKFRSQKHIEHSSIHHDGAVKTRRSRNNPAGIGATKEANVNHIGIGHHKTTECLCRVDLLATLSTPIDNPEQEHRRNYMAPNIGPQFRPKRRDKVHLDNRSPQSSADTFCGRITQHQRMYLRQTYLRKFTLAGP

SEQ ID NO: 1000935 - protein, 375 aa, Homo sapiens
VRVACRGGVRPGGPCGGLPLPVLVFFVVASAAVIVGVALSVAVGLLCAALLAGCLGGGAVCSFWDVSFGGAGRLAFACGSVALSEAVRVSSSRARRAVGCFLCRGVFPLRRCPGLRVGRGAGCLSSLRSLPVLCRGPSSVFAFPALCRGLGLVVLSVVVIVRAVPALRLLPVVLVRGSSSCALLRRFASHCLRFSHPSASWGCYLGPPQRCHLCVSRSPVSSLVLLGAWVMCVALPLVVWVSLEAVVVGPLGVDALFCHSVVNVVRRGGAGVSPCGTRVAVGPGSAVVLASCDSACRAGSCRVPAPSFLIRPVQYYGASGVHLIASLFRGLLALGSFMGCVQRVDDCTVTARPSGGLILLLHSLSVAMLEVWPGV

SEQ ID NO: 1000936 - protein, 136 aa, Homo sapiens
TAATARGAAARRQHILRAAVVARIVERQYASCALIAEAMRLSRKAVKRPPNWPTPYSKTTKDTAQCKQGIANAQQPADEARLGASRSVRNGTRALSEEETDVDANSAYRSPSPEPCKQLRGFGGTYRILQTHRWYE

SEQ ID NO: 1000937 - protein, 265 aa, Homo sapiens
MLDTGRGTNVASAGFELFCCAPLGPRGAMSRPANLSFVVSLLCVLVRSEHGCNEGQPGGTLANPSLGLLRGRVNVRELAERPILPEYAMIIARCIGVTQSAQGTLAEWPVAAESEQGENAQATRTKPNYARRSALEIARHRRDVPQGQGELATANARGITPMERRNRASQLVSQGCFRAYLAQSLLSTHAGITAVPLCEGAGEMGIRSGNVGMEPTSHCIDGVRPSGALPEREPPVLLPTNDSEAAERRVTVEEQLSSTGRELIG

SEQ ID NO: 1000938 - protein, 229 aa, Homo sapiens
MEVSHRPLGLCSFRPIRLWDGASNGRRNEWYDDVSDLMVMPCDVPNNAYVRYTDVVIILHHHLADNWLTFWRSLWNRMKAHVNHHTEAPCPAHVRSTENRSLTSVTVYQILARRSKIGEGPIMGHKVDCRNQQETHRRLEEPESLATGVGTLSQHMERREGSHRPPTESPATVRESSGEIGLVRCGQTEILISHWILPLGDAVSVPARSLGPHSTRPRQLRKLGKKERN

SEQ ID NO: 1000939 - protein, 100 aa, Homo sapiens
HHFLKMFFQFVLTVVKELGVSVRTRVLSLVMGIGILSEYSPWRNPSGCKPGCLLAELIGRSAFAQGRVRYYGKVYMRCHWYVSMLGHTAWAQDTLSCIMS

SEQ ID NO: 1000940 - protein, 147 aa, Homo sapiens
MVCEVCVAEDWLFAVGMIEEDSDERWGGTRLGLPSDSAWTWSGTEDDTWTWKIEMDSNTFPTTSLHGKGVANRVHLSFDEKHDVISLQVTDKMFQADEEKCFRLCLYLAGLSGLAALDVELVWSFLEVGLSGGARGAFWDVKGTVSA

SEQ ID NO: 1000941 - protein, 179 aa, Homo sapiens
GIAFQGLCSNTQPRPTVAGTQQSTFLIGLANPLSEVSAKKTPRPGLQAGTAWGYLHHTTHWYLAGPPAGFYMPRVSLTDLSAWADLRIAHRSISQDPKIKYPKENTRWDLYVPLYGRVTGICGISLSIVTEGRNRWHLSDGRTRMYMVKRTHGMEQVATIVGSTLNKVCHGPGVGGSRL

SEQ ID NO: 1000942 - protein, 238 aa, Homo sapiens
SETLPYSCPVFTPARTPQVSLFSPALWKYATAYSPPCRRGNEILIQRRERLYSTMRKALRTLLCLPSLVWVEKCTTVYVALCSALTGTYHRPRDMRYNCSPNAPRMWPKVLGPRRALGTRTTDNADMARDNATVHSRLYRDQDTPRPWPIQALAESVADTDNYGRDKWMYEPTQDRCHKTELFDNRAPGDMMATLSPGARRTAVPDEMLRDAGFFGNKTSTKTDLGKISYFKARRYPI

SEQ ID NO: 1000943 - protein, 74 aa, Homo sapiens
CGFGSGPVWANMSGEAPLSATDFSSLIGPVCVATSHYLVYIRVRAYRLVVVLLYKPQGRVGGLSPVVVIELQMS

SEQ ID NO: 1000944 - protein, 133 aa, Homo sapiens
GSYLASWLPCFAVRFYKGGDSTRSLAPAHFFLIFGSCASQYFAAVLCDSRGHMVLGRLRRAGAFATVVIAERLCYLSLVVQSLFVGLLCICLMPLSPQWFDQGAIVGTAHDHVLVSHLQRQPVLVTLPDELQA

SEQ ID NO: 1000945 - protein, 323 aa, Homo sapiens
GGGRGECPEAQAGPVQPCPRGEAGAPDHRRAACRRPRLRHPRRPCSARMEFSGQDQEGGVKRQHAMQTKRSQAPAVEWRLQGRSYNRSVEDHTEPALSGSRGGECTRQKEARSMERQLALPAHGAGRHPGVHIPRSCAEGAAGGVGMVRGSQARARAPERWGVPRSVPRTRHAVATTEKKTEQTAAAGEGLCTGLRVTAGRVMRAARLRHQELFRLRRIKAQVAEAGGAARRRRRRQARRDAEATQAPEGWRRLKYQAPDITAAELGAARLAIRTRSPRATSFETGFKSFQRRNMIEPRESAKFKRKYKGSSWRTRQTYALHV

SEQ ID NO: 1000946 - protein, 131 aa, Homo sapiens
SCCPRVVSPFGLQLMVLRVKAVGVNQMSLSARICVDPAVRRVPDPFPFTALCDTLVCRRGAKPCRVALPFSAGVVGRTPRGLSFRRPCFPLVVRRFVVDISPRGGHGVRSGPCISTSIKVHGKYIPLQYMP

SEQ ID NO: 1000947 - protein, 88 aa, Homo sapiens
VPGISWLKVLDVCLCVSSSFLLSEALGALALFQDVLSYLVRYLMTLVPLLGPVVDDLGVSLFPVIVDHLCSSHTLHTDSKMLVEMLHM

SEQ ID NO: 1000948 - protein, 210 aa, Homo sapiens
FGSVWVPLGPFLLLLRWSLGFSFASLVSGVFIVCSLAVLFSLGSLLVICGVLVRCIVVGAFGPLVLLLGFLCVAVVLFFVCLSCVCFVLVVLLLYGPLSVVCVGRLSMSRGMRLVLVCGAVRYWFFVLGVFPQMLLFCDFVRGASARVSVGCGARSSLLLIAVCARLCRVAALWSSWALSAICWVFLCEVCGCVQARSGRAGSWRLGGGF

SEQ ID NO: 1000949 - protein, 204 aa, Homo sapiens
MGIAGPIPSVSDLHEPVGYLQCLKWLYGFLPLDNIAFSYTEDIMEARNRSCLRDSFLNGKLGHYVIAKKQGSVTVSSVGSISDLLPSSSVVVDPDISVMQPPPGDTPSPPFESATDSHTLTAPLAPTIPLNCADATVTPSQAQHDLLKSSLLALNTTSEESPQNVWIHSSIRPHHRPPSYTDTVCVLCVCVCLCVCLDRAGTSP

SEQ ID NO: 1000950 - protein, 147 aa, Homo sapiens
LACQRTELLLGCPRCSHSHCGLVHPMGRICIWLYAVPSSPHHEPIPLQDPSITGVSSMHWWHHSEDMLNGMPSGSATIRPMLAGTEYPLSYVDVTSRGVCKVTTVLSPLAYMYVVHRYLSRCALSVRDAPWTSQHARENGSLTMKQL

SEQ ID NO: 1000951 - protein, 146 aa, Homo sapiens
AGASSFVVYYPLWCLLSSCVLMWDVLCLVFSGCLFFLSSFFLGSGPFIGAFLCRIRAWSFLDSSLVVGRALVVVLCLGVSSVLSFLVFPSAVRTVNLLLVPLCVMPCGFARVWRNPIDRLCALSGCLCVQVSLGPCNSGICYTFFS

SEQ ID NO: 1000952 - protein, 183 aa, Homo sapiens
DKNYAYERPVLPHLGACDLVLGAPLLDRNHLHGGQLPFMSWGRCPCVGPILVRVPSGISCVCMYVVGSLWVKFDKAASIPAVNGVYTVRISLLCEKRGWSAAIQLFTHVTVHLNPFLNPFDATTADYKPDEILEGSDPIMIRKGVRISEVDNQSYASGERNKSSRLFNDANHGPNKGISVCVT

SEQ ID NO: 1000953 - protein, 126 aa, Homo sapiens
MNSLLEHSEFDILVYLGVDLGPGHATVLQALWAYTSGRSTVKSLDCKWPLYLGSLRRTFLDSVCSLDPFRGSAILWLPASSEVDPCQLYELIGTAILSLTDRKSRVYSEALSTGLSVIARICGKSC

SEQ ID NO: 1000954 - protein, 155 aa, Homo sapiens
LRGSWLAVSVLDWGGFVVASRVWPFVGSPCSSWSPVCLYFLLCLRCSCIPFFSGYPLWVTFGCVPWFPVLGCAPGDVPHAFALRVHPLVPVFLSLGCSDEALYVFSWPWGPSSLLVPCVLCVSSLLLLLVSVAVEVYPSGVIGTGPSPRVQGEER

SEQ ID NO: 1000955 - protein, 107 aa, Homo sapiens
MFLTPLMELPGFYTAIKGCLFCCVELHSCASAISGSASSVFNTVCSLVIMCNVGSLFSEDRLEDTLEMPFHAAIPVAPSMVIFGCLVYTGYSINSGILLGKSLLHPI

SEQ ID NO: 1000956 - protein, 195 aa, Homo sapiens
MSDLFYKLVMRRKWMEGRVLLPASGSGTSVILVLPVFFLYLSLRGSGWNQRFPTIHPHLTPCSLQASLGKDLGLVEGSLEEPLPVCQTPSLLCRHRSSHRQTEDEDDLGILGGSMTPSPPDPDLGAVAHRHGHSQDQAAQTCFPGRGVRNQHCVETSFKERKAGLRPTQLGRGLTVCLYFMGGRLHPAYAAVFFS

SEQ ID NO: 1000957 - protein, 105 aa, Homo sapiens
LPVSGRWVGPRPLVPRCTVYYCTETVVNFEVVWALGTLCCMWLLLPLGPYGPYMVFTQWAKLGLAYGVVLRVENDLAYMCIDPSCIGFCVYTIRCNHAPIGRVAL

SEQ ID NO: 1000958 - protein, 69 aa, Homo sapiens
CRRVLLCVLFFACVPFLVVFCSWNPFAFSLVVLLLSVCSLVREPFWVLLSVFCMLAFLCVSFWDVLAVP

SEQ ID NO: 1000959 - protein, 208 aa, Homo sapiens
ASPSEPSLVKMTSSTPRNGSSRPTLRVTQEKHGETRKDRALPGSQKERVRETQPPGRAKTGPNEQREHLVMPEGRGANCAETGLSLGTASRGPDAPTRTTNDFEEPKGSHRTPPFLVLYLPMTKTMKESSPDAAFSGAAHHPLHTSSSSMLLFLAIFITPSRTMLDHEAGEALQLRTLLTCRRDRGVPSQHGTGLHSYRPARELLQTS

SEQ ID NO: 1000960 - protein, 150 aa, Homo sapiens
MLARLVSELVTSDVPLLLGLPKLLGITGVSHRARPGYCLIKVVFMILDNAPGHPEPHELLTPLVVKWPYVTPQTQHVPDSAYRSSCHKDLLQAQLAHGTLWIRMVNPMEENPIMKVWKDYTTEDIHRCYRKSCESHLNLKQIPTGEYCIQ

SEQ ID NO: 1000961 - protein, 233 aa, Homo sapiens
MRSDTGITTLRTCTLAALGSCHVSTKMTVFLPRTLCLPKYPMALLHGVITSEPQPQSHDEDSVARPPHALGEQQDAKLEGFRSSSELVNLPSEHWRGGHGPVDSRDSAVDPLSVGSKPVGSPCCKPMKHGPQHALTPVLGHEGHSAEVKHLGRGLGMSFHVPSAGVPAVRPAFMLLFGSFVHEPAQLEETRAPLPHASRLLPTCLSTSPPRHLKQCAPAQGRRPTALNREVPL

SEQ ID NO: 1000962 - protein, 368 aa, Homo sapiens
  misc_feature (129)..(129): Xaa can be any naturally occurring amino acid
LFVRCLPLLSPTVVVFRCVSLISVVSPWFPACTLVRFFSYFPYRQSGSPAIRCHFVSASSMFAGFSCWSSDSPQACGVSRRVFSFLPVVVLGSQSSLASFLLVSVIQLVFSSLSQRLLAYLSAKPRVYXPGLPFVPYGIRGRGSLVVCFTFRHPKLNPAQVFLPPFNTVVVQYCSVSLSLLTCSYPLMENLCSFPASKSPLGSLPQPHLLIPVRLGSSSPPAGAPHWDSCHSPVGPYVASSMDRIARGSLFRPCLDVYPPVECALGITSVLPHHSTVTLPAHCPNVLPWQPHIVQRPFLVGRYSTSTTSTQAVTARGPEAREGSGGSGTRPYTEGPVGGPGPAVYANVMSSSMFSPNIPLDVNYLYKA

SEQ ID NO: 1000963 - protein, 69 aa, Homo sapiens
RVELWFHDSAKVSLLRMLLMCKNRGLSAVYPVILDVQSMRDTHEAQSLQVSAMAKLWETRVSNVILGYT

SEQ ID NO: 1000964 - protein, 71 aa, Homo sapiens
SLFSLLFYVCLFLWVFGAAVLVVCVVLFFVLPCLLRGLALSVFIPVVFDSVSFVGYVCISFHPSGDFFTPF

SEQ ID NO: 1000965 - protein, 357 aa, Homo sapiens
WDFTEVSSGNASIDVLYFETVVVPYYCTDRFGGRFDFSGSMDKPVLVTIQPAVQECSEHLARYQPFPGHITDVYMVYGYVQPLLLVTEEKVPTEWHRCSEAPPRGLGPSPAPPTGSALPDPQTAIVPSHDPPAASAPSLRHSGRLMLLPFLGHGALGGGRDVQLDEDHRVQETCDFVDGIKKFRRHVHGVIEDIVRTDRWTNTACRSPNQYPVIASGHPASSLACGPPPALLPLHASHAPPSLATPLTLLSSHGLQQMFEGPMPCPAPMQTHQAVARPPRCFSVDNDASSWEALPAQPTPTTGRKPWLSFGCISRTMAKEGFSSGMGLGTRPYSCQYRPTHQQAPNPQAKMARGREE

SEQ ID NO: 1000966 - protein, 150 aa, Homo sapiens
MPSSSCLCLFPFGYLVAGCSRYSCLADHFCMVTLDDDPQLACPWVTLHSIAMCLSLCSLRFPRGQAGSPQPPHYAAGRPTLPSVSLWDSGPLSVHRSPCGQSGSVVPNTRARSDTLSGCLGPHQQERVQAGQAVHLDPQPLGSTPPLCVM

SEQ ID NO: 1000967 - protein, 97 aa, Homo sapiens
HEKGFIKSMSLRLPCTHSKSSPNLKKYGNVHIFRGATSTNSHLEINTNALFHYYIRRINAVPLEKLISAVSFSPDFVLESIKASRFHRPYILEVGSL

SEQ ID NO: 1000968 - protein, 83 aa, Homo sapiens
LVNISSCLYLSVELFICASKWCYVVAHSALRDAVTRITFATIVLNVARLTVYLSVRSHAQLMEARNYLPVNVRNIDGSNPMFH

SEQ ID NO: 1000969 - protein, 192 aa, Homo sapiens
MVPDSCSSRYRNSNGVKWIQPKAHCWLKLRLQRLTIDDIQTISSGSEGDDFEDKKTLTGPMKRLVLVNLPERFALKSTHGIAIKSTNYGLCGQGVRAHLFVRTHRQFYDGEESCYIIDAKLEGNLGRYLNHSCQPPTCLSRSVFVDTHDLRVPHGMAFFCQQKNPRLGQKLTWDYNYESRGTMSEGKELLCC

SEQ ID NO: 1000970 - protein, 190 aa, Homo sapiens
DALLVVSVFRLPSLSCLYSLFSMYFFPITRLSQGVLSVTGFPSTVASSSITVAPIVNVSRQIIYYGIIPPSSSTTTFSAKGVDIPGTCTVRDSSVCTCVSSTHPWVLSIICECLYSLASMCSTPMCPTIVLHLRARESFTRITNVDQLIDVPHGVLGRTIVSCYKAPLLRGIGTRQVSTRGSHGDVEVST

SEQ ID NO: 1000971 - protein, 243 aa, Homo sapiens
RENRTMHLSCDLSLTDYLLKHMVTHTAALRAFQCTVCGKRFTQKSSLNGPHAATHSARDVRPNATAIQAKGSFFSTQQAPSMEAPNRAQGAHPASHDRPLGALGPSPTVGSGAYPHSTATPACEDLARFHDHLERHCCHSLRRQVLSSYPFNPITPYQGISPPYRPLLHVLEPSRWYRAGVWCWLRPLLRRWTIFTSVKPGRSWQHMDPGPRFDSGSHPALSCGAGGRMGAACLPQGQAGQGP

SEQ ID NO: 1000972 - protein, 149 aa, Homo sapiens
MSCVGPLCTIELQWPAGDGHLGQRTTAAGLVAWPWHSGGQASHWACARELYQASSSRDTILEDDKVMGWSEVPPQYAVRAIEEQRLKTQQGPHACLGVLCLGTCEDVKAEPLVTRVPPRQAHLEHHRAQCSAVSSTHAVPENIRCIKRL

SEQ ID NO: 1000973 - protein, 120 aa, Homo sapiens
MGKAQGKGGSGDSAVKQVHDEMALVVLKDKSKHLSMKTGHRNVNVVQGSAFGVWVVSTYQASAKFSQLLSHFHLKQQQQRSDARALSDMFHIIYDVNIDCVSTFARCKTLIIRSTVGLCI

SEQ ID NO: 1000974 - protein, 235 aa, Homo sapiens
  misc_feature (212)..(212): Xaa can be any naturally occurring amino acid
GGTLILVPSAVMARGPKTHLKRVAAPKSLDVWINWLECVCSSIHTTGSPDELRDVFPPHHLTVQEADVNYALDEEMKYNETFDMHAVYNHECDGKGTELDLVTLPCHCILVDCYLHTCDNDVGKRRFPVLDLLGPPTGVWLRLVQSLLHTVQVGHIVQQACSQSVHDTRVSLVAATRRRDIPPSNLLPGTFQFDWPGVMPHFRSFTDREFAXCTIAMACRDDVCLICHECAHFPL

SEQ ID NO: 1000975 - protein, 70 aa, Homo sapiens
ESSAGSRARPRPAGFRRSLTLSPGLECSGVISAQCNLHSPGSRGSPASASQVAGTAGAHHHGWLIFLYFL

SEQ ID NO: 1000976 - protein, 271 aa, Homo sapiens
  misc_feature (59)..(59): Xaa can be any naturally occurring amino acid
  misc_feature (140)..(140): Xaa can be any naturally occurring amino acid
MIVLVRLVLSQRTYMISKLVDFLHIERIVRAYLDGPDLCTQVIDFRWSTMGRYLQEALXQGTRRKRYQQVSCKRFSLIYQKGAIPKVVANQISVVSLERCAIDQDDIATPGGGLAHRRTSANSARLRRDRYHNLPCVVHXRGASQFANLPVCAPRGVPGHAKQSLRPLFRSVKRGTAVSVRYNWRTRHLHSWVSTNMLPIAALVNLSGAPRSWLPAERLFVALDPRGVGNRSPICLGCPPWNPYPPHGGMAAKAVGASVCRLSLLPGTQPL

SEQ ID NO: 1000977 - protein, 244 aa, Homo sapiens
  misc_feature (1)..(1): Xaa can be any naturally occurring amino acid
XGLATQVFVGYSDLTDDDGSPQRRLTAQRTLHSRLRTCLRYTLHCTSWLAHRPHGQGERSEVNGAHRDFTTPDVFPLEERPAHMSCHTSKEWQQSSSTPWFANTFRNRPHSSHKTVSNRSIVAPFYARKQSRQLTIKRPVRFPTIGRNRGKPPFPGPAASGGLSLSRFGLPPDMGPNRSMTTTSGKPLWQTPPPFGPSKIPPKRAHQRTSLAPPWAPLANHIGPQVVGPFGERRIYPIGFVGGG

SEQ ID NO: 1000978 - protein, 217 aa, Homo sapiens
SASSPICSTLGTRLLRAESTADDDAHTRTAYRTDRPSTYSNISEPQWVIRWCELGLNSFAAARLATSRFTEEPTSQKMSMQRVGVNESDDYSLHRFKATNYRKSISPHVGSGITMLVNASYQAHDLRESLTKRVPRAKEAEDVAYVCCHHVEFETWNDAWYFCVRGIGWISCHHAGQGCGKEWHPESSTDGLEKELKAALVGVPHALEGAVVEFFVT

SEQ ID NO: 1000979 - protein, 418 aa, Homo sapiens
SRRRRRLPSARVDSEPKTDPPDFRPSPDTRRSVGVRAGVASTRLPLHRCLCGCVLAFVVGLASRLQLAPVASRRRFAPDGVSPLRTSVLAVGVVPVFTSKRHDLVWAILVFGSILIPDGGTHRQLGNSANRLQFVSQWPHMRDLSELETNRHPKVIPVYTRLTYVTESYREEIARGNSIGFSVDTRAYLDNGRLCGRLSSYPVLTCDLGTYVRQVSPQLEVLLSPRGEGQCNTIGKESAKREAVLRVTVDWSLVLGIQRRTAISLYKKRYSGKSKPSKGSVSVGRKRRFGFSERVRTLALPLPTEERTPLYLVAAQKKCPITRRTISAPKRAEEQEVHKVQKHPIGFTPHIQNDHAFGTQFRCAQRGAEKSGKPDTALGDALIHLSRGAPNQTRWVRNFPPLIPIVGQEFLWGTRGSR

SEQ ID NO: 1000980 - protein, 105 aa, Homo sapiens
MAVSRVECKRSVDLWGVVNRGRTFLNKWLSFPERLDHFSGEHVRTSPMILFSSFFDDPVSGLRKSPYLDHGTGLPYDQAFIAVAQLLPERRLSSPQSPLVPIKME

SEQ ID NO: 1000981 - protein, 230 aa, Homo sapiens
  misc_feature (78)..(78): Xaa can be any naturally occurring amino acid
RTLAVAAREECWMGELEELIGSDGLCLAQGKEEAVKQLRKMQRPRMKEPMAGTVEADTAPVPVRSIVLPASRRKVKSXLKEPERSELLLRSAVRNWAVLGAVLVRAGSAARTVDEHGKMKVVTMSKPETEACHFLDRESVRLEGRLGLVGRGTSLEEDDMSETHELRQCTVYLLDLVLRVRVIVMQLSCQTERSFSAKADERAGRQLESADPWSYGDAWVRRMRGARARH

SEQ ID NO: 1000982 - protein, 103 aa, Homo sapiens
MWAHLGTPRRTMVQNPKDNANLRPTAHLCWKALAAALSEHRQYCDTFRGGEDHTPLQRRRGGSNTPYRIEDRGTRGHRAISSNWGSKHTSLELDARGTRDTAQ

SEQ ID NO: 1000983 - protein, 181 aa, Homo sapiens
  misc_feature (117)..(117): Xaa can be any naturally occurring amino acid
MALLEYRAACTQTVRVSNAVAGSHYNMRMEGGSDAGGKMAAEGGFSGNSWSIHLCAVYWKPKFGGKRRRDRFAERSGRVNVRIENDRKRGWCSVRPWRHVKRLVHIVHLEGSPLSSXRLLLTLTGEEVDTEFSLYSSKAPIGGITWAPCLGTHTMFSQVRHVYFQTHLRIASISAKVWAFV

SEQ ID NO: 1000984 - protein, 207 aa, Homo sapiens
TGSEKVLIAQEKSGNNTVYVFAKKDSNIVPSTGECTIHVYENSSRATSSIVGYTLLSRGGQGAKKSATGQGSCGNSYHIVEGKKSHQLLSSQEAEFRVMSVPEQDALLLREHDVILTEFLEGRHDDSWKWVQDLSSRMKAMLCTPLNQEMCDRVSLCSRYANEEARAHRCVEHNSIQRIKMIGHTEVTIENKNVLQHALYGVNADCG

SEQ ID NO: 1000985 - protein, 242 aa, Homo sapiens
  misc_feature (82)..(82): Xaa can be any naturally occurring amino acid
MAEKFDHLEEHLEKFVDNIRQLGIIVSDFQPSRQAGLNQEAEFDIVTGLQDIDKCMTGCFMILLYRYARFFEYIRINGQHPXLYTKECLAEGSELKMSSYKARSTAIRNLESLLIQELSERYFREVQWAKLSRGIRGAGSTRLLKPAHPPCVKIPWDCDAALRLGLRVLDATFLLRWDWALDTSLSPSVLIVWPHGTEGLEERRSCAPAVPAACLASTGFQSADPSSLWGSFSLRADDGAGK

SEQ ID NO: 1000986 - protein, 226 aa, Homo sapiens
MDLVAQAGLSGTVWLHVQPSTSPGVQAVSAVPQPSQVSVGLRALRHHAKANFGILSDREWGFTSFSNLREPSGRFHPPSRRLPRGAWEYIRACKPTRTVDLVSVALYIIIGKQFLVWKEGEVVNVKSCAPNRDVGDRCGAGSPFSVNGLCATYVGDAPRFYRGGVIYARDGAKRAIYSGQDVPVGYLAPRPLSSTPHTPGAGQKPLLMYPLYCVFYPIDAAIHQGV

SEQ ID NO: 1000987 - protein, 130 aa, Homo sapiens
AAISHSLLESCPLAAFVTLALVAFNEERNRIYVRYPNLHLSTPLLMQGKGDDLLPAGTEDYIIYNSTEKRQEDLTTVQGIAECIYPNFTNRNYVKAFKKKFACNGTVIEHRNMRSNSATGLTQTPKGNHM

SEQ ID NO: 1000988 - protein, 169 aa, Homo sapiens
MSVRAILRAAERPGTGVALAVSAVLVCRRTLFGSSHRTVSSGAPYFPGARSGTLVRHRMCASLGLARLLARGSPNLVAATRVETHFQPRRALAKVAPYGLQGTLCASSSGSAREVIAGGHGRVHMTSNIFRRPGKKYAGPQGVAVYILLDQALLFSIYGICACLLKVQS

SEQ ID NO: 1000989 - protein, 199 aa, Homo sapiens
MVRTIGLSDGVAALNRRAPWLDKRALKYGANSTRSTRNDCGENNLSEKRTGRTHVETLVATPERQKPYSAPREVGASRKQRIAKTRITITRKLTMVGGHTKGSGYIHRRQLKGYLFCGSGAIALAVSIADVDESPSCWNTPSSCNGGAPSAPNGPNEARFWALRGAYSPSRVCVVWSWLLCPPPLKRLCRGPKVCTGVV

SEQ ID NO: 1000990 - protein, 317 aa, Homo sapiens
AGCVVAASPLISPRALPADSLGTQAQGLDAQRWRVPKGRCEPGSVLVLLTCAECPQKLWPSVPGLAFLRPSMRLSVREWLLRGSLACALVLVLAVQLGTAGAQSCLGCVLGWACVDAPGGVPIAGPEQGGSCVDWVWTPKTLLVITCYWPMASIALLILRCGLAVAVFHCGHPRFDLRLPLAGGAHTVMGAAAGRSEDTWHSIRAAVGLAHCCQGTLVSKSLLGPSRRKPCWALALEGPGALTGIARGAWNSTGKWTVDPVCESPSRTRRIMPATLAGTEMPGPPGSVAILDQHHTVTPAIYNPCVPNGSSTEIHKP

SEQ ID NO: 1000991 - protein, 440 aa, Homo sapiens
GTVVAQPVSLFSVRLQTGDMVKRLVQSLLLSFGRWYGDPVDPVLLPCNEILTHMTYGLDFANHQFEGSNDSIHTRNVWIRSRTRELSERHVQGGNVAKMNVGMSEDTDILVLPRNTWRFGETLQIDWEAIVCGPTRHIPNRFNLVAEARSSLKTHLRVNLQLLLSVAIASEYTLQTDCRIRIRTGVTLYPVWKYTRRIRVQWVHITVWVPTRNLGPMYEGWQGARRIIAPSEMSKDCSSSGKSFPEVDLRLELTTTYFDSINTTLALSFQSHRHRFTRVESQYDFAACVSQGTGGAHTGYYNAPKKAYGGLSRETFKFLMWNLRFYLPLWNLRMFRLRPNQREHKPWSTLARSLCRIAEYPCGSLGVESKGAQSPRKLCLDLGADFETTSIWPKVGWPINRNRQLHWSCVTTELKRATLLGPAFGPKLPWVDPRTCAPAR

SEQ ID NO: 1000992 - protein, 192 aa, Homo sapiens
MANRCLRVVVDVLVARGLTYMGRADESGHVTHTRHPLIKARHPVFNVLITLGSVAKGKSRWDKFFAWAHVARKFQPYVQSGVLPNPKYTATVTETPSNLWPRGQRKRLAKKQWIFKFVGAKTHNPTKVDQRFLSCLPIFVPSFSRAGGGKFPLGNATLGPKEDNFDSGRGNLRFGRKNKGKGPLCVEKFNGR

SEQ ID NO: 1000993 - protein, 102 aa, Homo sapiens
THWSTPIANFDYKSLKGTLLLHGGAVKTITVSRYEGAELDLLLTDSLVKDKCPYYYHVSLETVLVGPALLGHTHTSNAMSSDIGGGGCTRDKNFVVLNCLVE

SEQ ID NO: 1000994 - protein, 127 aa, Homo sapiens
  misc_feature (79)..(79): Xaa can be any naturally occurring amino acid
VHRIIGRGKTISLNRLSGLSDGGHMVDREHLMFTKLPVKLGMTHIWVTQGRVDTVDDQYVHHVTHRQHVVLVAHYRFDXISYFFRPSSVTNVGCDFRGIPSTLILHRMGMLRSLHAYEFGREALNRV

SEQ ID NO: 1000995 - protein, 285 aa, Homo sapiens
GFGGASLQRGYLWPPRLRLPPRDCAPGGSPVEPESAPTAPPCFGRLGLVASMDPACHSRSCAEVRASRYGSTASTNCRAILRRTGCQEGTAAYASVRVRVRVSTSLTRVELARAAPLASQDRLAGALLLSESRRRWTVRASECCVLCCTVTCRSTCCRARVRPCREESPPAGTLHWAPERSRAYILTCERGRAQFAWRVNLPFLGRLRRSDRRRNFGRGPCGSSYGKSTSLHCHRSHSTRRIGVTTPKGGRALRKAMGKFSRLIIAPKLRPKFDFGTDLVIRKYS

SEQ ID NO: 1000996 - protein, 103 aa, Homo sapiens
MQQHNIYSVSLTFTSVGACYPSKERKKTSGNTWNSPKHPPILQTDLLAIISPTIAQFMCEYSAPNKHIVHKRETMQHGDSHRTPKLPTVMVMERRVSAICSPN

SEQ ID NO: 1000997 - protein, 114 aa, Homo sapiens
VVQYFFLYKSILYSHGSSYLYFKIGLGSLDVFLGTSSKFSDLAHSARQSTVIESKYRWPDNSMCISTRVLPHRMAQCRCGGCSLCLTPTPPHVRDYSRGHLWPLDPFPSPPLEL

SEQ ID NO: 1000998 - protein, 38 aa, Homo sapiens
MFCMFMLNRPIQGGSATGNNGSSRGKRELDMMLHSYPG

SEQ ID NO: 1000999 - protein, 310 aa, Homo sapiens
AGPRQPSQPRPLLPPHARTDSRCSREKVEEEIQTLDLRAPSWTIMILRQTNDYMQPEEDWDRDLLLVPGHERSRKRKTMHGHGVTPHHPEGGDQQIEQHSTRGLPGMAWTLSDCMQGSVHIKDETTLDQAQERQATTAHVAQKNHHKTIKQRNLAIPTQPQTQRPSPTGKEPNRGKPARHSGGKRNPTNAIDHHCEPNPHLRTPANTCNTTGTKKKKPNTKEKPKARNTHEQQGKQPHQRHTVEEEQRRNKRQRHHMKPKNKNQNNNQDTRHTTSTERDTQTRDTQRKNIQHTRTTQHKSKNENQGNAEQ

SEQ ID NO: 1001000 - protein, 119 aa, Homo sapiens
LRGIYPHKAQLHMYRHQESLAVLRCLLCTVTLEGLYVISACRETYLVNMLRRWSTSDGSGRQSVEHRVGLQASVRCDQLGPAVIIETFQICWQHLSISIIIRASDHTFPIGGKRNRRQP

SEQ ID NO: 1001001 - protein, 92 aa, Homo sapiens
VVLASARRLDCVLDELWKRRFTIDARATGVAGHASAELLASGTSQRDTCFADWQRTKTCWPNPRAGQCVGVELPAVLLFSGLNIATMTPATV

SEQ ID NO: 1001002 - protein, 155 aa, Homo sapiens
MTAIIRRTVVRVCFFIHRLMFQRKYVAYSVENESIAIVSLRDVKPVLLASRLDEVEFHVPFFVLWMYVPGHYSTTEDRGGGCREQKGKFHDGDWPSDVQSASIGRGQPEFSKQTGEQWLPQEFYPFTFINHVVAEGIAGSLEVPNEVFRELGDEK

SEQ ID NO: 1001003 - protein, 232 aa, Homo sapiens
GYSNQNSLLVPEYFQGRIMNVIGEAIDERRVATHKTSEDIVVRPDIMHGMLHELLWEECSVDARHQCCVDLIIQRFSIRMPCISLHLMPRWVALDTFGAYTLVSCMELVLEDSLHDICAVEYNHNVRRKMPHGSVVTSSAAVDFGVFAGGERRDRQVRERAQGVLDGPNAENATSEISGFRFNSNLLNDSMERTRLIGGACHRDSTSGHTLETGDHHACVDLLARPQRVKRS

SEQ ID NO: 1001004 - protein, 126 aa, Homo sapiens
VEPGLHPSNHVKVTCIEVIRHGTTYSCVGVFQHVKSRDKSPMIREIWIPVQAMSPFTDTERLIRDCQHKESILQMNPHAKATTGTYHGLTPKKPDSYATSAGPRRGKYDELELGIGYGHQRLLDVK

SEQ ID NO: 1001005 - protein, 578 aa, Homo sapiens
DLKYMVIRTGHMTHTIGILVATLRRRGIERVLDALLEEGQFRKRLVNPRPKPSNAQSRIRRISILWILSSRMAIDWKLPSSGSFAREPVDPMHLHIANSLRSPGSHKRRLETPKISQSDRPKSRNMRRPIRFAFLTRVPRTTNAASPNSQCQVALGISEDTLMPDWYPLSPPLLERAFKIRSASDPLVRTPTRKTFPASSFQGRPPPIPAFSALGGLATGAPAGTLWCRPNPQVWLPSQGEFLTPGFHNTPRARRITLPLGPQPPEPSTIIPPDPLGADTVGAPLLTGTLGIVVTPFGGVAQLRITPNGAVTPVTLTGWPLSSRAGCCHARLGATGHRLDIPNKGPKRPSWFLRLLPAYTAPRRVNRRSPPLGPPPPVHTYVGSRTLSPPFVHITPDYSQPALELATFANARSPFPTADLCAPFHWCFPPTDGILGAPVPPRMNALTPTPGASHRARAPTAQSDPQAPTPPMRHTEQLAPPKPLAPTRKRPRPPYAHNMHGPPPTGSQNHPVPRRPPSAPTATLSATPPNAKGPTRAPTHAPPLQERTRASNHSGQRKIFPDHAAVRPHRCHNPRAHT

SEQ ID NO: 1001006 - protein, 314 aa, Homo sapiens
  misc_feature (211)..(211): Xaa can be any naturally occurring amino acid
MRLLSLVVWLYLCVSSVKHEDRSQAFGFRKIDLREAGYRAVAGIEDPEPWQQQASSKWLARRCVQCTDGGNVVVIDLPSTLRERAFGVNWMSLEIDIILVKGGIQDLSSCVRKEIYTNNVGEFALSAPSCKGLGSTYMRIVSIPREKSKLYHVAHETPRSTRSAGAPIGEPWLSISQSDYSCVTRGRDNSLGPPARERVERWSECFFPPFXLCPWKAWGHDPFVGGYTEAPYTPSQYVGILPPRGPKEGSRIIVAEDTQEEIQSHLEPTVPPYGYRQSEQKAWRIMGAASSRSQVLRLPLRSRDRNKIPNCLPP

SEQ ID NO: 1001007 - protein, 270 aa, Homo sapiens
MGCTVGACIMEAPCEGYFLGASLCYSGTYVSVDTRMADETRRSLNVIRYDLKELIKMEGLGENANKPDGRIIDDSQTCDPANRTIVQRMMVIETSLTRVTRSRETEGRALGAPTRHVRRKTIFDSVLGASQWDHRTISETMSLYAPVAVSVDGPSMGHLGDCMRPGKGSRAWRNLKQGRTGEKKLVNSLRRNRGRQLQVPVGIDFQRGGGTLTPPFLPYPPGSALGENPRKPVKTYLNRRVGRRPGYGCPPFAPASGRMGLPGSHNAPPH

SEQ ID NO: 1001008 - protein, 74 aa, Homo sapiens
MWQGPGARTGPRFLEGAIQTQFRGAPPCGAKDTHYSHQDDKANHKIPKKPKNNTATQRGPRNYHRPALTQGSTH

SEQ ID NO: 1001009 - protein, 140 aa, Homo sapiens
MWSPTQKLSLRGLPLRPTLSMASHGDHTMGFVGLVPGIRQRELQDWQQQLVNISCHEEQYRMHLWTIWGLMHCYDSSAPPKVRRYQVLLSLMLLTANSQTTMVTELGSSCMRLMGMRGLTGGQASCRQDDATAWASLILP

SEQ ID NO: 1001010 - protein, 104 aa, Homo sapiens
MASGDAVREFALNLLVMPENTAQVRCAYQPLQNCSHGTTGVVTSSKMLSCGAAGRVLELRIVRVETTTHWCEVSLSGGQVVTINILGMIASTGSCAAQFENTSR

SEQ ID NO: 1001011 - protein, 280 aa, Homo sapiens
  misc_feature (94)..(94): Xaa can be any naturally occurring amino acid
SGGFRAAAGVYGTLALASRFYLPQEPRRVRWSLRLVVRLSARRATVACATRPTWRASLVHLFSFPACIRCCMLGDVGRSGRLALHSFTVQPLRXYWRRSCSFGRLVPLLSMGLCTSAQMLPGTSISCHSPIRDRTAHLTLPETQRCAATSRSLHDMDAHTRVDVGPSTLYLTDVGFLDLQCHEVNDQSAIGTHCMGDWSRNSSCTLAPMRRTYTLRKGCKGVGPGRRPRDEFPRRTSILSGCIRSLGIPPNPLTGNSLARRDGALKPTRPSTHLPSRQSA

SEQ ID NO: 1001012 - protein, 118 aa, Homo sapiens
DLYRFAGAGCRALILSAAGHEGFYSKLSVLFSLNDSLGIMACDPERMVRMKRITESHLTGRVDCHEIVGGTLVTGVTTLVDQCAIGPKCVVSPGKTQWPRRVRGVMSEQELTEVRVPT

SEQ ID NO: 1001013 - protein, 277 aa, Homo sapiens
MGELVVSGTEDAMSNENPLGIYLWAARELTRVGQRAEGKREGTNTGQAERILRRVGLTMHNDASRKTTGARTLRFDAKRHRHNRAHISCHMNRTDTTLNCHGKSPGTHEIGTSLRWRSQWCDGLYTNHRVPKCGCDRQMSRLTHLKCSGCRDLFDCAIHTVLYPLWPLRLQLVARTHSVDNHRLCTLWGCYALVAGVIEHILVRNTWYYTHVLCGGCAPGYVDANPPFCLNSEPPLPISFGCQRYRPCGAHSVEQTPVQRQCRFKTVLVTKVFRIAP

SEQ ID NO: 1001014 - protein, 103 aa, Homo sapiens
MGPIYYHNALFEYTPMLPLIPTLSSPPRKLTGGLPKTYKDKSMSTPIRRCNTIPLSSRWGHPQQAQEQKKHPRARRKHPPGEQRVVGQKLWTRGETPGGDNSP

SEQ ID NO: 1001015 - protein, 128 aa, Homo sapiens
MTTVAGSGIVVVQGEGLRDRLGKGDYPVEIRDEGVMELLTAVIVLRLEECQVHKTLVERLLKQLAPSAALRQTRGGNRVRPMGTNWDEHPTDLGGRGLGGAESWETQSVSTTLGAKRGWTQTREGSRN

SEQ ID NO: 1001016 - protein, 54 aa, Homo sapiens
NVRTRRWSGGGGVVGSCTVEIPSGPCWCGLIPVTLALPYRSRWSQNDPIGGSRA

SEQ ID NO: 1001017 - protein, 424 aa, Homo sapiens
  misc_feature (191)..(191): Xaa can be any naturally occurring amino acid
ERLLESKRPDLWTDPVSWKRGGSDTGVAPTEAMIMACIQRHGHIVPRIQRAHACGGGCWIARKPNGQMNEWMYCAALDTDERRHQAMVRDEKIFYKRPAWVHMLVLTNCVADLERDCQVDRSLCRDRLEVVYDGNSHPHGHPGPDVVVFSESHMNQGPYVSVLVGRSVHQMANSGKPGSGTFDLVSRDSQXIRTCGGSGLEEYVPRLHESIVKEDVTAWRLLGIHWNCRVKKRQGMASARTAPCEPFVPKVKASFGKGPLGAKEFFLNKAHAGWLAEPLFSIQTVEIVCRWPMGRPLVGFPCGPTTGSNLLNVAQSLGKGPQAPLLGKREARGPSKLCPPIACCWDWLEVCVPPVGSRDTPFSTGSTFLASPGKGFGPIHPWVGQVQSWFPRKAGASWPIGGQGPRCHGATCRHDLFWQSFLSP

SEQ ID NO: 1001018 - protein, 106 aa, Homo sapiens
MRVVTCVSGSGTCVRACLPTVGPLLRKQPASVHKGRRFRLERETCERASFREKPYSPKLEEVLEPGLQKVCPLVRESLFFGQIRRHVLKGPPWNLGTSLIAEVPQR

SEQ ID NO: 1001019 - protein, 80 aa, Homo sapiens
SRNRKVTVLYVLTLFSVILTAVTGSEGEMVHRAKAAREIQPLNARLSTSRWPLVVVNRVNQTIINGKKGQWTLTRCCKGR

SEQ ID NO: 1001020 - protein, 154 aa, Homo sapiens
MVDSMEKGLVEVIIQELVVRRTIGSYTDQLQRWKSHNRPDYLLTLVDDDFDKRSEEGRCSEKGLEENNRIPDESGRERTRKVTEEWQEQLTCKVTESKQGDVALQRVCHEGRVCQRVSDEPEDGNGDFSALKSVQPGHGNHRAKESDERGDDEN

SEQ ID NO: 1001021 - protein, 336 aa, Homo sapiens
GEPGFPDPGDDGPGMGMEPEGVVRGVTWESRVSTCFDDMNLLGSLLLRGHLSPYGFREAALPILVRRGAIRTLGNQGAYDGDYVSSSNLVTWENGPDYAISISASMIGNENLNKPAPGRCVPSDRTRETLARVQTTRQVVMATSGRLLVGRLHVEQTLISVGAPNRLTVAGELPENLAAWERYTPTSYERVTHLDTKWFQTDCFTAGDKAGPPKLDAKNRCVTRNDRLRKMLTRQRESQREPQDPYWTLISRKKRHQTAGNGTARDKTQGVVQGATKWPFDDCNLMEVDTKEQGTIEGGNHPCRECSVPTKGTDVRTLGRGIRPSSYNAKWNASDA

SEQ ID NO: 1001022 - protein, 228 aa, Homo sapiens
DLYHLLVGLLLLTVCTCHGRSPAAPEAPAKNVGMAPMSNAGTLPTQHTNNSMHAGFEPVETGCPLILLLQSKPEALRASGPLHQPPHAYSLTLRAPSLAGARSTLLRTNHASLQLVTVYQCMPPLDRSLCSRLSTTPSSIVLPIDATQRGLQMPVSTIIARARPGTYSGYLIGQICHYTFPLLVALLQRPTMPRIWSAEPQCRNRVNLIVPILRSPACLWCPFTSSVA

SEQ ID NO: 1001023 - protein, 112 aa, Homo sapiens
ASEASACFNDEAEYLLSQPLCGHETHSQWTMNCKASYVSMRRVWPHEVAARTLWVNEWKGLCGPEISGGNDKLGIPYEGSGVLTPVAVSCLLLSNVGTSCYQTNGRYLDDSK

SEQ ID NO: 1001024 - protein, 134 aa, Homo sapiens
  misc_feature (37)..(37): Xaa can be any naturally occurring amino acid
MPLPVGAFASGGLGTANFGSGRAPRLGNPVATGGTKXREGDVLTGATLARRCLIAPGSVVTRKIQQRVGPIYLFKSDFFLPKRGAEKECAPQVAKTNLWCVRHMIIINRAKTTLATGRHYRAYKHFYPTGRSVL

SEQ ID NO: 1001025 - protein, 249 aa, Homo sapiens
GKEEKLLFGEGFSPLLPVQTIEEEEIQPGEEMPHLGCDPSNVESPPFGRVALSLAPIVSKRNDLTPVEDSSQSPTPMTQEVLQLGLGPQPGCVSEDACDSTHGMRRDEEPGLRRKQHHTCITLCGSAGAALLRGAQYFTSWAAELPVPQRDVPLDPVVPGSSVTSQGMWEDLFTDIPINETRATSPRTPSKFCPPQNAHESWRLTPPGQSTGDWISAQYKPPRLPLSPCPEPLWADGSQDHSLAKCSPP

SEQ ID NO: 1001026 - protein, 107 aa, Homo sapiens
WYRLGPGTRITRVHVVCGLGVGRPDLRASGYRLPLLWSPAPCPCPTLLRSPGLRALSAGLCASVRRCCCARGPRSAPAVTRVKPSFKGASSVTLAPGMAEVSIRTMS

SEQ ID NO: 1001027 - protein, 86 aa, Homo sapiens
AVSVSRQTARSSIKLARSLDRPSGPFPPSIAWTTPAPTRSSLLIRLRLFLFRRLEPRRLSGLMSVDGVESPSPPACMGIDVTAAFE

SEQ ID NO: 1001028 - protein, 118 aa, Homo sapiens
  misc_feature (2)..(2): Xaa can be any naturally occurring amino acid
  misc_feature (13)..(13): Xaa can be any naturally occurring amino acid
  misc_feature (45)..(45): Xaa can be any naturally occurring amino acid
MXACGAHFSEPPXWRKPPYFWGKKGGGGPPPPFFGGGGEFLGNPXFRPPSEILHIGSAPRELGDRSRKKLNKASGLFAEKIKSKNKGRESAKRQRRTGVSARRRGRREAQSSREREQL

SEQ ID NO: 1001029 - protein, 314 aa, Homo sapiens
MDGEATRPLAPGPQRPPPLLLWHSVLLLPGHVVPWRRSNRIPNRALYITQKWQLVHPFTTRTVASHTAETIEIQDCRDWLCNQKRDIQGDLHELDGRARPGLQPDSHAHPASPAGLPAAQMRQCPVPLAGSHPCPRVAGPIAHLPPPFVHIDSPPSYIRLPIATQWTLDRRARRCSLEGETERGEKGAHGRYLQINRAEAQTIRERRPLPENHSQIGKQAKHTNYEDTLRRCTKGIPVTPCTIRARLRDKQSAIRRCPKQKGATKADQPDSTQTTLPLATQHRTATEKLDHKRKSRRTQRNTKHRSDSSTNKRT

SEQ ID NO: 1001030 - protein, 140 aa, Homo sapiens
MVGITIFVVVKRISSRFCYTRLCKMMHRSELSASERLISRGDMAGPVRNRLYGVRWNSYYIRRIQLDLKKTLYLVLWIAWPLSCILVWTEVCIEYVVPDEEVMHDGMNGCRVVGAPESYHEKSLLTMRTPEGRQKTGLHR

SEQ ID NO: 1001031 - protein, 157 aa, Homo sapiens
MVSQASVLPAAELRRLQQLPTENLPSGSEQSENGPVPTHQCDCQPKLFGDVVESHGGYGEERWSRGVLANRGHEMCGQEARRAYEGNSNDIRVAGNREVSDDSKPDSGSTREEEGDDEGSAQQQPDLGPLRTTIGATKERTWPTSRQSPPRPHHEDH

SEQ ID NO: 1001032 - protein, 137 aa, Homo sapiens
MNLKKAQKMHRTACVIKTPLYPCQCEHCLEVPLTRGRPRIRKVEANWSSTTHTLKGQKLQRKTARATKKTKRLGHDKTQTEDLTVHITTRHTRWSPIASDRTSGPPKRNRPKHRCKVRSNGYEEVNFHCLEKTPHDV

SEQ ID NO: 1001033 - protein, 145 aa, Homo sapiens
GTNVFQRARGSGMCSNLSLDLGEKATSHYICRFLDPTHRVFARASRRPRASPSTGPAFAHCCGSRGGAWWLMIPKVAHTSCRLRSFSGDLGPFGLCGATGGWVTLDLHPVRVSFHKRLTRPQIADRTGRGCVAWSSIPAKGPRVM

SEQ ID NO: 1001034 - protein, 356 aa, Homo sapiens
MSQDEFSDPSTWRPSRFVARRRSGRHRGKVKSFPHGMTRIQGRSQARAAPYLGIRRLASDITSRDGKVRLGPGIPQDEATIGKSVWRLVNHVVRREHRIECVVGMVGYGGKGLRGDSGGVHRNMYLSRSQYRETDVTKRQFFHKRKSATLGVVKGEEKAMLRAKVEHGRENGARKRVWGRGKRSVVDEVEILRRAIEEATGPDQEINAGSTYGRDKQLGIDAIVFTYSADTMTRHVWPHVELGGNPMRRIGGMGNGLRSAERPGHMKACGGGTGLIHVTTRGPLMTPQTSVMGPGYRKNVVQRSIGKVESITQREGFTETGGLPIPSWGLPMVNVGLQPKKHGAGPWPERRRGNGG

SEQ ID NO: 1001035 - protein, 161 aa, Homo sapiens
MPLVGLRYAQWVVDPRAPFYEGGKPRSLCGFRYPEGGPFTGDDKARTKPGCAPVAGFRIAVGPSCVGAKVGKKRGPLCGAKPMSHMVSVVTPRERGGNETFACAHSLAIHRSGDNTPIKYHSEREFSHIQGALSKHYGRTARYKDGAHMTRCYAGDQVDRS

SEQ ID NO: 1001036 - protein, 186 aa, Homo sapiens
RTFGWTPRCLANRGRGRGGGRDAGGDGAVVKGEEDEGEENYAEWITLTESPEWTHERQPREQQAPWPHPPSAERRYTTSDANEHQLDPPYDDARNPTTGDTQRQHKTHTTQTNTNSRQQTQTAAHTTQTAPADRTNRAPGSPHTTHETKTQAQANKQTRTTEPNTHEQHRATNATDETHEQGENRT

SEQ ID NO: 1001037 - protein, 101 aa, Homo sapiens
MRKPATKRKQELFFATGQPHSRVGRAPTRAAGKNEHEVQGPERSGGPKGSVPGASVELGAGAKAAGHRGAEELDGPRGDTGGAGGRLGRALTSRCGGHRTS

SEQ ID NO: 1001038 - protein, 251 aa, Homo sapiens
MPNRKKAKGNERGSGPSCREQARVLDSGESACFENKAYRILAELDQDSPVPNRDLSRFVKWTRYIRLHRQRAILYKRFKVPPVINQFTAESWYRARQLLSCFNAVPTKYMTMMTIAREECRELSVPVADDTNGCMGKRGLSSTERYHLSFDACELHHLITRSLWWHEANEKSQSVVVIAHDGDPSRSGLSSCLSCVVQLGDPLLPYHRRRQRTGTSKSTGQTLTTVAFLTGDTREDKGAFGVMLVESYQDH

SEQ ID NO: 1001039 - protein, 211 aa, Homo sapiens
LDYHADDRKLYNGLEAKGRQFGSKCNSGVPGLPVCIEPVSLMCSTAQIFFSKNGKRVVLFTIMPMSPDVTCSQQLGIALPVVNVRCGCTSNVCSWDGVRGLTSVLIVGWTVTSDECGCLAYMIVHDGLCAPLDRDVLRRNVAYTYSLDCWAVPNDPAVHFSTPEGSLLPFGRDDRVSHLYDEMCYSQTLKSEATCDERCSQEQGAPCGLDP

SEQ ID NO: 1001040 - protein, 246 aa, Homo sapiens
MTSVKRRWVLQAVPRGTGTASFTLTLHSPRLASTSASRPLGQESPTGPAESPSYSPGGSCGVPQVVDVARDGEGADEHALQLALSALLSRTADNMLRSSVERVGAGWELERLSTLRVPPRWLSEAARSSDPSIPCAPGSSPVPPRVGRSGATAPSGAQRCPWPCRTYLSFPLPLRNHKTHHTPARNQNTLSTILHNIPTKKMFLPTVTETLKEQPQAGPPHIVPVAIPRTMVHIQRIHSSKQHFPY

SEQ ID NO: 1001041 - protein, 112 aa, Homo sapiens
MWNSLLTLILHAANPKFLMDLLDETNFSCIQYEDLTQVKRSGRIKRQKALMKSTIRLSTTPMYSWESCCYALLVTFSSHQAYGSTCEAVDGRSSMVDQAVHMDWVDGTLMVA

SEQ ID NO: 1001042 - protein, 375 aa, Homo sapiens
MSRFGLTTDLLLVSLLLLGMYSAEKPGREFRPRRDDETLHRDPRRSIYVSLRLCPYSLGIPSVGLSVVRHRRNISHCETWMRNRKGPGDRALPVFDLKGTHLEATRGMRKSSGAWREFPSGKTCGTKNTTEHRKALPCARNIMVFALGSIEEGAFIERDLRDGHGVRSHGVTTRGGGGENAIERVRMKNCRNVPKTSHSLGCLASPLKEGVHPGWVRTRQTEKGFARNGMRVGTSDENRFETQKTLDRLVPPGTLWQKARETPDKELRWRTTRREEKALRYALSGGRSVCGPTYLTWLPNTVKRSLFAQDMSFVSENIRFSEEGEPRHIGASGFAWLVTVMAFHIWVKGPPKDGTIRDLVGEVRGRITLTWPALR

SEQ ID NO: 1001043 - protein, 110 aa, Homo sapiens
MATLESEVRVTPTEDRNHYLSRPELQECSVLRRARRDSGKLTCMYVHDTWVGGISQQAHACTKLLVLERVCAHLRRLVVVLHLHRGRSVSRRRLTKHAVEKATMPVPERP

SEQ ID NO: 1001044 - protein, 67 aa, Homo sapiens
GLYIAAWRSLTHRRDAQEDRSTWNSRLTSLDHQSRLMWTDYPRYCFIRGALQDNVGAPKPRMHGIAL

SEQ ID NO: 1001045 - protein, 310 aa, Homo sapiens
AICKSEQAEVSCEPVISTQDWSFDGAALMLLASSPNRGRVAWLHNNRILGGWLPCNSLWQVSRKSEENLILEEETTLDDPPSKPSIYLTEIEVLDVRENPYILVMSDHSPQTCARLQWLQALDVLRLLGTQTCWRSGCLVLSTSGLSCCQRGECGPRGTHEWLRIGCRTAAGAKAFRSRDDQAKQVLKGMSDVAQEKNKKQEESADARAPSGKVRRWDQGLEKPRLDYSEFFTEDCGPAARTDHLADRELRACAGGGSLPQASSTRLTVHCAQDLFWMTAVPSMGDLLLDWREATSTKKAVCNHAVNAQY

SEQ ID NO: 1001046 - protein, 73 aa, Homo sapiens
ARSGGGGGCSGGDGFRPPVRCNADLPGRGGDDRGRQGHPCASMRDQWAGRQISRHEERGEMIGGIELLRLAVE

SEQ ID NO: 1001047 - protein, 83 aa, Homo sapiens
HTPCTLVIADRMQRCKITALVTQHNEDQGIIAPPESQVRPVWIEQAPIRGLSHVLALHSLECRIDAKLEEYARVQAASNRLTR

SEQ ID NO: 1001048 - protein, 330 aa, Homo sapiens
  misc_feature (113)..(113): Xaa can be any naturally occurring amino acid
ENKKNPASSRKNLCVRGEEKAVSFYKGNHNEAFAARMPLTWAESDSLLGKIAGLYAEDVTTPTHRMLEESHSRRGRPSEFGPVSTGTTSAKDVSQSLQCQSMVGRAATRKALXVDKHMLAALNEGEPYVKPMRWLPKAALREARSESFIVGKVGENGYVEIEDDIGRRAEMNELMEQTSEIIDVCRVRNSQEDACTIEISNEGSDLSVVERAEVWLCLKVPKANREQDQKVSIRLFQQQKHPQGSLDTGEEAEEVGFKGGEEVNVELSDKVSKTLREKKHHGMVFAWSPRAFQGVAGTRAEKSLDVPDCLVTRCQDKLRQGGSPGQEKKE

SEQ ID NO: 1001049 - protein, 283 aa, Homo sapiens
MRVSTGEYHTWYRATNQYPKTKQGRKNTGCPMEHYTDTKSRDRTGSGPKPKNTKPLTGRIPSHEAKKTRRTRKQTCGSNQTQRTRRQGRDNGEKLQYIPENNKSYGHKKNLNPTMSDPWDHRRDEQRTKQSAKAAVSTNRGKKPFTVHTNNANKQSEDDIPKKSDNAKDKSRCEKPQNKSNDYAPMKHNYTRKSKKVNEKETITPRHKRCQGTKKQHGSGRTTMTIRHQSARKHKEDNCKEDGAPYTRREQQHRSDPKTNEDLQHNHTNAANMSSNDNQNNEK

SEQ ID NO: 1001050 - protein, 64 aa, Homo sapiens
MRDRLLRGSGSPRITVSCVPKGLGQNKFRNEHFLKGRHALDAESARDELPLGDGLLESMRIDAG

SEQ ID NO: 1001051 - protein, 299 aa, Homo sapiens
  misc_feature (183)..(183): Xaa can be any naturally occurring amino acid
TCADREQLRDIRPYSDLCAVIATRQHRTIEGIRLMNRGDILRLLGSRGASAVIRELPIRPNYLLRNCYFSPSMRRQNSKLEQTFMHDRRIESVIKVMLTLLVLLARACWARTLPTKLRWVGCAPILASTASLGLPIMADNARSLTRTADCCSAPETKEACDVTCLSFDDKMKAHSPKRERITXRVMISDRLNLGPPDFVTATSSLGFYLVPPNRVSHSASLLEGARRTLPVLHPFHMSLGLKISVQAIKHLCGNRGLPLGKQGNPSGKAMGLISRSRLKFQGHCLPSIVPPRIPWQSDR

SEQ ID NO: 1001052 - protein, 256 aa, Homo sapiens
MTVRIRIQNLHTLVAEDGIAGYAPPSWLCPSINVYLYATRTDSRELGHVDLLVFAIVRANMRVVVAPCAGGGLVGAESCESLARETSLVVSCRREDERSNTLKSPRKIQCRKHACADDTKIMSANVLSPVRNRSANTRKVGPTSKYVFRSRPIGKRLLVGHRHVQEASVVYIYVTTGICNTICGDAKIIRQTPLVKWGLTAQTDTARCETPAVSGQKLYGHRAPNSEPHHCFVREIQIPDYSSYYKSLDCGRCFPL

SEQ ID NO: 1001053 - protein, 68 aa, Homo sapiens
APSLGPPGGIKGDGEVLEAIWYQRTTTEQINKQATIIATITLRNLYFYLRLIYSTLKSHVRPPSSYKR

SEQ ID NO: 1001054 - protein, 253 aa, Homo sapiens
  misc_feature (143)..(143): Xaa can be any naturally occurring amino acid
  misc_feature (213)..(213): Xaa can be any naturally occurring amino acid
PVHHTDHALSKNYRVSLQDVIHLGSYRISFTYQKRSTGTQGSECHYLCTTGCPHRQGMHSCTCLTCSFSVCRCYQMPRSSIVCMYGWMAELTINWCGNAGRQGSTNDAHARVFHDASLMSYFSQCVVFGSREYVIVRIHANQXYSCIIATYCPIDYLLVFAVHIIVRVGLRPTKAPCAVSLSVILRHLLETVLGGTHKFKGIKKYIVLKTVGXTIAHAAKCEYQGTWGKHGKYLRKVRRRRTGPVPSVRKPHS

SEQ ID NO: 1001055 - protein, 76 aa, Homo sapiens
MPSEYGLCGKNGFSLPLNDLPRSLERMTPEGTRAFLEKEPSVRKTFRTLFTVPPGKGSLESVPMQAEPQVRESTSS

SEQ ID NO: 1001056 - protein, 166 aa, Homo sapiens
MSGCRVSIGRAKSSGQGEGRWERFFKGYETDKRYGVLKRGRRGWDLECGGVQGTGGMMLGLLIVMEEEGLSDWVTIEGVLGPRFTMLEGVSEEDSNGNWSSGSLGTSGTDAPFITAADLVQELEGSRVPPYEERGIPYGEHKLAQEHKGSKEITAGEARGTVDRNR

SEQ ID NO: 1001057 - protein, 107 aa, Homo sapiens
MNVTAQRLPRRVIEEGTSFSPQKSRRGRPTSIMICDLKSVMRVLDAHFSRILMPEVACETVAYNWNDPSCSGNITLHEAAVELPRKSGSVNAVKSALDSDDSSKGFD

SEQ ID NO: 1001058 - protein, 427 aa, Homo sapiens
  misc_feature (195)..(195): Xaa can be any naturally occurring amino acid
MISAVVLVRWRNEVWVLLQKARVSLRGERTDLALGPDRVLLPTRIGAALQDDAGAVNGWGEWNCNDTGLTILLVPDGGTRDDVERRTAIPQGAVNVRLNREGTRHSVTSNVEIAHCGGTIIWQQSFYLPEWKAAVVGRPRRGSDLADVHVCSLRWAHYRNNSEGNRKMSNEEDFEVRMEITWDFDGNTVLEKLSXPKVANAEHAFAMSAYSVLGDINHPMAYTGALRGAQLRAISGADFHSIGALVSEIGKQAGFPSQKKVMVGVAESGNREGGRGPYGARFSVRREWVQQLLQLAGLLWGIFYADLGPLVEESLGEPRRIIHKTLLRKCGNESQFPNFDTIGKLPKARVIVKHDERLSMGRFVEERGLSQTCGCRETTLTGVSGFPNYLIYSSATYNGLVLAYNKAYADPYGCEPFFADTYKSGIE

SEQ ID NO: 1001059 - protein, 272 aa, Homo sapiens
TARRGNHAHQHTDSHGSISEDKGQLSSIFWRRTEARGQPSAILRIGVGVDVAGFQVDPSRAHHSSYVEPEVLSPEAQRRYSAYSKRQPRQTLQGGYQWSPRWIPSMRLLAYSDVCMRAASAASSYDNAHTWKNTRDAQEYNALGKCRVATDCRPLSYGPFGNEKSLGADGLAYQTCIRGRYLWRSQKNNWGTHLEDEDWLPHGRCIRTPPVEVNLNSSFAHLRVPDRVREAPTSWTQEEQSPEHAEAFPDGNPFCSVRSLPICAHTLEANFD

SEQ ID NO: 1001060 - protein, 176 aa, Homo sapiens
  misc_feature (31)..(31): Xaa can be any naturally occurring amino acid
  misc_feature (88)..(88): Xaa can be any naturally occurring amino acid
MIARVCQGDQQPKFLCNYVGAMKNATISLVXGGAAGNFTARHRLETVQLNSLLHNSHTRNARWLDHWDSRSRTMRLDGYIYKRPIFWXYSLTLANDSVLGVGGDDGVTTIHDCAECAICLMRELVVRSYDCLLQSEHLGSQGDCGTGFLDRRRGAPDSSSGRAWSSMRGLEDRWVG

SEQ ID NO: 1001061 - protein, 338 aa, Homo sapiens
GEALYLVRVCWGTMDVSLRLATGCMCLLDCAWSWLGLTCSSELLEWPGAVTGCCFDLRDGGCCRLWEACVLVPMSWWVERKLEHMIQKNQCLFSNNQCKGFACCLAYLSESQNAGTLTRAKNIAQHTADRDTQQSNGMETITQGETEEARLRSAGKGYPCKTLYRYVAELHRTVPMLMSAASKHNEPSHQATSGIIPCGQIPTAKGNPFRKTQALGRLECDSGQDPIFGPDMSQLTVTAQPLGPSWSLSHQESTRCLRQDWATDSLSIRVPGLKFHLRWWLPLSGNGRSLDGQCTSGTRRAYRQAPRADMEGIDRIATGCHTPRHHKPSLDALQLSRP

SEQ ID NO: 1001062 - protein, 291 aa, Homo sapiens
AVVYIIAVLVRSCLLHEAVCKTMRVLKQAKGERSQQHGRVPQTVGLLTEQGSTSDRDPRGIGSWTRMGSRGPAVTHSKTATSIEVIGMHIPRQDLSLEMTHSSNRLGTELSQAEVISEPQASAGWHAGQFVREPVVYSVCPTAVTLGRVLTRRTAVVTLSGAPISRCSLAADVGELARLGSRVSADLVTLPGSELGLHWWPGHVLPREGLPLRAYSRGFLPRPRAWLPWEAQACHVPQHALGAVVRQDVVGPSFPTGFQCRGPVPGKGRLGCLRGLGVCGLTVLVRPPKAP

SEQ ID NO: 1001063 - protein, 124 aa, Homo sapiens
MILSSVEHRRQSQGPDRQHHRRGTEQGVKEPIRSHQVYARPFDYDQRYGFPCEPGKTHRLLGGPKDGRRSLTSKTDRPGIRKANHREQTMISQKRYQIKAERVEKDKSWKDIHVDTKEAEVEKT

SEQ ID NO: 1001064 - protein, 297 aa, Homo sapiens
MSTLSQGWILMLLKPAVHALHAWASLIPLYVRYSRGLACPWNPHITVLWLVHGRDWCLCGALTCSNMNAGCGVLCSMHAMPGQVSFPEQLTQHKCDPEMCLETRLYFSSTELAQHASCASSQSEMLWQASFTKAKRIEAQQGSSEDDQKGPLQGNVSNTSRATHKAKAATKSCERDHWSRKKQKATNVQRDTGHGAKLDNHGRPRETTRTAKSTEGQQTTGDAYEKPDRALATAGQPGIRRHRSGRHQTTAEKRGNGIPGKVTSNNPGKRTETITKAQDATIPGRQTTQQEDLARDD

SEQ ID NO: 1001065 - protein, 187 aa, Homo sapiens
MTEVISTEVISESRAQPCSPKPIRLVQDLPEELVHAGWEKCWSRRENRPYYFNRFTNQSLWEMPVLGQHDVISDPLGLNGPHCPKTQCLVETPPAENKPRKRQLSEEQPSGNGVKKPKIEIPVTSTGQSVPSSPSIPGTPELKMWGTSPEDKQQAALLRATEVTVDLDIQTNAVIKHRGSSEVLTPY

SEQ ID NO: 1001066 - protein, 349 aa, Homo sapiens
  misc_feature (104)..(104): Xaa can be any naturally occurring amino acid
SSKVRQLELAKNRLYQAIMRADDILAPEVLHGVEFRTACEERRLLRHGCVHIFIGTCAWTSRVIELSRQGKAGEHCLIANLKLAAGKLSNVSEPLWLGEVCQLXTKEGDLPQVERFFKIFPLLGLHEEEINEQFSEYLCKQVASKAEENLLMVLGTDMSDGAAAVIFADHTYSSALTGIARICWRPTNHQWRPNYGPGRLYTLITYLQVDMCTDTVGHTSVAQLHASQRGLPSPTVAGHCCEIRPCFRTYRTTTNTDVNPDDPVTPVHALKDPHLQFEVTRLRQRTQLRAGYPSYETAGHTRHLISRGLGSTSPVVLKRRKKRRRATPAQGTLHKPTSHNRYFTKRRAA

SEQ ID NO: 1001067 - protein, 78 aa, Homo sapiens
MATLVIAGLPLTDYRRYKPLLESELNPYTHFGFAPPFGDKVVRPKGNPPRVRTKDYDETRNVDGRHSGEDTSCGERIK

SEQ ID NO: 1001068 - protein, 104 aa, Homo sapiens
MGDWTMETYFRAMAYAKPIFLWGHHYSNIPNYPTAMDIFGIRIGSKKPPPSGIYYGDAGPIPRYRFANVYHSGYILTLYKDKVTPHSDYHLIYDSRHWSHSKYL

SEQ ID NO: 1001069 - protein, 130 aa, Homo sapiens
GTWRQLVSVSAPGGLKNLEAVPGWLLRVDTPEEEAVDLSLVWKHVLDSCICEVQLTLHDQHIDFQQIIATQDISCRSLASMSAGGMPWLGQAPLSAEVSRYLRNSEGSMSGTSGYQVPRRPEARTVSRVP

SEQ ID NO: 1001070 - protein, 207 aa, Homo sapiens
KVYKMFASRRKQRYWPFSMDCTGTEAHISSCKLGPQVSLDPMEDVTCINDIGSRGRRLCRLGISSALTDPTRFLVKRTKREQPLCATERRLPTYVGVAAVEVAPSNGRAGVLTVYARIKLCDPAALGQWVRHRGQHRGLRARGETLTRKRTDTNTTLAESRRSNGRAKARNTGNHEIRTVRTERMPRGDEHLCRPDNLHRNTFVRHT

SEQ ID NO: 1001071 - protein, 281 aa, Homo sapiens
GISLSTSPYWERLLGQRTSLQRDPVAGSEEAPHGRCNYRRQDLGIQARPGSLRGLFWDVGVSELQEPKCVIAMVTCRDWPIGGRRATRAALSRSSQHECHVCGICVLTTLCGPDLMPAVVCRGPGLREQSPRLWADVPSGNDQVPSCWDDVQCTGSRRPRTGPSCDVPVAGLKEQHVGHERDCVAVCPVPNETSERPYILEASLMGSVVREAPYVPDRIDQPRGAATLFVQRECAGSEDALGFCGHIGLVRELTIVGRAMRPVGNRSSGSVQLFTYAGVRL

SEQ ID NO: 1001072 - protein, 357 aa, Homo sapiens
AEPGLFLALVAGSKNGIRICYQLVAACGARPGPLAPRHRRSRATRVAAHRRPAAELAHPSHHVFHRVSLEKEKMSESELEVQTQPLASKHGTPGRALRSWGRRAWPRKQASGESRETAARSRESRQDAQPKCQLARETSGTDQGEDKNKVCCQVPVKTRQKLQEGNQGADPYKAGRSEDRGAASSPRTPSAAREPVHTSDDARSGTFIEYAEAVSVSGVLTQNLDCTDQQWGRRRTYKPKTTTRTRHTKHGEGIRTKAKAEPKKPWERKHARARELNSQGHPKGTKKGSGEKDTRSTKKTQRQTDHGKTGRPDARKRHTRNEKKAEPRIGGENAPKNTQTNKDREPAQRKDTTRPHQ

SEQ ID NO: 1001073 - protein, 123 aa, Homo sapiens
SVVRRLQETEMTRIIWELITEKLIFPYVELDLHSYDLGIENRDATNDKSPRYAAEAIKQHNGGVKCATYTPDAKRVEESQSNHMWKSPNGTIRNILGGPVYREAIILQKYTPVESDMGTNLSS

SEQ ID NO: 1001074 - protein, 260 aa, Homo sapiens
MPKGKKAKGKKVAPAPAVVKKQEAKKGGRIPRVLKKGLKILGIWTGHSSPKEDLTRLCEIGPAYIQVCSRQKKPSSYYSGCEKCAFRANLTEFHPRPRGTAKKAYSRAVSLSCGPHKVHENQEDTKSREEEKSEKTRGVAPGPEKEKGLCGPKRGKRSQKRKERTHRVPSRNPEEILNKPVTPTFGCGEHQEKSLQAVVCGDLCKPTDPCGSSAISERRGWHLIVVLWPRGVCRAKTRGGAPLIPVAFNTEGNTGQKTVV

SEQ ID NO: 1001075 - protein, 326 aa, Homo sapiens
PHLHQPTQIPECPDSCPGPDPHCLPVSNAWDASLCLAALLTPEHVSVLLTLSPCCPFPVDPLPLLGSCCQPACAMETPVPAGCCHPAAVGWQCQLHSAVCPPCITLAAVRRRTCSELNDLLAVYIDRVRSLETGDTQGLRLRITELNEVVQPRGVLASQAAYEAELGDCPQGTFDSGKPKERALPAAGAEQTCVRSLRMLKCAQYQGTDGGADRLASGSGVEGTLGPLLAWNSQMKAAHCRPPGPTSGQKCHVAGRARPSLNIPREPTDVCPNAFHRHAPLTRVQAPRKATFTGMDTVHVPRVVTSLQKQVREEPVRSGTSRLSEV

SEQ ID NO: 1001076 - protein, 111 aa, Homo sapiens
MHARLVGNARSVVPFELIGTQVMRHKSISISITSEHRISSEEHVYIRAKAKARVCIWSRMRMGDPEAFVATHTAFPDHKLKENPKALKGPEYAQRTFLCDLSQEEQDAQDL

SEQ ID NO: 1001077 - protein, 148 aa, Homo sapiens
MDNSRTLLGYGRTPLHRLPLVVTHGTPLCRHHTDGRPAPTEHEQPHDTPPCNERPGHTTPWAEKDKPQGAAYPTPPAIPQQHSFPQTAHHRMHHSPRRPQLHTTLSGGPGTGRRNTPQARPTQTAEQRRTPKESAPRAVTHNKRPVPK

SEQ ID NO: 1001078 - protein, 266 aa, Homo sapiens
MPTGKKVKVKARWLRSQLSWEKQEAKNVVNPLLDEKAKNFGIGQDIRAQERDAHPLLGNGPGTSQACSGREPSSSKRLKVPPAINQFTQALEPTNRYSAAEAGPQVTDQRQSKRRSRDCRTRAEKKAAGNTGTSQTEESHLVHSRQEVNTVSTWEENKKAQQVEIAHDVDPIELVVFLALTCVCNNGGPLLHYQGKGKTGTSSPEEELHHCRLHEQSELGRQRRSGVKLAGSYQGPTLNDRYDEIRRSLGMAMSWVLRSVARNRQR

SEQ ID NO: 1001079 - protein, 192 aa, Homo sapiens
MWRQNEKPGSPALAPEGPPPSQALSLSLGQWEVPVEQFPRKKLTLSSFPFHCKCCNVGNNSRKKEPVNAQAQGALFLGTGHPANGLPLGAFARTMELQEARIPTCPLGQPQDKQMERTPKESNLGYPSPWEDSRSTTPRGRESRDKVPNPLGPLGLVTHPFSKAHDLLEIDSTKPGELLNQISEHPFQHVST

SEQ ID NO: 1001080 - protein, 174 aa, Homo sapiens
APRSPGDLSKYNFENKYGVPGPALCTQHILSQTENKVPVHQEYPGGVPAFFRDMKQGLHSLVEHQVGQRISPGMGVVDVENDCSISKVPEPEVLGAGRCIRRRRPMVPDTFSDARSNRHHRDGQRRERAKYRALGVLDPWIRGYPSETLRREEDTSSDVTIGISRENIGRTEQS

SEQ ID NO: 1001081 - protein, 185 aa, Homo sapiens
GQVAEAPGLVWTYLVGTLILRLLCPWMASPQHQDLAGQRLVVPGTLFPVSFREICDEVIACRCLYPAASPLPVWCIVRNETSAGRAIAEFYVSAELTSDQVRNHQLSGGPEGHELYQESFFCRDDNRTCRDDCPRRMMWAGTLHHSAIEAPIRSVLQPGFMGDVPVGVAPRGPQARTPRRRLNNK

SEQ ID NO: 1001082 - protein, 136 aa, Homo sapiens
MTISHYHSFGPLPHGVTLPLQSASACFHRINVADEGHMERVAGDRSSSVQATGRGHHDRGPKARRKDKGTDAMTDARANKGKPERWRERQSIMTLPRQKWAVGNGQHGHNGTQPGEQQNAPDCGGTEAATHQWGHD

SEQ ID NO: 1001083 - protein, 402 aa, Homo sapiens
MCVLEFQWRKQKDGSKDYQLCDCGPGIQTLRMWQGGIPKMQQAFVQNDHHSSMVLHAVPLQESYTLSLPGNHAGSTCNHMHSIEHPPATLPAMGQASSPRTARIHPRNLPAHESEHQDTPLWRCLKHLAAMGISTHDQLLHNPAQLYQVVRRHAMTGKTRAALHTSRFQTDKLGEQTQYESDNAVLGSDSIALSDTIHHHNNKTTNANVDIDPRLRQVKNPAKAKTATYSNATRTDVHAQDIKRAVDIGAGKSPSEKGEQTKTPLSEHSKDGTEPECGHNGKGNDTIGDDPPVEHIGRHAHTQSGTEPKYPSVNRIPAKGWQKHTGKRNPRRRYYQKRKNTTAIMKAITTKNGTVEPNIPRHHMNPSKRIQTDTGRVNPPIEDVYNEEDTGKSKYAVARTEN

SEQ ID NO: 1001084 - protein, 395 aa, Homo sapiens
  misc_feature (162)..(162): Xaa can be any naturally occurring amino acid
LGTEATDATCFAVVPGTRGVHPDMIRALTCRWKFDQRTRSKSVYREVQPEVKSACQVSALAPKIWSPWLVSPKKVGDDICLRHTGDCNGHCRTYGGKVSHSEQHTAHDLTVDAYLPLPLNQSNALNGTHPPTTSKRQARNSRLVQSPPSLRHLTSTLSLDLXHLARPHVLTSAHGTSAHTRFRYNAPGKESFLVEETPSIHPLKHSLVRNPDPHRVHVCGTWVRIGLCHLVCLVRNLFRIVNRIKFRLFAQFEGPGMGYDYALCNTCVRKVRHVLSHMGTQKLEEQQTQSYVTILTPGEVSTRVEPTSRSWPRQAGPLTDRQRTNSTQPETEKHEAAETDNNKRKATLHAPKVRVTSTQGQSSSSRGRRPDSRREGREAIKESVPARREQDGITH

SEQ ID NO: 1001085 - protein, 176 aa, Homo sapiens
GDIYFNNVCVPPPRSLCLLARMPADAHRSEISNVAGAIRALDFMAATTKLWHRGSYARITPDFAALDAFQCQVRNHEWCVLKQQAIPWLACADLRLTSAVLTWVVYLALNPCYEPTGHHGRLMASWQSSALMATSRCEHMHHTWGFPRILSSHVTLRTPHDAVSCALGLHPIDALS

SEQ ID NO: 1001086 - protein, 70 aa, Homo sapiens
MPVDEFSPRGVTQPCWETTSVAAADRGGIPTPQGVPTAGGSPFVSEDLTLRYKQAVQNTDGMFPHPKGNT

SEQ ID NO: 1001087 - protein, 175 aa, Homo sapiens
MALEDYQRMLGYQVKDSKVEQQDNFLKRMSGMIRLYAAIIQLRWPYGNRQEIHPHGLNHGGAGMAQILNMEPLSDVTGTLLFDVPGGVWECLMKQYQVQFWQDANSHQRGLLFPELKLSQAQDRWGSFHTPQAVLGEMFGTQGHPVPKGFLNFLLLGLLNVSITNNSRCCKRAHN

SEQ ID NO: 1001088 - protein, 120 aa, Homo sapiens
MRVAVTLAPASHIFCDQHGSGEYSQHHQTNLVLPATVTLSGKLDIVRNKNSVHQRNIKLWYWPGLATRDRVWTLAPERWPFWDHIRARSSYLQGFKAILPLSLLISPVLHFGTSGTLYQE

SEQ ID NO: 1001089 - protein, 226 aa, Homo sapiens
WNPSDQRMGRGLRGPSAGLDVFWSPSEKKVPSGVNNGFMGNTGPTWGSGLTECPKGPKGDPGFPGAPGTVGGPRDCKEIPQKIAVQPWGHVECPPVVKCDGPPMRGTRWEDGAPRETTPGRTQGLRWGSRDTCLRTPKEKTVRVSEIVSPEIYRGRNEGKPNKRPTQEETRLWPRKVTPRTVQGGSPGTCQRVWPRDDKQISHRANIITWVEGNKGKELSARDDTL

SEQ ID NO: 1001090 - protein, 214 aa, Homo sapiens
YSYKKFLIGRGESRDSGWQLQRDLRERPLSTTSIHLVLALELGSLYEARSYILLWKLCEPVSKDVALRANRVRGGMYLSAVPRSPSWHCTIVRGEPRVHLVDLCPQLLAGSVVQALQTLPRRRRSRRRPLYATDQIAQLSRHKALQGHTTRGLRDTPGAPCRENRLPKGWPREKHRGRAPRHKSEGLGVRKPHRKPWCGTTRASIHNPQPRATG

SEQ ID NO: 1001091 - protein, 178 aa, Homo sapiens
RAGAATAYTEEGGRERSVCDVCVCVCVCMCVLYLYFFFLVVGGATGEEVLDRGRAVELCWTRATDLWSPWKCPLEKGRRHAEGLAEANLRNPQIMSLWESWSPSMPHIIKKQRLLCTTFRQHLTDIFWSDWAGEPSPADVPGSAPDDLLHATWLVPYFQTVSSTFRPRWESRGRGATS

SEQ ID NO: 1001092 - protein, 167 aa, Homo sapiens
MVLSPLPIRRPFDSLSGNVTEWTDDIRCRSLAPTHGLRLCAGVSFARRIDAPWWPVIPLAVGSARAQATIGRDWVRSVRSEIAVLLCEAELCASRRQRGCATHSAAERSTQFRGRAISTHKAVDRSVDENSRGDSYFLPDEAAMMDIPRDAITVAGLNRMAPHCGNP

SEQ ID NO: 1001093 - protein, 385 aa, Homo sapiens
MPEAPDSAVASCVCWAWCCCVVLLLLHEALGAVEACMPYTGGNGGSILHGASSHNACIIGVDTEGRQPRYLKAMVRGQQCRKRRGKGSRKREAVRGPGGRTPTLAGRADKGELGAKTKFGDDNMNRCYESRGTAQGSPGEPSRGTIRWREMADVQGTLQFEGTKSKGLEAEINAGQACDENQGERKWPKSSEIGGNTRAAEHCGPRTSLSAKAGELGATIIELKQSGEDAQRGHNDYGESKERRTTPGATNATQVGKRKDSKTRVRTPHRENVGRTRKQVGERHRKQGRGKTRTNVGGKGGARLTEQRAAKRHWTQRQRERTQGMKSKEAKSKRRPRRDKLMETDARTKENPVIKKEERGTEHKEKQHKKNERKSKRGKAKRADT

SEQ ID NO: 1001094 - protein, 41 aa, Homo sapiens
GKTRRCPSQVTLPKNSYTLHSRDTQPNTPAPVPPAEDGIKI

SEQ ID NO: 1001095 - protein, 114 aa, Homo sapiens
GRATSLRHHGEGEGQESTGIWSYRAPGHRVPAFNSGKVDICCHSMTSFIGPQCTMVNMFQYDSYTMANSYAHRSKAENGKLDHTSGNPITSTSHGSEDTASKKFIVREQIARVV

SEQ ID NO: 1001096 - protein, 116 aa, Homo sapiens
MVADNRTPGRLAPTCTTERSPRTASSSTTQPMYPTLAPPTPPDTSPFLIQQQRANDARPPTPSTTAKYAFQRTTSYNLSNNPYNSTYLPHKHPNLAWAPQPPPNEPQSQTTACNPT

SEQ ID NO: 1001097 - protein, 145 aa, Homo sapiens
  misc_feature (69)..(69): Xaa can be any naturally occurring amino acid
MDGVVSSLWQACLIQSAAKDLKDAPPYIQWDEIAGAQLVHSSKDALDRPMTDEAWVLATAETLTLSTSXRHHVAFSGLELAWGIELLEWLDRLYWRDASVRNSASMPLGRDLFDDADALFTKRKVVGAPVREITVQGHHCDGGVS

SEQ ID NO: 1001098 - protein, 211 aa, Homo sapiens
MLLVTWPHGGPSSRCREQAVRSAAYARLDQHLLSGSDRRLRRTSTVCSRGELSDTIPDECTQSYRRMPHHRAHVCGEQARSPGTQASTTRHRSLQQHSTTQRVAQSSSVMIRAGGRSGSHALGKVSPGCSDYCGLWSTQTCGQGRPEGTFVAECAQGWNVLSVRDSCAGTRWLGRERVTDVFTSKSGTGWKQSRRRSKLRRCRNEAVLIVA

SEQ ID NO: 1001099 - protein, 297 aa, Homo sapiens
  misc_feature (207)..(207): Xaa can be any naturally occurring amino acid
MRKLAEGLEILLFLSDRLELSPSYKLSRDGHTPARSAGVAMLPVSLSARIVSPLSWGRQRAPWGEREMRLFGTRNFLQPSGTVGACRELPWNFVPAFLSDFHQKMSPMWSPGHLLFGELPAPPRRASPPGYETPGPGAATFRCVDTQKPVGGTPQQDYVRREKCEHPQNTLELPACVSQTSEAARLIGFLPRRPYINSHRGDLLIRXRPGLVFRPPLLANGPPWYATSPFCVTTRRGGAFKRPPFGKYHPRICMGPPNDDMPLKQGPVGGTPSDRQGKNRPRSGKQCCGPRPPHQRG

SEQ ID NO: 1001100 - protein, 100 aa, Homo sapiens
  misc_feature (13)..(13): Xaa can be any naturally occurring amino acid
MYFCLAPIQYPLXGRKQQKLNFNHEGNIVHNQAGQCGNQIGAKFWEVISDEHGIDPTGTYHGDSDLQLDRISGVLQLKAKGWHNYVSLVPNPMVGTSKEH

SEQ ID NO: 1001101 - protein, 147 aa, Homo sapiens
MTPRSAEVQERHLQGLLCDGSSGPCGAVATETLAAVRRSGWGCALLEAGGSQERVGAPPLLNWQAGAPPSQAQLQPSSHDCKPGHLCTLRGPASPPAPQAQLYLVPPPGVSPLPEPTPTFRNSPKKGVFGKGGLGKTPKGATRSGNP

SEQ ID NO: 1001102 - protein, 349 aa, Homo sapiens
  misc_feature (53)..(53): Xaa can be any naturally occurring amino acid
MEEDIAALVIDEWLRLCANRWFLLGVQTLPVPARFLPSVVRRPTYTHRASIGXAIVRLMNATPDVGLTAGPETHSSGITERLRRYRPVRALASVLQAWDDHVEKRSWSTTRFYNLDAALLRPRMDAPQVLARPEAPPETPSANRDEDDSVLCYETFISTPAHVRGPSRPCLSLYCPLVRTDWSLSLDSGVRGHLTTVPIYEGYALPHSLSVLSWTWLAWDLTDYLMKILTDARLQASPPRARAGKIVRDFLAECCATFALDFRAREIALRRILLSSWSKSSRGCRMAEVHRHLAMTRSRCPGGSLVPRLPFLGIRILADPRETPFIPSEVGLTSRKTCKPTRCFGGPHV

SEQ ID NO: 1001103 - protein, 136 aa, Homo sapiens
ERSGGLLPPSGREAGGGGAVAAPRGAQAAEEAASFFFPRTAGGPCSSPASFMARGSRDCCSMQEEDLSKSSRVPFALCKSIKSFEEAACAGRVANVKWGPKVSIIEDWWAGAQQACRVGPAARCLMCPRPGKLMNS

SEQ ID NO: 1001104 - protein, 131 aa, Homo sapiens
  misc_feature (36)..(36): Xaa can be any naturally occurring amino acid
MTIRLVRAVRSPSHSLSFSESVSCILYEIRDAYGVXLISAALSWSQYQQLPVLEGLYLENPEIKIRILGEPKQKRKLVAEVSLQNPSLLALEGCTFTVEGAGLTEEQKDGEIPDPVEAGEEVKVRMELCRP

SEQ ID NO: 1001105 - protein, 281 aa, Homo sapiens
KIPQKRFIIQVSLESRGANRKDSGVPKLRATEGPPNTLWAPRSEREGSAHPGEGLRLNTGVQRVLFENTSSRGKRLNHKYFSWITEAHRGALGRSGRDGIAYEIVGPGVNHPPFIQGTTGCSYTQQNSPPVCPKKRQNTWSSQDKLWHTWQRVRRDLKINLSEGAAPEYHLVEWNTKCARELCKGCGPTELCYDEIISVGGIPEKNACPQRTGQGGRPLGAVGKCDLPRGVWALQKKRSQRTRREAVKNLLQNAAVYKRGPMWETVRNATKVLRPTEGDAD

SEQ ID NO: 1001106 - protein, 376 aa, Homo sapiens
SVVSSAFILFIRLIVFPQALTEFLGNLLATNKRATKAKILKVASDVIFQLQNTFAVGPKIRYTALGIAGTWFEEWPRGLYSLSSANGDKRLRDVYLLWLNYCVHSSPCLKKIKSRCSPITSQFALASVRSPELPNVSQCGQLSQLFDFIAFSAHRLPKAAESRVTDGTIRPKEERKINRVPRLVWPPEGRLVNLRVPRQVVLARKSLLCTGFGSKCAHLKESSRNSRSSCDSRHVDIEQWVSLAIEETPKRASFAGAHRLDSQVVVHRRGPHLADKVSSSWARFWVPMSSLSHAVLAMVWWNGTTTLLCRSGSGIQSVSSTAEKSWAKVHSPKTRAIKTTRYYGAAIWAGNLRRELTRANSAESRKVRYSMRSLWT

SEQ ID NO: 1001107 - protein, 118 aa, Homo sapiens
PVRCFSCGKIVLTSKWEAYLGLAAGPEYTEGECAGCPGCLKRYCLAAGMRAGPRWTVIEKLLKLCEPHGMKLTPRVEPEYRRCAEHYGSRESMHGTRKLHEVVMDIRESWAYMVLDSQ

SEQ ID NO: 1001108 - protein, 249 aa, Homo sapiens
ETSSTQEPLNASEAFCPMEICMVPVVYPGPVEPGQAAWSRCYIVKRVVKPYRLYQTLKTSIRFCSYEHAEDTFTREASPQAEEIADRRNLGPPREVAAGNANKPWQNLESVLSHLEDFFARTLVPTSADSPWGAMPYSPKEFYELTWSLLAPYSVDQSLMRRPLVCAVSSEPYFMADAFSRASRLLLAHGHRRHGSQGHRNCGEDWFRPKLNYRVPSRGHKLTVTLSCGRLPSEPRLGRLHLVPGTSDI

SEQ ID NO: 1001109 - protein, 225 aa, Homo sapiens
  misc_feature (1)..(1): Xaa can be any naturally occurring amino acid
XSFLENRSWVIMDLQSEYLAMLPGVDWEKSGRTLLRRERSLREAQSRGTTWTDLITFTLTLSLVERFEEELLETPSVQDLLPGRDVVRAGAGGALEILERRLRVGVHDGLGFVLRPPGRCSWCLRMGVRLTRSAEVQQESGLLFQDQIREPSSGPEKPPPPPRDGRPPAFAVIFQLEYVLQQSCRSWTGNAASVTYSVQNWHACTWSVGCLEPLVGTLILEWLNP

SEQ ID NO: 1001110 - protein, 286 aa, Homo sapiens
  misc_feature (89)..(90): Xaa can be any naturally occurring amino acid
MECRATSSHRTKGILTHSLGCNTSVQTRACGLATQLIHLGGESLVPPTYANDVEGHGPCELSSSVAKAFLQASHGKPEAALSLPADSTXXWDNMTSNSRLVLLSMNPRGDDNSRQSHCFRGDVQYSSAIGDLDLSVATRNLPRPVEPKFRESAPCVKRAPRMGPFEREPNQHGNCAQIGSGHVRGGWQLAPISNNGSSPHCRDALTDKPRPAIKVASTYASPWGRGSEPLERRHAFENGFNAPFRDAKEGAGRADFLNARRLCSQRPTFPPLCCSRQTVVAKKFRG

SEQ ID NO: 1001111 - protein, 64 aa, Homo sapiens
MGGLNFLAQWVASQFGQFLCGPRVSPEGPWYLGGSVHVDACAGGPWAPGPCGETRGVSFTLGSP

SEQ ID NO: 1001112 - protein, 132 aa, Homo sapiens
LDCRARPDAAMSAALFSLDGPERSCALAWRQPGAAVVARVQVSLGHEERKEATALDVTHTVKLREKLNRVYSPLNLYSVMLGFFLQSYFRVCMQSTGTICYGATPSNHELFETEALCSGSTKRKRLSMLTYL

SEQ ID NO: 1001113 - protein, 128 aa, Homo sapiens
MEEPYLQGIHYEDGCSPQTQLRALWPGGLRAIVQAVLKRILIPSGLLQIGRYKSGMLPRTGGTFIHIMTGARACKKRMDAWNLINDVRVKQEQLCMHLRRIANEQTTCTVPLPVSACFASYHYMSRED

SEQ ID NO: 1001114 - protein, 213 aa, Homo sapiens
  misc_feature (86)..(86): Xaa can be any naturally occurring amino acid
RSLTAGKRLDDSGQEIRYLAPKVPIVIQVTIAFPGAPSTGSAVRQEATVSNGVVSEAASPPAGSTLLSQVPRHSREAEYAEARKRXAGQRQALEEVAGVNTNRSDEADIQESSQNPLRIRQVSPSKCDSDQAWGSCLESQWSSKLGADYKCRGNENDAADYACRSIALLVSSGHGFALSVAGTAGLEQRERPDLLALVIPLAPATVTLKPHAL

SEQ ID NO: 1001115 - protein, 32 aa, Homo sapiens
MATLFAGCKVNRIGPRWNNPPNGDLGPTANTG

SEQ ID NO: 1001116 - protein, 376 aa, Homo sapiens
GQLYVSALDPRGPWTTQVVLTLYLVPGDGGVARWILGLCNDAQSCPVTWACCFRRILTHFVSMLSRPSTSSSSGPGFKDGRMSDHSPVDERSLFLKQIILQPYRESDSDLTAVETHTDKLPTTRFWMLTQSYIDLMLTAMQDRSGKAAELKLSDFMVQHGELSLGSLCALTWRQSVRDRCSLLLPDFSPESSTSVKGSRGVREHGSDRDALTRLQPRSTFPLSCELGYSATNYTSCSHEVGSVTDQGVYCRCCDRMCDGGKWLGVNLGAQLLVLALKRRGHVHGEADTVVRTPRSEGRTGIGRGRIGAGPRKAPLARPGGQEPRSKVQDPPGASSCRAFTKDSYRGPPGRERAQGGAPNNPRGSETRSPAVGSCEA

SEQ ID NO: 1001117 - protein, 271 aa, Homo sapiens
IGIGVGCRSLCAGKFALIFPDLVEGLVLVNIDPMAKGWIDWARNKLSGLTRHFNRTRVLSHTLQTGGAGEQHRVGCRANGSRFGERSEPKGQTGGSSWEHVQQTQKTWTLNGLGTVPKSARRSAARDAGSFGDNATAEERGWWSAHAKAGNRHNIQNFREEWPGIWRAGTEDTQTREADMKAFKILTGKGMVLKWRISTRIEPGMGKVTPRNMEVHSTQDAKDPDEEWPSGTTKPLKPNTEEDSEGAWAKGQTKTMEGVPVKSTKDTSERR

SEQ ID NO: 1001118 - protein, 104 aa, Homo sapiens
MLTSYTLSPVVGHVGPSEAWAAAPCVWWPGVAFRASQHFTGGSGGRGVIRVLRPLCVLVLLGGLRRRVRGVLSASEGLLAVNREANAMQNLNETAVSPTWDKVR

SEQ ID NO: 1001119 - protein, 281 aa, Homo sapiens
AETCIPKVNVMTHPPVHLPCCELSISFQVGHARCPDGLCLLVTRIGCTMGFSQMVMLSSDKTSWIGGAYNIPLLCSITFLLESIGCLGPDTVLARGAFKWALDRYVSIESRLSIFWPRYLCTVFFTTQSQLITWSNSRNACTTNVIPLMGLHEYAIGKGESIDPSCVDRITISCPDTGAQDFRWCFSGCSHNALVGGTGSGFTLHFLVLERIVCLTMAKKSKLEFSIYPVPQVSTAVVEPYELYADTQRQPGALRLCLHGGQRSESMTIVPAKPKTSERPN

SEQ ID NO: 1001120 - protein, 251 aa, Homo sapiens
MLTEPVCTSPPDAPEPSLNDVLNYTADKDYHLFSVWTDCIDTMSTQISAPRNMSGITSCLSMGMRTQHLLERRDGHFDISEWLGHKIYHVRLTELNLMDTTRSGKLAHTGCIPYGMGVWRHRQLTHVGSFARFEECERCIGGPGSNVFKIGTLGTFKYDSDEDTQSIRKHVPITTIWNLEREPRSSIGMSSRPFLLLRKSIDAKKANVRGSAPGILGLRVTTLNGTFRNTPYNTNDVGYHQYPFGFRRLGR

SEQ ID NO: 1001121 - protein, 134 aa, Homo sapiens
QQSRMEHVNTVEALHEYPVMWYIMHEVIQSITSSLSEVVVKLQTLELACTSPVSALPTTDNCSSDRIESEGELDDELLHHGTTVKHLARVPVWCQMLIVLEEILVEIDGTSLRKKLAPGVLVVMDSEYTSHRIY

SEQ ID NO: 1001122 - protein, 274 aa, Homo sapiens
MRRTSAKGPDDVRCVDSFSYQSGDVNNSSTRIHGSRVNRFEGVSIHYFPVGSRHDRGKTLDVRSITLGHRYGPFHRSVFVATGDEIGVTVTHDGIRRSVELFLAALACRVRGAATADLKRVPVKKEFTSGACGRLGSTHRKFNTQPMVNGLRFPSARTQGGWIVGCTEPYSAKDTCCDDCVGFRSPGIVIACERTEGESLESVGYVAKQVRFSSRKFPCAYAVTFLLAVQAIGQIPRKFKWEGHGCTLVGQLEHQVGNCQSFVEQFLVNPWVPR

SEQ ID NO: 1001123 - protein, 207 aa, Homo sapiens
  misc_feature (168)..(168): Xaa can be any naturally occurring amino acid
MRGECSLDPTLVSHAVLEGPLSRSVQVFGYATKTELTAVGVHCEDCCANVSSIKAERRRPSGDELDARVSADSYIAGWHWPTVRCLLWQYGMQMYLVVDIADVTVVNWRVLVDVGAQTLYAYRESKYTSFESPWLRLINHDKLVVIDGLSNESDESRATISSVRRVGXRESRLVWLDLNTLRYVVTRFLKKGLGSGTLVDPLSCGYP

SEQ ID NO: 1001124 - protein, 326 aa, Homo sapiens
MVGGVPGTFISSKCIMMTSGCFAFVRFTTGDAIEQRGPSLPIITVGSVRTSAGCKRRRKPWTAETLVKEVVHDFRYRTFVISDRNGAGRERFHSRARLEDNGVGGGQIDGPRQDGKVRLRMSSLQHKSPLATEIELAGIPGGKRHAPGLKLAKAQPSPPRGGKDDAMKRERRQQPMEIRQEPTRHISTDFPVKKPVAGVPVFVNGRINVNTIVYLWMSPYISILTPPFIIVWIPSRHTTITCGDMAQRVAGHGPITEFRRVSSLQSWNRHFTMDILYFNTANTGRSHRCKICGVEPLKGVLIQKDPGTLFEAIFRHSMAQMITGAT

SEQ ID NO: 1001125 - protein, 94 aa, Homo sapiens
MSEGVGHNEELVEVLLKLERQLFPLLEKWFPQTQTAEDGSRTANSNYRGMEATKRWWAVNPEPLFGVGELPLGNDQIKGLPAKEVGQARFVRKN

SEQ ID NO: 1001126 - protein, 244 aa, Homo sapiens
FLLRMDRAHEAKIRLLHLPDHEQGQAVEGGMPGARARPGPGGAVPLSITTDFYPFPSGCVAYYTLIGASGHERTVSRPTSRSCEGDSLKDIHAVVLLLGGKKAAKSEDRQPVPGQQMTLKIEGDHGARVVLVAVDKGVFVLNTEEQSCRSSNDPGTVVGRTADIGCTPGSGKDYAGVFSDAGLTFTKQPLASRPARGQNFSARSQPAAERRSVQLTGEANGPKSGKNPKEAAQSAAKDGMRENP

SEQ ID NO: 1001127 - protein, 191 aa, Homo sapiens
MCVPPLERELCGGQKNSCVCPGRGGEISHFSKHLEPCCALPPFCGPPFQRALPSDFSPPINVGVSFFPRGLWAKSPLFHEKGPFYRLFRIFSQGVRGPCCGPRGIHVYIHKDTLLATGALVIEFVARPFQTGLQIDDKETLLFPGLTKTLGSGETFPLWDSPKKGGFWSESWEGDKIRWRVLSKWVCGPKN

SEQ ID NO: 1001128 - protein, 197 aa, Homo sapiens
MSLRTEPFDSVRRGTFDNGSRLTATCKLLLLGESTSECLSPAGLSRLGVVRSLGCQHFVTNWMVIYTSTVGDHQSGSGNFGGRKRGAEEAAEELLCLQQLRDSHVSTQGTRDVWEPVLQQRPLQRVSMERNRGCLRDQYFGGCVVRLTVCIGVAKLTLIVVNSVELLAQNNRSSLGGAITTRIASRIKRTEVVGPWL

SEQ ID NO: 1001129 - protein, 135 aa, Homo sapiens
RCAARARSLISSHSELKCDIMLLRSSSDREELDAMTLALHVSRIVPLAVVFDVADARGRRPYWAARVAETEELIRERVRQVVAHVRAQEREAAGGCETLRYQTRANEDDWPVGLRPSCDAVSVSAIRSRASCAGC

SEQ ID NO: 1001130 - protein, 66 aa, Homo sapiens
VSRGPVEDPGPILLISDDVFRLENDDSELSSVLCAVVINVAIKVSAVKPCGLVGPLKKRMPASIIV

SEQ ID NO: 1001131 - protein, 104 aa, Homo sapiens
MYSKNSDVHRLILGEAPKGLRICDYRRLSHETELISKNDSNVSYADGRLTSRYNAQIARNYYGTSPWQSKYTEPSMTRQISSSGPLVRFFEASWTSCHEHWDEI

SEQ ID NO: 1001132 - protein, 68 aa, Homo sapiens
DREREETGRAAHMGPERSLWKLANCQHGSDCAASLGPERRAADSVVGFSIEQVGRSGDMGLNFPGDHI

SEQ ID NO: 1001133 - protein, 251 aa, Homo sapiens
  misc_feature (213)..(213): Xaa can be any naturally occurring amino acid
MSRRKERGCLSQTWHLAVKLADQPLTPKSILRLPETELARNTRYGAIVFHSREARVICVAKAPRESCSYEPWSCIDRDLLVVVKLQDDSDTWTSIGIQPGSTVHVLREVLAMNLIERPEPVVQSGLVHGDEFLVCEHTGLSQSVVLLTGMAVLVKMLMVIKEVRWHHASFVVLPLGLRRVTLFASLRVLPGSKDLFLVSSAVCQICLSTSVPXHLMPRQCHLSWVLHSVARQWPECLGTDGLFPGACPSRS

SEQ ID NO: 1001134 - protein, 155 aa, Homo sapiens
MWQIHQFQSSGVSIPFRAVQKGGDQEHVLEATGTKAGLFPRFQQPPCDPFPSVTPRPTRTLDADGDGHEVRKPATRNSHLPTPVASTIPSSTSCQPPCRPHLCNRWHHPPPARTPPPLLNTSPRRHPCEPPPPTLTSPPPPPRALSRYPPTTSAT

SEQ ID NO: 1001135 - protein, 215 aa, Homo sapiens
MQKPAGWHMITFTCSCMGMRNVVHDNTFSQDVEPVPRKPASYHGHSRELTDTLGHLKDYCMDMAYMTCNRRTMHRTIMATHWVFAKTTILRTLHTYDSTIGHPTLGDQLEASQHQNTAPPASGEAHALESRNSTGTICAEQNQSIETTPDTYTKHPKCKWTTQKKNLMSPIGAPNTHREPASQNICTTKGKGPTTYTLRRNSFPHPCDRETIMTQ

SEQ ID NO: 1001136 - protein, 300 aa, Homo sapiens
MSRLRALLGLGLLVAGSAPAADQKPRLIACRSGATWWGPQWLKLVVAVWDSRMVMGGTDGEVPEPMEWQAHAVDQELFNEYHFSVDQLMELAGLSCATAIVKAYPPRLMSMEPALRVLVICGPGNNGRRWSGQCCSYNYQLIQGNEPNASITLEGHTSIARALHERFGDPVSRTMDYPFPWGNVRRAMTIDEACIELLGGLHLWVQLLRADASGKPVPHTNSSKLVPRKGDFTLLAPFAPAFDTFPLQRMGDRGRNVGQLGLERASQHPRTFASSAPLFEAPAQKVPWNPKLNAGTGKPN

SEQ ID NO: 1001137 - protein, 186 aa, Homo sapiens
MVGTTQTVPVPQPFFPTKSIWGEGIVGKNRTAMTDDHWDAGSSSIDVMSERMDHVNQKPTHRAPEGELGEQRHKGTQNLGGRERQEEGIGHGQGEDSVSSVPHRQAGGHEQKRRDRQQNGSGRRRHADNYLKDEKDTKDSMGPTSGNNNRCKWNSPYQPQKTLNTKKSKRGRDKGGAGRTARKAGT

SEQ ID NO: 1001138 - protein, 142 aa, Homo sapiens
MVGLCVSSWASLIVDDIGVMAITLIAMKLNRKDWDSLCWICTSLQEFGPGALSPGSFVLAVIAQSSLPTCIAWSHETDLYSASPPQCNSMGRQHVGYTLCWDGIVRCADPELVAFVFPGECFFGSIRLFQDKPVCGSWWYTV

SEQ ID NO: 1001139 - protein, 104 aa, Homo sapiens
MVGHLLRPGLMADMSDDSRSQNKERRKDGKNISTGGRGTQDVRSKSRSLHRNAWDVGSKGLRIGCPQGGQESLHIDHLRNHVSVLRQQYQCEGKQIAAERMRFF

SEQ ID NO: 1001140 - protein, 134 aa, Homo sapiens
MYARYVMYPFEEKFLPGRYPIGSMPELIALLMAGTTVFAKQDKCAVVAMRRCSFGTYTVTVRYNVRNERKGGNGTRAGRNNGAEVSHSVSWRVDRMNDCDCSDVLNHCDQEVEEGNLLTMHQRSVVTGESTGTA

SEQ ID NO: 1001141 - protein, 415 aa, Homo sapiens
MTSAFQLECLSDYTTLPLISRWEGDVHDYCKSSYYMFSLSVVCTSVETMYQQVRSVRSGGVYETMERVYPLKRPIGIDVTILVKLDINQGITGDLLAILNCLHIHVVRLTCHDSLKSVHSLHKSRRNIITEDNPGSLRQCAVATACNCVFHRTEFDLRHNGLSSAPRATQLALTTPCAWVDRQALPLCRAHLDCHICSARHNRLRTHLLPLFHLTLVLTSARDANPKQGAPRCNEPLLHNIDSRTASNLQVCLALFPSHHRWHNLIKPRCTPMHDIPPSYAAYPSAQLYTTRLNILTRLHFGSHQPGTSHGTRSRSSAVILPTSSSPQQTGHRPPDSEVSFHFTHHTRRYRVTIPCTQLPKSSCLLKRDTTVQADQFLGQTPVHWLYRLTATGLCDESNNARYHALLIILLSLST

SEQ ID NO: 1001142 - protein, 146 aa, Homo sapiens
ASVPQALSLAFADSAPVHIRGPAHHVYDDIAALSRRRMAPAMCEGPAFAELRMSLTWPVFHARIVGRTLGKQGSDGGHGSGRIPIVVSRFMASKELHVTYGITLPLACKPRFGSTGDRSTEALGNRALEEESWAAQLPFVNRLVRH

SEQ ID NO: 1001143 - protein, 242 aa, Homo sapiens
MFRWPTEKRVHHIPRAALAPQKKKTKQEKPKRTTCLERKTSITQNEEGGHPQQTRIRQTPLKIYEKNGGCTLSLLPEERRRIMYHKTRKQKNTCNPPPTNTRNLGTTNRHNHKTQQNTTDTEQIADTARIKQHRTGNRKDMKYKQKRRVETDPSHHIHVVVLVRTHGPHAATRTKHMKLSTQLAASVRQPDRLRARPEDDPQSGTDTPCGTINQQNRCRPNVIHRTEATPMRVKAPDKTTHT

SEQ ID NO: 1001144 - protein, 96 aa, Homo sapiens
TFWSLLPWKNNVRPQHWISTVAEELRSATVLRQVLTLWPGSGEELWACTRMYVWDAHRVRLRQKYERIEILIILRYTNVFAPYLIFLVPFTTQDRA

SEQ ID NO: 1001145 - protein, 92 aa, Homo sapiens
NSGLVRSLSGRRNLTDVDAPGVEAENMSCVAEGLSYPREPPDRRQSEEGATATWQDDLNSCAAIASGPSFALLVDAYSDYRVSRPWRKLAHQ

SEQ ID NO: 1001146 - protein, 122 aa, Homo sapiens
  misc_feature (109)..(109): Xaa can be any naturally occurring amino acid
MSKSESPREPEQLRKLFIGGLSFETTWMSERCRKPSIEAKWRDSRSTELGVVDIAEIRNYLKRSRGFGFVTYATVVGRWYCMLWICEGHNNGWIEKEFVENQTEMLYSXKKDSRRGREVRAH

SEQ ID NO: 1001147 - protein, 74 aa, Homo sapiens
MVIGVRMVVDERGKLCPVRMDNSHASRCIYSGEAEILSYPKTSRWRADGLVRIEYACGGESSVERSSSNTLGAT

SEQ ID NO: 1001148 - protein, 250 aa, Homo sapiens
MSWLLVECAWVLLWPCLGSLRPLGSMAMLLPMPCCPSSLRLGDACQAGALAARLPRLADSWEGFYGLGGVRFEISHHPAVHALSDVDSGAAVGGMQDWRHSLPCHAAGGATGASPCLSGVPRRPLSFSKCNTVEALSSGSLPCVPTPAFRFLKTKFQPLPVWGLGPPWLLQNVHCQPGPPARFPSVSGTQAPSFGVVLTLPGVLEPLYRVRFQKLSRCQSPVSFLPMAFTDCHNRRPLTGSSQPDSAYDL

SEQ ID NO: 1001149 - protein, 70 aa, Homo sapiens
GHPQHEEHGAVMKKGGIILSEKFLKAFAFHLCLLSHLRGHRIGVSSIGRGRDEPPTRHLWMKNWSLYLVR

SEQ ID NO: 1001150 - protein, 89 aa, Homo sapiens
AGPGAPFSASSRVRLVGAGWGEEDERLAPMGIGLQWVGVAMDGVRRDLTLGWPDLLTAVGSWTGTGNCGNALGLVAVCGEVLVGVAWVL

SEQ ID NO: 1001151 - protein, 159 aa, Homo sapiens
MKLVTDRRVHEWHIRQDPRSYEGPGVNDYGQSVDSLETRLTNRQYWPGGMAESKRLRMNAFGKSINLHAKRSKSTTTCRNSCMRNNCWLGHTSDMQGIPEAIKPRAESRGTPMGMREAPEEVQTFTTNFSEPGGILGARKVVLRGPVDTVHDIFGTGSV

SEQ ID NO: 1001152 - protein, 336 aa, Homo sapiens
ASAVERGPAGRRRLMTCPEWNVECGNMSMRVSQWVHAMEWDRVGGAGVDSGELWGPGWTPQASWPVASLIMLPWPLPLASSASPCSSWALTSLFLWYCYRLWLPRHACALGAGSLSYGGVLWCGLWDARECLVWAKPMVVVLGIPGKDLGRNGLSEPAASGLLQGATPVAGMGYEWVPVTLKWWLAPVPWDDGPESPKVYKRPGMRIYTYPRTWLFKSTIERDRRVTAPRGSRRCNVTVDEAGLSHDKLLQGNYEECDAWDILQGNYLHTAIKWDWTAPAWVRPRDAKKSSLLETKQCLGETQAKVDDVSMEEPYEGNLDGGDQTIIDVDRSMEDR

SEQ ID NO: 1001153 - protein, 324 aa, Homo sapiens
GRRLPSSGESLLSVLLGESTAILPTMVELQGRQIRPSWTRRPTSVNMSVIAHVDHGQVQADETPVVCKAGIIASARAGETRFTDTRKDEQERRITIEVKLPYYPLSTDVSENDLKLHQAEQGRCTASSSTSWTPPGMSDFVLESDCLASEITDGRIGGEWTEVSGRSAVQTETVLREGQYAERIKPVLTDETRWDPGPCWRHDKLEARGSSYKNFTNDAIEGTTRETSTHISDVRETGDDTRHTMGKTLSEDRPHMTIRGHKEGDKETNMAHHTRGGGPLQEPSTEHEKRARHKWKIDGGQRAKDTDQQRKEVNGTTQRKEGGQ

SEQ ID NO: 1001154 - protein, 110 aa, Homo sapiens
MRTPFYPYPCVHFTRLAAANSGHTIGILQHSVRTPRLDIVPTVVVRTYTHDTGGGSAKTPFRRNLRRLFLACEHKGIIKGVEQNVEKLFVTGYRSTKKLSNLQAVSNAWK

SEQ ID NO: 1001155 - protein, 105 aa, Homo sapiens
MPALICCMLVSQVTSAMSRQVVGFEPLYIKAEPAALQSKGFLGDRDLSLHVALAPGPAPTSLAPRPQGRGGWGGGWAGEQGRMGSLVLELHMDKALMGVDNVEGR

SEQ ID NO: 1001156 - protein, 561 aa, Homo sapiens
PSCGRQDPPEPRPSPEGDPSLPQRHNVKPGALKSPLENIHDHERMTLSSTRKLPECTHEMTTSERHRYGDHRDTATHRQDTTIPSFHHDSTRDSTEPQTPNSHMGHATGTSHEPLPIETKEDNRPKNKYSQNKEPVTTTHIQKTEPSTQKKTQRRADTHTSKRTKKTHNPKAQTQKNEHTSDQTETRETATQYTLTTATHHTTHRTRKHHAWDTPQETAQQNESNTRTNHDKQKQQTDTTTDQHRTTTKRQTPDTDDTTQHNAIKHQDTNNKHNTHKQNNQNTETKQQTTSEKPQHAHHTEHNKHTTRTTQDNKHTKPQQLHTTHNDTNKEEDNETKHEQNTPTTNPEDQHKTQKQTPIDNKDTDTQTTPQHTHHHKQTQKTHKSTKAQHNKHKNKEKHRQHKPEKKTEKKKPHTHNKTKEIKKTTTKRSHKAQSNKTTKRPQKTKTKHNTRREIQQNNTHTTARKSKPTQRENDPKQTRVQKTVHEDKDKQNKQKHEHNNPAQEQTHKTEQQHRQTPTTKQTSEKTSTKRHQQTRTRQNKHKETTNQTQNNKTKIKTRQT

SEQ ID NO: 1001157 - protein, 172 aa, Homo sapiens
MTRLLGVPSSYNDQADKASTRLKQLKRELGVRPEEEVSGGPYRLSRRNTCERDARYGRHLLDRPMPMNREVNAPLLYEQAHARVTLAVVYVSPTEIGPARRSPAELAPHRKAALTIGPIDGDAGLRGQNTVSEISPSFFLTSLRQWDCDTIMYELKQGRLPYPSKDPPGEYN

SEQ ID NO: 1001158 - protein, 52 aa, Homo sapiens
GQLGTHPKKEPMGGAEHGAGARDFIYACIRRCCNASLLQMIPRMFFQTHVVD

SEQ ID NO: 1001159 - protein, 72 aa, Homo sapiens
MVPAQCRRLLALWGLRPLELARDGPASDVALQLLCQRRRRAGSCTGLPIGMWDLNACPSGNLCWRKALSGKE

SEQ ID NO: 1001160 - protein, 308 aa, Homo sapiens
GLVHKRQVFKVGHRRVPTGTGWMAYDTGYTLAADMVRLLTNTAAGRMTGGFQWAVTTVEQAGTELSSLHRVDLLIRRDGFHGTNNDAVCLRHETFLGLRKLIRARETVSSSEIYHQDDEATGIRLCRDDRAKHYEGRRVALALSSKEIPPECAHRVAVNDVDKWVQPPRGTRREGLSGPRAPERHLVRAQRWTAPEEPLLTGPTAFVSYYLNALGVNVRMHSLVVEYREMVVSGQASVSPLLGGGGHTLMGHWRRPEEDSEELGWPSDWGSCDVSVAWSRQATYPGPKHALPGPAGSLPAWEVGIRRR

SEQ ID NO: 1001161 - protein, 213 aa, Homo sapiens
WEGDPPEGPATSPLTNSGHPGSGVQQQQRRSVLDMLMMHGMACCHLRAWPELGMPQCPLPVCTLLFMQRLVALVTQHVSPCRRLPPAFKSMEVANFYYEAGLLVLLRTAAMAGRRWKPPDGRPGAAPTPNGELGSIGRAQKRSHTTFSRVPGGRWARQKAPGSTAQPGQRTPFEGGFLDTQDQDKKPGLTPGQEHKSRATDRRSREDYRRRNC

SEQ ID NO: 1001162 - protein, 192 aa, Homo sapiens
  misc_feature (109)..(109): Xaa can be any naturally occurring amino acid
GSYAVVAKLAPEHQSKVEVHDCLACHVDPRTNMLDLNACRWVGDVSDYGTCIPMDACVSCAIPSVLQDLRTRRNKRRAIVISRSYRTNTFDFSVCTLGGERAQIETPFXISGLNRRVARGQTRRDWPFPGEANLQIRYKYRKKVPDARKVVVVEIYGTDLQCAHVKWRDKPVKSFVTRREGTYGRNYSALSY

SEQ ID NO: 1001163 - protein, 190 aa, Homo sapiens
ESEKEDLGFIFWAPEFCAAVRSKVIYAHAYRQELPFYGIQLTGIKVMKLQAKCYRARSRIRCEPMVRRKLRGLGAGLVVPVVVNDLCDAAVLEPPVVSVADNTGPMHTNNPDLVARGYARGLVARFRLPMTQVGACLRRRIPKTKRWDGAIITHFIPRKVGPQTGMLAHMHHAGNMLPFVPAPNPLEAVY

SEQ ID NO: 1001164 - protein, 200 aa, Homo sapiens
MEKPYKSEMKKPGKTTGKPEDELEPDADRKRQTRPEKPDVEGTTDCAGTRAEDRAAEAKVMQRTSAQDDGKAIDRRVARSGTVRGKLPRASGPEEHRSPGPIHRSRRQAVIDAHVLTTALPPKDATLGAERIDSLPPVHIERVYEAYPTGEPHVARTRVPHLPLANGDPPSEGIENFNGVNQGAILRMLKVKPKSRLVGR

SEQ ID NO: 1001165 - protein, 148 aa, Homo sapiens
MTGYSRTSHSAELDTLQYRLPITTTKDQTPRNELARTETIRDRSAYSMDLFYDLKRCCREKKLNAQRDYVTRLLATKDQVRLQSTWYHPNMTRWVHSNMDESEYASKLNTDHEVTLSQCRTVYTFYNIMMTASCTWSVAVRDMARPAL

SEQ ID NO: 1001166 - protein, 106 aa, Homo sapiens
MLPRLSIRTCGATHNGNTLNLRKGGFPSDKETRDAPNPGCHKFTLNPVGRNTRTEDKSACILDTLRMQTMAVTPSFLYRASTWRPCELKHIPVKEGPNGVGQGAPT

SEQ ID NO: 1001167 - protein, 315 aa, Homo sapiens
  misc_feature (58)..(58): Xaa can be any naturally occurring amino acid
GRSKSIRSLMASFKLSQVGLKVVIWASSFWYARVTLKSNSSAWLEQSLFQEDIRYHPXNSLDTPGFKLVVALARIKRRLEFGNKLLNGHSLQGINLIFLGAWKILEQATPLIMVLDIDYKYVQKGSQSLLGVTPPLVNRGASFFPSQERRESLHGVVMESPSRRVPRGPLQRKNWWRPLQSKWSDHFLENGPTVWMAGRIVLTFRFTRGRWQMDQNKGRSRGARRLQAEACPGRAHLPGAVWVNQKPNWDTPGILAAFSGKLYKCFKKRGESKKQIRAGAEREVHKIGQQRTQRDHGWDGTTPSHGRYTGISTLA

SEQ ID NO: 1001168 - protein, 298 aa, Homo sapiens
  misc_feature (207)..(207): Xaa can be any naturally occurring amino acid
MCIHSKVLSDDMKKLRARMQLGHSKDFTEIKMQDMTRYYLRVRCDWLMSSLAEAGGLTVEEGYLDTVVADYEEHHHYSSHPSYIEKEYEMDPRDSPEGNTITTCWQDVEETPDKPGEMTIGEQSRYQFERKVQWRNEYSQGLEETRRDETSTRTHVLVQRGDPVEIMGVEREKRLGWAHVCMGKCQAWQGSHVHGSKSSVYAVKCIXVLNAYWVKQVRTLSLSPVLSTQCFRYREGRQKRGGEQQGKRKLGLVANGTSSCLKPPQNPFERWKRITCRDSALSAPAPQSHQGPPRSTWK

SEQ ID NO: 1001169 - protein, 144 aa, Homo sapiens
MGPTTLKRHVFGSRLPKRNDHPHNLVVSSDIFGTGEFMNGELNSVSREGGPHNFFPKRSPLMEKGQRTCRRHCRHQDDGVGKTNFPPSVVLREFLQFRREGTHSDKIWDNQHGGATMMRRPRVSTHIHNKESHTNEARKGGGPL

SEQ ID NO: 1001170 - protein, 142 aa, Homo sapiens
  misc_feature (82)..(82): Xaa can be any naturally occurring amino acid
MASGVLLCLAPLATCRRPITCPSVSDRHTSVRNNEGLSNGPCQMRRGAPTRRPMPCGPSTIQHLSGSMSKKHQEPRTNVHAXQTKPLQCRTGNRQAAQESSLAPEELRALTSSNPSVAAQALAACPSGPCLLVSVLSHFRRA

SEQ ID NO: 1001171 - protein, 323 aa, Homo sapiens
  misc_feature (63)..(63): Xaa can be any naturally occurring amino acid
  misc_feature (139)..(139): Xaa can be any naturally occurring amino acid
MRPQRVACPRRRDVRVPLVSPCREAVPASRTAAPFAGKLASEPGAQSLGTMSLPGVLCSLFLXMSMTGRRFHDSKDLGYCPSEIGLSLACPACAVRRLAPGVPLTGAHGHLLCPGIMIALAKAHGAPQRCVPDACGDMXGARFVPPSGGHRTLALESVVALVLKTCSEVSESRTVHPSLPLLLACSCWHLMGTWRCHSLGATRVAYPGVWPRDLLSYATGTTDPCDAPRSRGLQRPLLAGWTSLHPFDASALLDAVVVALCTGTETASACLSISHASDRASFCSFVVLMPIHSPEFNGDPENVINGEPDPRHVELLGVVFPRQ

SEQ ID NO: 1001172 - protein, 366 aa, Homo sapiens
LTRGARGVCTLSPVCVRLKLSSNQITELSLCIDQWVLVETLNLSRNQLTSTCPQPFCTAEQELKKLYHDFQRSWTCRPGVPSRHEDKHQPNLGMRFMGVPTKRTLESGSRESVLLLVCHNELTETLSVILQEQHLVTHRTDMLDPIYSLYRENRRFLSMMQGSTPPICMVQSSRPKRPQTPKRSVASEDVIQTILNLRRLVRKTCMSGLDGDAIFRANCGLACLQLGWWAHRDPSGIAQMQTCVTSANGFHAPGMTHGQGMVLHGHSQDSLPEENEPPKAGTTAQIARAHSGKGCGVGTKGLEKAPLDYSRVLHGRTLGQVPGLTILGSIENFVPFIGGRKAFHGKFTKADWYLGAKTSWDTRGSL

SEQ ID NO: 1001173 - protein, 461 aa, Homo sapiens
MDALIAKQLTKNARERESCNDVTSRLKASMLGIRNADWFQGLCILLALLETSIENACSWDELHRGFAERDRTSRSRWLQHVERFALETGNSADMGLGTNEPTDASAPVSSNVSNVTSCRRSALTHRCVTVPSVSTTTMKNRLSRWGPGGALFINSGMATMCVTMSLKEKRLGTYGNASSIEQIDLAGSKLTMCSHHGQGPSWYTVSGSNTGVRLSYVRMCICMLKRPWFTEFPMMASRSAIRTHGVYEGKGTASVNEGTVYEWPTNEGVAFHSLGHPAYTHEGQVVDPAYSPCRKRCTGGGELHAVILTDETDGSLTLRLKKHVTHINLCNIQIDKVDGSTVIWDVKGNETKEDKAPVERKRRQRTNPTIEGHRQEVQRVKHHEGKETRTDARGKGNKPGDSKGTGMHKDGPQGRIKKRGHRNSAERRPGAMNKRTQQRQKRKPRVQEQTPIVRKIQQGGE

SEQ ID NO: 1001174 - protein, 373 aa, Homo sapiens
MSGNRALAVPGQCGNQLGAKFWEVTADEHWHLTPQGTYHGDSDLQLELHHTCTTMRPPGWKYSAPRRARGSGARAPWTPVRSGAFGQIFRPDNIRFLVRRGCWEQLGQGALHRRRRSWWTRMLDVVEKGGLTSCDCLTEVSSLTTLPWSAAETGSGDGYTSRRSREKSPADGKITPERGKQCNNGKREERDRSARKKREEQKREGKDHRKANPYQKARKGIAKKTRSRKKTNRALAVNRKDIPTTEKDRVRENHQKTNGHNDTNTIGSGQRNKTETKRPNQRRGGSTKTVGRESGEKGDEADTVAKDPWRRTSGGDEKQRGAEKTPGDGKNNVYGHHGNMEPRENKRREATTEKEKSGGKERRGQQRQKRRRA

SEQ ID NO: 1001175 - protein, 415 aa, Homo sapiens
VKTGHSARDHMRQPVPLETCRVHSDCATRVVTAHWLQCSLPGKSSHLRARPVTDLISTIGIGSDARLTAAFSRGGLLDRGAPWGAQVIAAYACCSYPQRILIAFHRRKTFVFRIHPMSGYIARLTYRRMSAIVVVYRCMRAALDCMGTQYIRFPFSFKRNVHARSHPCAEGPGTRPVDRMQSWQSRVAECLWTLAAVACLWLHVSSAWVYAKTLIPFNGVDITWGYPMRDTYVTAASQIPKAQVIFSCMRPSKAQLRGASRGGQGRTTPLCNERKGATYYGPRTFVAQPRRLQQRKPRGMGDGSPKILKWLVRITQRGQAAVASSAWRGHTRTKPKIGDPVSVGQHPFYTQIKTTAMRRQKGATKGPMGESSKGEATRATQAGKHGRYWRAEPRPWYGGGKRSWTHPPRNAPDST

SEQ ID NO: 1001176 - protein, 241 aa, Homo sapiens
  misc_feature (77)..(77): Xaa can be any naturally occurring amino acid
  misc_feature (91)..(91): Xaa can be any naturally occurring amino acid
MRVANREENEILPPDHLNGVKLEMAVHLKSRLPPGGRSLGERTMGWRYELRIAERSGESTEEACSGQSYCPEVECEXLTVKISCQGTMQAXWIMDERRRGATSTRGQWRDETRHSFRCRWTRDGDRSRCRWRQSILRLKLSWGDVHRPVAGEGTGCRRPVRLQRRNSPCGTRNMTWNDRWQKPEGTAWIAHARTMPTRVEYLVGFVREVRRGILVGSASKPPTTRAGRGTCSGVQWGERSI

SEQ ID NO: 1001177 - protein, 250 aa, Homo sapiens
SGHATHRVGPVTFKTDKTFTTVARRKVHGDMLTRGHRARGFIDDLSRHQSSSLSVGGAGIPGDFLESHPVTVCSQQREGLSVDFDAHTRKDRQYLITTSSHDDLSNSPGENTSVNSARCCRHVRQIRILINRKGLKGKASRPAHQIHLGGVRRDLNRLVRQATSNISKQLARDKRFSRLVNLSGKGNSCAGLIVGGRHHHRVALSSHEQSSYNRHCRPVRQTASMPGNSFGHDIAFQTDSTASPGFGVSH

SEQ ID NO: 1001178 - protein, 225 aa, Homo sapiens
MRSCLQRTRRSRSERSTWWRVHERVKSLSVGGPHGRRSRTMRRRHGGSICKGGETNQRVTHSTGHPTCWMHPDVQYMRCDPLMNVLHNTPTRITQRIAYLSPAQTQLTHAHRPQVQSDEQAIWSSLRTDVIDHQYQCQSLGTRRRLVGMCPYRGKLVCVDWPTEVSTSNQSYPSRLLGRLPKCLWDKVHPLRLNVEAQLVMAYPVIPRWTTVVKCVDPDRACSRQ

SEQ ID NO: 1001179 - protein, 251 aa, Homo sapiens
GFTGFPRGSGKKNPGFLACPPRVVKKEFRPLKRGKLSNHFLSKQRVHRKYKNAASKRGGGPVPFTWVDLVTLPACAQSGQRLSKCGCSRRATKKSPGDPTCVEKTQRRGGSLRLIERRRKISSPNGVVGTPRARREKIREKGFVETDSPPLRGGGVELSSAGGWSVFPAESVCSPVWWRHSNFLKQTKEVVEIRNTRFKPPENRGGDKQRGDSGGEKARCRVTHTAKTTREGGPPPTKTSGGAQRGDNTPP

SEQ ID NO: 1001180 - protein, 240 aa, Homo sapiens
HKLCSIMVRQEQRPELPVDPLAAAPSAMAAAAAMAITPAVELVSTLVRVCSIPHQGPLREEMKSSPVNVDRSRIALMVVEPSSFEKVGRAEGTMRAGMLVRRFAPRQRECGSVATLTGLAIRSRSSLPHHSLVVRPPVGLLPCREPNLPPRHHDSLNFHPYEYIYPGVTNRGCPRGVTVQCAGYTARDCEVARGGTPESCEPCFPSDQTGGREKATWEHEDAYGPLKTIRYIFCVPRAYE

SEQ ID NO: 1001181 - protein, 103 aa, Homo sapiens
MGAGPKALSRRVKVFFKLVQHGRWVHEATPCQGRRCFKTEKKLGLGRYEGSFVLHYGKANLRVFFQKVGCLTTPGTEIFGWRGRDGKSVGRNRKPSKCVAQRG

SEQ ID NO: 1001182 - protein, 493 aa, Homo sapiens
ADLVLSGSAAVSRLTQSVPAEPYVPRPVLARCCLVGRSLVPEVGTSFVEEGGDSLELETVWESLRCVLVYSVGRYVYKTIAGSLAVGVACHDGGRSWVSLHELSYVWSHALSGDDCLALRSWIEEGIGRTKRMRDFQVLGALKNLYRDAKGRRGKSMPCGISSRKEMTSTNVAVIAGDTIVIEERTSVVLVLLGAPRHEPHGDMGASRCTILSGISLVRRSEATFSVRLIARGTYNDCVLGTSPGKSGGRRSLLRNSMEWCDPGSGRPVITGCLFTFSLYCDDRVTGARSLVPRFWPRGALGPFLRSIGVAARAPLGTCVSLRHNLARVFSQDGRGIRVDSDFGGWVRRPPGWAALVCGSRREEFPRYGPGPGEFRLGGVELLGERIRGEGGQSCFATDHLRWFEITRAIDRVWRDLNALAFAGTTSYTIHPHKGKSPVEKQRRFREPCASTNFFGGHRLENATIVCSIRSPEALVEKAAFTPFVKPYKVCVA

SEQ ID NO: 1001183 - protein, 255 aa, Homo sapiens
  misc_feature (241)..(241): Xaa can be any naturally occurring amino acid
APASARRGGRSGEAAAAAGIRRSHVVRSPTGVCSGESRSFMVGTCRGTLAEVALVCILELENIPPASMPTVDGKRGPSYLPNIGYQAGLVMWPGFSAAGHKLSGAMVMSQHPLSEQVEKLKEVAGLPDDVVLYAERLAVLVLLNLYLSICRKQRWTKEDLELINKWAFQGERMIHGKPLREWTMLSVPGEEPSDSITGRFQSLTRSPGLQILVTNTKSLAIPGPCGWRQKQAAHVPSRSWXPHPEARVDGHLLGV

SEQ ID NO: 1001184 - protein, 307 aa, Homo sapiens
GRRRPASVRCSNCSTRQCRYMSARWNLSCHCLWLLKTNLVTSSRSRWCGVTCRVRTAVHCVCSSWLTVGAYWSSVYACSSSRSGPFLLSCGFFIVRAFILVAVAVGLRSHTSVFDQLRKLPDVKSPEFKLKAKESSRRSRDCLPQKAEPPIDCKLVVGSSLYNPIPCPFKGFRSMGRPSRFGGVEEFRISFKLVTLLTYVQKVKRTYAYTQRNVRCRHSLSIEKVMVIADIANVRPPMRREICCDPNKVGRYTHRWERTTGKEETLAAQGIYPKQLSYILTVIEKKYANPRVRKGGRQTTRLFSSGS

SEQ ID NO: 1001185 - protein, 53 aa, Homo sapiens
AAWVPYSCDASIYPCDLSYYSPNLLQAFRFVKQTRLTGLAVTSSSSFFTHGNI

SEQ ID NO: 1001186 - protein, 184 aa, Homo sapiens
MVGGQTSMEPNADCCLPVAGVERHFRYQMALLAISALSSRQNLYVTEGCHMSCIAPEISLEGFIDSLIVTLQNVIPIRRSTILAVRTTVSDPGNRDGLPPWCAFADTKASEMVMMWPILQQMVEWSVCALMEERVGERRYPTPRRKAHGLSRNKVERDKGTRSTSITNVTGELTGKQLGYSDRA

SEQ ID NO: 1001187 - protein, 152 aa, Homo sapiens
MEDLDQSPLGLCPRTSPSRRARPSFKYHFREASPRTRDGRPMDGREEDDEEMKTIVGSGAGAMSSRIARVGDPGGPHDVVLRRFAGGPVAARGPEELSQFAVYKCLFLVQGLVVIAREDNSSLIRHVFPPVGIAQVAPGAGSSLGSAPRSRA

SEQ ID NO: 1001188 - protein, 87 aa, Homo sapiens
MSSSREVPAPEDPASWLLRVNGNSGRQYTGIKKGGVSRTITSYFMFSPVAPTRDFRGLPTCTPGYNLNTAWSGFRTLIGAEAEEDWK

SEQ ID NO: 1001189 - protein, 91 aa, Homo sapiens
MPTRRQGRVDPSTSAPKRVPQSFVRIPKPKIRQNRFGGCLSLELGGEKAARKGPESFSPVRRRKIPVPRRGVPGGRIGEEPKFQTYSGGID

SEQ ID NO: 1001190 - protein, 286 aa, Homo sapiens
VPHYAEADIVTLQAVTGGNTYAVPSNCPQVQSGMGPPVVDLPLDLDSRFTRSKLVEGQFGEVHLCAVSTRRLKIYGLRLRFPHLNVRYRDYPLLVAVTILRSDATQRSCQGQMIYPSKSRLQRIHVAGLEGTQTIIRRLLGALVSLQRNESPLLAVRINLEINVSKDTGENAFETQRFPHQVGRQPKCLENGTKIGQMPQNGLVGPPFVRGTVVRSGPLAAKEGPPLAQFRETDIPQNMLWRWQIGSGQGARTGIPVPPRGALCAPYFLRDTSKSSTWSLGSNPGE

SEQ ID NO: 1001191 - protein, 272 aa, Homo sapiens
MPWSYKPSPFTPVDCIATGCRIYSEAACTSCGSSSVVHVEGLPQASYRVSASRCGQTSPSLECVPTGMKDHVMHVMLRGIKALLPLRSLACARSSISSSYLQTGDMKQMRRKAGALDGPTSLHDTGPSVVRRKLGDKGVISVATKTRSSLIESPRGGKVGETQGSRESDLIHWGRILLSHGTPMTEGNEGLNFDSKPNTTSHGQPEIPLAQFCRNKSRVWADTARSPSVLRLSLTVESDSVQKFAPMNYSLNVGVHPLKNRNFAPIHVSDHV

SEQ ID NO: 1001192 - protein, 179 aa, Homo sapiens
MTAALIAPRTLLEASLFSRAKRCALSWHTMITCESEDRMDRRVDASGTVDVAEETKTQRAQRFERDALEYLDQLYGAALRMTRNPADAEDVVQEAYAKAFSSFHQFRPGTNLKAWLYRILTNTYINSYRKAQRRPQTSDDQDVEDWQIAKAASHDSNGLRSAELEALDGLPDQQILDAL

SEQ ID NO: 1001193 - protein, 200 aa, Homo sapiens
  misc_feature (31)..(31): Xaa can be any naturally occurring amino acid
MHCVAGRRRGAGGAQDNFSHGRGLASSQRSXFLPITHTGGRKGAQCSPLRSVVSYQDAHMHFVDDKCFHEGRLESSDGSAFPLSRERVCVTTSKDVGFLPQEVRARYNAYNIQGGLFNHTRGSPAGCETQKSLGDTGAGFDEGVGESYSDASSAFHYLFPKSTQFFRNHMCCDGPACSFKSTFTRRRGQQAEAFHGRPQC

SEQ ID NO: 1001194 - protein, 122 aa, Homo sapiens
  misc_feature (96)..(96): Xaa can be any naturally occurring amino acid
MLNVHAKDQVFTKNHGHEAKLGKDFTEGNDAVKVEEAKSVCTDMHSMDVPGIERHSDTTLLARCSIEEDAKEYLRGTFPGLEGNLDTREESPLRRXSASWRHLFESRGCAKITKRLCGCNLS

SEQ ID NO: 1001195 - protein, 433 aa, Homo sapiens
GVQVPVQGASDPADRWRWQREDTRSGCDRPGAPFRAPVAACRWCYGDACGRTMKGGSPKGRGLALTAPDRGDEKGKEKQAGKRKEKGEKTEKRRRTKGEPKSRCTVRHNKRGKNNKNGPAANRGREKRKERKAETQRSKRKEKDKRRNEHTRETRADTNITEEEETQNKTTGKEKGKTNQRRGNRTKREKRSKERAREERAGRRPPRERRTATGIEQQNETPTTKAPTERAKADNQPNTTTPHTTHTTHKEDKQQNREPRKKTERQRQDAKNTRRRKKNRKNNQGRDQTEEDNRPHKRENQHTHTTEGTEGKRRKKRGENKRGGKQTRKTREKKKGQASKKEEENRRDQTEGENEKETEKRERAKTSDTEEANRKREEKRQKEKTANEGSKKQRDGQQEKRDEEENQHATAATQRTANNTKRKARKKHNRQQE

SEQ ID NO: 1001196 - protein, 143 aa, Homo sapiens
MKETTVPISGWAHRSALFGLIDQRGLSCIPCVMALIRAVIPMMLSLIPFGCAFPRYASCVSPSALVFKPFPQGALEQFLCEAEQLGPPVDVGRNRIGDPTLLGSPFTHSDYGNETIPKVYLEEHPQEFATLENGIQGEVNRNS

SEQ ID NO: 1001197 - protein, 85 aa, Homo sapiens
VLDDLARMRLGGRYQRLGGSYMWSAHSIFPADIILAPGTPETLKIVLVQSPSCLLMPRGYATLDSRPVDLASSLEADGPYKRLAR

SEQ ID NO: 1001198 - protein, 153 aa, Homo sapiens
MCQAVELGDSRFGGICQPFSTVDMSTREEQSPERQTDFKQLGTSQSTEKVDGDTQTTVEKRWLSTVTLVGTHSRGLTEPFGFIGGIIVRVMRNNVGKGYRPKELKGYALVTNVLKKKTVLDLCTVPELVGKMTRGPIGWPIRIHGGTLRCQNN

SEQ ID NO: 1001199 - protein, 184 aa, Homo sapiens
AASIRSSAVPSPLWTSTIPSVEASFGSVMGAYQTIFTVFANVHSMVTDPATRQSVTSQKNHSVCCGCDEGVCQGCIYRAIGAPLGKKNGLSMAFVTQVKRVCFEWTYRRCHRTKLVLEVTWSGGRAFHGLTLPNPQYTWNGPGPSGLRYPVRPSITHQQERTMQLIVKRAEEKFDWRELKISVK

SEQ ID NO: 1001200 - protein, 158 aa, Homo sapiens
MRAPRTREWKKVHGLRTHPTTTVCKYRDLSQWLHNVTCVETKSSLGNEKHHGGSGPVRTSRDDPGDTHHCEVFALLTPGRGGYPLGARREGAHEKLTLHSERRRRTLATFIWARGRSATIKEFVDPRKELQWSHTTTMSCVADKQWTGTLADERDTVC

SEQ ID NO: 1001201 - protein, 206 aa, Homo sapiens
YKVQFPYNDPNFPCKGRVQAARVSGKRVFTLKILPGYEGLAHMCVEGPLPRKSTSRTSVVGLLVCQDPVFRRVVFVTRSSTVPIVDFRGKRQASRGLEKEPENSEKSGAVLCGGSPKERDCTTVAGKARILLLSEVVFPRIRCGKHFSECVLREMGGGLYEEASEGEVPFEGKSPKIICERFTQQGDNRDAAPFLIKSVAPRRENI

SEQ ID NO: 1001202 - protein, 132 aa, Homo sapiens
MERADFLCRPTSRCMCCREQAAGSKSCGVEGWACDVGQELGNVPDSPRALSRWYCGSRAVPFNVSIGRRPGRRTDDQCIQAVPMGGQSVHYSLRYGTEVLDETIRTKIDWNFWMAVADALPGTPKLAKLLNP

SEQ ID NO: 1001203 - protein, 105 aa, Homo sapiens
MVAQGEPQVHVQDLYWSGDGGTGQNDLRDRQSMMTGRIETNEVMSADRLGGEEGSIPVVGSHDSDETDAMSAVKCYLRDHSARSEGRNSVRGEDMEWNGPYCSSR

SEQ ID NO: 1001204 - protein, 71 aa, Homo sapiens
  misc_feature (71)..(71): Xaa can be any naturally occurring amino acid
RRRTVELLWARPVCGAWSSGTPTSQRDILLAMLWRTISKGPHCWTPWMVGYARMTALEWDAGQQRYCCMHX

SEQ ID NO: 1001205 - protein, 209 aa, Homo sapiens
GFLRDARQAEGVLSSQEYVLSHTEMPGTLQAADAAIKKLEELHMMGQEKAKDELSAQAEVKKHQVLEQALADYAQLVSEGNIHADKIREKADSIERRHKKNQDAAQQFLGRLRDNREQQHFLQDCHELKLWIDEKMLTAQDVSYDEARNLHTKWQKHQAFMAELAANKDWLDKVDKEGRELTLEKPELKALVSEKLRDLHRRWDELESS

SEQ ID NO: 1001206 - protein, 196 aa, Homo sapiens
MSFSRLASRMRHPPKSSDFLRYGTVAWLDRRNSVCTCVRVPLTWARDPRDQARIGKAEAKERPPLARNVFRPGGHSYGGGATNANARTKGGTGQTGGLTQPKKDEPKKLPPDGRPEPKPGHPPQTREATARTVTPKGQLPGGKAPPKAGSWPQLLPADEGQGARAPREPKSRFATRDRPRSKLLYVYRTLTMLEER

SEQ ID NO: 1001207 - protein, 235 aa, Homo sapiens
APISDHPECFVPYTIGSCATQREGMRASTGVFSNAHGMRGATHGGRPRIVSPCRPRQLVKPVDDYLRNVCRCTHRMKRRLLLMSLFSVIIVLRERSHSWPALYIIADGPHMWLGLIRGLMEVHYSLHKYVKGGSKWNVVIEHLCLCCACCEKRPSSRALDGEGTKHGILVLGRLVCLKCSEWIRACSSRPDKVEESSRIGDMGLHGMYIDSYDQISTSWQYIVLKRDIPEKKDNL

SEQ ID NO: 1001208 - protein, 356 aa, Homo sapiens
  misc_feature (191)..(191): Xaa can be any naturally occurring amino acid
QDGGTCSAGVELFYDVAVAHKSWVGFGDPVPVSGISGKHQSLLGVLAVPGLNKHGDHSENDQSENREPYSRFQLTRDEEGHIAMAKNDVTVSCRQRYSRLTPSTTFCANGTVLARDVMGIVQNVRGISRGTWRYSLNRAHDIVCDVNLQKYLCVERNGVTGSYVRLVAYHDVYRGIVKWIHYSRKPYTKAXSHGGRPAWQKGPGISVMTDTNGPTWDLRVRRGLRLDPSLEGVNETPRLYNGKHPTGKRRALAKTNGEALGGAGPTYKRLGASGERMRDKTAQLWVEYVGILDPGLGARRRLSDGDRDFVRKTRVERGSPVNERILNARVKIGPRLFHTECWPPPKWKGQIPRIRV

SEQ ID NO: 1001209 - protein, 389 aa, Homo sapiens
  misc_feature (116)..(116): Xaa can be any naturally occurring amino acid
MSHLLLRRQPSHIAQTPWEKVEGRSQRIWSYGAPGHLGLLLNSILVTVDIDAIKDPLSVDLQAILVACTCLPSIDAYHMDTIPLDTCHRHEQLGSICHSNGTSHSPVFQRARSLTXIKVRAYAWTTDVRLVRCPAWTSSTHAWRMVLEGSCCKWSGRPTEVVIHTTDPPLSRCTAIVAPWDDERNDEVMNNQSSEDAIRQMAVLHPATVVSTPGQGHPMTSLEKSWNGLMTHRSMPIHCIQEELVDGPSGKRVAVMAAGHLQSIIPDFYWRCKGWWARFIPELKRKLTWHWPSVSPTATLSVVDLNLRLEKLGKYDDIQEGGEAGRRRAPSGIPGYNWSTRGPSDFTAKPSLHLDAGLDGPQDHWQRTRMNTMVTNKWGPAKGPENRTS

SEQ ID NO: 1001210 - protein, 249 aa, Homo sapiens
VAVGRVILEHEEWAPGSRVRRGTLMTPYQALRAWAAGISECSRPSVTSPMGNQLPGRSSDEPRIARAARVARGLCSFSEESQLSEASKRALESCSISRPVRFACISRARSLMFLDGERKVSGSDQLAKLCLLLMCELTEHGGVPNSVMHVPEGRTDLEESVGIYCARGALGGTLLPFAFNASPSRHPVGPEQSSHDGGKDSSHSRSTHRNGIFVPVDSAKQDSVVRSVVLEMGFSDEVVASTFPLTESW

SEQ ID NO: 1001211 - protein, 194 aa, Homo sapiens
MCKIFNVNRVVYTKGLSNLTAAGTIEVLTGGGGLATLMLDVGSQAPSVKAGADLRPKWLPPPSPVSRRQRLAAHQKQLLSVPRHPGQPQPPVTGGVLQGKCQGQKPRLLHAGLFPCGAGPPQWPSNVLLVRQSSGKSWPETGVLANASSPCSPVPGSGPSSRGCFSRAGGFTRSPSPRLSGCLKFSGAISSGFG

SEQ ID NO: 1001212 - protein, 246 aa, Homo sapiens
GHRGRLWLHARDADEGIVEAFLAGAVTSVSLLVNGAATVETRRSLARYGDSIPTGPPRQPVRGPPRVGSGAAVAPLIACVGPRKASSLGKMGIPGGRLADGDCGFASGADAASYRRMARRGPAMSSARRVREELRGPTKLLPGAAGQGPRGTRTGTSERARAPRRVPGVRRGAARPYGVRVYATCRVERGVGGCMLAGGPPRVLRLRAWSCDARADVGPFSARAAGGQTPRVLALAAGQVPFPVFG

SEQ ID NO: 1001213 - protein, 315 aa, Homo sapiens
GPVAGACDGGTRTRTRAPGWVSSPRRRQHVAPICLKYLCVLPYRLLAILAGLSHGMSWTVEQSVTAGPSRSDIHRVLAWRSVHSYLADSPTSLGVARWHMLRYTGYDLRGSLWLACAKRIRTGRGLEALHAAHVAFILCCPQSILFLRGRSIAWLSLGRTHYLASKHETLERQMETPARTSSDQSAIDQLGAMQDCDSAQCGRSCASKEIPAAVASHNSQDWRRHVKWNPLTSEVPWPVWSQTRLHAKTVDGSIDGQAKSMPPKIYKVAGECITKLENFIQEQRRVIGAVGSALLCAGLEMISSAAVHESQVEHY

SEQ ID NO: 1001214 - protein, 153 aa, Homo sapiens
MSLLTGAVPGPSGPRVTAGGTLRVLAAVPRGFTAAERAVVHVKRSDVTQPVPVPAGQCVMSRGYLHVPHVLRPGFVAHLGSHRSCSAGSCSFLRRASNWCQEERLREQNLRALELEPLEVEGTLAGSPPGPGAASQHQTDSAWRRRLTRTRHR

SEQ ID NO: 1001215 - protein, 339 aa, Homo sapiens
MARFKKNKTKTFRNCPQPHAYLPLPSDLEMGLTIMPNPSFPQRLVATGWMKRDSTKRGRSQEKPLDSTVGSRGKTRGWQRWTWTTAAGGEHRRHDTDKEKKDTDAQDTSPNLIGQSNCHPPRTKQITTARDRAIHDSDERGAKKGEAQHKMRQTQRAHEKHRTQRPPTDIRSEQAPPKHTPERQHGEQHKRPPTEPHNGINKSTNAPHDKKRAAQGHVNTTHKLRPTRRTPNEAGTKICRMSPKRMKRTHTHRETANQQTTDYNEPNTETTTQQTNRPIKQATNAEIRTRNEHQRTTKHRQTGKRQKETPDTRQTPKHTDAEKDTAKNKQQHHTPHQKQ

SEQ ID NO: 1001216 - protein, 362 aa, Homo sapiens
  misc_feature (18)..(18): Xaa can be any naturally occurring amino acid
  misc_feature (42)..(42): Xaa can be any naturally occurring amino acid
  misc_feature (99)..(99): Xaa can be any naturally occurring amino acid
  misc_feature (103)..(103): Xaa can be any naturally occurring amino acid
  misc_feature (108)..(109): Xaa can be any naturally occurring amino acid
  misc_feature (116)..(116): Xaa can be any naturally occurring amino acid
  misc_feature (122)..(122): Xaa can be any naturally occurring amino acid
  misc_feature (150)..(150): Xaa can be any naturally occurring amino acid
  misc_feature (288)..(289): Xaa can be any naturally occurring amino acid
MVGPEYRYSDARLGSVVXEPRNMSPTVDIERREVADRRAWRXWADLQGPSVDRRLNRVSRSGCLCRDLERVKCYFLCEELNVSGTHTQCLYSVQLAIPXQRMXKRPMXXRAMLGMXDNLLEXVSLQKNCAQHNCIRAKMAGRGHSHMDAXPVRRIRKYQVDEACRMRRLALNADRVVNGHIGGEVTMRDIRYLSSRWDGGDNNPHRALDSVALGKGNFATGLGIAGLSTRCTSSPNARWLTGFSMGFAADYSAPDEVHTSGDTLKASTTGSRLQGARFMVHEAADEVXXNEELALWSARDIACHPSPLISTKRVVAGWTNPGVPSRELACFLQGWLVNSRGDQLKNFAGLNCPRVGRYCGHR

SEQ ID NO: 1001217 - protein, 31 aa, Homo sapiens
MGEHTEVLKGSCRSFLASTIPVPEPQILIDG

SEQ ID NO: 1001218 - protein, 147 aa, Homo sapiens
  misc_feature (16)..(16): Xaa can be any naturally occurring amino acid
MWAHFSSPKGPNEAKXSGVCKALLNLKRAPGTLYLPLEKCSVRTKTCGALCTSGRGFSLSLFFQEGGFSSPANSQFPDIPFTTREHSAARGVCFPQRGAPQRGKERPPKTPGWGFFPEKSLPQRQHKMWAKFLRVLGRPHKSREEQI

SEQ ID NO: 1001219 - protein, 265 aa, Homo sapiens
MSGNAQWGPMSNIVHHRESDGKVGVALPREIEREESAFATPSPLTRKRSGVDTILPYLLSVEQNSNQTHLQYLGLATVMLLAGDRMDQDRQRPNPLGCNALGTGPVELTMSCYRPLLVSNAPRTRWATCKGLAVVRRPELSMVPCPLRGGPSEGNGNLTKLVPFSSYVGNYMRPAEVAGPVMWAPERPVNHQSEGINGDHSGTPTWFGIGPDPHLSTRRAIPVVQTHSFGVMHCPTRLCSPIHVMATRVIEHNRVFAASWFNPGG

SEQ ID NO: 1001220 - protein, 114 aa, Homo sapiens
RGMRSRPSCCRSWKETHRFIEAARAQGTHVLVHCKMWRQPLSGHPVLAYAMKQYEMLVWMQALLPLCRSFSAQSPCLRTLAFLRQLQIIPGLVLTAEAAIAMSGSRNVGGVSPE

SEQ ID NO: 1001221 - protein, 330 aa, Homo sapiens
MTGGNALLHRKHKQQQTTQTGESRTKQKSNSKQQKPRDERESTTKQNHKTQATEETSETEDRHKDDKKKDRRREKEPQGSEQRSSREAEEKEKKARSTEHSEARTGDRKLKQKPTSTGDTTKRKEDKESKTERREQQQGKKERRPRTKENSNEEHKRTEHKDKTSKEQKRHRADEPRGRRETSKQGRSKDEGGKREEDEQETRGREGRRETKRETNKTDHPENTERKKRKNEKGSEPRPKKTPAQQTQEQEGNTGKKRGNKRKQEESRHKTHDRKETRDKEKSTHRNRRTEREARKKERQEHHTQTQKHTATKPNREENTTHKNDREQTG

SEQ ID NO: 1001222 - protein, 218 aa, Homo sapiens
MLCMNAFPGQMAEREARQGLESRGVVRDWCHNLTVSRCSPECPWTLKDHERKDPHPKGLRGMPYVDTNGATMVGSIQQATGTRRLGHIVRQSMANVRCSKMVLGEAPLLTLGWGLTLRGPCPKGPPNDECITPCARPTFEPSVSRFSQRTGPMSPGSMAIIAFQAPRWANGCARFPVVPRRSAILSCCRKEAFRWAPLRLFFHPFFWVKSRAPFPLCR

SEQ ID NO: 1001223 - protein, 101 aa, Homo sapiens
MREYTFIKEAKRETQEAAKGTRRPPQKQKNARPSYPAGAKDSLSSQEGEADPERYQRQHRGAPTTREQNNHRHWSGHVNQHKKGGIKEVATTWRTGDPGKT

SEQ ID NO: 1001224 - protein, 294 aa, Homo sapiens
SARRTLLLLLLLLLLGLMHCASAAMFMVKNGNGTACIMANFSAAFSVNYDTKSGPKNMTILHLPITIATSCVTSSQHASMMATQSNDITRTTELYARLAIRETGHTLTLNFTRNATRYSVQLMSPVHNLSDTHLLPNASSKEIKTVELYNYIRADIDKNYRCVSGTQVHMTNVTVTLHDATIQAYLSNSSFSTGQTRCEQDRPYPTTAHPAPPSPLAHHPGPKSPSVNQYNVSRHQRQPACRTSTGAATRTSPYQRKDNKTATKDNQPEKPHKTPTTKRKQPEPTPGDTQNNCT

SEQ ID NO: 1001225 - protein, 143 aa, Homo sapiens
VSSVHRCHGVLCVYHRAVMEPTYQLFVRDGSLQPVLRQKSCRGMIWLVWAPYMCPMGSTGLSCVLSMPLSLSRSGTLGHTRKLHIVNCWCEVHRSGGHSLILTSWPWSLLTSRMWGCHAVQGLCGWLASRSLNSDISEAVCLT

SEQ ID NO: 1001226 - protein, 227 aa, Homo sapiens
MGTRKIDKYVGCCSRACRTSLGARLSGLVTVSHEVDPFRNMTAPDHSFLLDESGVADYREHLLSRMHVATALTVRVSICLYGALSSRTRGDANRCKEVPDVLRHHRALDLVENGPGGDCSEQSKERAWDKSLAGWKGDGRYQDICRIKRYVVESRVNSDRRRLANGHEFFVPMTPEDDDSNGIGEWTRIYPNSHGIGKLNSQSTPKEMITLLKMLIDLLPRRDKDLT

SEQ ID NO: 1001227 - protein, 315 aa, Homo sapiens
GGRSHEYAQASERGSHSSVLRCESMKIGLVKTPMRTNEICQLPTSRQHQSRIASVLGDHVVVIIQLKVAVIRCQFPVARIAVRNQHLARPDRAGTMRTLGIHCEQGVIMLEMSPIVTHKKVSPIGSLGDEVKCTFVAPLLLMKDYRDHLTKHRTRPENRLFIHERKAKHLEHGLGNGGDTGLLCERKRKEREIWRAIEERGTNFHHKEVGHGPEKNHEGFSPSHMDTPCACVSWNPRDRWDVATADKAFVKTECPIAGTGPPGPTRPAAGWKRDRAVPIPNGGRTTEKRRDGGGKSKSDKRKPFLISLKGAQGKM

SEQ ID NO: 1001228 - protein, 69 aa, Homo sapiens
VHGDQVFITDWKSFCKGYDPAPGEDYMRSAIETLLSAPSETQSVIAVNLDVDATTNSRRFRIADLLFTA

SEQ ID NO: 1001229 - protein, 67 aa, Homo sapiens
RFFWSRRHRRIAYHMCAINKRISNRTGKEWHGSRLPHNKCFARDCTNEFQNMSSVELYGRNRNLLST

SEQ ID NO: 1001230 - protein, 220 aa, Homo sapiens
MMPSTQEGALVCEIRSVHRSSSVGPFEMCGDNARKHIIVKNSLSKDRGSHRWAAVVALHTAAIKKTEGSIELTERLSFLCPPIGGYTCLRRHYSTAEWCTIPADIGRAMYVAQLGQYALGCVRTLATRPPKERKSVHKTGNEAFGSHVISRPAIETAICAASHCVATHHIGNDGLPSIPLRTNRLGEYDQRRNDAAKGERSVQFPENYHAVQLHRSRPPE

SEQ ID NO: 1001231 - protein, 71 aa, Homo sapiens
ARLSLFVSLAAHCAGWAQSLSLSQRGAAVSRRVQTESGGSVIHRPFPRQSAHKYQLRLLSDLATNSRLVGH

SEQ ID NO: 1001232 - protein, 205 aa, Homo sapiens
MGPLMVGPLVRRKMNRFQFTFGLVSKLGGFPPAHFLIAQFQREHESGNGKPSLNGLVVCGSKCSQNPGLELIRSRGLWIGALILKNGVCCLGPLFWGGDQVPPTKGPSKKWYECTPLEKPAINRRRRALWLIRCPDAACAEGDKHMQGGYIAAPGWWGHTVWVLSSKVAMVIIARCVTHRGFYLLLCVTRKRRWCYETLPCGVLH

SEQ ID NO: 1001233 - protein, 144 aa, Homo sapiens
  misc_feature (135)..(135): Xaa can be any naturally occurring amino acid
MHAEELGSKLRLAAHRDAPTTLIHYPAQASCNDRGHVRWRQAQRGPAAMDGEGEADAMLADDWEPQSHSIDAWTHRCPGKSVPAVQTPPAGSKISVDRSKGFQLVQDRQVNYRALGTFARGLARLSSLSQRAWGXQICDIGASL

SEQ ID NO: 1001234 - protein, 82 aa, Homo sapiens
GGYVLHTGPCCPLRPPGDGTHDASGESHNQGTISRGRFVRAIINGFCLMYEPASFMELTRHDLFYSCSLPRIKYSIHKTIGR

SEQ ID NO: 1001235 - protein, 143 aa, Homo sapiens
LRLEMIDPRDSIVSSPGILIRLLGDIEETANFYFDPPKVPYWSRLVQRGLTIVCLYYIRITRLICDLCHMLDLKGELKLLITRVPEETPIHELSLCAPAKAQANASPWGQCITARQNGVNCRCLAQNKTDPEHVRKGTTTVAP

SEQ ID NO: 1001236 - protein, 110 aa, Homo sapiens
  misc_feature (47)..(47): Xaa can be any naturally occurring amino acid
  misc_feature (95)..(95): Xaa can be any naturally occurring amino acid
KQVCHDIHECKLMATMVAVNQTSICTNTVGYFTSVCPLTSPGVFLGXNQIQGCLPGLGSCHHGTQEPTVPMTDIALHHLSSLELQVSADDPDQMXTLAGLRRRADNRDIC

SEQ ID NO: 1001237 - protein, 174 aa, Homo sapiens
  misc_feature (78)..(78): Xaa can be any naturally occurring amino acid
PGLRGAVAVSSLRRYGVVLDPLTIGVTPREGGVHLAKMSTLPACYSRPSLFEPDIVKLCFDYATCAKKTNRRARIAGXGGHLARLHRVLDDDALGWLLVRRLLCLETCPKHGSDGLRVCTSSSCWSMRVLIGDTTVFVVRDRYCFAIAKHIILWAARFGNSDKASGDLAYGSTR

SEQ ID NO: 1001238 - protein, 297 aa, Homo sapiens
MTFPLSSTSLLLRMRRCIGWSGIAFPRAGCLNKSPVAACMDARIASHTCPYVKKDASEVATSRIELFGTVKDDLSIYWSTRRHLSVHVRHLPAVTSAERELQQIRDETMVNDHEISVESKHQTLQGLAFPLQPEAQRALQQLKQKMVNYIQMKLDLERETIELVHTEPTDCGPDALPGAPRCCPLATFFLYKHTHEGDPLSLSVFIYSMPGYKCSIKERMLYSILQEASSSDSVEQEFPSGDRPETLGGLADGAELTGKDPSYDEGAPKANGLQAGLLAKAKGAQGGKRCHKRSSRV

SEQ ID NO: 1001239 - protein, 105 aa, Homo sapiens
ARQHGPRSQPNTVKKAARVIYEETYYTRLEQAGSSSTNKARVSREIRHYSPPTKLREAMHSKVTVIVTRDRRRYFRTKAQAIDGILPINAAMDGGRREMRGRSTY

SEQ ID NO: 1001240 - protein, 189 aa, Homo sapiens
GRLGPCTRILNRLEGLQGSHRCSVQRRHRSACSPAPFRPLPFWLKVQAAAPAISRDNIVPARSKVPSPILARVTEWIAVVFEKHSGHMSHSYCAASAGSCVCEVLRDAQQSPGGRQWRLSLCLIPDIVDPSWPYTWCCYRRPCGSYVNLQSKRLVPTMNTVATGNWEHVDGGHFLGGRSRSAIALTLVH

SEQ ID NO: 1001241 - protein, 354 aa, Homo sapiens
ANMEPRSHPKPCKKAALLVIDIKVTSTRLGNDFHTNNARVRGWSSITSPSAKHSSDRTKPGYAHRTLYEANSESVPDKMVSSDPLLQDARQRKAESPIMFLRVVSPWHHEPVTREIASLTGDGNSCNAYLNLRAGLMHLGQGLPQARKPIRDWRSSRIRPFGGPSLLELCFLVTCLLIDFSCRLSWGQITLRTNTSQVTRHKLRTHCQWTLVCCKGFLREMKCGFSRYMSRSQNVFVVDRLYHSCAHQSLWCISKTLWVDIFTCGHSPVIRQKAMYEDRRKEGSRMSPVDLLKPRGKTCYLTHHPTVGPPPTGLNLHLWNTGSLPTTMYVHPKSMMNCRTTIFTIATEITTLYT

SEQ ID NO: 1001242 - protein, 70 aa, Homo sapiens
DRDERELVVKDEYLTKTLQRCEERIVSSFKKDVDEAYNDKHRVDAGMSAALETGLEPEQRSDLSLMAHVY

SEQ ID NO: 1001243 - protein, 121 aa, Homo sapiens
GGGGSAGGFRLRGPAAAMILLRGEQPHHRGRRSRSRFENAAAGNKPEAVEVTICRFRWGPLSYFTVLSGAQIHKVMVSISLKFYIRNFRHMVLIELLKTGVPRTFLGKVQESGVHSVSCAI

SEQ ID NO: 1001244 - protein, 219 aa, Homo sapiens
  misc_feature (61)..(61): Xaa can be any naturally occurring amino acid
MDSLSRNSSGASVRRRAFLMHACESASTFRSGAYLTILPQGQFRDCTHLPVSAPVASFLQXCTRTDVIVICTFQGQMNRLTPSGLPGEPGSRVAQQPTHLVCTAHYCVEFSRMELVILVWAQRSSQKSALEVAEVGHGPRTLPAPHPLQSTEITSEEEPVAMWPLSGAPQCKGEDSPRKGWASAQTGLPEKAGDQVPGGQDSALVGPEDRGGQEHRGGT

SEQ ID NO: 1001245 - protein, 174 aa, Homo sapiens
VPHYPTTSSLWHCCLGLLLMVRFHVITISPEDAKGSVVKVNIVWRSLVGSSSYSSRASDAAHGIDEALSACGWWYGHDLVTCQSMALARTDSVCPLALAPGAGGQPRALPRGLRTWARAFMALHLVQRPSPYLRLYVASRGSVRSCSCIRPIGFPLSLPRGTHTRLVRLLCGCT

SEQ ID NO: 1001246 - protein, 106 aa, Homo sapiens
MAQKVTGIQRLVSLRGFKSRKGLTLSEDYPVVPLKRALQGGKRRDGNSKTNRKLNSQKVHIPTSSEVLYNLGNNPSKKQTCLHVLKGDTFHDNCWGTNPYIFLIKR

SEQ ID NO: 1001247 - protein, 101 aa, Homo sapiens
  misc_feature (25)..(25): Xaa can be any naturally occurring amino acid
GKSHGGQGVGLKPAWGGFRFLLLLXLCLEFYCYIRVLLSKCVWWLGVGGASPLLVSTSEVLVEGFSLLFRNFLAFSESAKGLFSQISFETFYYNILYVRVL

SEQ ID NO: 1001248 - protein, 206 aa, Homo sapiens
ENKGFLRNVVSGEHYRFVSMWMARTSYLAAFAIMVIFTLSVSMLLRYSHHQIFVFIAPLLTVILALVGEDPHSVLRPSCEKLALVKKAVDSARSCIVFEGIMSDFFNDTTISFYIILIVWLADQYDAICCHTSNSKRHWLRFFYSLAFAFYAYHYRFNGQYSSLGLVTSWLFIQHSMIYFFQHYELAAILQQSQIQEMLLQATHWD

SEQ ID NO: 1001249 - protein, 400 aa, Homo sapiens
  misc_feature (189)..(189): Xaa can be any naturally occurring amino acid
LDFLAVGVHPGGFFSLAWLGSQALSHGRRRLVPAWGWKRLDVCCLKGLAHGALGECSCLMTRSKRSEPGRGSSWAHDKSPTMPMTCIDSIAWKYGRFAFLTSPKNGLVAVLIPLALTLRWRKLILCVAHQLSHDACNESTFVHRADTYVTTGENPATNGTTMSLRSLAVGLSAGTCYKLLSLYALVFTXNVDTVQIQPKIGCESVTRANGGTLTRDIGTCGLGSQRATRLLPTDEVPTAGRSAQCSVPNLLARRIDGVPTLSVHWDCPLSACGASGLYGRRDPLVAAGFPHHAFRIDLLRGSQRGRRCAVSFSLYVDAVIPVLKASGFPSWVRVVRCGLYAAFVYYQVRHVAFLVGPDGRCLVMPRYTQCFKRPVWYIVTMGRSPTDRVDVIDSAERYGR

SEQ ID NO: 1001250 - protein, 53 aa, Homo sapiens
MSGLFITLLGVGLGLWRGGAPRGFCDRLRFLSGVLISTHFCVVVVLGAVVVFN

SEQ ID NO: 1001251 - protein, 646 aa, Homo sapiens
GPRSKRNRTQVFPTIGIDFKIRTIELDGNADINTARTMGTQPASRTRLLATHSPTRPTYSGACHTAATHCLRSYRTTPPQPQQSSLSHDTTPANPGHSRHTTLTATPPAPSLPTTPLPHTPQLHYPLRATHHAACTACTLPPNARTPRSPPTAQTRAPTSKPTPCAPPSATLTRRPLPPASPPAPRNPTRARHTRPHNHFKLALRHTQLATFSPPNPPSLPPNATPLTSHTTAPPTTTCAHHHTTTTSPRTRGPKPHGTPPPNAGRETPKTPHSAPTPFPASPPPEPHPPAATPKPPQRQTPNPGTPRQAPMCFSLPQRNAGLGHLPFLPLGLGPRPGAPTPTAQGPPFFTPSPLPSPPPSRPPSHRAPSPSGLLATPLGPAPPRCPLSPFGTAALATRPPPHRLSLNTLSTRAPPAAAAAPPPSLRPPEPPPLLPSYGPVAPPPSRRVAPSLQPAGHPAVARAATVPAIHARPKRHLPPQNRGVRPPNNPPPNRPTHTLAAPHTRLSRPRPQTSPCRPLPANFSSRSHAPTTPLGAPPPRANPPRLLPLTPPTHPPSPPRAPRHTFARPPSPTPPLPHPPHPPPRRPPPPPPPFPPLAPPPPPLPLRPPAHTPPALPPRPPPRPPAPAPSRAHLLPSPPTRHSHR

SEQ ID NO: 1001252 - protein, 155 aa, Homo sapiens
VIRNKYECELQEAKQHLESEKLLLYDTLQEELFERIHVVLEEDRQSLVPQLCMVGRSKLARQEAAPWSWDSLPTMLRGRIAPLVSGPYIVYIASRDRHPGGLDSHQNMARAAVSPQEEKIGCDLDPAVHMSVGTLQSSLALHPGILWSSLLQTRR

SEQ ID NO: 1001253 - protein, 227 aa, Homo sapiens
MRSRTIIEWPRYVNRRMECGRGATHVRVARCRRVGSPRLMGTIVEFLSSQALPRRVHRKFRACLHAKGWMATRFLMMHCEHCCSHWACPRERSARSLAWRWRAHGPFGSPPGYGFGRGVYRPGLATYVPWGTQLVVGEAADHCPFGGNSWGPKGGGQRCLEIPRFLGATDLVPPILWLPVGKPPWFDVAHCLRVELHRPKGTSREFGPRKATYQGAKKAPINVQGIV

SEQ ID NO: 1001254 - protein, 114 aa, Homo sapiens
GRQNTGVVKTTPVSQNWDRNRIISAVVVHLDSVDYGQGPHYYWPSDLVKIAGGHSTKEPYAKTLEEGGVLRWERASFKVCLGSVDTTEPAESCNGGITMCISPGGRFETKQGTM

SEQ ID NO: 1001255 - protein, 323 aa, Homo sapiens
MDDPSLFSSPGGGGGPRGRGEQGRMDDPSVGPKIPQALDEDPARCNGEPPREGDELLSRRKRRMVTEQMARSSLGQSASETEEDTCVLYLINGERYPAMRRNRREEEKQPQLVCVGGWSSVESLGDRVEYDFNARSRGSDSPAADVEIEYVTEEPEIYEPNFIFFKRIFEAFKLTDDVKKETEKEPEKLDKLENSADPKKKGSEEEHKDSDDDSSDDEQEKKPESPKLSKKKLRRMNRFTVAATQAAGGSADVVEMHDVTAQDPKLLVQLKGTRNSCALCTPLVFKRNTCRQRGIEKPPFEPGRLHQSTGSKRITRPASNENR

SEQ ID NO: 1001256 - protein, 80 aa, Homo sapiens
GKGPARAEQCKMCDFTLINQTAVDSTESLPRCLTETRVMDKNPVNRPSVGDCDLKGPVVQESTSQTLDDAHMAPGETLEE

SEQ ID NO: 1001257 - protein, 144 aa, Homo sapiens
  misc_feature (56)..(56): Xaa can be any naturally occurring amino acid
MLVVYPHAGFPRTVRSYRYWDAEKKTDWMLRGFLRWSGESDPEFSHGWPPRPVRMXSTGMDPEIRSRWKPDAAVVTDRVAVPRSLTQTIRASVWKPGGEMRGALRYIGGLKASKFILGPSPFFQETFGVYNDKRRDLGWWLDKS

SEQ ID NO: 1001258 - protein, 168 aa, Homo sapiens
GRYGPGFGQPRLRAASSPASSAAVHAAELRPRKPEHHMQKTDMQDQKTNNDKKNQRHNTIKKERHNTVKINTTKKEKNKNKKTYNRQKNQENQRMTQQTSTTHNNQNKTHTKKEHIYQKTPKQDNKKHQANTTQNAIHEKKDKKNNKKNQKNTTNGHNKHRARHKKQN

SEQ ID NO: 1001259 - protein, 171 aa, Homo sapiens
GSPSWQWLMQLSNEYSPATCAYCRAMEMMRTPSIRRSYIQAASNIVTLMRGYVASEVSPCSFASGDMGGRVLVVSLEDTSSGLTLSLSIRSAPYVNHMLRRHHPFHGTFPHRNSEIVRRISSVVAFSIVLFPSWPSLAKEGMLVNRSSCSSNAPTRAHRFQVSFQMAEVAL

SEQ ID NO: 1001260 - protein, 290 aa, Homo sapiens
GPEACTGLPRLPPAMPAAPMPRALWLAHAPCVREGQADAPGEWRSWQCWTWLGGIEICITFPNEYVKTQLQLDERSAPACGTWGIGDCVRQTVLQTMDVLVPVPQAISITCIYVFHPQMDWTYRLGMFRVPQANTCGDAQWTAGQHCVGLLCWTGQLDCGQRTGGGLCDPMETIKVKVHPRPDLPKSTKYRGYFHGDKGDCAGNKELKGTEQGHNTRTRDKEDKGYERRHIQKKKRRPPLRQLGTRRGKQTKKREGKRAEYMRSDQEEEEERDKEEGNRHQMDDRETRGN

SEQ ID NO: 1001261 - protein, 147 aa, Homo sapiens
MPSVRTGTDGKLGPGLNGPTDWRVGHLPLEHLNTQTDVWPLVAPRLATNVPLTLVRWPARVCFCHGHNLQNLILERGPQEDTQGSGSLKGQDEQIDLLQDLISMSLTKGPIWETGIHPYPRLASGAPAPARARKAGPGPMPCELREP

SEQ ID NO: 1001262 - protein, 114 aa, Homo sapiens
MDDRAFGNYEIDCPRICVVHPTYLTSLFIWGHWVLPESSFYGARGCRFWPHVGPFNDLCETAPSQVDNFTGSQVSSFTIAWSIHCNEEDRRASSIDSRLGRDRCEYKYCTGWLT

SEQ ID NO: 1001263 - protein, 386 aa, Homo sapiens
RSTSGLQGQLMSSEPPPATTVSPPIMLQSVLLDDHSREPVMRFTITSSARCLTVVPYAHLITASTGSSDLSFGQTGAGAYTRDSLSYRRRSVKWLLTRLLMGPWPSFTLLGMYGQVPPKHSFRVHYSSEVVSKVEHGSVHSGHMLLDCRSSLIQCCARILKPIRIEKHARSGVMSLSTPRAALVSITWVIPCTRGLWVLEHCSSGSLRQIGWEATPFVAVALVAKTFRAGRSAARTLGMSDNSFHTETGASSRALVPSQSISWRTGYGGPGDVGLWGVPGPSGTAVLTIWQRNRLTILKSIYKHLPKEKNRTPHTHTAHPKGTSNCREMPAHTQRVRQTGAHVAIRAVFPGTQQGFWGATGAVQTRPRTPIYVRPILSLPDKARVN

SEQ ID NO: 1001264 - protein, 106 aa, Homo sapiens
MAWNGWRDIDLRPQSLRGLSLGRYRQDIKCRRRNVLWPSKYWGVCASVILVGAILFGSVAYQQAHLAKPFSQSEEDCPLLARKVGLISDRRTGRLRGTRLCSDKEN

SEQ ID NO: 1001265 - protein, 118 aa, Homo sapiens
MVVVLPRVCPRFLRSVLCFSLLPYDVALAETPWGSSEGAGGGRRGGALGLRCCVIFPLLSLYFRHLVQLQCVLLCIPSVLALLTCMLSSVLLGLPTKTMSHCQREQQRPCVVFSCDGY

SEQ ID NO: 1001266 - protein, 113 aa, Homo sapiens
CRLNPFNPWPHCVQFRVVVSQATQTRRPSGSIAVTVINLNSRKQMKSRISTSYKRRVPVWSPHRLLEFIAYALMTSIVTAESSVGRVSSHAPHCVLGETSIAQKRVLIDMSVK

SEQ ID NO: 1001267 - protein, 105 aa, Homo sapiens
MWAPKWKASRPGGPVENGGNFTPRDQGIPPTHKRTTAEKATIIYDGVRQTQQRDTSYHGAQWVTRGGVSQPRSFVCSRTEGGNAAGDAPHKKRDAITLQQARVTG

SEQ ID NO: 1001268 - protein, 407 aa, Homo sapiens
APIMGRVRTCSVKNGGAVFITVNSDYMRLGKEFHSNKSRCARRLAIIPLVNEAPEDHTIARLTSKASRMKATLHETAQIPQVSSSQACRQEDDENRKTHTYMYPGRGLGASVIHGRLYRMLRIMTTYTDILSRNVVCRTLRSASFVPKHFHASTSRLLDEEIDLFAKPDTSEGSACFSRMCIDLLMFVSLIELYIQNHTFPGEKQSEGIDMEIRKRHSRHRFPVRPCVNCIRSAPSEHKDRDEDGLPNGELGARFFAGAINGRGGKLPKYPAKGVVTVRRVPKKEKRRGKTLVSEKAFVPRGWTNPAVKRRTLYEHSSLGHKSFQGWLGPKGAFPSNISRRRYNKKEKGPLGARKERGTRINQELELEKAWGKPQGRCAPGVPGMVSSLKPMSPPTKMPSGTPGPPL

SEQ ID NO: 1001269 - protein, 280 aa, Homo sapiens
MDLRRLLGKLQSKLLYSAYSKLCRMDFSVQRPWTSASKTNLHHNRGGISQHKGLRKVGVKLSTPAFIPFEVQTSEISISWELKMPQGQELRMVCSELIFRHHFPGTLVTEEHFFVVEFWIKKCRTIKKKHKNKKKRPPGATYMSGGRKKGGLCERATWPTTSGFRDPSFSWYHKAGKLCAGSPPIIGGRPGIKTFGIKAPGLPPGSRKRGGSNKRGESTSRRSRRRAGRTGSGREKADVIPMVMPAHTTTGCDDAVQSRSVRQRHTAATGGDQRLDEPTR

SEQ ID NO: 1001270 - protein, 184 aa, Homo sapiens
  misc_feature (31)..(31): Xaa can be any naturally occurring amino acid
  misc_feature (75)..(75): Xaa can be any naturally occurring amino acid
MQLTSLEQVDVEGLPVRVIAISFEAIWQLFXTSVSYDACSFSSITCPRDKEILDRRDMDLCRNHFARIIPIRDGXPNILCDLSRVVLPSNAPVGKTPRLLAMGLNLSGEHIPAPAPVSLTDHFLWIMTVELKEGDHSIARQGCSPVASKQDRTLGWKHNVRWDCQVVSSHVYPHGSQFNHCSSV

SEQ ID NO: 1001271 - protein, 467 aa, Homo sapiens
PNGKNANGKRRWHPVRQLSVTKQEAQNSVCRSLSLRNKVHCELVGRCGSHGTSPGPLKQRLMRAFGEDGPLLISGVATAREQHASIQVRDVETRLTVRGQNIDPTFPSPSGTPVHLRPRSNGVSVQGLVVLEGLVLTNNRVTKEPFEEPKRSRRTYTETPGRNSCSGGPPVSPLEGTGKMCFAIADHIRGVDPLLKNGIGRTHPVVLFRDAKRRFHTHPFYTILGLRDEPESYKAFKFMSVRKPIGNSPEPFGNPQIRKPGVGPFYLPLGPPLYWIGLQKWGAVPHFNVAYLIPSRRDKSGPKKGHFVLDTVPKGLPKPMCNMEPFSKPKHWFLPRFPANQDGLKTVSGGKTDHKMGPASFLGPLKRPLGMEENGLITGEAREKIFTQTFGPTRNLPWNLNGNSLSPGVNLLGGGLVPQFGFPFVRVPLKRVPLVGVLRSNFRPQRAFGKNQGGQQAWLNKCENHFG

SEQ ID NO: 1001272 - protein, 342 aa, Homo sapiens
MKDGCVSTELGGNIVTVEAYGTGTISFILTDVDRRAVNKSIPRGTERHGKGRPGKCKGLPWVQDEIYHDVSGRGCNKYAEERKEGINLESHLFDAEGKHHEELNVEVAGMGVGRQGTFTYHGGYIRKARGDRYLEGRENTPLDKERKATSPVEYKGRRGVKQPGKGVGRRRLGKAATTKRSHSGEYVPIAASTGSNGERHGDAVACNNSRKMLPPHQTAGDTARRRTQHTQEKASSNDAGQTGTMVVPNRDHSEDALWEVTTGETAPQEREDQVGEQENNLEDTSSCRINKPKNEIAGNGAACRADRRRHRQREPDHKKRQTVTETERPPMVTRTRGQREQP

SEQ ID NO: 1001273 - protein, 234 aa, Homo sapiens
ARAGGGCPALRVLRTNGSALHLRDSRMLLSPARGLVARVAARMTAWAPALSPLVLLLLLLLLSGHWPSIWSCAPPQSVTQGVYYHPARLGAAAVGPHAVDLLCWPDPTRSLAASARADAGVHQTMTLMRQEDEHGHMTMTIVAGCVACRRDPGEGEQQHVERRPAQSRSPCGLRKPETRDTEVDLVLGSPGPASARGSAEAPAELTCTSFAGSGILGMTAPGQLGGQGLHVTAL

SEQ ID NO: 1001274 - protein, 235 aa, Homo sapiens
  misc_feature (166)..(166): Xaa can be any naturally occurring amino acid
MGWIIMMLAMHFRPALCPKTPSLGRVLLPRLVALYVLTYLQFMTVLGLKSDGALESHRSALYDSRSFIKGPPSVPNQDSPILLPSEEVIQTWRTLTSRTHDMTRAPKNLVREQVRRAYPSSKGPNVIVEAPAILGSCPPARKGRRWPHRFNSVGTHGWDWGLNVHXAYVSFGAPVNNKSNTTGETSRECNKYRGGSGRRRRVILPVRPLGLLELLLGNADCCVCTHGGRNLAEST

SEQ ID NO: 1001275 - protein, 125 aa, Homo sapiens
GLSQAPQFGLKVQLPSFLSITHTMEKALSDRVSPGLGLPDIFPLTHERLAVIGFPIPKVPVHAPFVTSYKGLANTAKFGMNSLQNPTAPENSLTCLLPLGSGRLQMTCFLSVPGRHRTRRRVNPK

SEQ ID NO: 1001276 - protein, 74 aa, Homo sapiens
MPPSGYRQVVRRHNRALLEALCNHNKRPDVSVSPRDEQFNRDIEYEAMRECEIADKPTRLGRISLCASNTDTVS

SEQ ID NO: 1001277 - protein, 374 aa, Homo sapiens
MTEVGPVSHHISCPNITRDTKLSSEGFIPKSSLATRYFFNFFSTTSWRGLRENGEIGACGGPLSYNSPVSRSLRNVLCRLAGRKQGYTFESCAPSREHSKRVSTHYSVEALVGALRGRTGAWWLSGAARSVCDAPNRNAVQTIVCQEPRITKGVAFPHISLPRPDFRPRLSLLSNLTRRIRGGTTRGAIKHYIQPSPLPRGGNALGGTKKAPAPEKLATAETVGWATEGITDQHCCSRKPKLSQAHTSSACPKTKAPQRLEAPPKIKKHQKCVTPSIPRGTETANNRLAARRLFGNPRHGTPAGVEREAPNYAQPLKVNTRGYPKGPQAGRLAKGSTFREKPRRANDYPIPTRGVSKSPSRRSRAPETRGTHIR

SEQ ID NO: 1001278 - protein, 155 aa, Homo sapiens
MSTVERNDCADFEPGELALDARILDRHARMCTKSGAVSAWNTRCTRRLYKIVADSKAKVLRAALTEEGRREDASSTLSSYHKPCLGPLWCPQFWKTRILISKKGLADMLCWVQSGEPSRSSLWGLKNIVVRSVVRKKGAVNRTSEADVCGSKVGD

SEQ ID NO: 1001279 - protein, 102 aa, Homo sapiens
  misc_feature (61)..(61): Xaa can be any naturally occurring amino acid
MASMRTSMMRGDLYHRLADVGPELELSTDLLRGGSCSRWTRVSSIHKHTHMPEATHVDVEXTHWCCQVERESREGRGRSYARGQYGIEKPIDSFMKITLGGC

SEQ ID NO: 1001280 - protein, 130 aa, Homo sapiens
MSEMSLSGAVSAGGNSDIELDYGLVQILFDACMEKSHEGTFLREIGKERCKKVSPEAIKMGRTLWVNTRMHEGRRRDPRCAREKQQEDTNAERDLDSWVDIGRCDLLTFGQCTLDTFTRGDEETEARKRQ

SEQ ID NO: 1001281 - protein, 152 aa, Homo sapiens
GVEQRTRVSVPQDAGPGVKVVDNKAYFNRYQCDTLKTTTDEGKQLLVVYARENGIALTTYDEEDKLANLSRRRVQDCNSSGVDQTRAYSIVSDLGVCPVYDAGTMISLAQRYCHDGKPRLDSYSVLDTVWDLENIDRSQVYLYIGLACCGTW

SEQ ID NO: 1001282 - protein, 201 aa, Homo sapiens
MSTGTFSWKLEIIYTIVIDNNTHYWCCNVLSIDYAVETRHQPAVRAVSLCHEQAGDLAFIRTPQVHVWYTEQIILFYSYVHILTEAALKQHLSQHCAACNAGIHKSTGTRTLATDVCRQECHDYCSHRIHVILLTRISALDTILARKLLPNSYSQNSTHVNTTTNDPIARTASTVDFVIPNSNFPLADKAYAHPRCTLLRR

SEQ ID NO: 1001283 - protein, 414 aa, Homo sapiens
  misc_feature (238)..(238): Xaa can be any naturally occurring amino acid
GERVEHAFRLTSGHAYDAASRVVAVSCLPGPKCYMLPLYTPWESFQLPLHSLVRSDEIDPCFVVRFVVVTYKTTYEIKSYQWDEWSSCWAMRCMTKIPPPAGMKNYQSEFSVIAALWYIRWIQGSLANIVLGVDMRGGALYQRCRGSANHQLLTRAPLGGATANRRPDAPGPSPRTQCNGVWMEHLLRATVTTVTERVRDMITQQVYGTWTSDTLVTRCALSSPQAEDLCGWMMGEEXPTGFHPGKKKGLKKDLYCPYRGRRGAPFPYRGVGGSFSQLLNNVQGNSRPLRGLKEAKGFGGKAKRGKQVIYFHWLPRWNWPVERGLPWQTEALVSIATGRGHEGRPSPLVSSRAGYTLDMFVCTRGPGREAPPCLRPRGASFRRGCRAPGREFGLGKPVTAALGYKYIRAGGGAR

SEQ ID NO: 1001284 - protein, 183 aa, Homo sapiens
AALWTEVNRYGQNGDFMRALKTVNKILTDQRRDDVTDHALYKWYALSRMAEFQGSFECHQYSHLKCNANNSLSFAKAYREYRLNRIENASEDKWKRANQQYRQTEGAFMDKCYTVWNAYDEVLSSVVEISSEPPKMIMMRRGKTNPFSSCCEAQSQFGKKSVPENLGLHRRHYMSCATTLHVH

SEQ ID NO: 1001285 - protein, 204 aa, Homo sapiens
MEANQSSTDKRTPEKTLNTVGISLLMQIGQAVGSDRCGYLILSQMNSLEPIKRDPGDVPSHVGCNVEWPPSSVTSSSDSQQWCCVNAQPVKHIRKTISIQGFILTNLGCTSHSSKHISQESNLLTGRCIVRRVREPTGGFHGALWAKSDVRGPPDFTCGNHKAVPIATGCTIKGGGDKKPRKREETRIRTRRTNWHKRHTGATV

SEQ ID NO: 1001286 - protein, 184 aa, Homo sapiens
MDSGRPVVRPTTSSPSRKKGAYDTITLRRQFPAIVGTLDLAEDLDRKYLMERFLICMRGLQASPPPAERRQSCADIQGEASAYRRPWTFEQGDWPTWPHTSSFSGKKKLTKPARCARLITHWAMRRVPGDPEGPWFPSLPFLGYGNLWRHSTQDPFTSLHDMVTWTFRKDLLGQTGLSGGPPCI

SEQ ID NO: 1001287 - protein, 376 aa, Homo sapiens
  misc_feature (127)..(127): Xaa can be any naturally occurring amino acid
MKCDSGPIRTETCYLTYTETSCCSEPVNSKLIVSPGNLTLNKRIATKRRRIHLDALCIAMVPHGKIQDTLSPTCRQLQYSVLESVWVLFLSHVLTMIRDTSLETRNACGNRSQTVPGQQLNRRSRGXHISNPVPYPGRQGHVLSVRRTSMHLEEEAVSTNPYFLCENHIEPIIAYDWTSRDETYKYLQECRVNWPFSKYIRFYVSFGCFNLGFGLRDISIFPSLNKRALSHTATTVINVKNLPFGGNYGVIKKCSVENKPRDEPSVVVPSAQSPAKFTLRQTEVFTARIVVEVFTSHVVNANGKANGRTAAKMAFWENNSYNINNNQEGAKLLSRNHNLIVAHENIPYVMVFTQTEERMVILPLLDRPQTLAPIQI

SEQ ID NO: 1001288 - protein, 101 aa, Homo sapiens
ILGRQSVSFWHCSKIHHQVSVTQTQQLMERKLKLVVVDTPWHFRLQRCPMLQTSKEIIRLRFFCPPQGLMLCVLVVPLGRYTEEEHKATETILNHVWDEEG

SEQ ID NO: 1001289 - protein, 85 aa, Homo sapiens
WKITLVNYGFRYIYNALCVLLGARGTIKLCSEACCFWCLLDLNRMMPVMPAGTQQQGSEGDDIVTVTIIKSMTYNTYCMSATVAL

SEQ ID NO: 1001290 - protein, 392 aa, Homo sapiens
GKNTLSKIKSRVMVGQLCSPLPSTGPKKYKRATFIAQKEEQKENTLLSWALLYPSHTTQLLIAPARVPYTKRVTVKVLEIKNGFTVVCDNVVAFFFTQRFYYYSSMWKNSILNTVAPPPTELRVQKVEDKEKHASKKAGIGANPKISYINKVRCAPLKQYCVSQNHLLTHGAPLYNKYHQQNISPFFNELPLYKKKKRARGPLETSFEGTTYIITSPPVCGTKFSHSGIGRHGGDGLKNRRACATHTEQRSGTTVAPRRLGQARAPLLNTSKSGKPTGKKHSSNKRGQWPTRANNTAAPPPAPHTRSTVARHKGNTNNCTRCQEAKNDDGNEQLGAKRGKTAGYQRDPQRPPRHPPTGGHTLAGYPPQTASSPQTPPNNPRVQPVKKHAYDT

SEQ ID NO: 1001291 - protein, 509 aa, Homo sapiens
SLPKWNNFFFKFQQNSFSPSPQPVARAAPPSLSHPPLHPPSLKPRAEEGIVENVKKAQERSPSVQGKGLPHNIVVVEATSPRAPAVVAVGHSTGVPHRGSPLPLIKYKAFILCTAPTSCVVENKSSLNLCDRNRHRAATSIHRLLSQERHREARTHSQREDYSPPTPPVWGASDNTVRRGHNTEKTLLQKRRPPDHYSRVAQQGGGDTKQRRERRTRKVERPEGHKYRGRENRRALVSAPPKYNMTGRSHQAGHTPEQKHRALQRSVTPHTDFVAESSAHMREEEQGTTGWRTLTQTQPTVVGGAATKTANSRPLLTSGGPPHSSKKPRDVTPQSRFTRSCLSDNNPAPLPTHTPAGWMMQARPPRTRAHLLTDRQQNDTPCRVGGQPPPMLTEVGHATLAPSATSRRAYTTEHHYHLLSSPRASPTLLVLLYCLTDHRPTRSPPLLAQAEHGCTPHSLCVSTLSRVAPPRLCALWLERTHHSHRQERATTFSRGRAAQSVTAPPSPAA

SEQ ID NO: 1001292 - protein, 228 aa, Homo sapiens
  misc_feature (23)..(23): Xaa can be any naturally occurring amino acid
MAGLLEEALTEKVQKQEDLDKDXKYTSYRITKTGQAVSRSQGEGLESGLQEAAQSRVLAKKFGPPTSDRIGPFWTLFEPGNEHGVAPPNGGDEFPAAVSVSTGSLPHDLPGVWAHDRFGQPITALAQGEAPKNAVTPSTDRDTFPLTPFGEIWQLSMGAPISTHKAKGPYEDCLSITGAPRKRKGIIPTKEPFRSLGFSQTQARKSVIRKHSDWAPPPTRHPTVNGAT

SEQ ID NO: 1001293 - protein, 112 aa, Homo sapiens
  misc_feature (89)..(89): Xaa can be any naturally occurring amino acid
MGNTSYSGDPPHLWQRFCAIQGHTGRSSNPIKGQFIEAAKSGSQHGEPYRMEIVQTERQLRAHYIPIVKGAATCLVTVSGNMTAQRKGXTIKVTKGVGSSRTVTFPIFESRA

SEQ ID NO: 1001294 - protein, 319 aa, Homo sapiens
MRDLVDCCRVLIASLESTSSVGRAYVTSLDAAYGGAIVHGVARIIAGHASYSSLTGASSRIRQYLQGFLDLLSCTYYHTIRTVAWDGLLRSSDACLPEVTLMSSELSTVDRPFSSPMGPDASAIALHSRRECIVVFLCHPSGFTYLTVDGRFLLELERRCECFLEHGINGTYVTTQGDRGIPKPPRVRSKVYRLTRCWAPSSGVGPLRNFTQAFTFAQPAHGTIPRFKGARSIRFFFPQQLCPPRYINALVAPSGPFSSFDGVGHLTSGTYAHVPAFHVGVTLYVVPPFHSEGTFTDQFYAVVVANNPPGIQDLPGWNL

SEQ ID NO: 1001295 - protein, 152 aa, Homo sapiens
MEYRWLLCCQHLSLMALICEASWGRGLPGACPLGKTGIGVDRRHAPTGDCGTHKPHMMTENIALVTPQQGTIVTLGQMELTKRNEQFKGVGRIPKTGGDLRAWPLSVNAPSPTNLGKGQDQKRVKTNDGPGREQNGQNREAQCKVVDQRDRW

SEQ ID NO: 1001296 - protein, 139 aa, Homo sapiens
RRIRTSAYSLTGSQGEEEIAALVIDNVLRACAKLVLHGDDAPRAFFPIQSGQGCPRHQEDVTGGAMGQNVISYVGDEAPETMRGHPDPEVPPYEAWTSDNPNWDRPLGREAFWQTEHLLRNEALQLLGTPETRSHTQVD

SEQ ID NO: 1001297 - protein, 183 aa, Homo sapiens
MSQPLAHNGKPYSQWLDPSMDSRCHQINLTDWGDTDSRRSPVLPESVMTTMESVLLTRCGGGPIDINMILIGHRLQIDTQEAPPVEELSSSVFHMYTDVKSPLGKRIVHAPGLLRIGREASPIRGKHNRSARRTLFHTYTTSQMRQLTDDVATCPMVPSWDSRHGGHVPNTEKRGVLYGPRHR

SEQ ID NO: 1001298 - protein, 70 aa, Homo sapiens
MFVGARLNLSWKNVGRTRCATWAWRSEFGDVVQFVIPKEVHRWQDEIIPPGESNAGTAWQQKSAWRDSNR

SEQ ID NO: 1001299 - protein, 205 aa, Homo sapiens
MRIVKAKAGSLSYERSISDYGPREYEADVQNLKFVMAEDGQEKQWITFYVARRKNPKVGRLSLRNSDGITSDVSRQHGVRRGVARLLRPIVKIFNENLVKLNKASNLDNAWRDVSEPIMISNGGDPESGSRVKMESSIITTAVGHSGPEHLHSEHTQNLTLWRRIHAVAFGVDSPVGKTHGHPICHGGIRMSMTNPSTGREQTDF

SEQ ID NO: 1001300 - protein, 82 aa, Homo sapiens
EELTGEITRPVMDDQRELISNNESLPDAVSRGPGVPTEHAEIGKHRGSTLLLRGRCIHWRDELCIFDMARTTSGIHSLYAGT

SEQ ID NO: 1001301 - protein, 342 aa, Homo sapiens
RSRATASKRMLLLARFPRGVHARNTKSLLPTVSGSPSPSCRKLLALQRPLRSTALTQSLLQETPQPTEAPMKHHLDPVPPAGNSSPTEALNEAAALSRANVSLLNPAHSLCCPSSPLLPLTVAEGCSVGTVAGEDNTRDPPEPCLTVSPLMQLGNSDPPKEWEYTSRSSGDWVMHGLVFRDSMQGALRLLLSLPLSLCCPVRKLGSGGLDQIRGVPPLGHVLESCDSQPLPIHVLLLSLTEGSNQKRKHPNADPARGPQTPSTSVGPWWHYTPANARGPPELQAGKPGDVKATNRTRDTPHYERHHIYSLTRTRHHARRATRPTNRLTKIRNTTTHIRAAIP

SEQ ID NO: 1001302 - protein, 45 aa, Homo sapiens
MSVAQTDMTHGTLPPSHPEPNALSRPTLLSPRPDLMTRIQLNPCA

SEQ ID NO: 1001303 - protein, 379 aa, Homo sapiens
MVAAEHGQVHETWRSVVLVLCLDATPDSKLSSGEEHSMHGTSKIARYRPCSEVAGHLTATPRQSDELAMGKKKIAKRSRRENLCVIVYNYNHLMPTRYSVDIPLDNTVCHITDVVHEILLLKRNGSDREAKVKFEGEIHKTGNERSRFFQEYWRSYRLLRLSDRFKTIHTTDTHKEILRNNKTRGDSLLGVECRITHLRVNLKCAQLGVRTLRVESHGDPQWFILWFTARRKVENFCRAGGSPSYKGKSWNYTCSRMSAGDALTPWEGLKENAGRHKNCGNGCPTTGKFLVTASAAMTAHWQSVTCGGKRHEHKRTALQGALPRELNPPTGWSTKGTALERGAVKTLGPPTYTRVIKRYREALSGANPYTWDTAVYHIA

SEQ ID NO: 1001304 - protein, 327 aa, Homo sapiens
AYAHRTTCLLCKGSLVHPIVRARGEVGRQQRRNAVVQSPRSTYFSMDVCHTCPVMLERSTTVSCSLVHKTGLPFVLCGCSTGPSGQAYKGAIQGKVLHQETRWLSLQRRNARHLKCHSAVPTTELRKDHSGNYTAALSATTQQESRDKVRTAPPSDPEAGALDKGDNAEKWDLFRLQLAGDGPSDPRMSSGVDRNWREKNVVTSGAALLNTKDDRYMTSCYKYMPCGLTSLQLTRRVGNTPWVERKRLIVSFPLGTPPPLAWGWPVKQKEPQWVELPWGGQGRPRSATNALGLWNRPPLLFHNPRQRKGRKPRLGKPTQVVPQGEKL

SEQ ID NO: 1001305 - protein, 121 aa, Homo sapiens
ALLSGPSQYDPLGPQRISWKSPLTLDELFGTPQTVLEERWTETLLGHALCVVLSGATVIIDNNALPLHPGNWGRVGSGYVDLMEGLHDGHFYALKLNPVSLSSRTEEEARSMKPDHVIALF

SEQ ID NO: 1001306 - protein, 103 aa, Homo sapiens
MAPLPLPPKGATLAGSLPPMGLPTGSPDHNERLYPQGSANPRMRDHRPSACPGVTQRQLERSQIIVSPSSAQYSDCGIVRLHHLSSLSTLPGTTVVIMTQQEV

SEQ ID NO: 1001307 - protein, 135 aa, Homo sapiens
  misc_feature (60)..(60): Xaa can be any naturally occurring amino acid
MMIVCTERKTQNDQTKGQLRWYPVPFESGCNRTEDNTPTQDLNSNGVSRKAEDWGSGITXDLVVPRGFQGRSLESFRNIMNMGLYRHVNGVAGSGSPEALDRRVYVYSTWAYSQKCIVGTQRNTPSGDVHVLEEA

SEQ ID NO: 1001308 - protein, 171 aa, Homo sapiens
MTEGKKQQDAEHIDDGMRCILAGNRRHLHRHLQGLKTSAVNMILCDCDDVPERDQRPPELQHRARREGRRKRVLGLVLLRAREEVWSQMSEVRRDPPSQRYLRYCIEVPHCLEACPGETHSEVRGTVRCWATTVNSAACGFPHCPKASVHRTLLGQDPMRLGGGQSPNRVK

SEQ ID NO: 1001309 - protein, 111 aa, Homo sapiens
  misc_feature (62)..(62): Xaa can be any naturally occurring amino acid
MVYDVNCVSRLLLQAALSTKNSRHYSEQTRPHIQHHTPNTPTRVGHSQLPTCSPEGFTSSRXVTKMWQSCKSVQTQESSHTVLRRVYYHRVFLILMTPALIDEPLISPWFQ

SEQ ID NO: 1001310 - protein, 322 aa, Homo sapiens
MTKRGRIAAASVHAGIAERNRYLEGIAAELSRCTSCGYRAGRKARVGRLPRGGRSAADGGALVRAGALHVARRVGVGRGLQPHSTSGSAVLQIDGMPCVRPALPDDGMEDRRLACDENRSVGLLDFLEVISRILIPPWRDARTRASRVEVTTKNMGLRRHREGNSCFGGDSLDKVAGHSRGGPGRGLGARPGGERGPVVSEVALAFGQGAPLGFGPRASMGPGRGRRRHRCGAPGTAPRSATLLAQPSGTYFFTFGFGPQGGGTKGPLVDCWDNFRGHGIRKAPWNKVKHIGEGTGFPETAGASLMRGVPSNNFSCSCQTVF

SEQ ID NO: 1001311 - protein, 314 aa, Homo sapiens
  misc_feature (27)..(27): Xaa can be any naturally occurring amino acid
MRRAQNACRKDLLARSFSPRIDTHDDXIGISLSPAYNTMNLLCAHVNSLEAYVRGMERARLPALASAHAGPDDIGDRVIADHREVARPTRVPLVGLITNVSPLMASGTIASCAENATIPDITFTLHMVRISRCNLEHRSTQMLRENPRDLRGVLWIRLPSPRAERPRSGPNPCAMGTQALQNGDSWGSMSLRHIGPQAPTWPYVHRLAMDCHVGTRSRFAPTRVALPLAVGWVSPVWRRQPLRERPERTHLAYEPTLSRERVKVNAQPRMNPENFLTPVRLSILAAGPGTNWVPPLANKSVVLPLARVELTGAE

SEQ ID NO: 1001312 - protein, 273 aa, Homo sapiens
  misc_feature (32)..(32): Xaa can be any naturally occurring amino acid
  misc_feature (81)..(81): Xaa can be any naturally occurring amino acid
  misc_feature (96)..(96): Xaa can be any naturally occurring amino acid
  misc_feature (204)..(204): Xaa can be any naturally occurring amino acid
MTNDGSLSLLSILCETKVYSETIGKWTPYANXFDNVAKMHPFGHEYFDVTSRERKRPRVGHQNEKLIDWKALGPEDVNIAXKFKSCFGCESVRNLXPQAIKDHLDIVPVLLSHQPNVNEALQTACELGKRNSTKEFDEQDVPMFVWDPAPNTTSGFVWRSPLSEGKRHSPVGPRQPCQALRSYTCKGGVQAGPRPIGTELAFAXTRSPSRNVLRSTPRRQKSAPLARQEGLCERRYGIRSPTSLPPKGFGTPATEKRPIFSIGSLCGPNLLVA

SEQ ID NO: 1001313 - protein, 336 aa, Homo sapiens
MRLTKGGTKGSQEEMWLIHFSYRGDCVTDVNSTMHTVLEYYTKIIREGNGSVSATDSNGNPEIGTLHGLIGVRVFDSDVSSDLRDMNERLHLGTQFPQSDLLHSTVHGIHRHCPDLICPWPLRCITRVVINKLVFPLAQERTGPELREFDTLTVDRQALTCMVHLASVFVSGVRVVHSKRTAEQSRYRKTYLSARCQSGPPKSGRMMMEIYVPREVQTNDLKEVVNKLIPDSIGKRHRKGLPIYFILSMMSSVRNSTHCLKKPKFCLWEQLMELHGDNGHVVPGKKALGDEDRVLKVERSLTGILNPPVPRNLFKASGPSNQWANNKRCSFVNTPI

SEQ ID NO: 1001314 - protein, 194 aa, Homo sapiens
QPLTYSADALCVCVCVCVCVCVCVGERVVAQGLGYRQCGKCEASLIIIISATVMSLHVERATRVPASGLEGFITTRVFFTVVSCVSISSTLCLVSLMKGLVCSQAGASQETLKGTWLRLGSREYLLGHSLSKKDLVSILQLRQVLLVCASWEDLLIGGSACRILLPQGDVASPMRPEGPHLWGPNISVLHQVCH

SEQ ID NO: 1001315 - protein, 296 aa, Homo sapiens
VSTSIGRLAMNKSDRYQWCGEYRVPHGTQELAVDSPLYLEEESWIVSAYSSAWTYVRGSHDNIGSHSVDPSPAPKESRDLESDWLVMGLRLMMEDDRRSSPEYCQQFDAQVADSSREVSQSPVCDSERTWLSWDLISTCPFGSIRSRLTQSGVLRSGGRNHTRVVAFTWISTQTQLWAEPKNWTLANAIDRFGNASTGHLPSGIGDFHHFGRKPNSLDARRLVGAVTMLGTRDRTQPRMRGTTRGEWIGFRVIGFKDKRIPKGTPGLIVRQCRWRGNGTLGDLYHCKPPEGRAMGE

SEQ ID NO: 1001316 - protein, 284 aa, Homo sapiens
  misc_feature (220)..(220): Xaa can be any naturally occurring amino acid
MAWSCKPHFALRTGKRAAWPTGGFTSQAGSCMDSLQTCNGPRLANGAPHSAPLPLGRVLSPVPVGGGCASTSSCYHTGMVAASRGLPGLQARVSDASGVALDMFSYTNRLASDLTSSTFIVDLREGWRRVTVHGRSLVMIPERCHAVPEWTYTDPRIQSIFTPHGKGPRSPLKERRCASSLARSETKIERGVIAYGFDAGPGFDAPVREPVYSRTDERLXVITDVNENEVSKRLRIVSVWPVPTPGLVRRYGARNRAKEAAEQDVDRRTTIKPILGALGSQEPR

SEQ ID NO: 1001317 - protein, 163 aa, Homo sapiens
MTGGNWMTRVTQLIPKTKIPGQGLLSAHAVSGSAPIARLLANLARADSDVLKIWRTSNLRPCMTGARRDEKSGNPGESSRGWMWGCAFSGDSQYIVTASSDNLARLWCVETGEIKREYGGTQKAVSALAFNDQCAGLACDPSGLLVQVGGSWRDPCSTQVRAD

SEQ ID NO: 1001318 - protein, 152 aa, Homo sapiens
GGTSRKPTAGRTSATAVDRDDIQDHILWALKGMTLRYKKKDDVVLSEAVKVAGIVKPRLARYIEPMGWQLNQPTWPLVDKGEDAHLFVRTHCQFYDGEELFATSLMPSLKVNLGRARLKPAVAALETVMSRMYLRGYPVIFASPGWSSLPAK

SEQ ID NO: 1001319 - protein, 296 aa, Homo sapiens
  misc_feature (210)..(210): Xaa can be any naturally occurring amino acid
MEMPITSDAIVGQGSKWTLTYGAGAYGRIELYTVTHWTHFEHTHTIHIGVSPRKDHERTQIKTECRISRNSLTILIPWVDRDGYKVCTNMGCHRTTQSLKIKGERVSLSKTRGDIKPTEVYGSRGAVTVPHGGNSAFVGAPLKIGPLVRAPSTANSIFAWARCVEKGGRTLGNRRDGSGFCMIFGVLRVLQRLRPPMKDASPFEEILHLXKVGGRGTQTFGEHIREERGDRKGRPRRGGRVGEYPASWDMVHGWESIGRASTVGRWETHSGVRSGQNRDSPGRGFTGDGGMTANTH

SEQ ID NO: 1001320 - protein, 292 aa, Homo sapiens
SIAPPTFQHSAGRSLTGQGTEPMMAAADGDDSLYPIAVLKTNLRNEDGSASPQTAVKEAVHPSPWPLAVEYGIADSEHSARLPYSSTIYDEDEVLLALAEQLGTFTTLVGGPEYVHCLLPPLELAWTTVARRHVCARSKAVVGPYRAIITSCVTRASDLVAHFSGLLVKRLAGGDWFASRLLGLRTLSPSAVPECSSAVRAGCFEHVLPDTCAQMTPAMVRRAAVSKLGEFAEVLELDKVQSEIIPMFSNWALTSPDSVRCGGGGVRLTRASSAPGGSGGLVMPTLGPGVED

SEQ ID NO: 1001321 - protein, 259 aa, Homo sapiens
  misc_feature (166)..(166): Xaa can be any naturally occurring amino acid
  misc_feature (198)..(199): Xaa can be any naturally occurring amino acid
  misc_feature (219)..(219): Xaa can be any naturally occurring amino acid
  misc_feature (242)..(242): Xaa can be any naturally occurring amino acid
MAPSRNGMVLKPHFHNGLAGRRCVPQCVQSMRGRVQDSAARNGLGYCRMCAARHRSLRSRCQASLVRAQSVSHASTGFLCSHIEMAAAAWPACVQALDGRSRGVPGYFTTDTVCLGPYRDILLVRIPAMEGLEHRRPNVQRPLGKDRTSVGKDALERASSSAPEIXILCVHPMRQVRFSAPNKKRGKTTYRGVESEPXXNLVRKPQALDAWNRGPIALXPEDMSNYMQTGREGVGKSINVAXETSTAHFRKTLALSSSR

SEQ ID NO: 1001322 - protein, 421 aa, Homo sapiens
  misc_feature (123)..(124): Xaa can be any naturally occurring amino acid
MPNTRSMSSKPDHFSAVTSSAICLRWQYAVSSVDPLAKLRTSTYQPWSFSNEIHPAVATLLVVEKCSETVTRTAWKPSSTSSRNTDYPSNTTDTLPWFETEDRSLLWHYVPPAVVHAREEALXXTLKYRLGVRSYQYSVCYVCVNAQADAVLQTTPARAGRLAWEVLAPHQRPNTCGIMRTHNGNMQHRVAENAAYTGSQSCLPLELQGRNGWATVKASVLDVRTDKPYQSGWEVDPDWILRVTRSQENLERTNVTAEYTADTLVSVTAVSFSPHVTLWVGWKNPVIEGQIPLFSLVNRGGDTICLRQVPKWTCKPVARITGPRCTLCPGTYIRDCTNDRPARKCVRDTLPGISRPSPGVREIDRAIHKLSNRGFARVDWPPSVAETSRGFHFACGAPVLPNRHMWSAPIFGEAKNTVFGR

SEQ ID NO: 1001323 - protein, 173 aa, Homo sapiens
  misc_feature (3)..(3): Xaa can be any naturally occurring amino acid
  misc_feature (8)..(8): Xaa can be any naturally occurring amino acid
MSXFEQYXRCDYNFGERGDAFMSAWGENTSAREILSLSGNTRAAFVPVFVEKLLPCFGHRGRRVVDKDHFFLLVRISTPGAPAPILSHRGVRGVSEKPAAPLCVGRGGSLTEVAGRTPMEKGREEIWARIHPRCPPEKGRGGLFPPPKEERRIPPGVPKRKRLIEEPGPLGPY

SEQ ID NO: 1001324 - protein, 229 aa, Homo sapiens
MLQLKGGVHTNVALESALSRLSCDSGISTRPRSSQSCVENYKRHMYPHQGHSQIPRDYTRYNEQGATSPNRWRHGLFLRNVPKQIHETDSCASPFGHSPKVLPAAPSTEPLQHSYGDPWTQPGPPVNTAHGHHHADIKAPRAIKRTIPQSAIQPRTIQHGQETHIGAQTPQPTPNPHHPAHEQQTPPRPPNHPRAAPPPTHPRSQHTAPPRQASNRQEPNTPDTNTAHD

SEQ ID NO: 1001325 - protein, 357 aa, Homo sapiens
  misc_feature (283)..(283): Xaa can be any naturally occurring amino acid
GFPSLLKPVSKMRMATPLLSIALPMGALPRVGPMLECQLSMDIHDQRTMCMHLAPRMSDPPARCTRSREGGASRHEPADTVKNTDGMTIVLLKVFEESWIATRSASVHVMKIEAVLTSLLAVKHALVAQSPTEDMVTCSQSAQERRLYAIDSLIVHPGFISGPKLSTRTREHNLATLSAYGTAIWLTCLVVSFPQWVTGGSPKSQVSPWATYRLLVSSRVNLEDPRHIWCLRVWIHIQDPRAQFPIIVIKRVMHGPVVTTQFLCRDATQDYAVTTLYYFSFPXIKGTPKGPVPTQILSSRGPFVTPFNSPRIEGTSLAECPVGIILFSVRTPPFGEAERNLRHPLRVQAHNQRPKSY

SEQ ID NO: 1001326 - protein, 225 aa, Homo sapiens
MPWTGAPGQGKEKTMSYPALVSGVLWGWNLPRGPPGKIRCWPGPPSDLGPSKGTPCTKRAMTERNEVVAKKPSLLGRRGVPRRVGCTPEALSKETPTWFVPPNSRRIRCDRKAKRAPIIRYSRAHFPIKPTQGENKEGRVPSDEGGLSSLAQTPLGRPEGTPLAGALFCLPGGMAPTDHRGGSQLEKGEVLARHNENRYNSKRPPQPFSPWTQETGRHTTGPDFH

SEQ ID NO: 1001327 - protein, 97 aa, Homo sapiens
RVAPRAQSLSFADPTSVHTRRQLTMDDDIAALGRSTTGSGDVHMPAFVGLTECPPGSVSSPSDRGALTYGCQAAMHGRAWSQQGIPMWADVGPRTQR

SEQ ID NO: 1001328 - protein, 350 aa, Homo sapiens
MVENEIAALVIRSKWLQSSDAHSVVIAWGRAAPLSRCSPFHSCGRFQYNLGAVMVEAVLAIQELHNDRAELVPRGKAMGITEPMTVTSIVRHGESSTKLGTTDGRHDTVHQHSFLRIGGQLQWLPVQEAAASCLTDSEGHPLKHTQRAYINEQTDDVSSYVIEDRSNTPGRMITDGQSRSSACSSSTPSGAAFDWDTCHWTSWTTGVTHNGDPVYKKGYRHLAPQRAVLTSWTLGLAWEPDQTTLMKDPHLIEAYRLQHHGRAGTSWRDIHRRKLCYVGPLELRAGEWPTRRNPSSSSARRSYKAVRMGRSITIGNDAVPGGPGGRGSKHYIPWVMDILRESTESHVQVP

SEQ ID NO: 1001329 - protein, 401 aa, Homo sapiens
AEVKDTGAGPARSCEREPGTPGAMDGLGAPDLLSQPETECAGHEGDHPMDNAWGKLLNVTLRIGPSDAARLHQALAGGGSTFFEIPYPCELSRQDDRTGVHEGVNELTPTNPPLPNVPTCREETVPSGGSCTRADGRQRALSSRAYSPVASPVVSPATERHAAGAIEHHPKLVLMGQTPCPPFRLPDTKCSDLATPPTVLWRVRRTWPPFHSAPCPESPFAPPFGPFRPTPPAPPCHLNFPWPRRTLRPCRFGGASGMSGPKLAILLAALEPRLVESEHGRTPLRGSVLPTSWGRLDPSSLTPPRNNSDLGAHRRFVPHELGESGSSAHPLRSGHYRTTLRLVAHTTHPLGYPPIFLYVTTGNALVSTIIARVSNDHPSPRPLLVSRISPLLLPHTVGQSS

SEQ ID NO: 1001330 - protein, 96 aa, Homo sapiens
VKSVPCDLRRVGDKRFLVGYNESSQHCLVTSISRMTYERVCIRVKSHELNTESLFLTRATCTMSRHSSCRDQAFMLPNRACTQMYKSSYDHVLKLT

SEQ ID NO: 1001331 - protein, 276 aa, Homo sapiens
AYGEALGLASLGGPEDSPWSTCPEHSGMHRHRPTGSVLLGLGEGSWSLDEEARMAWLPYNHLRVIGYGYRLSACSCDREGRSSWAKAYDPTTRIRPKAVVLPISSVQALPVDVDRIPESLTSSMFLGVFTLVSNSQEIGLAQQWTLAIVDCVASRRETSIVFGAMDPFVFPSLNAPMGALSAKRYDLQRLVGVGLLCSLLHAYPYLANVRLVRSYSYPTKRARGGPWRDVTPEHERTMRVDRKLHKRARWAVAHVNACALAKPYTSSASSAYKRQP

SEQ ID NO: 1001332 - protein, 67 aa, Homo sapiens
GPANMGRVRTENRERRSARVSHRISNYTRQGTRFPHEQARWCVGESPYSPQTKRLRLTRLAGYAHAL

SEQ ID NO: 1001333 - protein, 345 aa, Homo sapiens
SGRRCEGSRGMSCDICRWMVVRNCITVFLDHTRNKQTYSDVVRPNNLEWSPAEVRLPLLDATVVLQHRYCVDVEPASRTGDTVSVEWSTYRRKDPCQTETHCRDAALMVAGTTNAEHSNCFVAYRSSERCRTHGVRKRQVTERRPGALGQGQSPARVAWRPTSLRCNDAGTGPSELGVKGKEKGGKHGSPIPHEACHARRTRMLPQEVDTKRFKHGLVSFRGASERMKISWTRTHHIKKTDTTGPGHKIVPKPPRSPLPHREPAQSIYGGEERENQNMTGAWDTQPTYKDPVMGKGLASAQGMIDKPAKTLEGGLGKKGTNRNPWGPGDWAVNTLGPDQPPWAKP

SEQ ID NO: 1001334 - protein, 89 aa, Homo sapiens
EEKQELSGHRINNPVVDDQTLILISKQVQLNLPEWLGPAPWGPVNGANAARTVAQAACCHTACCNHSRRMKLCIIFVVDTGASNGLTSV

SEQ ID NO: 1001335 - protein, 111 aa, Homo sapiens
  misc_feature (9)..(9): Xaa can be any naturally occurring amino acid
MKSEHTWGXWGGTTHRASYHPAQTRKIIKRFSHAHGGNTHKGGLAPTERTQKERAKRHRKQIAALKETHNGASTKLRGRPRTGQAISCPHHTLQITARQTVRAEAPYTPAG

SEQ ID NO: 1001336 - protein, 315 aa, Homo sapiens
LFMLLRGHSPFRQHKINDKHEIERVMLTMAVGAAPSSFSPELQTPMLEGLLQRDVKPEIGLPGPRGSGGEREPLVSAPWTGRWSSMPKYPPPTDPPSEGTVNAAARLSYHWLRYECSEVTSINGTQGLAVIMLSHGGSYAQAFPAHTLSGAAGSKEVGQRACALRSTTQPACRQDPGMVGIGKEEPGTKHAGASDGRHTPLGKGRAFSSGYDVRTIGQASFADPSGRRLSSIRTCTRNAPRVGGGEALRPRGDLVTMEEIQIVGETRITERTVAAPQDPRRGNGNKQCDSDPSWVQRKKECARLREAQELGQRVT

SEQ ID NO: 1001337 - protein, 536 aa, Homo sapiens
  misc_feature (82)..(82): Xaa can be any naturally occurring amino acid
  misc_feature (137)..(137): Xaa can be any naturally occurring amino acid
  misc_feature (454)..(454): Xaa can be any naturally occurring amino acid
AEDGGGAASWGLMVEAISWDAMGGQLMGSNRYVLGPEWWLARTPVTGINHFVAMCLLEDQAREIILALVTLEKTVSVTPESXLTECPTTLTSSGLQTGIMSGRERGRRHGYSLSRKHNTLQAKGLTSAGLHEYPFLXRLDFGAGAIPRARSHIRTKGKKMPSMWCVSIACPVQEGSVGGLEKVANREGESLSPCDPRASRHWGLPTVGGCVGSAHKVDPQVQWGGQMRQPHWEKRGWNRKGHKKPRTKARTDNSPKEKPGAHGTGQRTQDIRVGKDAYTDEETKKTRPGYTDTDRTGTANNILGGKRDTPKEEFPITETQTRTEAHFPGGMPLGRPAIWKKAGGVQIPRAKTKAEPSGKRAQQEEATTRRKTNSTHAQWGRHKHGGARHQKWVGRGGQAISMAALNGSEHHGEKLQHQDKVGPKTPGGEATTNREQRTEERQGEVGDTLEHQCXGCLQKPRGLYEQQCGDKNNTLPGDKGGSEQSTRAAFREGRPPLPEGGTPQRTIQTCENTNRREETTRPERIQHRLKTHTFNP

SEQ ID NO: 1001338 - protein, 116 aa, Homo sapiens
PQEPVGYGTPVRAGACAGLWLWDDQRRPPGLLSRFLLLVLLRGDASAPVSIACLSSRVRALFLFELAVFSFEPGSFSCTALHVLKPRDRISCHRPPLRQPRRARLTLLDGHFAHSI

SEQ ID NO: 1001339 - protein, 66 aa, Homo sapiens
QAARWQCKIIQEEEVCQRRVASFNRLRLNEDSHLALLMLAEDELMSWKMEVWRLTHKAGDMKVNYH

SEQ ID NO: 1001340 - protein, 327 aa, Homo sapiens
GSCHLAILSSSMNGSAGFCGPPDSGSDGVTDGAAHICGPGKVPLHDELSCNRDYWHGIATRSRWDTVASCEKIRSTTREEFGALRQRRGGVPGGDWSWGGPDEDDWNSQKDIRGGGAGRCRTGCADTTTSWTEADDPCSCRVQPRVNVSPIQEGAHWSYSQNCFVWSRLTDLLAMACIQSPDWCLIWTRSETRLGVVSNILNPYLETVRFQILVMLAIDPPAGRCLHLASGGITMAVTVLFPVEWKAQSDAARSEGIDRELEASCWGLITLSEWASSCTGGMQKVHEDLGNRVPELLKRHGLRTSLRVRDNWPRQTLVPVVRCRIAD

SEQ ID NO: 1001341 - protein, 272 aa, Homo sapiens
MTSRTKVDVRIRWSGLGLWPCTVQNRTKAEVLRGLAHACLPGQGTVHGATLLLMLDEPHQTHRGPRTLSIWLNKYLQGWREDLAVIVSHEQGFLDDVCTDIIHLDAQRLHLLKGGNYTIDASKKDVRSENAERTAETGMRTQEKKLKELKAGGKSSQARRKNKRRKPCLGSSRNADGEIKMRKSQEAPELLKRPKEYTVRFTLPEPPSESASKCWVCMVVNIRATTEENHFFKNWECGSTWIQDLRCGPNGGGQSTQPGETVHTDTTMAECE

SEQ ID NO: 1001342 - protein, 254 aa, Homo sapiens
MTLSLDFCCSCHRLLLLLAVPTDGGARRPSASVRLLQGMGHQLTTRTGNLYLRGPLKKSNAPLVNVTLYYEGTVRWLDDTLPDPESIFRQHGCVVMEILNVTLDALRKTQQEQNVRCAGGSSSASMDKRSAICKQGGGLRCRDELDMVAELFLTIVCMEVVRVTWREVCHVCPVSLYSSPGRVAETLSLECANWRDRRTVRGISDNAQRPCRTDALQSTDDEYVPLRSSRHSGKALGRSDSSSFSLVCQLYQGK

SEQ ID NO: 1001343 - protein, 158 aa, Homo sapiens
MGRVRTITVKKAVRVIIEYVSTLRLGNDFHSEQCACARRSAIIPSKKAPQQRYRGYVTASDEANSERPSDEVSPVKLQEAGRENMDETTIMFLRFSAYGSSETYLKYDPDTTAKSAATLVGLRHVLYSSLHGHSSLLVEVVNFQIAPRGDHVSKFMSC

SEQ ID NO: 1001344 - protein, 159 aa, Homo sapiens
MVLSLTFSLCPWILPYLLLLILYDARCLHTLLIVVFGSTYSNTLRIAPTRRKAVMFMRNGSCVVDIVPSVDLTVEDERFISPLLTIVVQCGHLVGAWRHEARFGWTPGSFTGSFCVAPTQLFTLGKSDVTLFPSVAFFFPNFGRVPGGHPRSSAGTFLV

SEQ ID NO: 1001345 - protein, 198 aa, Homo sapiens
MLTTGYRKMKMMVFCAFGNRNMQKKLSSRTLVETVAQAKHEQGSVLATRTKRKRRREEGGIMIQDSMLPLPKRSQDDGTAVRGTIRRGRQAAYFPCSIDRHDIDAAREEIEDGLVRRKKMELLQKYASETLQAQSEETRRLLLRIRTQLGLSLRDSSIPQVVPQDPGAADSMAVCCEGLPGPISQASLPLLVLMLTGG

SEQ ID NO: 1001346 - protein, 235 aa, Homo sapiens
TGLVLFSRRWLCLESLPCEAPVLAASDSDIDGAELPTGVWLGTPKPRLLESRLTCECHFLNWDGSECGTLYHDTSITNEEYALHRTVTCGEYLGRVIGAGAVPDAEYWNSQKGTFLERRLIRGCTPTVRYNYGVVEIFTVHAADSNLTVTVYPSKDPDPEHASNLLVCVCELVSIQAALESRWFPEQVRNEKAAVVSTGLSPEWSTGPSETLVHAGTHVPRSAEVYSCQVVASSL

SEQ ID NO: 1001347 - protein, 426 aa, Homo sapiens
TLHRRHIGYFRTYRLSSLGETYVLAARHAWPAGIRYSSVLMDVTMLSLSITARDMQTDSTRPPSYQCRSTILDCCSLSITRHHATLGATYLCCDFPTVVAHDRVMVDWRPPDTARVCLGAMMPLTTSIPLAVLERRELVNTCFMFVVSLLRGSGVSTRSLGPASSTPSNPANSSRYTWFETLVSRLGHVSQFCSRSPFAACNIAHDVHRHSHCCSIFPEKPGEKTKTHVRRWPPHNVFCSACELCGTASCERHSAQAVRATIVRCAFDPVVFLPVKATEPFFSVWCGRQDVASKTMRAPRFLVTPYLFHLRGFPGIFIVFPDNISARTRGSPPLFGGFLMILCGRGEKRSLAPTATASGLGTHTILEFSPMVLYFGTPRGVTVIRARLTRRNRALGNLVSNNHGPFGSVHLNTHWSGAFDKPRQQL

SEQ ID NO: 1001348 - protein, 214 aa, Homo sapiens
MRASARANYTRGSTSLPSWAPPFLGPCIGPPPKLAFRVNWSELLGTPPICKQRASLASKIQGPLPPGKFQFKGTINGPYPWASPSGKTPWAVFIGQTPPHLASTKHGGPNYAKLEPKSFFLGDYIPARWKTGNPFNLGHPNQWCAANWAPTSEALGSNAPQVNREPLAVRTFAGPPGFPGGKKTLGIDARLEPCCPPDRCGAPFPFANGKTLVS

SEQ ID NO: 1001349 - protein, 258 aa, Homo sapiens
  misc_feature (98)..(98): Xaa can be any naturally occurring amino acid
MSAPPQEYYHPARREEEAVAFLLGEKNLLITTETCGVGGLPTHTHTECGWRDERPAGGRDTPPLRGGGPPRRGVFLPRAPTPPGGCHQLLLIQRLWWXKRRPLILCPPPRWLVWTPPPQKGGCSLLGSASPLNVAVVVERRRCRTGCWCVFSLLRAATPLLCCGGLPLDGGALLLLLTPLLLLVGEEGGRPVFPPVVGGPPPRRGATTIYGGSSTCSATTKPPRRWVLCLPPTPAERSAVGVLFGVCAITPRCVVAPR

SEQ ID NO: 1001350 - protein, 140 aa, Homo sapiens
AAWMRRRGSTFYTPEKPLKAIAPDPTAVLLSEKEENYACIRHLSIMITHAAKAEHGNVPSGSDAVLSPLHAAGSMKLPCDVVVLEEVQGWGVSTVDVTLNRCSSCPPTIANNFLTGSNRFEDTSKTKDTSHIARLRGHTT

SEQ ID NO: 1001351 - protein, 167 aa, Homo sapiens
RTEGEVGTRWWLSRRQLLPTPRPLWAQLSGGLRRPCEPAQTQALAPCPSRAGCRRGPGTGPGDPARRPSRPSTQWLSKSPGRRRPPAPVARCHCCDRPVAASPSVRPWHRFPLVPSTAVPSRQGLAPPGSLLPAVPAVRASCPCPSSLPPSPSVPHAGRLSTHAVRI

SEQ ID NO: 1001352 - protein, 192 aa, Homo sapiens
MIRRGPRLKVRARNSFLILLDVHRATDARNIRWPNRWYAGREVAAIQGSIDERRVSIVLALWTCMGQQLQRIDHDPKWKLCCQLNHSTLCLSSILWGVHLLKEKTGQKCPLAYEYRVKHHGGKAPRRLIVSKGHHWAIDIAYLRQLDEANATVRTHRLASKASGLAIPNNPTRPTDNMPFGPAVSQDGAANE

SEQ ID NO: 1001353 - protein, 111 aa, Homo sapiens
MSADSGFHRQAFVVGVPLVLPPVPRFGTWCRAIRVLEVGVEMLMSPLLLVWPSGPVPGSERATGTSPRSALRGTRAVCARPLGSLGPAGPLLSRRLEGSYTYKTKSRGPRS

SEQ ID NO: 1001354 - protein, 121 aa, Homo sapiens
MSDCSQCCSPESLEEVLSDDLYVTRLGREDALITNDVLCSHTRVSHLHVCRLIEHYWPVAALTSWSPPSIATEYANKTEQVLPCTQSTGMLWDDIHDVHFKKTVCPKSYAQENAGARAHVT

SEQ ID NO: 1001355 - protein, 258 aa, Homo sapiens
MNVIFCLYDKDAFYVADLGDILKKHLRVVEKLSLVSPPFMQSNVNDSKAIVKTLAATGDRHLTVDQQGLKYMSGSTEVWEVPPREDFIYANPCKQVSQIKYAASDKLDVQMMTFDTFKLSDGRVGETAIRNEQSGRCGCLLMIPEASSVVSDVKIRSPRSEHAGSFWNGRSELNIDVVGVSFHVRKRCTDPETFVQAISDARVCFDHGGLEVGFQHVIVDIGGGFLDLRMWKLKFEEITGGNPPSVDNYFRSESWMRI

SEQ ID NO: 1001356 - protein, 153 aa, Homo sapiens
MENAARPGGGGKAVGHTLDMCEIPMPGILMAKSVSPQYWVPWRVPYACPSTQLLNPTLFSRGVMILFSADEWRILTHIYPHIEDMSISCRWSHEEEHRIARKWSPALILCAVMSLAVLNEVRLIIDITFGMLTIASRSGERIASTREKSRVQQ

SEQ ID NO: 1001357 - protein, 304 aa, Homo sapiens
MAPRTLILLLSGALVLSRYLGLLPLHGGIVYTRRCSRSRTRGGAPRSSLVGYRWTYTQFRAVSSVDAVSPRRGAAWRRGWSRRGRSIGTGKTHEVQMRHVQQICPSELCGILQRVYVLILELRPVLTPFQEGTVLCLANLVVPDWAASSCGYNQFDLRRTKDYIDPELRTCCYLDRRRTRRLMISPCASGRLARDGGCSGEPTWRAQCVEWLRRYLENGKKTLQQRGTPKRHDVTHTSLSDHEGNLRCWAPGLLPWRRSHLTWQREWRRTKIQDTELVETQASRSMEPSRSGQLWWLPSGKEQR

SEQ ID NO: 1001358 - protein, 43 aa, Homo sapiens
KRDILSFDKIKEQEERESARGSGNGQIRETERRREREQREREQ

SEQ ID NO: 1001359 - protein, 315 aa, Homo sapiens
  misc_feature (40)..(40): Xaa can be any naturally occurring amino acid
MRSHASLSTRYAPIQCEFRVVTGLGISLYEDLVTSEAPHXLQCMTPGKASHGLQCEHGMNRRIEKEPYALRSTRSTYSTDAHYIEAGMRDFEEWGDGLKVVQYSCSARLDYWNWPVVTVVHQVEVAEARLVRRQRVSPPLLNASHATRKFPSSQKHDFTTRVGNRGPWPRDYNLDRPVAGQCSDLKSRARHASARPLVALLSTGREVPSGPLYPGQQPSRNAVKADREGQGGWLGQQVGVAGLGRVRFGGKGTPGPFQGASEDGQGNVSLGTTPIRIPSIGLKRLECGFAHTCGSVKGKDGYAKHGGDFTSRKTI

SEQ ID NO: 1001360 - protein, 107 aa, Homo sapiens
MISEYRSSSDERYILAITHCCSSIEITRSATETLFQSSIKKIQEAALPGSVIQLACYSRQYAFRLVNLRMAMRVASGRRTMATSDASDSHEIAKKHARTGIYDVTWQ

SEQ ID NO: 1001361 - protein, 253 aa, Homo sapiens
VLIVVFGGATIVLGDSRFIMWKPTVLFWCGALFLLGSHLAGKNGLKASIGREIQLPDAVWAKLTYMWVGFLIFMGIANWFVFTRFEAQWVNYKMFGSTALMLVFFIIQGIYLSTYLKKEDVTVEYFMLLATDGENVHEARMAARPEHLKRLEVLKSEGRLLTAGPNPLPEDPNRVSGSLIVAQFESLDAAQAWAEDDPYVHAGVYSEVLIKPFKAVFKLMPAVDLIRERLQTLDPLVLENGDEESSAQGHAGN

SEQ ID NO: 1001362 - protein, 271 aa, Homo sapiens
MEAGACALPDGGGCGGRRVDDGPARGPGSGPEAPLDEAVCGCCTPTYNEEEEERRYATARKRLGLLNERAEFASAGGMLTYVRLPGGLLQIQLILHYDETYREVKYGNMGLPDIDMQNADGYLNVTPDRRPALHTCAHQVFWNEVCMMFLAVGIYALFVSTNYWELLLHRLLPSACGPVGMAIVPLWASMGNYITRMAQKYHELLPITRSSDGQGMKQRAPRGSHAPYLPGLPSHLLQLLPSELRLRPVAHDLFPGTTTCMTLNHTLYNVA

SEQ ID NO: 1001363 - protein, 41 aa, Homo sapiens
FAPQVAVGRLNRFFAEQTAETLRCRAHLFVESAFASRFDHS

SEQ ID NO: 1001364 - protein, 344 aa, Homo sapiens
ERGQFGSERLSPSTRVLKPPSRQFCLSAAAPYKAATQTAAAPVKCCLPDCLLPLSLCLPLLLRGCWCAFLVPGLGACAELAVPCELAVSEVALSLHFPWLLPLDAPGLCCMNACVRRGAGRIVTYWTRSDVSLQTSDALSMSFHRSDGLPQTVSDPCMRTRARACIVSSCTMRHKELSTDHSLPVDHHVLARVVTISLVAVEPQTGLVTLFTKARLDSLRGQYELITAPIAGMKSPEGSIFTVPCKDDHCAKTNGSSTLSIETPELGNPVLTDGSFFLTPTFRNWLLASKEDYPLGVETVGESHSPLGIQNTAPTFSILRKPVLIEVAVLSMNLPSGSRLLHHP

SEQ ID NO: 1001365 - protein, 244 aa, Homo sapiens
MGYSRRDAGVCQKLWGHKGFLRQGELLEKSGPIDPGGSRCSGPERPQGAMWPNIGDNYRGGGGATPSFGEGAPGAASLYRGKDGGAHHARGDHAANCLRHWRLMGTLDARVVPNAPLAIENWRGQRIPLYSKGELGGERSVGEPPNHKGVISNENLGANQACGGPSENTWKTHYRRSGRNLGNTPRPRGGMRCPSHEERRYVGHLHTIDPRTSPRGRGSPHTAGMGEHQKQRGQEDTPLQEGSR

SEQ ID NO: 1001366 - protein, 224 aa, Homo sapiens
MLHVVLRKRETLTSPRGREQVTEELTVEHRSCIDHACEQSHANPMIPECVLERHTKGMSKGMAENTQSRSYTPIRVIGTTTPPDVDDLAAGLGENDSGPNQRDCFQLSRMPISCPQARYYRRPTCPPWRATVGVVAAHGPKVAEALSCHYLVESPCNWQDPVFVGLWCDGLGGDSGAQEPRCERQPEGGPTPFLVRPPGGVHGWVAPFRPPGHFPQSSQALARI

SEQ ID NO: 1001367 - protein, 207 aa, Homo sapiens
MKESKSLRGMIYLILPVPSYRHTQTHHLIVLPWGPLLQRDEVSREHYCSRCHEYARTRRVPEPTPGNTTCFRQGQFLGFCLYYLRGTVTKMVRNRYGVASWGGIRGVSYPTRVGARRPHSGPNSPDGGGHLLLFPVGPQQGVRSPFPIPPPVRPNIERALTQWVRNPDGLCGKTSPLRRTLVQPFATKGLRIRRASVLGSGLTLVCP

SEQ ID NO: 1001368 - protein, 283 aa, Homo sapiens
ESVTTHDTVLDSSSSSSVLTPRDSQARRNSLGGSKVVEERRIDACCMLGAIQGGTLLRMALEVMAVSEPGSQWSHPDYKIALRYKHQSMCGLVPGSLGVHSRQLDVLTMDRFLVLFRFLSTLFLPSQLELCVALSYRIGPTPRGGPPPASYVTWPRAKLFVHCVATIHIVAHGRQAAVDALYPRVGKLVSLADHKVGSLGVLVVGVERETYEYLQGTRAPLGYSPYTLVNRAFNWDAPPKRRCVIASREAPTQDTGPRCQVVLRAKGGARNAPSSVGYVRPIR

SEQ ID NO: 1001369 - protein, 318 aa, Homo sapiens
AAGIVASRKLRDLREPGDLTGSNYPGLNISLHLDWLLLHKREASGVVPRVRGPMTTGYEGPFDVTSAAEDMVLRMVQRQSAQQEELPMKQGLSESRTIGDDAAFNLTIYRDALLDLSGVRVWCTPHGSQGYNMFLQGIDPDGHGFVEILLGQTEMNVARYSELEYPTVKHHSLDTMETYQTSIERCPKARDRCRPWGLHLAEVLDLVTGCDIRYCAQDAFFQVKGGGTVGIGWPDVGNSCMRLRKVIGETMSLVNELAFTDRQDDGCQKRPGIVGLVSRGVPKNKRGHAGCLPLSAGRAEISKQEPRGGAQTQRSPGV

SEQ ID NO: 1001370 - protein, 283 aa, Homo sapiens
ESSDSSSSSDGEGALRRRSLRSHARRRRRTGADQRRAKRGGGASETACTEKFRTGLKRVHVVSSEGEVEGPERSRGRSEGKPCRTYTVTDHGCSERGKGKSTGVDGLVQSKQHQRRNVSDLEWSIESASTKSAWRRIALREEDRPVDPAARVPPDVERSWAQQARGKGQSLEKRTVCFQSTAGQTGDRAINRGPTSSKDDRRQREGTGGTKSVSAIDAKRVSLAPERTLRREQRSESGIGEVGGTGLGKRDAQTRRRRRTKTERMDLGTEEDDPAKDERGARP

SEQ ID NO: 1001371 - protein, 109 aa, Homo sapiens
LQLLSFGHPLPDSMMVLQVAAAPRTVALTAYLMVAAQDLWSRRRDHSSRINLLTMGRASECLRVLIVETQSTYLDDDTSTSRETDVAVLHSDRRSVGGEVASVPVDGDA

SEQ ID NO: 1001372 - protein, 128 aa, Homo sapiens
MIAVAVIILCVLGLIEPSCHWSFDDEPSSARMLEGEARFILEGPRVRCCQVWPDPGLDTLGRVPRDHLVRKVTIHSRPNKFRPMYLHTPSRLESPNYGRPYSRPSGPAFSCQSSSTPSYTVGDVVGTF

SEQ ID NO: 1001373 - protein, 136 aa, Homo sapiens
  misc_feature (27)..(27): Xaa can be any naturally occurring amino acid
  misc_feature (51)..(51): Xaa can be any naturally occurring amino acid
MLVDAGRAKRSTLCASKVVVDETFVLXSRLNQSSGFCGEVFVENIPFRTTXYYWAKVFTGKSGGAKSDNSVVDSLVVRQRHQDTYLKFNNQGFRRVIFSSATIGLINLHGIGPGITSFPPSHSTPPTAQREGGGRY

SEQ ID NO: 1001374 - protein, 260 aa, Homo sapiens
ALDRRPHLGLQGVGWGARQLDVRQLTRGGASHGQRMMSSSSAPSEIAVSMGQLDGRHSKVKANEHMPPSCSAAARYLFVAAGPNEEVLCKCGGRSTNVRLRTQIEDRDIAMDFSGSVSSSSLIEAGDGDCMVRVLGAGRNDCWMVVNQHASVGAVAEALQRTLRGLGLVRARHWKSEVDQSRLQTLTARKDGSSPKERPSRERTSRITKVWRPLGHVSANRGFDLNNWMGIIAELKTRLNLRSADPKGVHAKGRAWLTRA

SEQ ID NO: 1001375 - protein, 166 aa, Homo sapiens
  misc_feature (151)..(151): Xaa can be any naturally occurring amino acid
MGTAGPDMGHSRSNERPRGERTGGGQTREATRDGPPSRYGTWTITNTAIRHADGPIRLPGTAIPRSRVRGEPCEARVALPLSNWKRDFPCHSMTARTWHDHGLFRTRRDRGPGIRSETYSRWPAEPIRRAKENGLGCTVARFLLAPLVKLXFGRGHTVEGTCGAQT

SEQ ID NO: 1001376 - protein, 239 aa, Homo sapiens
ERARLYRVKVESPKVMAKHLKFIARTVMVQEGNVESAYRTLNRILTMDGLIEDIKHRRYYGASHAARRTRGKADETVPADLTNMAEWSRKITSLLALRRESGRSVAGLLRPVGGSTQCETLIQFSLHLFSLCTDPNFSYVATSRCKYNCNISMSARNNTRIEKTNCDGGYNVAGGGQEKGSDADKEAQLGTEAWVLPENPILPGGTRRGGKQTGRARPTREGQAAREWAEERPGFTPDF

SEQ ID NO: 1001377 - protein, 221 aa, Homo sapiens
PNLGNPSCAAPLRIDCPRLARLVRTRPPPVQIDSSAEQLACRVLPVCSDTLYDHLGVAVSTTPLFYEKIIGRSRGHDIQWQALTEIGITFKVTLILDASAVRPYKAGFRYSCLYLVLFADLKGAPGLQIFSPLSWDCCLKSRILVRVKAPDVPPMCHCEVSRGLAQLACIAYLITFSSEYLLKSGYSILRQKCQGPVRATASAQYRGVMGTILTMVRTEGP

SEQ ID NO: 1001378 - protein, 93 aa, Homo sapiens
GHNGWVTQYRYIPRMFPAMILSGLSRIRRIDHVDRLTRDETNYGIPQRVVLLVVTPTLFSDVVISSDGQLALSRLPGMDTLTPTGISQGAATN

SEQ ID NO: 1001379 - protein, 249 aa, Homo sapiens
EGMSNGVAVGQQPSTGLSGHHAPSVQAEYHANLWDAVSRASRCTSRELDLQGKVLPEGVGPGDIKAFQVLYREHCEAIVDVMVNLQFTLVETLWRTFWRYNRRASPVRRQRGWYMTEAEKRLAQGHPGAPSPKFEPCAPNGPMHCDKVLYLGLVEILIPDVLRTIPSGLTQASWSFANEPGELGHRDAMVNIPEEMLRVKVACGGAFAQTLRLLLRRVNQLAQAGARWCCKNNGTRSSQMAERPPSRRG

SEQ ID NO: 1001380 - protein, 127 aa, Homo sapiens
MTSPPLCENGTGRSVRPKGLLAARMLKASWVQVPKCLHCTWGSNAKLARFPYIRCTTGRAWNVCMVHVMSHTSQVCERRGSYFEGGAPIGSEITPFSPGNATFVINPLFQPTYGEMTTPVYRISGTS

SEQ ID NO: 1001381 - protein, 138 aa, Homo sapiens
MWVVHRALHTGAVALIRSFAIPRRNQEVPGMRHSWPCSDYEEQDWFVLCPVYPVPYRKSFLSRHDKSQAPFFPMTLLKLDLSSPLYLPEERGPCCINTCVATHTSLPTQCKISGDENPWWPWVKPINKQGTPKQARRH

SEQ ID NO: 1001382 - protein, 109 aa, Homo sapiens
MRALKKWISLTNFISVSHTWQKLLARENLSRSCAYLLDGATLCISMKHTKGTALGHEFYPGCWHCSVKRLTKERHWAPVVTKRLKAQDARDQEDSRVHHETVPATVLFP

SEQ ID NO: 1001383 - protein, 148 aa, Homo sapiens
VLDITEETLHSRFLEGVRKCCQCLSADWLPNCVHSDTPVLSIQRGYKLRSLVRGVLWQDWHYDHIHTLACTQRSNGRILIWSRRNRIYLGPGVWGWGSRRATWYYPRQLSLGGPIGPWVPPQCSKSLKYPFGPFSTLWGPFRCPFGGL

SEQ ID NO: 1001384 - protein, 139 aa, Homo sapiens
MGEQSGGIATVALQLMHRALTDVDSRATTRLTSTTTTPRTRTTTDTATRGTQCDSERQQQHGTPSSQLASWTFPLTAVYQQPIEVDLRVTAPAHDVHLGEREDCASTPRRPTSSTKFVDIRDAKMHLTRRFTMGATASE

SEQ ID NO: 1001385 - protein, 113 aa, Homo sapiens
MAGPWDSQCARSRRRYQAAFVRCGGRLSCGCLSGSALQGPVYLGLAHVLAPCHVLEYGRAHCALPRLGHRFPTFKPARRCDQALWNPQDTYGLEVGALYLRCNGLGPLPPVCV

SEQ ID NO: 1001386 - protein, 238 aa, Homo sapiens
SGRAPVPTLPELSFSHRPLGGMVCKALAVAFLPGLSHLALSAVRGSAAFLSISLVGGPPWQQYCNGATRQRVMKGAHAQPVAPLTSVTLTHIAPLEGPPTCGPSSGNGSMGPLSQDLLAPKLILPSIIVLVLRSTTVIASSVMKCWPLAPGIPIAAVGSHVPGAVSAGAGKWSANERECLHINLLNPHTWRVLGRCTSPFTTHFALAGPVRPSDELKREGCSGDPAQTVLNAPHLFAH

SEQ ID NO: 1001387 - protein, 90 aa, Homo sapiens
  misc_feature (13)..(13): Xaa can be any naturally occurring amino acid
RKRRPSKGFGPKXPRALNNNEPYYTVYYELVLIAEAVFGRHLYTTQRERLHVTPSAASTYSVLSRYLSDMITFDQRGRWTHLRKPENSEM

SEQ ID NO: 1001388 - protein, 128 aa, Homo sapiens
PGPKPPSRPKWCEKIPAEAGCKDDACPDSSPNSSQKPLDDARLTFTVCVFRCNGRSERPVLHPSLCVQTHFMSTPHKECHQSDSGQMEVSSMNERTSRKHQSCHPVVANQVQKYPTFHGPARESTPQG

SEQ ID NO: 1001389 - protein, 120 aa, Homo sapiens
MPLLQWLGRPPTTCEAGQGDYALRALHGYGCHPRLSTSVQDRPYPLTSYTMDKLTKNPNINKQFAQTQEPVKPRSSLDNHRKSISPITDEKAPDHAHGKRSRKKRADSKHNAELYNVPTK

SEQ ID NO: 1001390 - protein, 102 aa, Homo sapiens
CPARRRVAEPLAAGRDGTWLVLVLRPPWPRRGHWLHWPGAAACMPLHGPVCILTAADPGAWPPAALHCIDPSVVACGHGTRVVAPTTGTLGPHAERHWPDRA

SEQ ID NO: 1001391 - protein, 423 aa, Homo sapiens
PSPAFRLLIEEAVRPPETMRPVQTHCRLREPAALEMELLASLCSAWDFHFLTCGLEEQKRNRHSKTPKESAKLLGESRMTARGQRHRLYGAPWQTHPRAPQAPDCVDHLELTKALLKDTCWKSTSHHRTLPLLTGKKPSDTARGVDPTIGKTAIQDRQDRTFRRARKGFNPLKAQNLDTIEEGNTDVAYYKKKLTERRHGRDQHRPTDQLDERPLPGKGMDTLDAGEIVPLEQERVQLDTGTSNYIPENHTLLPHVGITMFPVMEWYTTPLHAGSGNRTFRYFQRGTCYCVVPSAALRLLDGGANYTIVSKESKVREAYYENETHVDVEAVDEEPRSNHLVTIKRRRPTLQIEGEPIRGINSGNRRGSPNTIKATQTVSWKRGTPQQNPGIKRMKIKDTGEERLTPGNTQKRWNILTGVAYPQ

SEQ ID NO: 1001392 - protein, 107 aa, Homo sapiens
VSERRVPGSGLWVAGGCERTALRAQAAEASGAAVWRLALSGRWDEEADLSPVCLVSMSCCCLPAGLVLLRLWPAAGAGRRLPPEAEPTPDVARACCAEAAAAQPTRE

SEQ ID NO: 1001393 - protein, 300 aa, Homo sapiens
TKFGRGDSASPAPATTPAQPQQSQSQTHHTAQQPFVNPALPPGYSYTGLPYYTGMPSAFQYGPTMFVPPASAKQHGVNLSTPTPPFQQASGLMAKTGFTDNECIVERSGPRDDSKRGRLLQEVGYAWIIRQAPNKSAGSGPGKGVSVSSSTTGLPDMTGSVYNKTQTFDKAGISCRDASTFQPDLGLGLHWDPGSGAALAMSHQHFYTSCQPPAAPLTAAEQHFRRMHKRGSGQAQPARSMQHKSQSLQTCYGKSPILDNLNPRRDRVGWGQVTLGRRDTRAPFGSQCPFLESRHVSAIH

SEQ ID NO: 1001394 - protein, 272 aa, Homo sapiens
MGSRRGGPGKTQRRFPGVFGPQAAGVVKSSRAGGLLNSHCFAREKEGDKPRRHHPRQRAHMPFLSLSQPRRQTAVESFQGSSLPRAVDNPGSGAFGWVPPWMPLHHTPEKISQGGPKGILVREGIHNSFRLNLILLPNESGVKVVTGGNLSVQANKERGIFLKQFQLQDLTEKRTKRLLTVGANRCLSVAGKTLYTFGEIRGGGRRPCPEGGKRKRGPSFCDKDLLPVEKIIALKRQPPGFARVRRPHVFHLNVRHLPTQKTPQKGPEAPPV

SEQ ID NO: 1001395 - protein, 475 aa, Homo sapiens
STVHCAQQWIKYGDTTTSEGVLFAHLLRPALGESQCRTDRHRTRLRADPCDWMWGEGHSECAVEYDVSSELSATPKQCLAPNKDWCKACARTMQEQKHGPMCACVGLRHSAHKVTIMKPSGHHASNIEARLMEVIIGELTGKQHYTREQIGDEVTMQTTQYRDQRGDVREDPSGKRNRKRPKWRNHMEKGIPRTRQNRNNVQDQQDTSDSQKNKYTYTGGQDKNTVTPEKIRQRNRKFTPAYENTHDDTIIRKDSKIHKQKHQTRQRHQEEMNEGPQKGAPKGDNSDYGYPKAKEEWDIGTMRQVQGDLMQKSQESPKGSPRWRREEDPQARHRASREETNTNREDDEPCHKENTYSEMTNTGASTNREIQAQENVDRVHQGTARQKRQDIERQKNQKNDRKSNKSERGNEQRDTQQQQKDERQQTDRKNRKKKERQKTRKSAPHTTHIKQTHKGQQRKGTIKTQNTQKHARKAK

SEQ ID NO: 1001396 - protein, 285 aa, Homo sapiens
AAALAPSVLACAFPPGLDTGSTPVTSCVRAVHTCSHSCSPLCQEIHTEAASVATSPQSTPVDTCDTLATLTCGRGPGVCCDQEPLPHPDYNYLTATYLPLTEGAMALDPESGRTHACCSEKWLLGEIRQRLLMSGLQWRGRGPNLLSACPGRHFARKDLSEDDARIFKAWACGPTGRWPTSSRGGGPDHPRAETAETRRVGKPTFRCALGQTQTSDIVMLRDKLGVTRPEPRQQRLERARSRPGKHVAWDEGTQGHGHKNKKARQAPEKQGHNNQRGGKPRGKTR

SEQ ID NO: 1001397 - protein, 146 aa, Homo sapiens
MPAGVWPHHMTGTQCFLPKSRQRYHGNLPGLTINLIWSTSFANAAGLHTVWQRYLTPSVSPVGDHTVLLLTTKGKNLVTRPPIHTSMTTPPEPSGHGLVHTNPFPPSNWCEHCHDIKYSLPHEVELQLAIFTLPTPPSPMRQHNGI

SEQ ID NO: 1001398 - protein, 391 aa, Homo sapiens
  misc_feature (135)..(135): Xaa can be any naturally occurring amino acid
  misc_feature (280)..(280): Xaa can be any naturally occurring amino acid
  misc_feature (369)..(369): Xaa can be any naturally occurring amino acid
KTLAEGLGGLSDDLNDSMYTVHSPAVALHSQGSGAWILGALHCRRRGWTNADTPSALWPQRRSHRRSLSVLGGDIPNLCGCIRWHHEGGCPILVTCWYSAEQFDPGDGASGGPCAVSCACGGLYTIGCLGKESVXVASKPPRVQRATSHVLDHSFPFVCLTFPPAGGPSNVNARVEALELVARSMPLFPQKASTPQGHAPQSFAPIRKAKTYVTQRMSLKVCGQANGKRIPRFGTKFREGPGGAHLGKNRFVGEPKGAFLGNSWNPWGVGGTVWGPFHKXTPIGERLRLGGHRTEETKFRYTTLRLGALVLTVRGTTRASPRDQNTRLGEETIGRRDDHWGARIGGNRPVGAPLFGVSQYSPRGEPPGXRTCRATHMCGHTMGTPNRGWRR

SEQ ID NO: 1001399 - protein, 117 aa, Homo sapiens
  misc_feature (60)..(60): Xaa can be any naturally occurring amino acid
KTTEFLINLNSDVFPVVVILRLDHIIRSWPPRHSVKTVPVSGPTSLQPSRYILCPCTFSXEVARGFPRGVTSIAKVFIRGFSCALYSGLGQISPSHQFEKCIGGSLGGPSRLSERAV

SEQ ID NO: 1001400 - protein, 235 aa, Homo sapiens
  misc_feature (186)..(186): Xaa can be any naturally occurring amino acid
  misc_feature (189)..(189): Xaa can be any naturally occurring amino acid
  misc_feature (194)..(196): Xaa can be any naturally occurring amino acid
  misc_feature (222)..(223): Xaa can be any naturally occurring amino acid
DNSLSPHELQEQTVSYSTPVLKVLAFRSNSPDSDPVTILASLFLSLSRGHPVWRVPSVQMNEHDAPCTPCLHCRCHDRDGAPHRWCQLSWKASLYTLRRAMIDYGSEHILAWKHVVFERPWGAGLLHRNRYTIRSSATRKSHLQLRAQVINHSTVHACLAAEMGVSHVEAYPKEVVRYYTLMKRLXPLXIRSPXXXHGMGFSRGYRVRGLTRMGYASGLPSXXYDIDVVILSGRR

SEQ ID NO: 1001401 - protein, 129 aa, Homo sapiens
WLLRELWEDPTSGLRDYVSVRKRPEFSRVCAGSGRLRCPPPFLVSDRASFPGLVVPVPDTAGVLPRDAPARTSSQEVPGASLLSQRTCRPSLSLTVHRVRSVAISQVAEAVLTSQVKAHQDEYQISITQ

SEQ ID NO: 1001402 - protein, 264 aa, Homo sapiens
MYFQCYVPHSVVLVVLRWCGGVCVVWRPGVASLTISSLTWSKHGVPLMVWIACVETRDFLCLTAIGTWGPRQQVLGSYELALTNNWLQGQPSILASRSNEWDAASFSVAYVVFSHPGLQWLARAGGVQQSPGVARVRAVAWASFAYPCWAVTLMPVGPALGCPCFFLHCLLLAWSRSAMCCMVVGGRSSPALLDLLPGSYYFRFQREISVALCVPSAFVIDLSMVTDGGMYVFQLFDYYSASGTTLLWQAFWECVVVVWVSGAD

SEQ ID NO: 1001403 - protein, 148 aa, Homo sapiens
RRSWNRAAHGNASAAMGQVRRSRERRACSRRNTWPSDNSMMQASSHHACMSHRDRVYKPGKEILQSLNKMGGCQDMGRLPFSIRVSSGKAADSGISDEFKVKNTGYWTDIATWECRRSTRDIESAHVKPARCHPAGLVLVCARLLVLT

SEQ ID NO: 1001404 - protein, 376 aa, Homo sapiens
  misc_feature (157)..(157): Xaa can be any naturally occurring amino acid
  misc_feature (333)..(333): Xaa can be any naturally occurring amino acid
MRPGHPLRAQGWEAGGRRPARWPRRGSPKRHPGPIAKGVSNLKGKEITTPPFIDRSLGSGAYEGAYERCAHKKHARDTESHDRRGPDHQERELQRQGPESQEQDPPTNAHTNVGGLMDDPSTELGVLHILWRGTGRKICSEEQKYKDALRILYARRXRTIVELSYGGHAQTEAYYSPSGKRGGPRLITKPIPSFQRATTVGTAVVIRSLTSHAGFKHEKEKPFLRRICETPPRFPRSGFFTEPTFCVVVSPQNHPRGVVLRMLECPQATRSMRSKHPAAYQKTTARRTIETSTGEGYPPDGPFGGGHCDESRGTPHGGETRLLLRCGEYDATXEKEAAVWIETTPQEKGVTIGKNCRPLISGAPQEHRPLIGRGGQ

SEQ ID NO: 1001405 - protein, 254 aa, Homo sapiens
  misc_feature (108)..(108): Xaa can be any naturally occurring amino acid
  misc_feature (134)..(134): Xaa can be any naturally occurring amino acid
PAAGYESATDSGLSQAPRNAEFPDAGEAMDDRATEIRLGEDPDVSDVEARKITNELRRHICLSERHVPWIVTSYRVHVVRARPDGEEVGVIKEWSERNSASLLVLGEXDTKVSDVSSRYCAVHMDASGRIQDFXLLIIEAWNSLVRSRRCSLDNQIDCLELKVKRLARLRISHREDKLSPNVRREKGNEKKGDRAYMGHRLCELFGASTNPCGRRLSPVYGRTELDTAEHRRPGMNTIRDGKFLFVNPKDLPAK

SEQ ID NO: 1001406 - protein, 250 aa, Homo sapiens
MTGALSQHPRAAPRCILADPCFIPFASLPYWVESCPALVCLSGLHVVRPSAAWGHYTLWRGPVGAPRELPRGRDAMAWVSRATWGAGFGDAVCAVPYMVEMFTKPQRSRRDSRMYHITKIAMIPPGYRTALQPPINSHTRTESIPQAGVAEQERVSDDREVRTSMYSPYCLSKIRNCEIPGGYSRGDWIAKAKSHDIVQELEHTSARVHSHCDSVPSTGMRALVYYPWCLWHGVTVHSDLKVPPKTATVR

SEQ ID NO: 1001407 - protein, 175 aa, Homo sapiens
  misc_feature (70)..(70): Xaa can be any naturally occurring amino acid
MVRRELATARLRAHRAPTRCLGACAPFLHPFLELQGDPERSQANAHSALGDVVYLREPGSALRRVVILKXGMHMAWVQAAEPYFHSGCPGLSLHGSAEGDRLRGAPGSVLRGKKLVGSLLCATPTLNPVLPVDIWAIGHLDQETRLPLKWVGSSIRHLTPCCRGKGGWGTGEGQL

SEQ ID NO: 1001408 - protein, 170 aa, Homo sapiens
  misc_feature (58)..(58): Xaa can be any naturally occurring amino acid
MRRPEGRKRCDRIDTLEDTTSRHLRLVSKSKRRLRKGVVGWQQAIRWIRNLATMEPPXKRSFRTCIDIAAVVYRQHEKTHWAFAEIERIRQCRYKIASRLGVHEMPRRGLWSRMERMAGGPALQCCAHVVTGSTRRGLRPESWCLWVSWRNVLSRTLAGCDPILGGGPIS

SEQ ID NO: 1001409 - protein, 126 aa, Homo sapiens
MIQTHPQLSRLVLRPRDISTDITEFMTPHYFEGIQAVSHKGENTHHKQRFSKLHTTPSSTSGSTQMFLGDSFGRYKTPGLREHILKKLPIPINEKFKISGGTPPQQNCTVAPLRDRHKIPTDTSTT

SEQ ID NO: 1001410 - protein, 289 aa, Homo sapiens
LSFQSACIQTLKTAARGVCHQPGPAAAAAATAGSSSSRCRMMEAEVSGLRLQPSCSSPGVLHVPLGYLDHAASLYEQVKSPQSRELAVWVIQKLAKTSQRRGIQGFRADVSATHGCHREWPTQKQGVTSRKHMAPPLDLEERLDRPDGLPMRCPRQWQGSHKTTRDHDLSTQKRKHKRAEGPDSPKLDTTGIEMATGKGPIGTVRQNWIAMCREGLRIDGVGKRTQAVNSGNPGGKGSDDIEPGPPSVEFIGTPLEGNTWTLAAKAPIGDDPNGSNRVLPGYERSQHHK

SEQ ID NO: 1001411 - protein, 180 aa, Homo sapiens
GRRRGDAGSLPPSLPPTRSNDAKGENFAHTVCVAVKKLLSGHVTPDTSGAGSLQLFNKVDYDRIRDVAPVSRVGIQTQVAATCGAMSAAYSSGLREKRGNAQVISKIQRVPRSDGTHSCGATISNSNYHGRTTSRHSRISYGNQLIALGTVSQSLVAIALRESECWCGDLDARVHLPREA

SEQ ID NO: 1001412 - protein, 424 aa, Homo sapiens
ESACLSLSRRASCQNAELVEECQKCGVCQKTCLLCRRGSVRRRTSFHKSCFLCMVCTEESGQYHCGLCMVVKIYCKSLLQAKKVCGPEGYGYLGEGSSAPFRYLTKWGVAWVSKHVGSRRGPTGPDAVESPNASEICPGRSEWLQSAAPRMQTRQVILLLEKVIGRWERPGHKACFQIVTNVWEMALTSSTLAIKDGEGINWHQGMSMLKKTFVAKGRRRVSGGKGAVLPLVQLLSEDNIEPTRPMAYLPALYQSPMPIPPASSVRTLRGTNLSCADPATVLHYIDLKPCGNMGFPYGVWARYLLGRSRAQNKKSYHTMLGMIDTNPTRNEDQQRVNGGTKELKTAQAPVIHQNELKPDKAGTCNIRRYTVSGDDTHNTDEPRKPERRQKLREPHKEERQQVQRNRDTQPTSERGKDEEAQQET

SEQ ID NO: 1001413 - protein, 505 aa, Homo sapiens
  misc_feature (94)..(94): Xaa can be any naturally occurring amino acid
MSTDAGGCACRVPPDASHVCRYTSDAVVLLLVSSGWVRATVLSVELRGSRIERSLADSHSNHCMIIPIVNTASVQSRSTAETGSLSCVALSLIXMMRAPVAIVVVFEEAYAFRYSTDPELEVSPFVLRVRDYEKVTPHLARHAVWLNPYRGYLYGKVRDYPSRGKGTYRSVSANSTTIPCWHRYIARDLGLRLCRPIALNRLGRIELSRSENERSTHGAHWNLERLSVGTLNERTVATVAQMVSPIEHRTAFIASHMIGAIHAVLNCLAKNARSTERFRRGDHYRLTPIFERHWLNVGTTGRLFTNVTKYKYKPHVEEFGSPTPKNRGHSEGLPTYTRLVPYELNIGFVDCAPVQGDFMEGSVVSLIHELIHNGWPTNGTKKVRDGFELHASSEQALGSMRKVQCVCVNTVGAPPVHTFYYEGFLGPRCIPSMWAPCPKGLGSWEKPLPEIILNPFLESRDNVRHKCRSLSQGEKLRLTVCAPLPNVKTAFSEAPMRNSLGRPMG

SEQ ID NO: 1001414 - protein, 197 aa, Homo sapiens
MDPMEHFVTERSEQTVAVHSLVGTAYSYSPETVGFHEKWSTSTSEEVRETRVANDLRAMRTPEECPETPSQRDQVQVAFVKDLRRLLENDPQRRAQNSTCAAKGGHTDKHMGSKHWEDTRRIMLAREAQKFGWNAGCTHDLIIPGQPRERLRAGESHVTWDAGSRTGSPEKRGNVTQRGGRRRRDWLKHKKNKHTSA

SEQ ID NO: 1001415 - protein, 192 aa, Homo sapiens
  misc_feature (89)..(89): Xaa can be any naturally occurring amino acid
  misc_feature (123)..(123): Xaa can be any naturally occurring amino acid
GGIQDAIVYRGEAVDEKVSDPLLCVNCFSCAGPMSVQQPSSRPIGLRRFTLDHTSQGPMALDGPPSCDGDEVMTELLAMLHGSVNDDTXLHMWKGQYALVDCKGTCTLTYQKYLCIAMGGQTXIVRYVASLGTPLGRFSTGRYALAFVFALALSGRPILRRFYSFMQDAPKTLLSRETPASSLRQTIHKYGV

SEQ ID NO: 1001416 - protein, 100 aa, Homo sapiens
EAHALGQFRGPAGMRREFLVCRSCHQWYDGKHVYTKRIANIWSPPTCNMPSSKSKKVKVSTQVSYRGREPGLVADTEVPGSNVGPVVVCCVCRDVYGMEA

SEQ ID NO: 1001417 - protein, 120 aa, Homo sapiens
  misc_feature (44)..(44): Xaa can be any naturally occurring amino acid
  misc_feature (60)..(60): Xaa can be any naturally occurring amino acid
  misc_feature (102)..(102): Xaa can be any naturally occurring amino acid
  misc_feature (117)..(117): Xaa can be any naturally occurring amino acid
MYAVSLVGSTSISLTPSYPRADYCLRKEVTIRDPRVQFIRYFVXDYHVEDNTQHPRPEDXIVVAVIAHTSLFASDGEKLRRMEPYAPYIVINRLSNDIDGHXSVPYGVHAKNLDSNXLQN

SEQ ID NO: 1001418 - protein, 153 aa, Homo sapiens
MSHIVDWGGSQNTGKSGADISYILYSKLPSGKRKWVSTRQWAKCNSVTDSSGLQPADSNTGLLGALCTSLGAKVLRGAHEASFVPLSLCGNASRDSVVGALDFEARGRPQIDRPKVYQGATETESLAQKRTPSKWAQVRAPYEEKVMHPSVEF

SEQ ID NO: 1001419 - protein, 68 aa, Homo sapiens
MMGTHEPGDLGGTLMAERGGLPALSPTTVPSNYRQAGIAGSRTGPGETEPRLQLDAAMLNATRLTLGR

SEQ ID NO: 1001420 - protein, 98 aa, Homo sapiens
GLLLLSGALRGHELYAFPVAAHPCSASLCALHCLSTIVPAVSRRAPLPDPAHYRERVKGMFYQRLRQLPGGMPFPSMSCDLSPVTGHDTWGKFFSDSN

SEQ ID NO: 1001421 - protein, 337 aa, Homo sapiens
  misc_feature (134)..(134): Xaa can be any naturally occurring amino acid
AGAIIFTVVQRLKQPTKGHTKVAYTFDSGPNASIFTLDDTVALSYVGLQCDVKDCPARWFELRRQQLTVEGGSQGRRPGPPLFTLDASLACSLGHQDGQTSHGWGVQDTIIRTLKVGGIDLIQSLGIEPLVCRXPVAAVLVSWRCCRKPSVAFDVVLESVEPAFALRSVTYTGGLSTSALVSLRGKPGDCCGWGPLGPEKHLVGGPCVGRSLLEFMQGPCGAHNCESRTYRRLLGVSSWASEDDSHCRNPVARSSSVRKVPPAPSLAFKGAPLNAWNHPTVLHRRIGDKRNGGGNEENCAVTHTEQRHRAFKGVTDRQNLFRYILSSPYERNFLDED

SEQ ID NO: 1001422 - protein, 141 aa, Homo sapiens
  misc_feature (71)..(71): Xaa can be any naturally occurring amino acid
  misc_feature (103)..(103): Xaa can be any naturally occurring amino acid
KRKEEELVSERTEAFTIARNLLTAAADAIERIMSSYKEVTDAVLCYTCPGARDCSRYLNDVQLLSLQDVPXGCYEADRFKGEGVLWGNPVGRSGVRVEGPSEXNPMCQGVGLGLWNRGSSAENIPIVTPSGEVVVASLNIR

SEQ ID NO: 1001423 - protein, 313 aa, Homo sapiens
PLRPGSWWGQPQRRAAAAWCWLRPRGRRPTAAGGAGLPDLCWRATWQAILCCWDAVGPGRTARLASVRTPWLRAREPGGLKRENSQASSGQCFGGSPGDRRATGTPRWRATPGSLEDGQARSRSGKKDSGQRGRSRASPRALEGPDFEKLGRPCTAGPLLQACTSSSGDHVLSGGTRRMQASYREPRSPAFRFPGTFGSPSCAPWLVARGPAMPGEEGGSLEAGALPSFRFPGYPPDLAATALWPRSLCPAGLPFGAYGVPFPGPSQVGHFPGGGGLGPSRFGWTGSSWRCKGPLQGPSPHLSEFPLPSCPRG

SEQ ID NO: 1001424 - protein, 39 aa, Homo sapiens
MVIRDRSCRGAPTTMRRVVFLERLTSACSHVVVRRIASW

SEQ ID NO: 1001425 - protein, 277 aa, Homo sapiens
  misc_feature (169)..(169): Xaa can be any naturally occurring amino acid
MLSAHDRSPSCTRSTVQPVSSTPVSPIDAGLAKKSPLALLAQTVLRKIWLSLDHVRPTYLNCELVLDGERAKRGCQELAECDHRPATAPEAPGSGETSGAPRRQARGDSTVARRDERPCVQGPEASKGGFRAGRASSQQKTKRASVLRVSVLPAIPPYVPSLRAPRDDXRSGAFHGVPPQGARSLRRPLFTLGIGARRVLATLPPVLRSVRPRAGGFPRRAGRPLVNASFLYLGQPKRCETEGFGRGGGTRGIERKHHPWGRPPKAPMTPGGPGHPP

SEQ ID NO: 1001426 - protein, 125 aa, Homo sapiens
MCVRLHVWRIEKLELVPVPQKRYGDFYVGDAYLVLHSANDEPRSFTYRLQLLARKGVFPGSKHSLLPIFTVQMDDYLGWQRQCRIENFKDMSLMTLLAISKCGLKYKAGGVASGLNHVLTNRPDS

SEQ ID NO: 1001427 - protein, 134 aa, Homo sapiens
  misc_feature (26)..(26): Xaa can be any naturally occurring amino acid
  misc_feature (97)..(97): Xaa can be any naturally occurring amino acid
  misc_feature (107)..(107): Xaa can be any naturally occurring amino acid
MQLVATPLSSYLRLRLESYRESPGEXPVPCHPFRVDALTGSLMPLIWGPCTFSRLSLVPECAVSDGAIRLAEPTFARAFLLVCCAVHGILCLNRDTXAAPFLLPLRXSMSAIGDNCERHIARVVCVCGTGDNCA

SEQ ID NO: 1001428 - protein, 286 aa, Homo sapiens
GGIAAEQKAETLQQQLQLVLGAAWSESEVFRQSRVGALTASQDDQEIDTALGGDMLARSVRGRRLLWSWLVMVPRAGVRLTAHSAACDKDGRTDSAGDKEISRQEDKQIGLGPNMSQPPLTLGWHENLSSVRPINEPEDSWTAQEVGPAPQKPGEPYYPQSREVSPVGPPQLPIMSSLCQRKLGLGAPGPVRAQTGDEVISPDNDPPSGLSSPMASAVENHPSEEEFLVYRNDCSFPGAGSELCSPGKQVASQQRLFQTRNSKVPFKTGRWHNLVLSGALSQRDSS

SEQ ID NO: 1001429 - protein, 283 aa, Homo sapiens
  misc_feature (209)..(209): Xaa can be any naturally occurring amino acid
RERTSLEFCDYFFIPSYATFFGVPQLPGAPMWLDFGHMWLTGASCGLSYRGLAAVVWVKHFCALCVEKRAEAMCPGPQSYSVRRLLWLQLRELGEVAEGQALEVCHTCGGPVGLCGNLPRHHVCGGVCSCRPKALCERRPLCVSQGERTPRRGVSPLRATAVFSPGTPRGCRVTCGVACRIPVPTCGTFCALHRRLCTHQGFQRRGPIXVGSLCTELSQRDPIRGRKNEAHVVCRERLTTTFRAQVGLEGVPPPRDESLDTNSEGILRREFLPGTQSLFRGGG

SEQ ID NO: 1001430 - protein, 438 aa, Homo sapiens
GTCFWGWVPRQPGRPGLTSTSAVRARPVSPCPGMSAGTLLPVSLSRPHSSLAPRLPCCCGLALVLCGCAVCALMCCVHWLAVLPRWPGVLCRCFGLMGLLDSDASKKLRELQSVSEADLGQRKASGFEHSGFAWGQVLRLGLQKGPARCFGESYINFVDPWVCSQGLGIPPGFFAIVPPRKRSPSYNPLGIERAIRACTKTEIGVQRKRAYPNSRSNSIPLTLVPPKLVAKPVKENGAKPNVNAMAQPIFSAFTQHFGCATLGRQPLVRAEFYDTARVVPTRLGLKLGRYIRDYRADNTRTARVWTRESCVRHSFLLVLSRQHIIDAEREKPPYHYAGEPKFGGHIGLDTITVSYSITSRATGYTFYQVQSSNWIGAEQAHISPQEYVAHRAIPGHEFNTAREHAYTGPPAWAPLGGLLQRYTPYGPSQLVATSIYEG

SEQ ID NO: 1001431 - protein, 275 aa, Homo sapiens
RCPDEAEPCVIYLHTCRHDCPKRRLKCEFSGCDLQLGEAYVEPLEGYVAPHSEECLTCDEYSVSARCMNAASCVHGPTSMPASRDAPMPHSVLHLLRLRSSVFEQLYPEAQPDTKCADRLLVLALGRKPIVVWALWLGEDLPGPSEGRAVTTALCASAHSEDIRAAKSLGGALSVAMATAMCEESVKPHRGHDVCPGGAGNGRTLQEASREDLVRSSSGGHVTGVLIWTIGRVWTVATGGQGQSPDLSASVQASTDISMVTPLQVSGFLDGNWQW

SEQ ID NO: 1001432 - protein, 108 aa, Homo sapiens
  misc_feature (81)..(81): Xaa can be any naturally occurring amino acid
  misc_feature (94)..(94): Xaa can be any naturally occurring amino acid
MHAKRVRASFASVVICLCRNPFLKQPDVALCERTNVPLLLDLDERWRTRFDKAVKIVSCLACIPVTVDVVDATRYGRTHQXASHSEKGRARFEXSYIDILTTNRNILT

SEQ ID NO: 1001433 - protein, 236 aa, Homo sapiens
  misc_feature (68)..(68): Xaa can be any naturally occurring amino acid
MKAACGSKTEPLLVQLSYLGTKFRVSPPLYPIVVPVPERMPSLRRILCLAQRILAHRAERFLRGIPHXYESSMLATLDTDLQIALTSHRYMLERVRKTWLLELSCAKCYARYSYCNQRPGLVSEWTRVLLLRLPPVLGPIEVGKVPCLNSKGSIELVLVPRFDRERLLQPSLGPPRLTSLSSEGNAISKISATRSAFVYAHEPPDFFEVCSLESAFEGRNSGGTQEEIILKRKIRS

SEQ ID NO: 1001434 - protein, 303 aa, Homo sapiens
LRQGGHQRENLLDFHLNTIQLPLVIDVTEQSVSDYDRQTDVNFKTGAESFKEAKILVQSIIRHADHTDNQTHSSRFFGLNEGKSARPCASSPLEEEMTKCTYALNQEELDWHACGSQSSATGFLEGKIKPQPDEPSELASEDCGQGSLSTAALCRVQNFSKYVSVFDEKHQQSLVGVLCPMVMVTATQPRARHSWDTHLVTGPYKGTHCTNHSLTRPKIRNSYCGKRGLGVPVRRCQHDSPRAQRSFRCHVPDQGRSSSNNVWNDTLDCVLRKFLRQQVRQDWWQGHDGRSIEGHLEESTRSQ

SEQ ID NO: 1001435 - protein, 295 aa, Homo sapiens
TTVRAGPRRRLCCCNLITPSSTFLSDRCGVRYEREPRWRQVRELLSPRRKAVAERPPEISGMQSGSQKLLRRTRPDVSFSSSRGLHSASTLHFRRFRTSPLSGRGHPVLRYTVCQSNNLGGTLAFTCTGLTRTVQCPDIPAHKYGRDKSANHKVCLDLIVGLRHAIERVLHIRRHSRSMPWVLGQLCITCALPMSTFRRIFKPLVHLHPCAKRYPSTVIRSPPGRHIPPFLAPCWWGTAFRELWVIPGQTEQAPKNQDPITPLIQCPMATFGPMGKRKPSSEYAGTKGPWVCGSL

SEQ ID NO: 1001436 - protein, 168 aa, Homo sapiens
GCGRGLLLQCRAQEPFAAPRTCCWRGTRGRGSRGHSVRRGPAWTHALAVCDGSGGPGLICCARCTVHAHSISDSPGYHWLLSVIYLHLLISHAQWANSSQVARRDPTGLAESGPMALSIRIREEFSEFNSIVPHEEGRTEYAPSGRQVHIARWVPIDLALTYTCNRSE

SEQ ID NO: 1001437 - protein, 236 aa, Homo sapiens
MWHRPPKKWEPGKRNVRRSVYRSNHRFPRWLQSGEEARFHVPRDDFQPCLTELGIALSCPQWPALAAWFNLVTQSKIAKPAHGSTRVSSDGNGLLHLGLFGGFQEVKTGQPVKSLRQGNTKANPWQTLGTKHGLDASHGQRNRLGVAKDFLREGLLLLNIRQRSFEPKGRLPPFSNSESEVALMAGASRLMATGHTQKKRSTTPGSLTKDNPRPQGRTGKKPGKPGPVPVGGRGEI

SEQ ID NO: 1001438 - protein, 336 aa, Homo sapiens
  misc_feature (13)..(13): Xaa can be any naturally occurring amino acid
MRDYLLHAQPARXASVCGGTVYVFSLPMRKRRCVGISVGALSQQKSPFRAIRPFKDMSPVLPLRHVAAVPKLPHVLRKPPRCQLATVGAFPHWRTLSDKRGRINKGGALGGALPPCSGLEESSRPIMVAIMHSVAPVCRGFSWGSPQGVPRPLPPKKPITKRGHNTGGSVEVPPPFIVPPGLWRPKGNFLPVATSGDSGEKAEKSNNLREGSVSTWLPDHWRRKTSLSTGTLLLEGDDFFARPPVVGDDKEGGRVKTLGVKHSDIRTCLACDQNKRRPRISARLKGRTLGKPPRLCPYWKTAPQAVGFSGGKLLVQPKSLFGGGENMRFRLAFMTP

SEQ ID NO: 1001439 - protein, 79 aa, Homo sapiens
  misc_feature (58)..(58): Xaa can be any naturally occurring amino acid
GFAVSLDHCTMCASSDVPGALRRPAHDRVYAFSGAATLDRARVACEPGAPCGAKVATXSEKLWASLLKATDWSRDYTSV

SEQ ID NO: 1001440 - protein, 146 aa, Homo sapiens
MLAWVTSGSQLIVRVTEISARQDIIGPSILHLDYAVRVDQVTWDYGVHVEILSFIVHRKLTASSLGCSMQGWTFPWAHRDSRPKTISEDDNEASHNHNRKCPLVKLDSPLDPTAYLFNMRMISRGIGRKYFLGALSEPKPTLPRGT

SEQ ID NO: 1001441 - protein, 218 aa, Homo sapiens
MCVGAQSLSKCARTFSRVTCYIILYYQMWRRFYNARKVTIPSHCGYTRLREKSPKCFRRGFSSGNTYSGGGTQFFLSSATSLSAQDKLPRPSTARVSAPQTCGDTLRKQGLTQDLHPHMLSVAPLHILYTTYRPRKRLTTQRRSDDNRLTAPSTLHVAYSSYSKSRQFAVHKEEDTSCHTVHVKYALTLRPHIKRALITLSRRASSQVVTYSTPTTTH

SEQ ID NO: 1001442 - protein, 332 aa, Homo sapiens
MLEDNYMLPVLILTERHARGGGRWTWLWSQEACWMIVGREGVSLSRCADHPPIIVDLASGTHPEAGRRLRPGLAGAWALDDVAVCLCVTAQSWSATGHGCCWVVDARLPGEGQAGGAAPRVLLEPDHFTMATGRLLLPCDTIQGAPVPAGRDCASVTDARVHIACGPITVGLPFHVGRGPDWPLYPSLTVFPRVRTAVDRGGPGWLASGALWMCASGPQSGLLANEVLWAQSRGVTPLDPPRRNRKGWFIGGTTGSTNGFRKPWEVVPQNKWEPPDKRTTVEKPQGWSWGYEGGDEEIDVTHLMPSELLGEEAALRTPFLTGGKGSRLRKFN

SEQ ID NO: 1001443 - protein, 286 aa, Homo sapiens
MTSGNRKPQKHKVPDLCRDRLFHSSGETHLPWLRTRPGSRGHTCGRAAGRAASWLSPWKVLGEGFQQILLLQTTLQPEAREASLQHGPSELAQGTLADVGLQIRLRNTPPVGLWLPEPSIYSGITHGPTLALQEAHSWGDKQAPLNSSTKEPSLIIHGLQPWAMSGPLHCHRIHQIQGQGLQVPEMLLQHGVLKAAHPDVKRRFSRIAYIWPTCREVGLVTKEQTQLTETSHLAATWQGTSSPEENSSGKDPGTESPRKITGWEEPEAGTSTQKPGPVAHKENTRG

SEQ ID NO: 1001444 - protein, 121 aa, Homo sapiens
MMATTIAGDEENLEIVPVDLQKIMLAGGLWPEHRMGNEDVKRSVYISDIVKGGAADLDGRVDSGMIRSLSAEVGRTVRKMPHRMTDGTHSTSMCGTRGGIVAWHRRIWTRVPRLRYRGILL

SEQ ID NO: 1001445 - protein, 242 aa, Homo sapiens
GAGPLMLDRWHRVCGVCSRVSLDMGDGRGWLLCCLGRAWRQALEAEVVNAAALPVRPVRAGRTCSAVRVCAGTCWLLTWLLEPVPARLFGWGQAGCLLQGADLGAWAPGPLPLALVTAFTAACSVTLGLPDPGALHETICLGWPDPWCLPCGCLIGGLRRMGTPASWGPLGGPRAWAGHGTGWQYGAKPFKGTAEAWAGPDWCHGVAYKLAWRLHCGWTSWEARAENYWGALGNDRGRLGVS

SEQ ID NO: 1001446 - protein, 244 aa, Homo sapiens
RLQRGERRRAVGDPGAMGRARDAILDALENLTAEELKKFKLKLLSVPLREGYGRVPRGALLSMDALDLIRRSRGQSFYLETVWCLSFYRYTCCCDMVPVRRWAGQDCMACQRTEGSGDRSQLGIQGPVLSLAAQARPARYIRSMHLGCSLSRGSTNVEWLLDALYGKVLTDEQYQAVRAEPTKPSEDAEALQFHTQAGTGPARDLLLLGPKGVPVADLVEDLERRLRSPYPVKHSGQPLVNRTE

SEQ ID NO: 1001447 - protein, 72 aa, Homo sapiens
GLRGDKYGKWRRGPCVQSESQRTLYKRHVQMTFATGGRRAKAQRGVSGTFVHLGHPWRPVAGNSRSCVLAIV

SEQ ID NO: 1001448 - protein, 159 aa, Homo sapiens
MALVPLGEESKTACWKRVDDLEGRNGRCSRSRANAVMLIAIGLVWSAFLGRESHVGRKSLGGTISPSILSVRSQRGREPPQNSARYMPLSIGALVRPSDKRAVGESKIIFSRGARRSNRGGGQGKKVFPGHSRSGDITLARFLRGGPVVVGVYENPHIS

SEQ ID NO: 1001449 - protein, 419 aa, Homo sapiens
LSVYVQGEDGPGSQPGTHPHPDAQRSCRETAEARRTDTIASAGENEAGRRSERQQREGDREDRTEAKQKRQREDETTPRATQRQRKRESAQEERKGRGERKKTRKEEENEGQEERKKHERAAREKEAERGEGECRQEGGTRRRERARGTETRDASTRRGDRGSESERERSEAGQKGGEEANDGRRRDEREEEGEGRKRRPEERAERKKEREDDETEGGEETRGKREREKHRRNETRGESNSRGEKEESEKREENERQDDEAGREQSEGAEEASDDTRREATTEKRERGERRRGRGEQKRETRNETNNRDKERETRLKERGEKKKQDKQAGERAGHGRAATSGERQTTQTGTQKKTTGQRTDKRQKDRKETKQTQRRTAREQERQSARTRETAQEPDEREKREKRKRRTEHRGEKTKRGE

SEQ ID NO: 1001450 - protein, 326 aa, Homo sapiens
  misc_feature (93)..(93): Xaa can be any naturally occurring amino acid
AGPYAAMGAQPECAWSGSPSFHKDWQWRVATWFKHAGRCKIAQTDKARQAKAAPGSTRALASGSHPVHHTLRLPQGIRVRTQKCCAPGPQCFXGMDGSVRGLWLVSFIERKVLALGNRILRYFSLCESRTERCEQRSHWELPCKDPSCDMTWLTRDVLWIHRLHSPRSTMEKRRRAPARQGRDQLSWLTVTCKTWSIAQSLTVTWSMPQSRQALVLQRGENTLPSSIDIDAKTEESYPIALSPKIVTIMGPRCPKRSAASFRRIPGTERETKGHAAEAGMLEKLNLTWKAPLWGTLEIEVGRVKRKRKQNSAGGFKGQVVRKKGGN

SEQ ID NO: 1001451 - protein, 91 aa, Homo sapiens
VMKTYRQREKQGTKVADSSKGPDEAKIKALLERTGYTLDVTTGQRKYGGPPPDSVYSGQQPSVGTEIFVGKIPRDLFEDELVPLFEEKPGT

SEQ ID NO: 1001452 - protein, 102 aa, Homo sapiens
MGLEVPGMFDTLQMILCATAMPSHDLSGGRITHLVECGIICASCQNTSLVSKGVHVTPDGCFRLGYPLMARRYDASPGERMTERSAYIARKGVLKWARCTMV

SEQ ID NO: 1001453 - protein, 358 aa, Homo sapiens
GSPGPPRAGRGGPIGARGTPAQTWGGVGKAVSSPAPGPSAPCLPQLSRLAGVPDRPPRHSPEAAFREAADAEDSPCPSRGQKPDDSTAARRAADSRRNHEHVSEKSSESPSKTRRNRKDQMRKKQQASEASQSSSNAMTGWKQPRHTKDVKITIWCNQPSHSRYESHRKQGCKKQEPEKKSQSSKLSDGTHEKKVPRRTARRTHRAKSLPKKGSDHRQAAMLSERKQYQNQMNQTRHHEKSNRTKEINHRTRIMLVERVAGPQANPGHGGLQGKHETDAYNTAWPGRINAESSPSGNRPGREVLDNEGHKEALRDARKTRRRNQVRRPQGQCHSTPPRTTAKDEHDQKIGSGTTKSQN

SEQ ID NO: 1001454 - protein, 195 aa, Homo sapiens
MFWWGPLAPLCVARTKKSRREPRYEAGGLARRTFTKNLAHERSHARANGPGGGTGGGVVFTYSAMLTEEPYCKEPQSPGENRFREHEAYRDEPGIFLSRFAGEFVRPNWGPNWPGVTVGKTIWHRGCPRIGGLGPLGAKAKRLVIFLKPRATAGKPQFGPPGFPLKYGSPLARRKGTGPLGEPPKWAIGAFERPG

SEQ ID NO: 1001455 - protein, 96 aa, Homo sapiens
MLKAATGSGRPRLVVYIVRKCWRFSSEEKKVDAETSWESEEVYCMENVFVVRDSHEWFSPLSNRGSDPIETSCLSGDDGAAACCGDSNRIRIPNAV

SEQ ID NO: 1001456 - protein, 215 aa, Homo sapiens
SSVLLSRVRGLGVAIAKNIILVGVEGVTLRDQAAVSQLELIFPRSFYLREEDIGENTVAGELSQALRATPWVSKQSHDACRLHSAMRPWSYEGSIAYNGLSKVVCSLPPTGATLGGPYCRGGVECLFIKTWELIAGVWQDNAGGCLWSHVSFWLDLSRDGQLESIQQSFPDWCEGKTYFYVGIIEVLLLGYNAKGTTIAHWLIGLPVTRGIEGTG

SEQ ID NO: 1001457 - protein, 525 aa, Homo sapiens
RAGAEPVSPQRLSPGPARLWREGAHSQTRARSRQARHQAHVEINQWHITQRDRPKLAADQMRYTPQRTPDSTTETQRHTQIRDAPAGTTTLTNTTKIQITGRDTQDNSSTQPLTARNITRLGHTERPPPDVLNHHSHYTHNSARYGPHPRLTLHPRRKGNRTQPEQDNDSNTTAASPQSLIQPHNATQDSRPHRSAPSPRLLRPPPLLTPHPSSPTHPSMRRPHKQALHGPHLPRTSRIHRSRRQTKPTTPPHTAPPHSVAAIGSARHTDAAAVDSLIPLVLPPSLRPHSRPPDASHRHETELKRKLMSARTQTTRTQTRVADSTTAQLTPAIPPPVTLARPLYLVPFISKSHPSLHIPMSSINHVLTSTSSSTQHNINTHHKPTIHSSLLLYSHTINLHIPLPLLSYYNMTSHPLTTPIQSRSASAATASLTSCTRARTAPCAPAQTRLALDSSSTSCKAPQYSRGPPVGIYTYSTSTLQLELAGALSCQLVALSNQRPREPVRETVVRADVARDHIRRRHSKE

SEQ ID NO: 1001458 - protein, 129 aa, Homo sapiens
  misc_feature (95)..(95): Xaa can be any naturally occurring amino acid
MEARRHKPILLRKRLSSNLGNKTMRLLEQKALGTLHEHEIESQFSSIAALDTGEATRKEIPPIGELCAKAREGTVVNCTFHSGVGYEKFQERRGXLKLTVDPRLPIPVKRNVGSEIGKQPSICAHCDMV

SEQ ID NO: 1001459 - protein, 208 aa, Homo sapiens
  misc_feature (96)..(96): Xaa can be any naturally occurring amino acid
AEVPVPDMQSGLPIHSTPICALCSPLLREPVRASAAVLGAQSLSLRQTGVHYGLRAPRSSYLRHVRAGPRGVLEPAGLLPRGDWLTLQFHALLPYXPLVASRRVSPLSFSDHSLAFVSAPQSPRRAALVAIALGASIVVALDWPLLGPSRRLPRVRLLGLPLARGSLRCLCSVCRRALRPGTWHHLLHLSVTISHGEPFPDHLRPSRP

SEQ ID NO: 1001460 - protein, 37 aa, Homo sapiens
MCPPQPAPHKLGPVHNPMEVPHPWIVAESELHTEDRI

SEQ ID NO: 1001461 - protein, 120 aa, Homo sapiens
MMPCVGCSAVVVTLRSSIGRVVVLIRLMKRRSFEAIYHAYALLAFSDRIEYRLQARDKFFWYLPTSASRILTGGRQFCQSICGVTVNGQVVRESTIGRPVMRCQVAPENSASLYLSASGG

SEQ ID NO: 1001462 - protein, 56 aa, Homo sapiens
REKMTQTYAFETFNYPAMYVAIQAVLSLYASGPLPTGICHWTLETGSPTLVPIYER

SEQ ID NO: 1001463 - protein, 104 aa, Homo sapiens
MPEVEMAEGGCYRARSEHKCERDDTTREDPARFVLLNLLLHMPEPQSLRIGPCDRREIQVPKGNMRDRMLMLAMDGHSACRKLEMPGRQTRHEKRCNGAGSMPM

SEQ ID NO: 1001464 - protein, 284 aa, Homo sapiens
MIRSARSAPDSPLFALAEGTSRSGSPAQQPWLFKGYRTNHPWSRRWQFTAHSNHPNKPPTYHILGHQVCALTCYRGCTTEQELLTRETDPRFELPTKTIGELTYRDKSVLDGDRSLRPWDSESTTDELHKADSLRACNQIPSRDIVKAALLYHQDIDAKGVQRVEDQGNRQMRKDTSTKNKIDAPTIVKPQKTNNNKQNTREGTTQHQRERRQTKTDNNNRDTQQRNQKPKRTPHTQRTKTVNQSRKTTHAPGNHKTKREQTKKNKKTETAQQNTTTKTRTTPN

SEQ ID NO: 1001465 - protein, 155 aa, Homo sapiens
GRPDERDLAAVTCCFTVRRIVPGGAGTSKMTPRVNLERVGVLVQPTRAFRSTESQTDGTDVILRPSLCGLSPNRGPVIDRILFYPSQYGLVFEEEPDGDLIGGPGRVIRSQTELSVHCPRVACSLAGGQRLDGAYPACQECCVGRTQDAEESSPR

SEQ ID NO: 1001466 - protein, 144 aa, Homo sapiens
QKVDEVMYAYEQKEYRKPMKVDDWCANGACRGSLESHGAHRKGVSLNSLDSTSLSLMFGGQYEVMVIRLYVAIVIPRKGHQSLEMERHFEICVDIREGLVHKAIHMKVEVHGFFESTSFYKNIQVVEMGLEIRNGEGLARWVGY

SEQ ID NO: 1001467 - protein, 82 aa, Homo sapiens
EKTVDITLKGRTRFIVKGPSRNPVVRSVKSHQCTNSAFSVDSEEKKRGSGSDKLVRGNKNRERCDLTSAVHVLSQDTIVRET

SEQ ID NO: 1001468 - protein, 132 aa, Homo sapiens
MYDRDSYLAVCAENYLPRTSGGARIQPPRSTLELYASYVYLVHVLLLMTADDVALNELLREILCFTNLSERRREPAAKLIEAAESNEVARILPFRHINETETGDDWESGLNCTLECALHLGLEHVNSVQYWK

SEQ ID NO: 1001469 - protein, 256 aa, Homo sapiens
  misc_feature (28)..(28): Xaa can be any naturally occurring amino acid
MVMGALSLCPMENCIAPLTLVLRNSFSXARTDGNKKWRSLRFAPNHPKGSSFPRRVVGVAFASPSWSDILVTSLEFPSRTPSTRNDTYPSTEDLHFGRVSAMANKVACQKNLAIVGGERIVGKPEFQEVEDSPCVCSPHIAFAPKRQVKREPPYVIPFFALFGVADQKALGRNGLLRTTLWGLDLGNALKRKLITNNLGTSNQGLTLETNGLELGIGFTRDSRVPLLDCLFLGSGKVDLVPGAIGSWGNLQKRNGK

SEQ ID NO: 1001470 - protein, 136 aa, Homo sapiens
MAGLALLRWADVLAAQKSARLGRQESLGGLLALSCRWAVWRPCRGPTGRLGFGLGFFGDRRGWFLLFLPLLGGLHQLPAVGLEVVEFIELHADILDGQLEQVPKPCQVLGCGAWVGIRVQVWLTEAPELLESRGHQ

SEQ ID NO: 1001471 - protein, 122 aa, Homo sapiens
MIEGAIRWSDTSTKLTSEWNRIIVQRYAQSNVSTDTLRNHGDGLCPFVWPCAYRVPSCLQDPELQTDVEYVSETECDAAGATYLLVPTHVVISKVSAVPPWGRVPPHFEDPILRERQANQNN

SEQ ID NO: 1001472 - protein, 222 aa, Homo sapiens
MNAVSCARLGVDRNRRGQKYQPSEMRDGDRGGQHAPVRPVARMGSPFLGLSRMFFPPTSGPGDKLSCGGSLMSHCMGAHWRRVSAHYRELREYRYEYTNMACPLTPNCHCFPRCVGLGSSLREQATTVPYTITTCLHNALVKTDSAVKKVGAHTEQEQVGRDPVNQEENDKRARTAPIEWYQTTDRWSTDSTIVHERLGDEQRPPVKSGSELTGSTGCSEQM

SEQ ID NO: 1001473 - protein, 193 aa, Homo sapiens
VSLTFFDGVSHRVRSQKIAEPRFLERRLCGLGALLLPQSQSFSCRGVGYRNLYPSSKLDAITIILSPVLVAPHGDAVINVPNRAIVAKPEDNPGPVRPADALSQSYRYYESLGPSPYVECCKRFPAVEKEVVVRKSSPKPPWPGRKGNGGCHRGRSAAGPSTSFSTLGSSPSLSGARCCAMLNPGTACGVPRR

SEQ ID NO: 1001474 - protein, 106 aa, Homo sapiens
MVALSVSSGARLSFRRLKLETVSINTDVIGALGVTGTELLCRNSSQVLEARLRDINTASWARGGAWVVKTTDVAEWCDSVMDHNTESASPLVRSMICRNGVPEKIE

SEQ ID NO: 1001475 - protein, 412 aa, Homo sapiens
  misc_feature (264)..(264): Xaa can be any naturally occurring amino acid
LAHNSPGATLQRPPRRTPTVAYTFDCCASAMPVSSPLRATHLCAEVCVLLCWSRISRSMVSNSPDRQALIFDGARRVTARPLLSSMTLSLALAARPTWNARLPGLGGSNYSRLRRLKGSGSPSYRHQFPWGSGAPLSVRQPSAAGSSLQLALVLRSPALPLSVGARVRGTRHLRCVVPQRWLALALRATGCQRDSWLGALEPETILLGTFVESLEGVSSLRAHTIAVRPMAFAAFLLEAGRHIAGLPSHGVVKRRSRPSTEPKXGQSSARLLRCDPSLAIGRKIWRVKPRGRVLGVRASEALETHTGIAKSTGPFRGVVKLAEPKAWLRMSSIKLRPFPRRKNFRMGGDRIGFPYPKNGGHAGEKGEVPVGWLWGEDKGIAFEEPSGEMRPNVLPPVIRWACAKLFLSRNEK

SEQ ID NO: 1001476 - protein, 340 aa, Homo sapiens
  misc_feature (127)..(127): Xaa can be any naturally occurring amino acid
  misc_feature (214)..(214): Xaa can be any naturally occurring amino acid
MRAKGLTGLSEEVCGSTLWVHQSSCGGFPVRMSLPQSLQVFTVFFSCEPLPSPPRALQLLTPAQNFSVTPGSAVDPVVHLQGFSVQFSGLTSVFGTKISERPPLCSSQALWDLTAQVCQSPHCGLKXGPVCVAHRAPSQGALFLCVADLCVCSGGGTEMLLLGRILAVLIPPYLENGAPFGLIKGAPGDKQGAHNFLPCGLGPPGGFQERHPFXPRVGSDQSCCPSNNIPGGTHRGGESGKLPLRVELAERNKTPQGPQNLFMHIGTNRRLEDDTPESLVSSRQREARGPTPNQREGRCSPHGTAEVSTTPCCIENQVVFGWKHHPRMCLRETMIVRLTH

SEQ ID NO: 1001477 - protein, 275 aa, Homo sapiens
  misc_feature (35)..(35): Xaa can be any naturally occurring amino acid
MAMAGQLWDGNPGATMFWHTPFATGVLYMGKNLSXSPFIGSSMTPALSSKYKRNTAYSFPTVMDLSLVRLDPLAGYVSSFFLDALGFGLFLDWVGLSTLCPPQPEQRGKVSVFRAAPFWYSPFKRENELSEVCGASVCVVLEHTICDITELSLKRKAPKGRKLAEIISPTEEGHPHTNVSLAFFETTRGGPAWNGKGAGPKAERDAGTVNSGGGPSQTFVSPPPLWRWPGFPPIGCISHGGGGRIDAGHGGPCATSKAVGGGAPPGRVPPGQWLS

SEQ ID NO: 1001478 - protein, 237 aa, Homo sapiens
WEQNFTGQQALRGHGFFRNTGLARPPLRLSIIISILNSNLYPPTGYCPTEVPIGAYVVPRGLGPMKVWVLKRQRGLPVCTKVLRPQRKRRRDGVSGGQSDAGSITSRILGLSPRGRLMSQGLPMSPVSAVPGGRGWGPRGCGGYCRGLHGHWRWCCPSQTPVPRSIRGVQWQSQGGLHRGILRGPPMPGQGLPLTRRTWKRAWATGAQEAHWASPAKVPKVVANICHPGRMRDKKED

SEQ ID NO: 1001479 - protein, 69 aa, Homo sapiens
ARGELESLRGVERSAAVRASRLPGPLRPVRLMLDPGVQTISPGSGLPDYRGIRVPYARVSEFDCLLRGV

SEQ ID NO: 1001480 - protein, 305 aa, Homo sapiens
PRTTSKPFISVTVQSSTESAQDTYLDSQDHNERGDYASGPDATRSDSLDSSTRPPSVTRGGVAPAPEAPEPPPKHAGSDKCHNGTADQLLSPTPEVRPQHMVIAVIDRNTSGLLSDQCQKRSPAPRYQNFHVQSGFTVEDDCAKAVVLALTVCPPERDTDSDTQDADDFIAVKSSDRSLPDCTPQPNSISIDAGPRKAPKIGQYQAQRLLMETTADLSLEASSAAPPEPLARDLLQLPSRAGTARGLPRDGYWFLKLLQAENRSGLQRLVPARWTRRPQENRLSGRSLSEKSSDAVGKCPSTDCP

SEQ ID NO: 1001481 - protein, 180 aa, Homo sapiens
  misc_feature (107)..(107): Xaa can be any naturally occurring amino acid
  misc_feature (109)..(109): Xaa can be any naturally occurring amino acid
PRGPGGLFFWTKKPRGFSPGAPRGNNQEGSTMDLLKPRGGTCVEAEKKTLAWGAISPRCGKSKMAAPNRGPPGDSGVLCVRMSIGERGTDPPRGGGGGLTLEPGGHXLXRGVLWLGGAFESVPCRPVHPRGGEGVLCLFPQEGVAPKSGLCPVAHKFLLWEPPGGVLRRKVTPVARTQLL

SEQ ID NO: 1001482 - protein, 298 aa, Homo sapiens
RSGDQNGYQLAEQSSPLQNLAALQTGSLKNIVLPMIHGGEIQQTPNTVAASPAASVSQPDNCVPMEAVGDPHTVTVSMDSSEISMIINFYQRRVFSIRGSRGSCWIKGSQHRWERKNEIWLTKTGILAVSYTGEARWTSEHSSDDHHWPSSDGQRYMIILNAAGMWHARGQQHCHSREAHTADPQSLPGPWEHPIQQERDKPVPLPAPHTGRLQARSTTRTSDAQPDHTRELHDTGGPQGAPDAEITRGTLPQPEPPHSTAAGNRHLAAAQAPKSAPHPHSTHSDPPRRTGQALPRPT

SEQ ID NO: 1001483 - protein, 174 aa, Homo sapiens
MRGIIEGIKGPRGTRPEVPRTRCYAQYYPITCLPEGGGNTRVWGQEERAKGPNKLSQPRYNQWGEPKGRQRPQKQGENLEERPKKGAHTNKLLTGEKENVGDPKANNKVDLPKLDNTHRDTNGRFDTQTREIPPAIQWGKTESQKFEAAPPVTVGKKGQEDQGTQGYSDQDYLL

SEQ ID NO: 1001484 - protein, 352 aa, Homo sapiens
RNCCGCPSDLLLSAHSTLQLALGPGPVRALETWTVTAQGGSWVKGVVVPQNVCEKMRRRKKRMTEESVQKSMPGGSVAVPVWAPRVVAVPGWWYQLMQSSQSLHRLCSIEGFQCSLVVAATRQQQKKKKWGMEVRWTIPQDSNRPERALKWERSGWTGLAALPLLNDVPLGRPERHGGLETSPASLGRQPPPMSIMIHEPRRLEVAPPTVSQKGDKGAHAQVHQSDAKRTTEEMDAEARGTEQKGATRHGGEQTRHGQGHDVLMETLAEQREHREANGGRGSKRRRSGATTIRAKRDSEEHSGTRESQLGTHQHGRPGQTKQSDSTQRTGERRERAQKEEADHRTENPPEVT

SEQ ID NO: 1001485 - protein, 342 aa, Homo sapiens
MRAWIFFLLCLCRVGPWHALSNEALPDETEVVDRILVAWRCELRLSVGQLESLSTVEEAEFDALVHEEDRKRTRWWRRNPCQNHHCKHGQWVCELDDESTIAPVMRCAREPPADACPVPHWASLENGVQLMTNKDLSNLFLATSLANEKLHPGAATKREATMLPPGSTSGLAYTSPLALDSELTEFPLGHAGTVFKNVLVIACNDEGLRTRQGFWLKIARSLQGDMTDPMHELENGGLRRARRSTKVSMASLLGSWRVSVDTKVISNVTVFRCYNWARYSSRWLGTPGDARFGLAITRLLHTEAGNRGHSRPGPVGSHAFTIPNKGNAIGNYTPDAIEPEDT

SEQ ID NO: 1001486 - protein, 151 aa, Homo sapiens
GLPWALAMPGQPPSSPHAALAVVLASLAAPPCACGPCPPWCPGQSPRCEAMDCLMLACSCQRAARTWAGFKCGQLEGRTCGAIYQCFVWSGTAEARKRKAKSCICHVLWRYHTQQDCIPASTVSSYGCYHEQQAYSEHAKAKRNNLAIDLM

SEQ ID NO: 1001487 - protein, 312 aa, Homo sapiens
GDARGAIVLVASEQPSLSIWSYYWYAFGPESPSNRLYRTVMLQDTLYDYFWMGTSVRLAIDYTSDLLGPYSINDRMMDVVYSQKAQDLYIRLPLALLLRSLDIDYVSFEAVSSGYTNWLALIEHIRRKRRLRGTSQRHPWKHFYLTSGKHAQSQVEVELLSLCKLGSLAASVARWFPSSVRLTMDLVPVSSMKVPRSQLEIHILPDCRSLPGMAVIVDKPWFYDMKKVGRDIPYSSTIPSQYWYYMIGTFLLLVLLFSIASDVRREDFKEQIITMWTPSFFISFLVCHYVRAGILIMGLLDSSDNAVESARV

SEQ ID NO: 1001488 - protein, 64 aa, Homo sapiens
MISPKGSASHKLTRKYPKGQVSYNVGAPRENYYSGEKRFLVADISWLPRSEPDRALVHPRCLAS

SEQ ID NO: 1001489 - protein, 130 aa, Homo sapiens
KERDFFRVSRSLLKPGLAQLQTPPARKRERKTDRGRWEERIKKGTKSSRRTFHIVQQRDLGAGREIPWDAGLEVSIVEPQAVRASGASRDPARLLSLLKPSVQERLFKNRKAQGRSPGRLCWLIFRLAPL

SEQ ID NO: 1001490 - protein, 152 aa, Homo sapiens
MTVAAGLASRGSVGAQRGAGLPERACPGVCWCSARPRGHVPATGHLQAIGLVRRQVWAFPVGPGNSDAVMRWAMLAAGWLRGLDLWGFVTISELLSCPSWTVADLRSASPGYTRCGLDRLGLPSPSLGEPRTTVTLGEWASSQWVLINRKSW

SEQ ID NO: 1001491 - protein, 75 aa, Homo sapiens
AADAGTLARSLRTSLDRSNDAKGENFPRQFVWRKEKLPWSCDSRYFWGWLNAVFNKVDDDRHQECRPVYRVGNPE

SEQ ID NO: 1001492 - protein, 60 aa, Homo sapiens
MWDTVITLAGAIRQLGRDPRDCENADEYDKCDWSSHVVGENNDEGTQINRCGTFWCYTVK

SEQ ID NO: 1001493 - protein, 224 aa, Homo sapiens
KTLINKWKLTKIFKPLLQNASISRGLRKPKVYVGYVTVNIIKWADESKYVRKRLSQYMHVKSVEPCGSQTPCCPVNACRKLGDEGEDFESTLEGFVRRCVKEEDPGKHFVHTACGLELIGVPELFSIIKTYCGDAYRCDLDNPPEVCENKQTEDGDHTRTVATTQGGQFNPGSVNDPQWESTTRRHPNNGEREYRDIGPRTSAHQKGVSKKKSSCVSRNRNIFS

SEQ ID NO: 1001494 - protein, 474 aa, Homo sapiens
GRALLDYNIQKESTHGAGAPYTKVGYADLAVKTSDYGKDAVMLLEGGAECHQYDEVLKGKENPRTMERQSRPLTEQRKSPRAEKNKPGRLDGTRDHDDTRQSQDKRSNMCTHGHASRTCKHAWGMHEYVCRGRERTESVGERGTQSPSCDAQGRPELTKREQDENVPQGGRRVHKGTKGERASRASLGNRQANESVGITYGCVSVHTPTQWAQVIVGQQPLMVTLEPKGTIRQGKSKVPDRVGERIGIGLPGRYKELVWGIAKKIRSRQRGKPGTKGVKGQQRANSINATEIATGAEGETSQVVNEPGTEGTKGIRKSNEREKGKYSGRVKREAQRGVGTQSEAVGGEHTTAEGKREIGQRDTHHGYRGTYTKSRSQETEAGPDTAVENTHREWHGRATIKRKGEGRNDQGIQIAGREEEAPRVKTWGADRHTLDRKHTNRDTEGKGRKRGEDTQSESTSGNEGHERERPVGKQ

SEQ ID NO: 1001495 - protein, 301 aa, Homo sapiens
AKAVDRVGSPSLGLGIQAVAADYQYIGAYPEGPDRSCGGVFRVAAAPTKELLVKHNPYRSKPLAVLADICCWKLYKCLSEHAVKQKHDSEPLGLKRRFMKFVTEGRNKGSWYLAGDTLPIDGILPSPEIMCEDRNFALCLYPRLRRTWCARRQAPSRPTCVIMVKSPVRRYQEAYDDVPGGMLQSLVPTPMRGSGRTWSTCRLEAIGLAVSDDWLSSSHPNDGIFPSSPNGTAFFPGSSNSPCMKGNANSFLSNQVPKFRVEPKGLFQELLGGEHVTAATRSAGTISTKSQDGQEKQGGRT

SEQ ID NO: 1001496 - protein, 103 aa, Homo sapiens
MHTIHSFVERLWKYVRTYTRNPLLDGSARKMEAVRAKPCFATPCCDPHISPLLEKELPPYYTTAIVGNSQIPWFEPTVFPIQKAISLVRNPLGNCFGEFGPTH

SEQ ID NO: 1001497 - protein, 69 aa, Homo sapiens
  misc_feature (44)..(44): Xaa can be any naturally occurring amino acid
SFIRRLSDLTKAGTELKIDPIDMTCHRVLGGCVCRLRGIPNGCXLVITENGITRQVNYSREILAQRVLR

SEQ ID NO: 1001498 - protein, 414 aa, Homo sapiens
PSGIDHCGGQAKVALMVHGPHPRCWLSSNLVDLAGHVRESRTRQVPNTCGSVASRDQSVVVGRVEVASRRQWMVRCWVAAVGHICNGSPIKSKLLNDLGPEANVDCLALCRQQQGEAALDYFAVSQGALRQKAVDALSIGVPKWNYHVGVAGEHCTRRSTSTNRDRTPLELGGTSLSSNLRRIELHARLVLSQQLWADFFGHLKTVSPKGITIFHRDTSKSATRGLNIRRGPPKWESTHMVSAAGKILRNDSGGLLLTGPREKGSPHGRVRMKERQAVLVKLTLVVGKQPALAPRLQRGPTGTGQSDLETIVATKSTQTEREYDQAGHNMLTHLAGTNTHIGRREHPEVVNSKDKRHHVEAATKATERASGHVDTEEKSQTPEHEAENTERDEAPAKYPWQKFHARSNKKERAN

SEQ ID NO: 1001499 - protein, 474 aa, Homo sapiens
PQATNLCLSPHDSQSGPYPFSPFPANQWSIRCSCCTAPHATVVKTALADNGQAHTSRNDRRPKTRPTCTNNTRPKTNQQPRTKHTPQNTPYTRQPAPPNKKKTQAKNQKRHNNHTPQQERDEQRSKQARSAHPATQREQGTERTKGNNNTQRAGPNKKGSKPRGRGTEKKNQAGKKKKKQRERKKKTRQAQGEGTARHRGQPRGAEERDKTPNGQRGQGKEGKERGSSKRANERGQPRGPSETTDKGDKGKETEGHSHQGPRPGTVRGAPRARAETPRKQTESQATETKEKRQKASRQARENTPRATRPAGAHADDRERGQPAQGPLHEPSSRADSNNSPQQPPDAASNAAPPGRTPGGGRKTEVQKRRDEQMEPQRESGPEPGGTGGPKKKRGRGAKTERKRPKRAKGNDAKHTPKAEDESQGSTSTPKGAERKRRGKTTRRNKAAGRREETQEANVKNENETEKKRKKRGKA

SEQ ID NO: 1001500 - protein, 181 aa, Homo sapiens
LEWNERMNTLQAHLDDAYPKDVGEYGNMEDVRTVYVAHGITEQCAPLTSRVRTMRDGSSAAYNIPDRQSSSGVAARVRTSPVVCMCRPGELGDSQTGCNMDNKTSRKRPSNRYETKVHSEHRVHSISVRAGLSVRRFVGWYRCTDDSPCNLQVREPGDKGESHLNQVNTFLRDVSNHAMTG

SEQ ID NO: 1001501 - protein, 113 aa, Homo sapiens
MHRATGSHKEREDTSTTGDHVAKSHKVEHDDIETLGVEGNTAQPYENSHKHVSRMTKHETREEWAHEHTTALSREQEQTGTETIDNGTTRAESLPKRGNGGAIGDTTTDKQAQ

SEQ ID NO: 1001502 - protein, 252 aa, Homo sapiens
ILCAPCTTLRGPAPPACPSAACQAQIISRLLGRHCHRSALHHPEPVPADTGSQQRIQDVWTATLYADDTPGAADFLAKNSNRTPHSGRRETGVRGTRACTQDTRQAAHVHCRDGHVEADKTRLAAKGYRGTDSATLVENPRHTVGRSPRMPCNGTHRRTPSIKRQLNVIFRQYEGEEEKQESRLGTEYRRTSRRVHPVKPQRYPPQYRDGSIQNDRVSETNQFGYPSQITQRITERHKRAMGATTALSTENA

SEQ ID NO: 1001503 - protein, 368 aa, Homo sapiens
MTHRHMKDRETAASRTTLCCTWRRGEDNQQWSCGHLGRILRCNSVVGPIEAAPLCFRGATPGADRGPGHCAPPSMIPGRGKKERSCKDRKASASATHGVIRARTPCGNRKRNGTYPEEKQSKAEPGPGKEESPFTNTKAQDWNGGAGAFTKEKGHANRKMALEVDPGHYGQDEPPTETGAPWRGPKSTSTWTNRQGLRKTAMAQQGKRRPNRIAPRWFATQARRRHGLGRNTFHQNDTGQTQGNKGRGTPMPPSKSPKNNRLQSENVRPTQQTIRKQKWPTPQEMVLAKGTQEGRKGLTKSAPGKGDILQPGGQRPPHTIGHKPWAGKGDQGRDRCAMRATEGKKRAIGLPPGSRVMASERAAKQQTT

SEQ ID NO: 1001504 - protein, 177 aa, Homo sapiens
  misc_feature (125)..(125): Xaa can be any naturally occurring amino acid
RSEYSRLVLLRGDEIWSRMTVEWTSSQRYLVLLEFHLLELRVGSQGIWQGMLGIGILDAVGSHVAHGSCDGTCMWSMSCGCWKGHPQQVMTLARRKRYCRHASVASKHGYQSKYLHVVRSETRKXLIHVAVGGAPYAPEPYGARGSTPATKALMWPHLSGYVELSIGSPQLAESPLV

SEQ ID NO: 1001505 - protein, 461 aa, Homo sapiens
SAPVGGVIERYDPVLVIPSCGEEIDCELLVPILRSSWGHHEPSVVPGALGWTLGTLNFLLVPPDARASRRQTGLDDSAMEYRTQWVVGLVAWLIGVQSGGPLHLALRLRMCVLLASWRDRYRCCIETAEFLTPETDSEDNIRLKAVLKKGRTYVAELGEGKKVKSSHGSSQGTQGARGGGVGTHWAALGTGAPSNSPAGASKAQERARLPSLRDATVEVGAFRSRGNRWNVPGGQGRHWTARACMGAWRLNPHGGWDRLDYNDRCLGAKNLSLANPGGLGTAAYRRWHQGEESNGKPTGMNPGVESPIGDEREAKGPYLTRPQRQRTPNEPRRHAGVNRLNPQGGHGGNITGAGEHQHKWGDSQWEQLEKGDDRGHAVYARNETCAAVKQTRSEKPYHKNAHQEATYNLAEMPHCWNTRTLYTGTTELGKTKWAEKPRPLPPVRHYLERGEREKRKRSTLK

SEQ ID NO: 1001506 - protein, 308 aa, Homo sapiens
MKRGLYKQAHDQLVPGDDHVSSRHCVSPIPGPRVALNEASANKRTKTGGTRGPQILVANPVRNTLGTSSGAQLDLAGEATLKPGTTPGNAEAQDTGGLQGNINGEAYRTEHKKNGAWAQGTRPVLLTHLLATPRSTHRRLGPPLNPSEEPRQGLGTLLTMKRDARTQRGTQEMTNDWGARTTPEKCPRERRQDNRDDRSNWIDKTGATRSPPNRRKPGETPREKPHRFEEPRRGKAEAHKEGEVNTDRGTRPPCVKREEQGGDKKGRPCKHQKENKRPQRVNSYRQAGHGHRNAKNNYCKRGLATAYE

SEQ ID NO: 1001507 - protein, 287 aa, Homo sapiens
GEPQPRRPSVASARDAETPLNDHGIVPDELTFHEFEEATNLLADTTMMQPPPAEADQLTPQWARGCGRGLMVASYGAEDEVEEESDKAALLQVQQQQQQTGFWTFSYYQSFFDVDNLTGPGPGSKAHCCPGLDNNFVRATICGNRPDLYGPLLDLCHVWTLSMAVNLGTDAWLLSQRRDPYIHYKTPVPPRLNRGRHQQSTAIAWLVPRGPCGGFLTVAQGCPGAHGAITISCRLCASTGVLPLWLHPHGGPCWSIPVPWVAVGLWERLALGPVSAGLVFTLLTRGP

SEQ ID NO: 1001508 - protein, 280 aa, Homo sapiens
SHSVLPSLRASRFSAGERPVPGPELDVAGLCPPSPGWPRFKLPDGLVAAFPGDREGVGRNGKKRSTRCVIDNGSGMCKAGLAGDDAPRSAVSFQSSGAPDDLMGVMCVAVGQKDSYSGATICLSMQCVAIVTREVPHVSYGIVDQLWTDMDEDLATTPSTTSCRVAPEEHPVLLTEDPPVTPRPTEQKMTQTYVLRPSIIHVACTWPSRALLSLYASWAHHWHCHGLWRRGQQHWCPSTRATPRQAILRLGPGWPGPDRLPHDDSSLNRGYRFTNYVRSG

SEQ ID NO: 1001509 - protein, 297 aa, Homo sapiens
MAEEIAGWSVDNGSGLCYGWFCWGRRSPSRVSFHRRAPQTPGRHGEAWSHERTPTVGDVRALEQACVILTLIVPHCCMRIFTNVVTDIGMNASGTHTRVYQIERCLRRPARGRTPMSLADPDGPPRETPRWANREDERDDVETYGSDEPSIDPRLDVSMCSSMARCRVTIYARLGRIQLALRRWSFWMSGVDRTTGAHSSEGLSPLTPAPISAILEPVLVPVHLSQTYQSLKDPSLESEAYSRCTDARAVARYNRCRDSLRQKASAYRSPWDSRGTEHWPPCRIRPSFSVTKSYEAW

SEQ ID NO: 1001510 - protein, 172 aa, Homo sapiens
WAPRGAPQVVRSPVRPPRRCPALPAQPCLSYMPAWLLVTWGQQVASGVGPSLLRTCVRHVLLRATGSRCIHLAAGDLLCCCVCPLGRGPVAQGQAFAHCGLRNRGAPIRLIPADLARFPPEAPDKPLGRNPRFSVEPPRKPVYFGPNVEDGPKVSPDGRRPTTRFLARGPWR

SEQ ID NO: 1001511 - protein, 317 aa, Homo sapiens
GALHDSPVTHVEAALKDAAACDGARLRREYLYPAMARGGGCMRSAQEQEGSGCGARWKKTALIPNVSLRPERLLCLYEGVPWSLMYAGGECVTMPCWMMNTGMGKAVRRYPKVVMYPHKLPRTTPKFPAPLKMFAKAIVQAGCSQGALRNEAEVDLTVGALVRACRCLTVVDRVLLVVHGALGGTPVGRLIVSHRAPFWFAISATFRRRAVRVLRSCGRFDDPSTLGTMSEAKPRPHLHIGFAVPALGKRVLLTSFRIPYFPVADRCQATGSSRFDKPVTTYRYPSGNHVVIEDRTNRNVEGFTVRFGAPFELKAVM

SEQ ID NO: 1001512 - protein, 217 aa, Homo sapiens
RQAAGAPDRFSSSSCSSVLLLSYAGRPPVEYLTRAPRSCALRAIPSRRATSEGSAAGGKGLNRTALAELSDGYAGLEQTRRSARRATYGRRRACSARKRRERAVKMNAPFGVRSLPYRASLEAEVDALAGGHVSSPKGRCHNDSDHRDTPRDVLALTKRPELNTVNARRPKGLAAGDTKRLRIQCKAVRVREKGASRSNQFERHDLIAWYPPGFDSK

SEQ ID NO: 1001513 - protein, 280 aa, Homo sapiens
EDFRSPAQGAPRNEVVGQHVYKKAFPGTGLGERKRLDVTLFAGVSVTQGGGESELLQGLVQPRITRLVGFRDRYSAEAMLGRLFSKKIATRKPQKPAEKGSSLEQCVYLEKREMARLKSRDLLLGNVSVAEIVELEEWILKNLAQTRSASTTWPSPPDWRAEMKINEDPSLMRRQTLHLSMCTVELSKETLDTMLDGLGRIRDQLSAVASEMIQPAARATAMTQLVMSDKCLPSMQAALAAAADNRQDGGDSSAALGIREDDRGTGKKAADPPLFVTRSW

SEQ ID NO: 1001514 - protein, 210 aa, Homo sapiens
MELKGRREFYEFYLLVILVKAYNLWADVRGFQTDGRYIEANPWKNLCRALALEAGCPRHNQSRQEVPVGSQGTPLGVSPSRGRLLYSPGLQERHKDMGEGLFRPRGYPLSNPQWTEVPSKLVGQEHKHQTRHFNAEIGRRRAILRKCDGRFQREQRFAKESPRIKTPNWFENFEATAHAGNNTQMELENARPCKRYMARQQLRDIPTTLI

SEQ ID NO: 1001515 - protein, 109 aa, Homo sapiens
MTVSEWGVASLACQGPFVQSQPGLDRRAFPSFFQSDRATCAALGGFRPPASLDPQEEIRPRWHWNVVGMRALVCDAPRLGGSPSLCPSPFRDSAVPWAPFCIVVPCVQR

SEQ ID NO: 1001516 - protein, 163 aa, Homo sapiens
MAWCRGPVLLCLRAKGWNQFIPARLGQEPLRGSSVTVLQVLAYDLRDGEREHEDRHEEESPRSRVLPISPSEHLGHWDWMSFVTWINAHGTALTLREESSPRRARRTRAETRSGACPTHSGIRGSFDALARPSPLPRSKSVTSPLLVQSSRERPFQAGELINS

SEQ ID NO: 1001517 - protein, 240 aa, Homo sapiens
GWQCVGRSMPGVTVKDVNQQAVSSTRLWPCLPQESPGEGCNRSPSYGDVIPVKACAHTTSKRVLLPVPMRHWFLRSRRLRIHSRRAPCTIQVAARMSGLASYMTNDRMWATVSRKRAVSGPATSALMDFQGVVARPWSSKALGGVLTPWWTMDQDGRPQNLTSLQGDIRRSWTRIAVIRWQAAQLEEAVRSKTMLGLINLPHFVDPDKDKASYSGYDKRSSTTTRSPQRRIKRRGEEEDA

SEQ ID NO: 1001518 - protein, 278 aa, Homo sapiens
ERTSLEFHIIYLRRKNKKLYSCSETAKQEAQGIMTAPVSHFPLHVEGTGGEVGSRWDWAGQRKQKASCSYMAPRHSGAVSTDPKRYVLSHRVHERRRTFSGGSHVKEGLRIEAPWTWETKLCGLRRTLTFPGSLSSHLWCPAGATQPLADKRGLVSPTNACQCSEPFDNWPVALVPRTFGPERPAPLKTQASTRHPPFSKRVSESPDGKFPPRVPQCAGVGNALFPPLGIPTPFGGPERRESEGALRGTLWPIQQLGGCFGDSPKKPHYTRAPTKDWK

SEQ ID NO: 1001519 - protein, 285 aa, Homo sapiens
MVYRTRGLGLRDINLVGLSALSVGWVLAATRMLPVWPPGVSCGPSWSRLVAGGLRGLVAGSTAAVEYLALRLHLGDLGARCVFLTTCLTSISGGLPPVCQAVEALRWERVPCELHARYPSDRTSLLARSPVTLARVLGACRGAVELGNPGLSKLVLNKKRPGKSAWNILWTNRGKQCGQLGAQTDSWRELLRLKTSGFKEKKGLGLPSKVGPPDMVPNSVGRHPQGYPPAARYRETAWPLTKKGIVRDNQNKRRTRGGREAHDSNVTPRLLQREEPYKEEVIRSP

SEQ ID NO: 1001520 - protein, 198 aa, Homo sapiens
MRGHNVGSKGENSSGQYSGSQYVGANKRRPRYTAAGRAETHSPIARSKADSGLRKYGHTNKRGAEYTAHNVYYTPAGAIPPHGAAPPQTMTVHHTAATPNERAREARPTRRLPKHVTSTRRNTRPQAQPQPNTAGTYHKHQHQLAAKPQTSRPNHVEAPNPGHQRGGATARRGRQTHNHRRGDHHNTYTHNQPTPERV

SEQ ID NO: 1001521 - protein, 119 aa, Homo sapiens
GGVEAETTERLYGGAGQCLRGSSVLATGYSYSVVLDVDHAVECRQLVLDEARRQSEPGKYTYVCIDPYHIEDKSECYTGTARFHALFHVSVTSKTARFAGGHTEMLPASDKAAPVTMAA

SEQ ID NO: 1001522 - protein, 103 aa, Homo sapiens
DSAALRLLGADELARTTCCSVAAESRMKGGLESAGLQRRLLAEPAADGTQLYMGAFMLSELFVLILCELIELDRDVHLRILSSEASLGRMLLRRGICVVMSGH

SEQ ID NO: 1001523 - protein, 200 aa, Homo sapiens
MGDTALGSGYEWFRLQSLRNPLKKPMDKRELRMFAATRDPWGVFMGCMPYPGVDAQGGASQHLQRPREMGKDPYVVRASYLVIGEALAVNFSRGESGKNKRSWIKWIETSGGHTFGSQYRWGARKLRTGRLKTWHRTSYKGSAHTGKKLDKTQVSVGPCNGKRGFGQNDGLREPFFQYDKFEYRRKLEKVRQNYVTHHIA

SEQ ID NO: 1001524 - protein, 71 aa, Homo sapiens
ATPVQEVEGGVPDKKSKRGGLKRSSTAVVRTQVKRGIPAAWHRWAMIDVLQCCADDAEADKTQNSRLMRRV

SEQ ID NO: 1001525 - protein, 173 aa, Homo sapiens
MAGFSVPVVARSNLRVVISDRHPRGLARFWLDGCLPHVAQSVGAAMTPDSCQGTWPRDWTLVPGLDSGHRDYATVALVPESNVRLLEAPDPAGAHAAGEAGPGASGPGVGGWAWPPLQLAASPPQRRPGQERIVISHARPRSSAWVGPHVLGSAAALGYHVQFGPLRGGEAQR

SEQ ID NO: 1001526 - protein, 171 aa, Homo sapiens
QAPSLGSFHMVLSLQVHRSQELRFGNLCLDLEDVWKYLDAQSKVCCRGGALMEKLCWAVWKGNVGLEPPHRVPTGTLPSGAVRRGPPSSRPQNSRCTNSFTMYLEKAVDTQHQLVKVAGREAVPCKATGMELPKTMGTYLLHHCDLDVRPGVKGDHSGTLKFDCPLDFRLA

SEQ ID NO: 1001527 - protein, 285 aa, Homo sapiens
  misc_feature (169)..(169): Xaa can be any naturally occurring amino acid
MGEAIIPRRKQCALCEEIAHYPRAKSSAYKIAGYVTDLMKRTSESAHYRGISIKLHEEERRKERQFCFLKPLSRLASGRLLQASILMTTGNAERLIGLRTVMSRTVSVHSAYRLVMKFRETASRDPVLKLFLWKLASITSQSNLVTTKENAQNELRRGSYHIDLVVRRXNRGVAFDILVSPWRHNALYPMSAVPFPWRLTRGGCTTFDRSFPTIFSVGYATESKRNSLEYKPRWRFISCGQFDEQLSGEKNPKTGGALLGGINSAWLAKPPYPTEPKLTKLEPGI

SEQ ID NO: 1001528 - protein, 222 aa, Homo sapiens
MLKPDFVFHVQLHMTLVGKHEANESPWAIVEENEANATAQRIAQHHRDECDNNTGSTATDPVTTHATTNNQSRTTPQAPTSNQNRTGTQENTTNRQENTKTHAATQTTPHTRGLQTAQEGARNRAPASSNDRGAHTSATATKRSTRQREGEHTRTTENHDHTHQQQPVQRTSTQHVHAQEKQHTPGTPHQDERTNDNPKQRHGPSRGVGTPTHPHTPTHIHR

SEQ ID NO: 1001529 - protein, 152 aa, Homo sapiens
MAFTRILSIWFFIKMPLHGIDRWIGLQYKSYTHWGVWSTFYRVQSLGRRHPVLGRSPTVREGRETVNPVDRAAVRAWRGAREEPREVGSRGEWTEEGSRHCETAGTQKAHVTGCREGQEGQTSVGGYPEKHIPPSPSNPEECRVACPQRVGD

SEQ ID NO: 1001530 - protein, 123 aa, Homo sapiens
GTQEEEKKPPPALPPPPPLAKFPPPSQHTATTNPHPQPGQLLKSIGPPLTGGTQVLIIEGTWRQNDIHNQELGTIETHTSDIPTGNTRVRMHTRTMNDNTIKPDTRKTSHTGKSPRTRHHYMT

SEQ ID NO: 1001531 - protein, 433 aa, Homo sapiens
  misc_feature (117)..(117): Xaa can be any naturally occurring amino acid
  misc_feature (126)..(126): Xaa can be any naturally occurring amino acid
EPYNATALRASVVTMNTDDTYVLRRRRRAVTGPRKDFSGSIHWGGGTGIRASGHVILYLHKMSEKELHMIQHVMLKELCSDVVAYQAKRWSDTWGCRWPVTSDFLNPITCSQTIHVXWVVNTTSWXSRCVPVVPSVELAASSANNVGAKSKRWGRPVSPDVSYFPCDALDVLARISTQRSWYRTHVESFRGFFQQVAEKNYNLRPVFFLIDQRSIDDDLACDPTGTELDIRHRWVACLAGGRDGPMERTGRMEPDVLMVPGNNEGSQANFCWEPGIPQKIVQRIRPVLGGRIPNLRWGVKQGQVLTLSSLGKGEANRPIPPWKPYLSKAADPSGGQVLTALPNVFHWLGTGALPFQAWLTHTRAETVQWTRQDEQVTNGKGLEEGNRVEPESCLTPGEVINTLGTPQGSPTPVENKEGEHKRVEREGPTKGQA

SEQ ID NO: 1001532 - protein, 275 aa, Homo sapiens
MAYYEKKEKQMEQQKKEAELYQVGMNQGETQSPQSKEMTCMTDLAKMKQNRDSGKVVNKIATRDQGLRDGLVLQGGYQYLEPRVMVGGRKQDFPLVEAAVQKAHSYVRKLRTKNGCRCSTVTQESSCLKDIAGGVGDSIMEIGKIKGLPKPGKAGSEHIRPRQSEAGTSGEQWEVQMSNHGRREGTKSHPGERQDGRQAPQAVMARSDWTGGNTKSEETWSCGRAYPSYNRPRQRDMAADKVEHQTKRPRQGSTSRTIGPKMVTTQTGDKEHRTS

SEQ ID NO: 1001533 - protein, 177 aa, Homo sapiens
APEEEEEAAVRAIAAVVCGGCGCVRGDRRSCRCAGLYLCGLVLRVLQPAALVCLVVLLCHPAACFAQFFPVLPLARVPALSGGAADGSGVVGRVPELQCQPFLRPLPATRIQLAAAGVMTQLAFEVPALEKRSDISEAARWGIPRQGDSYSTLVVRTRKTRIAFGGTTRSCDTERFT

SEQ ID NO: 1001534 - protein, 233 aa, Homo sapiens
  misc_feature (22)..(22): Xaa can be any naturally occurring amino acid
  misc_feature (93)..(93): Xaa can be any naturally occurring amino acid
LRSTDLKTSMYTCQFPRRWLSXSQCSAARIRGLACCELRMCRMLDSLAAIVSADEIHEDGSSLHTRGDFAYRKFACKQLVGSDVHARVCALVXRTLVSVLRAPSTCASPLCALDWQVACASRLCCSRSLPPSKSRLAWGRSSGLWRATGRRVGKGELKSCHISSMIDYTFHAAERLSTLLTAQCSVDGKISLFTLRTHPTSETPSLAYHTNTLTEVERWNARTFACHSDAARI

SEQ ID NO: 1001535 - protein, 303 aa, Homo sapiens
GPAAPAESLSRGCRTGRDRLVLVLRPPGPAVGIVRTGPGRCCCLCWPSGSCAPAPGCLAPAALHAAPPGGLLAQNRVVAPTPGTRDPLSELPRPTCLVRSPCEPCPWRSPAGRPATFFGQWYEQPAGWDFWPAVLLPWRMLIGDPPGEATDFSYDTGSSKLLPWQETPHSYIKHRTLTQRRSSQHYRSNGPLTFTSEVPHKGTLDRRFDWGKTSSPSPKASILLYLSTFATIFELREFLLAWDYNWNWNYFVLALCQDFAKPSSTMETFFDFPGDTSKIPNRFLPADVLSRMPVAGSGTTEVA

SEQ ID NO: 1001536 - protein, 150 aa, Homo sapiens
MRRETSCGRGLDKSAQPLWDRYTAVGSRPFGGLDSAIAVTHCGGIPRPTITEFNFTCQEYPFSFVQSPQGTRCEIAGEKGIPLAYYTAHEGNPSTSTEGVGPLPQERTSPPRLALVFSEASPMDTCGEHRKDPKRPKYNVQGTSPNSYFT

SEQ ID NO: 1001537 - protein, 116 aa, Homo sapiens
MPCKCTNLGQQCTRKERLLIPGSVRPLIAEGPDVALTCGPNGNGPGFPGQRHVRGGISYKSPRESIPHLCSPADAKSPSRSSKYPGPVNPCGRRHVTTCAEEGLGTFGLHLLRTGP

SEQ ID NO: 1001538 - protein, 414 aa, Homo sapiens
EPAHWDWEGGPTAMGPATSPLTNSCATPAKLAGMHACMLTQACDRSRAVDGRSHLRGLAWMLVHAPSAPLPCVHPAFYATPLFAWGPSMSPPLPAELTACLLNPWNGGQLLLRVRTACACLQYGRQWRVISQTGATLCGGQNAEGTVETIRTIRSAILVAKTDRSESQGRSPPGQKYISPMKTLSTMEWCHRTAKAARAVPADSRGQRDQPHCGEGRDSQHTTARLQPASDHSPSPSGDPDTPHDEYTPPFTHTSTLVQKGTTTETKGDTSDTRKRQDPPATCTTSRTTWKPGNWLAVRPYGHRALIHDPRRSRSPGASHGLTHNSVYRKPELSTTHTTQHHHSQRHRNTPHTFKHTLKHPPQPTNSETNTLTHGPTLIIIIPYTHYPPTHTSTINNQPPPIHHLSSLLTYSRN

SEQ ID NO: 1001539 - protein, 230 aa, Homo sapiens
MCTLRVSVYCFRFFTVPGWPEIGLRRKERHVCPWSVQRPHNADNTGRLAHIESQMNSDVGVKRSSTLECTTIRWQQRMYSELESSLNVCKHNVDMSTCKSTASFAMRDNAVGAPRSCTPDVLMQTTDMQLRDLTLDRSMRHLDLLIATCKKVKPLQRSFNFSTIFNSERLTGRWTVNGTAYSTKGILARLGQPWALTKDINGGFGQCRLGSPRQSLFFSPGGAPKMAVVR

SEQ ID NO: 1001540 - protein, 36 aa, Homo sapiens
MPLRNRKALGEVPVVLGPKGFPQTPGMWLCSPPQNF

SEQ ID NO: 1001541 - protein, 133 aa, Homo sapiens
  misc_feature (36)..(36): Xaa can be any naturally occurring amino acid
MVSHRMDYLERSSGHYFSLGQADARGCKHQGGLTLXTLTRQKSIFYSIVNASMSEGIAMPSISTCVAARMDIAPPFIFNVFVERFPTFVWYLTTRTIWGAKGGAWVGDLLYGTWSRGKVAPTKGVVSIATSSH

SEQ ID NO: 1001542 - protein, 273 aa, Homo sapiens
SFFYKREKAVGDKVYWTCRDHALHGCREPGHHPGQRVTVMLWALPPALIWRAWKPWLAACEKLPVETLHGWAWTALWSQVDTLAPRLWIVLLYLHGGPGSPDSHQASAQKCEQKVEDQEAANPGPEAPDEHQDMDADPGGLEFLKTPLGGSFLVYESFLYLSGDKCGWRDEGVLGPAGHQCPAFVPAAIAVPSLPRVRSGGLSCVVTVSLPDWGGLRALRPSGDTSPNSGASGGGPGGPELLKMPPVVPPSCCPSPSSTPGDGAGDKVHGPAG

SEQ ID NO: 1001543 - protein, 105 aa, Homo sapiens
PLSRSISTGQLRVRRRPVRRHKYQQHSSSEQRLARIILLPPGLFADGIIRVATKILSSSPGELKSHWSQDDFGALHAYRCQLTCGKVQCKEVTYPKASAQQTGIW

SEQ ID NO: 1001544 - protein, 230 aa, Homo sapiens
APVHDLRTVPEGASATRLLQLGTMREICVISRWASCGRTMYRAPTGFCVSVIKLMKQLGLEPHRQITMEYRDLSELERIMRVSYTVMAAGNQSMSLGDHSWMCICAVPGAPWNLLLQDAGSLSATGCLQYPEQTYAMFRERRSWETGGTRAGAEGTTELHVVDARKPCGLTSGSLGTCCVMGTTCGSRRMALLNLLPSEEALSPGVATHDLHTLCGVGRGTRGDSPREWA

SEQ ID NO: 1001545 - protein, 215 aa, Homo sapiens
MGFWRLLSLRTALIVDALCMTWLCLTLEKMACDCACVVPCQWMMPAAAAVYMECRRRKHWLGSGLCSSRQRIGVSGEEGPSLTTEKDAVTGVQAANLPLWEAPAALHLSGGRWRWDGGRQAGVAGENPSESAGQRPGHQWGREGCLSADTFYPRLIVAHQPNWSGLEMTITRLAKGVGLEPKTQFDFPGMTPGRVAELACSEELRDDSGLSGRFS

SEQ ID NO: 1001546 - protein, 165 aa, Homo sapiens
VCHVTCMYSWVNAEAQCWSLVEALVLACKLPPELTAVESAAQNDVVSGLEMSWLEKIVFHIVWPLCAPSDGTSPDLSCGKFCALSRGQPRSVSAVISAASVQGGPGRRGRYRVAFPDCRSYGGPPESGAVSPEVHCQGKPRKPAEELRVLSDLLSTVVPTRTGAT

SEQ ID NO: 1001547 - protein, 332 aa, Homo sapiens
  misc_feature (85)..(85): Xaa can be any naturally occurring amino acid
  misc_feature (219)..(219): Xaa can be any naturally occurring amino acid
  misc_feature (297)..(297): Xaa can be any naturally occurring amino acid
RPPATDNTSPLSLSFIDVYASRRVKRVHLRRASSEPFTATYAAMFQIDAHYVMLSIEGSAIETVGEAGSQVTGADCRRRRERERXRRRTLCHRSGHYVPPPLARSRTTDVHVRGVVVGIAEAFERLLRRTVEAEPIFAALIGRSDCHGLKGIANVDSKITTRFLTTKQFESRVWPPLVHSRAFEFTLFSAKDTQQVSSDYGIRGMFTRGESRVVLASVXRPKVSKVPSHKGFLYKTNCLRSIMFGPRENAVKKAAVNTGGGVPDESPKRVSQLRTRHDRGDLGAGCRLRLRLAVTAXCSQAVGPRGVVPLGPVASLAGNFIPRRRDGYRVGF

SEQ ID NO: 1001548 - protein, 177 aa, Homo sapiens
GGLSNAGCHLRLGCWGGLQAAYISPPEPELPGLWAQGAGQSGLSLLPSFFPAWRIHLLRLALLQSPAAQCVNSVATRRDCRTPRRTPCSGRAWPELLLRASPSPVRSREQAPTSGLLEDGTRYRIGLEAAPEKDTVVRCLRTRTRMDEEVSDPTSAAAQLRQLRDHLPPPSSASPSS

SEQ ID NO: 1001549 - protein, 98 aa, Homo sapiens
MGPTLFWFHPHFYLVKILRTSDFGQVTGTRFPLKRSVPGFEHSLFGFVDRFRCDHKLTSETAKTLFGAVPLLPGPWLLAGSNDNSTVAATLVAFSVDM

SEQ ID NO: 1001550 - protein, 200 aa, Homo sapiens
MEKRLRDLENQYRKEEEEADLLLVSADVLSAVLETAEDDSDKRISVNESLEAHSPPLQEQLATTMAMIIVKLLWSAQQCEAQGPSQGLSDPPVDREAARAERPSVCGHQWSDLKMQVVNEICYEVVLADFRHGRAEIEALAALKMRELCRTYGKPDGPETPGGLLCRDVWDTVGEEEGGGAGNGGGCDAGARGVMWDSVP

SEQ ID NO: 1001551 - protein, 95 aa, Homo sapiens
  misc_feature (59)..(59): Xaa can be any naturally occurring amino acid
DLAGFTFTLGVCSTLRYPLLVRRDPVLLEVSPESDSQRIACQGSIVLTLLRESHCMRLXHLQPREQVVFSVVLCATLVSSNLVSRTVWPVNASGS

SEQ ID NO: 1001552 - protein, 404 aa, Homo sapiens
  misc_feature (89)..(89): Xaa can be any naturally occurring amino acid
  misc_feature (208)..(208): Xaa can be any naturally occurring amino acid
GGVRELSEEPNHLDYYSQTLRVTKLTEYLKIQDCLECSWRTIPKVAFTDMAIGKVVCAGGYHFRWPYSDSVIELVVETRPHGHGNFVAXVSSPWWVHKDSWLVEAHCTRRLGVGHFIWTPGPPLVEGFWVLGRPPLWVGPMPFFTSLTLTSFSNVASPYCTGPVQTSTRTLCKGECVAMGREAPFLTHVIIHSSLGVRIALKLKAGNXNPSHCQALQRTEPFYSKMALVGHLEKFGETFLELRFGLPQIFDPPGGTEVSGPPPQRMKGGLGTKPVFHEGLTIGDIFNPRKEGNTFRFRISQGGKTLFRFEGKPLGIHFEGFTHMGEKQSTKVCPPKGIPIVFNLFQVFFHKGKGPQCTTGLRCHSEMGPPRVERLERGKKVGKRRVTATCGILGKANQGTVVHR

SEQ ID NO: 1001553 - protein, 265 aa, Homo sapiens
MLESVIQRPRPTRVVKEEIVVDKLASSCVVDRADVSHFVVVRRKRDKVEDLLLVEVVCQLVGASVILPLMTSETCCYHNSVQFVMRVNLRRRVAPNITETTIQETPTRLLLRLEEAPLPEDVAYAMLGTNNSASHLMSLVVFLHPRRVGQNSGAVGCPTIISVGDDHMNNQQEDSFGSGPTLSRGLFLCVVLQATQLQGVVFVLRYVPLLVVNVLPCSFGQRPGGFLREGDTGGFCCCNLLWPLCSPGSHQSRCVVFVLLVACSG

SEQ ID NO: 1001554 - protein, 103 aa, Homo sapiens
MGGGPFVPPEWCISENLPGEPVARPVGSRWGQRIEGQIPVEAEVSSAGEHQVGGKNLSRFHSKHYSGNLPERPLHTRKKFPPVWSRKERGRRERVLSHTLSQR

SEQ ID NO: 1001555 - protein, 109 aa, Homo sapiens
MLGEALQCATGHVVPEVMGIHRRHEPQWQDTSLGAWMHWTSGMRDQSIVHGATRGELHARQNSCTHMPDVETHREETGDSGTLTWGLGLSAHSDSVTWPIWWTAKLKNP

SEQ ID NO: 1001556 - protein, 182 aa, Homo sapiens
MHNAPRRGRRVEVSVPPNWKDLTWTAYLTRCALADCLPPRFPGLVRRRGGGDAPCWLWEEEPRVLRGSRVRTVASWMAVRTGGPRPGLPSGTWLENAGPRGGQQLSRADAQAAPSPVRKGEEGQAQVPVVILSPNSLTRSFQRESGPRRGLTLGIRVHSGSSVDLGAKRKRCRGTARVPKPF

SEQ ID NO: 1001557 - protein, 487 aa, Homo sapiens
GLIRARVAAVELTLQCPDPRGVPSRGDVRDLICEPCVDATRSRVVTVPGENIEMTPFREYDTRGHLRLETSKVTIELFTTRSGNTHGLLDPHWPKKYLETENRLDVAPRNPVEIVGATFADWGEICADSKAIACAHSRFQYRSSLVAYHQIAIGFRSVAGIFPLWGPATKRMPPSCFLGNWGKASPSPLGASYGATIGPQNTLKRLRDNLRNYAGKRYRKCKCGTDARRSGCVGAHEEHRRQLCPSNSPFGYDGSPTEHYTLRPFGKNRRQSPASRNRRLSSGYRELLAVQPVGDTTRTIGKGITALTVGNFNGHTTAEARLRTGRYTLFHHASKGGQQHICSNRSICWGAIAEPHFHVGTLAPVVKDGKPQPTPLAARHKRWEYPTFRRECWGTHETQLCILARVNIRPYWVGNTPMERVSMEVRKFRLETKADRPIDSAPGAITQASVVQTNSAPHKKRRKTHLGLESKFAVARQPYQPGGGGKN

SEQ ID NO: 1001558 - protein, 251 aa, Homo sapiens
GGAGPGMKLGRAVLWTCQVLVAVPVVQAVEPIMPWDLALAGVLTGYSLTRVVYCSLRRDAAGRSGALAGKALQKDLDDNLRLDSILSIVNIILKCRALDFTKADPMSPEKPLHDSPCKRAGQAPAKISSAMIIAENYLRRVDLTQVTIVHLLSGHSCTFPRCFKDHPCTRQGWKFGIPFWMSSGLGSLRKWDEIWRSSMLKLIEAPVHTGSCSQGSLFGQRVVASLQTFCTSRLDAKFTYPVAKHLVRGVY

SEQ ID NO: 1001559 - protein, 316 aa, Homo sapiens
  misc_feature (52)..(52): Xaa can be any naturally occurring amino acid
MPGGQHAQAWASRGTNVKDSQSHLVAASCTHGNRETEPRERGILKVPLLLCXRRTWFKKGLEPPAQAGNSTGGSCINARFRVAFEAAHQDREQQGMSYKHESLGVGKVLGGVPRFYSTDAERVKIGSSRALTGKVEGWLSLRKYFEVRMRREARTIWKRRGGTPFQKVERPLPWGSPHSSGRFRSTNKKIVAPHRGCKVHWKQNEGDELRAGTLYAPQAKGPQVVSVSAWIEWGLWGTNVACGGPHLWNLRDHYGASHVGTMYFTPPLVGRPHRCSYASVTFCESLSHRRVPSYRLCRNIIGDVTRQIWTSKVMKG

SEQ ID NO: 1001560 - protein, 128 aa, Homo sapiens
MFLYANKRARVCRAQVTFGPRAKESFSMGLPNWQPLQRERREQAAFMYHQREIPNFRPSDTDCIGALALRHKGVCTFVAHTKREKTRRQPPEQLDDHSIERDQLIPLKADADNLARPLHQDHTLKATR

SEQ ID NO: 1001561 - protein, 378 aa, Homo sapiens
MQIPLMRKQEVTCDYRTSDDSKRPHTSPGQGKTSRASTPNRAVLHTPSMQEQWCLGGSGHACMTWTLAWRLWHKHDRAKRSMRGALHTVAGQLHPWTTQKPPVQGRLHNRGVPGPRRGYGSQWSKKVPQASCRRQDDNVLEERDRGVTRVGNGQLGAKKGNGSIGHGMSWGLEDVSHTDTDPGGIGSTELAPLEPRSKGPYPGGAKQERNPKKRAGVRWVEFEERNTTWREPPPFDRAHLGRHRNIAMGIGNWLTHSPGKGPRKPPVREETKSAVRETRPGHGQGISPRGQPKVKTHCGVVNTNLRTKSADRATARCNFQREEIDTTHWVEATENKGISDIAGLHHTDGTYTVRWGTLRKDKLGTHRGSPQRGREETR

SEQ ID NO: 1001562 - protein, 97 aa, Homo sapiens
DGQCSWDAVGLQGFSPHYYVVVQKLRLLRSLYGAGSGAACYPVRVRRSWVPDVAVFRVKTWLYCGLLCVLAVTTETPRQTAHRSCVTVRAQGPPQHG

SEQ ID NO: 1001563 - protein, 440 aa, Homo sapiens
GCSYLHCYIHLLVSPGLRSQHGNCNEFSHHGSHRTYRIVSMLLDQNSNVSRRGGRAEKSYIRATDNESGTVLPPVTHVAEPLHHQGSTYLQHAENKHLCSSRKCPGGLGIDLALNSTDKGQGSQSMSDHPPGTPTEGFPCLGRPWRPLYRTVVHHKREGKTGKEGVTIQATRRRVHGIEPPTSAPKAKHDGAFTSTKERRWRRPSGPQLAEDYIGQCGTHRHRGAAARTAHVHAPVKTVCHRARVENPRAHTASDKICRTRSAPPRVPGPCRCRHASTDHSARPPLSHSRRLMPETHARSVTEAQTAYTREGSTRRNERNLRRGLTPIAANPAARHRDNPRGAGTHGAEQSPQVGASSPATTTTQPSRRGAFHPLPHPNAGTSPRQPDGTRHHTPSTPPHGPSSHDRHRGPDRLEPGRHTRTKRTKEPNHYPGSYSAALT

SEQ ID NO: 1001564 - protein, 395 aa, Homo sapiens
  misc_feature (34)..(34): Xaa can be any naturally occurring amino acid
  misc_feature (309)..(309): Xaa can be any naturally occurring amino acid
GPLGLRGPAGRMFTSSGLQWALQGGLWSKSLRAXSPDDPLPSGIDPSSQARQRGAVKVSCCLIMKPYQRRGARESGDMPGISGRGWTEWVGAKEKVIVCGLGLYETCMTYLHGEGQVRVVCVCSTVWYEGINFGKTEKDEWGNAMETELCANNSLERCLARFACGVPWVPGAIDSSEPVSNTFNGKGVMGYGQFCCRAQLQLGPRPKHYTCGGIYCAANLHLGHDALRGYHRANLAVYRSNHKFNCKLGTWHYFRPQQRRISPEEVGADRIGVSHMGGLPLVVRFTEFRAIGQEGELGFGNFVNFTGIXGGERSGLKASNCTTKSTLPRGGYTAVKRNSMWREIYGLKAPNSKGVGRQPLGCGITAGGALDCASTGNHGQPRTGFRPKGLGPISK

SEQ ID NO: 1001565 - protein, 81 aa, Homo sapiens
RDSRVERGGVGSQKPTFWHGSVSIFRQLYSPRLLGCAWFELDRWETMTWTQVRPRTARGNPNDACTNALVWTLVTGLRVAW

SEQ ID NO: 1001566 - protein, 171 aa, Homo sapiens
ALRRACSVPAVGSRAGSSSRVGGSHEAYEVEILDAEDNGEAVCVDKVEHQPPLRRSRSIFTKSHPQWYPARQIPPRWTPKGKSRERMRMFYRSCPLGTRATLYFRELGAQISWADGHSVTEDTTGTPVDQSYRVIMSYVAELPLHTMDQQSMNFRVQVGRYKLDASVDLDI

SEQ ID NO: 1001567 - protein, 534 aa, Homo sapiens
GRAMVPHEEASRQLNASTTAAEGTTHASTRFDGAAGLPSEAGPGLRGGPGKWRGTCAMSGTWSMVPYPACGGELGPPAGSRTQRVGLYAREEEGPSHEPETRHVRGPPEGATERARESDTDVRIAPRHMRARQRGHRRRRDLRALTRLSRGYLTLEDGTAGRSNGISELPAQRGRSIITPAGNYSGPQPIFSPACNANSQASTRATQPTGAPVGHAQRSGAKDPTLASLTLSALQPTPRERNTHGPIGSGRLNAPWGQRVTQGPRAWRPHREGNIAQVAGPPPWQNRGNAAGRRRQHSRRGALGLREPKRPAVTYAGNLRATLGKRNRQLPEGQENGQRRNSHNPQRQGPHANPLPQMPSCPCRAAPRIVCRNLHPLPLPTFGTHPLGHPHPTTGARYAQSDNLSEPVTWIAILPYPAANLDPTLGHLRTTYLSRTAWQMTNRLTRRGATPNTRPPTTPPSGRAGTPARTNRPPPRHSPLRRTRPTAHSGTHLACGAPLHPNGRHAPTHQPVPSPHASHTTPAHPTAAHDRSAD

SEQ ID NO: 1001568 - protein, 385 aa, Homo sapiens
KTRVIQVYYRKNATITLYGMQRQHGPLSLQSTGGTAGQGGTKGQGASAPLWPESARENRLGAPLYHIHHTGQETPPSERPVGAPESRLCVSTTLSVSLHRGKRLFTLCERGVCARLFVVTTHPLWTLLMKDKLSHQEAEKSVCATQNHACLKNRAANKSVVPRVLTQKVSPHHLWSLWWAPPHNKRPLLMIAGRNTKEGPPPGGALPGCGAPTRKNARPRWGGEKPTQQGSFHVGVVLVCRSTNQPCSNCLFLRPPPNNNQVSFSNKEGPPLTFFLTVKAAHNIFLHYSPHYWIDKVCRLLSIRQVGRSPYTAEGEGRRYLHPPLISSPQHKNWLCVSQPRQGERGGENEFTFRTPQADVINIRRGRSILYSQHNNKQQYLFLRF

SEQ ID NO: 1001569 - protein, 165 aa, Homo sapiens
MPIVVSWGCGHFGGPSAEAGVRQSAPRNEKRGWVRLLRSRWVLEVDQYPWKTCGYRSALSGGLCVMMAPNEKLFFVDTVLQVKQGADKEENHSPEEVTASQMKALRVELILENTSKSLAPIDVSPTGPQAKKLRRMEQLWEKLAKQWRAAPGGAQVPGAVLLKPF

SEQ ID NO: 1001570 - protein, 120 aa, Homo sapiens
  misc_feature (50)..(50): Xaa can be any naturally occurring amino acid
  misc_feature (52)..(52): Xaa can be any naturally occurring amino acid
MLHAPGPEQHLPGPELDHYEPCRDNCRSHVHSPRATVGTQWLLTRSSPGXLXQVSIHVQRAHDTHCYARGVLVQQLNRHKWCNTAQSEQERNTDKTDSYTNESFQRLPEDLDKVHRAPIY

SEQ ID NO: 1001571 - protein, 398 aa, Homo sapiens
IFATLPYVACNRRQRPLTDQCLTPPLGERPRELTLTYLTRKPSVVGYTTKAWYHLVFPWEPTVIDAVPADLLCNCSPRARVRARPAVRTYWGTRIRVERSVSTQRHCTPKYYIGTHRIAAIETSHSVVWCTVRNLVEIPLHMDTVSPLRVGETYSLASDTVQHGKNRIFPYMIASRQCRLCESHVAYREPQFRMLTRTRGYALGESSYERLQKVTLSRMPDYHCETPSRKGTFEDLGKEGDAVRMKGTGGRPILHSETHFQSDRVDTYTLPSPIRGTQKVVCKRHVEIDLRMVWGVGKPLTPLRNNLTSPRLISGFGRVCRNTVSRLCKGYRGDILVMEDWRKLGTLDADHRQIFPFKFSKGASQIGANRETPRLGAGYTLCHVLVSNLRKQFDSQKR

SEQ ID NO: 1001572 - protein, 332 aa, Homo sapiens
MKQKIPCKMYVHQCWDEIDLRIAQLYGVQMVRSIHYEKVYGLEELDCISTRRHGKTSRDTVNTPKQKKRIEHVLEHNNASPEDTSHACATSRGRAHGEAVYITPGHNERSSFSEPTPKKPMRNPTTPWRKAHGQRDPEETREGQYAVKGKGPCAQTHRWGCSASPRKHPWGAQKEYAHEAKLPKSKGERTRLGVDHEGDGIALEPVGWTRKRTLKSKGKWDSHGKPKGRVERDVGSHLQPYKETSPGGTSAPCINTAGGKDRMGAPPMAPIIENAHLATDNREVEDGTFNREQRVRKHELRPLGDGAPTESVAAKRHPEPPCGTDNDRRVKR

SEQ ID NO: 1001573 - protein, 241 aa, Homo sapiens
RHRACCCAQYVVGIRAGPGLGSQGMDLDVECVVRKVRYTGQGSLPLSDHGIVVDMAQEGRDGSRRRLICNCDERIRLQRYALNRITVWRSMAGKRTPSGQLAYLLARPDTRVKLLDVTGGLGTDELRLLYGMALVRFVNSYLEQTTDKKLPRSPSKVLDIKRVDYSGLGIGEPMAHVSGPTRENGPHNTLHGGQRSEPCALDWAPRKTYLAPTPGEPTDRALESREEYRKRESGRGPQGTK

SEQ ID NO: 1001574 - protein, 220 aa, Homo sapiens
MGASGAERARDPEPRAIDVADCAGDSAMCRVACAWIDVEAPYLPYSPSSSCYGGLAGMGATVFVQTLDLAEEPDAVELGTGAKTREYTTSFHALTSILQAEGLRGNLHRAVGLACCVRPATPLPDLDIYTVLFERLTGADGTPHWPFCCKAVIGHDRRCHWVPYVENTSRSGLFIRMTADGRITDDQTPWTTHNVSNALIRIHPGKRVSSHCERGCHPYH

SEQ ID NO: 1001575 - protein, 375 aa, Homo sapiens
EQLRRHGGGSGVMSLVPDLELADRERGEELLLIGARAGVSDVLWQAVAGQSADAGFSPVACCLHYLEVERFAASLLLQRGALRLSAMACLSVAQPRCCGLRLLCVCPYLMPLASCRLLALRDARTCRGKRRLDGAVVRAKALGPSGRMPARGRILGSRARSSFNSSSRANPCLPRSFAQVRPLVGDLSGLTGSLRGGTRELRHWAEFCPLERSHFTPPESLIFRAPPVGLVVAHPLLSELKPCRGLPLNEIVDPFAEGDLSRRLAEQFSGADTFGAPSVPPKGNVVGEPLHPEDSDLRGFEGEEVSLAMEGLLRVERLPPQEVFEEWQALPQVVTRVGENTKGLLAVGEPKAVLVRRNLDLGSQGGGLWPKESAK

SEQ ID NO: 1001576 - protein, 175 aa, Homo sapiens
MVMMAQCETEDVMQCLLCVDVDIGASYEPGTLNGTGCMIVPVTYWLCAPNCCRFGGAGTTKHDHVLLWMCDCLCRCSLRLWTVLRIAPWSSKRSPSRPNWRGHLTVDTHWCPRGAVVAFSFQSPTFVVPTPRRLLTPRELHWPAVALEADRGTRPSDYREGSLPKGKRIGEVEKR

SEQ ID NO: 1001577 - protein, 270 aa, Homo sapiens
MSPTLCVEGGVCSLHIYTAVRGHLSVESSVCLSSHTHKRVLRCVLLTTTEILSVCLCVAPLLTRDTLCGPAVLFEKAENLSHGRHTVEKRRSRPKYVAGGVEKPRGLTTCGGRRQRRSAPSDEEARNTKSVVRPPRERKTSSAAAEGKTSPAKRDDEAHTPRRRGHHPRRKHPLRVAQNHPERRQLCSPPPEWVPLSSTPSGGGLLTLHAAEGKKHPPEQQVGAAYTNRRRRVGGGTTEHGPLHTHHPRLRKSTGQTTPEEERRTIVLPA

SEQ ID NO: 1001578 - protein, 425 aa, Homo sapiens
GKKNLLIMRGKGQKGATQAGRFEGRKLPPFIGFSKKPAAQPENVGPGRAQGLQHILHKGLSKTSRRFHTSLQTTKVCLSGPHQSVGVRAPWCVIGSSIFSRAFAAGEHRFVSCVCRQLAGHSGGASSRCGPPCVLMWAYTEILPYKLLNQCGPFSPSVEGLNSQGRILAVGFDEMAPHKQQDKDSRGADEELTRGITVWQTPINEEVGSKKYRSSPQITSGVSYNTFSTGGSVMFFPQMCLAAEKEIGHIPSGKHSVERARKSGHSLTGKCSPDNPRKVVAPHQVWASNVGPPEICGNRRAHTLALYKNKYLTRGGTHTFVVIVCHHTPEQHLHHEVVSTTSGPPAAARNQTHLCWGVRTPPRSKKHPRRRGGAPRGAHKTTAGAPTYEASELWRKPPGGGGPHYRKGEQLTPLKRALVCVWLKT

SEQ ID NO: 1001579 - protein, 299 aa, Homo sapiens
PLYTGGVAQHEGIVVGLADGLVILVHAESGQVHGLAVDEEAGAVDTDSSDAEDLLVSIDYLITVDKGDFGLVKIPVAWLPEMDRRDAGMGVRTGSLSDHVALGVENCHPSRYRFSIVRKNRPGDDSVISVNVSGDGDVLNVGLGAATQPHVAVDAGVIEEVVPVLLLRGPREIDDNPRRNGLEGQPIVDTNCEPTFFCPGRTDSVIRLRKGGTRQACLTNLDVVDPKRGLGMSRRIEMDDERDPSGSSPGRKWRNLHGGLPRPGDQHVNAGGRGTTGEENPWGTKGPGNRANLSGGAAY

SEQ ID NO: 1001580 - protein, 287 aa, Homo sapiens
PGSPYLSAWLPEFPTVSVSVAVPSPDQARSPVSRGGPQVRISCAVPQSALGCGALGVWGYCALLLGAVMIVMVPVGSSSSRSLRTCASDPSSLFFNNVEGDPLSLLSRPSYFFDVMKPSRDPEGARSSQVLGARCPTCTGSSGTKATVEAFKKRTDTVSFLEYRTFQFQPSKSHGRRARYIVMPNILVLGAAVMMENKPMTLKLIMTVVHFTNSSGERCRFMNPALWVDDHVRATRTPLVILIKKYFPGMFPFKDQIGIIADSKLQNSGLLQRCHGGSNIRGSLVPV

SEQ ID NO: 1001581 - protein, 126 aa, Homo sapiens
GGWKTWPLQLGVEHCDAVVTAFSDDELKVVSCGLEKLRHVKTRSSIQVLKAVEDLISDEISCEMVQSASVFQKPEQDPLDKATVWHAALNQDLEPDQSAMSFKCIVSSVRMPGWDSVSSSLTSCCT

SEQ ID NO: 1001582 - protein, 106 aa, Homo sapiens
  misc_feature (86)..(86): Xaa can be any naturally occurring amino acid
MTSHRGVNNTSPDGGKEAKRLKCQRPCREGLRLRPREAEAGGREPVEAYGSSRSAEINLPLLCRRAKFEEVERALVHLAGVKPLGXFASVIASLFQCGASMREHPL

SEQ ID NO: 1001583 - protein, 67 aa, Homo sapiens
VLLSPENWASPCLGVLDLLQSLVLRSRAVVPEALGDSACCYSDLSAFGWCCWALLRELVAWGTQLCT

SEQ ID NO: 1001584 - protein, 193 aa, Homo sapiens
  misc_feature (126)..(126): Xaa can be any naturally occurring amino acid
MTGLTLLYVLSEKPWLKGARTHQAAQYGRGDEAEQLNPTSHFRMTPTGGVALTSPGVLAVGEEQQSAREVKIGNAPAADDSDGRRRLVVRELKHQTGTSVEMKGGMSHGHRSEHLKGVSSKRSEVXERGEGVLTLVHKRLALELLLGGPRQEVQSSQSGGDPHGQGKYYLVEHGPRGHRSTFTSATGGHISGS

SEQ ID NO: 1001585 - protein, 181 aa, Homo sapiens
  misc_feature (144)..(144): Xaa can be any naturally occurring amino acid
AESGPACRLGGPVPRRPAHLRARIPECQGRACTWKVPAPVPSLQPVRDLSPNSTIFRSVQGPRWTMLGHCCGTLRSPDRSQVPAQPATMVAHECLVQQIQGGLKGSECSACWVWRRGSLGLSPAAMAGGPSLTPHCCFSSLTEXKQAKTFTRGGSYTMEQAGEWEVQIGRRIEGGKRGEGH

SEQ ID NO: 1001586 - protein, 253 aa, Homo sapiens
  misc_feature (47)..(47): Xaa can be any naturally occurring amino acid
  misc_feature (101)..(101): Xaa can be any naturally occurring amino acid
  misc_feature (137)..(137): Xaa can be any naturally occurring amino acid
ARVKFSHGETAYVAACDVGAPASVGEHRDGRRNARYGFRRAGYLRTXLYYGGARTEPSWTLPRDSSLHGTPAILHVTSVTWRELERLVRWSGTQLSLRVCXYPRFRRIVKIYSTMDPNAPASSCEVGDQVHVGSMSXSVSRARGEIAVISQNSRKGRTENQSKSVARSRTSDTLCPDAMRLRELGLRQERKSCGGEAESGVKLDGIRLIKASFGTKRQQNNVEHKGLKSLCSGVYKKLTGEGCEIVEFPEFQL

SEQ ID NO: 1001587 - protein, 331 aa, Homo sapiens
GNGRAGGAAAGGREGRSVAAAVVVPASAEARALRACVHVPAVLFPPSCGRRSMTPRSASSFTTGMDGRVVGPSRGEPPIPPLLYSLDRLTSHGWEEEHWLLCLNRIRMSREELHDDVHLLDGRRCNEAGNCVDESDLADYTCDRDCRLEQYREMQAAKLVGFQEFHNPKGMSVRITICRSHGRVRSSRSELGSDGFLTNMTGTCPELSCPHDVDRNARRTSNTGERRLHSVQHPEGGRMNGEGELAGGLWGHQPGVGLGKADEQRSGPGLRGRLFGRWSEGFPRKESPQPQEPDSLNELGQAGRKLERDLGPRRVRGSGASGFEGTDRKGP

SEQ ID NO: 1001588 - protein, 411 aa, Homo sapiens
LALSGNLQWPRLSGSADLPRPSLLASESLAEPMLSGLGWSWVWSPWLGLQLCLCQCSCGDPGAIVSVCESLSILHEVVSEALSPEVLELRNESGVQRVSLPGTVRLTSCVAVCELLWFLTVTEPPHTSDEPDMVPRQALCQRELGRSVSMRWAHPGTDPRPVERELVSWTTSPANCHGWEQGKPLGNPLNPKEREDQDPNGLGEHELPEVLPFGYSPGFVRDERARGAPNSAWAYNTVLLRSTSNTCVYSVQQMIPDAEMSTAIERHVNLLLCPLVPYFQDTWPRRDCIRMLQTRVNRTSNQDTCMEVVNTHPNSPFKLGKKLKQFITHKDNDDENKRHRLAETQDVGRVGMIMWERYRQERRRAPRAPLAPYCRHGHTLVRMGGRQRKRRKAHGRWLAVVTNRRQQVTPG

SEQ ID NO: 1001589 - protein, 42 aa, Homo sapiens
MKHKKFITAEGIQGPFKIPSGRGLRGQERKIGKPTLRRRRGS

SEQ ID NO: 1001590 - protein, 174 aa, Homo sapiens
AEYIAPEVIFRQAMGSQWTGGRMGVVLYEFLVGCVPFFGDTPEELFGQVVSDDDHVAMREMSALPADAHDLIIMVAPGIARWTVWALVVHSRGEAATPFCWPGLGQGFSDTKPSSCARSKPRIDTSYFDARTEGYRHLVLRGYEETNDRTNRPHDDPPVLLLLPPVQARSTGMF

SEQ ID NO: 1001591 - protein, 184 aa, Homo sapiens
MEEEIAALVIDNGSGMCKAGLAGDEVSPSRVSLPSLGRLAVHREASCDVSMGARTGLPYVGADVGHRDKAVGACLDLVKVTAYVETMAISRPNVGTNNGARSWTSKSNYTTIEGLQACWSPREGCQRQWLARTEGPSLEALHSAKQMRKDDSGFSLQRTLTINRPGPCNVGHSKAVAGPFYRPL

SEQ ID NO: 1001592 - protein, 206 aa, Homo sapiens
LWGDICINGRTKVEEGSNVGVGWGRNGRDWGQGLRTRKVCKTPQPPRGLPLQVLCSCARAGGYRELRLSEAGWDNTLPLPKIWAPKKPASVALHCGIWGPPSVTQAGHIYPPNLDTGSPLGETLCVRLCVPWGDLGSLRCDVRPCKRSPRGEHPTVPLSERFPPRGEVCNITFTSRKNVEGHVWAPIWGARRHGALGRPVGGWQGC

SEQ ID NO: 1001593 - protein, 285 aa, Homo sapiens
MAKKDLGEQQDEAELIREDIHGGSAQFTASGRGERRAAALRATQEELQREPLCPTLRPTVPGSADRSSTCAVISTGRAVARAADDPEAEDPIPEARGGARRPEHGRGPTKSDAESDHPRILVSPWVLTWPVLVMAEAGKWITPEPTCSEDVDELRTRRAAHNVGREAGQGMLGCNRVNCGPAGSLGAGRGGGGALRDSLQVPNGGPRAGAKYSRRCCRKDQRTPFSLLAWVAAGKQSPNPILIREDLLHLPFLGASGSIIGEHGQGRAGSFDDPVCVIAASRPSA

SEQ ID NO: 1001594 - protein, 234 aa, Homo sapiens
  misc_feature (207)..(207): Xaa can be any naturally occurring amino acid
QAAGRVSDAGPPSGSPRGASGASVICRSATESRLARCWRSVWASWSHLVWGDRQESSLLVRTSPEALASAHSRHVVVGTRRLLVDQSLYQPSWLLTSIVQIGLLLLCTHRASPIVRLRYHRMSCATHEARGLLDTEVSTQEPTLLVYVRDMVHTLQAALLDHLALQCETVRSDSLRGHQYNVARPLRLSACVETQLRETPAIARMRXKRGGLALMTLCVVYYSDLLTLLRRFRH

SEQ ID NO: 1001595 - protein, 125 aa, Homo sapiens
MAPCQFFPHEVGWEPFGTNRGTFLGSSRTRKAFLLSLSLGKDSWKSPSYLVPQFLREEPQVCLRLRGIWATSARGQCLGDNTTTNGTVGLVVTHSAVGGFPGTPTWWPFHGRPICTRDPRPFQAM

SEQ ID NO: 1001596 - protein, 109 aa, Homo sapiens
MKQRVSAIGMTQTLAVSSCDPGIHVLERELASNEQYIYVSVCVCDLALSSVCMSHVYVLLRRREDKLLLAGFPSFSWPKVFPYPLATARALNSDQKRQPRLIERSKKCY

SEQ ID NO: 1001597 - protein, 60 aa, Homo sapiens
MCARSSTVSLSLYRIRAWVDRLDSRAESTVFDAFDLFISQTVSLQELLVPELVLRYVVIY

SEQ ID NO: 1001598 - protein, 273 aa, Homo sapiens
MLTLEVAIGPRDDALSGKDLALGLHCACLMCTLPCCCPDQIHRASLSRVRSCYCRCVKRGLCRAQMERPWDLVGAQCSLLLSEHEAASSSSTLVEVTLGEVPAARVTMILPRVLRDASRTPHYHELPSLEPILGGLQQIAMNEDGAKTFPDLESEFQAALSRNGGRVGSFSAPQVSSQEPVTKAEIAGECRRKLAVFLSCDLQTKLPVPCSWSLGIELMEVEPDRPLVHLCTCLGLSYEWLLGDNQIMPKVKPPDNRPGIIAERPTVPLRRNL

SEQ ID NO: 1001599 - protein, 33 aa, Homo sapiens
MVDPTRCTTGSPPLLPFPWVGTKHSVLGEAPMI

SEQ ID NO: 1001600 - protein, 121 aa, Homo sapiens
MPSLRSIQSLRIVSLSPFSLIGKCGSGGVIHAQGPSSCSRDLAGLLGTGLKSSSEPALLRPRCNPGQAAHRCGDSSMTHCITAYWRMDCQDQARVRGRQRCGEGDSLSRSPGVLSDICNTD

SEQ ID NO: 1001601 - protein, 96 aa, Homo sapiens
MYYIETPVELLRLKYWLHLTRTGTSTANGVETSLRIPEETHRCPSVEKPRSLRFLCETPIRCRFIRARPVRDDAARPWKAKDVHEGDICQERLDRP

SEQ ID NO: 1001602 - protein, 107 aa, Homo sapiens
MGTLHPFMCLVRMGVLFTHVTVLHFKAVCQGVDHARLAPAVSGGHRLGLTLATTGDPSALPSAPPAWVRRHQRGGLAATRLSVVGHLPTLRIAVPALFFGPPFDACG

SEQ ID NO: 1001603 - protein, 223 aa, Homo sapiens
MGKEAEREESKRRKSRRRQARREQQETTEEKRDEREEKRREGERAEQGERRREEETTPGARRRRERDEEKEKGKEATHSTAKTRTDRRQRTKTEAHKDRRSERPATADREPDTEETRAAGRNSRRSERTDESPEARAAEPAPRGEENAPGTKETPGRTEPSTKERGRNSNTRRDESAERGPKATRPYRDRKKKHEKKEQEQIQQTERRRADAAAATETRDTGK

SEQ ID NO: 1001604 - protein, 141 aa, Homo sapiens
IRWCDVITEEFSGSQTVGYPSVFLTYGKLQHPGIAGKVKSLPKDDPSKDGPRLHSRFLGVYKGLWHDITVCDEGTFDTCRRSEGCHSNNAHQWLVRTVKQFSGDTRRQGCALCGQVRARIADGETHVEGPSRNFNEMVVLA

SEQ ID NO: 1001605 - protein, 344 aa, Homo sapiens
KGIQETEEMVKCGGHPSRGWRSCVLDNKLCPLQPRQIKGMQILSKQAGLRQPAAVGRSRASGSGKVLALVFGIATCATLFFILRKQYLQQEERLRLKQMQEEFQEHEAQLLSRAKPEDRESLKSACVVCLSSFKSCVFLEIVGTFVPEPECYTLPCHEPKTCALSAEHGDHPGDTPVATANSREASTGLTVECTPMCPFIRAFVSRGLWTEQWWGVAVTIRYDREECIGYKGCGTQAIPSRLRRENVHPALEPASRGPKGPAVRFKRPEHTREETNARRKILPTTGRNAELQETGRGELQDGRRGTPKDTRKTGGTEEPTRVRRATNSVTQRGTTVLPRLEPGE

SEQ ID NO: 1001606 - protein, 107 aa, Homo sapiens
VWSCLDLQLRHRGPAFCPQQQTALSRPGSSARQRLEREPWGLCTPGVWSLFHQVDLMFGGLRRMKLNMLKFEPEAKQEILENKDVVCINHVHFLMDLEGLKIDIIDL

SEQ ID NO: 1001607 - protein, 294 aa, Homo sapiens
GNDRDGLTEHDTAPLCVQQLGPTESWDPAASRVASRQSAAVRWARDVTLRSRWTNMYTRFTTSAYFDVPDLVRVLLKGAEAAELVNSTVHVTSIQRAQTLHIAASMPVPGAPPKVLCWMPAVPTLSLMDIDTGLVCRPRERVPGSYCDMSLGQRQKAGTLVAQTAACGRFWQEARCHYLASLPKVHAYPTMTASQGNLMLSALGPCSWGRPGAAWIGHEDRPHCRTLCGPRNSCPAAQMALPVGAATNPEGQRTDSASTRGPYGNFILPSQAKDLFGSVSNISKAVTPPTCYVT

SEQ ID NO: 1001608 - protein, 305 aa, Homo sapiens
MTPRGVVGAPHHGRMLVPPGELAETTQSSAESASYQRGFVESRVAERRHVVADNAILDLPQDSSVHKDRRKDQKTSPSDKPPPSGKTPPSITAVRETLSLPRAENSLYLFTPPEKNVLTPNELCVFFYLTPPLFSSEAVAAITDVGLLKIYQPVVSTPTTTCIFTATKNDDSCSPQKTSLYHIQSSPKWSVLSPKMEEDPPVYTWMKLLRRGRRDKKSPPPLLRLWLLKRTIAVSNQSCWRNTTAVHYTGAVVSAYIDNTNWACPIHIHSNMSNIDTSPVAPRTKKHIFLGDNPPPLSVHQFSID

SEQ ID NO: 1001609 - protein, 292 aa, Homo sapiens
EKVMNFQADVFTLGRSPKSRSQTLLMVQKFLMVHEILNTLPADGGGGPMPARGEKRGETQDMYQSIMMGNRAGRDGNHDIHDQTNHREEHRQGMDHHTRGGGKTDTDKTGMQDKTQNPVDRRGERAKNDAKEMMEETGRKRNPQEQNKDKGRTRQQTQETQQEKKKHQKAPKYKIKRTRRETTNTGNTQKEERARTRNTTHTQRSTQVRNKNPRQKTKKQKDTQQNKSMGAHRRHDREREINKHDPMTQKKQTKDNTVTSERHGTTQETQDAGETQKRGTRPPHDKEDNTTN

SEQ ID NO: 1001610 - protein, 179 aa, Homo sapiens
KRMHQIIRMNPRLGLKDLQVLDVMSYARLIFKEHRYTYESSFTQHRRADAMLTLIMRIHGLTICNGFCHLCCKPQDAYFQYELLSSRFDIESNGWERLFLLIAYISILLGNCWRLISYWKCIEIIIYRETWNQYADDDDEDLLQFDTNGVNKERFVWLSYEIALEINSTKTTTADYRSS

SEQ ID NO: 1001611 - protein, 168 aa, Homo sapiens
MLTRQSWLGCYDYISLIRLAGHRMREAIPSEYGPKDRYSISNDELQKGYGMTGRGYRAQFAYQYVCRIQNEAIESQRGQCRSRSCMRYERTYNSTTVRDSRGSASRTCSSTIAQVECEYNVLHGTTTFSAREQSNRDSLSTQSYRGTDPASCVNMTVQWVMSRHEQNI

SEQ ID NO: 1001612 - protein, 154 aa, Homo sapiens
  misc_feature (20)..(20): Xaa can be any naturally occurring amino acid
  misc_feature (59)..(59): Xaa can be any naturally occurring amino acid
MALGGSVTRTSPHVTHPSWXPCGERQLYVATDLLGIEKITGRIVWWTANPSSVVRNAIXMLSCNSLSQPCRSSREPGCKVAPYGLMVGPAIRRQSTVEIDQHWVAYQLTCARRHDSDLRLWQSIDWLSHQNPGMVLDVYVQAGTFGGGDCGPVQ

SEQ ID NO: 1001613 - protein, 142 aa, Homo sapiens
METRIGLAAVDWRTTLRTEENFFRTSFTWPVFQPSGIEMVAPQRNSRARSHSWVPLLLGGLSVWFWPPLVDGPFRSDPRDGAVPPRSANRERFPGACYVSRMPQTLCLWVATGTRVCPPARFRVSIRLVHTIGVRDGAMAIV

SEQ ID NO: 1001614 - protein, 113 aa, Homo sapiens
ASVLRSISLALRPTSGLLATWQTQLTETHQPSVIVVFLVTHSHADQNLFEEQKKEILPEQTTEASERLKRKIRKLEKATQGANSYSNDSYYPSYRVAWHEEQESWALRWSLTL

SEQ ID NO: 1001615 - protein, 121 aa, Homo sapiens
MPTCRHMVGVAHSYVAVSVIRKQRPCRRPKGHVGICGFPIPAFVVPASDFGFPPPLAVFTTQFHLFLDQDEDNEERWDPMSWLGVRTPHPVWNRSCVLTECCTTKWLSPSVANTLVEGTRI

SEQ ID NO: 1001616 - protein, 162 aa, Homo sapiens
MLTPKRQYTYTPEERQSYCHNSNAPGVDPPVPSPSFTFIGGHPHCGGTYARGCIVYGRGQHVKLENPRKRMRGPSTIRWEPGLLLSRGPVTHRKVGPHPRIAKGREVLCSANPYGARAPWELSDSGLGYGMACSNSQRPVGNGENPAKGPTCNGAMPHGAPP

SEQ ID NO: 1001617 - protein, 153 aa, Homo sapiens
AYSCQSTPGIPMNSSLQGTGRIAGVLCIVVGGSVIIALDWVDSRACQPHGSYCLTFLQTAEYPLVHELCSFRSRRDEGLMDWSAIHANVVVQSERWRAWYGRAAHMQASCLNIRLVRPHVVAVSAWAFVDTRTRKDRHGHVIGGPFVSGFGDG

SEQ ID NO: 1001618 - protein, 223 aa, Homo sapiens
DKLPYKVAEVGLGALGDARPWTLLRTRCRVLMRMREAVLGSKPLKGARIAGCLRMTVETAVLIETLVSLGAEVQWSSCKIFSTQDHACGCSLPRLAIPSVCLERGGKRTREYPVVHVSDDPCSVQVIVAPSKHEFWTDMGGEPSIQNSSTSKVPRQSSCQGILGISDETTSGVHNLYKMMAHGILKVPAIKGQLTPSAKSKFEQTSMGCRDSLIDGIKRATFM

SEQ ID NO: 1001619 - protein, 296 aa, Homo sapiens
MVREVLTCETTSWYRVTPLLNRSSGIAWTNIREMRKVVVCDDAYYESVTQTWMNDLRVICPWPKDRSFERDFRWPTVLIDEMNMVERLGWRTLSGGESWVGLPLLGTPRDVQSTHMCRFIPCVRLPSFRISCPVRCARPPVWRVRRLVTTLYKCTVFRIHSTCLCASNGTRRRRRRISRGTGRWRGPEASTSLSSNCLNAWRSAEPKRRPMVGYRANPQWFRWHHDNQNDPVGPSWVAMEKRKNCHGTPFAPGKPADGSDPKSPWHQIAWKTGKGETGATRGPEPERPLERNGLGR

SEQ ID NO: 1001620 - protein, 209 aa, Homo sapiens
MLKEDDELTVNPVMADELTVVAVFRGRMSMKEVDEQMFNVRRRKADTLWNGSPQQCHRQPSCVRSRSLVDRRRWSSHLHLCIVAETSRQHLQELSSASVQCHVPPEGLPPLVHQAKVLCAQRIGSSNPQRVVISHNMNRSSSSELIYAVSGMPHAEAMEDGFQDEEAEEESLKVMRAPSQLQCFLEVPVKVGYLLKPGPISIVHFQTLS

SEQ ID NO: 1001621 - protein, 88 aa, Homo sapiens
MVDGPGVYGADRFNGRHCLYDRVPTFAPGVNMVLGPSSPRWSAWASSSSKYVYYEPLVYNNTYVYPWWGEAMGWAFALSSMLCVPLHL

SEQ ID NO: 1001622 - protein, 284 aa, Homo sapiens
RELSRFFREWMFIINSILNPLSKISQSMKIQVGKGQSEHRTLSGSGGISTLTYRLVLQFFVFPAKGKEKALVGAKPVLEAPGKAKCGSSPLSHEGKMCEPLSYVPVYTTRDGKEGTYKGACDRTNGGGGPPQIVALGPPGKVVPRDTGGHTEKALKETPNYKWARRETHKRGSPETLRGPPYARATYHTAWTKSNHHTHKAQEKGLQNTCVCNRGAPKKRSLRVPHEASYAAAPFTKRSYSIEHKGTQDNGVTRGGHHTRVCGALNRNKPWEVVFALRKCPPGG

SEQ ID NO: 1001623 - protein, 101 aa, Homo sapiens
AEQATKSVLVVCLGNICRSPIDEAVFREELVEPIINDLSRIGRVDDASGNLPGLVRYGNTRAERTDEAGRLALKDGHSDIIPGGAHGYAPGRAYTQRRMTC

SEQ ID NO: 1001624 - protein, 39 aa, Homo sapiens
GQEEGAQEPRVAEMKKNRMWTDDCRKECFCDIAQRSGAG

SEQ ID NO: 1001625 - protein, 214 aa, Homo sapiens
FDAKNMMAACDPRHGRYLTVAAVFRGRMSMNGGQMSQDVFNVQNKNSSYFVRHGSPNNVTTAVCDIPTVVASRWQSPFIGNSTAIQELFSRISRAVFTVHCFRREGLPSIWYTGEGMDEMEFHRGCRANMNDLSSLSISSTRMPAHERGGGFRVSEAEAARPTGQRPPYTSGFSGSLSASLLKDGPFPSSRQKYDLGVTIYLDHWFNTSWEEGL

SEQ ID NO: 1001626 - protein, 155 aa, Homo sapiens
VSIPGSSATCQPFTPRTGSPSSSASACSPGGMLSSAGGAPECKDDKKDTYVVLAEWQGHQGGASCPKGCDPRGWHNGRISCVTSVDLMWPCEPAIRHGGPGEGTGFESVGDIAVTGYQSGGRPSFQGFLGRTGLRPNHYLPQDDRGSGGHGWLPG

SEQ ID NO: 1001627 - protein, 144 aa, Homo sapiens
SSLPHSYPPPRVDPTAKLQDQLYANRAGSYGQQSYIPTGPPQYAWSCILGTESGGFSGTRKRTGGMSWTSDKPGQGNEGDLESVEDMKARCVGRVRGRTAASELEARRRAMDAAALGFKLHVLVGNPNGIERIQDLMILMTRTV

SEQ ID NO: 1001628 - protein, 226 aa, Homo sapiens
LWVRRFSHEALAVLFSGALLWLLAAQGQAMTVLTKNQLFAAILHGDTHGYREHWNNQPQDYQEPKTPLTGQPPQAPPATDPRMPLNKPKHTNSHGNVNSSSNKAKPCHQPGPLNCHSQSCHAHSHGNCHGSSNKANRHLPPAQDSPVLPTPENSSKPLRVLAQSSKETIGRLHVDQMVPKPCVHLKPRFKFEVMYTTQGGGRGLGHLCTEPQTKTRSRKLVRVPNP

SEQ ID NO: 1001629 - protein, 81 aa, Homo sapiens
FDAKNMMGACDPRHGRYLTVAAVFRGRMSLKEVDEQMLKVQNKKQQLLGGMRSRNRMSKTGRYVCHLQLRGLLMMAVDPFD

SEQ ID NO: 1001630 - protein, 345 aa, Homo sapiens
VWAWAVRGLQGYLGWLHAALPLTTQTLQRRRTSRKMPEAERAELALTLLAEADSLLVQAGSGLELAAVADILVPWSTFVDQQRFSRPRKLGRACASCLDTQPSEYYQSTYVYVFLGLILYCVVTSPMLLVGSRLVLYAAPVTFSICAPLESKLVLLWTEEVSTDASVCSGLEASPSPFYPWPGAECGARTYVSWVAGTRHHMVGSHQESPRIDLPTTKLTDMWTGEGGLQDLATAQDVYRVCSYRRGTPWPGAIPSEEPKAVYHKTTTGPPNWPYVPIGNQGVNGSGYQGRQSIAEATAPQFSNRPQGGEEESPGPYMGDKYERVDHSEGVTISRDKEYSTQNSE

SEQ ID NO: 1001631 - protein, 189 aa, Homo sapiens
PSLSVAGPDPRPAGRLAEPPGAPGPCDPCTQLRRTGGRARGSGGHGHDASGPGVGLSSLPCYWLPQHPSTMLALFPDKSAWCEAKNITQIVGHGGCEAKSIHEQGCAQDMLLQRTCCPPSTVPNSPHESLVSLGTTCIARPMSSVGRFVTAGGARATTEVPSGGQRWVEERSLHCRLPGLLARQPRSRR

SEQ ID NO: 1001632 - protein, 373 aa, Homo sapiens
MNVRKVLCESKGKNIKDYQQNRESGGVVRRFDEILGRPVMWYPGGSVVDLEHSTIPASEKVFLAQKMMIVHGANRAGKACRSSELARYCLVEHASRRPRTTIPWLEGECMLAQVQACDGADCIIAVWRNLAKGTYPLEGLCRLSVHLNCHVEAEGLAFSPRLCECIMEGYIPALCVVGPHLAQLKLRHERPSRPKGLPGEKAFPLQQLSCNVGVPNNIRYRLHNMFLGKRSASSLGLGLRITGTNVGRHQSHLLVRPPDNPPMNKARTRAPTLVHQLTITYALFAWWAQEHHGREVRPWWLQGTVGPSLGLETFLGVCNLLGTGARRLALQWKGGDLVGPLGGLPRNVVAPSPSRVFTLGPHGVLCPSAGMCP

SEQ ID NO: 1001633 - protein, 39 aa, Homo sapiens
MSTRPGYVLLAQDFGLNSRGSKNLDVYTQISRTLPDVGA

SEQ ID NO: 1001634 - protein, 104 aa, Homo sapiens
MDPSEINETFKYINTVVSCLVFVLWIIGNSILLRIIYENQVHAKRSQYLDLPACVLGDLSAINQSLTSRINVYTSAWLEDWPLGAEMCKRDAFHTERLRWESLC

SEQ ID NO: 1001635 - protein, 107 aa, Homo sapiens
MVDTCITSSQTMPLLQERDEDCGLRIMVTPRSHPTQGVTLTLSVLNAARTVIFVSNWRRQGSCSEAHSWKDQEENPLAAGLVQPRHRETVRGSWTRRLPPPDRALRE

SEQ ID NO: 1001636 - protein, 123 aa, Homo sapiens
LTLSDKALMKRLREQVLREFLAGAGQMLHIENLNMRGRPLASTWCNWHHAPMELLTRPSSRIRVRRSPWTPSGPSVGIVADGAGCWSPIIFIYEKRPEALRTSWMMTTAGSAPREEQRDSTRK

SEQ ID NO: 1001637 - protein, 242 aa, Homo sapiens
RGTKPAPQAADPRTTIREYARRFRPSSAVPFARAGRPISRMADAWNMGPYYKRGSRRRQIGTPKPECLSCLMSTSRRSHGPDGRMNCGTRWINASYTTPNSRSVGISYVPSQREPARVMMQHGKPKFPREGLGSVQVRSEGPHGVPTRGGVLTSFPPNHAIPYETYVRNGNCPFAVTKGLTGTTQRCNPTKRILAPIGISPIGEVMAFGSGFAQKELATKPYGGHIPTIRLVRSEGFGTPTA

SEQ ID NO: 1001638 - protein, 117 aa, Homo sapiens
MSAVTDERLSYTAAAQCGAVVTTATVPAAPASCLDCPQADLPWPAESRSPWRSWCSSQGHGLMPLALPGLRGGPDLPSRRVRRMNVCRKFLGQGTRLAVCMTSHSVGPQPNVERASS

SEQ ID NO: 1001639 - protein, 151 aa, Homo sapiens
QTSRKLCASARSARSAFLCSGRQLERRGVCLGLVQLDQMCITAMFALAWVCMPSGYRPTSRTKTQMVCPYRIAQVRTPPIKKRQGQLTGCKSTGVQLGRTRYVARTAEPKSIAGGDLLNSHERNPSIRMLWTIVLPKVGGTARCHGKYAGQ

SEQ ID NO: 1001640 - protein, 298 aa, Homo sapiens
MKIKLAKGTSSPGASGQEAKHADLTLYCTRSLSHERKEEAYWGKARVAGPGKANVGLTVSTQGKVYPFIFPVINTGGKKATEGCHAEPKEGGPPKVASSPVKGAPEWGPPRRFQAPLSGPPRHLKRSHRKSGPDGAHSHAEKRGHTVKAREGTTTCVCESATKSLHHMDHSGPFWALSQERLYDNASGIPRNSPWSAGEPKECGSYGDTTGGVPYRRRVENTQPGRESKTPGEEKRRTMVGNNNDTRAREKSLPILGPNTRHKTQKPPHIQRTKNNNHMWGEPEDTKSSLRKINTGKI

SEQ ID NO: 1001641 - protein, 457 aa, Homo sapiens
MALDTDVMHMTMVVRMNGSVAPGEVGVHRKLRRRMSKCSTGWRYSPRKGVISVLMRSHTHYLSEDIKLRTRRWSGRLREVPYNAAYFEIPCSSSLLESLLNQEESLVDPQGLCLVRPYVSYYTRMLIYDTHVAGMAEPPDSRLVEDDPRDMSGQRYVGLTWLGAVLIESGPGQAAIVVYHSITCVPPHVLACSCLRASSAHRGVGRRTSILACDWGQATVPDSVQVTPTNVLRMHHGLGRRTKRDMYTFDTLVVSQEGLTNSQLRNKKAPFVVSPDLKNRGDRTKSVTLSTMAPLVPSAIPVGETLHEEGERSYVGLGYPPLTSGEKTTHRTVRLELADALARGFYRPRKNWTSTSPFCPYLSVGARLGHYGGLMDSRQNRGQSAPRGERSLVQPVSYPGLPKLWDTHVDAIHGMRFSPTPLDPQRAENKSIGWYGTPVDILYANARHYWYTSECPI

SEQ ID NO: 1001642 - protein, 113 aa, Homo sapiens
LRCQLTLMAVCDPRHGRYLTVAAVFRVLYCPMNGGQMSQDSLNSACISEHAATLCDMRSHNNATTVRLVDIRDRRGRLMMASHLSSWQVVQPIQVSSSSHSSEQVYVPMFAGG

SEQ ID NO: 1001643 - protein, 593 aa, Homo sapiens
MSTCLTPCLWTCLLLPACLQSFVGPTATALHLPKPRLLLRGSPHTSDRPYLNQSGALHATAHFHATHSLYTRATLGRKPATVARPGRTHNGTEPWPPHFEPDKPPRHVRPDPHLPEDRRPPFGTAQGLNPATARSRQFLTNISLIRAFPHSGPPDDPFLPTTPSGGPTTRASPSIVTTRLGRNTGQHQTYTQHFRAIPFKAHKRRAKAQGARGLATAPWARKRYRGRGNLWALTHLHPVWVRTQPTFHTCAIAEASRKRDSAENGLFVPSPTAHIRLKCPSDTPLDVTKMLQTFSQPTTLSPPFPPQHSTKALNIHTTQKLPPQQYSQRVVSPRHPPLSPTTPPSFPHTTTLGRISPPLEQRPAPLLVDANKESSTKTNWQLTTREYHSFGSRCDPPTGRQDTAGHNQYTRAFSPPLHVLDTTAPQIVVTARPKELPVLHYWRTGLHHTPSMQIKHAPPSNYIGDGHAHINPPHLTNDETAPTVRATPHFERHMSKKRAFQTLRACPFVVSTPRNRQARFTPWTQPNTVAVAKHRPHTAHEVSDPPPHSHTHVDDRTATQQPLLMRQQTVTPHQQPTMTRLPPTLKTVQAPVA

SEQ ID NO: 1001644 - protein, 82 aa, Homo sapiens
APTPHGTHSNRNGIPNAVTERKILGYINYDKGPQRVDRPLRGYYNPFDWTPNSNVFTRNEPPTNPAIIYAIHPSSSHRPRDT

SEQ ID NO: 1001645 - protein, 122 aa, Homo sapiens
GATPLRTVRQHPGARRALRPPGDPPPRLDPGPGAQERVGVSVGGCERVRAWAWERPRDCATVAALPSPPPSPFRTFSTPSLSHSLDEGLGDLERGSHIVFPQKQNLVSVLLCGIHCLYALNE

SEQ ID NO: 1001646 - protein, 339 aa, Homo sapiens
PPLAHPGLYAVLPADDSETGRSRVQVTVWWAPSQRSRSSGCCILASQGRCLSRELLFCTCNFSESVQLSTQGASDAGAKVTNRITLKHTFNPHASELLSDRKGPVSIARTPAFHLAISAELPHYPLGLFNLLPFQDAKLAEGRTLTLETQAALGEPELDDQRDQKNHVQRMNCEETTTSAKVRSGLPKPVEGTLIFETGLQERMICPERLSIMGTQTTNVGTAPPFRKKGWYFPEVDCPCKVVGRQKTARRGTQITFGNTWENPQTPWGYSHEEQVQEFGPHSWKLKLGIVYTTEATTWNLGEGAFIEMVAEAQGNLPKLGDRLAMALPNTWAFPEGQP

SEQ ID NO: 1001647 - protein, 165 aa, Homo sapiens
GETAAWFQLDCTVLCAWLECLRADLLHPQLSCCLVNEEAMVCSEINMEDIEKLMLISTGEDSMDGSARMRVPEGALLEASEASVVKCPEYSIFGATVWVNHNGPVELHRARSPKLALIGQKRHRAQNLSGVTELIVIRLRNTTNRSSCKERVPYACVTDGAHLVP

SEQ ID NO: 1001648 - protein, 146 aa, Homo sapiens
DFSQTVLEQWAHRHNDTYFPNLKPDLWQDDMAYRMNIASCSRYQLPQAGSLDDDYSPILSDLLSTHGVMTWQPNGRTCPFINDHRHSTELREFQGTLLNGRLDLGTIRNAWHLFNQKRGLLNIGQQESLHKKTNQALNNDSRSHAN

SEQ ID NO: 1001649 - protein, 166 aa, Homo sapiens
MRLATGLPFVNLSSARWGVGRVNFEALIITMSRELGGTLLLGIAICCCCCSQEEEEPEAWTMEMRRRPCVSGRRGGYWQRGNRDVRPEHDARRTTADHAEQSCTAPVPEIGPVCYHAKQGNGAPTNSVAMSLPDEVHTVEDQSQTGNTKLGICGFWTRPMNLAPTT

SEQ ID NO: 1001650 - protein, 246 aa, Homo sapiens
MAFERIMERFDHVIDQQFFLGNADPYRKLVNAVSRGCKHTQEYCNTLFYIRHMLHRKPPPHTIAQLPRSSQALVIGCSIPFAERHTYKQVMVARQRIAGVYEPSRGLGNCGIAIAMGGRDTGYKGREANPTASTPFKQPPCVVELLSCKSFGSTYAIPHWPTYPQLLAQSLRNPVNTVRPEHPTSSHNRDTQTSQRAAGERTLCGRHAPSLTHSTAEHLWHTTRASTRSRAVITPQESITSRTRKR

SEQ ID NO: 1001651 - protein, 220 aa, Homo sapiens
MGPLAKLTPPIKLPLHRYFALAQHGRPHRGPKTPIGFSPRTVVASRRHLARPTPRGGVPFYTGPPSELPRALPHSVRLAPQSPLSLGTRIGASTALALSSQCGRGTQVRLLKPRLPKVLSLVPKRCTFLYLGGTPCGRFPPRVFPTASQLCAPLPEHAPAAYNQARAPFPPFPPFPRAFPLTREAWLYFPSSLTQLRIASPRAPLFSGRPPMARRHALSL

SEQ ID NO: 1001652 - protein, 237 aa, Homo sapiens
KFWNAVRRFEIGPTIKKNMTGGHEDINRHMAKKDLGEDASQGRRLELDPKHGSSRGLFGQLPARGLQGSCKAGCVAQKVTHEEFAMADRSHRQHAVSPGTMTGGRNAVKLSAYVDSSNTDSMLVAAVSQEENVTRAGGDMSRIHSKDTKVVRLDGPCIRGAEILRMRHCVELLRSSFLVISWGVPTRWSLDPKAVFLALAGGSGNVGASLGAPCWLRSDSRMPPYWITLALLDIPGR

SEQ ID NO: 1001653 - protein, 186 aa, Homo sapiens
MGRTASASIFLYDRPPCTDQRPPRQVRQNYHQDSDAAINRLNQTLERLRRSVSGRSLLHVLTIFDPQIDSGLFDTNLLTMIPFPFSQVSVKDEAKPLSEAHNCCDRSCQESQNAVLVPAQSVPCSEGINAREPIPSNLVRWPLGANTRASLDSGNTGAGLFASIVLSSANDPLFDHSPMPRTFGTA

SEQ ID NO: 1001654 - protein, 66 aa, Homo sapiens
ENRRFWRMKLLRPQSWLHLPHTEIVLPSEKKAHEYQVHRVCAVEKYAYTLKNHKGVHACANFEIAK

SEQ ID NO: 1001655 - protein, 216 aa, Homo sapiens
MRKSVACSVILRLRPISLALLLVSSYLVRDPILLSSCGPYLVSVLNVRYGPPPAITRSCESRRLSSGKDRSTYEMWGINNTRKTDIGKAKLIQQLLTDQSAKNGQRGTAPREYVRDYGGKTCVTTTRSQRRCNLIDQPKKDLQGSGASAPVVPGMMCPQRQAFMGRLHQTYARRIWEFFANVAQQIGPVVTPFKVWGLFPNRLIGATGGHGPAENP

SEQ ID NO: 1001656 - protein, 82 aa, Homo sapiens
  misc_feature (21)..(21): Xaa can be any naturally occurring amino acid
MPTRTRVLVLPSASRHACFKXPVAPVRMCRYVPRRSLSGTIPWELCIASERMAPSPETGMGRQTQDGKEALIRKTRGKDDMR

SEQ ID NO: 1001657 - protein, 119 aa, Homo sapiens
MMLCVHTNACVQMRGPHKLSYTGSQHEVVFTTCCGVGPLPKRGRYMSGDKNNAPPLGSPVGATKRTLCCGVTPRDIFCRAVVSPPKILIISSPTTIILSKGLFHSQHNIFYPEKRPRYL

SEQ ID NO: 1001658 - protein, 81 aa, Homo sapiens
MPVGQSSPAGSGQTAAVPEQLTITVGFEPSPGPLTCCSTAHCCCAGVVAPSGAALRERWPRAPRCFSFLSVACGYVSDVDI

SEQ ID NO: 1001659 - protein, 266 aa, Homo sapiens
AELEELGVGCVAAVWRMCLVWVQDSCLIELVSVLRGTAPGSSGREYLSCDEAQSFHRGPQTRSRSILRLHGDGVTIPVITADSRIDTEVTVNQAQVSESCPGNGWQLVGTHSLGNVAPSEYLMETSSKCVTSGSEGEVKPCPHRYLASVDHSRERLENENNEACDESIVRSMWKVRWVLTCFPCSGVIGDGAWDRMSTQTMALTQRPKEIGGVKFSLCRGQCGIDLLASRRGYLPKSIGKPSVSMRWKGPKPNQGDERLWATQHNL

SEQ ID NO: 1001660 - protein, 138 aa, Homo sapiens
MISVGHLKPVLSGPYPMCKFSPVCCVTIGTGLYAPLGKRLPFVLSRYGSSRCVKRAHRSYTISMVPPKERDTWACDIVPKGGARRRILTQSEAAKRKDTCCHEKVVVVDPQGGFQTTTFVAPPKRKGERPPYSGVVPK

SEQ ID NO: 1001661 - protein, 291 aa, Homo sapiens
DGLRLLDSWVCGRRDCGSWIPGSVGREECLREEGLGQTSRSLAFLANAPRGLDFPDPASIEDLMLRPHGALEVKEAQSRERGEIDVHGDGYGEPPMPGKVCGFDPGVRAATQSSTGIVRAFDEQRAPRWLSAHKDDVWGPVALGDIESSWKLSVSSVMWLMEDDVEDPGFPETFRRFWPEWNRVVKKRLDTPHLGIEAGETLCPRDYRHGACQLNLLGTYTLHEIRYSPYLRKTSGNRHRSSPACGDNCGQCPRHFPIVGTKGADNRHDPTLWPWTDSPHGVRVTVSPQEA

SEQ ID NO: 1001662 - protein, 338 aa, Homo sapiens
MPWRLCWRCSFGWAFTTLSRLQSNEDYFKDLCGPDAGAIGNAIGQADCKAQDERFSAHLAPWGSFMKNFLTFPSGYIFDRFKTTVALLIDHTIFVQPSVTSSFNSLYTVLTRLQARGWILHCAMLNVLNAIGGELRDSLQYSQDLDEIGEPYESHTLFEPSSTTSTDGSNYDFISFAYVFRYQLTLSLMKEVHQPSEALLHPSIYCRDSTLGIVDTALFHPECPRGSHPITTDPPTTAIGSVPWEWHHKSEAQGTQLSIEQQGAKGHKELPFQLKEETPWAGAMKQELPLLSGSFRFLSGALPWHLGVGACAFHVGGPTVFIWALLSPFLTQPWPVVP

SEQ ID NO: 1001663 - protein, 222 aa, Homo sapiens
REPADVSMPGWLSVTIVPSSGTYPVLGSALSPSTTPQLLRLVPRASCMTRGSSAVAPSGASSAPGLRTIARISGGLLAGRRHQDRVQGIPATKEKAGAATELEMTGVRPNLTSDEGVRISPGVSNDIMILAAPERHSEVKWAKAKFRLVGTFYEGRRLRGSCARDIVGTSRNQSSKAPRMKCESVDNLEPGTIIQAIRRDQTLAREAKNGLSTRKQRTVGTP

SEQ ID NO: 1001664 - protein, 226 aa, Homo sapiens
ARLLSLMTKGRIDPGRHRTYGPGYAEKYNAEDENAEGQGVIQEFHFESYCLPTVRQHTVDQMSHFKARLTDEDKHEDPWNEAEVRRLIDLRLICNQELLAKADISSNQSKDNELAKVKRHTQSSTQCIVTKKLHERAMPYRRKVRCVRYFSWGGMVRIRSPFLRVTVCVSPSRGLQPNIELHAFEFYMPERHNVCQEEYMPCSDANGRILPDTPISRKVTLKQVIR

SEQ ID NO: 1001665 - protein, 267 aa, Homo sapiens
MAFLSAYRTKNSRLYSNSTRKAPTLVGPYGRTSKTLRRDRRVKTLQPKEHPKEAAQIYASASTSPPRCLALSIVSTSMNPRSPVPKPPGQPRSLRTPIVVLSHLVDLRRLLKSSDQGCCIKLKATHLIWCTCEGKLGRHKPIVHMEESTRSAVIQYVVKALGNQVASCVHHLTTRYRRTRRRHRRGMIVAGPNSNEHHWCPIRLLEFLVVADKYGKKNQKTKTSHFGDLWPEGGTSRQLSSQGLSEPIQQLTARQGPPFSTRIMSFN

SEQ ID NO: 1001666 - protein, 304 aa, Homo sapiens
  misc_feature (61)..(61): Xaa can be any naturally occurring amino acid
  misc_feature (93)..(93): Xaa can be any naturally occurring amino acid
  misc_feature (167)..(167): Xaa can be any naturally occurring amino acid
  misc_feature (191)..(191): Xaa can be any naturally occurring amino acid
MTLEGFGTFNPGVAILETPTPCAKTSPKQTTSLGTMGQLPLRDDLERARTKMLGENYRGSXMAKRGEKFLYPEKSVFPLLRYALPPTKGGHTXFFDDVEQRAAAICPCVKTHSCVPPDFNSPVLSRPVATNGFWVPPNLFRPGHRLPPIFGAETTLLLDSLREEAPXTGRHTARQHNRYTSFLTTETRSGXYYPHALGQETPPRGVKKSLRAITTIACRKKHPSAGRKNRGTGPRKTLFQTAAEFYRRDKQSKQYPPRGAYIFFSHAPLISSGRGHRGSDYYQSETPPQAISDAEAGGIITQRA

SEQ ID NO: 1001667 - protein, 211 aa, Homo sapiens
MLWYLRQQLSHWRFEHRVLTPFLLDEPASTNNRQRNSVNGDCTTCLWPKLWPKFCAPSVAHSHRHVKALHLGGTPVDSDQSQRAERAFSTHTNVQLNDAGNHRMPDVAEMPDWTAGAAPKHPGELHSLHKPRTQAAQSEGTRPDTRVAATQQNSIRTKGPRALRTAARTQHPGTTASHTSNRHKGILLKITLRLPLGPMLRTAYTGPELFD

SEQ ID NO: 1001668 - protein, 90 aa, Homo sapiens
GFGCMGTPRGLQTDCEALLSRFQETDSVRFEDFTELLEKHEVRDYLLWQNEKFRKEQLLTQEALAWAWRYFIPPYTFLIRVVLVSAIWII

SEQ ID NO: 1001669 - protein, 135 aa, Homo sapiens
  misc_feature (95)..(95): Xaa can be any naturally occurring amino acid
MDFAPKRISRASSNMGNREQKLYIPQGRATARNGEIGLEDKWAPCTKFRREPCRNTPLRAQPLRLWRNKPLWTSLSRTTASGNGGNLDDMTCGAXGPQDNPGGAEPHVRRPLRRYRRQKEFGFLVGPRPTLLNLG

SEQ ID NO: 1001670 - protein, 90 aa, Homo sapiens
MALAGAQKDPQWPQGCAVACKGTDPRAHCLPPSWVEQGPAFISKARGLRHLDAASGDTGNRETEASPSRSQCDHTWHLTSPKSTCSEPVS

SEQ ID NO: 1001671 - protein, 187 aa, Homo sapiens
MASRIDEFTRRGPQGAPRVSNADLPLSPKTLPRLSRAGPGRICETREESGTRLKGLNRGECEVGSLGSQDWNRPRQVETRMGTTQEIDCGAYTPRRLRLCADGKGPDRALGPSANIHRCEPQKLVAARTTFHPQVKPPRMTVIIHIDRIPGRWPKVSKDPSSVNIVPIYGGRQQEKAPKVVSTGRID

SEQ ID NO: 1001672 - protein, 360 aa, Homo sapiens
TIKDQLKQRTRILQAIYPVATVKSSIKIQEQLCLVQDSNVHDVPAMTEADCIPESSAASSDLRLMQSVIEQEVRLHVTQAPARGGPPTFQGRSPLALGLQARAPCVYRDHSDEYRTRGSLNAMQKHHIAKCEDAQLVLTRGDADLGVPSVARSATSSNCSSTAQMSLEFQILQGLHSHHRQWMRRRSSLDTIAQDVSCHRFGHVLEGMFALMPDSIQPNVCPGVLVDGKWLCPTGKYTQGRGPAKSKYTPNEPASCFKQCMTHTSGAIRHDMCSLSAPSLLMGAVRWCHPMVPLACEAVAPCLPATVARPVSPTVRRYPAGFLGTIVLGRTGHGDHVPRVGFADGLPFVIGFVDPRESRL

SEQ ID NO: 1001673 - protein, 180 aa, Homo sapiens
MAHRDPFRGDPCPRKHTVGKTLITRLNTESRRATEELEESQNTPPRTKRHGRVNGASKKLGSIQGGALWSPKQPISLALITNKRRKGAQYTKGIEEPPTITVPNENHPHKSTPKDRRDPPHKRMTLLQQGTRQNDGRTTQRDHRSQEQTPAIQGSDGHTAPNRAHGGKIEESKWETGTAP

SEQ ID NO: 1001674 - protein, 109 aa, Homo sapiens
WLKEAEVALRCSGVWWQAGSSLRQWRHATFPEYELPELNTRAFHVGAFGGAVRVWPVLRWGPVGLCPLEWMPPGILRLPCGAMARLTSRPGWMPAGGQGILDCSLEAVA

SEQ ID NO: 1001675 - protein, 255 aa, Homo sapiens
MDHKAEQNVGRARNRRKDKTTTWIDKQRLAGDIQPHMQTTEHKRDKKTRGIDTAAKSGRREPIDRDQSSSDTRSTLKTQRDVTQGKTIADEERTRSIGTKMGSTTIGAQAEQRASSPTSRRDERHTEEEVRHKHKQTVESDRAKAQGTSGRGSPQIGSKGKRGTQHKPEEDHREKRETRELYTSRGVRAGRKKDNTRAIARAAYATARAEDIPGEGAKTGRRQPEQREQPGSSKKGINMEPGRVNEESNTWERRQ

SEQ ID NO: 1001676 - protein, 276 aa, Homo sapiens
MSCYQDWWALSVEIANQNIILGGSSCYPIMTRALPTWAASFLPQFYLRGGQDHLVKTWAEVYTARSLSSTAMCLSLLHWTLVEDFLSGFQVVLLTKTLPVRTSMLSGWVLSIHRGIKLVVAEHCGACWAGSFCDFRRGNAPHQIPLGEQSPQCYGFYGYQGPPPVLVPACTEGPDDGVLRRGGGLLCSSFRSPRGMVRNGQPEESAQWQDQQLLRPYTFETSVTVSAILRLDSWRQSSSQGRDVPTDDSALNSLGGPHSREPDLVCRTCAKVVALL

SEQ ID NO: 1001677 - protein, 585 aa, Homo sapiens
  misc_feature (305)..(305): Xaa can be any naturally occurring amino acid
GTMADEYTRHDAVTLECLKKSATCTQTDATGRMSCTQTDGLSEWSKPGDVPYNLRCARSTSSARDKTFMRCVNLRVHWSRHVHTRGPYTIGVDLRSYDTLRMPLRNAVIFVSLRAHNLTSRDHSVSGLSTHSAHCALVTSSSHAHGREPLPRRHHLGSHVIGPRSLGHRELRRCILGCGYTYEFVAPEFGPVVRRSSLEICPFKTVRLRQYRTSNTVMCTPQGVRTRPVKNFADTRQGTYRSLTRNNMLRSSGKTWRNAQIGLEPLYSDNVLIPHERRYIRTFRIMRERHTYGRQALGFAIFGIXVVSKLPQATFVLYRDINNIATYLQRRTTQAQCRNTAISMCHPHEPIGLILTHPAYSLYMRTHTRLCSTQLSGYIVRSSPINGKGLNNIAGCTNGLARTNGTSRRGNQLRGQGHTVGVTISIPQGCGPAPHCQTKLLRWVVTLESHPGYDTSSRCPIAEGRKAWPWRDATHSTELLSKPGEARNHNVILPPAALTLTRTGTYGGGHDIVAHFANGMPLNRTSARLVDDPTMSSVYPPRHKRRYNPVLKLPAYSNGTQDYISAMLQTPTRANRPAHHLVTIA

SEQ ID NO: 1001678 - protein, 74 aa, Homo sapiens
GSNSLIFVLPRGLASNLSKSHTELCKKLILGGNLKKSMMRRANVASKSSPASPGCAIEHDSPGTPGSGRTPMYL

SEQ ID NO: 1001679 - protein, 344 aa, Homo sapiens
LFPAPAPPGGSSLCSPSQSPLPGAELHLGSLFLSPQTQLPVQTSSLGGAPPLPACLPPGCSPAQGSSGMNLFRYLGDLIPPPTHIILLLLNNLEVPLVRPEFQRHEPGSCIAVRAPLSPTSSWHPSLSRTAYSLRLLTNPRSTERVSSTSRPCIPFSHRLLGPHCIGQRLTQRPNLYRSWRNRDVDAPGTRQRCEASPCSTVVRQQGPTFHGDQMTTRAPKYHWTFRTHPSIGAGNVASMRNAYSVRNSVTLVKAPRPGAQVPLAHRPNPLAPQRGWDSAKRHAGVGNGAVARIPRLTPKYADHTELLFRRALTVAPLHHPDNLPCLKYLSLPHLGSPWGRSLP

SEQ ID NO: 1001680 - protein, 105 aa, Homo sapiens
MVDGILHNTVRRRAKPMPSTGYTVNTEGYAKVSCGKSIAIQRGLTKLREPYPPCRCEDRCHYRCATRRPLCGEHANLCLEYPQWYEENLCTKTLHNRQDAIHNIA

SEQ ID NO: 1001681 - protein, 259 aa, Homo sapiens
MPYSGRKLPKVIAALTQSTYRVVCPSQRENCTMSWRLTRHNCCREMACDRRFRYESLTDPFDTLDSGEMTLKIDIIAPRPQERTLTSVDSRHWHEQRLISEVIWEPIAKSWYSKHCMEALQAEVQTSPVIGQCGVGFYSGYCGGRDTVGVITKRQRVTEQYAVRSLLRGGSLQLCVLTMVSPWTEGTQRDTSSLKRKIETEYLRRAGGSPRPSVQRTAYRKCLRLTRIHPVPGTKGHPNNGEYETMRARGDRTAQEHTG

SEQ ID NO: 1001682 - protein, 57 aa, Homo sapiens
  misc_feature (42)..(42): Xaa can be any naturally occurring amino acid
  misc_feature (50)..(50): Xaa can be any naturally occurring amino acid
MCGPPNKLLAQSHYFTPVSTTPFGVLTYTFGNIRSLVEQRRXKEETGLYXRGVGNTY

SEQ ID NO: 1001683 - protein, 492 aa, Homo sapiens
GPSTCPCHVLVAVHGPCVSLYASGPHQWRLSWTHGDVGHTTSVTRVYRGLLPSLHSRSVALWTLSCGRGTLYRLYRYDEQHPSTGAEASLGVSPTKRPEPGRHQLRDDQTGKAVPQRSPRAASRPGRWATERIPPCFLWQDGDYRGMSPNGPQVRVDPIGSTMDAGVHLVVLGSTSPHRFSRKPPFSPLPLGGSTSGKFHIAEGSPSTQKEPPYTLVQSMPHYHSDTVSLNSARDTELRKGGEKESGIGLTGHPKGLKQRLGIGYTTRTRGRNPTRRSGLNFSRGAPTLWAFRHHTGHLAQRKHGGKANSKTRGPPIVAGPLIMGQPPKFVTHAKFPKHGTIPSFLGRSSPTAQRKRAGHNRASTLSRTAYSFGDTFPGRLGGAFLPRFPRLGSDPPSQASLDFQQAHLFFPPEGAWGKWGLGAHLFYNRTKAVQTQDKGFNPEKPGTGSFRAGGAPPRFTPLVFEDVHRDPRVSNTIGSFFLLTRPGETLF

SEQ ID NO: 1001684 - protein, 144 aa, Homo sapiens
GFPLPNGRARETGVRVSEECGRCGLFAEGPRAGLVPVWCCAVPECCAVLVLCVPVLCADYGCEVSMGLYRSVEREPLCGSGMDAPACPSPLVELRPLLVCPDCAVQCVRDLGPSEAKSLGGQCELGCKFNATGRKHVTADGCDR

SEQ ID NO: 1001685 - protein, 455 aa, Homo sapiens
MRGKGQKGATQAGRLRAGQCRLHRAPPEKACVQAEDVGPGKGPRAAATFYTRGSAKFSRRFPHSLADNKRVAHWASLKSCGGLCPVVFVRVQVLFSRATLARRCDPGSCSACARTVWRGHSVGASCEMWALPVWGLMGPYIRENLSFDKALNLQVWGKYLSLSEEGASISNKARIICASEGRLVICGAPHRHTKGHNIFSRGGGDKRRSPGEGRPPCGGGTSIHLYTKGVRGEEKHYIEDLLPRNTQGEVTPIKDTRINKGCRGGCFPQKVWRPPGGKKDVASDSPPIEENFFGVAAGGKQIGGALFREDVSREHPEMWGPPPVVGSSPCGGPRRILVDQRGRQIAVSSQRHLPCGGGDTLVVVSGPHHSGAILTTVAVCHPEVVRPRGSEAHTSGWGEKLPFPGKALQHAGVAPRVGRKTFPGGPSLLAAGCGGNTSGGEPLHVERGQSSPSWE

SEQ ID NO: 1001686 - protein, 255 aa, Homo sapiens
PSPPPRGSERMTGAFTVVSFSDSELNEVSSLMSPCSHYWYRLQDMSYQQRRGCPILQFPKQRGDVVNDLQGATEERGKNEESLDEYRRLPVLQEQGVHEAMLRRKTPVSACIPGKDLSIQSHPVGMGTKRGLLVPWCSHKVWTFTPMGGMPEPELLTRDSIWAYLLLHYMMQRCNSAILLQLCALESLDLTPKTLTTARSPKPRSWGAYAFDSQLAYSCQWTRNTRKNLSKLSLRSPGINGCIGYRCHVTGNTTG

SEQ ID NO: 1001687 - protein, 345 aa, Homo sapiens
MEEADRRGWSLIDGSGMVKAGLAVGASAPRARVSFHRRAPQMIQGRHGGAWATKDSYVSRQGPEQAWHPDPEVTPLSMVIVQANRGYDVVSKIWQPHRIYNELRVDPEEQPVLRDRGPPEANANEREDDFRLKSETFYDTPCMYCGLCMAVACPSYALWAASTGNCRCDSGDRGHPNYGAPILRRLLPFRASRIHAVMDRGWSEDHEGTTSMNDPPMSDGYEVRRPRSERGNRARHRRSKLVLQSSSVTSRQEMGNVRIRPLSLEKSYRACPDGRVDQALAIEPVPVVRKAPVPSLPSWGMEILRGSMRTTFNSMLGVVPVTFRKDLEATPVLVGGHTKVSRMVK

SEQ ID NO: 1001688 - protein, 320 aa, Homo sapiens
VHRLDGTIPVIPYLLEAVTEKDSSSMEGAPSGRIHGKWVMDTYPCGMQTINSTECASPDCSYGLRMSGFDGILHASGGIDIAEQMLPPVMLTGDPTDDTVTDEALQEAAQGTPGPQELVTADVQAANKPVTDDILELLLWSPMRVTGCPEAPAPFTHYSLTRIRTWHPPHDRALKEVTFHETRSHHEHQHLYETCAETTRGNPHEPIRASNHGVPGTSTRTTRQCTRPGTRLIPFPNERGDTLGNSNLLRGPGYHSNDVTVRGVWGAYGFGRCVEPRPRVKVKSLEPGNDRHAVGRTHGNANRAPAGKKWTTKQKNQERK

SEQ ID NO: 1001689 - protein, 72 aa, Homo sapiens
CSARAAPTPRCARFLPSTWACCPEALLPDNKCIRGLHMLRPNSSTVDDTSGTHERACTTIALDDMSKTAGKT

SEQ ID NO: 1001690 - protein, 121 aa, Homo sapiens
  misc_feature (76)..(76): Xaa can be any naturally occurring amino acid
MVIFFVGIKKNLLGALRIYFFFSCKVWVPGKTVTVGGAGIGRPIFGGQTGGTFFWGDGVGGACQIVAGVGCAISPXKGYGSQRDYDGPTPAYNSCGAQKCSPLFGALIYIVGGVTAAGTSS

SEQ ID NO: 1001691 - protein, 75 aa, Homo sapiens
LGVVQEVEVFAGAGVPWSVGELHELPASIGAQNLSPRYDEEEEQKMRGDKVVRRERGLLSVNEEMIVVEEADDEK

SEQ ID NO: 1001692 - protein, 180 aa, Homo sapiens
VLVQNFIKGLIEEQLPNSKIQLPGRTRLYAWWGRGCGACGRAASWLSHPFVSVKVGGGWADTPHLGVPTSASRVAQARGSLEGQSLPVWGLPGAAVIFTFDAQKTRVVSNRVAHSSGSQVVSITRAPPGVVGINSERQSNKIFRVEFIALLCSLGRVFPREETKKTSLQSLFVAPNLSPK

SEQ ID NO: 1001693 - protein, 326 aa, Homo sapiens
MASETTLSVLLTAGITRRYRAMAIGPRKAGTTMREDLGTKCLLTNAGCRVVPVERSTQCAVLQLQRTALKAPKGLQLEHEASPLQHCIVLEYPCHRNAALIVTVGPIQGSWLYPFISLLGGRTKCQSGPWYFLRGPADPARHVLPHRSSRCLTLASLPTVPVPASLDPGFVPAHLRPGSLHFREGISYSLTQTGIPSVSTRAQLVPMPGTLPVATHYSKGRKAWLPYRQHPGTLLKRGSIEATQPGSSFRYISSMARTTAYAEACARMRSPEFRLRHFGSDLTPGYPEVFPGWAAMCPTPVRVPCAFRQLLAAALPPCTRHFHFPL

SEQ ID NO: 1001694 - protein, 115 aa, Homo sapiens
YKWSSFLKGPTISLKGRCRQLGEGKKCPFENLARDVKALAQHVLWKGPLPEEKVTLETERSGLSSAAEDSKFLRQWVSDLVAPPCTIVDFEGKEAKLSCGLRKEPKNSPRNVGAC

SEQ ID NO: 1001695 - protein, 43 aa, Homo sapiens
MGMKGAFHIPGLPMGHTRPTVIPCLHGGPWGAGAYVHCGPPGP

SEQ ID NO: 1001696 - protein, 234 aa, Homo sapiens
DHENELETNSEEQNSQFQKPGAGEASAQVHLMVPPAATWPCRFEPEDTLLLLSCDADMLGSLGPKEAKKAFLDVYHSFLEQDTRVLRVPVPPNVSLGSLTSTRADLISEDVQTCRLRARRWCKSTAEETVEPGMLEGHSSSKRLMGMTPWEQQLAQLEARVGRDRASYEARERHVAERIAHAPGGDATYHLYRRRTMSAAVVNAIGLYMRHLGVLDQEWTTRKSGEERTSGKKV

SEQ ID NO: 1001697 - protein, 169 aa, Homo sapiens
  misc_feature (15)..(15): Xaa can be any naturally occurring amino acid
  misc_feature (61)..(61): Xaa can be any naturally occurring amino acid
MGATHKGRPTPRTHXSSFDRSHLVVHFEGKNTRRQCESLFFFDFGYPKSFARPPATLGYHXVLEGETPKGPSIEGVGNGRCALWCPCPHGGRRGPYLNSAQSEAFPERHQGRLWGAPGRTGQYARHKLCLPLGGPKLSCRVCGSPQKTEEKTRMLKSGNVRRRGIAVTH

SEQ ID NO: 1001698 - protein, 329 aa, Homo sapiens
  misc_feature (60)..(60): Xaa can be any naturally occurring amino acid
  misc_feature (121)..(121): Xaa can be any naturally occurring amino acid
FLGFSLVLSLPETVLPVPPALGTRRLHRVAYVVGHRPVRRAQPETQKPLNPGDEEVSNLXRASKWRATDVWQISSEACLGPKSSDEDAFGPKLRGIVMTNEWQMPFFERFKSTHPSGQGPXIERLCRTQDEEVGDGTTSQIIEFLHGTMLSVAEHFLVKQQMQPNSGDQCLPLRHRMIMIRTLREESSIPVDISDSDMMLNDHQRVVYYYQSHQSVVHLWLASIALDAVKDGTVLRRMVGKEIAVQHKYCHVVGKDNPDASLHGPGPSSRPEYQGVNLQSMQGSSGTSAWSSGLPRRESRKPLKAHGTGDTRRGSPAAISQRCPITQTL

SEQ ID NO: 1001699 - protein, 352 aa, Homo sapiens
WDTKVFPPKRGPVFWKKNLGPFKKPPLGIPGPPWGVPGFKKKKKKRHTREKITPQRGCWRRPHLKSGGGGTLATIIIVAITATKTIKPGDSVALCRPREFFFGDAMSPPRAGFPPYYTHSLSVSLSNSPESSADPLKQTSSWCVSFQKQKRVAPQKRLPLLSIKTTTHVIQSLCEIYINAAAPRHNGGASSSHLPLIGPPSLIYKPGFILHHRNNKEPSSKIIREVRPLKNGWEEKQAPPHLLGGEVKKKRGPLLTNGGNIPPQSWGGGSAQSVCAHQPVGSPGIRGRSSHGRVHLVVHDQQEETVVVEKKPSVVAPGGGKHMMWGATTRRGRPLERRGALFKSWSRHKRVP

SEQ ID NO: 1001700 - protein, 85 aa, Homo sapiens
DRGGCRGVSGGRHEQQLHSRRTQGAASTRIPQSDTIGQDSYRLSAEAGEIIMETMGIQNMLMEMVLKEPMDTDVRAVITILGKFS

SEQ ID NO: 1001701 - protein, 311 aa, Homo sapiens
MRLCPRGLTGAACGHLRRVVGVLWRGVRSLRRPAPAMVPPVWTRVLPCARSPCLVLAPQRAVVQCLSYWWLWHPPGSWRWFSRLLTQLHLTLSGGTCLGSIMVEEQFARRRPVPGLLPGTSPPTCKKSGALPVAWLERTMRSDRAGGLHAEFLPETCPSQIETHERYMVSGTNVVRDPCGPRVADSTESLVLTRALVALTLPTDRLLGLLLGTWLAHFRGQDILRQRYRLPWYQTMTFWALRAWLEGLPRCQCHLALQSSSPCRSELVPFRQTVDLEAEQLNVGTKLDVDVEGLTGKVPNLNMPNLFRPSC

SEQ ID NO: 1001702 - protein, 276 aa, Homo sapiens
  misc_feature (170)..(170): Xaa can be any naturally occurring amino acid
MPFKVCIRSGVAKAMGANQEDMRSLLTGLVMENTLSPIATKTMCAPPETSRAQVCVSHLVTPVQHPTGVYQQGTERIHMISPLVLRHSGNVYPRVETPPVSPRSYVSPVGKTMWARHKSVCETPRLERFYPTGEDNPLLSSPASATEKSTPPHKEGDTESSAPIYYSSQXPPPRKKRVVRGDTCLLGPRPKIVVGGAKDTSPTGCRPMEQRTKGCDRIAIAHTGDRVVVAAHDDTSRRERPHHNGGDDNESTIRREHSLFAQEEGQPAGGGSTSTQ

SEQ ID NO: 1001703 - protein, 283 aa, Homo sapiens
RELVSRFSWFIFSGFRPSPNSKPSPAAAEAGCDSSGWLSLCRCSPLSSFGDVQTLSRGGPPASLRTSSCPPIELLSCSRCLLLLLPHLALPLPLPFLTCLQGGPFSSPWKCLPLPIFPFSLVVFSHFRGELYPWFFSSAVSDVSVPPLSLFSFSLHSMCFPPLSCVNVAYEWPTVPSLSPLFSPLFVVSEPLSFLPSTFVLGEWFRVAKRNHLSSPRDLPYESLSSIRGSPLWVNLHAGISPSPPPQGNPALESRLNQTATILRRSNENFSAKKRVVPYWQNT

SEQ ID NO: 1001704 - protein, 256 aa, Homo sapiens
GYVPLENRRLALLCVWSWAKCLGALPRSGAMKLLGDSAGALGTLRLAFRRAAGSEVLGQHGGAGKLRTGPSPVADLDWTATLPASLRTPVGRYAPHAANRRREGSGGGVRAEAGRAGQTSPFGTRTIMADGQRVPGDWLLDVARSGLGHRSSGAAREWYAIGMNGTRFVRKGDPGNGVMYPGCLVGRKHQTVKDETTVVTVEQYSERDRNVETDRDDESEAGNSVHQYDTGKREPMYPMGLQATKTDKRDRHDDHK

SEQ ID NO: 1001705 - protein, 231 aa, Homo sapiens
MVDKKMKMLRDELDVAKRKTALHDVTERKTGQTHGADAATRGGLTPNLRTTNNDITLKMAGPHHLSQRRIVARHCRKRTPTGEGEWQRCRPRTERLGKTSTKKGSGQIMSDHATQQRRNANERDKQDRAWAPKRAGDTSAEKKELEEHLAGRTNDVVDAGDYHRGRPQRTRARVSLDKYRGSHPRGGWHRTDRVHNTAASTQVGRSERRCTTKGGRNGAAVPTRPCPLGVP

SEQ ID NO: 1001706 - protein, 223 aa, Homo sapiens
ERTRLEFFEGFGLEGECWKLYMGMETFHISNARVSGRKFFHRRCMSGPYRNRGYAVRIHKNREVKSRVWVTTICCVKFQGSSASYVVPRKMVAGEGVNNNNCRCIRLMNNRAKGPAGYPMLERLSTSPESHFGKARKGSFRMGSLANVDNNIIYMGPKGGPLAVDKSTVTSKTPCTIARAKVDITAECKQRCKTATPAFIPRGKCWNSTRKRIAHRRDSTPMQ

SEQ ID NO: 1001707 - protein, 124 aa, Homo sapiens
  misc_feature (27)..(27): Xaa can be any naturally occurring amino acid
MGSYSIRKRFRQSTRNSLIAAASIGCXSRDSFRIFAAIGALRPFGALLIWHATIVGPPTIGSLAVVPSYGGLRVAQLEGVTRCFGARAPKAYGRPPLSRGYGRLCPSGQPPRMRLASLSIGVTQ

SEQ ID NO: 1001708 - protein, 322 aa, Homo sapiens
  misc_feature (197)..(197): Xaa can be any naturally occurring amino acid
AIFIIIVVAVHANVALMASDHIRVGQCSTSMELVCASESARTRQAPMQREEAALPSSGGGGVRCDGKWCVVLVVTMAYMEALLWSVSLFILAWVNVIACLGGANRHCHPSIHPSAGDSEGVTPACLQGLPWRAVNCQSSHQWYAQHLGSQTLPHQTTGVEQASFIPRIVRLFVSTRCKTTGKPLQSETNVPQRLNLXWNPPYGTSNLGMAAGRFPHGRVSSFGLDSLYGGTDAVVQGEEVRGIGLGVEKWFAPLELEKKQANAGLRAIVMAQRAYRPSVPLRSTRVAGGLGGLYLRVTMALGRRKEAPENDLTLAEKEVTGT

SEQ ID NO: 1001709 - protein, 172 aa, Homo sapiens
MVGYAHKKGGPLLTKEVLAVAQSGGNIGEAPLMARPVPGPCSGAQVWCSEDTVPEGLALHPSQWGHGPHASGTGVPADRIPDALVPRGCPRVLRRNAVRIEAHCWRGADSHFMGQAFPQKGSLCPGFARLPRGCAPPLPKRKLNPIPCDQRIPMVVFKGVPKCPPGVLRRTE

SEQ ID NO: 1001710 - protein, 141 aa, Homo sapiens
GTGAAGWSTLCAADVRRQLWELELGPPVGLSMWPAAVQQYGPPPPCRLAPERNCMDTCGGLGCGIPCLTLCPVISGMAPLILSNCCDVLSLNRSICPLTSNPLSHCDWSIPSYQRLFASRPNCHHRSLSSSLLPFIWVPIS

SEQ ID NO: 1001711 - protein, 345 aa, Homo sapiens
MSAAANCGPRARTMLLPSLAGLRPLPDSWTDGKCSLTPCDPCDNPSRLGVPVAGSLSSFWDIAHTQTCIRLTGTNRAYRTHALCSDLATSVTPPNYPNDYTRKDTSNDYTLPLFLTLSGVSDCAHVSTLHLPSHYSPHCKVHVELHHRLMPFSPTPRALTNFTHTGRACAKDQLIGTIAKPVGRLLHPIGPVLTTYRGIFGTARVRVRRQLHGGKKRLFTAWPTTREVNAREAVKLPGTSWGYNTSSWCYMAHSAFHPRIAYGAMAYISPIGPPLNHCKRLLDPTEVSISETHASPGYWNLHLTLRHSYIPCRLALSPRRETRNSKEAYYAQCVHHRRPKAFLLG

SEQ ID NO: 1001712 - protein, 107 aa, Homo sapiens
MRYPRMMSGPGCGRSAGVRCALRVIVDEAQAMRLGTRPELKSQSSGEWRPLLLTVIVLSETLLPTVELFDAETPTFPNGSLTPRLRSNDRKGSVRALRGYNLVKRPS

SEQ ID NO: 1001713 - protein, 229 aa, Homo sapiens
EGGVKGGQRDFRLLELSVSGPQGHLESGSGKVTFPKMKIPNLLSLAVELVGREMGVGVHFPKAEASIQAGAGDGEWEESEVKLNKSKIKMPKFNFFQNLTGERCFHWFTEKLHFFGSKRWTVKAVQSAEPSASPLEERQRPKLFPEGKFSLFKSKKPRDRQIHSSDEREFSGASTPTGTLESEGGEVSLERCRTRYRVNTGQLKLQVPFWWTWGQEQGSLMNGDWDRID

SEQ ID NO: 1001714 - protein, 258 aa, Homo sapiens
EIREEGKSGVWKKLAALPNKWQAAQVMELLVIPEGQRVSALEQLKKGPVTVSGPALNEALERYIRLRSLEFSRLNFSGLPAIQLRNLARYAGMASVKYIARMPQQRKLAVLTAFVKAQEITALDDAVDVLDMLILDIIREAKKKRAKKKTQAPLKDLDQAALLLARACALLLDDNTDVPDLRQVIFKCVPKNQTGESESKVNELARPQNNIFHDEMVEQTVGLNRFFRPVLRDLHFLRHRQVTMYWCDSLSGRTEWVR

SEQ ID NO: 1001715 - protein, 114 aa, Homo sapiens
MLWALLPNPLGGHAPKKPPVGGVVILLPCATPLGILGLSLLRALPAQNSRPRKGPPVGPLGLLVFFIKEQPSRPGNFARFFPNSSLALGGLKAIQPRLFPHRLVGLGSNRGLGQ

SEQ ID NO: 1001716 - protein, 159 aa, Homo sapiens
MPVLRTVLNLDTHLGSAGRLNIAISRVPPRRPYRNWAARCQRRTHGRRPERMFISCARRGLRVFESGAGFAWAFGKSGVPQGTRISGPIIVNHFRNVRSEGIAGRNHRKSGWEAPQWAFRRGETTYLSTCVFRAEIPSLVPRPPGTDGKTSRIRGILSA

SEQ ID NO: 1001717 - protein, 206 aa, Homo sapiens
MLAAVCWAALDQESCQWQCERNESSAVSLVELQIVLIGLGESQREESKWALLGGTMLDDTKVHEGMPGRNELSAQAIRELEKELQNVVVAYLSSWRATLQALTGLITMVFAAAGISHPGLLGPSLEAEQVSIRYLGDQDGGELAGCKKAKEAMKAQMAEKEAILQSKEGECQQLREEVEQGSNVAEARHRELQGSREPVQQQIQLN

SEQ ID NO: 1001718 - protein, 146 aa, Homo sapiens
  misc_feature (35)..(35): Xaa can be any naturally occurring amino acid
  misc_feature (55)..(55): Xaa can be any naturally occurring amino acid
MQSCDSWHVNVQCISHACCVYPRERVCSTIVQLGXRRPEYMVKVPYHVSLVQCVXHPRLLGRTRMTELELPIHETSMLRHVTSSWKSLDTSRGEIAMYDRIGRGSWHVGPRMNAPSKWLDLKESRSDTLIIPFTDSNGHEASEAVW

SEQ ID NO: 1001719 - protein, 316 aa, Homo sapiens
GTPGGSVVSGGGAYAFGLRGSALAVCLDSAGPWNHVPRPAGTGSAALCVFPFCCWQCCRCSGRGIRDYAPITCTSRAVLNCATADFSTAVIDVGLASNIPLVPAIFKCESENDHSMHVRMMHETVHGCSGQVSSLCMARSQPYASYYVEIAYLLSGMDGTKSGQDSSHTRKVVARPLCAQGASMEVQASGGWADELMRARHPTTGAILWTKDDYLVLALTWKDTFGNDGEPDVRLALLSPSGPLSRMQAIAVCAEWGFDGFFIWRAVELSTITRVPMQDTWKDGSIPRYVPGTSSEVSERRNRFPEMVGTLATRPG

SEQ ID NO: 1001720 - protein, 322 aa, Homo sapiens
CALCMALCRTPREAVSTSSAPQCGWWPVQLLVRGSEKKECGPGAGEEWDVCLMACGPGKVVGACCCDVKGLPVLRSCSCGGPAMGPAGTQTKPGDAAGLPALGGPSLPGPVRPNAPERPCAPALGKAGSAVPWAALALWWEVCDVGTRTEGSLGRRGLGGCRGPGSRPWQREAILLVGDCAWKRSGRVPGLSRSSVKTSKTLLPPAETFNPEDFPGVAEIYIRGRTLVDPLGGQLPGRPTLNGTREVHVGLCPRKASRVMHLGGYDPPKNGRDREFNREKRALTGIRDRGDGETKPIWKELEAFDVDDFGNDCGEYEALISV

SEQ ID NO: 1001721 - protein, 86 aa, Homo sapiens
  misc_feature (37)..(37): Xaa can be any naturally occurring amino acid
MQSILRASSRGHLPASFSLVNTRRRKLRDTFDLPRNXLIHRNTKTLLREAHAATIQDKGERTPRERGDWPTTKVGGTACGKRLRAA

SEQ ID NO: 1001722 - protein, 117 aa, Homo sapiens
MALFREGNPRAWVFAPQNTLREEKCFWKGGVAYRGRAGWSRCAMFFTERVCQIAKASVCANFYSDTPTPPVEEETTSRHLDLWLSPRVVRISNRPDYHVGGQPPKWCGVPIDTTAFA

SEQ ID NO: 1001723 - protein, 112 aa, Homo sapiens
MGPNQTPDLCPSPWPCGPVVSKRPKRRPRRELVGFTPQVKADQWSRVDLWCKNTKVLIWASEGPALRKRRGNPRVTAQPRGHRNRYGIQRPRGQGDKGGSCRANERQDTKTH

SEQ ID NO: 1001724 - protein, 254 aa, Homo sapiens
RKEEGSKISTTAEAAQALGPVPRLPAARLLAPAPTTGAQASRRRPGSRADAGLIYYSPSPGAAGFPVLKIPRTSGEGYPLFAVTTPFPQPGWRLCRRYPADHELSTGSQTVHEHSCKVCREPARQRAPTPPVTLRTPGEDGEEKDADPSESPTSRNRLGDVYTKAEVGLMKQGVMSVSVLCDCDDRDSSVFNQSRYSWSSTPSDRTWTKVLLKYTEYNEPQERPPSADIIENLRKKGFNGWTGPSRREDSREQS

SEQ ID NO: 1001725 - protein, 113 aa, Homo sapiens
  misc_feature (107)..(107): Xaa can be any naturally occurring amino acid
MATSWWLSQKVNSHVEKSPAEVHVTAGILLLTEGTYTPDSEFVGHPLDLRSPPMTTHAQTLLEMDEHNILILRQTSLQNWRCAVYGVERVACLWEITFPCRETSDVXVKATVA

SEQ ID NO: 1001726 - protein, 337 aa, Homo sapiens
ESEGPRSALLRHLAPPQMLPSWAATRRRGAAAAGSRGLSRRRPATARSQREPILLRSGGLPGAPHARQRSYARVELSASLGGLGGGRSGGRVARPQWAPCGLAARGSACSSDFRPAEQLEATQATIDATSAGFLHFHSVVPHTYVLALTSPQRPCKYATLRRETPGDPSPRRIHRVDVFPFAEPRHCGSATVVATPLASDEARTQVNWCGLSPGVLPITQARFPVTHTHRTFVVPRRYNRCGFHAPCNLTTTFAVGEHRLRKQVIVNEVEGGSTHSPFVEEETCEPTRRVALGENAALATWYKVESKSLTRELRCGPAIGLPPYHPALCTAWGPHVS

SEQ ID NO: 1001727 - protein, 123 aa, Homo sapiens
GVFPSSVFLCSPRQPLSPAPVSYLRDSRLYALLGLAMPGATSSKWSGPSCRLAYEVRIDVERASNPSCTVTYVLGAGSVGDELGQKCVDAHTPGVNAIDSNQHFTLGLVLTSCAMLLYNVCVR

SEQ ID NO: 1001728 - protein, 335 aa, Homo sapiens
AAGGESRRGSGDSARGRWLCSAREWSCGPGLLGARARPGVLPAPAVSAPLVRLRLCCSEGSAGGQWSRGPCAIAGIAAAVSVLLARMGPVAGGQSSLWLRALRPAQRRPGLEEPCWSQARPKPGGRLELACRCWLTSKRLDGALAPDLRCKARERILRRKPGAPGDRPTGGRDVGSRGAPLRHYATAANSARLHRSVLTIVPVLGILDLAILGSGTSLCSIQWIRMSSLACDGCPVPRLRNSPAVVPGPPCGRVAPLGPRVAAWGGTPGLAHAGVALAPVARAPPRCGLQPRVAPPKPLVPLGPRCGCGPGVRVRKGKACSTTVVGIQPIWQHVA

SEQ ID NO: 1001729 - protein, 56 aa, Homo sapiens
MNRDGLVEGTRTVNTHMYNLALCVAGETQRRPCTIQVTRPIRPQIETFLEPLPVWR

SEQ ID NO: 1001730 - protein, 212 aa, Homo sapiens
MCLLYILIFLFILYYFFFILLFIRERERERERERERAEREREREREEREREREIFSYIYRDTSDATRERRDERARERESISHTTERECVCARETSDARRDKRRERRDAGRERSRTRAARRHTLLHNNNTTHAPQRRRQKNKTSEARRHSAGDETTQQKRRAGRVDERHRSIAEEERRTSSRGAAHKKKRQMLLVPPADEEDEKQKRRRRKRR

SEQ ID NO: 1001731 - protein, 116 aa, Homo sapiens
MCTWVGPLQENDYQDFSVVSHDSLDQWRAPMVHVTIARSTKCSYALPSYYCLYAGEDDPEHNNTLAHRIVIGDEASMVKSWIVANLRRRKRMRDGYHPIRFSGRPFRKIEQVASLI

SEQ ID NO: 1001732 - protein, 138 aa, Homo sapiens
MAIKVNWYQTFYHKTCICGQRRSGPFKKKYLGRKTEVSNKCYDAWRPSNQGLTAATTVSKHTGGRKKKETAGAEHEKKDRAGEIFPPNGKKGGPGGGKPWPASSDEANSRREREKYVKSENKTGGPTHTGGIPTDRRY

SEQ ID NO: 1001733 - protein, 67 aa, Homo sapiens
CTCFTSLCTMCRWRDSWGKITVLLLPHMRDTSYRNAGGVSRNSKSCYKDREDDRIRSCELLNSPNMA

SEQ ID NO: 1001734 - protein, 83 aa, Homo sapiens
MDWASPRGRVAVARSTARASELQGLRSRVLGTGTVRWLLTERENRLASPVTEVLDGGRGGTRRMLTCADCRFDLRGCGFLGTL

SEQ ID NO: 1001735 - protein, 95 aa, Homo sapiens
DRNYSSIRILFLLVVLSIKISTADFMRIDRIERSRTPRMYNILTDVDPDRQCCLFIQFMSSHYCSYISIERWSARQLNRRVEEPDQTQLPRATVL

SEQ ID NO: 1001736 - protein, 158 aa, Homo sapiens
PGVCRRAKSWLTEETKCGLRDDMNVKEFRAERRTLPRMSSQLMNSGSSTTGQRRRLTSASTATVNYRAHEHDWHSATNNVSTSSQLLRHRRPALPYYNTRHNYLLFSRRTQPLLAPDTRTSPPPRTTLGSTLSTYRTTAYLLHDQGRKLTTSFPISSQ

SEQ ID NO: 1001737 - protein, 120 aa, Homo sapiens
  misc_feature (84)..(84): Xaa can be any naturally occurring amino acid
  misc_feature (102)..(102): Xaa can be any naturally occurring amino acid
  misc_feature (111)..(111): Xaa can be any naturally occurring amino acid
IRRKLLQCANRDVDVSFEYCCSFIFSCASPDELMHPMALKLLDIHLAVTNWKVCMPLLSRALSFSKLRASTHARCHVIYATIWXGTTLCWDFMQDSTYRLAXMNAYCSVLXTLAYRLSTT

SEQ ID NO: 1001738 - protein, 143 aa, Homo sapiens
MSSFPGLNYSCLYHHRAGMRESEKSFYRLNENYNEKTKRFYKEKSEKDLEHKEQQLEQVLEPANLLAEENGRRIFYLNNLSCSGSLRNPNTGFILIHSVYAFDFRVAIDFFSSLHELLTSASYTHFYLALLYFTGHLLFARTH

SEQ ID NO: 1001739 - protein, 100 aa, Homo sapiens
  misc_feature (31)..(31): Xaa can be any naturally occurring amino acid
  misc_feature (41)..(41): Xaa can be any naturally occurring amino acid
  misc_feature (45)..(45): Xaa can be any naturally occurring amino acid
  misc_feature (90)..(90): Xaa can be any naturally occurring amino acid
TIRLERGPGRKVKHGHRLLCLGESWYSELVXWNFISKKYIXTEEXRGVAERNARVEILRVHYLECYQQESKRLEGIVLIEEVYPTYRHHXGTGPHDPRGN

SEQ ID NO: 1001740 - protein, 185 aa, Homo sapiens
EVCAVITKKNEEESTCSVIQYRVFVVVSLYKKQIRDFSCGATAIVPDGHQRFNKLIWIHHYYVHIHLTNQLRDDCSQCFSRLDTDVHPLDNFAQQKGATTAFIHDTGPRAQKPSKESKITPYQLLDAIELQPSTHQPPHIEASLQVHSNVLLDVARVMLLLLTHYYYFISFLLTRKRPPTTINNH

SEQ ID NO: 1001741 - protein, 102 aa, Homo sapiens
MRPLRVLFSWLSFCRPCCITRHHLVAMTQYVSFGTRCMPRLQQRTCPGLGAHEAFYPIIALCLGRHCMNVHHLAFTSVVLRVHLPNTGSLSRKRHSWIYPYA

SEQ ID NO: 1001742 - protein, 102 aa, Homo sapiens
AAPEPRKGDVACRHRRPRYVCHFQFFTSLLTVILLLICTCAYIRSLATRLLDREFYWIVARIFRKCASNSVERKSPYVAVCCIVTGLQHPLHISSWGNCQQV

SEQ ID NO: 1001743 - protein, 235 aa, Homo sapiens
ERRRRKGGGETRLVVLLPECRRRSCCCQQSCAAVLTMSVPPSLSRLRPLRQQQQQLLRKMAVICSPPAGLKQFPGVELPMNMACNGNDHGNGKTGGLRTRTILILHPQWRHGERYFWMHNIESRTDVVPDARSHCDSPSPQDRWARSCPRLWKCTPAGTTSSQSRRRRRRMTRRTVSGFDRQVPDWRITTGPRETRNRVPPQGSFHFSTPYTALLSRSTEENVHALTKGGITSAT

SEQ ID NO: 1001744 - protein, 77 aa, Homo sapiens
RAWSPALSPRRALVEFWEDGRRSHQSLRTDHIEAKLPNEFDGHALRYARLYGNIITYRGCIDMNIPDYFSYSHERID

SEQ ID NO: 1001745 - protein, 358 aa, Homo sapiens
AGGSRSPRLRGAKLLDLFLSSFAYTEYIESSQHSYIRLRYRLVTPTFYSTDKLYLAHQSRLQEKHVLVYQWFTQQVTLQVTLPAHSGTTQLTPYPMCDLELSAQRIAMRGYHSGNNGCTPQYRYSNPHGRYNTHTATIPITNQPPSLPPATCTQPTAARHLRLTLNARQPHPFRLHNTSTDLTEPKTEPTLNHGTPPRNMSTQRTCTRAHTHPMARALSQSQPPRDVPFNNDRPTVTARGLYTQLQAPTPPMSVPNGCRDTVGRPGPTPLDARLPVTRYAARPLLEHSHRLPHPLPAKLQSPGVPNRVTIHRQNTTAPITEGTVIRGPELHTLHERAVTRAPASRPSQQTSNDVAQRR

SEQ ID NO: 1001746 - protein, 72 aa, Homo sapiens
MTALYSECDAGTFIRSPGYNVSTLCTHCIICPRAIRSDCIDVCSGCCQWTNRAAYEENRGFHCMDYDREHIL

SEQ ID NO: 1001747 - protein, 344 aa, Homo sapiens
MRTDFSIVREGCYFRTREHCVSSTRLTPLSSAYPLTLSRIRTMLQLTFNTLCVTGTTLRNCADDPSSTLRDFTSLLIGLRVYSGNSTLWRPGVLPRSTDVELAELTHRHTLTLLRRASLRIPAATYQPCAAPTMLAHHSATRMHLNFSNSFPTNRPHQALPHYHFLPCPALLSLLSTAPLKLPLLPLLCQLLLQPNLLFTDPCNPPPMRSPSILTRHIFLQRCARTAHPLGKGLLCTNHQQAPVDRQFLVPLPEPHFCGRDLSSTPGAPGHAFPYSRSFLHSGPAAAWEPPLPSSSSPGRCASRLLSISPQDSYFFLQPRGVWLVSPLDPARDCLYYKPPQGPT

SEQ ID NO: 1001748 - protein, 239 aa, Homo sapiens
SGVGRVRHCRALRGLVRGGWQRRPRPPGSRVVCPQLFSRPVSRLDETGSRVPCASVATLWLGRLGPEGTMSTLRPDARLPILGRIRPLVTAERESLVRPRSNPAGRGRQPQPNVTGKDGGEGRRRAVRTAQLALGRRGAAQVEPASWELGDADDDHQCGCSTRLQVPGRLAHLSRNKGSCYGARGPFRQWETPTVKRRSTDRQYDGRMTEWIRPAGGTDPAKEVGKLGPCRKRRKSADA

SEQ ID NO: 1001749 - protein, 116 aa, Homo sapiens
MTTREDLGLEEDQFEVPLREKVWKRSSPCMDCEEKRSELKGACLPSIISLRAIHDGSTRKSDGVTNWVGLFEFLNVGNQWYTGHFASGKRDLPKGFLLRFFQGPLMVWGKQLKAQT

SEQ ID NO: 1001750 - protein, 245 aa, Homo sapiens
RRVSSRWEGSYDSREVVEDTEGTEGRLRSAHKNSSEYTIRGKMNWAAFGGSEFFIPDRHSDRFEMPTKQRISRNGTMTMALQCTESSQYDDVMYSKKGAAWVTLQHGQEEVMQYRLVDHIHPGPNSETHAAYEFPNVKRSSICQTCLPEEKVATLSCMMSQNTTVREYWTTCNKSQHLTEVSNDFLSCYILCHRQCRSHMTALVLGSSTAGEHRRRVVTTILYKAILRGADASCAAGIPGQLNIS

SEQ ID NO: 1001751 - protein, 81 aa, Homo sapiens
SGREIILRLLEKIAPSSADMTSTVRDKRVGHDHGSARVMSLRHEPDGRGKHTPVNAAIEQLGATTWPVGWLRASEPMEPGT

SEQ ID NO: 1001752 - protein, 244 aa, Homo sapiens
ERSVKSKPSHEAEGRLRGADATAGEGDGALARGLGRTTVTLVARLLELQMTEVHGQLYWHIQTDLRRGGSPHRPDEGGDQEAGNDDERVGIGANKQLQPCTEAGREATGECEACRPATRAPIRPADLLVGRGRRRTRVITTERHTLRAQQRQYQHVAEYQEEGIVARGHQGLLRPLYNTRNHHAVNAIHIYYRKGSIFTSYKQQCKGDNNTGTLQFMEFPEHRIHATTTILCNMQRLLTLETRR

SEQ ID NO: 1001753 - protein, 116 aa, Homo sapiens
MLALSCVVCFGPFLLGGFRLAWKSLVSASLYGGPIEGLHRKIVTGWLEALVIGSGGDRVLQRLGTIPQHFTLMSLAPGELKLTSAQCTRKVGWDSWRNATIGRPFRDKLLWLQAIM

SEQ ID NO: 1001754 - protein, 88 aa, Homo sapiens
MIFIIIATEAFPGWRRGPVCRLPVDRPFAVVACPDPRSACVCALVLFAHVCVCVYACVCQAQDAVHDWLFFLPQELTEKPGHCVPGPG

SEQ ID NO: 1001755 - protein, 192 aa, Homo sapiens
AERGPRNMRRERGPGGTPELVLLPPRSGAGPRRAASFLPSSRPARPEAAAEGRGAAPPSAAPPPRAGAGGAGPASASRGGSMRSCGAAGSELRIRTSLAKDSLRPTMHRGRAAFEKAARLVQDGGARPSCLTRALQPKSPCQFTPEGNAYLTRGTLTQYSSLQKTPVLERQDYKLCCGNAFSEISKRKSTFI

SEQ ID NO: 1001756 - protein, 362 aa, Homo sapiens
SGVRRKGRCRAVWRLACCADADVPARRSLETSRAAAAMLPMDSAHVSLGRSRPMNAGSAPCPAGGSCWRTRRRDAGERYGRSWRRSWCRLAVVRLAVRFAARELPAALTECRSGERAGGWLARLRSKCGRALGVSRGRCRAACPQGRWHGGNREALRIRGSMLRRATGRPDARRDMRCKQGMRCDPGKPRTGRWDARPMPWEDLRILTLVWGPKGEASRFDTRGDPTGESRPDVCAVADRVYPRALQRRQLVLALTPEDDLRGPTFVLGTTLSRGGNAIARWAGHFAGFRSCHGPGGRGPRFGNGVPRDLDSRFRDSHSLGPPFSRVWAPPEVLLAWDHSVKPPQRPVCALSTCGMKPRMPP

SEQ ID NO: 1001757 - protein, 199 aa, Homo sapiens
SGGSRDLVLRLGHLHSHCLPVLACLDQGPPDCPMSPCSEECCILCPAWRARPEATVVRGADRMLLRVWCLTVAGAKSKRLTRAPGGAERRRSALVGLLGDSVESSARQSPGGPKGGVATLSFQCMVLPDAGPLLAAVLLAKRTAAVPVRQCGAGTQDTPQAGCELLHAPLRYNAWGEGELIAGRGAYSRAGVPALARHP

SEQ ID NO: 1001758 - protein, 74 aa, Homo sapiens
ERRDAVRRPKMAGGGGSRKARGGVPAAKAGPTRLAADRSGSYCAVDVTWRQRASAAVPWAGSVRPGSGRQWDCS

SEQ ID NO: 1001759 - protein, 104 aa, Homo sapiens
MVVPRDAEPKLDCTAAIIGSLLTSLPDSPASAVPSAWDCRRAPTRLTGFRIFLVETGFRCVGRAGLQLLTASDLPASDSRGAGIADRVSFTSVRQCCPGWSAVA

SEQ ID NO: 1001760 - protein, 142 aa, Homo sapiens
MNSEYQPTRRKKKKLWTRLNSWRKELQVLHSLRAVTLPARIGGFVLEVRETNNLLLSGERSREHVLVKETVDKLLKGYDIRLRPDFGGPPVCVGMNFDIASIDMVSEVNMPSYCGRCLASGIQSKGVKTQAEEEIEEQTGTR

SEQ ID NO: 1001761 - protein, 114 aa, Homo sapiens
  misc_feature (93)..(93): Xaa can be any naturally occurring amino acid
MEEQGLYSRRPAFLLLCHLPLQLLLAGVVWGYAIDRIFDVLLPRDWQMVPGRGLPNLLTFYRRSSRKPSSHRNACPPMPSELWLWLWGLQELXTTSLDPCEQAPRPTVWQTSTS

SEQ ID NO: 1001762 - protein, 155 aa, Homo sapiens
  misc_feature (90)..(90): Xaa can be any naturally occurring amino acid
  misc_feature (92)..(92): Xaa can be any naturally occurring amino acid
SGLGAGGRPGGLEQDGRTTWSSGCVFTQTLTAMRLSAPRPPLWRLLPLLLLSAWPCLDGSARSLTCLVSIRVPGGLVDNVSTQGYGGSPXQXKQLSADADITGLRAYAREMQRLVTHIYRCSHSRNIGLAWMTTCGGCCRDEARRIYREWRTSMT

SEQ ID NO: 1001763 - protein, 110 aa, Homo sapiens
MRTLILLGFNSYYVPALELVDSERCMALTGAVPGVVYVGCRELEGMDEEMSPWNKEAIKLGRCVYTRRGENREERHGSSPAEDVTLQQERRLNRQIKVLLRTRLSKSVFE

SEQ ID NO: 1001764 - protein, 192 aa, Homo sapiens
ERTFLMLRPAPHPQEAPHSGVISPESTSPQAETAPRSRRPRSLPPWPLTLDGLPPALQVLVCPSRVRSMGALSVPWTGYWLLPGSLLGSALLDRLPVGDLSPSVWSPHNTERGLAGMGAHIEFNWHPVLMVTRVRPSSEGIGHSSSYRLTVDLGNAASLLMKSIHAGLNAGCCHSCNNLCGGRVMRTTMLTI

SEQ ID NO: 1001765 - protein, 169 aa, Homo sapiens
RATRFRGRGGGGGEGAVRPAGWGGGEAGELCPGCSHSPAAAANPRVRSSGHLLVPGPVWDPRDAQERMAVLRCVESLTGPRPRRQESQAGQPGGGGGAETRPSVASQVFPREREARLAEATDPSQPRVSELLQQSPVFFLAEGCFQRGGSSEDSSSPGVSVSGKGLDGR

SEQ ID NO: 1001766 - protein, 94 aa, Homo sapiens
MKLDQFGLTGSSYSREESSSRDHEATFLTICVLLKLVLREPWYPWEESSMSSWDETSCHILGVETRTHAIGFIWIDPGEADRRGFALNRLGPVG

SEQ ID NO: 1001767 - protein, 98 aa, Homo sapiens
RLPFSLCILSDAGHSSARGPTRAHLDPTLGQPWCGGGRCRRGQVTVGTRSLADLSEAVSLHFLVTESHSVARLEYNGAILTHCNLRLPGSSYSPASAS

SEQ ID NO: 1001768 - protein, 283 aa, Homo sapiens
MLRKLTIEQINDWFTIGKTGDQVWMLLVRCQPAIPCAGVRAMCEEVAEAKDCGHTGSQVTADHGLTDSRTKRLLALCQRLIAVPDTVVTSSTNMGSVHATYDAHYITTKGNTEHCIRQAHKGRVALYVGQHVCTETQKHKWRTKVFQQAHVHISAVNFTRHVSTVSFPTVTNRYLQAIAALIAILQLGLRKDRRIDDLMDRQVNFPMVDISHVGPPENAAIKEANSELPDRYYSRDTHTDTRGYTTKLDSTEEGQPQNTEKAYGGKRGTRHTEASRTRSRCLD

SEQ ID NO: 1001769 - protein, 298 aa, Homo sapiens
  misc_feature (81)..(81): Xaa can be any naturally occurring amino acid
MGLSFFSKHVPHPGRPARGCIEDSRLSIISTGWRFSTQRESCVADRLIRAGGSLIFQRESESVKMQPTQSQELKIRLLYRXIVVLELDGVRSLELLLKGCLRCIEGSMIVGIKWLPQHERRPLTPCPPKRIQTYQSNWKITERRYQGPKEYNLRERRGETERTVSTVTLSCEVPVLNAQGSDGGKVSPRRIFASGHNYHINSISVNSDCETYYVGDDLRIKLWAAGHHRTRSFNIVDIKPGQEWRDLRERDHQVSEVSMPEPLEPSWCTRSQQGPLGVWDMWAGCLCDTASRALRAVE

SEQ ID NO: 1001770 - protein, 105 aa, Homo sapiens
RRAGHGPRSAGLCPVCVVDPCGLTVCSSRSWRHPVAGKLGDLLLTCERLALRACEALIASLLVVLGGHQLPAASVPSFIVAMGVVAVPYGMKHARDKVDKQVGGE

SEQ ID NO: 1001771 - protein, 271 aa, Homo sapiens
MVPGNVTAVKRRHWLAIYCIAGPGVTTRRCSHYSATALPRALLTYPTLNYALVYISRLQRDPIRALSTLCTAPPRLSGTAPSPCVVSSSGNLPFLFTYDGVLNHCAHATRSPPTCRAQLFNVTLQLASTSWTTLGYHHRALSCYNREPIIVPQYLPPPKCERPLSRQPASRRRRPRGRVHPPRREEHHKRYLTHMHLWVPAKHLSNAIWAPLSPRPPATPSHCSSSLLPLSYPALFTLSAGIAVPVSSEATCALSPCGPSSTNQILKQHAF

SEQ ID NO: 1001772 - protein, 135 aa, Homo sapiens
RRSDGEGGATDSWRAEEAAAGCPVLDHECRSRTAGDPERCSFRRALHASGHSQLPDSRPEFPAVVWRHRIDTCYASVERTQFELSNNLYAEAREARGQSYLEGCPACLTAYTIGSYAWKLIHEKVLKKVSTSTFK

SEQ ID NO: 1001773 - protein, 117 aa, Homo sapiens
MRSRGDVHAKRWECASGDRYSENADVVQYEVDVKKDWGDEVVSLVFPPKNVANDRNKLRRWMKLRREIRGSGTAVSAGSLARLTGRLRKCRGCHTFTTKSVLCDVLVQTRGRSPRGN

SEQ ID NO: 1001774 - protein, 118 aa, Homo sapiens
SGTCKGTGVGRSAPQPVTSCYRPSNLGAFRSLLLRSCLGLPVIGGIDSGPSASMALGSLAPSPFPPRGDSLPGEAVTPARSVTEGGIQADITYLIKCSDMRLRGDGLVEAERTHQEEA

SEQ ID NO: 1001775 - protein, 216 aa, Homo sapiens
  misc_feature (86)..(86): Xaa can be any naturally occurring amino acid
LDDVKAGDEIETRVSVGTTAMKRILWIVSYGDYPMRPLLCVDSLCILLGPVSRGSKRASGTYYRQWSRSACECLEEAVLDVLQAGXHPSSHPDVVERSTRVGAMGRGGAGTFARGVPTAVASGGPTDPGAGHAMRTEGEIHSKPVKEPMRKISQASAQRLTKHYLALVVQQWLSARPNYRLNLSKVCFLLKTTVSSIASTGNVPFTTPATRCDLRC

SEQ ID NO: 1001776 - protein, 238 aa, Homo sapiens
ACTHVRKNDSRTPLSFLRNHMRTPIEWHRSVGQKQRLLAYRLWQQVVQRRSQRRVVQVHAGRRASCHRPLRRESCSGLCGVPYFGRIIESANLSDLTKVRKPTGNCFLSHQQRADRTLSTRRELPDPRGRTYHDRCVQALETINLYPENVEESLVKDGYFPTVIGSRFGRNALPVTCGQPLWRYPPKAKEHGMHNNMTLNATLVKGYTYRRRLEGQKGECRARNETRNRKLQMDFPGA

SEQ ID NO: 1001777 - protein, 73 aa, Homo sapiens
SGVPSEEVAAAMVALSVSAAPISGPGHSRGHRVPVGQMRQSPPSKIDAGLYSSILSLLWWAVWLLDMLLLGAL

SEQ ID NO: 1001778 - protein, 171 aa, Homo sapiens
AESSSRPGNTSSSSRPPPPPPPPRLPSSSSCRSPLSPPPAPARPCAPEPEHQLLGEAAQQREATCHQRRRRRRTSTRGQQAADSQQQGQDQQSYILTRLSVWSGLTDAGLTTILNEPTLVYHLKERNDNSHQQRAKLSQLTVPYRPSSTHSIAAVTCTCTQDNGKSQHMPM

SEQ ID NO: 1001779 - protein, 130 aa, Homo sapiens
  misc_feature (71)..(71): Xaa can be any naturally occurring amino acid
MVVGECLVRSIKALKDYTLELWHIGIKMWLILLSPSQITCIAVELLLPGVLHYTRIEVGIVIVSVWKRLGXVLFAWSASDAHPQMAPGGLNQRISNRSSEDDEVASGQEPVQIPVWDIQKEPKRPVTSEL

SEQ ID NO: 1001780 - protein, 115 aa, Homo sapiens
MHKRDPFASSAANPNIDRFLLRPGTNHNSWQHFYNKGRLHDKRDHADQRKLNILSASSGTKGQHKDNTTNFPNTAYLRSPGKISDHYPREDINNDIFTNKRVLALKRTKHPNSDP

SEQ ID NO: 1001781 - protein, 469 aa, Homo sapiens
RRARLSPIVTPPEDPSVSAPSIAVLPDTPYPRHTRKRSLPAIHQRDCISLIQVKKSIAITFSSPQFLFLGCMHIAILGTSPNVESSLSNRCHMQQVMGALDSIYGVLRTRMKSYMTLVAYHTYSGHVMLSCYVALVKIGQTTGQDLAHAKERIGRTRYAGDQSYPVACLYGDSGERLPITDLSSLTLPMGLSLIGDGTRRTTSVDRQTVGTLLEASHGDHVSKKPKPLVSSHKLHTLAQDEGEHRPKYALHIPLVSGKLNDFRGEPGDTERRARPTTHSTIGKISSDTRPFPFLSHCECRNPIENLLKNIAPTPSPLVGILGRMVQHHGVHSSYRKRNPQPFEKCHHKRGYAEKNVGNLTSNFTGELLDGFFTSAPMGPVPHAASYGAQNRYMQRKAPVMPLNRIAPNERGHSADTPRKGLPNTPAGKKSHKRGLPLPGTCNQKGGPTIPPVKTPGPNNQGTTQRATQF

SEQ ID NO: 1001782 - protein, 340 aa, Homo sapiens
MPLTQTRLHVDASGCGGSCPGCACDIWMTDAAVPLGFLLHVLGSTQCCKLEATLRSYLAYHSHHLISENHWDDGLDVTLTRGTEARPRLAPSSTTIRKRELTHLHPDGYTSYTLLILSLHAPSLLLCSTLASTTPTLQPLPTDSLVDLVRASTRNLLHAFTHPKRYFFLQSLQNSWTITIEYSRDNLVTHGWDIPSGAHTHIPSPRCTVNFTFGNPWRRDFPGGSQGKNQYWTGLSHTATPCTQGMWAQLFGDNQRCINSGEEIWQLVLVLDLYKWPPRAQKAIGQAHTRERHHIAEHPVDLCGVSAVVLVNRRASKVYTWREAQCGSDRSQMMQKQRRQ

SEQ ID NO: 1001783 - protein, 427 aa, Homo sapiens
ADIQAARAGGRSENTLFSFTKMADGACFRFTSLLTSLLMHSVCVLDAGHLEDLGIEGTDSLGQDVHQSRKVLDRTVTVSGVTGPGSRVTGSCPVLRVILYVMSQTHCRYRCAYVIGLPHDDVLCVNGQKVWRMVFPDRLIRQDSYASSYQCAVTTEDAMLIHNSLPKGTAALTLRNYYTLSDYTLCLCALRRVCPIGERTGSGQAPLWVEIHRIQQTNARLKKDGSSVHSIGSSRIGSTSVARHASFVERGTKRKEQVAKRGTYLDSRTVCTGEQTRLDLEAKANRYGHYASTSNGPAIDTVGVGLQSYAGSTHATVSEASQSRELLEETAFYQQSHNVWSFRTRGNWGHMCVTLAGCVLSLKKNVIRMYTVRPSLSLRTHERKPSVEAKLTKSALTKDHTSCVTDTLVIATIIRNTRPQEWRSGML

SEQ ID NO: 1001784 - protein, 219 aa, Homo sapiens
DRVASPHRLAPPSVAAASARWPCPPAAAAAPERGAPAAPRAVSAGPSCRSPAPGPPCISDAAATPCGFGAPAEPPPPPAGEGGRERSPDTAPGPRDAGHSHTETTALIHQNRPALTTEPERSKTQAMRRRDEAEQSKAPEPAASALQHTARASPPPTGPDTACSGAHERQRLAEQTYSWAYSLVDSSQVSTFLISILLIVYGSNRSLNMDFENQDKEKE

SEQ ID NO: 1001785 - protein, 60 aa, Homo sapiens
MCAHTGSVNTEHKSVLVDTAWYCVHTAHVCELKECSWTPGASAKCVYAGPVWCQGELERR

SEQ ID NO: 1001786 - protein, 121 aa, Homo sapiens
  misc_feature (18)..(18): Xaa can be any naturally occurring amino acid
MGTVSIPQWGCLWGCLYXPTISLFLRGWDLSVESVSRGKKRSAAAAAQAAVGIWGILIRGKKRLSIEPLSAGFSLLSGAQYLGGKKKRGSPTRLFQESPIFLSGGSKIYRKPPEKKESVKV

SEQ ID NO: 1001787 - protein, 268 aa, Homo sapiens
AGLAVETRQLGDADARALRMLRKLTIEQINDWFTIGKTVTNVELLGAPPDIARKGQAGMEVQKPGRWTPALGPAEPGSGSGPSSGPSGRCVRKVTSAKGAQKYEYINKYRQHRSTRSLMCVASVQPTSWARSKAISGYITQCDLCIPGTPYKYPEFAYNVDTRKRKSLLIQKVIPLVDYPWGPREAAKKHSDPAEYLGPLRTEHPTTADKRNTQTRTDRRQAASDRRIRKRACLDPWAGATETPGRAQETSNRGTKRNILTQKSWCEN

SEQ ID NO: 1001788 - protein, 47 aa, Homo sapiens
SGWSGPLPAGPPPPSTGLCQAQEPDDSLPASTEPCFGSSRARGLSED

SEQ ID NO: 1001789 - protein, 400 aa, Homo sapiens
  misc_feature (113)..(113): Xaa can be any naturally occurring amino acid
TAATLIFPYTRTCGWGPNGPHLTVKTPKIVVCSLFFSREISRNCALQKNTFTLNLRKCDSLSRALKCNPFSNLKSRVNEPSGCLSWPKETPLELREQRNTRGSPIAAVGHLSXTPVTRDTPARDTKHTTAWSLFVPSLFEREKISRENHSRAPVNARYNSPEAEPSLYTSPIHQRLQHISSTPEFSTNLPSVREYSRIHQALSEEHILSFSEGRLYSQVSRERAITHVRVLSPFCAQGGKFSHNLPQIITPNVQHNVHTAILAGGPPVIEDAFGPGGNTVDRRPPELSAQKPPVYGHEISPQFVLVQTRGCHTPYEAPSAHGAPPTRISPTTRKHNFASPPRRGLHETNTLRKLPKGTAVATAPKPRADILPAIGPNPGSGTQGPREYHNGRGTHAPKKP

SEQ ID NO: 1001790 - protein, 106 aa, Homo sapiens
  misc_feature (52)..(52): Xaa can be any naturally occurring amino acid
RGGQCLLGNRGGWPEAGIPRLRRRWPAVEPLGRAWLGVTAGLRLAGGRPCDXVYRRSSLLAGYYWSASLALHMSSAMLIGFSSGTTSDKTSRVHPVGPSVDTLPSY

SEQ ID NO: 1001791 - protein, 139 aa, Homo sapiens
  misc_feature (21)..(21): Xaa can be any naturally occurring amino acid
ASKGDFFSKKKIDKMCSISLXPPFPFPPSCAVPPSAPRDLTPWRGAWVWQDSPFRCEAQHHCEGHFPQVEGVVLEEAPQVFSRKRVSLVSLLFSCSTECLIPTTFIGANTAPPSNANLVVDIYSFPPVLGCAGRGSHKL

SEQ ID NO: 1001792 - protein, 183 aa, Homo sapiens
RGAEGARAEGRGAARSRAVGPERAAAGSSRALTTSSPRADDDHGTRRRSWRSTNPARTLAPPMERDEPPPSGGGGGGVGGMRGVPGRCRRGAAVSVRDELGELGPGDVNDRTVSNEPVSVWGPRDEACTMGSSPVRAARGCKRSIATDGYIDASDQNCVMSRKPRNRCQYCVCSNASNGDEPK

SEQ ID NO: 1001793 - protein, 416 aa, Homo sapiens
  misc_feature (206)..(206): Xaa can be any naturally occurring amino acid
  misc_feature (307)..(307): Xaa can be any naturally occurring amino acid
QWKILFFGNPTNLQNLSLAFKPPFFSFVQFSALLFSGGLPCECAFLLLLSSGLVERGHVRQTLRGWCSSEPLRLNSLLQRNPRRYLVSVPPSKRTLLRRGCESHPRFSVWFSPTPHNRALSRAYDTKESHMWSPLLHTNECATQKTPHPERGVSGESLSVCLRDIRLIEVSEVGERICVSLCDTSEAVGPGSLCELRACKPPRVAXNILLYNKISSHHLCIVENLSTKCGARENSRDRAPPISRALNKKRVVLPPHEKKKEALLNPRRAPEENICAKLSPPPQYYTTRGGAKPLCLVQKNGRAEEKXGEDTEEEGRPHRWVGKQHAKAACGGSSPGGRTPGRVVVGRRKHTTAGEKGRYYKDEHHRCGGVGESSPPRVVVFYEDKTQEGRPSYSNNTLFVAGPIFVVHPSGEPHFP

SEQ ID NO: 1001794 - protein, 162 aa, Homo sapiens
MVPFVRAGWTKVPEDHQRHIRVKAGEDRPGGGACGLAPVAEYGRKQVFSKKFRGGSFVRAGGDRVEQLRMAPEGHLDRTEMNPKTDWRIQQGLGRRKARAGIAEARPHANRGDRESRQGGPGGQSLAARPRKTRAPEGTHSRPSNPDHPPARGCTASGTNPE

SEQ ID NO: 1001795 - protein, 123 aa, Homo sapiens
  misc_feature (57)..(57): Xaa can be any naturally occurring amino acid
PKRDFFFFQVPAIGNPKGDPRVGPILGSPFPNKPGGGGCAPYHPFCGLDFGPPLLSXSCVQHLPIGAGPHLSLWNVGISRLTHPVHMSPTPPSSPTHKERFLLWGEGRSRGHREPGEGQCERE

SEQ ID NO: 1001796 - protein, 131 aa, Homo sapiens
ADGKAQTGRLRSAQTTEFSDYTIHGKTELWLTFVRRLQLLHSHDRQFSIEFDDDPPTRHEHTHRNWVTHYIMRNLQAAHSTTLPTLFMHAACSFLQTHRTPGPVRLTLDETRHTHHRNTLTAHTQDHACDT

SEQ ID NO: 1001797 - protein, 144 aa, Homo sapiens
MALVAAGPGGGLCAFAARAGSSSSYVLSPTCEPLGCVRGGVFARSAHARSDSRVLLFRVGIRSVPPWLAPGYLFYRQELRRAQAIRTPREAHVGIDRSPASSDGGEGCFPSPVLSDNYRYLIIDIQAVGWGCGPFKPSGCAGFH

SEQ ID NO: 1001798 - protein, 234 aa, Homo sapiens
ERGWRLHWLAAGGVIVRVCGFVRMFLRRRVCACVSDKDSWNLRPQGYCLLTMPDHVDGRFTLQIIVHPSDLMPTARQRCCHASTMHALVTRCTTLRTGCCTTAGYVTRTTSRLYATPSTLLTFTAQLSSLQAISLSTHTSGLTILATPKMTPCLAPVLGAGTAHACSLLFPDRSTGQTLNGKLALQTFRRTLARTHTRFPLHVWASITTLKRRSNHNSCLRNHAMQPSCLVTRF

SEQ ID NO: 1001799 - protein, 170 aa, Homo sapiens
AGDGGAGRIRGSGAGGRDGPGRGRAPRGRVANQIPPEILKNPQLQAAIRVLPSNYNFEIPKTIWRIQQAQAKKVALQMPEGLLLFACTIVDILERFTEAEVMVMGWTWNLRGLGLGLGCFPSKAPGNADSLWCHYGTQCAVIPKWTHSSPKTSGMLYVFVDIRIDTTHLL

SEQ ID NO: 1001800 - protein, 106 aa, Homo sapiens
MTPQTSTAKTELPHEKDNHDANEPELSIAQEHRPKRQRMAAHTIILIEQARPSNSEDPDDTCSTREHHNSECNMLPHNTQTPYTANIDKDDPTYKKARATNTINDQ

SEQ ID NO: 1001801 - protein, 145 aa, Homo sapiens
MSGAPRHEMEGMLLQWLSPCLVMENVSDGAEGDQGWTDDFNRMTGPNERWTVSQPYGLVIMKLLGPRIQSEYLLGPKPLGHFSSELKRLNLAFKQLCGSQMNPSGALGVGSNPPGSYRQSRSADGGISCGDVAVESLPLGNGMLG

SEQ ID NO: 1001802 - protein, 116 aa, Homo sapiens
MKVTRERPPPTDYPSRSFGFKPSQNVGPLAKVKEKPVPCWLILGYLNKKRRRGNTKWKTHTLYRETKGRGPAKLIAYYNLFVGPKRTKLTRDGPTREKEKVRPMERRQQHLGRKRQ

SEQ ID NO: 1001803 - protein, 153 aa, Homo sapiens
MWPRVGRKPGATPGENWGGSPAGRGWASGADLVLYGQVRKRWYYKGLNPPGPQMAKGMCLGPVYPRGWDSTPCVDALWAQVPWLSVAHLGLWRVALKLGPCRQGRVVGTSLITPPIRHPGWVSGTLKPLHLSEGRTPQARENTTRVPTHHSSL

SEQ ID NO: 1001804 - protein, 104 aa, Homo sapiens
MDPSARVEKRRHKRGDGRHSRASIHDSSPHSTLAGLRCLAQPPCPGYGGRTCGVDVARSVTGAGDLTGGDYDGRCTIACAKRPGLKQRSADRLNTVRHRRLGTM

SEQ ID NO: 1001805 - protein, 174 aa, Homo sapiens
  misc_feature (154)..(154): Xaa can be any naturally occurring amino acid
LLVGVPANKRDRAGIRIWDSEWSGDSAIRDVYAHMKSRISCQYFSQIVMGAELRMRWGSPEIRRCYCPGQGGPGVQCHLDGEYKPGLTVVVAFRELVEPTETRMLSSASSGPGAVGCLCGELLLSLTVHGGTMTSWHSLLLTGVASRWWLANQXGRGVVVLDAIQWMTKASQVS

SEQ ID NO: 1001806 - protein, 367 aa, Homo sapiens
RAPGSRLTSERLSVQRGQWRTLACAHESARRCPGTGPAILGPLSLPTLVISMRALLARCTDALCGLPGHGRRAGSYVVQDLPPSSGSVQRELTAGCCGEPVGSACCLALLQASPAQYSVGDLRGLSRTLTCPLTRQQFLGGLTRTHSTHVSALQALCNEHQKYPRARRRLHLTLPHGTSRLEPHSWWHNELSRSPVTPRPVTGAGCFLTVPHGKAHATVPFLRTLSATPPDTIPSEGAASIHLGHPYNGPTVTYFPVQGTRRKYATETCSRIRREATAVTAGSIRTPRWQTPMSTGGFLYNTTLVDPSATALNATTYSPHPLGSTNAFCSATHCALANQSARAAFDTLCTLYTRGSLHTLVQRVPPR

SEQ ID NO: 1001807 - protein, 233 aa, Homo sapiens
EPRSLSFRLDPASWEPRGSCPDVEDWGLLKVQSSALAPSVPKSSMQVPQEEKTLLANLGTTASCPARRLKLFFSKMATSWFCASGSRGGNPVISCRWRGSALHFEVFRVALRPRPGRPTALFQLEDEQFPSIPALVHSYMTGRRPLSQATGAVVSRPVTWQGPLRRSFSEDTLMDGPARIEPLRARKWSNSQPADLAIWGGQEKTPLGWKPPTCPYLACPERAVTLVLLKAPA

SEQ ID NO: 1001808 - protein, 108 aa, Homo sapiens
METVALQGKQLTSEARGHHQGNGMEHRRHSIEGRDNVKLSYGHDEGELGTVTSQYKTKTLLAARTEYRYTGQAARAQPKYVTTITRECSVHTENLEERDSGKQRQERE

SEQ ID NO: 1001809 - protein, 103 aa, Homo sapiens
  misc_feature (53)..(53): Xaa can be any naturally occurring amino acid
KKGRFFFNLVKFAPGPPRGGGGGAPGFFWALKPPTGFLFPPPFSSCERGKICXPRGGLSRFGSWRLPSWGVLGEAACVRMLSGPQGSSMCFPPCWVDEPPGVF

SEQ ID NO: 1001810 - protein, 82 aa, Homo sapiens
REDGDQRVYGGIAVAVAIFRHTAQLRRTGAHFGTVSVHSDDSPQGRPWQMQAEQLQRLHQLLQRTAAVHHVTRSQLDDSSNK

SEQ ID NO: 1001811 - protein, 106 aa, Homo sapiens
MGVGILFVYVAFLEWIGPLACSDTPRCILLPRCNVGESTGHTRISPGKLYKIECLKHKVEYHHEQCAIAVDYHTVLLLARRFQRPVSLEAHGTSSCAEHLVYQDVT

SEQ ID NO: 1001812 - protein, 304 aa, Homo sapiens
  misc_feature (87)..(87): Xaa can be any naturally occurring amino acid
RSAQKGALQATGDSCCRKLMGVRQYRVMARQILCAIGPEGGDEVHYVSPTEIHSDDDLLEKNINIVRKGLNRTVTLSEKTGGMEHLXVSPERRRRKSRGECKLSSWRIASAERAGGPNGRNGERAQYVGKSSRYASGRRRWSIEVACAIPANPAGDLTREWNAPGVGGRGKGTVRTRAREEHVKPGERVVKCMRWARRGEGGAKSSGQFEASLESRGDRGRSMYEATIDYWARTHGGTTEGFFLIWPHELYILTLNGWTDIAGQYCIGVGGLPEWLWTVYGIGDTAGGAERGTQGLIGGERLEG

SEQ ID NO: 1001813 - protein, 158 aa, Homo sapiens
  misc_feature (103)..(103): Xaa can be any naturally occurring amino acid
MWRRETSGRSQEKQHHTQRLCGRPQCVCGLSPKGQECARTKNLPKCVSPYTRPEKPRRELDGAVGCAGQKKNHPCENVRAIGCHISREGCAAPLWWRKRRSPXNGPSWGQNNTLCVGPLTKLTPRGAGQTTLLCGALLSVGSPPNRVEGDPYTLGEHL

SEQ ID NO: 1001814 - protein, 203 aa, Homo sapiens
RGRAAAQRLNRCGPPRTTLPTLAIMTCLQNSLLRLSCSSAAFVSWSSAVLAGRPEESPSPTRSRFPHGTEAAANFEHRFHPIWLVSQNGRLHRPAGRPGMRTRTPRITLQDAAERRPADTPRRTHHRQALGPETPAFDRPPSLLDRCTKTRRTLPAGGGTDRTQTQTQDGDGRVDCLSVPELGSECNYGLTVGAEKGEIRTLS

SEQ ID NO: 1001815 - protein, 77 aa, Homo sapiens
RVFGWQSGVGRSPDGSGREVVGAIAVMTKLDSPCGRDKCSHRLKGRDRNSESNMARTHIEQEYYKLRTIDAESVKRV

SEQ ID NO: 1001816 - protein, 298 aa, Homo sapiens
  misc_feature (96)..(96): Xaa can be any naturally occurring amino acid
RESESKSEPPKDGYSKMAPEAQVEEAGTDAVIWLQMEHVRHLVLRDADPDQEHMIYPRWLHEILMQAIKDVNERESFLTGVMRNKPSSCIVPSSEXSGGVHAPSRTSRHSVGFKVDIDCGGIIRTESCCARLYPVIKGKDEALACLLQSDFVLWISLGGREMTGSVVVWSIAKRDAILWQAVQLASSVGNATNVIFSRCRDEMFMTAMEVGQFEYGNWIFQIEKSGQRESQTGTVEKNSHEYVEWMMTDSLMLALEASNGDVLKNEAPGRKRGDRWLGLRNGQIAGWGVSGIMWLKMG

SEQ ID NO: 1001817 - protein, 56 aa, Homo sapiens
MNKRERILERKAKDTNNSIHTENGQHPETAKQQKETATEQKQEKRKRERHKDKRQQ

SEQ ID NO: 1001818 - protein, 102 aa, Homo sapiens
AGRGHVSDGAGRRVKLTVGVSGRAELSSNPACSACWHRWSRRQLLAPWRMTTPACGAEGGCWCCVCRGRAVSGLCARSLCVCEVEVDFIGRAWVMEHEKRTL

SEQ ID NO: 1001819 - protein, 50 aa, Homo sapiens
RETLAGPENARSGGGRSVSSRLPDEPLRCGTPRWEDDEAGGGFTTRRTDG

SEQ ID NO: 1001820 - protein, 174 aa, Homo sapiens
AELLNQRQMREGEESGAGAAFQAHGAAPLFFGLGYLWAEMETAARDSGTMKQYYDEEINLDALVKFSHITPSTQLAPDRLVYASFSPFSMLCEAAVRVAYGPYGALICIQAGLVCSAFGSSLEYLMTYGVSGNTVIAIDNLNQNTDVETSLAGLCHSVYSELGPGSHAPGRSSY

SEQ ID NO: 1001821 - protein, 71 aa, Homo sapiens
GSGVLPAASMMRGKVQPFRPAYELMEQPPLKVSKWTSQRCQSVEGIQNNIIGGVYTLCDIESHIILFRSGY

SEQ ID NO: 1001822 - protein, 143 aa, Homo sapiens
AEIRSARSPGSSRATHAPEAELQQREGEESGASHMAARVSSIAAIQRLATVKFKHPSHLLRRDLSGKRLQLLRRLDTPRRRRGGRRAGPFSELAYHYGQPAERREAAPIGASSWSPAEQLAELLQLFSKAGFPGRSQAVTEWS

SEQ ID NO: 1001823 - protein, 124 aa, Homo sapiens
RWQAGSFGHSRCFVRLAWGWPNATITTSLKSEGEEEEEEEEEEEEEEGEGEEEEEDGEEEEEEGGEGEDLGEERRWRRRVMLIVMKRGGNEGAPRGLELRTGQEYAAVTSAYGAQRPCLLCFLK

SEQ ID NO: 1001824 - protein, 124 aa, Homo sapiens
MVVWRHKSRLYFALSCRDRSRRDRPCNLSNVPLSIPINMCLKTASAPGRTPVGRGNKHAPTFTISVHSNWRSEIRHATTDRRKTETTDTQPRETREQRHRHSDRARKVARGLVQTDTRVNAKVA

SEQ ID NO: 1001825 - protein, 163 aa, Homo sapiens
  misc_feature (28)..(28): Xaa can be any naturally occurring amino acid
MVSTGIGRNMALFLVVQLLIGLGPHEWXGIACRWRFRSVLLVCGCDVANSLRWCESYLKNCRPSYCRLRDVTQVDIVPRAILNNVSIPTGQSSHSSCRGEALRSQGPSHVSVDSRGKGNFTLQVDPLKVLPHPLATYERRKLLRRKPDVLITLCVTSCRTRRN

SEQ ID NO: 1001826 - protein, 89 aa, Homo sapiens
MDRKNHNTSKTPREKTTRVRKQVAGDTTEKRRSTGALHRTNWGRYQEKPEGGHRNRGSMGATRHPGGKNTVARWGNNKGPRASGVATEE

SEQ ID NO: 1001827 - protein, 284 aa, Homo sapiens
RKIFLYSEKKNPKKQKFPNPHRGGFWVGGGVCPSSPGPQPRWLGSKKGVRGVRAQTNKQGRVCDTRERKGVQTLSGERGTASTEPRRGSERGQTPKGGEANYQNIVMESNQHHGDKQRIGHKKTREHKRSGENKLVDDWRNTNGGGPHRGSDYEETRKNSSEYNITPVTGTAPGEDHADTKQKKITGTPQKRDSSHSTRKKTWNAGKLDQNESEKPQTLQTSEMKKRCEQNKGSTRGGQKGGNTQKREKAGNPIEQGPKRMRPQIHHDNRRTADPRKTRNIAKK

SEQ ID NO: 1001828 - protein, 435 aa, Homo sapiens
  misc_feature (162)..(162): Xaa can be any naturally occurring amino acid
  misc_feature (207)..(207): Xaa can be any naturally occurring amino acid
GPVRAHTSSEPSGDMQMSWLQVSAKSLSGPQLLRMRHPLDARARLTIRPLPRGYGNRNHHGTLIVTSLVPPSRHVLRGRVDALWGMPPRHIEQSGTTSTALSLHPSVIGWRPSATLPKGHRDTGARHDMIASVACVSSTKRRKVRATASKRLGKLGASIAMXSGVGFQGCSFDTPHSTAIRSRTRDIHDRVVGGTRRTRAFRVFSPXGNHVAPTSLLPCPQGVVSPELGVTRCQRTVIRIHSTGSSVRKGPDSKLSTNYISGQTDAKAQDRGNTTRRNAKRLTQRGFLTGNKTGHPLFQHGRDGSPNSAPNGVSSVEPLGGTVRSKPKFPKVGTPGDAGLREEGAPIFRQRLLRRPVVSYDGRAPATREPRNFSSTGSELWRQVEHRKAVYGGKGEGTVAAYYSMAMVSRTVTGRSEEEERRPHHELTSQTVLGA

SEQ ID NO: 1001829 - protein, 182 aa, Homo sapiens
DNLCFVGLIFHALSLHGRVVPVCLNGQMSQVLELTVIMFHRRPSNHKSKANLPKVWVRSSQNVPMTYLGGTIAARLNIPVSQVNLLRMPKPAYVHWQVIYMDMSSEQLDDILKYHTEIVFARTSPQQKLIIVEGCQRQGAIVAVTGDGVNDSPALKKAHIGVAMGIAGSDVSKQAADHDSSG

SEQ ID NO: 1001830 - protein, 162 aa, Homo sapiens
GEGRSHLSKVLSDWEALLHAGLSGWGGLVAHQSRPPRSVRSISPPCRSERDTSECWEGICSTEIIAPGERLKAVGLLLVYSSFLCSVCVFDNCKLSASMFGPGAWHAASWLTIVARSAVLSALDLAQGSRGDFVRGTLDCPKDSMRMYWAVSHTDSRKLIVC

SEQ ID NO: 1001831 - protein, 310 aa, Homo sapiens
VHGTQTCSVLKPEDGTDDNVGFGLGMNSLRGSSPGPLVWLFPVAMAPEIYREQLFVRGCSVDAGIQEESLSGRSYFETHLYVRTHAYQCTPVEFERHSLQRYPTWSEDIKEIARLFARERMSPERSVASAGRSLGEAWTPVRARVPSWSQARLVGPEGCPPVASPHSLLSLACRLRLRAERHHGPWRDGSSAFERAPVSPRARVVARLVQRLANTSSSVACRSRSRLVVTRRLFESVHCFRLAEVIPAMGPPRPRRTWAILCLAIPWHQGIETRAERPAIELGISLDPRKNFKGTSSFERTVWRTIRKEV

SEQ ID NO: 1001832 - protein, 127 aa, Homo sapiens
RAGPQSVRPAQPSPASRRYPSRVRSRYYGQPRLLPTARVPTVEVITKGQMCPTDAHSSFLLDCSSRTMRIIILEDMHLRASDILCFAQYYTAMFSLDPTGDPTIVDSWYEGSSLRSMRVNTNYVYPS

SEQ ID NO: 1001833 - protein, 155 aa, Homo sapiens
MQYQGTLSGHGTCGLLLPSPCSLPRTQYCPGTPSGSMNTETSSPWDDRQRPPHQLDAAPPNDPAHAPRLDTDWQQSGYSLLLPALEMSFQVQVMTAKQSPGAGHYCPESRGGGELRRDCRSMSDLATTLGTAISALWTMSFSREKPALEMDHQFL

SEQ ID NO: 1001834 - protein, 165 aa, Homo sapiens
MICPCGASVILGNNGFIWIYPTPEHKEEEAGGFIANLEPVSLADREVISRLRNCIISLVTQRMMLYDTSILYCYEASLPHQIKDILKPEIMEEIVMETRQRLLEQEGEGGAPDARDCGPCRSDDCDVWSPYRGSAIDSRDHPFVCIDGPVTASLATHGSRFTPCL

SEQ ID NO: 1001835 - protein, 110 aa, Homo sapiens
MSEIGYIDLLYVKSENSEWIESSKDTVYHGCYDSSSIKHVAPRELTESSGRAEGTCPSKVELLENVSVDRLFGKSWMQQGLDPAFRPRETLASRQESIYVITWTLCCCEK

SEQ ID NO: 1001836 - protein, 168 aa, Homo sapiens
ERENKSRVLWVFFFHAKFINFPGIKTLCGTHEAGALIPVHGNSGGGLGRGWFSELPVIGRLGLEYSLLSQKARGFRYRDRLYRNGIQGVALWERLPRVWQLHAPGAEGESSFIEYQPISEQQSLRPQGDGNDCQLPLGDDKGMRRYQTKRAAGAVITMERKREWWGRI

SEQ ID NO: 1001837 - protein, 424 aa, Homo sapiens
  misc_feature (224)..(224): Xaa can be any naturally occurring amino acid
SGVAGRERELGGRLAARVAVARLVPAQPCADEAPRKGSFSAARVCLHQRPHPYALLALGRSCPAQCLVGRLCAASNECWSSMNFLRHDLVLALTIFTICMGTTLGRKGLPTECRLLVPVAKHASNLFRLHVVNEKRIPEVGRPSLSTREAVVCCQEVHTVGSSYTTKSNGSYTPRNDIGLSLSKMGRDLFARVSIGGPIVVSDRLDTPQEGVSSEWWPNTYGRXFPRYFLLWVMLHTQRGNKRQTFPSRVQGDVNAYVGFILVYGFICVISVPVGTQRETFVEHKPTECFSRELGRPTARANATRTPFGPLREQTQAPSFWEHFPQPLDKGFPKAATEGAAHFSLFFPHLVSSSPLTQAEQPPQWAKTPHPIYKMFGFEGRCWRTRGAQTTVYRQDTCAPSYGPTPYFPPKSFLFMGSRGKNFF

SEQ ID NO: 1001838 - protein, 158 aa, Homo sapiens
MVRYMHLGAGETHEIDANQAGSNLRCSLEEQHRETAQAIKGYAYTKKPRNVQSGNDAHRCSRRLVCTIPMFPKGGSWTRCAQAKTMGAGHEVVGQKEVLNVGCTCIRNKRERECMNYKGLDVDSLVIEHIQCEQGTVMMRRLDLQELMVGLTQYMSSP

SEQ ID NO: 1001839 - protein, 112 aa, Homo sapiens
MRLTADWCLWVFPLTWTGTVYAPFPFVRILLPFSPLAARGMAVLFGLAFSCWCSCLDQSFHDPSSISFFGVLYLISSSPSSPRDARVMVASCGRARWYSTRLTCSRFGILPK

SEQ ID NO: 1001840 - protein, 241 aa, Homo sapiens
AGGSCLAVGRGERGVPKLARHAPRPSEAWLPHAPCSLLCPVGPECSAALPLSRCPAASTALRSYWSEELAPEGGERDVVGGHGRIKPPFQLNHEERLKVSPDYNCVYEGTKFPLKRIIVDDDDRKDMVDSMTRAHPESIQGVPHHNSLAPWRLATAQQVTSNPRKDFITAASYELALPRLNRRKTRRYSDGNPKPKYREHQYIDSSCWTAISEQKYKNPFTSSHTGFQYVIKEQHIHKRKT

SEQ ID NO: 1001841 - protein, 229 aa, Homo sapiens
  misc_feature (149)..(149): Xaa can be any naturally occurring amino acid
  misc_feature (175)..(176): Xaa can be any naturally occurring amino acid
AGSQVAFRLPCLLCACAVSTDFDQERVQRQPRPQRLELLVIDDTGRGSGSLRRLLSKADRERSELARLGESIMECARHKGAIATWCSQSTRRASPRCTCRVADLATIIYPRTRNSNRRRMPVVMIGVSISCDWKLAKSDGTIRDWSHEXERVDSRRSGDGVHGDTIEYIVTGYNXXTPPSSQCKGPVILWEEFQSCLHCMVGQGVLFSLKNAKCGHDSNEFVRVGGCGS

SEQ ID NO: 1001842 - protein, 155 aa, Homo sapiens
MQVSAPVLGPLLVNSMLATGCLKKPENSFPRTWAAPFVMHMKRKRRMGSRQPSVSRPVIRVVLGAICNSGLSGARGCLVTGPVPGGSPPPAGVGKDPCPVCSAAEEALAAPRLEPCNPEESRAPSPHREGPQGPGPRPPSFVPSRCGGTSDSPPT

SEQ ID NO: 1001843 - protein, 271 aa, Homo sapiens
  misc_feature (120)..(120): Xaa can be any naturally occurring amino acid
  misc_feature (193)..(193): Xaa can be any naturally occurring amino acid
  misc_feature (266)..(266): Xaa can be any naturally occurring amino acid
SGGVEAPAGGRGYRHGARGSRSRFLASTSDRASPAREVELTQELNKRVARRGHAGRDAEHAGPDAGIRSPGLRRLGTRTRQAGWGRVDRSSCYSPVVGGATSHAARKHRNKSHTATSCVXASPEEDLRAIAPGALEEPASVGTALTLGILWQLSLERNYFAQSLGQKLIDIRVWYIDVMILQHCSVRPRAQEXLGKAIEWPRLSGKRRIVVLGDSDDLLLYTIPTKEANSTILIHQSSSLRIALYLRGRGKPTTGILWVGLRKKSXFTGRP

SEQ ID NO: 1001844 - protein, 226 aa, Homo sapiens
  misc_feature (26)..(26): Xaa can be any naturally occurring amino acid
MRSFCALELPGLGKIDKGDEDGTNIXCWLGPKQGASNLLGVRHEHTSQSWTSSACHVRRDEYLNGGRTGGLSPVKGGPLQLGPDPKSMNASRYTTHGVHEMRYFGSKKVSGGGEYTVPTRVYGNTLNHVRFGIRRHLGIGETGTLRDEFPTMNTTRSRRCWERHHSKGGKMTHKREPVAVMKFTYQRDSVWTSCTHGDNSEAFSRTGPMAWRNWASTLWFETRVTP

SEQ ID NO: 1001845 - protein, 220 aa, Homo sapiens
SARGLPPTAPRSGRCRLHPDPEPAPPAMEVAPGAARAWTGCTLADAELRRHPDSTSLGLAHNYMEPAQLLPPDEDGRLLQSARLAGQSHTMPSPAHARARVSYRPAHARLSGGQMCRHTLVAQPGFALGWTGAKPALSADAAQQHKPVDREAPSPKNASEPPSACWRALEAQSLCSQGLVRDWDAEGDGHAEGSTRWGHHPYRPQKRESGRATWTKPRND

SEQ ID NO: 1001846 - protein, 338 aa, Homo sapiens
  misc_feature (63)..(63): Xaa can be any naturally occurring amino acid
MECCPCSACDQLAGQRESPQGYRATLKPTDQPKALWRAVEDGLAVLLGSFIPKGLVLPRADGXHLVEQTVSVSFVAFLALQYSPVWRTVVNWNLGIQAPCVGNIPHDRDSPCHIAYSDDAGTCSYQRRMFLSTTRLASEVHEFLMSLLMCLGKSPRVVPSAQRHRSTTVRRLLRPSLCHVMTTSQKHYSQIRDASRRDQCRRGEPNISIGQTSVQRRMGTQELALPRQGPIRSPWAIGSNMTRSGRAQTEHTGPVRHTQQGDCPLRDLRGKEEPDEKTSSHSQLLDLLDREIHHESQGTTVLPEPEASGLPYSGDARDLNSTNRANPCRWTLCGDAPG

SEQ ID NO: 1001847 - protein, 72 aa, Homo sapiens
RKLSLTSAHFGPGRGKVRVVAEASLWTRARRCTGGQDRLARRTERIPVKRVAQTTNLSLPEPTNTREYVRSD

SEQ ID NO: 1001848 - protein, 132 aa, Homo sapiens
MRTGRPRLGQFVYKTAACIQDATSLARLGVILLLLGQILWPETLFSFSHWCRPGTPKWQSVGLWLAKTAFQEPQERTLRIEEWEKVAATPDDRTPYRRADRDNRGRPQDIRQEKESTEEDTPPKGTRERESA

SEQ ID NO: 1001849 - protein, 47 aa, Homo sapiens
MLRVPHRASTHAFCGKGPSGSPETCVRTRGHERRLVVGRHLVHVAVR

SEQ ID NO: 1001850 - protein, 423 aa, Homo sapiens
AWGCAALAGIWRTAGETRRLPRDSCSRTEGGGRAGARIAAREGLEAAGRSPVTPRVLYTERLNGLPSWYPRTRTTPRILNAVKHAPVRLTDLHVNHGLVEHRGRLRCVQLPFRNQVIALACCYSKDVTRSLIWGVKEDRRNPRNLKAGLEGVGHALSAGLSVSKQTTVRYGSPSIKDMASTRMTYLSDDSEWQIGSTSAQGSLVHYDSRSYLGVHQPYWFAPSLYERTTIVESRYVHLPQGTTIWAVREAPRIGVASKDHCKRYSLDEFLVGNRLFQPKRIGYDSYSASNQGNLGLTLAERGQDLAKRTKGEPTASPNLGNGVVWSADAHPLSEIGVYIQLWGREVNSQTSEEGKRHRDIKDKGTVQWRHPKDKGVPVGKATGIGHVGQILGGGRQISRLIGRVKPLLELGYYKNGVSSVEKP

SEQ ID NO: 1001851 - protein, 91 aa, Homo sapiens
MSGALDVLQMKEEECPKVLAARNPLSVAPIVDLPDVTSTSIKGTREGIYIITSQEDLGKSFCWQLVALLPLKTLSDVRKISSRNTGQRAVP

SEQ ID NO: 1001852 - protein, 235 aa, Homo sapiens
HSGGANVCWEQQSLTRRKEAAQLHLPKVIIPEPPGAKLAPCISTPVHENCQHSPHRRGKFAVTEGDKIDRRSGKKLEDNPKYLKSGDAAIVGDGARESPCALESILPVPASLAEFAVRDMRQTVAVGVIKNVEKKERQDAGKRHQARRRRRTKRGQVEDAGARGATLPGGAALRTPATAPAPPRTRSAAQRRPEPPQEMSDLSLQRPSVATDARHKVQCKFFKRKGAQKPQASAP

SEQ ID NO: 1001853 - protein, 194 aa, Homo sapiens
AVGEPGAPSGTARLPRLAYPAASACDSGAADARLTRLRASADLRGRKESPGGMGGEAGCAAAVGAEGRVKSLGLVFEDERKGCYSSGETVAGHVRAGGVLSRWPCCALRHCEAQGLRQLRLGPRAPDPEASGQPPMSLGCHISEGGRTCTCASAMREPPSGEGIILLHAWKNMNFHFAFNFHHEPMVTIVYWEI

SEQ ID NO: 1001854 - protein, 198 aa, Homo sapiens
YQGNKTGKGSRHYSGPLIICGANTGDSYVKRFSIYVDVVPHTCRGHPRGDSLDHIWAHGRGEASCITWNRAHVSHNSSFSHELLTVEEWNTHVWAPPKKACVGPHTPLGTQAPHLAWPVATVSHLAPLVHISHINISATQRNMREDKNISISQNRVCPASNRVEHSRESIYPLKWDTRQVTFPRGHTLPRAQRACPSL

SEQ ID NO: 1001855 - protein, 132 aa, Homo sapiens
REILLVSGYGWTVRVSLISCVDWTRQRLVCFPSYIVIADALSPPEVPGIGRDCATYVTGSQFSAIAPCDDSSKALVDRVSLSSARLFDPCEWKFVSRMYLYVDGLIYVGVCKLQCHFVLSLLILIVYCSPFY

SEQ ID NO: 1001856 - protein, 37 aa, Homo sapiens
RAARARAFKKMFSEHSVFSIERHFLIGFAVKSCGTSQ

SEQ ID NO: 1001857 - protein, 185 aa, Homo sapiens
MATLREKLIAPSERKKRHQFQMDKITVVGVDKSVWGCAISILGQSLADELALDGVFRKIRLEKEHYVTAESSKQSGAINSPVRNRALIQFLVRHLVTMNCSVLAGARLIVPHRIMSGSCSIWARDVSVHAKERCGKGPRVTCWMSDDPVNVVFHNILFELPVLWMLVIPYRSDLEIEVTLNRMGL

SEQ ID NO: 1001858 - protein, 82 aa, Homo sapiens
REDCGLGHAEGLPWGRSVESRMGVWVDGMGESSTAVMGKSSQLGPGGEDAVELLEDDEAELWSPLWTDEGKGGLSNALVLEQ

SEQ ID NO: 1001859 - protein, 508 aa, Homo sapiens
GNFLLRVCVPPIVSRSDGYQGHDGVLGRSICLENQFGSSADAPGDGSNRGVWQAETPPTMALTTHVLLSLACITSKRDSMHVKSDTITDTLYDNVTLQRFPTDLRKTGGEPVREYTGETWEALRLGSQAEGLVRLQGATFGNSARSVYERPARDCKPRGLDTEDTTPKRFMHVPHSSLTRSARAGAQRRQTFSKEWLAICGECTPLGHDNTKGIKRRPRGGTQVPRNHVEACWCPVELRNWDENLVGSEEKGDRCPTRNGGPRGATNVRTGPNWPRFFPFPPGEGSPQRNFSGGMLTSRRMSTHGTAGTSSSQNTGDTLSGDKVKGQLGFPLLFFGGINLLGRSNASVVGHLHPRLFAPKMRTGGTHPFCTYRHPTTLALYGGTSDTHTALWGIVNIFAVDIFIVAPPPASVYNTSSATKSSGYKPTPHLDTFYDSDANKAYPQPHSNTQTCGVWQTHLRHNTDQDDVSHKVTFAPQKGEHTRAFLVIVRDKLQLDTHRRDITNRGLL

SEQ ID NO: 1001860 - protein, 152 aa, Homo sapiens
MAPREASRCHLTCLNQCTFDLPVKTVGMTQQDVEDPMETLIFIQCRQYLTNSIRSRKADTNRAIIKFTVVVRLCGARTQRSEQYMRKTSPVKANYYTRIDPITSPTEQVTSRDNSSNPILESISNNRVYDLRCLDQDIPMVQPLLKVCLFND

SEQ ID NO: 1001861 - protein, 114 aa, Homo sapiens
MRVSTESLVLLATVILSDYSPTTVTPRGCFSFASSYCTQGSSQRIISHISSARVRATCRINVDYGYTQVRLWFQIMNIFQGIFMSSIECFDIPLSPLNRQLESRLVPTRSRRTT

SEQ ID NO: 1001862 - protein, 227 aa, Homo sapiens
MPIHPPHGCQRKVLSHPCSRRGALVSSLIHLIDNHTSGEQLTDGKWGFLHEKADLTMIERRWVYAPDANGLPQSTLKGPHMAGLAAEADGGQRSGSTGHTIGTTWEGSCCMVDSNPARSCDRRGTSLVFPTIGNSTLGLHSVWTGHGFSLHMPRELYQSSRGQTWQDNRGEGSQVEGEFGCYHIAKRKGGWKYTFRDEKLHDDKATMPRRDAVVANESAKAKKGWYR

SEQ ID NO: 1001863 - protein, 268 aa, Homo sapiens
AKGEEIETELAHYGKRVKAQGYMHGLWVTGRGYHGGSDATLAWLAMTIFVAVCQSLSSVCFTLLLLASLYKDVAATTSGCHRHLASTTCGCSAPYPQSSKMCRPSANPGTKLTRATSTMTASARGCQQSAYPTAVPMHLTQSSPWAHRATTETLAGLSMLRPSPPASLLTTRYYMDAPKAASEHSLAVSGCHLVMSCVCVSGVQARFLTRPVCAVCVQVRFLTPHVCCVCPRLYMWLPSGADKDGEQSLARVGWDQSALSSSAEGSAS

SEQ ID NO: 1001864 - protein, 86 aa, Homo sapiens
RGSRNPLGSASTVWELNSFALLHNDSCCQSLFGSAVPLSAVILTARVCGFIPEVSETTNPPGGTNNSRRTTFKNCNTHCKGLQLHS

SEQ ID NO: 1001865 - protein, 83 aa, Homo sapiens
MHWCSLHVPSPWPLPSLRVLPGLGSPGEQSLRLGNRDAGVQAPTSVAAARAVVQSHSGMDWAGGRTSHFGEDAEEQIIQSINC

SEQ ID NO: 1001866 - protein, 151 aa, Homo sapiens
MTGGDGRAENPGRQQDQEGGEGRLRQDPGGDPKKRDTLKADSGGSHCQGTQLEQPARASTGERTGTQTAEDRLDETQTAGPQESMDNTAQGRNTGPQIITPNRDEKEKTRTPRRTTDTSTNRITPASETGTQTDPATDPHERHKITRGTRK

SEQ ID NO: 1001867 - protein, 43 aa, Homo sapiens
MPECRPFAEARVGIKNGLLAGIKMRFGHRPRECAEAKTAQNVI

SEQ ID NO: 1001868 - protein, 513 aa, Homo sapiens
VHSTARPVASTTTCRSPPFMLRVGYTPSSIRWDDDCITISVSRKVGSLDASLDQLALWSMARCWRHKHGPHLAPGHCRFASPAWGLPCPCCHSISVPRGTVLDLFSPTYNDRLSRRLEAHGLRYVALLSYMSSRITKVKRPGGSRRSSHRPKAMSDASRPRLTQTETLLLPAGARVSTSAKSIRCSAYQYRSRDDLWRPSYFEGASRSQACRGGHSAHAPDGTPHHRGQGAWLDHPGAEDPLFPKFGRGPGGLAGLPTGRLGRFGPFRLAKGLGGALLEHWAFGEVEPFGGVLHPGICCNGRGLWGLGAPRITCGAVWPVPMCPVAVAGHGFDLGGASPFLAFPPRNSCCPETPGLRQGDTLLKKRCSTLGSTGLAGVGGTNQPCDLSTPDSGVCMRIGHALGKDSGSGIGVAYCNRNLTVQVVITEGSPLVTKVGWRDPSPCIGITGLDTYPGEAKHTPGPRMKALGNGHGTTEPTTYHTQVGAVTHKRRRDPEKRQAHTRIFTIGHTIRTS

SEQ ID NO: 1001869 - protein, 188 aa, Homo sapiens
  misc_feature (107)..(107): Xaa can be any naturally occurring amino acid
MLRRWLRWDRDRNGRYVQVCQMNSGLRNEQRLVTRTKWLKEASNGLYRLVILDINEVCTLGRYKFIRLVREARLGPTSHHSLEGLQHLPKSHRAQGDGDCSNIGVDXGGYKLASLYILGRLTLQSFDYVRVVLVEIASSGKIASTKWHSQALIKRYSSSRTGSAFDDDLCHIASVGRLDKEGTRYFHH

SEQ ID NO: 1001870 - protein, 294 aa, Homo sapiens
PWCDSVLRGCSLEQRSFISVPAHSLATYSCSVAVIRDCERIRCDDVTMKASRAVALVTDLCRIDDTRGLTEDYFTVYMAGTQMSGRYMDASTMCNIFFHSKARYTVSTGVTCAGKHGSRCLPRLDVDMTLSGTLHLHRRGPRIPPLLETVKATVVAKPLFAHKVVHCLEGPTTGMSPPSVGEALCREENETKTKDWLPLTGFRALVGISEGSHDATYLRWGSHGDLFHASAMVSESADGIGEVSFQVQELDTEEYVAEDLLVENLLLIRSFISLATKLAVVPWPLVSKRLPVRP

SEQ ID NO: 1001871 - protein, 103 aa, Homo sapiens
MAWLKVPIGAWKNPSVPLYFDSFVHFDLRFLRGYVTNGAAKFLGLERGKKTGYLGGYAETKSTTMICGPVEVSWEDWILSILGWATMNHVREIPLWKKNIGLG

SEQ ID NO: 1001872 - protein, 253 aa, Homo sapiens
MAGAVANARAVSGAAGLWGCSSRDVDRRTGMCGRAHPPSVVLRRLESREKQQHGGVRYNRLRTQPSQESQLWRLNCVFQHRQTYSDPFESVDIACACKNTSRLRYYAYLFTHLYEFQRDSYSSTGQTRCYMKSYLVKSANLLGLGLGQSTRRIGVESVTPSMVAFNGLQNRLTSYTKSPSCELYPVGTRRDSETVHSRTFTGQERHVFSWDGSKVVHPNAGFCFSPLAAYSKLPTRGNSLVAAMRTPYTNNVS

SEQ ID NO: 1001873 - protein, 115 aa, Homo sapiens
MVCSFTQEASETTSPRRTNNSRHTALRAVTLTGKVCSFTPEPARPRTNQKEETPNTSEHQKEQTPDTLPLRTVTLTARVRGFILEVSETKNPPIPDTILVHEMIGFSWTSNYGSF

SEQ ID NO: 1001874 - protein, 194 aa, Homo sapiens
SGVQANCRANRWAQSEWMESRNREGQTQMIVVRDLGPQCREPSRAKTIREAKDVALLLVRKTRLLHPTHPLAPVSASRIVPEGNVGEGWNHQTEAGDTSGLFCPSKASIGTSRSDIMHSLARRAQEHLLRASHIQSWSFAGCIENAARAVTSNVRFRCRVNPESMATYWPMMDIRDSGRIIRSNKRPAYAAIDL

SEQ ID NO: 1001875 - protein, 342 aa, Homo sapiens
MVLDLTYSPPAEAFSCLPPYFSSLAPLLPGRRPRASVPAVCTPRRPQADLCGPSSHPVAAHIKLQVRCWTEHCLRLCLHRVWPALPSGRDCWDGPLCERGGSWLGGCSRCGLMRDPLSGPSLSPVRPKAPSSDHRPYERDTSLPLNDAEGTWFFLLVRCKRSCEEQACQRSRVNHYAHKGCAWAPCGSDVCLSWRLTYALGHAQPLGPVALSRGAPPSVDQAWGVPVGQFATWPPLLDRPSSVPHRLVDMGGYPGSVPSFLWTFGANPITGGLKVGDPETPFEQFPAEEAPGFGPPKEGFKENVPWEKRPQWFSFNAGHPPGRFFTCVEASTGGSAPKQPPR

SEQ ID NO: 1001876 - protein, 65 aa, Homo sapiens
MVYYRLKPRRTTLDSAFRQYPAHVHVQGPPYLSWSSVARGIMEEMVWSVLDTSKLFGYEPTIYYP

SEQ ID NO: 1001877 - protein, 189 aa, Homo sapiens
MAAAVRAEAEPERLSALSGDRCSSLGLLCWPDPRKRMRLPLIFCLCVLNGGWADAWASIAYGGGYMCHCRIPCQLFVYGGCDGKQGKENYPDQEDAHNVPVTENARVTWHTECTILCPSAPEGRSETLSDSQYKICRNASLACRIFQLVLDVEESCIISWRCGNKTVRLRALSCSQRNLLPGQVVSRVR

SEQ ID NO: 1001878 - protein, 233 aa, Homo sapiens
SGPVPSPGGRLGATSPERNQTEAALGLTRGLGAVLPGLGHARGAGEAAPGHSLCPLRLITSKPGCKTTPQTRSLRGTWSGTPSGPGPRCQCYGRGRVLLGIVPFVYCALLHAVPICTVSMSQDFGWNTEGGRHRAQSASSGCYCLTQVVGGHLGDRIGGEKVILLSVLCLGLHHGRHPTARPAEQCPPGLHDLLTILMGLLQGVYFPALTSLLSQKVRESELSFTYSIVGAGP

SEQ ID NO: 1001879 - protein, 132 aa, Homo sapiens
MTEEELTDRTSAEDRRCQNCRDRTHTSRSSKPVSDKSCARPGVTPWTECWQQVHCLAWCTDNQQTLTPGKGLTTALRRRNTGLFDIALSAHDDPLFMERIVSELITDSQAWIQPKWDQTEKGNIRVVFKLEI

SEQ ID NO: 1001880 - protein, 119 aa, Homo sapiens
AELGRCRRNERERRGGRIRRRAPPWARTRPPPRRPPALDSGLSRRRPGTAGMWAAVPDCCCLLLLLLPTTASCLPTLRTSPAVWHAPWGVWTGVLWTRCHNGSRQWSFKAATKCRPVEP

SEQ ID NO: 1001881 - protein, 101 aa, Homo sapiens
MGCEKREGPNGWQDPAFAKPRTDLRSMREAPVTGEVSCGLTNGRRDCGVGTTQGVGQERGHCSEPLRGHRESHGTETVTVPRRVYPCGEDSRAGMASHRQP

SEQ ID NO: 1001882 - protein, 132 aa, Homo sapiens
MTRDRPPTQIQRADSTSMCSTTSTLDEAARAEAMGPRLRAATEDESYTLEGNMIYHWSRHGDLHTAGIAAHNLCIPDMVDANGEQLGTRTTSGSLSNLGNPCNWFPEARRITRNEVTNSRLNDSGQTMRTLY

SEQ ID NO: 1001883 - protein, 98 aa, Homo sapiens
  misc_feature (97)..(97): Xaa can be any naturally occurring amino acid
YKNFLFNQGFITGTDSLELKGKVLQYTETYIRKFTTLYNTGRGKTQKQQVYSDSRGNSQWLSNLRVLSLTFVAKVVFSWIYKSHHLGGFSVGLHTSXI

SEQ ID NO: 1001884 - protein, 280 aa, Homo sapiens
  misc_feature (141)..(141): Xaa can be any naturally occurring amino acid
MCNLGCRGLFMATWGVYPWLFPSPGPGILVPPQSGPASGRHGLEDPRPGRRRTLVWHRGAGSGLARRTREGHRAVYSLGTTGGGGQGKGDRVYSLLSWGSESPRGQGAQAQQEVALMYKAHVVGSTGKAWLSGFTNSTSPXYTRTALMWGKNPPGNLPEHKYYTQSFQWIEIPETLVTQCVCGFITHSCGFTEKCRETKGYVAESSLPWARGKNQIWEGESELYSHHTGISSPSTPPEEDFGNTTKAAGRKKHNTEYNKTTKGPDATTGIRDIGTHGGER

SEQ ID NO: 1001885 - protein, 110 aa, Homo sapiens
TKGVSLGYPGLDSQGRNLGSLATFGLPGFQGDFSVPQPLKAAGDYGRLCHLRRAIIWGYFKIEDGVSPYGAKLGSGNFCEPWCNSGHSYTAFSKVAGDLPGHWSSPCAQA

SEQ ID NO: 1001886 - protein, 501 aa, Homo sapiens
  misc_feature (136)..(136): Xaa can be any naturally occurring amino acid
  misc_feature (173)..(173): Xaa can be any naturally occurring amino acid
GKGFPLLAAQVEVLVGSISGQWKQLAPPGSRLIRSVPLRASCVVVRRGIYQGCLYQQVLRDNSVRYSIELRIKGIFPHCVGPGVLVINTSVGAHLHPVAVRALPKVGWKFYTEALKPSQRRGHPLDKMSCIVESGXEGSSSPTGGITVRGTEELGPTGGKERERTLSKCTTSXGKHWGCAPTEHRRESSLGDPLRRGAKPSDAMDIQIIWTRGKTYLSTTLNQVGDKHPLTGGAGHCNGSTNGSTYVTIGGTVGYNTPREGAGVTTQPPFVRESPLVGTTSDKESLSSRGWHIQPWESVRGKRGRMHPKAKDVGETRWEANTGNSSVGGSVGRQRLNNVINHPLRTVERAHQTEERGVHPRHLFERPSMTTIRVGRKKITPLSKVRRAKTHGVTTYQASATIGSPRMTGKRTEEERRAPPPSLPEARVCDTQRRQRPERRRRQTRGKQQHKTEKMGNAPTSCRTGGTSDTRLYKRGWPNMHRLNQQCEVVTRDNTDNKSQK

SEQ ID NO: 1001887 - protein, 73 aa, Homo sapiens
MGPKGLGGGHLLGDTVTPRTERGHGSPPMSNKGLETGSAGRQGSAQATGNNLKTYILEKRAPGRNQGSLITYK

SEQ ID NO: 1001888 - protein, 141 aa, Homo sapiens
LTNKKSFIGGGLLKHQRWSPKKILPVADKEEEIPVKLCRHATLFHLLSEVWVRLVDVFAEYHQRTTEKRKHNQRGLDNCALHLCSAKFAQISTPRAHPFTTISPYKRNKRQISPRYNTSISKHQKLSPIILVVLQPTNVEL

SEQ ID NO: 1001889 - protein, 217 aa, Homo sapiens
MPSFLPSGFSTGYKNPKFLYIVPKKGTPLHGGVGREEEEVLPLIPRFVVRRLRHRGGNDNVEPLTSGVQSRFPGTLWVLAPQPLWCRGVCGQTWGSTLRHHRDDTTTEVWPREKLVPLVDCPLWQIGREKEPYRGGPMPCGATQGGVSQRGQRITRAGVLPLTRKGLVHTKRDKSLYQPIRADRSHGGTKPRRQGGQTNQSEHIAPDQNGNTGITKD

SEQ ID NO: 1001890 - protein, 324 aa, Homo sapiens
GKFFFFQKKKPPKTQSFSPPPRGGICVGGGGCSVPLSPLWAPAPCVWFGAPQWGVCGVSGAPKTIKSGVAVCVCCVARENREVCVTTPARVRERARARERRRESVRTRETRGSPRQKCGETRPPDERGVVAREAPPLLSLRQPHLLSVVMVGRRASFINQHPTGRSGEMKTTTFLSVGGAGPPLIMSEERTIKSSRLLLWCPEYCRCRRDENSSSRTPILVEEDAEVEDAAAPPTPGARWEGGSSRLVGGVRAMRGEEGKIYPPSHWSASSNTNIHSFLPPSYHPYYPASLLIAHTMISTIEMKHTYRTGTDNKYLSPSDRIIQ

SEQ ID NO: 1001891 - protein, 106 aa, Homo sapiens
  misc_feature (45)..(45): Xaa can be any naturally occurring amino acid
MCNVLHRPHTIVTNPMHPRSDSCEMHRQAWQDVLLAILVAVAVRXISDSVYFHQQFCMTDALSDRAECTDSDLMREYNCETGKVVTRRSHQRRYTSSGRTGTGGRT

SEQ ID NO: 1001892 - protein, 69 aa, Homo sapiens
MAKQGETLRIKINKDRGDRCNEPVCKFPTGDHRFVDPMPMQAEGDIGTTHIEDGWYLHIPKRHGGTRHF

SEQ ID NO: 1001893 - protein, 246 aa, Homo sapiens
ALRDDLDAERSVQSDSCSRCSPVPPPYSAGAYLSASPLFAPDFVYHRYSSVYGFRYGPGAPSLGVWALLCDLNMARCARALFVELSSSFPLRLYSASRGGPVCPAFGAVCYESAARGLCPVDFAEPWRAAFWLRISGAPGSVEAVTHGLIMEQVNVQIAVANAQELLQRMTDKCFRKCIGKPGGSLDNRPSMKCIAMCMDRYMDAWNTVSRAYNSRSAAGTSQHVTGGAGHPDLFISSKRALRGGV

SEQ ID NO: 1001894 - protein, 138 aa, Homo sapiens
MLSIHDSKMDFGYTLARVPKMLRCRDRHQPQVTYAWTAEKFLKHGEYLYVEAKGLRTPARSSIAEAIPGERPSHAGQLTKSPKTLRVTSERKRLDFQSDAAGKLAGIHRCRPMNPFLHATRQGWHSFPSLAKGVYFVA

SEQ ID NO: 1001895 - protein, 45 aa, Homo sapiens
MVVTSPSIRFPLPLLLTGTSELAPLIGRKSERHAGGVPDGRVGQP

SEQ ID NO: 1001896 - protein, 159 aa, Homo sapiens
MHLNICPCWLAEEFRGSRRVLSYARNVRAKYSLSGGPSRDSVLRSITVLLIYVESEVLDAAGFSLDWQHADFGSTKAGCRVLLALIFAWSWIAQFRPVTRWEHKRALGNNGPESIIGVPNKYISTLCFPGSQKTLFPKVKVNIGCIEHLVFRGLCGHPF

SEQ ID NO: 1001897 - protein, 247 aa, Homo sapiens
SRVHLAAPGSGAHSSLPACELREKRNITVFILCPHDITVEAERTKIQILTHEGNRAHPGWSVWQPRSVPSSGEVISDEHGSRPRSATYHGDSDHGAGRAISVYYNVKPQVANMCLVPSWWIVEPGTMDSVRSGPFGQIFRPRQLLYLVSLGQVTSGPKATYTEGAELVDSVLDVVRKEAESCDCLLGFQLTQSLGGGTGSGMGTLLISKIREEYPDRIMNTFSVVPSPRVSDTVVEPYNANLSVHQW

SEQ ID NO: 1001898 - protein, 108 aa, Homo sapiens
MQSSDEAPILVARATVSMRPPGCCGCPPGSAFFTHPPEFEGRVSKLGFERTGEALRVEQSRGHVSSGVRDMRVSRRKLPRNVRRSLHTRFVRWQGERRALHLTKLRHP

SEQ ID NO: 1001899 - protein, 425 aa, Homo sapiens
  misc_feature (223)..(223): Xaa can be any naturally occurring amino acid
MWTRRYYVGSRVEPNIAAGYRRCMEPESSETPRDRRVIATSGHSSLTGPNPCHLAVDFEPGRSPVSQRLSCLWAHPRHRPRPCVARTRTREGDYDRPLQAGSSLGRRTSQHGDAPLVGRRERPIGPGVRLDVAPWDQYRTWCAVVRARSIAEAPSAIAYDKQALRSKGYPHLPSHLLSELQITGPRSTFVTPSIVSSPFRAPNAGAQSPSVAKRVVRQRHVEXSVVSSLLYVSSSLQLGAFYALSSHKATQCPRMGVTAFGTFTSAFQLYPHFALKDTTHRGFWWQRPRPGFHPQDKRGRPTKLWGKGSPTRCREGRCHTPSYISVATQDQQTNGPPINALKRTGRIWTPAENGERVGTWKEPGAPSRIKDSPRASGGHSPQRVYQRAQRGHPRDTQAREPSRRGAKKHPRGLVLKQDGGDPAHH

SEQ ID NO: 1001900 - protein, 197 aa, Homo sapiens
  misc_feature (35)..(35): Xaa can be any naturally occurring amino acid
  misc_feature (60)..(60): Xaa can be any naturally occurring amino acid
  misc_feature (69)..(69): Xaa can be any naturally occurring amino acid
  misc_feature (92)..(92): Xaa can be any naturally occurring amino acid
MPRRSSGRWRRGNPTCGRPFVFSVNGGVEFEATWXLMPYVLWPEGNRHLKVFSSRVQLVXEVGNLGVRXARHIGEESQEEYRGSCCVRLQHXVSRLYGTGGATFSVGSAWRNVGGAAPISGDELSQRLFKFGEARRSGNVSTVTIRMVDPQMECKRPETLDRRSCRIRQRVVFRGMCHANGVSKLACSLRYEDYEPI

SEQ ID NO: 1001901 - protein, 73 aa, Homo sapiens
AQTSGDVLSGVSVDMILVCVLLSVSVTLSPWRADDHSLIFITFMLVSSWEQTSQYEKNQYLKIGKGERMVVLC

SEQ ID NO: 1001902 - protein, 331 aa, Homo sapiens
VFTPEDLHICRTRQDEKKKSRDRDEDPRWRTVDLVYRLLAARPMCDGISCCKFLATMICGMLPERYYDEHAVLENFTHPPCVVGQTGDYPVNCLLLLRLCLRGLPPVERGAHLSHLRVWSVDLKGDPKTWLISTTKYPSYPSVMVSFLVSYSCLLNLRRRGRLSIVNKAVSTSYDCLNEYFVCDYAHHSIHACGAPQKTFASVTKLRILVLVCTRGTTCYIPPPDLRGDYNSMRAGLDIRPHVLRLPADRYSKRTTLHAFETSGSLVQNHILPLIGVSMATCVLSSSIQRAPLDVGGQAPPNVSLPCPFVPSAAKLSKPPPIILGVRVRRA

SEQ ID NO: 1001903 - protein, 321 aa, Homo sapiens
ASDCPLDWPQEYRSFLQMAVSFTVPTPGHSSQTSWLQSGSGDKHHFKEYSYVRFQSCQPSPGASLPKHDASWLQARFLGRQWHDELPVCRRTLVQKVVRDRSVVLLIATLEEHSKLRCSWIEVSSYPGLLSRLSTRGVLCSLTPRESYTYGSILAHEGFREQAKQQVNIFLEIGRSNGTHVGRLLLGRLKKGSMSTRRSPRQRATAVRIAGQIRASLGRELTLVPGASKVPFEGKHATLSNSHEHCQARSPAPGSCAPFGKVYPLGQDLPTRTGFVNIVSGHPGVVIQVPGTGRVYTVRIPGSPIAQYKQVTIQVLLDTVV

SEQ ID NO: 1001904 - protein, 150 aa, Homo sapiens
MVGRCHKAFKPDVIDSSYGSCQMDVCNIPLIASDPSVEKPHEHCRFTGIRYAPLAFRLVTLGLNPPAGEGVEDPSMAILAALEVCVTSHSRTFLSNHTVLDSCVHMQALGTVASKACRQLLQHLYVEHLFDVHNDDKDGNDPRSLKETRE

SEQ ID NO: 1001905 - protein, 159 aa, Homo sapiens
  misc_feature (131)..(131): Xaa can be any naturally occurring amino acid
ADVSVYAPPVVRLLFGKLRAGYAVLEADLADRGSIRRFREDVLATTGGTDHRWRVVYIGMDYYVSWSHDYNAAKTDTVMCCIADEGTVSNTYTFDISINILVDLCVAWRHDVRGQQDQLTTPRRRIVRVPXHLAGSRLSIFTLCRSFRSRFADEPIQDA

SEQ ID NO: 1001906 - protein, 286 aa, Homo sapiens
GSPRGPCARPRLGGPCPAAAQAAAPWLPDLSCPRLVRAIDGGCGRRSARAEPLRLQTSCRGYRQHSHLPPKGGLGRWISRPLPQRSSGPVSRAGGVQAQARKRPARWCMLMVLGAVRIICTVDTRCLFWKRASEIVILCARIARTTISGCCQGRAGPRRMGVIALPWGKFRVGTRTPSALTGLSPGQGKRVPGRALRSPGRTTRGARKGAQQGWEETGALGAGAKRQRRTPYGQHEQRRPGCHRNKCPVQKQTPVAAPGEKLGPEASIRAIPKEVHKGTHGRPGYQ

SEQ ID NO: 1001907 - protein, 188 aa, Homo sapiens
  misc_feature (140)..(140): Xaa can be any naturally occurring amino acid
SAFVVHYGVCAAFPLVLYHVSFHNVREPLMSLTLLKEDDVLNIPCWHVTSTEDGTKSLTFQNVDNSYIPSKAGKMVTGDRISTNISSTDLETKCVLAWASTVAHIVASLANAHVCVYVEELIIASRENSTWRIRVWCLNXWHALPTLGAHVTNSLARVHLLERFSNRMIAPRMPFLWNASWLAVVRVD

SEQ ID NO: 1001908 - protein, 271 aa, Homo sapiens
MDGGAELRMSGACDEECGLQSGPPREPWRSSVAILASVGMEFVGQPRRVAGRLVVGCEPWLLHVGIELDRSCWIVATHAMAPEGRGRRLVYAEGAQRHSVHGIILRPLRVGPRDLLAGPVRRRARILELVPSQVCSQADRHACKAGRHAMGTHGAQGCTHTVKGAGSSLPRARPSRHEWFNLGHSSVQAREKTMKGEWVRLLWEKHLERRFASERGSPGSDERGGSHVHSCGHVPSRGKAAWSRCTRVHFGLASLRGEPGLRPGWVVPLVG

SEQ ID NO: 1001909 - protein, 103 aa, Homo sapiens
MNHVVLRGALRPPSHSGLHNKNALVLTLSRGQFRIRNRSRSRFLWGRPGRYKITSQNVLFYKRISSVKAKAMYVLPEVLAATIVVAGKGKTSSHSDLTRNALT

SEQ ID NO: 1001910 - protein, 270 aa, Homo sapiens
QRMQRSRLLRFSEPSPFRFRKSWPPVLAVFVMVSSLEDVRTDMRGAVESSDARKAGDRSVKQGRCLLLSMSEGQRRTIILVGRARNDPGWAEYGSRAGRTESRTAHLCQACMPVVSDVPSIARTMDATLLSQTPMEEPETREDSGEFYPSVGLRAVVLAHSPVSEQQLHSDDALPPYGNVLVRRNAYARPAGLESHWNLANAEADYRARLNGTCCEPLASRQPRVGQCAAQIVALAGPSLSDGAAFLVPTGLGAIMGEPRTVGLGRDRKG

SEQ ID NO: 1001911 - protein, 104 aa, Homo sapiens
MWNFPGRFCFRRNRAGAGLDGFADQGGIGFHTRPRRMSRFTPRFKEKAKGPDYRESNTGALWGVKSRGLRPHENIMFRFYREGSSGQPSLWAISLGADTFPPQV

SEQ ID NO: 1001912 - protein, 301 aa, Homo sapiens
MADDAGAAGGPGGPGGPGDGEPRVASARGFRLVAIRGPEFRCRWIVGRGTEAAELAECKAEAERSAMPDHTKLCRLVKDMKIKSLEEIYLFSLPFNGISRSLTFFLVGLSQRMRFRRIMPRAEGRSRDRLSATRFQGSLFRIIGCTTKGPRWVMGVNVLHTVGGHPSSVAVQSSWASSSIRPRAHDGYWGNKIGKPQTVPCNGDRPVRHLCWYASSLSPRGTGIGLRTCVPKNAVHDGWYRVTVYTIEPGLALAPWGSFANATFDAISKTYRYLNPDLWKDDCIHQGLPIQSSLTTSLRPK

SEQ ID NO: 1001913 - protein, 172 aa, Homo sapiens
GVSADVLVLLLGGRGAADGRRHSGPRRSPSPSAPSPCRCPGGAVAMRHTRGACAVDRVGREDEDGWETRRGPQRPVSPLVEKEVGRARIQRRSLARSLRACLPGRRADGLQGQAWQERPAECLEALTGVGRGSQGVVAWAGGPGERRGEVAPRLCTLSPEDESEHREPDEEE

SEQ ID NO: 1001914 - protein, 463 aa, Homo sapiens
  misc_feature (366)..(366): Xaa can be any naturally occurring amino acid
GKYMGDQSSSMKLMPQHHRRDATCPQQALVPLAGTRVSSLAVVFGRYKTRPDARRRCSLASVCGDVDPRGRKLPTVGYICPREERCQNRERISTDDKSPMDEGIQLDDIDRGAVTGDDRFVSQALASQPGVSSGISSTLTSDEPTLKGVLALTIQGFAWVSGAPMGRRGRNATIPRGPGSSVRQDKTIPWKKAFDGKPIPNRVPRGISRYRYTPIGVPWVTRHSPVVGILCSWRDLLRCNALAGAHCRLGGHPTVEFVVGSHGIGREEAPTATMCPARPQCGTPKRCPRYPLLFQCKLLRRWCPFLRNPNFDFMPSESSLTVRHYVRQCTPSRGVPIGKLEKAPYVSPIIVAANYPKGGWSDAPWXFVDSHYWCDVCNHGTLVALTDMQELDLAFLISSYNNGLLPNPFTATLPLERYMSLSSETSIRERQRIDGYHPSISTPELGPFGTWDTYYSLFHGKQL

SEQ ID NO: 1001915 - protein, 196 aa, Homo sapiens
VSERLCSLSRFHIRICYQRRPRRSQAGPQCPAAPLPATSERRSRQAGWPSLGHPRASLFHLLLREGKMSESSSIVQSALGPPSRTRTASEKRGPGQAAQCMTSEGSPAEVVQTALRRPQGGLTKRDTQQINGCLPKTPGETAEFQEGNHRGQTRKETGRKDAKEGGHLAGVPRRDGPMMQPMAAAGPCFAQAGRVG

SEQ ID NO: 1001916 - protein, 302 aa, Homo sapiens
MYMLVHKEATIPPTLALSGHPDTETHHAPPPAPPHTPRPPPHAPPPPPHHTPHSQENDQMRTEKEYTSEERDTQKNTKTTRTTEKTERQAKEQASTAELENRVRQEKAPGSIGRSKKKSHHRRHTDQTTPQRTSMTISWKAGREKDRPQERTGATRRKKNNRRTKELEETKTNEQRTHESVPNRREKQWNKKTNKHKEATSKSRHQDTSTEHQERSETRKKMAKQKQTVTTTSNQQSHTRLRKSQAIGRHNEWDTNHKRQKREHSKSNHHALQNEQKRKDKHTQATPTQAKQEEDTRKMNAK

SEQ ID NO: 1001917 - protein, 212 aa, Homo sapiens
MAEKFLEGEVPLETFLENFSSMRMLSHLRRVRVEKLQEVVRKPRASQELAGDAPPAIQQALGAPSPAGEHALWCEEQAQPPSAMPPIPLCAYSPSPQTAVWAQLPMEPLTADPFPSSVPDLLLQRGLWAPLSPERPRLGPRGADGLPPGSTERSMSNPDGAILGTPMGWLLGQGYPFAGKAWGPPSTLVSFNKSPYPRKQEETLPNAYCLRS

SEQ ID NO: 1001918 - protein, 296 aa, Homo sapiens
  misc_feature (81)..(81): Xaa can be any naturally occurring amino acid
AKEENFNDSWYVTNTQKTIFFTPFMVPVNFWVDIFTYNVVKSPRRASGSLTPYENRCQCLEAPSYFCAPPHEVQKAWRELXRDRNRASVVGPQVSPSAKCQKAWLNLRGTRGFWAPSSIEGPNLPSEQSGTFKKAACFGGCPRGSQGSLTETGVVCGSRVFIARVRVSQGLKPKKVVSQNLRGGPMAMMCRSSGKNPVGCKQTGLPGVRLLLGVLKPKGQRAVYRPGPESRRRVRRPHEESGPRGPTPSQRNANHDSIRLQQNRGKSSGRGRPRCTSGPKGLQVTRGTTDYIQAKR

SEQ ID NO: 1001919 - protein, 401 aa, Homo sapiens
MRDNSPKRTGGETKTRGPKGTQREEPLINETPTISPHEGRVCENAPQEDKDRGKHLWTQQHGRPLLMNQNPEGRTITPEKGPPKERNFLGEKDNHRETTIGAGETKSTRIPTSGRRKSKRLQLARTPHQKDLSGKSTHIGRDTSHKTLDTNQEALHTRTAEWTTPHSRHGQTSDDNITTKRRHATQPRRPRRERTHTPAGRNNIHGKKKHNNTTDNQITATQTTKHSKNNNRKYNKHRENKTTHGETPTMKRATNTRITDNIHNGTKGRGDPTRTSHHQHKTTDTLSTKEDETTHTEDKNTPLPEENVRQTTEPITSDQKRTTQYHSRKSTQRREKTKDNQNRPHRWTTEKRPRKLTGRTSVEHKYPENTMEEEMTETKHNKRAKGPTDQYNKRAKRPEEP

SEQ ID NO: 1001920 - protein, 361 aa, Homo sapiens
VAKCPGQRECPLVHGSDAVSTTGSPLLESGHYWVTKGKVQVVIRFLTESYRLPSQDPTVRMSIPICTLNEASLMPSSTPCSGLGMSLKASSGRQQKDVQAHGTSADAHSLCGDEALTAGYGTQVPGMVAGWSVQGEPGVCRATTEPGSDCVTMGLCSHLDSTQNSNKIRQLLHNFPPDAAQQAQESPFWSGPNAVHILLTFDVNNPLHLDYVMAAANLFAKNYGLTGSQDRAAVVTFLQSVQVPRIHPQSLASRSMVLEPGAGEAPMALVMTVVSEELKGHLPGQEKSLDQNVPIDFGKGLLSRDFPMGFIRVDPAPAENLKSFWERPEQTCCAESPRMVRTQNGCSLLGCTVQGATCSPK

SEQ ID NO: 1001921 - protein, 103 aa, Homo sapiens
SERKGLRLTELEASPLPVVRLRQKRSRHHDEARVQVGSCESEKASGVPVSVSEPWSGSAKNSALSGDCRRGWCSFLPERKLDCRLASTLGTRLVVDYMARVHV

SEQ ID NO: 1001922 - protein, 323 aa, Homo sapiens
MHEPYHVRAAGLLDGQTTTGWGGSKLLVYFVHIKGGGHVYRHSVPASERRCQIANRRWGSRELALCEKPSVPERCRSSQWNAALRCVCEEPGSALRTGRIGDARMLGSGDSSRGQSRGEDLVDGRSVVEFVSQPSRGHNHLVRFRTLRRWLGGWPRWQGGGRLHIDRDSGRQWVLKSCHGRRRPRKGTLAWSRRSRRSIAVGNPSLAMNGHGERYCGEESVNGAPGSLGLEHSRNEDRIRDRQRAPRPVQKGVGECWQEPKGLGRREWEATFQFAVLSTERKESFGDGTGTRCLLRSRKRGKPTAGTSGAPRVDVLGSESTEA

SEQ ID NO: 1001923 - protein, 139 aa, Homo sapiens
ASCFVPLLARSCDPLEEKGCQVFGIFSFCALVSPHLCGFIYPWSLMMATYRWGFGVDVFFVDVDAIPFCVLVFLLTVRSLSFRSVGVCWKSTPDPQTGISWCCLFSPMCLNPGRGVYMLSSYLLVVCWLVFLQEKKLKK

SEQ ID NO: 1001924 - protein, 257 aa, Homo sapiens
  misc_feature (126)..(126): Xaa can be any naturally occurring amino acid
GGGHLQRQVVHAQGYAGAWARARTRLPLANCHLIGALQLARGRSRRQQRLPASRFVGRQRLPELSIVSYSRACAFIVPDTDWSAVDIITAKMHRTRDKWLCIRDAGRHMAGVRCAGIPRSEQPTGXSVLPSRQKDRLRHVERAIGIDFSWETLPPPIRVTPFPGARRGSIGEVSARNPYRGATWLSGEQEIEGSNTALDSRVSGGVGQATNLLHVRTHVPIDRWVAALGLACTEGNRKGIRHRRRMSLDPGNLPKSF

SEQ ID NO: 1001925 - protein, 239 aa, Homo sapiens
RRGAVLSGCRIAAPSTSASCCLLLLSNMCVNTPPSFCWGPHPLDTVFGGYYFVGANIVSLRNGATIRLLSGGIPLVGVFLLPTGECFWGLWRSPCALCYSLACSPLRVSGLWEMMVRVGKKWHVPREEEYERLRLILREASEKCFNAVLCMRQAVGYSGACPALSRHPSANVTSTALSPSDLPVMPYPLRKHGVPYTLVPWHLDRPWSGPRPLGRVLPQLPTCLLNMRVPVCWMSVAVS

SEQ ID NO: 1001926 - protein, 218 aa, Homo sapiens
SLLVEAHHVSLKSPPFIDKTEVVQRALIATRGRAVYDSRSLRCEDAGRTSSILAFGPQRSFSLSSHIEGDIVGPPLGAVHQGRSDSFYVQHLSCPPSSRSSCRPPVHSVGAHFLIGLTMHGDWTVLVSYELVWDPNGAVVISLFFLRSGICCKRSVIYDVLSQLWRLRSPISSRDVFLLVYVVLEEMIGLRSAPLSRHFTPALGSGGCPFLILLASDR

SEQ ID NO: 1001927 - protein, 309 aa, Homo sapiens
CLEKALWSDDQIQSLGLSSSRIPSLVSLVSALRLVPPVISSAVSPVKYDHSRDERIASTYSSLGIPAPMLSDLYESIRASIVAHESNAGVTVHALLGEYSASPALMPDITLHGTERLTPTCDLDSSGPSSSTSSPGIIPPGDQLEGHKAHTAVASTTRELLSAPLDGHMPISPQVKSGLLSYQATLKFIFPTVFFILICMPNILPVLLFTQHDTLDMRLKPLRLWRETGSEMDNLASCRVPCFLTSSLIGICKQLRVPQYHGVLADQGHLGQWAIWTKGWGVGALDGSLLAQSMNTSCASSLNYCFTRA

SEQ ID NO: 1001928 - protein, 251 aa, Homo sapiens
MRYLWIDHGVRNVHVSIQPSVVNCLKTATLVTNKTYQEHCLGQGREEYDPLRALRALPRKRLSTWAHTLRRNVCTQSLGPGSELLQGKNVLARNHIPGKESPYYPIPVHVPECAEGAPVSDTTGKGIIMLKAGGLTGYSRNFNLLGKHAVEEPPLAVGTRGVDRPLRAGQCYGPAEAPFQPTCSRLALFVRDGAPERGSFPKGCVPRLGRLGVRLLVPELPPVFSRVDRGLYCRALVVGSPRRRSVSAGSF

SEQ ID NO: 1001929 - protein, 321 aa, Homo sapiens
MPLLQERPPAYNLEAGQGDYACGPHGYGAIPAAPPRRYLSLPRHRDTHPAIAMGSTNIQQTDRHPYIHANSIVVVEMAVLSSMGWECMERLLHLSWGIFSGHSSSFPLGGIIMPVKRLEGKRRMHPICASHPYAEREHHDRNIPTTQLIYIPYCYNCSGTSKIYYDLTPFTGLDYRKSRRCVTLNGGTNGHADGESPGAAGHNAKLCHCPHQTPKSSNHTNLQITRHLTTELILATSYTFSYNGILNNHCSFNSPCNNSDTHFNTTNNNEHPHITANHTTTTTNKHTRTNFHMLRPRLHTPYTINHKHHVPKPVYHPGRLP

SEQ ID NO: 1001930 - protein, 346 aa, Homo sapiens
QASPQRALDPSPALLTAWPSSEELELGPVPSAPEERCKWFECQQTAVTPEVPAGEWAAPVAWVPPWLRTSNNRLSEEIEQEVAGAGEAAPAWRIMRWCPSLPCLKPIAAESAEWPPSDWPRGTGVRRFRLFGPSLYGCGVSKGRLLRSCTEIPRRTGHIPTVATFFTWRHVELQPLSMQMEFLCTSTGEWKELPGRATNRCREPCTPPCTCSEERDVGSLGLSAARGTRTVSLKPFAMPIDSKGPIHRNTGSDALAARLEGHSQSRRDSSSQGQGVYPVEVGSHPPGTVASHPKLTDLLVDPATLEWPHEGLEKRLRLSSGARSLVSLRHSTAAVAYGHEFSGRLL

SEQ ID NO: 1001931 - protein, 202 aa, Homo sapiens
MRCSRPSRQAAAFSDRSNDSGVRQGRPGGTGCPAAATGIYSKSPQTRGGPGPGEKTANRGQAGAPAPGRRQPTRPTRSQQAQHQAQAAQAAGKRPISVGHRWQPALAAQPGPPARQRRPVSGPGAPRRQPRGAAGTRKSSLSHLNSSGSEYGTMSMTPPCYTVGTLGEKDTRAGPRPKRSASPLHLSARKYRPPSTRCYTRL

SEQ ID NO: 1001932 - protein, 31 aa, Homo sapiens
MTRATPICVHHGRPAHTLTVAPTKRTTPRDM

SEQ ID NO: 1001933 - protein, 148 aa, Homo sapiens
MVYRAAFLANVVRIVRHPVYLQCQDGGSKASPSMLLDCLSRGTQELSTLSLGVRYAVHVALAFCLIALCIVGNAQTQMCPSRTRCPWLIHSKLRPNRKPTFSVHSVLLVSLIVSEIGTPPHLQAPQAMKRGHNANVAPAWRAQSPQLA

SEQ ID NO: 1001934 - protein, 451 aa, Homo sapiens
  misc_feature (145)..(145): Xaa can be any naturally occurring amino acid
  misc_feature (262)..(262): Xaa can be any naturally occurring amino acid
ERTSLKFLWYISLFFFVAPPSPPNLRAPQNCFFYKNCTKRGVFPFFQGGWTHGVLVAQTPGGPGCPLSLGQAIAFACTARGVSPPLMRTDGCPSRQGGVPYRGALSRGGLPPPHVVWRSLTPQIQRCGAPLSQISCDRYILCGEXCAGGILDLMCLILGVDTRGPTCGMQELPCGMIAPVLSRPRGNSLPPTGYNSRYEKKATPTEINTSNSFVRAAYLSRSSWSPPVCHNTPAAAPSTLAVSITPRSVSGCHSTPTAWWGXQTAPPIRPADKTVCDQLKGANLLPRLINPQSGQTWLDAVMRVGHKEVTKRKCTVRPQHIVVFPPRQGETPIPVITAVCGTQHVGRTHTICVMAGPPRWFAVSTTPVASTAMMLYHTKHANRCATLADHNRYNVVTLNSAPQTHTRGFCAADPATTDVYSGAMMKLLLHGGPITWPHYQNCASYMHGTTT

SEQ ID NO: 1001935 - protein, 239 aa, Homo sapiens
  misc_feature (67)..(67): Xaa can be any naturally occurring amino acid
  misc_feature (159)..(159): Xaa can be any naturally occurring amino acid
MGKFGPLFPSLWQPQWNSLTQQATLLGRRKSPLAPFWRCIMALFYAICGPHNCAIGAVCRLGVRKLXSTTCGDHCPCSIPNQAPRMCENASTPLSGLVGTCGPCVGARDISNSGNPRHRGAPELTVTGSEPSLATEHCEETPPFPNIWEAWVICQPRGXALQRYARGYQPAAALGHIGGSSTFPNFITPPVGPKFNSTHRPHDFEQLRDPQIGVGFANSSGHLVSPFQVGIFNPRIQSA

SEQ ID NO: 1001936 - protein, 118 aa, Homo sapiens
AHATIIPKVFAHAPETPSTLHRMTTLFCINVLSEVFGQDITTIAHATHVFCACAGDPVANVRFNAATKSLPEDEGPSLDYSTLQSEVKPILEKLTQDQDVDLKYICPGGSDMFCLSPR

SEQ ID NO: 1001937 - protein, 126 aa, Homo sapiens
MCHRFFHISREDAMHYMSRSTVPYDTSRYNGLLACWVTSSHIANCLKCFQRLRSNPKSAKGYEPIKFRLDLAVGFSIPVSVMGINILALYSIVCDCVLRLRNVIILGETICRICMRDGEHAKDEIW

SEQ ID NO: 1001938 - protein, 229 aa, Homo sapiens
MKHKISLVPEMCAHELLPLIEAQGRVVNVSSIMSSHDALKKLADQSCYAEVPPGETITEEEPGGAHLNKVVGGYQEGAAPKGEVLAQQVSIRWLTEKFGVTEFCSRIPALGTPDFKHKDKGYRGFLPGMPSGPGGVRTDHAGPSASKKPLTQSGGENPRVYQCGLFGPQNAERVPSGAFCFDKQVYRDDGSCSRPSECRNLAPFSSVPKGVYRATNTLFADKVSFLSHT

SEQ ID NO: 1001939 - protein, 103 aa, Homo sapiens
  misc_feature (27)..(27): Xaa can be any naturally occurring amino acid
  misc_feature (103)..(103): Xaa can be any naturally occurring amino acid
MVAPWDLLVRYNLLGTLNMSSRMEESXRSWEDPITRRYDVTIRNPIDADCIQSNKRHQEYGMRRTTLNWYRTEWRIYKRICPGEGMLLIRNFGMFGDPVDYGX

SEQ ID NO: 1001940 - protein, 228 aa, Homo sapiens
  misc_feature (40)..(40): Xaa can be any naturally occurring amino acid
SCWRGIEARLRGTFGSGRWLCSAGEGAGPAAVALSPSCDXCPARLLVTAALCETPSVLALEGSAVACGPAGPGLPIAGHRLRCLVGALRTAWALCALCGSRPRVGLSARMRLLRQDRFNLGGWKGSPCPCAHGPQGPKSLVGTLEALPGHAAGPTPGTQPVPERPLYTPTVFERLTEAPCEWLGEFSLNESAPLWWAPAGGKQRQPLCAGMDHLRRNVLSETSTSWDQ

SEQ ID NO: 1001941 - protein, 228 aa, Homo sapiens
MSLCYSCPRPPVCRTVLECPSCSTPQCAADSQEALLVDPWPDSSRDSPYTKRSTTDQVRARVIEVVTPRWFGLARKSEQRVLMHNNRPLTRKVGTSTRQGSTMSSLRVPPDLAWTERCRPGSRVPLLLLRGAPVASHPLAFHLAHIAPLTACLGSMANSFMALGPQAFLAPMRVLALAPRPFLSLFMDSQPWSCSAPISLEDMVVPTDVAIAFVKPCAIWGIIGAPVS

SEQ ID NO: 1001942 - protein, 109 aa, Homo sapiens
MSPLSEYNEQGGTYSYRRTANETRWEYPVNSETGHGSRRSYRIPTFSIGNAFSERNTASYSGSVVQHNMVQHTTPVFPVNSFIAQQITQNYDPTSYGMTYFPVSPTFSL

SEQ ID NO: 1001943 - protein, 119 aa, Homo sapiens
SKIPILDSRECGPYAMSGHGCPVCDLTESTCAAKVIGVVPAERQRREKVICEHQVTCLQRSVRSHTLGLNLDGLMEQDILPKVQLKSIPKRNGPDSYVVYESHQGRNHCCRQPGAWTHV

SEQ ID NO: 1001944 - protein, 200 aa, Homo sapiens
ELQVTWTLQSAVSLPRDDQLKVIECNVRVSRSFPFVSKTLGVDLVALGTRDHHGGRSGTCGGLSDVGSGVCGSNRCLMFSFSRLGVVHDVVLGVVNDQYWESVGRLWGDALGGISPKGMSKSVAKDPQGRNNPVVTIESFYNFKRVVPMDVLAIVEEAWDYMTLVPGLEYKSDFYTETWLSKVTKLWTDTLEEAVDGEMT

SEQ ID NO: 1001945 - protein, 243 aa, Homo sapiens
EAFAKVICNSFTICNAEMMRSGCEGYIPDISLLNARVCDPKCSMVVQLGAKLVTAEARSREHQQVVVEELTDLRLRWVSLRDEPSAGSAVRASLQGPDTALWNVHWLSVRLQSEDKVCVDHAYNVCSIEGEKVMVEQGKSLPDEYFPRVDHTYGWNKKSIVEGATNIAKKSREGHGSPWPIVGTRRQKSITRYDKVSGNWTVPPSDSTNLFMAERRCVQSRRPCGVDCNLQLQGLVGSERLWF

SEQ ID NO: 1001946 - protein, 252 aa, Homo sapiens
EIEVEIIPVDTIETTVVGEEEEEDDDDEDVRAVAYTRVWSVGVPSGTPARPNTTSIITSSYPPMIVLAARLSLTDGSLTPRVHAPASEDDPGCSTREEVGAAGVPTLWTGLSRLMRTVLLRHLDSFLPVASRLARLADSSEHTTLNEGLLGQPWLAVPAIDAGSAGWTSSLFCATCRTAVKERGRGAHQESARTSYLSRPWAVLRRERSCRRRPAAHKRGGIENAGCSIKTPGGLNVLASCSVGPQHDPGCC

SEQ ID NO: 1001947 - protein, 179 aa, Homo sapiens
MKSEFDESWKESTLQPLSKKAYYACGNSADALSSSAKDRAVRASSALVRHLQNSVITSLDHAYNTEPCDCSLVTMSLWSCTSSWNCDSHVLGSRGDKLGSPMRSTTYKSTYNHGIFSQSDRLEIYDRRVVTRGITDEIARPLTSKLRHGHRERSLYLAFFVKQLRLDIDTSAFLGKRRR

SEQ ID NO: 1001948 - protein, 177 aa, Homo sapiens
AVSRVHQPDEQRWRSGAMVKMAAVAVTTAAAVRAAGPPNACSTTDYAGEQHGGGGWWRCEEPWSEGGGERLGRTTMTRTKSLSSPVVHIQELIDGVVEADLDGGLAGVWNLISYVVVMPNEETSTGGVCRCVGGLHLMDVGRRGPDIRLVDRAQRAVQNSSRQSEKDRPSDRGVPRE

SEQ ID NO: 1001949 - protein, 93 aa, Homo sapiens
MARHFPGRATYCGISAYAGVRATVFAHSCSKFRILDLYCACRFHQCVQSISYCHEAKYFSSVCHPRSTFVPLPQIFFPNPSWLDFAGSHGSRS

SEQ ID NO: 1001950 - protein, 78 aa, Homo sapiens
MYWTKTFRALYGLSKNPRGKRKSSGRNEEGFKAEFVKSPSYKATEVEGLFEERRKLASVEDGTKRLCERLVRTILVVR

SEQ ID NO: 1001951 - protein, 259 aa, Homo sapiens
  misc_feature (107)..(107): Xaa can be any naturally occurring amino acid
MGESRKVKLKKVQDQYAQVLMSPNARREQVVSAGLTRRHHIVLGPEGDLIEVQRRSRGASRGRRGQTAESTLAPRRRNSPYWNKVRSHGHRCRRFESQVTENEEFSXTCPPPSGGRLEAVKVGESSLWDTAGTRLGRAHDGRRLRVTGPLGVAWARSNQPQVDNRDSRLGEQQCMQHCAKGPWGAMGGYRLGPTRNDNGTHESRTRITVLLSEPKSMDGGGHSVPRVVNDIAPRHVASQEVRNGMDARTGPKQKRENEE

SEQ ID NO: 1001952 - protein, 265 aa, Homo sapiens
MHSFTHCTRPCLRPYRHWLCRNYAQSFTQSAGTRSSGRARVWRCWQTVLMLADPSGPCKPCTGRTYFTGRHGHTVRSCKTSSQLMETDNAAAMSLLTTVTGHTEVASHGVKMPGAVPGHSGARDKLRTRRTLEYGQEPVQSTPRGIQWAIRSQVRPFRQCVTSTVLDPEKVTEHTGQAAGHPGISELTLGYLKSKGEVDDETLFQGHKGRTMRIRCPTAGYLDDPWRTKPFKQVANVPYSPGSLGTDNPSQPRWRAGIPSNAESE

SEQ ID NO: 1001953 - protein, 182 aa, Homo sapiens
MPPCGGIGHWPLWEHLGGWGHVTPRTHGPRRRDIFTAFVSAGLETARHNGNSSSLAYKINFGPPYVGAIQRKTFGTPRAGTISLPTEAITKAVPRYRSPRSSWQFSNTSSGGVYSARSNSANLGARDYVTQRERVAFDTLKGTVGAAPRTLESRHFCGHGFGVESCPHDRGALYKRRCDSPQ

SEQ ID NO: 1001954 - protein, 211 aa, Homo sapiens
MAAVKASTSEELPGLLGILIRYMQDSGNMIIRAIGLDARANHDAYRQGRGIHGVNLPWYLPSALIPQSSYDNEAAYPQCFYDHHVAVAGRTPCEDRVTFQKIWADIHVRAVGVQACMKEDRAWSKEEEMETERDAEVECDLSDVEISEELRQYFAETERHRRRTTAGSEQLDAELLDSYVNADDELYVTDRRSVEAQTERLVSGARRDERW

SEQ ID NO: 1001955 - protein, 66 aa, Homo sapiens
GEATAAVESAGVGEEEEEEDGGGDGPGEGEMLRLAQTPRRLTSPFRVTYRLWGHLIEFRRRRLIKA

SEQ ID NO: 1001956 - protein, 94 aa, Homo sapiens
MAKFPTSPRTRKRCNQPTNGERGWMAKEIKTGDRTTMGRRKVIGEWTDIGGKTGGRKSCEKLLGEQRGLVNEGNTLGGRSGGFRGNVFYRPGAC

SEQ ID NO: 1001957 - protein, 229 aa, Homo sapiens
GELVAGPPATSDVAMLYFSWWWAARPSAEMWAAWIRMAIAGSCTDETQPETQTGEANRGWTGQESLSDSDPEMWEWLQREKEQAVSLAVEASLPSENCLAAERARGRPVGSCLNNKYSEGDPGKRYYGGAEVVDEIELLCQRRALEAFDLDPCTVGSQCPSLIRVPSQAGRLHSTFCNLTNGSWRLDLADGGQSQTKATCLNVERISARPSIYESMPYKLNPKNWAHWS

SEQ ID NO: 1001958 - protein, 376 aa, Homo sapiens
  misc_feature (20)..(20): Xaa can be any naturally occurring amino acid
GPGCFGVCRRHRCLFPDCDXSIDRQPLQLLSFRTPLRLPETMCIPAPVAAAPAHPLAAPMGIQQSAGRPYGGKRSQMTPWQSFTTPTIPDLFQQFHYGGNPIPLAWKPAPLAPLYPKFVDIHPNFQRSHSIESYVPERRNNPLREAPIFPAQEYKARQKATTMASIQRCATKFFHPKSGEGVTSMRTPEKTDFPKRGQPFMRASQKQMGFSLAHAGPPSIPKLCGNQYDSLQFPYGIRHNIRYLIYDHHPEIYEDDHIFERPKNFTMSGNSPPHIGTTRPRQLLRTPLSFPENGASTTNLERPTTTNDRCSESPEPHPTQEERETNPHGKVAPPPTTEPGAHKAPHPHKDTKPGAATNKTTVAAPPKSEAHAQIYP

SEQ ID NO: 1001959 - protein, 205 aa, Homo sapiens
MVVTGVSQCALAHLMKPRCQNDDDATVDIAGGISALNHALDLGLGLLAQFVDPLSVPTLRHYAFPIARLLREIRLSKADLRPIRGLCEEFTSVPRADSYRGGDARRELTPFPKNIFPRLGFGLFCPGSCWPSMVGLGPVSWGGYTPGVFLPGGVALRTLCSQRGALYGRWQRVSPLWRGFSWACAPFVVTSPPVVGRYWSRGGLW

SEQ ID NO: 1001960 - protein, 68 aa, Homo sapiens
SPSGESDLSGCVVVVSESGSALSSMCLSQLTVRAGLRWNFKGELLSHYSDKDGDGTSHESYIMEVGNV

SEQ ID NO: 1001961 - protein, 74 aa, Homo sapiens
MREQDQAVHLWRYERRLSEPSQKVTDLELRDKYTEIFGHSVRHEVYMLLSRKNRLPVGASVLDWACAQIRTVVS

SEQ ID NO: 1001962 - protein, 53 aa, Homo sapiens
MGAPQRAVGLSPHLREFRTRPPKGEAQHSVEFRHGRMSDRTRSGHTRFPLVER

SEQ ID NO: 1001963 - protein, 206 aa, Homo sapiens
MYTAIPQSGSPFPGSVQDPGLHVWRVEKLKPVPVAQENQAVFFSGDSYLVLHNGPEEVSHLHLWIGQQSSRDEQGGWLRVAWVGAPENSRRVVEERRLCAAPRGAGANESDLFMSYFPRGLKYQEGGVESAFHKTSTGAPAAIKKLYPGGKGKKEHPCHRAGTLNLRQFQQLGTASFWELVGQNIFAWCGGKSNILERNKARDLAL

SEQ ID NO: 1001964 - protein, 335 aa, Homo sapiens
ASSGYPALRRGPSDVGHSSRCSCSARTQSVNPEEKYTSGNQSSAVKTIADIIRTCLWTLESSDEDDFVDANGIALCVMQLMAMPVLRELQVQASSWSNVHDLTLAWTQDERGWTTGTSIRNYSCEGKCCLELSSFLEQRDAPNSGDHVLSREGMDDYDQHPKENKYPSLTSVTVIWLLNIIKQLYYYQSHQSVVIFALCNIALDAVKHGYSLEENGRAQQIDIGPLVRKKLGTVTYTDESTHMKDLSELTSVQVCDLTGIVISIHSYPGANNQEALRTFEACVDSILLELTVKRRKAGWPLQHYTDDEGSTPEIPQLGDEVIQPYAARNNPTEPV

SEQ ID NO: 1001965 - protein, 274 aa, Homo sapiens
MTSSPVSRVVYNGKRTSSPRSPPSSSEIFTPGHEENVRFIYEAWQGVERDCEAGAGWRAGLAGWSMWMKVPGPEPETTFKPIDLSELKRRKPRQDAKEVLERTRAPSHGTPEDKGSRGENEGASELTSRAAGTGLDMGSLKWSGLQDNGQRQHLSSTWQLHTRAGTTFAWHRRWALGTNSLEEHHVKEQYRLTRTQAPGPSIRTREIKALRELDTITVIVGARGRIHGREGPTPTWGYTKGSPKAIGHPMGWYTGGLRTVDHIVHEQPHKGIDE

SEQ ID NO: 1001966 - protein, 105 aa, Homo sapiens
MWKDSVHVASGLQWSQRPYALTASGNARFSHLNSRNGNALGEHVTNDALCEDSLWRKFCIIRHITVVIQGLKQGEHIDQSKVKLGTWMRYYAGLCALEMDASEWA

SEQ ID NO: 1001967 - protein, 160 aa, Homo sapiens
MRTKLGGAGTREQRELMDTRTLQRRVMTTQYIISVPSKSNKKLCAGPTVPTLGGLVFLVEHVESLRGDPYSYPIHSVERYLGQKQRKSSGIPDQNRVVMHLFDRRTLAISQSHLKARNVRGSIRYDAMRRRPHRTYGKIPICWSSTWSRTQTRSFEIHSR

SEQ ID NO: 1001968 - protein, 107 aa, Homo sapiens
MRDSDYLQLIARRTRGKLRPLGQDQAFIEAAYGPTQALTPQELPGPPFRGWEPFSPSEGPQTVGTSKELLVDRLASMVWNNLRGTEEARFGANHEPPSYTYKGKAVG

SEQ ID NO: 1001969 - protein, 236 aa, Homo sapiens
MAWTHVAPNICRTPRVEPSPKQSGGVLPYPVGGQRVPPAKRGSLTISVGTTKVPLGNLQRPLAQTRNSLTRKKEDPNNGTREVTQANNPLKRSDTWDTELFLRRHQVLVLGAHTGKGPLGPMAQRPGGTFPRGAPEGGRQQRLSKVPRRIPPKGPNNRKAQGPFMETNKAFRAQRRHTANGVAQAITGKHEKGERLSTGTEGNPLCGTGLFRVDPRPIGKVAAPFYVGAAHTIGRE

SEQ ID NO: 1001970 - protein, 282 aa, Homo sapiens
MREGIVGGEANVTNFLEPQRVLSSSLTVPSAAEVTELHPVWLEAVVPAMTFARNSPGGPTRYLSVAPFCQTTIDQSSTSSRFLQCECGLERQLSDQYTPSGNTESWRKRWLRGGVRPAQVRATWYRLYCLQKKAYDDKQRIKKRTRGGHGAETRSTILDEPRDTMPGVYVSYGPYTRLVSTQWEQAAAWVVCSTVLNRGRTVNVVPRSTHMAPNADFPPESLRAPGLLGPSGRILLVSRGREPSYTGIAPSMYRGSYEGTDRHSCLAIEPTGSEFRISDLGT

SEQ ID NO: 1001971 - protein, 250 aa, Homo sapiens
FKMKRTSLCCPGWIAWCNLSSLKPLATRGSKRFSWPQFLEYAGDYRAPATGARANFGILSGKIGFTILPRLGLEPLDLVIQPALRPSQKGAWGIHERYEPTTTARFCFVVFLNNKREMCQEAGQGRQASCEPIKSGDFWKFFFSFYFSGEKGSSWPLVFQRGWECRKVGYGSVKAQLAEPYGIPPVGFQEFEFVLPVPLGARVVDSIRYREIYNVGDTPGPTERGPTRYKSFGENSPQHGLNTPGRVLEN

SEQ ID NO: 1001972 - protein, 58 aa, Homo sapiens
MGDDETDSDVQACALGATGDLTHQSGVKRQSSPEKPAETGALCNEVQLTPYFAKVSGD

SEQ ID NO: 1001973 - protein, 192 aa, Homo sapiens
KDYNMNGQRVDEKYRAEHVLLTCSSEEIVCMIMRSSTLKLALEVCKQSVENVVTDVSIRGSLARRFHSRRGLGSMEEFRDKHRLRMRKRQSLIMDAIHNTKESYNSRITMDAKKNYEQKCRDKDERRRRPSVRSAKLVNPKATRKASQVKVGTSKTAVDGRQTEAYMVQDSGAWYKVREEWQSEHDQGLRGI

SEQ ID NO: 1001974 - protein, 209 aa, Homo sapiens
MTSQRRRPQQVQSRAATQLSSWVSGGKRAEEGHVPSAWGRGPVMLHVAFSQQGATREGLVRENNGRGDLLKENREERERFESALHSHGGSVLSYLASALKGQILSAVLTFGKRPLSQCHLSVSSSSVLKAVDIQWLRIPSPLVLRIPGSSETGQEQGWWGQWLCESREGHVLLDYVVIAPYNRFSRRFSEEEMLLVRDEAAAGAPWELC

SEQ ID NO: 1001975 - protein, 248 aa, Homo sapiens
MPGCVTVNTDVDTTAVHASVKSLLLTSTFPSSNVREKLEEVPSELGSDTRTNRMDQSTYKKFASTMTEEDLSSYELRILASRQDCEYAVTILWVGCFGVFRTFSIEAIGSLVECEYRYQERKQVVSNDSRRVTVSMSRRSHPQKEVVEVHVASGVPVPKAPHAVWGGIANRFGFGKYTVRKGNCASGRSAKPLDRHSPSGDTKNGGISLGNEGKSSRVYQWVVAMCVRHKKRYGKGAIFSRNRNSYWC

SEQ ID NO: 1001976 - protein, 98 aa, Homo sapiens
TEVSDEWGCEKLQESRNVLLVNRMLMKRQNVEIPGYPMIGWPKSMWLNDWRICDSFENSKTSSSMRQILNSCRITTGLLDQKSVSDDPNQLVNPNKTI

SEQ ID NO: 1001977 - protein, 93 aa, Homo sapiens
AARISHGGHEFVAAGFGNCGGNSVWPVPLRHSPRIPRGLYLRAQVGCIQTGLAASLVYRTQVDDAMEKRRRMSVQYMTVSRILSTRRSWWISY

SEQ ID NO: 1001978 - protein, 157 aa, Homo sapiens
MAPRARGAPSWAPREWPTESAGDTTARGHEETKKTREERDNSMKRKKQERRNEKEQEETHKKHRRDEENNDEKRRGKKGRTQRKKERKRKKEQTQRTEKEQDKRNGRKKRQQKERKKEKTRANKKETKETEQKKNKTERETRRSDSAKTRKEGDKEE

SEQ ID NO: 1001979 - protein, 421 aa, Homo sapiens
MSFTKRFLPGIDERREDSSFERYGNQVGFGLASSGAHRMAHDMWTMDDVDRRMTSEFGSDINLCAELPRQHTLNGSIADDQSQRRLASATRYQYGEREGRKTNKGLSAGYRVYDCGCLVRLDMNGYAGQGRSARTTVALCSPAKTLAMYTYVSRGLVNVYSSDEGNSAMAEVHSFGNQWTPNEVQARKPENVTYQLDRNARGKHMVCRGNFWDLFLGLGVQRKPWWAFGHTVALTRVGHAVGSAIDEPTAVSHSVGEKCSPIKGTTTWSFEDVEEHEETRQTVEKLCHVGVVQTQMGWWGCPQRGQPRLSSPRWLGSVAEVCPFLPLIRCWPQCGACARRSVQSRMGPHQGALGRKRMGPGKGTTNGTDTQEGKGERERTGGQEHLRGRNTTWGAAIAPKEMWPVAKDIAAKRVPKSGDNG

SEQ ID NO: 1001980 - protein, 409 aa, Homo sapiens
ATADERRCGSRRVRADQGTMTSERLWTASSIQKASSRRGDDPRVDRSASSCVTTTFMSHSLLMEASVLEVAESSCSRGRSVLWTFYPRESVEIRAASKHTCRDTDKEQEMSSRDGTGPVLGVVDCAETGVPWSGAMDVTLTAKGPVGRADEPKGLHMAGGRLRLERARYPWHGGLSALSEGAQVDQLKAYDLLKGAICPTIFPAYVCQVSHNRTSITGFRVDPFLRRHELGVFNFVVVEETTALADFLGTIAELKLTYADRALRGSYWCDRQRGKVAFGSARVARQRGIGLGRLSPGLGGNMERTGGPFDRHTGGATFPGRGVGIGGTHPSLGKGRRLVPIPLGILPLFNRQQWQRFTFGSTFVAQNPEYPMACHFGTQNVKGMSFILWVTTPTSPWDIHTCIGFIDHG

SEQ ID NO: 1001981 - protein, 274 aa, Homo sapiens
GQFSHSGSSADPPSCYSAGRKWTEEIAALVIENGSGMCISWLAGDDALRIVLSFHRQGAPYTQGDQWWCMEPRNGRTYSGRQRPHDANAVVNPGACKYPRLEHWHRAANCGTTMVRKILAEHSTVSINGACVVGLREDATQCVLTEDPAVENPEGPDRGDDDLRLCLRPSITRFMYVAIQAVAVRLYAILWLQPLVIVMDSAETWVSHIGAHLARCYAHRPYVRDPCVWDPGLARDLTRGTSMNDPQLSEGYELHRPTAEREIVREDQGEACCY

SEQ ID NO: 1001982 - protein, 273 aa, Homo sapiens
  misc_feature (81)..(81): Xaa can be any naturally occurring amino acid
KRKSAEKDRLMVSTKENECSVFQLVESSKQSMTEKEKRKLLNKLTKSTDESWKQDEMNKSLPKRAWLVLILPRLHIGNNTXREAATESIVELGEGQEFNFNVNKLNQYSQHISLFGQTLTGMPHARFTGAISEDVTLTQDIQAGNGRNGNDIYGKTELEFRVNGITSKKILKSAVDKERRKSLVKPELWRLAVEELGESLKKTRKAWNELLKTYSSDLLLCSDAKSQKETAALMDDEQFETMTFGKQNSYKTVINVSRNLSKDLNPAILGSKF

SEQ ID NO: 1001983 - protein, 190 aa, Homo sapiens
RTSLEFYYVYWRPQVIEMGHFIEAPGPRGPGQDGCPSRKRTTLLDLLLGTQVVGVTTLLLAAVDSTEGEKASIALAGDHLVAVVFLEQRWLEKEGLRLMPPRRRKTMVQGETLPGCGSRDKKMCGILQLLAGKYQTLLVRWDTLLYLEIWAYDILNGVTGLDLKGEWFCQGGIYTKDRAMLAVRRDLSPN

SEQ ID NO: 1001984 - protein, 295 aa, Homo sapiens
GHRRSAKSESCAFSLPEYSMSFTYSSPPSPSSTGPWALSRRPRYCRPERVPAAAGPAVYAKALGCSWFPDSPCPAPAWLQWVGMGSGGLGRAGKRGGLGGIGMRPSNDDRRACRALVERLALFHSRTGVDRSLADRESDWLGEQTDSPGALLEKGQGPTGSTRLGDHELLRCYAEWTLDGLRIYLPRVTVGQIVLGISTLEHCSGALSCMLDEIPWSPVMRHELADAARSVDELTSMVVRHRIVDDAKCHRVKLEDRRIAALKEELLFIEEEPEEDVKRGKRPKWQVWVDRKEDG

SEQ ID NO: 1001985 - protein, 548 aa, Homo sapiens
DPILNSKDTRGRIHKSLRSWTAIRCRWDEGHEKTRVGSNYSGWSPWKAWQAQLRSRDSRRRLQLRTRTSRHYAEHTPHRVTLKSHVSFRLLARGKPCVRRAFTGGRRNDRREVHVTPRFHASRHVLPPRTVKPLHVRRHRILHRIIHRIRGDKGRALTNMVPRVLAWRKTWGGRTPVARSSKGSTLVPVPQAEGSRCSESTPKAVDGGGKERNTGSTEGPGRPSGKDLCGGGVTLFAWPGEADSVGNCANWGSRAFVRKGRMGIEAGVKGNRCTLRNEHQPKEKVLDGRKGRLFRAFLRPKKVGASEFLVVRYTRSGPPGPRKGIRLPVCKQPISLARGVFLSALDWLETIRGPGGRGAEQGMGVRALWRKAVAALTRRKPAIFPRKGERTDTYGSRWPTRIVHGVTTTVCGTRLYVRPAWTTRHTNNGKPDNCQLTRERARAPEVIRKRCNTCLEQPRGVSTRSRLMGVRPQLPSVLRATLTAPRDWKEVGTKVSRRGIVNPAERPKQDQNCTWATEGIPQGGRDKRENHAGERERANGELREGGDH

SEQ ID NO: 1001986 - protein, 421 aa, Homo sapiens
  misc_feature (231)..(231): Xaa can be any naturally occurring amino acid
DAHTSIIVDRAALRLRMMEQLKLSYRMQLDLDYIQGHVWALWCNTCSSIARVQHREAYALALGPVVCSRLACAPVGLQSTLVRLGLCLAEGGDVDYDTRVDGLTCSYYQGVQPAHWEQPQSKDLSGYLHNYGRSIVPFLRPLPNVFIGPRFLNVRKKSTRTEGSGTSIGHTEIDCWRPVHIGGERVEAIKVTRKARPCVLRNSCLKGARIDSISLDIGHGIDIGLLHNGVXPTIVSTALVRRQLEIELQGKDFGQGVSISPRSGALMDHQGPEIGNKFLTERHNLGEFRSNLGVDPTKDPLTLDGGPFEYLTPGGKNDRTSEDGFGHMTWLIFPPAIWKTFLKVAFRVVWRPQKLVPQEFEPEWNGPFNKFLFLFAGGQQNTKGNAPVRRGERGRCVKPHGPRNSVVTGRKPCSPLWFLAD

SEQ ID NO: 1001987 - protein, 114 aa, Homo sapiens
  misc_feature (44)..(44): Xaa can be any naturally occurring amino acid
  misc_feature (49)..(49): Xaa can be any naturally occurring amino acid
DSALLLSRRCWLLSLDPYHWRRPSQDPPHSQLVLLGSLVIFSQXHLLTXVGESSYIPLARGTSTIVHFIHPFPRPSRFLQFPLQIRKQEIWGSWAILYQKGGGVGQEETPVAVI

SEQ ID NO: 1001988 - protein, 32 aa, Homo sapiens
MKPPGHKPNTKRPLFVVIRRNHSSGIRSPYVS

SEQ ID NO: 1001989 - protein, 283 aa, Homo sapiens
MPKGRDMERRWSDMLSAGGPDRMLFKFLGERLPSSEHRYGSQNNAWATQRTALSSLLIQRAGPYEGHYAKMRLLKGSGYIENYREEYASGVRRVYERYNVDWSMGNSHAKASCKVPQNGSRMGLVIPWKFKKTRNGPRENEREGLDSLGSTWVAKVGYGRESRVDKVTQMSTTTVSIRARQPCRPPSWLYRNNWIGPWSPYAWGESNQGLGTTKKGKARTLDNRKRKAIHKDLGVLHQERQTFLKHPSWRKANTKEFPKKLPHFKGQKKPGRRGSRDIPILGL

SEQ ID NO: 1001990 - protein, 105 aa, Homo sapiens
MRAFPMNWKHFGRQGRFSRKAQGHSNTVQDLSRLKGNQFVDNVEEELPFTRNKLTVNCRLLMIPTAVCVGARIGLEIGFQYLAHWRPVLLAVPPCYAGGTVRERR

SEQ ID NO: 1001991 - protein, 368 aa, Homo sapiens
GSAAPTPDQDQIPEVLTAPGQIPTPARSNAESHAGLATPDSEQSLSFDPEPLLPFPGTPAPCGQLLVNQCLAMADPCPSCAAAYPACCGPHGLAPLQHVAHRASPVHAVTKVTDHAGASNDPLARVYRSDTCCSYAWTNLDELHVALRPFSINPSLDRAWSSLRRVSRTSKARTNEARRSRDACKNRFELRYDQRKQQPRPCKAARLSQKRCGCTEFQGTLRNAAANNQKAQDGVRPCIETDSNGLRAWHRDPLSRDYCIDTFAQGRSRQREDNCLIKMHNDDTPCESACVQSNSLNRGDTSDGNTKPYGTSQHTLEREMANSKAKLFHGDSENGLDGQRFAEMHGQTSDVTSNTIHERVDTLDTLSA

SEQ ID NO: 1001992 - protein, 257 aa, Homo sapiens
MTTIGYTDRTYEQIGQDNTQAHKHGHSREESEQKEAQKKYIRKDKRGEKQDETTEYNHDQRQRAPATRTTTYVKKQGKRNIKNRSRNDGTDKQIEELREEDEAKSTHDASHTQTADREKTKQDEPRKDTNANMKTKNTRTNAETTTSIKTHNETKQKKPTSQNPEGGHNEETDTQQNDTPTAPHPTQNHRPNKTMNKTTEHMTKRRTHPAQRTSAKQRTTNMRRVNQPEQKEERPRHTDHSTRQTRNTKARKTQRNE

SEQ ID NO: 1001993 - protein, 359 aa, Homo sapiens
CGKWAAEPVSLEWLETLSGLGDSGAAGAVALSVRLRSRLPCDGGSLSDLRDASTLQGGTLDGTRNVDSERQTKRRNEDGQPADRKANLTAVHSVGQSMHEHICRINTSRRADKPRQHQCRQEEIQRTQRATATAPRSAHEASWLRKRYTGADGTGKQTFHGRHIGHQRAAPHIGKEPQNLGREKTWTQRTELRHQITRGAVDQRKGCQRARDKRPKETGRGESKMRENTTRPKQKTIKGRLRQQTKTEKRSTYPKKYRATSPDRGMERITDRVVYEELQVKKKREEKTGTYACSHRPRRREKPHIRAEEARRISLEVAGQDEATQRERHDRAERHTESKRARHSSIQTEALSRTSKHTG

SEQ ID NO: 1001994 - protein, 139 aa, Homo sapiens
RRNMAAPMTGPQKKKSVLWSSTLMRCSLYRSCMGSHMRSSSGPQSSECGSAELKRPEFHAAHQDAELCRLKVLPGYSTGSRRAYKRCMPMLREYSLVVAEPLKLSAQLHILDFYAKYKHNFHFHVALGHIMSNNLQRIP

SEQ ID NO: 1001995 - protein, 158 aa, Homo sapiens
KSQANNYPVHKVTVTKQPARAWSGNPGGQFFIHGSCGGDVCNTEQLGVTLQSQGPQGWGMDKALDAGPLQKGVLPPSGKGACQSVQPCGGSAQVRGLLRDRASVPQEPLREGWFLVRRNPEGPRSFSKSVFERGSPFLPWPHSEAPGGSRGGPSSRAP

SEQ ID NO: 1001996 - protein, 173 aa, Homo sapiens
  misc_feature (23)..(23): Xaa can be any naturally occurring amino acid
  misc_feature (91)..(92): Xaa can be any naturally occurring amino acid
  misc_feature (104)..(104): Xaa can be any naturally occurring amino acid
  misc_feature (110)..(110): Xaa can be any naturally occurring amino acid
  misc_feature (123)..(123): Xaa can be any naturally occurring amino acid
  misc_feature (126)..(126): Xaa can be any naturally occurring amino acid
  misc_feature (138)..(138): Xaa can be any naturally occurring amino acid
  misc_feature (140)..(141): Xaa can be any naturally occurring amino acid
MPLELSLSGLELFDPSELLEQAXVSGLWLSGQEPSGLEPFYSGGDLFCWNFSSSSSSSSFFTLSTRCFFGRSFHESCLLKLLNFILDYSVXXFLCLHNFKTIKXRHLGFXFSGFNLLGPSWGXPFXIDVCLLPGLEDXIXXGPGRKLEDEISELHALGKDMAWSPHLSARSID

SEQ ID NO: 1001997 - protein, 111 aa, Homo sapiens
MWERTRTCGMCFGGNGRPICVEEKPGPRGPSPKGAPHYRRNSYSTGRFLGKLGFTQEARSFPWDFFWADFPSHIGRSLLNLREHSESNSYITGVGNHPMDLKFPIGWGLGS

SEQ ID NO: 1001998 - protein, 118 aa, Homo sapiens
MRTAMPGLGRTVASGPEADWLLHISRTLGFAHRIMVLSVIDRQKVTYKRMWPETGLEDAEYGSDVKKQIATLVVRVGKQSRGYQGTGKVNGGRSRSSCAVETDRSLARTTRRYRAEET

SEQ ID NO: 1001999 - protein, 94 aa, Homo sapiens
DNILSDSVTRICRHWALYSLWTSAADIELCVHALWRHFTRCTGGLNAHTGQRHLDKPPDLNLPYARGVRVHSIEPSCARIVHGTGSPCMTVEPI

SEQ ID NO: 1002000 - protein, 260 aa, Homo sapiens
MKIKFGKGQSSTGASGQEAKHADLHLCTLFLSHDGERGLWGKSPVLQSGKANVGGFSVSTGKVYPFSFPCYTGGKKPLRVPAKQGGGPPKSGSAPGRCPDWATRRLSHHSVAARLYRAQNSGPFGRFHRKGTQQPTGSNLVGAPKAPLCHLPFGLSKAFEPEDKNAARGTKRGLNEPGVLRPGNTGSIAWKCDLVGQVSRNSSLGVPSRAKIASDPSGERCKAREFPRHWARIWGALVPRACFTLWSSGLSLPSMDPFIA

SEQ ID NO: 1002001 - protein, 190 aa, Homo sapiens
MRIEGVLFLFGGPSILDTAMMFVRNLIATVVCKILCITQNVIHKSLKKKRNPRKVRWTIAFPESMLDDRSVTIAHNLQYLEFDRNVEDEPNQSTSESYGLKLLMRRSSSRTKFKHEAPSLTFTKVTQDFERKPHTELPDKFTDYLQKSTANTVHLIRAPLAGNTGNSWKMNMVQQLRRGCGHGRCSLNNL

SEQ ID NO: 1002002 - protein, 185 aa, Homo sapiens
  misc_feature (57)..(57): Xaa can be any naturally occurring amino acid
LFRPSLSSLQWEQLLLCHSSFTPCENCSPCFQVWSSTSLPCGSRKHLQQLAVSRFRXFCSVVAETDREDYLTGLEEPSGSLWQALHVVPLIPYTCVFLGRQAFHKPGRHFSRGTFGTTSKPKCSIGDVWGLANKLAGALGISWGAWEICENLGVSRRERLSFHLRVYLPKEKPPFSSVKRQNKLL

SEQ ID NO: 1002003 - protein, 362 aa, Homo sapiens
  misc_feature (38)..(38): Xaa can be any naturally occurring amino acid
  misc_feature (204)..(204): Xaa can be any naturally occurring amino acid
MEGSLYYTTIPELFPKMFGRRRGKTQAEAHKIMRLKVXALGGTHCPLGSILELSWMPLAVDGSTLGPRECPFPFGAVVRPLAWVFGPAIFPGPLEAKPLFNLVALVGTHGKRRRLTGEWKPIPSVLIPQVPVWPTLAYRTGLGEPFAFLGGEREPQRFTAPKGVLQEPANGNLRGGFQFQRKGWYLVPSPLFPKTPTPKIFKWXQGKTPQRIMGYVSPFPARFFSPKRVCKPPAYDHIGMPIILGGNNFVCGPNAEKYRGGVATRDNPCGLSYFGPFGGATRLGGSDWRRKTHRAGDSVSISLNVGNTPVDNNGPQTRTTRDSFRSLGLGNTFPNINFTNWGAQNTFGAPQEKIPLWLLPFW

SEQ ID NO: 1002004 - protein, 85 aa, Homo sapiens
MRRGAPFITQPTKTNGGRKQKLLLPGGPEGFPRDEKYSHQSSPHSVIVDKHHGPPQDIHKGAPRVSACVDHSSIDNHSPSPPLFK

SEQ ID NO: 1002005 - protein, 151 aa, Homo sapiens
EKILLDAQHESGRSSSKSSHCDSPPRSQTPQDTNRASETDTHSIGEKNSSQSEEDDIERRKEVESILKKNSDWIWDWSSRPENIPPKEFLFKHPKRTATLSMRNTSVMKKGGIFSAEFLKVFLPSLLLSHLLAIGLGIYIGRRLTTSTSTF

SEQ ID NO: 1002006 - protein, 360 aa, Homo sapiens
ERSVIMRESALEPVACALRRRRGVPVHACDGGRPCQEKLASMLGDSAVGAVQWRPGSKCREAWQWSVRPHPELACGCSESQHTITTMQHLEQQNAGQWPERVSSARQTAAQERAVRLGSPGAAGLRVPNALELAWIGRAGNASSGICVFKRRSGCKSQSMRFYREQGQPRSAVWGPGSGTKIAEPWGPEKASALGGPDYRYGNDSSIVDAQGRPEGGTVHVEPKYVYIALGRQRGNWPGTVGTSDAHSRNAVPRITATPRENRVRRCQGGHQRCHTNAPVGHKCPVVSIRATLVGRPGLGPVGTCRPWHKATKDPGEKATQCHDGRAIEAGHQSAALWKRRRKEGPYAAQGENNAAERGK

SEQ ID NO: 1002007 - protein, 110 aa, Homo sapiens
MLFRSHCAIQNPNECQPSSFRSVDDVVVLGMNLSKFNKLTQFFICVAGVFVFYLTLWVFTGIDIFSGGFQVLWLDLTLVQFAFYSIFGLIELQLIQDEPEENTRKNLHDK

SEQ ID NO: 1002008 - protein, 127 aa, Homo sapiens
  misc_feature (103)..(103): Xaa can be any naturally occurring amino acid
LPYLYTVLITDQPLLVKSAKQLSQALSIHARIPSHIPLQSLSSSHEQVDIVDYNGLFKYTQPTPSINHQSSNTGTASMLLFNFSYYSRTYLAMYLTNLLSHRXTTVPVIHDSLVYESTTLCLLDVLP

SEQ ID NO: 1002009 - protein, 325 aa, Homo sapiens
WLLAQQLRAPVAPDLFVPLQRSPSRSAPGGSRVESMSKPPLVKTGTAFSSDRRQTGSAVMAATFLGAHVPAWTLIHHPSQPGNTGIICTIGPASRIQWQTLARQMALSLDINVGSSDTSLMDTHEYTCGRPIRGNCAGTVASGHMRSAFVVAPESFYLGRQISFGGYKDDLQGPLENPVDPGPSYTMVPAEHMHDRCGSLTGKRDSAHLRQQSPAWEYTALHMAPDVVTADTLPCMTVGKLTNTKALLGKGVGVGDTVGGHRQTELRSGLGGGKWGELGIYYIAVPNGRGKLATEEEGVVPRETLPQVEIGNRWRGDWDENRRSR

SEQ ID NO: 1002010 - protein, 102 aa, Homo sapiens
ETGFCFCPGGLRLQSTLIGSFDLQGLKGSSCLSLPTNGGLQGTVPPYSVFFWFGLRQRCLACVAPRLGLRIPGLNAIFPPQPPKVLKITGLNPCAPTPSKLL

SEQ ID NO: 1002011 - protein, 398 aa, Homo sapiens
MASTFAVNPYISMSLTSLRMPSFGISCLGSRREDLGLAFGPLVLPYVEIVNPTCELERASHCDEAFTAGSAALPGNTNLCMSSHNEGASDTSGSSNRTLFSEGAIPTGGIEGADGALLFPPADGTQGIGGPGKQEAVHSRFRFCLSIILWLGGAQVFSVRSPPGTGSVFWQPFGFACFEGVPYPISCGNPMWCALGYNLNGRPPTLIFVPPKRGDDPVPPNLTFLGAFCAFDINMRHLTARNHSFGGKRDTVRWAQTRSYYRIDRLEEAVSPPSALEISQKGGRTCPNSLNRPIGNLPRANQKELSYCEWPAFYGGNLRAMFMELFSAQHFEDRIFLGEITPPVKCKAKADKRLQICTQVGATLRRTSGAEPDTLGREAKILREHCVTESATSTSNDA

SEQ ID NO: 1002012 - protein, 142 aa, Homo sapiens
MVRTKATRGLIALCPENTEVGDPLVTRRTFASQYCRISRRLVILGDNYVFHCALACCKPLFPIAPYFGISLWLELHPNQEVNAKVYWGSLGRANGIPKGISGATLGVFELSLFPRGLDTCYTQILQNFGLRPMVWSPIVKSV

SEQ ID NO: 1002013 - protein, 272 aa, Homo sapiens
MSNNTCSCSERAWTEYFASRTMMKTRDTMLGGARTWVHRMCILAVMVNPVFTERHRIPCHVAEDAIESDGAICLITHRAPVVNALSLHNSMSSFADRATGLSSVTESRCSRESERSPGDSTLKVPGPMPVIWPPEGRRGANLADYRLGLRISCGFQRNRSSLSPPSFEWNTSCTRERIPSNKLGKPGGRRDTLNEGIGAVVPESPGGFRLPVGGKPPGMEVSQASIVDLRGVSFGRVKGFHSVGTDIVAQVHEKASEQENLQWGRILGFSNK

SEQ ID NO: 1002014 - protein, 282 aa, Homo sapiens
  misc_feature (96)..(96): Xaa can be any naturally occurring amino acid
  misc_feature (134)..(134): Xaa can be any naturally occurring amino acid
MIYEVNTAYQYGENSQHRLYPRINMGARLPERFLIGLSRGHQAEWCTIAPVACLFRRLPSNIYESLSCTHKQTRKPTYNSTALGDYLLTRKKDATXNSKEGDAMNMRNPLVAGLKGARPDVHGGITYSYMFVIXNPVQGKTCPVEELSDHAEVMCSMGKPPMCDRMAHEEPMRRSLLTWPLLTAHESRVPHAGRPPRNNPGGGVGFPPGTSIMSRPIQNMGDPQKIPIKQKGHITLDKVTNSVPRPRCNGGTRLVPRLAQLLRKGEVAIRHWRRFRPYLTRQ

SEQ ID NO: 1002015 - protein, 121 aa, Homo sapiens
MLACVDCGSKRKPYQGTGITSRGEVAKSEEEPDGTGGEGPRQDEEKKIQEKDQIRKTHGQEGRQKMNCRGDEEIWGEEYRSTWGGIQSMVPNEYTQDKKSEEIKRERQQGKYGNPEGTEAT

SEQ ID NO: 1002016 - protein, 96 aa, Homo sapiens
PGCEFRSARIVLCEHSVLLYAPFTSSSSVALNGAVAVRATNGNEFRSCAALVALTVSSLEVALHENILLYMHGMLYIVETGSRTEALIILFKVGST

SEQ ID NO: 1002017 - protein, 106 aa, Homo sapiens
MGTLMQIIMDIRAPGTSEVIILFLVCIDMTSSDVFIVHPPPMSDVAAELEYWFIRDGLLSMISLLCMTVGLLVGLCKNLRRVDFRTMLLPFPKDCWIRLWFNGVIY

SEQ ID NO: 1002018 - protein, 110 aa, Homo sapiens
MLVLRLPRYTPREANGRTRLARTASLDDIRSSPPCGTLVGSMSMWRWSAMEPTDMVVQGSACQDGTSCAGIKDNGCTQSETTEEEIKNTRDHHGLMDMELFTTGNKRHTT

SEQ ID NO: 1002019 - protein, 172 aa, Homo sapiens
MANSFRQECESKSSADGLLDTMATRGMKANQTRVRKLVAPEASGKSARKTWISPGNIEGLKTTGKQNPPESARESVLDISRGWKAESKEDGLKKRTEGGKVRAKSAQRKHRGKLVTLRKVSEPKVDLGKSNVGPSEEPRRQEQGIEGKRKVEQQGVDEKQFNPSCQMKCKCE

SEQ ID NO: 1002020 - protein, 125 aa, Homo sapiens
MPRLLSLVALQIVRLSSLLFLLVRNTEEGVPMRITEVPDLMSTLLCISGHEKRTDCEAPWRLMGRRTPMGRSKDVLGAVSPSSSVVVNRESSTPVSLTGSPPGAMSWTRKYCEAILSGMDGSNMK

SEQ ID NO: 1002021 - protein, 306 aa, Homo sapiens
GKGGAGGGVGKDAGGVFRVSDPRGRRVKSSRAGDSSIATCFARREGEGINPSATIHASRTSAAPKPAQPRRQKQLRVPGSPSTGCSNPGSGAIGGCLRECPFTQPCEDSQGGEGNSQRDSQSFSYTYSTPSESADVLTEELRSNDKTRILKVPVQAHRAPKRFNGRTVLSGGSLYIENPGGERCPRGSRDSLAVLLEFAEEQLQATMFFIGFHKNREDRAAFSETFSFGGLEMWENGGSLVPKRPELASGLHVREESLREKTAGMMAELGDWEIGPGAHACTRVGENRKVVIRRDWPHVYRGNYVT

SEQ ID NO: 1002022 - protein, 72 aa, Homo sapiens
AAASGLQENDGRSPQELKFLDNFRLLEELEEGQKGVGLKCTVELACLGRLMKYIDTYKVERHDYWGHHRYKL

SEQ ID NO: 1002023 - protein, 399 aa, Homo sapiens
GSGREEICFILGTFGPGQGTRTEPVFDELERVQCCQPSRKPGVPDAWSVKVSSGQDYFVAQEVATTSELWDVVAYGELSWRYVVVLHAVVSPDVALRVIADACDIVNTKDNDIPDTGQVDPSFSRETFRTQQTLGMASLEKRHPPSPSAGTVVDEKTTVVSRGSVTMVDRAGVRRDLLPWIYLWAAALWNAKLTTGGPVRLWPISNSLPPMTLKQGQLWKPCEKRVEGPGPQNPFSTRATQTGENRAALWTPFVGVVVSTGKREVEPSYEDTHGCQEVIKKVASRILGQNVDTGGWVPALEERRARVPCAPPVSSPTAIVDGSDHAFVWNLVKLKGRDPDRWDDGGQANETGPMGKGHGSHGARHGPQAMSPKKQQGPRRTATGGPIIASVAGPKNATQ

SEQ ID NO: 1002024 - protein, 308 aa, Homo sapiens
  misc_feature (98)..(98): Xaa can be any naturally occurring amino acid
GRLPFRKDVVPFISKGLRSNVLLSLDDDPREKDSFRARSTSLNERAKSRIQTSLTSASVGGLQMRTPWARLTIACKKLHLELTEILSGHDGSIQSSPXFSGCPEEVSCGAEFLLRVAGPKPWLVGNKLVTVTTRRGNREPVVTEAWSSGEHEGRARRSSSSPGVHVRQNKEAPDKRGVPGWASRCPVGPGIGSSSMSGGHGLRVGALDVPCSQFLGSAASPGPRTGPDAKPEKVSRWHRVPVQEKTNQASYVALLNQGLGGDPWTGGPQGTPVSCLKLENRSSLSPRTSTNSPAGAANGLMGVTLRRT

SEQ ID NO: 1002025 - protein, 117 aa, Homo sapiens
MNISNNRNQYTGGNNWSKNIGGKLQGKCSCFHRIGNTRLPDRNETPQNYTVSVTVDLRWTQLLQGPTVRTPSHIFMQVQFLHLQSNTPMQKSLPPSGQPQGILYSVQTRNITFVDIN

SEQ ID NO: 1002026 - protein, 30 aa, Homo sapiens
MHEQGQQIRTKKDAGDKDNPYRLQTVTTQW

SEQ ID NO: 1002027 - protein, 443 aa, Homo sapiens
MLRSSRSWASTKSRIWYCYVDRRMGLQGGRGQGMKRLIRSEYKPRIAWNAMVVLGPSFVARMLPFVSLLRPGRPYIWHALVACAGLRTFVLSLGGLPQDRPSRTSGLTSGLYGMRSEDVCGGRHCVPCHGWCPSKQVTCNGRQRERKENCASGLLTGVGQAVARPTRAIPLVGLVPTPGSVRDVRVVALGHCGKRPCFPLATPINSPVSLQIPYVISGGSKLVDRRVNMPRQVPVDMRSVAAVTTHRGVLPVKNTPLGEANELPFVPTLRTGRTRCNSASAPDFGRHPTGPLIKAPWVGSPSPALSEQGGGTRPDVQPEMRDAPRAKWDRRTPGWVRRRGWVGQGARLAVPGKPAEGFGFPEQIIGAWVQHGAAVIYGGVYASRNVSPDKTFLCSLKVAERGPLVHRPDGRSFTHGRGTPRPCRLLNGDHLESTHFGFREVFP

SEQ ID NO: 1002028 - protein, 232 aa, Homo sapiens
EEVGSSHLTSPTLEWLDPCWALWGSAPATVTNLLVGTPGVWGAPAPPAVQFIAHGWPLVVGPLRGSGAVCWELAQLGQYPWASCKQCALVQGWWESPSVQYILPTLTQTASCVAPAPSTMPLGPMAAGSLLARAPHHQHPFHPPTLGTSTELGKVLGLPLGTPKGPLGQIPPNSFGMSFVTRFPGHGESRRGASNRKHLGATEQKAKNRTAQDEREGEGEAEKGRERERRQG

SEQ ID NO: 1002029 - protein, 342 aa, Homo sapiens
GFPEQSARRTGRKKKPPCGPGAWSWSLRCLPACRWPVLDAPSCCWYDALPVPVPGALGRLMASGLLRVVAYCATGIMRWSSGCRLVQSVEPLAGGWRGAALYGQGVGNGVLADALRQVMAPAKKLGSMYSSIEYAVCTSRCPRSHAPVAFLVCRSDWDEEHHAWGSPTGLPRDSLSGCCLLGTCTSAGGLDMNEEGLAEATPGEGAERALRRDLIRLLAWTGPQTTRLLGEVVAPGDHKLVRQGRPLACVAYRFSGAFQCYTGRHSPRGVSPRCQRCVHCRKSRDLASKVPSPWFRQDPYFADWPLGGPSTSEAQRAFPSDWLGQMQKVDSLPSGMSIDEDT

SEQ ID NO: 1002030 - protein, 104 aa, Homo sapiens
  misc_feature (33)..(33): Xaa can be any naturally occurring amino acid
MATRKRPRIYAFCFVIGSFEFRQCGTLEILVIXERRWLNERYSEPRGWCSQFAKRRSQVGNFPEIPSHWQLTPIPAGEPVNYGRSQPGTTAEANMLGEYFGPEK

SEQ ID NO: 1002031 - protein, 74 aa, Homo sapiens
MRPKCSPYWFHNGPLLRLAVELGSPLVNAEQFLYLSQYTTINSGHFRFHPHFERQFLARYHRYSNIHIFYTHTL

SEQ ID NO: 1002032 - protein, 123 aa, Homo sapiens
ARLVSGWTGSEAIVSQRYFALLAGNAGCYSGCDLMHAYPRSRERRKRNGVVHRVPRSLSFCRDMNADVAPLAPQESGVLETYVTKTAVCIHRLGARMTTFTWTTHGFTFDSWNAWMRRRGSPD

SEQ ID NO: 1002033 - protein, 107 aa, Homo sapiens
SEILRRTLPPNVPSAKPEYPIGYPWTVLLVASRGPLDGIPGVYALAENFCVCQFYDLLGDMLASVPSRMSNSGLRTSTPRNKPEWPKLLRIARVHTLALTSIRNICR

SEQ ID NO: 1002034 - protein, 172 aa, Homo sapiens
TRMKYALEYSILSYLFSVRYTICFTTHILIDYAILVSSSPDNAIFSLITLNTKCAHCIPMIRSTTDIVIWYHECTYGICLELSSNLITLSRNLYKTYILITIASSLTGHDDSNDELNELHRYRYSDDTPLCVLPRCICEMCIGLLLTVPYMHLSDEPRFDYSDNEYISSPSH

SEQ ID NO: 1002035 - protein, 114 aa, Homo sapiens
MGRRKNREGYWRQSPERCSEPGRWRQRFCWPRNNSNESDTTLNGSDVEGVSNAPMYRPLKKTATGALGRTISRLKAQGTLLGNLSVAAVVVVAPTPGRANHHPGEAFLRELTSP

SEQ ID NO: 1002036 - protein, 287 aa, Homo sapiens
MVLCFELGNQEPPILDYELVITFMNITTFDQEDVRKISIHMYRNAVSAGPYGVHARTASRNLLNTDSFIRLRYWLIRLVNSESGRLRPLGILVTIATEVVYKNQTYRHSTNRVSQCPLASLSRFPPHHVKLRRDLGSYLTLDVSDSKDLELEIPKTSSELMPKLKARVGNPHLTIWQLFERTYQYSLKTLPQKRERENNMWGEQNKCVSRSREQHSRGAARKKRMVLKKNPSRMRKQTAAPRVKTQGRALGTKNLRVSRKSKKRRHNKRTFAEEGLSPEKTSAREVT

SEQ ID NO: 1002037 - protein, 216 aa, Homo sapiens
AALGDAPDPVPWLRSAGSPGLLSGMGAVSYTQGQSPEPRTREYFYYCGPTMGPSFPWMIPKVKKFHHLASKTRRFLDHRSFITALRPRPLVVRYEGPPLPLSPLDPCWQESRKLPVCCRGTGTVDLHSTLLNRGPGCLRRTLLLTDGGRRPWHVPHKKHRSCNGMPPEPGTKRGMPFVAKHGEAGEQLPEQDDVAHWLRFTAPGTIGKHTEPLVTK

SEQ ID NO: 1002038 - protein, 106 aa, Homo sapiens
  misc_feature (42)..(42): Xaa can be any naturally occurring amino acid
MKGSGPQECIVYPLESPNEVFNAIVISVLTCRIYDVSTSSLXSSAIGHRYEKGSLKESKVIIISNRAFINHIYYWRVVIFLNHIAYERRIKKHFPRSCHVSSQIDR

SEQ ID NO: 1002039 - protein, 117 aa, Homo sapiens
MVQCKPRLIGRLPIGSWYSEALLEAPVTHLYSACERIGRLMIITLRCDQLMHTVSTQLSLDERLILRAGAQGCSCTLVASYRPMNYECTSNYSNDWQSFDTLSVLGQSGFPWGALRE

SEQ ID NO: 1002040 - protein, 77 aa, Homo sapiens
SVSPAENITKYGQMISVKMSEKSRNVIICFCFDGGLVVGENIRRTTQMSSLSYRSPSLLMYCALYESSVRASDSAYT

SEQ ID NO: 1002041 - protein, 69 aa, Homo sapiens
DVTLYQNAGPNMPQVPDYNLTSSTLPQARMAAEQATLSHEQSILLEKASAYKDPGVPTLRGKIPCINAN

SEQ ID NO: 1002042 - protein, 140 aa, Homo sapiens
MSHGRIDFLNKNFCSHQNGPNRLRGSNDILPTATLVAPQRLETCGRYLGAPGDSFPQLIGIGPRGNYLFFIAKFYTRFHTGVVHSPFLEGDYTERLHFNDTFRQAAVQKHTKVFIFVLAQDFATFVRSLKHNGFPRGKHL

SEQ ID NO: 1002043 - protein, 121 aa, Homo sapiens
MSSLDNCITKNPIQQSQAGTTHQTTQQHKHVSDGQSAPKKKYEATTAGGTRAPQDREGHNTGATEKDTRRDNTGLTQNRQGHSADNNKPRGHNETLDKTTQQRRETNSGINKKKQANRDKC

SEQ ID NO: 1002044 - protein, 119 aa, Homo sapiens
GWRRVELFEDSRVCRHLYMCLEIGVKRSVRMNECLSIRAYISQKRRWKNNRFKICGKLKQVTNYFHSFRRSPSNTYVLSISRSSSEKAQQSGRSKCLKCGGSRMFYCYTCYVPVEECTY

SEQ ID NO: 1002045 - protein, 147 aa, Homo sapiens
MILTTQQLYQISYILQLMHHHDTRSYTSPIDQTLYTRFRYQHDETHALITRSPYDNNTVATHDDVPKLLHTTLAERHNNAANHIKEQRFNASHIPSTLHTTNHKNQQHTNTSKAPCAPSQARSERRYYRVPSETAPEGTPEGKETKG

SEQ ID NO: 1002046 - protein, 81 aa, Homo sapiens
LFTDGDEPTAHENSASRQKDSPSSPSPRMRTRDGEQLERDALDAMSPKCPIFMDVEIVPYAQCYKNSCDGLVVVTNANESG

SEQ ID NO: 1002047 - protein, 220 aa, Homo sapiens
MANLRWNVRRLITRVLLKSWYWVPRGNSILETRCAIPETFPIDAETWLLEMKRTLTGTERIFRQQYTAYKYADRDVTVCISARFTPTYLQKKMLNPSKTPEHIWVEILGRKPRKTFRTVGHFGSMELSTLGARILRHSNIFQGDPIKLWITETYHMGAFKGKLQPVLFLLKGPYIDNRGLLRHLKKVVVLREKTPRTRDRGTRSLRCKFCKRNCHVTLIV

SEQ ID NO: 1002048 - protein, 112 aa, Homo sapiens
  misc_feature (71)..(71): Xaa can be any naturally occurring amino acid
MAPLLPLPPTEVSLGQISTSHALGASPPLEAGQTTTQFTPRTELALPTCNWRGDRITQPHFVLFLPNRASXLGVWGTPFAGAPFCKDLGTPSLRTSWTLLRAKVNAHYIWLA

SEQ ID NO: 1002049 - protein, 108 aa, Homo sapiens
MPHQGTTADEVSEILACAPLCPDGMMTRVLKDFLVRHTRGLQTGSISTYDSWVVRKYWLHLILVFVSGGNLNNFHFYISNQSTSRRSDRRARLEYLSHFRITCRDMTY

SEQ ID NO: 1002050 - protein, 161 aa, Homo sapiens
  misc_feature (11)..(11): Xaa can be any naturally occurring amino acid
  misc_feature (92)..(92): Xaa can be any naturally occurring amino acid
MQILVKNPHGXKPSPLRSSPVTPLRNVKAKYSRTRRVIPPDQQRLILAGETVWRMAALSQDLQLPERMSTSGTWGLFAPAKGGHLLEAFLSXPVFGPRNITIWADKDGSGPQVWLMASGPFTTTSVAWSHIWAGKRHDMWVGSNTQTNPGRVPKEKEGVTQ

SEQ ID NO: 1002051 - protein, 67 aa, Homo sapiens
WNSVMGKHVLKNVNDMRTRSYMTDGKLILNKRMGRRDATAGGAEKSHMLKFESTPVKQSRWRLLLKI

SEQ ID NO: 1002052 - protein, 194 aa, Homo sapiens
MNDTVSYPHKKVHDPIRSTSEEHKWSLMSFTPGRRQMPKTEISRNKTRPKCTRPHRMSSLYLDSELILGGGKTTGFGMIYDSLALMHREDMNAITVDFVHMDLSGLYEKKKDLKIKQANKERKNRMKKVRGICQEANVGAGKKPRSQGAAMMLAVATVDYCARTLINLYRLLNGDPILAIDTFCHRFPYDPLDQ

SEQ ID NO: 1002053 - protein, 299 aa, Homo sapiens
MRSLVLSVIAMITYLVSRVECSSVLSLSTYRLSRFVYHPVAVRSYFSLYLSLLFVLVFYLLLACISLLFSDIVLVVLSVCSLSLHRSVCFYRLLLLELLALLSLCSVLSSLRLSRLLVSLVVVSGSYFAVSYFRCILPLLLVSILCCAFTLPATDSMFVLFVAYYFDCGVLFLVFSVSWFVFLKFSISTCRVIVCLDPFSLGCGVFFLTVFSRYYCLFCFVSSSRSSLVSRVGLVDLVPSARFSVSFFALVLCWSCLLLFLGVRSCLFSLCMSLFLAVVLFLGRSIFFLLLFVVRVSLA

SEQ ID NO: 1002054 - protein, 97 aa, Homo sapiens
  misc_feature (35)..(35): Xaa can be any naturally occurring amino acid
MIKDEWGPNSLCCQMSTYWSKDAAQKAIMMSTQCXLIQSQRTGVSHCAQGYVGGSVVGREYSELLQQVASGVVKTKLRLVCLLFCLVPAWFHETICG

SEQ ID NO: 1002055 - protein, 69 aa, Homo sapiens
  misc_feature (68)..(68): Xaa can be any naturally occurring amino acid
HMSLMVKFHKSFLHTVVDNLSWVIMGRWFNQPAGALLISWICTCESCQGSSSSSDLYYRLTARAGDLXT

SEQ ID NO: 1002056 - protein, 90 aa, Homo sapiens
  misc_feature (9)..(9): Xaa can be any naturally occurring amino acid
  misc_feature (63)..(63): Xaa can be any naturally occurring amino acid
MRTDDKTQXEDDIARRTYRDLYTGMSMYCSYVPPRSTERTLAGILYTLGHVYICVVRWIANSXPISYVPNIFWTIQCRIDPRRVAHGCKA

SEQ ID NO: 1002057 - protein, 68 aa, Homo sapiens
AKFTINLYIIATRLALTIDLSTMKLIGDRNRNLVQYDDMIAVNGEDDEKIYKQSMIYQGLMTPNMHSA

SEQ ID NO: 1002058 - protein, 81 aa, Homo sapiens
DKTPCIPIAKGSNLTVYTCKNPCILCILLYSCIELLECKTVPSFLSTPIYWWILIGISYLFVLSRLGSKAHWRHLCSTSGC

SEQ ID NO: 1002059 - protein, 220 aa, Homo sapiens
GLNPGAGGEHGRSGVVVTHIFAVTGCHARYSVLAEKDGVSKLAKVDCWRVCAEHVIHWPRSHEDKALCRVVDGDSPPGDAKILDNAHSQQKDPSASGLLRIQDSFGLMMVKETFNGQPVPSLFKSALSCKLPLSDPGTTYTQELAEKLQISRLRSHYPDANQKPEMVIGLSPFQGLVWLPAERGSMYPFYSKVPEVSVPDRQLRQQHTWKQSMSHDSQAV

SEQ ID NO: 1002060 - protein, 162 aa, Homo sapiens
MRSLIIHHQLEDYDERSLFAYGLDSLTLKNPHVLSSLPVRGTPSGHFELCGCEQAGNSCKRIVLKNHQSRFLTVNTAILIALNKREYEIPSNLTPADVFLREVSQVDTICECLLEPEEQVSRDAPMDSIEWADSGVINVNKNLKDMLQAARSLSQNRKSRIE

SEQ ID NO: 1002061 - protein, 67 aa, Homo sapiens
LRVKMVERGYCFALTTFSPSVNLVQIEYASAAVAGGAPSVGIKDMTNGVRISNLRNKTVISMAVVMS

SEQ ID NO: 1002062 - protein, 88 aa, Homo sapiens
KFKQSHCVAQDGVQGQQSVAQWQTLCLASSVGLQALLHGCPVKFYLGDSLSGDDNGFPAMVGKGWTRRSDLKRIIHHNEGTKKREDNK

SEQ ID NO: 1002063 - protein, 155 aa, Homo sapiens
MRRLYSTTLVTDYYAILTSCLTLLETSNPIYHYQLTTRSRISFLMYAYPIYASRTQMLNTVACLEAPKCLLNRQSESRNASKYKYDLPRELLLDLAKAQCTRQRVIPSLTSQSHHTGRGRNEEKHIANEASIGYTECCQNEIVYSGIICSVELFV

SEQ ID NO: 1002064 - protein, 199 aa, Homo sapiens
MPSSQQDMGRPRTPGCGSLDTTYFQVLVHLQCTRYKSRRQRDLLERQRGPAEASDWVTTIMARIISSNSLPVPMRKEPCGPKSSILVLRSFVTHDPTPRAGKAPGGFPQSNQVPGEAGARKGTDREGKTENERGRGSENRTGTGNGKRRTKQTETLGGTGKPWKGIASGEGRSTGPPGHSSGGLGPRQGTPRWPPNRDP

SEQ ID NO: 1002065 - protein, 192 aa, Homo sapiens
  misc_feature (182)..(182): Xaa can be any naturally occurring amino acid
  misc_feature (187)..(187): Xaa can be any naturally occurring amino acid
VVRRSRGCVLLLHECLGGKDQWTLFQPWSDLRCILIRYVSIAGTYLHRAVYVLLRPASAIWWLASFIDERTMSSLDSSELFHRGARRPVHETGVIIGTCHGPAYIVPSYFMELSTYKKTGDSMCAHGNGVEPSLACDRCSAGRKRCWRPGSKRRSSLHRVTKRGQEYARCAVVFSLVTGEPXHTMGXKADTM

SEQ ID NO: 1002066 - protein, 41 aa, Homo sapiens
MDCPRDLTTQFERTQYTITTLDNSRIGTRTAPTSWVSSPKR

SEQ ID NO: 1002067 - protein, 137 aa, Homo sapiens
WRGVSLWSPRLEWQWARSRFHWQARSPGVHGHSPASASRVVPGVAGDYRGAHHHTQLNLLWYFIVEQWGSHQCYTPGVVWTLRDLGESARLGLPKVCGEYIGRKATRRGQISGIFQIESGVHTGVGPGRGPQLVNPG

SEQ ID NO: 1002068 - protein, 33 aa, Homo sapiens
  misc_feature (20)..(20): Xaa can be any naturally occurring amino acid
RRRANRSVERIYLIWRLLLXTNDERSEVVSEEA

SEQ ID NO: 1002069 - protein, 105 aa, Homo sapiens
  misc_feature (78)..(78): Xaa can be any naturally occurring amino acid
MGKSNPTSWAFAVRTHPRGPQLFSTLGNPLPFVPHGTIGGKQGNGTKTRQAIFTIATEEGVEDTRDQTNSCMEPRHWXKGTYQGESSKIPSTWQRRLEQGPLGYA

SEQ ID NO: 1002070 - protein, 287 aa, Homo sapiens
LSSRVRTGTQHPWLLPPPRNCTPAGSCRAIENRSPVEALSMPGRLTWWCRYYAAQEHDVSAGAASSSSTTTSSSHKPVSPHAAGLVAMGRLSGPDARGIWHNDNKTFLVWVNCGGPPAGHLHADGGPHDMARCSPDSDNPAITQIENSLQTSNGTTEATLLGHALHPWIHTITRPAAYHTLGPTLGACETQGVHIITGLNPDRGATAMHAHVLRRRAGTITARVTGAIISSNSPTGAKHEVRDCCDHEYMPRDDGWTHLGPLSPNGAMTPAKLGHSHQEPMARLRPA

SEQ ID NO: 1002071 - protein, 182 aa, Homo sapiens
PESGSRPNGDRGPQVHRAPQEALAGWSCAPLREGTSVGHQGLLAPWAPAPVGPPYARISQHGDPLLSDTFTESNNRLALEGPNWASEALPGPMGPLWASVAPTGVPGSSWSHRTPQAHTGTLKESLATQERRARAGLRGEPGPRRLCWSSGGNPGPKGDPGEKSHWGQRVAPDYARLRKMLP

SEQ ID NO: 1002072 - protein, 31 aa, Homo sapiens
MGQETRPLRTNNLSGGEPLLVLTNPGLAIYE

SEQ ID NO: 1002073 - protein, 131 aa, Homo sapiens
MVFPRGHWSFKGEGKRSEKAVGQSGWKGDLGTPKIGRNLAIYSSMVFMPERRSAQTPLRQTCVQQAPSGYTRTYTGALHPGGSTNGHSRSKRPPHRGPYERSRDRAHGDVNNNTGCRGLCPPPGAIPFVTR

SEQ ID NO: 1002074 - protein, 187 aa, Homo sapiens
MAEHKHQQQSINRLLQFGAPTTTQGRTPPCNTPRHQAGPHATSTAHQVRARTPPQERSDHIYNDSTKKQKNRNADNTTRRNHRPQREIPKTMRRHHAQNTCSPTQTVPNKKGAPPKILASGRHQKRHGALQHRGLKRPHTHLQLEKTLYTERDTPAETEKAGDIHREENTNWRQTPPHAAQTKNNDK

SEQ ID NO: 1002075 - protein, 229 aa, Homo sapiens
MRSGACSGAARTGPELGVGGAGGSAGRESADPGLGRGRALNAAGLTPGYPFVPVSAQESSYASPVSRVRQKLVLSSASAWAPKALSCRDRASARSGRARCSRGARAQSSWARMPGTSKYADGKRRGTHLRDGMLELAGTERRGITAEAGLPRSSPAGAKTVYVCHRNPIGGYYIEGQQGDPGATGARCTTPMGQEKARILIIYPGDDRLGIKVPEDIRSSQRINSRVGY

SEQ ID NO: 1002076 - protein, 263 aa, Homo sapiens
TTAGDGGLGARVSQLVLVSRGAIRHLLHCALLSVLGVRASPVPAVSSPVAPVGLTLKSEALSRTGKFTRLVTRSFVYENPISLFCRRYHHLALWLAILERTVEHRADQVLLHRDLFAIFSAIIVPVIRGCVITVKAGEKWRMPEVAPQWTFAMLGRSTTVRSRMRRDLVLGMVSALQCAGYRWAPAGCHRGSFPRPLSSVMVCGLSIGHGLWAHLVLFHRPLRASGAEARSDLPLQPDEEDIRVQVRLRVFSREGGEDQSRKL

SEQ ID NO: 1002077 - protein, 115 aa, Homo sapiens
EEKKPHLQGKPVRPLSLPASTFVSEWIRNEFERRQTLKTDGKNRSQGARQYRTTRTTRDESTVTTVRPQAHTHEQTEEPLTQQRDNRHHRPRDMNKHRQNTIVTTREQHLQEGQN

SEQ ID NO: 1002078 - protein, 359 aa, Homo sapiens
WKGSLPRWPRRECRGAISLTAISASRGSSDSPVSASRRWRGTTRVVHHQPVPWATFGHLNRRSGVLSSGVPPGVVFNLREPSEVIVRCASADLSPKMWRGKYTGPCDSTTVVFAAPDISCVIILKSPSTTGVICHYRGEKPRSNIRGTITQFARETLVGALVGEEVKVWVYVAHNDMRYIEGAKSAFYRVSHNKLRKRDNRGKKLHDTCVRKHKCSTIEKKKAVPPLPGAAAGGQAPQVGGPHNAKNRDVTPAGGQHQAIPYTMRGEEDHKTIPLLTHPMMGGPSPIHAVGRSTIQQRASLEKSCRQLIRPPKEKHSLVGNPTNGGGGYKLSPHPNARRDAHTTMWRTKQRRGVFNSKT

SEQ ID NO: 1002079 - protein, 127 aa, Homo sapiens
GQSRCCPAGPHLVLSASSYINKESVVMAYLFTTFKRLPGGLHLASLHCCLTEEGAQGVQLSACVTSYCCSPHPLDRGGTSRILLNDSSAHAKSTPATTLGDPEPNSAGCGMTTVRNTDGCSRRFMGG

SEQ ID NO: 1002080 - protein, 73 aa, Homo sapiens
RKEDRFDVHQLANDPYLLPTHEKIKFFRKPTHGWADSIPYTPFFKHNYLLTFLQDWHDIFEFASRCTLKFESI

SEQ ID NO: 1002081 - protein, 117 aa, Homo sapiens
MHMFALAPVCERVYRCVRVDTRMMALCCDHPVNPPRVSRYLLRGTCVSDIYVSTEPIYVDVYAESQGTRSHDVLADHDIALDLRTSDNVIRGPNSSSATKTYSRTTSLGDCHYPPST

SEQ ID NO: 1002082 - protein, 167 aa, Homo sapiens
MAVAGKDVPSWLRSLRLHKYAALFSQMSYEEIDDTCLSSTWSLTNVTKGARHKIALSIQKLRERQSVLNVPEKDVLERREPTKLLCTELQQIIITPIMAYSVLQATVAAVYHDPYCQGWGPGEPPVTRAEPSPSPTRDRTIGTERQGPSSCGERNQLQQLQLPLDGT

SEQ ID NO: 1002083 - protein, 242 aa, Homo sapiens
MSAQSELMHYPRCPINCRLRYVVGPTPVERTPPRPNCENPPSPSDVNSFPPLATNRPNRPPPQALSGIAVRPHFAPHGADTAYVAVGTHLSRAHSVIQDPGFTKHGPSARRTLRNWSDRNPSYMLPPRNPSPLEHYYCLRVTHPKYSWHCGAPNNGVAPRTVHIYSHSDVTHIAAAKLLGRKLPTQKDDSPGDSCPKTSFDTQGMRNTTDLDAHQQRLTRASLPPIRDGIHAMPSTTDTYMS

SEQ ID NO: 1002084 - protein, 281 aa, Homo sapiens
SRRSPPPSPAMVRPPVPLGARGGRAGPGAEPCRPGAPGLLPRLASLMVTVPTMGMSDGNPELLSSQSRPTIGQSENIRETMRVPPITSSPSSRSHPSCTWGTTKGQLSTRLCHGLSPQGSGTLGLISLSGLWTSQPSSVSKHASTGQPTDSRDRLPTDAREMVHSGSGHAYDSEPCPGPCMGLPEQVLGPTHIEMPISQDPAASRRMGNPRDRNSPTRSHIHRPEHAKSGEHPLSQSSIPTPSDKRSRTSAIEHRILGQNQDDPSSRDPKNKKGPGDPKNT

SEQ ID NO: 1002085 - protein, 414 aa, Homo sapiens
IINTKLLKHYYLLTVQQWLDYGNLIIGFYEGEDYCICDHYLPCTIHDFQIDLTAVTEGLEAQGEKDDWSIAKAMRLKISKRRVSVAARQCQKITQLGTHVPIPTALQTSTQTAWTKQEADYHRRMLSRQGVYGCNHRHWLVPTSVLPFLNYCIDHSKTVRRNGCASHPETLPRNTTRGTARRNRKTPIRTIQTRFEPNPKLVADNHMQTQTTPHPHTAQAKQKQQRHTATTRGQQTTQSNNRHSKHTKQHTAQHKNTTHKQKQKPGTKQPTPRRGTQQTHTKPNARKQHQQEKADNNQPKQRRTQPRPPRRTKHDTQGTPKHPAPPQATQDPMARNAEAQERTNHHWPPYIKKNERTPERARLQLTCQTRTRQTTALDYPTTHHTSTQGRNHPQNQRTPAHKRQHQHREQAAND

SEQ ID NO: 1002086 - protein, 378 aa, Homo sapiens
PRVADAWAAIVHYAYFESDSRCPKASQRRTCAAAGTGRRVSGVRKDRALLADPVFRFQPPISEREPTESKGPGMAQSRGDRHRPGHNYSLRGGCPNREGWENQSPTNQGNRNHPRYVAFTDNRAELIGDAAKNQVALNPRTPVFDAKRMIGRKLRANPGGARSDPCTHVGLYQVDTQTEHKPKGARELQGGRPRDILSPKGDLRAMVAEPTMTGRIGRRTYLGLPPGGPNAVIHRFRHYLHTDSAATRATKGCRVLNRGGSQRCCGYHHKGGPTRTRTTQMAYRRLVRATPREPGRHACNTAGRTPYGGLEIQGAPTYRSGVPQYRERTYRHTTLFSSEKDSTGQGQPPTGKGSRPHETKAGSETDNTEKELENNNKK

SEQ ID NO: 1002087 - protein, 115 aa, Homo sapiens
MDAGTSGYGAHISSSWVGVENSVTCPSAEPWLGHESLYTLKSIAAMGAPSSDQADSTKPSHPKNPPNSTSGCGPCHRVDRTLLRLTSFHWPTDSPAKMIGFEIPYSFKLPSSLTL

SEQ ID NO: 1002088 - protein, 148 aa, Homo sapiens
MIRSGSGRYLGQGTLRANARVNESASPFYCDLMLNGLTTDDLTRYTTKNQLRKSTLLTNEALKVCFGTLVGHWLLAYKVRQLKGEVELYATVLNKEVLLVTSTFGKNSYSGGHDNLGPRPVRIGPYDVERQLFKRITRYMLAFQAIRT

SEQ ID NO: 1002089 - protein, 293 aa, Homo sapiens
MSLIDCSSTVPGPWFDTAGTPTDSASCETLSRYCNVTAAQRPLAAQRSPKHTLDTIPATGSHGTNDSTTGGSRQRTISTTLNFTGTFGKRYAHVGNGAKPTKGPPIGRTYQKSHRKISQNRHRLGQGNNAEQQEAKSRETTYIRRERNNGTRNARQTKKTTETKENKRAHEKRHTITGDEDQKNAKKAKQKKRRDKHEKRIQPNREEGKKTEKRATAQRDAHKTREAEERERQEKRGRQRAENPNRRTKRRKKDDETERQETRSRQTTKQDAERGKNKKGRGKREQKKEESRS

SEQ ID NO: 1002090 - protein, 79 aa, Homo sapiens
AFFRKASDLAYRRRLQESEAFFRKADGREPCPVVPGSGGTDPGAWVRELMKGSIEERKTRKAHTKKKKREKHMYGELRR

SEQ ID NO: 1002091 - protein, 115 aa, Homo sapiens
MKGRTVRINRYTPTYNDTRIHDAFVRPPEVAANRIPNKLKGDKVEPPNTKGVKGWETDHRRGHTIDRGRENTEGKHTSGERTKKRRVTQRKGEMGEAWNKRKKSPSEEKDVRKGR

SEQ ID NO: 1002092 - protein, 690 aa, Homo sapiens
MAPHQTDAVTCQAHGLHRETRVRTTDSPAYTLSHRRTPGIISLTLGLHTTRARGDTPHPELYPRPRPPPGHQRTTNNTNTHNTRATRHRTTQTTATPTPHAKRSTPHTRPPPAPPTTPSHDTRAPNTPQARRHPPTPTAPASASISTKQSHKQPPPDRTDANPPQPPHTTAPPPTTTERDTHADCAPTAHSRAHNPQHTRAPPPRPPTPHTPAHHTQERKPHAGTNKAKTKPATYNQQHTTTTHRHNNNNKTTQPTTPRRHNTDEQPHNEQPRRAPSHPRTTHPDNTPPAPHTPRTRGHAPHTSTQQPGAPAAPATTTPPPRHRRHPTQPTTTHTTRQHHPKKSNERNAHTKSRPPPTAPNHPPPHPQHTTTKPTENTRPKTKQDTTPQMKRSQTETTHNPPQLTNNNHTRRPAPTQTTDPPQRPDAPQPDAAGHDPPAATEAWRTATHRQHPCPTPAPAPRSPPDTPTRHTPAPDPAAAATAPNPDTDSLTGPRRPRGARRTATGNDRDPATRNGANGARDGGAARGEGEEHDGTSQLQQPRAGPSRTDETAASSPDNRSGRQRRHGHAPTRPHTTRNRTTRKRQQTQTQTPSQALTNSERSGTAGAKRRTGKEDQESRDSDEAQTAASAKPGDTGSDARQERDHRAARSRRQQQEPAPRPRRQPSQSRNGDAQKNRSASRTSRRATTA

SEQ ID NO: 1002093 - protein, 431 aa, Homo sapiens
GRAGGRGGVWWHMPVVPATREAWAGESLESGRRRHACEPRSRHCTPAWADVMRDSCRQKTHTTNAKWGHSRTRKQGTPIARRAKAPNITTFQKSPEDVVHRTHKSAVIRVSSERPAPRSTNARRTSRPAGTNTRQRSGQEAPRENPKRALAGPYTATPLARDEPVTPNQQTDTARGIIGPAAPIANRAQRGPYAPTNDMRDPPPQLHAAANTAGAAHEGNQRGTPPSIATTQLATDPSRNGNDHARPALLRRRPHPGASPTHHTGPDVPGTVTANVWPWCGAAQPPQGLGSQRCAPAHTVNRYRPPQRAQAHREEDHYTRPTPWTAATPRDNHRDRGGHPHPTPLRAHNFDHGHQLATSHHCRTGYRETIHSAIKPPHPTGAIIPTTTTVAIAATRRATAATPTTTRPPDAPHTTAARTTPARDTVGAAHT

SEQ ID NO: 1002094 - protein, 375 aa, Homo sapiens
CGIQPGPSVNRVFLLPRLATGWEQGLKSLGRAARVSRQNRMRVTAIWFPSHAGMDPMKDPVSCMMNAQAHGQSVIQARVGGRTNRRALTLMALSRQAPCPRLWRGSRVSTMPASKGPVEPTYTCFGLLGSLVSSFPRNSVTHRLEARLRISTSPGAENGRTYTARARIEHPQCQVTDVRRATKPAPSTIPCTGVPPQGPRTPTAQYRPAPRENHPPRGHSAHIRSASRDDHRWHSSPQQRADEPGSLQPVPRQDAQHPVTASACTPLTPRPLTGSSAVHREAGPAHVPRTTGPRPRRNDATRLKRREETIPPIPSPPLARPLEAQPARTSTPQPVPALDAPTRTRHSAQRRRTSVRTRHGIAGHTTLRAPTRRTP

SEQ ID NO: 1002095 - protein, 312 aa, Homo sapiens
VLPAEVLVVWSGVWSVRVADPGRGPCGVPGGGRAGGRRDGLHRERLEDKAAAERSKMIDKNLRDGRTRTAARDVKLLLLGAGDVREEHHRQCTTDEIIHEDGYSEERMPGSTAAVVLQQHHPVHQWPFVHSHWATLHIDFARPLQSARRPGSLFALSCTADAGTAVLHLHRTLFRAAQCRTRSWALTHGVVARPCHMAPLKRTLPSFHSTSSLPLRYPWNTQAGTPVLRPNEGEPQRPPSHHPVRCRTTVGNPQPLLTSQPSGAHIRLAADIKNHSAPFSTRTPEHTLSHSKAYHEHRYRVLAFTHRRPCTV

SEQ ID NO: 1002096 - protein, 126 aa, Homo sapiens
STTGSHPTCVRCERPSDNYMTSTNMQRHTYTYLPSVCHSPLGLVSINGQALIKRCELVQHLVDGGDDTTTPESGLLKHLFMGEGIIVMRHSVLSFWALDERNSKSGRETYGQCQAYEPKDACCTYL

SEQ ID NO: 1002097 - protein, 236 aa, Homo sapiens
AQRVLPRTPGQRPPTRKPPGADPRSTARLTADIVEVVRTEYVYTRPRHGPTTLPTIHVVTPTYSRPVQKAELTRMARHRLLLRDPISTGWWWRMRRAGRRGSSRLLRDTGLNYTHLHVETPREYKLLTETSREPRIPRGTMQRNLALRWLRETFPRNSSQPGVVYFARLTTNNLHAWSSSTEMPHVTSEGVRVARAFVGDLRYEGPTGDRGRQGGGWYDGVDAHRAYAETLRGYAV

SEQ ID NO: 1002098 - protein, 270 aa, Homo sapiens
VILGYGQATGVTRLSWFPRTWNFQCYNWDSTQQVGMVGPLPGEGLGSLASRERLWLEGTLTALVLRYLAPTFSLIVWSKPDLSAPDPTLICILVWRSPETPEAPELEAKPGLSMSPVCRGRVVTYTTPKATMSRAQTTAQSRNPCVRMLRSSLVPARRSLVSWEGTDRSGHGLGLVTESALVSRRDSVHSARIPNGLVGQTLGNRVYQDEEVKTGCAELPSSSGGCPGAQWGLMSVQAVLARTALFPGVGYSLLKEEDPSLIVRIHMYDQ

SEQ ID NO: 1002099 - protein, 118 aa, Homo sapiens
ADARCELELLQLAGVAGRNLDPCAPDTAGLAMDLNQPDLDRAELQSSRRPSPSSDKDVRWHLSGTQGVGGHVTDDSLRITNPHPERYEADCDIDRYSRLDCPIGATVEPLALSSVKYL

SEQ ID NO: 1002100 - protein, 118 aa, Homo sapiens
VSYVRDKHSDDSRNVLKSLVRNKHLDHSRSFLESYVRDKHSDIDKSVLQSYVTYIQTLVAVFWKSYVREKHSEPSNSVLESYVRDNHSDHRWGVLDSYVWGKRPDPRIIVLESYVRDI

SEQ ID NO: 1002101 - protein, 271 aa, Homo sapiens
SRRMLLEPEAEKAAGPLSVPRAPCSRPVWRGACPWEWLGQVRVEERGFMCCAGRDGPSSECLRTQALLTLAQSPTQSQLQLQELSRAPGGDPTEEADKHSQMPRHQTQNLACQHGPDCYLALMADLVLCQAPADFSRCSGRRQLRGPSYISQCASRATAPLQGVASDGDHQHHLDQITNNLRDTRAEADGTVTWDSSSGIQDGITLDTEGQERPEGAWMAPETVERSKGEQKGPKPGSRDGNKTCGNHREWLTPDRVPLGRSESMDPKESG

SEQ ID NO: 1002102 - protein, 88 aa, Homo sapiens
HLVPATCKDLVVHEAGLRHPCNCAGPLCSGEGRPLRFEPDPVAAKMGMEAGDGAAGMPRPDTRGLRMVTALGEPSQCGCPVMECVQMT

SEQ ID NO: 1002103 - protein, 234 aa, Homo sapiens
HASEENTNISLVQDWTWRVSVAKTVQDSDRDDFAVDDFGSENEGELRARETEITPLTQQPGNEGGEGGSRCRAQDMRQADQELDSRGWAGLTRDTRNEESSEHTTLAGGQKATELHTRAREDHAQVGLTRRKPVQSRDLSHMQQWNLILLEQEGRQGLRERGRELTGTNSRIEGDTEARETEATPEEKERVHTSGRKRGARLRTAILNRRGPYSEGATEHLRGSTRKQETQEPG

SEQ ID NO: 1002104 - protein, 216 aa, Homo sapiens
FACAWRLLPVCARVRLGWGSLAAVAGVRRCDACRELFGVHNGPQGVKALGPADRAYCRARRDDTGDRRAGPWDLQCYEADLSADSPKETKWQQAFDPNLEHGARLPYGCGAPSWDALRCYSAKDGPELWQQDARMHDCVADLETNMSYDQQLDVLHWLHTTSGSHGKSIPSHLQEIPERNIILALQAVVGRYPRVTLPGHTPAEPQSRGLTVALLV

SEQ ID NO: 1002105 - protein, 208 aa, Homo sapiens
IEPVVLPLLWFAESGAMEGETLHTFYTQLVMPKVMHYAQYVLLALGCVLLLVPVICQIRSQGPEDTVSQPGLAAGPDRPAEALRRRVSRISQRREHQTHRLSHPSRPCALKDTLKHTPHGRHRQHAVQAMVQTLRDGAGAEGTCRERLVNKHCSGTFISTWPTGLTTGSCESSVTLPQGEPGLSRIRRWAQAYSTSKVKHCKSGVEVP

SEQ ID NO: 1002106 - protein, 140 aa, Homo sapiens
MGKKSRVTNSEIWHWCYSNCVTKGNLEPGPVSCCRNAGKSRLPGPGKQTWEEYVQILDSGLKTHTAPQAKRGLSVTLFEWHHTTQIYFSIDLMEHWGLCKHGASVEGLESGLHLSTDRRGFWVYENAKQGEYSRQYSKYV

SEQ ID NO: 1002107 - protein, 375 aa, Homo sapiens
STGPQSQLSPNAKEFVYNGGGSPSLFFDAADGQGSGTPGPVMEAVGAGTCNQPASFAPWPRYFGRLVAKQHSSMAEDDPYVAGLKLINLQHHAVIPASQFQHRECMANMTHHTCPVGPWSTPSNTATQQQRHTGQTKQQAHQQTMYKQDFRIYLTLTSRTTRSSPGTGMGGPCKPHPSAVPLTTLTASPTGAMMKYPSPGIREPGATQLLTHLNTSHPTHYTYKRDPLPPYYTHTYAKTSSWHPPMAPTDTVGTTNIDKHLELTPARDSTTQNHTHTTNDTPTNPDTKKLTAHHTRIQYRRTDPRPPAPTQKRTINHPSPPRHNKREQQDAAHRGHTSPPLSQPPSSITQHEPTEQTIHRPSRHERHNNTTRAHP

SEQ ID NO: 1002108 - protein, 41 aa, Homo sapiens
MVTYMKNGLFLQFHGAFTDSLLNEVSHEKGKPGFTGLGKNL

SEQ ID NO: 1002109 - protein, 147 aa, Homo sapiens
HAIGPTHHECEAGPPHDTLRLTALPDYTLTLRRSPDDMPLMTPEHHHYDPQLPGRAARHCTPYNTFAAGFNSTGLTHSHSTYPGYSSILRSTDLISSAHLSSQSPWNTLHTTLHTSRRRHTQHTAHILYTTLHPQPILAVSHHDTTH

SEQ ID NO: 1002110 - protein, 121 aa, Homo sapiens
  misc_feature (59)..(59): Xaa can be any naturally occurring amino acid
MRVMAPRALLLLLSGGLALTETWACSHSMRYFEHRLCPWPGPREKPQTSSQWGLTVDEXQFVPGSTRRRPRSPNEGKPAWRPWGGSKEGARKYWGPGDTEVQAPGTELTVSLRNLRGIQQS

SEQ ID NO: 1002111 - protein, 58 aa, Homo sapiens
LGDEGLYTCSFETRHESYTYIRVYLIVHVPARIGELSRSPCDRRMMGGDVNLAIAWTV

SEQ ID NO: 1002112 - protein, 53 aa, Homo sapiens
MAKTIYFSSLRQPRATPRYKTFAKGHQAIMEDNSRAMQSAVKEDTINDEAKEP

SEQ ID NO: 1002113 - protein, 77 aa, Homo sapiens
MRKKLQRTNVKRGPDTAKRKGSRVKEKARSPEAAADGRQNKGGWPLLLKGGEGRTVEQAPGAGTQRPGTPCSPAQDY

SEQ ID NO: 1002114 - protein, 209 aa, Homo sapiens
MVRAPVVLAIKRLRQEKHLNLGGGGCIELRSCHCTPGWVTERDYHLKKKKREEKKIGLAYPGRLALVGEREAQGRSLWDRWPGPGPRFSRPSKAQSPNLERERSLQGGFWDSITFWIGYRMDTIPGGEPGPINPENHLAIYRVPKLGAYWSHSNGYRGTEGHSRMKGPHRLSPYIPGSKVAQGSPGTTPGGAYGNLRSHVAQFYDGAIR

SEQ ID NO: 1002115 - protein, 243 aa, Homo sapiens
HACGYIGPAMESRGKKQNNLSSSARVISVGSREAGVMRECDLASTVALGGVLGIGNALLGSSSAWNIGYPATIGQMPSEQDHLEARYMIRFNMLLQWRRGLASMCPGVESNVRLWIPTVLVDESSASMAPTAMTLLDPEQIINTAPEDAANNYARGALASQCGKGGVTGPSMSDPDISATRGSIEVPGSPRGFRVVFLAASVGELVLGFSSLLMERRRQLIMARSPSWSSRIYPEPQVFHSCS

SEQ ID NO: 1002116 - protein, 82 aa, Homo sapiens
QRRRVAATPPPCGGGCQQTRCNGKRVSEMPDAKRLRLDTGPQMPVWEVDIPSHHQARQHLNHAATVQCDLSDAVRRYLTRKP

SEQ ID NO: 1002117 - protein, 109 aa, Homo sapiens
MHLRLISLDDGEEPHRLPLSTTICLCIPVPPTDVQRGRSDRVCSFALRPQARTSHPPPTSIVAYSTNVAWVLPFACLSHTCFPYCILVRDHEPGVLGSDALRTLVALPL

SEQ ID NO: 1002118 - protein, 240 aa, Homo sapiens
MGRSVLEHGDGNPITIFQRARYPSNRSHVVGLMLSARVASVRVHWPSFTTMEKAGAHLHAGEPKGVIISCAPLLMPPMCVYGCEPGEVLTTASRSSSNAFLCHQLLSTPWPKVIHDNILRISGRTHEHRPCHHWQPEDVWMVPSGKLWRDGRGGSTQERSIPVAHTGGCQRHVGKGHPSELNGKLTCAWPSVSPIVNRVQWWDLELPSRTQPANICMTSRRWMKAEVEGPVKGIPGTKLS

SEQ ID NO: 1002119 - protein, 105 aa, Homo sapiens
  misc_feature (7)..(7): Xaa can be any naturally occurring amino acid
MEGLVDXTARIVTDRRRTRCRSFGHVKNEREEGGWEQRDDRLCSRNGNPMDALCGCNLDGAYGGVKPSRKALRTVSRDLGHYRLVGYQSMVALTMHKASAVILSQ

SEQ ID NO: 1002120 - protein, 135 aa, Homo sapiens
HASAPVRAGRTPCALVLPVRSSTRSGAASVSPTQRAPLREVVGSGAAAGPKCGARVAGSRAAVARDVAGGVSGSGLRRARGRSLPRAAPHAVSVVRSPVARRLRVEPVIPFLCRGDVFGIPGAQAPPPQPLASGS

SEQ ID NO: 1002121 - protein, 222 aa, Homo sapiens
LKSARYGGWCEFLWWEGERTSLLVRHLRSDSKKSSGSFPQEKGDRVTLGSGSEMRQRTQAVICPGRGPGGIGVGITCQCADSGTACCLRTIRVGAGVVRDHGSQGMIWNSGLTVYGCPQGCGAASSACGEQTASDVTGSSWARNARHERRFTCKDFPLYCTQGRRVSVSPTDESPHGVSGTPGGRQVEGGWLGGIVFKELFRCCICGVPLCLSHCTPLQTTN

SEQ ID NO: 1002122 - protein, 197 aa, Homo sapiens
GVPSELIFWIVTTYSSSVLEHSHPALRVVPGVSCGRADFLRVQLRGNRELLLSLATFPSVCRLLLGDAVETVPGFAGDYHALRSRASRMPPGERWTLRRPEPNHSQQFPSTDSDLHGPFLAAWGPRLQFNLAGFPDSSPGEISVVCNLGQVTGVLSTRECLENFNPQLSCSPIRGQLSTQRPGACSEIAGLPQLGDK

SEQ ID NO: 1002123 - protein, 236 aa, Homo sapiens
PRTPGQDCKALRADAASKPIYDRHVIRTVLSDSLPPLCSCGKRGLANEVSGGVMCDCRVTATGVAVAVEDGGGKPEHAVDALARDCLLGYPSWTWRGHRREPIRDVSKASPSTTVVVGNTCRYSRKSMCRAGRVAQRSSRCAGAPTVRADQALYTMRRVDSPPINEAEEVEEGVEVAIIGDEQDNAMPREAIAQQCQHLQHGDLGVAQVGKEVTCRMRLPASSRSRCQWLCHQRAL

SEQ ID NO: 1002124 - protein, 146 aa, Homo sapiens
MRARPIIHAQPLDANTQAPEPPPLRQRHPRPTRHGQRRTGTITAPTSPRPSTPPANPHHREAHTPDAEADWVDRTEKRQEGEEDDPPTQPQLTGAPARADEQQRPPRDATHRTPHDHPQRHSTTARDRTAQPHDRGRNQHRCDDRD

SEQ ID NO: 1002125 - protein, 124 aa, Homo sapiens
MIHSLRGAGAIRGRGVTRQTLQSPVGNAGSAEAAGTERRKHVEEFTIGVNRGKEVNQNSRKAGLDSDGAGSPREQHSFSMGHFTLIMDNIYTFQKSKICKKPKRNPQINAKGGFHEQRGLLISW

SEQ ID NO: 1002126 - protein, 228 aa, Homo sapiens
GDLNQFLSAHQLEDKAAEGAPVDGQAAQGPTINYPMLLHVACQIGSGMRYLATLNFCTSGTWLTLELPIVGAKRYSTRSMHPQHVWSMKHGDSLMAAVSYLHVLQGPVDRCLPILVEAWECILMGKFTTASDVWAFGVTLWEVLMRLQGPGPLVQHHSTEQVIGERRGEFFLGPWARPVYLSLARLPARWAYMRLMASGARKPGDVWRQRAPFSRAASVPVPEDAVNT

SEQ ID NO: 1002127 - protein, 192 aa, Homo sapiens
RLWAPACLCGDERVPRPSCGGSAPLGARRGRRWPLGSGRAGGGSGASVGSSGTLDALVRRTGVRLPQWDAGAAQCGFSNAVVQILRHARSPRITRPTTCWTTRSSDKALKTIPNWPPSRKCVPVNGEFVGGCDILLQDAPRMGTWLEELKKLGDHSGPFKMKRKTKTPSEGGKSSLSREGAVHVRDSLPEKP

SEQ ID NO: 1002128 - protein, 206 aa, Homo sapiens
APETQPRSHHHTTGPRSPLLREPVRATAAGQAIAALLQTMYSQVRVLDPPTGRMFGGPGTVSRPSSSRSYVDYVHPELQPGQRAGAPSSQAQTSTPRTPGGVYMPRAPSGVRLREPACPGVPAPCKDSRGLSRWPSPSTPSAKEQPGTKTEDGWKLAGSWHCTAIASTSPKDAHTLGRSKLRILLGRARSSSRAQASRAWGNINRR

SEQ ID NO: 1002129 - protein, 137 aa, Homo sapiens
MAFLIAYRTKDSRLYTTYAEGPNVVSPLRDYYNPFHDAYKTLHLKSPLKPARHLPVTLYITRPPYLALTIVVFYYESLNPTYANPVVFDLNPEGSVAYIGVLRRYSNVKRMMASLLNVHSTSCIRADVGHADTCDTP

SEQ ID NO: 1002130 - protein, 50 aa, Homo sapiens
MAIGARSGPSAVMGSSKHKREDALVLIQPARTLHCRDLAGTEMSRCREPY

SEQ ID NO: 1002131 - protein, 109 aa, Homo sapiens
MAVQDLSPQHGYAPDNDYCALPTRHPGPTDAHLGGPHTTARWPLDTLNYYPDAYPVSLPEQALAQLLPLTRTIHADAPQGSYRQRSLAFHSPQATKGSWNPPDHHRAPS

SEQ ID NO: 1002132 - protein, 67 aa, Homo sapiens
AHGVGKPFSTGMDKENTPVKNYTGIAAFISGVCGSDSLTDIKSRSTEKNLIFEPVDVKMCCQISECE

SEQ ID NO: 1002133 - protein, 245 aa, Homo sapiens
VIPEQRAKAKRVPVQCIDPVRMQCAPQSPQLRAQPASTRRCPSGLLNRKQSSPARIVGASPDHCLAWSPVQMAMLTTAVSSGTRLSEDHGVVLPIYVGPLDGIHATTVHNISMSYPPRGPELTNAFSGARLGSCGQSPRLLSRLDCVREYAEQVYRRAVFVEGRKPFPLTGRRLRDEGPPRPKTAGRQRTRTWEYITGTVKKGPRWAPYCLTTSNNPIGFAYNVAHLVGRNELSPSFEKSPFKEN

SEQ ID NO: 1002134 - protein, 284 aa, Homo sapiens
MLLLTKARRGKSPILPSLDWPPLQCLLLRGCCPAVVCTCGTIKSAISVETCCPHNSRDNAFTFERMCATNPVAGTTTTWRKLFLTPNCTAPISLQHYVSNSHRRQFPHNRVASLLRIGVVLSGHHILMTPQAEWARENEGSSILSNTKVGAGPPITKQIISAPHQWRGTSYPTPETRNPQTLCVCANRNVVLVATQTRFVVGSPQHTLAARETAKGSYPANLHFECGAPVGTRRHYQRSVFNPPPFTPLSDQQMSHTVVVLMSTNHRPGWSTPNICCPRATTHS

SEQ ID NO: 1002135 - protein, 152 aa, Homo sapiens
MVLVLCSISVTALVLLGSRGPRAGDVAVCGLRRVFYSKDNEGSWFLLPLSITNVDPRDTDAAVLSCCPRRQTMQAPIRSRFHNVKPEYLDAYNSLYGRLLLPKPSPGLTTYPVLTRAATGNTVRVWGAWTRHVTPCGRFFKVATPVPPWICT

SEQ ID NO: 1002136 - protein, 90 aa, Homo sapiens
MTPYSILNNNKHKTRDTTQLLESLLTPAKERPPNGITRRHTPECVAYGHSKIGVPLNYIGRLEQFTYSAYVCPRVAPLCFLHNVRAQLGA

SEQ ID NO: 1002137 - protein, 115 aa, Homo sapiens
PPPSPAIGCWTPMMAGGMAVRFTALDLGFGDAVHVYDEALGPLRAPDYCVVSPHFSNGNGCHCGDICLGPGVSVSITTHVACEHMVAGFNAAPTMCGAIACLWDQTLCAYGSGPA

SEQ ID NO: 1002138 - protein, 253 aa, Homo sapiens
MGTSTGKTEAEKDKPTGAITPVQHNPRTSNNNTELENNPEGATDLITQTVQTQKKTKRKTNKRDNTDAQHKRLHHPPQEERHQKENPARLTPTARRRDNHTGRDHTYKRRQTRAPINQQRDQIHPDTKTPTTTLKTRPRTNTKGQDPHPQQHKRDSNTHHNNNNTAAAGEQKPKKMSQDTQQPPKRHKNNTRTTARKHRNNTTRNEATNTAEQNHNRSKHGGSGTTEHKQEPQREEHSREKQTPSNPERATQR

SEQ ID NO: 1002139 - protein, 411 aa, Homo sapiens
GTRCVRAARRISASGEWFVCSARRGPAATPAAPRYPGHGRTVLASSFLGEERRPGRYCSSVVWHDHLEAKHHSSAWPLTAYLGRQKMPKGRRFLRVLRYTSSVREWSNIVTHSKNHWTLLIERSHVGRTSQEPRVNNACVHIISLGFNAERDRRSRQHRGTQTLPRTSTYSYTAKTETFVLGHIALCVLRAGLEVVTMALSRSAMISQYHLGPFPTGKPFSGHTPDRLLARKRKNASATPCGEMQYARFKFRRFKPSGVGAISRKGNPPRKKIPKAHTYISTNQGFYGVQVSETIQGRLPPLRAGDTGSTRETPLFKHILTVGFAEELDRLGPINPKADTAKTMIMNHSAKHTESSQRSNWKAPHTLEFLGTETVIGSPLLLLYRIDAEHTYVGEHPPIVRLISETPQTQA

SEQ ID NO: 1002140 - protein, 134 aa, Homo sapiens
RSQGLIPEARRAKGREIGAEWKQMPAQGQCVSLLDLYKLIEGPSAWNPGAPELVRFAVVESFVGTRAQVRMERERVQGLPYSAAAITCRTRCSFKMTGGSCSLASKSTKQNCADFTCLNELARSFGLRVLLAPR

SEQ ID NO: 1002141 - protein, 74 aa, Homo sapiens
VELQPVYFPSVKHPFWTQSGAIDLLVRPSLKMRSREAGAKLRRIQEPANVAAPELRSLKLADYRARTGFSDAAA

SEQ ID NO: 1002142 - protein, 70 aa, Homo sapiens
MRHHDKRRQGGTTQPVRTRADTRQNNQPRSTYQVQHRDNNKQTRREPTPTRGAKDDDDPPKATENAPRQT

SEQ ID NO: 1002143 - protein, 146 aa, Homo sapiens
KGRARGVSTASRLARWSKMADISLDELIRKRGAAGKGRVNARPGVGGVRSRVGIQPRPSQPSQHCTCTFQPEIMMPGEKIGLSDALAQTGQSRMPGRSFSSKDARFRITGKLQDARPDVELSPSSQSTDAPEAPHRYADAQGDRSA

SEQ ID NO: 1002144 - protein, 82 aa, Homo sapiens
MNRESKPPSQAGTHNYSEDNKAVAGPTRHLPPQISDSSTASCAPTSESTNMRGSHHVVPPESRYCPATGAAGYHGLPSRLTR

SEQ ID NO: 1002145 - protein, 340 aa, Homo sapiens
CGCRTTALSVLAPEALAWPARPETGSAITPQLMLQCSALGLSCTQALWPGPVCDARCHNTCYTYLTGAMEDVACAADLCRAGSLLLDVRVAPAGPMVSQGTYRHTLYRRLATTPRNLPPWETQARAPLAPRFCIGPCGPACGRGLRRCQGAITNRGLQACQGQRYPLTIEAWALGMPGVREQIAPYRTRSPMHPRGGPPETPICARYESPFKDSDPMRCPLGATLDSLTHWGLQSVRKREGSKEEAVNAKTGASIGPVETLEDTHHGVPAAYRTTGANSSNDPGGKTQAISTNQQNQKNNQKPKRHPRQKEKSGDRRTRKQEKREGTAHRQGKQPEREQR

SEQ ID NO: 1002146 - protein, 286 aa, Homo sapiens
MVPRRANTTSCLMGPLLLLQSPLPGDMPTMDQDLVHRPWVSTHCAGQQPGLGHGRSDTSALRAVIVACPSGTHYQIQTHRDMDGMLRCSDASKYPCDMLSAGPLEAQPERPHKNLTSIGTRIGTPPLDPSKTPGTRPHAGVHTRRAPHRPGPWPTDPPSTTEGARTTGRDHWWTQRTTPTRRQEHTTRTTPDAPPPRKPEPHGNPQDHTRRTHRQTTHTTTPKPTLPAQAQTDDTQRSTLRQPTKREPQRLPQTHSDKPTGHRTKANRNERHEQETPTQTNSSKAP

SEQ ID NO: 1002147 - protein, 210 aa, Homo sapiens
RRRLSSSGSRGSRSGSAVAPPTSVGSGCGSSLDYYFIYYGSCTSLSACSPASSGRGPPPLAPEPQNRSSSIREPQTPAAAASLRCWNLVSGCLLGGFWFPRHFCYPAQERILVIFPPLSPGSCSLGRGAGALQAGEARARRVVRAVEAEGATMGCTLSAEERADLERSKAIDTKPKEDGISAAKRREIYSIARGLENSGTQAPCVKQHER

SEQ ID NO: 1002148 - protein, 126 aa, Homo sapiens
IGAVEGPNAQAEHAEKEKERLLQERMRSREDEDALEQARRAHEEARRRQDQQQQHAPGATCMHAATCNADCGVLASRTPLYGPRAPKPQVHCLWTTQMGVWPVKRGSRQRRRREAMAATIDMNFQE

SEQ ID NO: 1002149 - protein, 334 aa, Homo sapiens
  misc_feature (296)..(296): Xaa can be any naturally occurring amino acid
YGTRWLFELSISETGAGHSEARGRARRTLVVVRPGEAEVARSLARLADSPERSVAVGGRSVARAGSVEGGDGYVAVAARMGRHGPGVTGRRRGAFFPRIQCGPSGWPRRRPPILKSRAARSPVPCCAPERSGATSQPDRAGAADLSQAGRRILGPLEHGAPSPKTMNAIGELRALKPINSQLTCGDRRCPHSFGRIESYSMEDGQENDEHLFKQFCQEGSPTLWRHFLRPQTSGTEPQAELSKDARRVRKEVPLRWQLTPENLFLPDWGASLSPSGLDYSILRKAAGMVQPEATAXSGGWNCRANWRVLFTTVDGGEFPGGLEAPPFWDCTVCT

SEQ ID NO: 1002150 - protein, 56 aa, Homo sapiens
MEAVKFRDGGDDALSEYEQEVTAEKIDEGRDYDAAKTKSCDEPSHVMMKFEHAERV

SEQ ID NO: 1002151 - protein, 165 aa, Homo sapiens
MSTFKSYEATYPMLIYEDGCLRDMWNVDSPVGPRKLCDHITTLVVCRETPLGVPNGFPAVVHPSGWGYPVLLAKGAIRLTRPSEGHFALYLLERVLDTFAHARVENTHAIGIQYFHQYGALFPEDRHMRHNPSFMAPGWDLAYAQDDVRVGSKGPFPFRKRNARR

SEQ ID NO: 1002152 - protein, 292 aa, Homo sapiens
MRGFGYVTQEAILWTYFTYTDTTWHESRRSFTDAYKVPLRAKDRQLLTLQRTDIDGPSYRTRPDSEGLTDGHACLLRDCQHETYNDCHSRATLGLTDDTMPQLHDSCASRTQLSPDAPRCVGQHYPMTALPSADPGKADIIEGKPSGQLSMKHACWYLLPEEPRHRRLTVHVRRRNPEIPTTGTVPGTRTTASQGATSQHSRETRLHTPRHTRHNYVCTQTSASANAREFLNGNWNGTDLSVIHDNEPQAASNPLTWQSPSPYRREQPMTYDPTPSPTTLQAQAPNLDIVII

SEQ ID NO: 1002153 - protein, 73 aa, Homo sapiens
AATTGSSQGISVGEAERLQIPSRVQMPVSSPAKTDRSQEEDGKQRVMSAAESEIGEEEREVRRSRSREVHDMK

SEQ ID NO: 1002154 - protein, 188 aa, Homo sapiens
AEVARSLDRLADSPERSVAVGGRSVARAGSVEGGEAMSRWQPGWAGRAGSNGTSPRSFFPRIQCVPELEGRWRLPPDLEEPCAAAEPLPPPAHPGTRRGSDPAQGQTRPGCGLILNPAQAGNTSPSGARSSFPKDMKLWDELSFEAIKRHQLTCGRTGDAHFIGQDEKLPHVRWQEHDETHVKQFCQE

SEQ ID NO: 1002155 - protein, 265 aa, Homo sapiens
MQEIMLATLQRMEKNLERRVSSESIVHSDHGHSAVRMSQRIKDTRFGDERRPTDRRMERKKDGRDRYDATDRSDMTRDMEAQAGIGCDDETDNPPAPSHVPKERSMIDNSESAEMGASAPPLTKTVCAQEFDIPKGLLTDHHVWEAITEGGSGLAPRVARTQKCVGHSVCMLYIWREATTLVLAAAPELGSSRNIQPQVQQPEGRLNRLVPEPEDGQCARNSPVMPRCQWTRNDNLSDQGHQARCNTPQTPPAIKDTGGKASRKK

SEQ ID NO: 1002156 - protein, 171 aa, Homo sapiens
MHALVLSPPVTFECGWRGRRGARGGLHAPCVAAPSRPFFLWASPRTVCGYGKGTAVDWAPQNFEQPAGGKHGPCTGCAKKAPFPRRPNGALHKAQAKPTDSSRDPQEGNPWHDNHGGEPGHGGVREQGHTWVHKQPLKEHPCDPLKNNRRAQIVPNKPWLGEPLLVENSSR

SEQ ID NO: 1002157 - protein, 121 aa, Homo sapiens
DRVWSLMRFLIKGSVVVGSVYLVYDQEHAVGPSEKRPGSPTEGWGGGPRPHMYQFSQIRVSADYGLRDTPGTYGPGTRPRSLAWMVSVWRGPSQSLSTIVVRPLLSADREFSGPVHPPSVI

SEQ ID NO: 1002158 - protein, 161 aa, Homo sapiens
AGVCACLLLSWAWAFCCYRCAWYGQRTLTSSVRIFLSRARQLSVCRARSCFRLSCQLDSEHARRRSSLTSSALRCTIMVFVSGALICVVLQRSHSEEWVVLQESCESGRSVIMHSIHCLNVELSAIAHNTNLDERCGDTVTLSFPCPRIMGEKWLQMRTYQ

SEQ ID NO: 1002159 - protein, 372 aa, Homo sapiens
NTETVPRVLRFPWSVKLTTARSPPEALMAALVRQAIAAALLPGALPCPHQPVLCRGLSCRGWLLVRAPSPLSREFQMESLPDCPGAGLRGMSSFRPYVAGYRCLDLTWDPPVTPTSRQGTASKLMRRKHGYLRGCLNVLSISPLFALSTFYQGRGRTGGVAMARGALSSHICYLPSYFQIIAPLVGLYYSCESSVQQAFAYARFRVRASLTCCRDPGGSRNYKAIVYQRQLNGGSAVQCQLRAEVPWEQPIFTLRKSRFAKGPRASRWFTYSLTDAPITPETSTAAPPSLWPRGNENHIVGGRNQKVWTTQRRGTKDGQRGDTTTFATSENTIRCSPKLSPFRPKIDVHFRETKLYSEPPFGGNQRVADQCG

SEQ ID NO: 1002160 - protein, 36 aa, Homo sapiens
MYARVQVFHTECYAYYRPFQTSLVQRPNRVSDGTHD

SEQ ID NO: 1002161 - protein, 34 aa, Homo sapiens
MYIPPRCLKTLAGPCTTDISYRLLAEVRNLEKCK

SEQ ID NO: 1002162 - protein, 199 aa, Homo sapiens
DCRVHLWSIYKPNCIMSLTVAHYPQCRASVSTRPEGAHLVAGSQSGSIRVWRPGICHRILCATLMVTSIESAYILHSLGFASRTGRVCPPLVPRITSFKLWDIRRNGCVFRYRGHMPGRVGCLRFSALMWPCGCAVVPAHDHIRADALWISLPAEDDALSSLVHTGVLVDVVELSLPYEGTSWTSGSSDRTHPLLVTWK

SEQ ID NO: 1002163 - protein, 68 aa, Homo sapiens
LSFSIAQRFRLVLEALGNAENSECCERVSTHLEKARRGLEDTTSGDDRSFQIDGQVQCNPVTRKTLFK

SEQ ID NO: 1002164 - protein, 426 aa, Homo sapiens
VGLIGGAWAGSADASLRASDPGARGGRRDCELLCPRSLRPVAWGHKSPSGVPGDWDWSAGHCTYRIASAHHGPVGTSTRHRESHKRGKNQSRDASSDSERWSGMAVASGWRVRHATVAPGTCRWGATSWGITWARTSALVIIEDVASWRLARVHDLQSGPTVGSRSQLRPNNGVSGGKWRTPVGPLEEPGLYNRRGVDKLWQKWGPGATPSRFRTGYLHRASRGKKIHYNTWMRANRGQHVGDPLGKILEDTWDVASRAAKVERQEYGRMSHGGAQGTKAFGTPREAIPFVIWAGGGKLAGTLVRRGSGSRPLEKTGTSKWWTPEGWVQGLGEPRGLEEAVAPGESQGGKMPTDEGSTPQPTSHTPGQSRRYVGEKTGNHERIKRYTSDSRCRKGEEGPRVSKGAIGRRIGRDVNDAVRICALEQS

SEQ ID NO: 1002165 - protein, 352 aa, Homo sapiens
MCGGGGGGDDAFAAFGGARIGHRRCVADVSTLLFDCDGVLWLAGRPAVPWRAFEVLVRVLQMPAAMRLGLLSHSYHISSHKTQRCHTPEDEAAAPVASSSPVGSTRVPVTRDGSSSTGLLALGASYLRLLTQPCPERPPDGPRGRYGCVGSRHARDPARRLCEARLATIARRLLARVGRPKSHLLIGGRESLATDVGLCHVRLCLEWPRNGCLAAGWVALGTFMDARTNLFKVNHLERPSGPEGRSMAVLPLAGGSPRDVGRFVFGWGHPEAHWDHNPGGHSLGFERTGSREYSTSGRGVYPGGVWLLGSHERPRWEEIWLQAAKDRPMVGPERSPLPERKRPTKGADIYSF

SEQ ID NO: 1002166 - protein, 220 aa, Homo sapiens
VGAWAEAAVRCRGWYWEGGREGRGRKMATSGANGPGSATASDSIPRKFSEKMAAAMKQQNQADGDWRSFEEVIMDIGSTPVTGPKKLRLAIHKAALIHAVGYYCPNVNRDWPLSPGPSFRGGHPYQLNPFGIPSREPPRTPIGLGGNPGARRDPSKTWCYPYFAGLPPRPQIVTRLIPYKSMPYIIFLPPKKFLAGPKAHRQGPCGAKFSTCQHDKGGND

SEQ ID NO: 1002167 - protein, 75 aa, Homo sapiens
AVVQRTSSLERGCPVWSSNAHVRIHIRSYAGIVVRIFGHPMGAGPMIPPPRRGALPCEMLCCVGLARQPHGDGRN

SEQ ID NO: 1002168 - protein, 151 aa, Homo sapiens
  misc_feature (97)..(97): Xaa can be any naturally occurring amino acid
AETVVSGSREDGGDGLRRGQCPVDSRVSGGPDWFPGISVDAGTRAVPRSGGRKRVGQRKTGGTRRWSLIVRQSKVYLGVLRSTHGKSPDLRADACSXATTMSPSGGHALLVMIADVTVSKGRLHVLYLDSTLSAEAIIITETGGARAEKHS

SEQ ID NO: 1002169 - protein, 96 aa, Homo sapiens
GFGGQLSSPLSRLLLMSERYTSVYQFNASAYVSVCGRVYGTGYMGQADDDVIMDAQLRRADEMYCANAVASRLELGAGCVCRRVGEADWTLGGSSA

SEQ ID NO: 1002170 - protein, 159 aa, Homo sapiens
MGGKHADRDGYITSFNSTTRDTNAGLLGCLDIKRAQRPGLGTTSLSFALQRTPHKNAKETAYYGNQSTVHVTPQCETRHQSTTTVQDIDPSGAPTMQAATSTKASTLNQETYKPWWYLAKGYHMPDRRVATREPTVPLHADRRKPCDTKWSCRFHEKKN

SEQ ID NO: 1002171 - protein, 372 aa, Homo sapiens
MFHAPKKKQDVRCQQVRPQIVRVLTEDEDGAPQKIRDEANGPGIERTVAWQVTTVATRHGIRYYIQWRYTTVSGHVGEFPGRVWMGLHRKHWDDWIDHRRTEALGILVKTGMASGKPAVDKETSAMAWAVQGMEALPLGISNSPYNTRAREGPTKKSWTVGSDSMRRGPVVPCEGVPGGMAPPSKHGIDMYNASLGEKGTTWVIAVKTPAKLEPLGKDATWRYRLTGRDKDKAHYTSIFNPPVRKRTVGGSQKRGFENQAWGGLETALLPEKFDAEAEGTASLVEATQRKPHFGETTLSRLSGHNREPHTAVEVGEHLRAGDCCLMAYEEHHGTTIGGNYRQGGSTLPATVGVGHTDEDDAKKGTPEGGKHH

SEQ ID NO: 1002172 - protein, 31 aa, Homo sapiens
MTRQFNLSLFARLPAAIPSSKPNKTPVNARK

SEQ ID NO: 1002173 - protein, 111 aa, Homo sapiens
MGPLPLCAGLRDDKKTGDSCVRTANAAIGLIKVNGRPLENDMTPAPRLHCNEGCWRPDLVLSRPKGKPSFACVYDTPMLPWYKRLGAFTVAPVFDAYPVYVHSHYKPLWWA

SEQ ID NO: 1002174 - protein, 200 aa, Homo sapiens
HASLFLVDYEVHNSVTLNTQCLAIEPTEIENSSGTVFITPRSGNSHYPPDHILQFIPFRHRRTVRAATKFVLVRGLVMRTSAVVLGVFTRLTRGYLQSGTNILCDLLCEVVAGAHCLHLCSVLQWVCCAPIMSPLKWCCREAYSTNIVCCHTRWCHNSQTCGKARRDICTNTALRICLFPYNVGRVAIVALNSPPYVMCL

SEQ ID NO: 1002175 - protein, 216 aa, Homo sapiens
MVSIDDSGHEKTLSSVVKDFLKGNIKKELFKLATHWTLYFDSIVRPSQEEHGAQEGPSSLSPFVLPQWSCHRKEALTKDMEYFFGENWEEQVQCPKAAKKYVERIHYIGQNEPELLVAHAYTRYMGDLSEGARVLKEGGQGALKLPSNRGRDQFYLLRMWTMPSRFKQLYRGQDVNAWDLNFEDQERIGTEANKVLEYNMRDIAMNLGHAVPMAED

SEQ ID NO: 1002176 - protein, 51 aa, Homo sapiens
MTERKQNTKEVLRDGEHNTNGDTTDIRTQPNPCSYNSHTHTTLEEHDHPHT

SEQ ID NO: 1002177 - protein, 66 aa, Homo sapiens
TAQVCTMAARLVRRCGAVRAAPLSVPVVGVLVARCVRRLTQTPCDDVVCVGAGGLVGAAMACALGY

SEQ ID NO: 1002178 - protein, 279 aa, Homo sapiens
  misc_feature (84)..(84): Xaa can be any naturally occurring amino acid
CPEALFQPSFLGMESCGSGKRYIANVYWNVCSAPTQINLDVHLRCAVLGPDDMDEDGTFASIRLNERCRSSTFGNIELVMHNIXAAMSLRCASNREVTLVIGIDEASQHMSITVSMGIQRRIVRLHHTISDVIDPIDAANGYLTVVATREVLSTYRARIYWISTLLPFNRPRWDSDQKACGRYLTAKHPEDKIAKLGAQLVHIMSLLMWRERIELLRCSRFNIPVSWALKRSDKTLAARIVTQDLKNVGQLEVRITWERSRKIMVHPDRYWIQMWLSTN

SEQ ID NO: 1002179 - protein, 408 aa, Homo sapiens
MAVCPRQPLATSPTTSRSLPYLPRPSPSGAGSSVRLSVLPPGELAREHSRLGFFAEALVGRAVITVALTIALRLPSPPAFEPGMCDQGLASFTLRVDTGRVTDAGQYEGTTKAGSNCPFNPGVMTRHPLILEHFLSASMRVTRLNHGWVGYNLAILLRYLLATTNAALPVYTRITEWLTTHTLQRQELGDSCQPFTPQTSNPSLRRGPTCPLSGPLEWQITPVIRWLNPFSPMCPTGTIRHHRSKAWNQSLRGEPIGNVTPRKHFSSPPPVDVTVITRGKGIRKEREPHHGLDKKTNQFYSMGAYMLPIPNNDNAGQGYSELPKDCGIRTPAHNMASMPTINVAPPDGRTTGYAPGVPGKHRSFPGTWTTRWERNSEGEEVTTEIHAQDSPISRAAAHHEQHLVSPRH

SEQ ID NO: 1002180 - protein, 180 aa, Homo sapiens
VLDLRVAIAVASADPGLTGPRCDQCQLRLLQSLPGVRGLPPLRPDLLTADRPGAGPERFGRLRNATCQHCRSRALGMEDRGLASLDPRMQRVRLTHDPEDSFSDKDHRTSQEPGGWLQVDQMPFLYPQRETTPGAMQKTEIHAPLGSERRTMWSHYPAEGPLGRKYLDRGQAFSDWGRRL

SEQ ID NO: 1002181 - protein, 84 aa, Homo sapiens
MARQKKTKGVVDTTEGQYSIQDTHTATHKEENPKVGGTSARNRDPPNTRRRPGPPAPVARHIARVGHGARHEQDAQTHHRHTDG

SEQ ID NO: 1002182 - protein, 437 aa, Homo sapiens
  misc_feature (116)..(116): Xaa can be any naturally occurring amino acid
  misc_feature (126)..(126): Xaa can be any naturally occurring amino acid
EGPRAEGGRGASGARIVLILAENFSRSVKITFKVTSASAHRSERCIKVSRDWRTDVRDTRVSGLASSYHSTGASYSARQKAVEGPSPPRSNPRYTMRSSCPRRRASGTRQSRGKTXVTYSRAAADXTCGVWYGRRTCKACPRLLPILRRAAHGAAARTPGRGKCTRAHAPIRAQRYPHSRQTEGETGRVEGHLKTALSGHSGQLSWTAKRVPPGGKSPECGHWYSPLGGEDEATQYAKPGYRRRTVCNWTPPDLEGTPHWSGRPPANEEATPNWRPPLCGLTPFFLRGDGQNQNTKVSQGPERGTLRGGERKEAVEPPDDKREKGAVGKKTDTPPLDLRKKSGPQDRIKRPNNPEERAIDMEAATPITPPNEVIPIYTGPQWTEDTGGGATRGIRGSFHTGGGAVGHPKQNTRLDGNGTGARRGGLGGADGGAHTGK

SEQ ID NO: 1002183 - protein, 93 aa, Homo sapiens
TRRHASPLHSRPHSLDNGCTGSRRQDRPGPHSAESPCTQGHIPSINRLHGLSGIRGVCPQTGMSLLDASPETCLSDLRCLLDWQSCAHAEGWL

SEQ ID NO: 1002184 - protein, 191 aa, Homo sapiens
MLEAEGMRVVTNVSIPLEALEQDSKTVLMKCRMSGELSKTLSAARNWNARGQSSSQVPMLLEVIQHVNIQNLVEQQKRNHVGPVLNHNRLYRQIIPFPSLFTSKPKYTSTDRAVTRLSVPCFPLTTQRKTPLTPFYYKTRIAFGQCLQFLAFRSSLSVRVQTDNRRKRYPALCSTATVVLCRGVDPQGVVR

SEQ ID NO: 1002185 - protein, 207 aa, Homo sapiens
PRVAHASRCAGPAAQTFSRPLPDPTAEPGGCNGSMGGGGVVAPRPILQCELTHSTDQYHVMHRTMCAGSIARVRTGRAATMLRRLCIAGHGRPTRLGVGQGQDTARCQRRPRSAKGSTCRRYTYPSSHASKQVACFGINVGVIPVRAYGPLDSQRELGTRSRGSWDPHTGWPTGSESYGASTQSAMCHARGARANGWQNEGVPSVKP

SEQ ID NO: 1002186 - protein, 451 aa, Homo sapiens
  misc_feature (377)..(377): Xaa can be any naturally occurring amino acid
MAVLGSAVCIAQWQSGTHASMPAIWRARNGWHHPSEEAGACWRGWLAATDAVRGGEGLHVQGVWSTELAPLSSLQGVVQPRPLANQASCDPVSFGSGVLSTVATNGGAERRAEGRHHSTVSSKQVLGKSCWAVVPAGLTSLVKSPRQLFGEGHRGDWDRNRWDGPRYGSKDPTLNGGQALTDDPVVVLPTTQSFVCRTLIYWPWTDGNAATALIEIPQGIGYALQWASKATGRDSSLNWPLAGRCFWTSAWHALDGSMLRTLVLSHHLTHFTLKDAVRCVCTSPDRPMTCNARLAIHLPENRHVNAQTRTPFGAMTPEQVRYTVTFGAFGYQRRSFTIRATIAHVSPAQTALTSAHSPAVAYQSSRWGQVETSQFRXTRYFGGAFPAWNASGSTASEASSPDTSLVSARARTRLGISLIIQSALLYPYPSWNAEHHCVSCRSHGSALTTCL

SEQ ID NO: 1002187 - protein, 179 aa, Homo sapiens
ERSSALGARPSFHKNVYGTLNPVQAQLWQSVDPPLHATKMHSGVCLEPKYLYLGLLHDGIASYNKLIKQDSARPQGVVDESHQWIEHVVIRKSEQLVTRDRYIDLTSYQRKVPRDRKFVELSVTESSGLIVGHLESRVNLGSAIERHLTQLMNDVSESVMSSVPVTRGVVKPDEALSSS

SEQ ID NO: 1002188 - protein, 338 aa, Homo sapiens
  misc_feature (141)..(141): Xaa can be any naturally occurring amino acid
DVFLQPRTLTAPCPDQESSERQGTEVHGSSCSLVDPRASNSEMLRWDEKKIIMTPGDYMIVLRTEADGTTEGGVETVMAGVGIKRDEDDASSCVDVRGSLEEEGTICAPRHKETTSNVDDVHSRAELLRRTRTALIKGELXLNEDSRCTLREGQIVDSKKPHMNKLRSPRGTNSNCVGATSFNYVALLLIRLRGRMALDARARRGVLKDTLYGTQQGKHKGRNGNRTWLDLLRKHGVGFPKGIGGDTQSSESRMGRSSDPRDQDTVEDTGRPLNGQNRTKPERKKIKQQGGGPPEGTNGRPEVRGPGVTVNPQKHERNDERTRGNHGERARGTGETEA

SEQ ID NO: 1002189 - protein, 214 aa, Homo sapiens
  misc_feature (8)..(8): Xaa can be any naturally occurring amino acid
GRVGEPRXPPLLDPKSLTKEEYYRKTLEEGDIRGCILGEAGKKDVSIRGTGLLEAELVTSLMVGTHSEGIRMVADEAMLVKLEYEMNGGGKWHGKWGPGKKYHHPSGEQTKTGQYSALTPRNPSYERHNMEHHPHDHPPGNILSKAHHSAPTPSPHYIKNQTPTNPRSNQASVRTRTRLIPTAQHPPPITPPHARPPTAAPLKKPTARHNHQTT

SEQ ID NO: 1002190 - protein, 104 aa, Homo sapiens
  misc_feature (75)..(75): Xaa can be any naturally occurring amino acid
EEILSERRYQPRLSGQQASCRFCTWRRIMPCTYRPRRGSCFAEIPTSKRMPETDLVQEHYVDATLLHNMYAHSHXHTTWDGVAFANRLTLCLAYILYWKKMDSL

SEQ ID NO: 1002191 - protein, 202 aa, Homo sapiens
MEWWSRMLYDVYLSMLEYLNGELFLGDPPEKLTLEEARGTAESGVHRLPHGQLYAAGMVAWTLQSMMATDGSVLLPHRDTQPVHVVGAVPGVKTLFLFPNQTGFPNKHSRFNVYCFRDSASLLSIPEASKPCSNQPLMDQRLSSQLTDDLEELQLPQDATESDSRGGHLDPSPSVEEDGGGSSIQKTKRGALRTLLELNQNP

SEQ ID NO: 1002192 - protein, 169 aa, Homo sapiens
MGGPPFVRGLQSVETLTQWGPHGALGRHSRPWGPHDKRIAAHSEKPRSISAPNTKGDASGYVRKPISGCEPETQGGPKTYTTLGYPYWETQCTHHYRTARRRTQGDPLTPGGLASQESRPQKRQATGTGKGAYNGTVRGYPHIVAEKTTQNREPPVNPHTVRCSEQTPA

SEQ ID NO: 1002193 - protein, 107 aa, Homo sapiens
MSGRDVSLRGLSCARANSLFLVAGGYPAYSKDSGLLTSIHAENGISRNSLNAMCLGFIHADLEVRLTDEWRENCNSGAFRLVLQTRTGLVYLLYYTEFTPTEKDEYA

SEQ ID NO: 1002194 - protein, 392 aa, Homo sapiens
  misc_feature (231)..(231): Xaa can be any naturally occurring amino acid
  misc_feature (240)..(240): Xaa can be any naturally occurring amino acid
TALAQSDRIGTEPRWRRTTDDDSAVYPIVGAHMTNSASEEYSFALNSIKEAVPPVCLVPLWVERSRSELLPFRYRYHRMMRDEVAPGPAQNMLGKPFSIAPGWEAQQLRDTCTCLTARSGVRLGPISLRRQTRWVRVASARWHAPLTGGHSSAIGASTLARDPWEGRTFVCSRAGKARVGRGLADLCFEPSPVDARTLQACYLRSGLPPGGCPRCLVQGAGTVSQQITFAXTPGASSIDXATIGVTCVCSTRPIHSCGAVMRIGSLGDWDHTFQRRGESSPACNSKALAFCTKQGTRVADGMGRVGGRCVEHYAQLTGPKEGILGRALGDGPTHAPQDRWKNKSMGDVLVTMVADKFKGGPDKPGAARNHHNDLDQHPEPENDGKRRKAEHS

SEQ ID NO: 1002195 - protein, 147 aa, Homo sapiens
AEELTTILRQSDCRHSTNTCRHYSEGSRTVLVKERQEEPCAQGLPFIESTVELSLLCDMTTKAGSGLTNGGVNRKATGYRSDYLSVMYENMIKGVTLGLPVLQDEGLDVMLISPIYIVVIQAEWVSLLTISDNPLWVRTNIIQHGFG

SEQ ID NO: 1002196 - protein, 237 aa, Homo sapiens
  misc_feature (110)..(110): Xaa can be any naturally occurring amino acid
MIDWCKRKTEDGGVWRKNPVSEAHTAETAVKGVQELGRDKLTLTQCCDDAQVARHAVCAQHSPFWRLSEKGAADNGQAKTFRASCLGSYLLANKSVERMEERTQMKGTIXAINLGIYNRELYAKRSIMPSTFSSMDVVSHEPKFHPWRNAGDVAHKKRPESTRVMRQGTEGATILTALRRQEALRGETKDPVTNDEGSLECRRSTRVAAAGPALRERTYYHVPSSLYRGAAGQVDQG

SEQ ID NO: 1002197 - protein, 105 aa, Homo sapiens
MGDAEMLLRLPGADDDRPRRQQALTSVARPIRCTENGQRVKSEWRFIPRDGVKRESPPLEILVDRMRQPGALATANRGQQRSRSQVCMMAHGLEVSRNGRPPHEE

SEQ ID NO: 1002198 - protein, 142 aa, Homo sapiens
MAPVACFQKLAEYHARYVMAWSQATQRCKGFSPLTGMEHPFSRLSQTWDLLSSAKASREWTRCSPNQQFSGLTIQDGLDSEYRNMPARMAASVSSDSAPRVRRRENRMLDRPPKELKALQRLRACVWASPALLQVIRDTEVS

SEQ ID NO: 1002199 - protein, 120 aa, Homo sapiens
CAVRPEYGRCRTRLSVPLWGSPTSDWVKVCGNSMLEREASSREIGPEPQLSPHRCRRCPQALQQLVMRTTCSQQFLDEAEACSSYSVGKILTKTGELPRQPQHHPEETEEELTEQTGGLA

SEQ ID NO: 1002200 - protein, 253 aa, Homo sapiens
MVLAGRRGMVERCPCGVGPGGYAVLGLLEASLGGLSLSRCDPAGLATVALGGTLRDSVTSAEEVGSMLEDGEGRIDDSMGTLEPRLESGGRTPREDMDRGNHHTRGDPREQRGVVHRMRHGAPGGWAIELKDSWEAQLARTLRDGKARGGSIVWRERLGAGDKHLAAPGKQSAPQTTRNGTRQKDERFDQGRRVTLSLPSGRVQKSRAQLGSGGIAHETNSSEPRKGVDARPQWEEGGSGGQQFVGKRGDLKR

SEQ ID NO: 1002201 - protein, 132 aa, Homo sapiens
MIAVMNDTYLLRTREYMSNRLFQRKHMVIAVLSHRKPRALRRNRENYLNVKSTGCHLDEDRIIGGGKTSGFGLIYDSLDVCIEQGTKHRLTRHGLYEKKKTSRKQRKERKNRLTDQSGGLQKANVGAGNTKV

SEQ ID NO: 1002202 - protein, 295 aa, Homo sapiens
GRVLVSLCSFSNSLLRFATGSRRRRKRESVAKMIFRAAVNADDRPLLLGKATVFARGNSVRSIRFRAELSGGETLDCISSRVTLERRSCLCPGKVSSDDELSDSTRMKLSESPSEAALKDWEKAPEQADLTGGALDRSELERERTMMLALERGWRKQKEGAAAPQPKVLSSDRRVVSTAGARRGQRIAVPVRKLYRPERTRPSGLGHGGTVSKRTYRKRIDRFVKRQIEDMDDHRPFFTLAGLPYVHSLITHPKAVCIYGASRPVELLADMRPVDSGAGGTRGVTRETCKYVQAG

SEQ ID NO: 1002203 - protein, 430 aa, Homo sapiens
QKTCGGRRTRQSEMAWQPPSLVGEHLAPPPRAPDLSVVAPECPQPQPRGVHHGSQLCHQEEQEDGGVWLNATRSRTVGPMSTIHRVLGALPLMGHARKKKKHTAAPRAEHARERDKEAAGRAEREAGRETRGGGEERAEGGGERRGRSEGRGESQRGERGGSGGERQERGQREEKRGRGEESRRGEEQRTRTRSEKRRAEGEAGRERRRRGGGRRGPAAEERTAANSGAAERRGEAQEKGREGPRRRRRKRRNAGTGARPTKDRQGDEQEGRQAKNNKERNRKQDRRGKKTGREKDARERAVQRRGRSGATGEKDRGERKRRREEEKHADTQTKEETGRTGDRDARDRRGTAGSRSAQTHKEETDRQDKAGDKAERSEEKEDGRTDKKEGREGRTRERNERGEEKREGRRAGSPTRGEQRGRTRTKTDGV

SEQ ID NO: 1002204 - protein, 203 aa, Homo sapiens
GHNDEDDIGTEAMEAAEYMSSRPSRQNYAVVVPSCDHSYMAISIQERKILYRAFTATVCVLVTNKRTCSQQGGYRMCRRLERFYICCPGMLSGISYVHTKLYMLDGAKILCPRRHLTWCVMDAHLSALRARGRSYPCNTSLERDHHDFMESTEQQAHTEETVTLGVSERKRRRAMDLVIPRQEKRQHFVVARNSKWWSQRMPL

SEQ ID NO: 1002205 - protein, 40 aa, Homo sapiens
MALAFGPKIDRPLCSVAPFCGGGQGPPKVEYIDIITRNPH

SEQ ID NO: 1002206 - protein, 146 aa, Homo sapiens
VWLGSSVDGLECYQIWYGIWRLGPARRALAGSCGSSCLVWCFGAPQTAVAYEWGLCCSTAECREPPPLDRVYEIPGLEPITFAGGNDALSCPVLAAGRIYILPLVTSWIQWTRRVLPARPLFTTHPLYKDQACIISFTTVPDFSRV

SEQ ID NO: 1002207 - protein, 258 aa, Homo sapiens
  misc_feature (221)..(221): Xaa can be any naturally occurring amino acid
PPGRRTGGHLLSLEVAVACEAWWRVQNLCWLPGPSGPPGPEAGAGVCGAQVVEKAGSRRGASWTRLAEGGFVPLDVRLQAFTSSQDAHRDGRSLPLACGAFQWPSSHIGPHSGIRMHLSAVYNALLVSVLEAGPVEALCGSAVEHAATLAARKLALSRKANRGQPQQLKDRIAERALADPDWRAWNTTLVLHGARHATQDRHLAGFKWLLQTSNGGLRMFXHISHWANNLMSWLAKLGATRRTSKTSPSRPIHRWRTT

SEQ ID NO: 1002208 - protein, 116 aa, Homo sapiens
MKRGPSEDIRRTKRCPNEQRGTHSNPYRHTVYPVETPDSYSVMAPQGTLLKGMVHRLRTQQVHSNQRIGGTDGDHERIKKAERSQKANTRATRTQLTDPEDARPGGKDDKRVAQRI

SEQ ID NO: 1002209 - protein, 321 aa, Homo sapiens
CCMQRVLRAAQLFLVTALPPWLPQEDAGGGVCAELCLLPVCWCEPDACVHVPLLCELPLVLEVVACTGSAALPRVAPPELCCLWPPCCCLIALNEALALAEIGACDSGQLPRCPDSRAPQPGPDILQAPARGELPVSRAPWQLRPGRPCRQDAPWRRLRRARLLRMQKLEHGFSGASSMPVSAGSMPVLPKRMRPVMARLRGEQEEAGPSSSQAGASNGVAPLPRSALLVQLGHCQASTGQARHLDLAVSSLKTGPRPACLPTSCATVSTENLWERGFFLQCGWQVGGDFLVYPGDPSDTRHYIVHAGPKNIQSRLLCDAE

SEQ ID NO: 1002210 - protein, 149 aa, Homo sapiens
MPGPGTDAGKIPFCDAKERNPCRGSKALRGGGGTGEAQARAGSWRNIVWRNVVLMSLLHVLGGPVYYPGGNRPIGKPFNSALGAVHSGLLSLGRLWGGDKVVSNSDYVEAKGILSGDKAAFWRNIPWLYASLHGFPRTDIFKWPGNTGP

SEQ ID NO: 1002211 - protein, 193 aa, Homo sapiens
PLASPTRSGLRRSGSCRLDGAPPARDLSEPTVAAMHRSSEQPKRHDMTVYPDRSDDGDHDSVTQHQNEKQSGHSVLEITRRPMSLARSDGPQQEAQPTTEIQPPGSGQVQVRHETQRRTSQKTPGDQPTSTLPVDTRRGAWRTRTSDRNDKSRYREERKGGITQRNEHHIQKAEIKCGSDTTGNRAAHNRQTT

SEQ ID NO: 1002212 - protein, 205 aa, Homo sapiens
MNKKKKPFLGMPAPLGHTMPGLGRGATGFTTRSDIGPVRDANDPVDDRYMTPHRQENRWGPDEENIMAADDDDEDLNCHPITMSLHGYCWETSYSSGPYDEPMTDGTQMLSMQPWNQHRMADNEENEQTGAHRETRHTHYEELSYGNAPTIQQEFQNIKEENGWPARSTARTEHGIEPIPPKDMRRRNRNTTQTRGNPNANRRND

SEQ ID NO: 1002213 - protein, 385 aa, Homo sapiens
LGPGLRVVWGCCAPGVLLLLSYRSSFAHFPLPAVVGAEKTCRTPWKDERWSAFANERWTNDGARTKHAGWTHLDLCYNASLTTTSYDPVELTCRVPPTTLATLSLSLAYFANARTYHDLTGHVNPSFGPTVLYHSPLLGPTPLSLRLGGQFNLLTNADPFETDRIDPETRQPLANRYPLPGTTTMTLLTAHPGLTSQHRTLPMACAPHLIHCRHPRHTRALDVNQQLPLVRTSPSQLRVSDHLHCFPLAWRPDPETCPPPFPLATYPFVWPRGSTHAGLAHGGVQCPFGSLLGPCVSLPFSYSRHHPHARCGPLDTGTPHSYGTTHLVGHGPCAPGHAGTTAHRFSRWHLPSPTPFVHRRIHAPYTSISFRHADNPLSHAHHLPD

SEQ ID NO: 1002214 - protein, 140 aa, Homo sapiens
MGECCLPDTVLEAWQSPTLRPGGGRMWPPGCQGRRPGLWPLSAVAANAPNRPCFGAHRQHTRGAGSRLDGALLALCDDRMLCPIRHPDISNRFCDRSLTAPSGRGIDELTLWNHKWGKFTYSQPVTILPFELCTPSPCGT

SEQ ID NO: 1002215 - protein, 70 aa, Homo sapiens
LYTNLPKNLLNDNIHSHENSVDIYDLLRRTTVIPTLVSSPDEANQPERLIAGTYFLDSTPYRLRYPYSSQ

SEQ ID NO: 1002216 - protein, 283 aa, Homo sapiens
LALASEPSWLVPFSAVVPAPGGPEDVWARAAPKLGSGGGAVCRSAGLSVAAAAPRVKNPEEETATTRPRSNWSPNEELAANNLNGENAQPRKRTRGEQAPTQNEEESRHSGRRAEGQKPGRHISGGGELEAHLSLIFDGPYLIGTIEHNEAEQMTVQTGPQRQTDWTTPAERLRNSTMRHYMPLSKTPETLTTHYDFSLITLQPPTSFRCTVTRDHWLYQLAIPVTHIFCYSPYRRLHTFNPGFYLAHLATLLDSSLPVLSLTRYGHLLRFHPIPGNTTLASY

SEQ ID NO: 1002217 - protein, 306 aa, Homo sapiens
LKAKEGEEAGPGDHYWKLFPRLGDEKDVSVVTCPDYRRSCFQAPICPVFRLTDEMPSRPLLTFLYLRCSGQPGGPAQPSLASPLLSTLQRPFNVSASDVTRASTALHDPPIQHHAQSPRRSPAAHGNKVTQARLYTGSSGEGLHQTKADTRLSRYTLGPPVSPTRYPPACSRVLPTPGQPNPPDSSHITRIHQTCSQHNPTHTPPTTRTTQKQIYPQKPHTNHTNKDNTTGKPTTNTNQSQGKTRTARREERERTRSTEYNRRTDGLPAPAPELTPRKRKRRRDGTSGGSAPLGSRQDREQGREEG

SEQ ID NO: 1002218 - protein, 308 aa, Homo sapiens
MEAEALVPLAMIVTIFLLLVDLMHRHQQLALHSITRQVPCHCPGLGNHCCMWTNQNTPYCFEQLRRRLRGHVYTPAAVPWTPSGRAPWAGGVREAMVTRGRGHGRPPHAAHLTGPGHSGRVPKQRDPSRKHNGPDVALSKSADYPPTSPHYDAKLGVHCGTRKDRHWSHDGADTQRKCQTLRIMDEPRITAGTQGPRTGPQYTAPNRETPNGTNKDRLDSHNAADTTDTIPQSNHWRRCQPTLASAGVNGNDNPHPNYSPHAHLHLDPIRRSKAQRATFATGRASYQRTLPIRRQQRAHLTNDMGPRD

SEQ ID NO: 1002219 - protein, 185 aa, Homo sapiens
LTHRADPRAATPSTTPRPELQHGGRKPELKLEGRRPVDSVAPEHLTSDNVDIVESSAARLMGTMDAVRRPRVLTRYLPLGGPARTPSRSRPNGERPTFHDRRRSHTMWAHRDVTPDRNSDRETHTRRESPHGTAGTHRRRRRPTKPGTQYRENKTPEGTRPRTKRKHCHRDTINETSPRQHHGRA

SEQ ID NO: 1002220 - protein, 209 aa, Homo sapiens
ASCRSFRLTGACTPCLAQVLFQGLLVEFSDYPAVPRKGCPKPSLEVPIGHGIHFEGLMVFPQEVTLPPGAGCILPGALLDPNCLSPLEGSEHLSSGTSPAWGQTDMLSSSRLHPGQIDQQNLCPRLLAVYPGSGVCQATRRSHREGPFLPAGGTPKITCWMPSRQDTACGCQAAGRRLDRGSPVTVSFAQSGPNKPLWDLPDITLRIRL

SEQ ID NO: 1002221 - protein, 74 aa, Homo sapiens
  misc_feature (62)..(62): Xaa can be any naturally occurring amino acid
DDTLICLEEVVVFRLRQHNITPYVMLLEGILTIAATSIAYVLPNPIPRPDFHHIVRDSVVAXHRADSIAHIVPH

SEQ ID NO: 1002222 - protein, 274 aa, Homo sapiens
AYAPVSAPAAERRLWNVEVRAESSPRRSGGSVSGALAASLGAEAPDCLCALDGHHQQYGRPISRTGAALECVPEGTVEGMENIRILPASMPVLVIHWNGWERHVGGVSAEGNPVQGPSKSVCGGTREREGTTGLEATTRECSFAFAERRHLCGKQPWVALGANRASGAGGDRGARLGDGHEEGMKPKVVPVGATRIPWGGATSHTGTSPWGVTRPRVPTQCTDGCWSIKGPHCESMRSGHHWGITAKNDGTLGWARLGHLKFGTVATCTPLGNN

SEQ ID NO: 1002223 - protein, 228 aa, Homo sapiens
MAILAMGSYTYCLGHTSARSPLNSDLYPMQQRTGLTTSVTLRPRLQRETMTSYIAATYYLSTSELSTEERSAIDQHTHCRSQIKPKQTISGLYHHFSPDLSLKGSKPFDNGGAAHQYRGFLTINTVCTTSWAIKPQLQNNIKLVSNDRTHDKSVKRTRSGQFTHHNIPNCGPQQMLYVTSPLQHEKDLRNYKGATTNEVTTTRSMLHQCICSAWDKHNQHRYLSNDTR

SEQ ID NO: 1002224 - protein, 227 aa, Homo sapiens
ALLWSSYKQAAWHGGTESPAPGLGDSPPDVGLPKGASVSGDVMGSVVSLSFTRKCKPGDPRQLVRTWCCMSAAETDGSVRAPNEELANSKVKSSSEVSDKFQAVFHQKSDFYWFHATEANPEAVRPFSGVNKAAQTAAGSGKVSGETPVVKDLRAAVLVWNVNQGTQSRCYGGPWLQGKVQTNSIVVRNYIGRDHGEGIRQTAKYPWKTIGEFLGDELHGGHLKGFL

SEQ ID NO: 1002225 - protein, 283 aa, Homo sapiens
MFKQWAPSYGLSAEVNEPAPVHNMTPTDEEAELRTWIEGLTGLSIGPDFQKGREGWNYLMQHSVSELIAGHPVPKIKRSMQNVAAMLEIAVRTSILRAMVRLLGIEPWWTCSRPRTCLRSGNMTQVQVSLLALAGKAKTKGLQSGVDIGVKYSEKQERNFDDATMKAGQCVIGLQMGTNKCASQSGHDCVRHEEDLYDPKNHILTPMDHSTIRLQMGTKQVRQTGGHDRVPGNRRTIYAYASLGTGQVLTNSSHVPCRCGYTQGRQTRSGQVFRPVAADYIEH

SEQ ID NO: 1002226 - protein, 309 aa, Homo sapiens
AWPVSNWLCWPCAELCEHSPVQLAAARAVPAALRRSAVDVASAIQLPGAFDAAALAPVTWVLSSGPPVARRRDAVGAERHLLVLDLRCLEPEGAAELRAVTRTLCLAGDVLAVLLLAGELALARTEPGLRDALFDASYTAAASLPLMAMALDAMSYPDRTVPPSDRAAIQGCLGHLNRRSGEGTPGGFCMVWLPEADPARETTEAHTDVHPKGGQGLDPYNLGRYIPPLTYRSSRHCIVQSTNSNYRLGYEEGSQDWRLSPGPWVHERVAKANPWGKAHDDGCPTNKRLPYTYPTALGDQGPRIPPDTR

SEQ ID NO: 1002227 - protein, 121 aa, Homo sapiens
MRTHEDATMKTLFRPDGTGDKPVHERDAQTLSCTTTTQHPPKPYFDQSASTNRASRRRCPRERAHSTPTVHSNINAERIRTCHDLVWTGTHDVQTATASYSDRQPLPVARQHRTSGSNDKL

SEQ ID NO: 1002228 - protein, 322 aa, Homo sapiens
  misc_feature (106)..(106): Xaa can be any naturally occurring amino acid
AEAGSHRRGACRRKPLRGVKMRTTEDYLTLCAVDGGDRQHTDSMKLSAREARHRELLEEGAARDMTRSESPVVELRDAHSPSRPSVPNGSSPSVASRTQRPLREKXWKTRIRGLTNGERMLKGTRRERSLDDVLMPDGTGAIDGMVTGDDWRAEGKLPSSYSDIEYERPWAFGKMRGVLGKVGGEEAHCPWSEAAPLKASTLAVSKQTYQQLAWLADGDRSRNPPYHRSTSNRCILKGRLLEHIFHGDAGAFHSRRQCAPWNRTTAGEGTYSTNRHGADRFQRVAKGAIPPRPNIQILRPVPLVAYWSIPEKRRVPSRGPEG

SEQ ID NO: 1002229 - protein, 280 aa, Homo sapiens
  misc_feature (132)..(132): Xaa can be any naturally occurring amino acid
DYVSRSRADDLVEKVRREAGAGSGEEEERERERERETERDREKERELEGSVKLGLTDGAVLRRGSAAVSGPSCRHRASSVNTGSCVGLQVSPYLGPDTPACGALSVNMPGHHCPCRPVQVANRSPIAYCAPXCGQVRPGGSWGYKCPGVHVLASRSSSAGQREREARERDLRDRLKPGFEVKPSELEPLHGVPGPGSVIPFPDMGAWLCSLGPPGLHPFPFHPSLGPWSENSLALAAGPALRPDHVLMLSGWQLRGSTQTRVAALGNEPLGRVQMLNVTP

SEQ ID NO: 1002230 - protein, 80 aa, Homo sapiens
AVKILVSPWAGDRGVVTGVCKNKTRTQSLAVCARCAVDANDSAVIDSERGWREKGDTQVDACLRFGGHYGCSDDYEQQSL

SEQ ID NO: 1002231 - protein, 413 aa, Homo sapiens
MRRPKMLVISGGDGYEDFRFISSEECGYPRKSRLVGARDVTRDEETHAHSWWSGVDPCHALLGAEGPSATDHDSCLVQSVPEPFLHVDSLQTARSSMQRDGTVFARPGDALAMIAHDVGDFVRSDHSAVEDRFLRVTKDTNMETSSDDHWRLLPTEPASCALDTRGCLSHSSIDVANWGGTNCWYLNNMRDLQRITPCKVRFRVTDQWSEPRHLKVSYGRTLGEHGCVARQGNVEPHIALAENYFFLDADAFVPFRIGAWPRGPLGILDGKVLRAKLVTPPCFHHDSRCDVGTQIGYHVYSRRDTIDSRCRARWISVWCETMAQFESIPELSEGREQATTSKESVREDSNVACAEARVSASPCVDPLCAADASYVWACEATPGGLALNGSFSPLVRLGVQLGTRSERKCAYGI

SEQ ID NO: 1002232 - protein, 131 aa, Homo sapiens
RGAPAVVISQDRVALEDGKMFVTPGAGRFVPRKTFPGDFSSTNDGIQQRRQARLVLCRSHVCATVWLYDWALSTTVKVPAKPGSGAPARASCPGKISVPPVRNLHQSGFSLSGSQADDHIARRTAQKIMAP

SEQ ID NO: 1002233 - protein, 297 aa, Homo sapiens
MQTVLPPVQSVPVCHYPMMPYGGAVKHGTVCKLFPELWPLRAHGCGCFELVAPVHTAQSRDALRVPLASPSPRATQRGARVLAFKLPRCASGVFVSRALPCGARRSEHGPRLRGWCWALWPGGMRLGLDGWECRPKPLLPTAEPGLASLGACGRPETPEGCTLVTGKPAGCWELPALGLGGEPWGCTTRGRWQPCAPRSIHAEAAQDGASLPWSRPACRLNPVNRVQGTCPFWRKVPEPFLELSMACPTRVVEVNPGPRAEIKVVSREAVPILVGRGRETREDNESVVTKGVELPGS

SEQ ID NO: 1002234 - protein, 128 aa, Homo sapiens
MIPWRQRHKRGRHKHHPYGIHETHETHTTKHPALEETHRNHTPEQNIHKAVTSVVKLQWLRKTPHHGQISLASTAKSKGHGHRNEAQKSAWKTTWLIPRLRLRDKRVTPTVHYFAHTMCYASQRRGAN

SEQ ID NO: 1002235 - protein, 172 aa, Homo sapiens
  misc_feature (58)..(58): Xaa can be any naturally occurring amino acid
MPRVLVSFALSVLLLSLPGPSSRMQFLVSPTGSGRFPHSGLRLHLSQTVCRRNTACVXSYCMSALLQHSTQSPPCPARRPACLPSWLDAIVAASNLRRKQRRRTRRTARVLWSGPWRGQAGWLPGHGGTAERCKPNDPSIPSGTSSVQREETELGEVEIREPVTLSDMRIDE

SEQ ID NO: 1002236 - protein, 120 aa, Homo sapiens
MSEAALYGKEYGTHLSEKYEKTLCLQDILAINVHFMGSIGAIKKLVLPLLGLILPGDAIPHPSMSREEKITYTLPYCLFGWSQGPCENKLIAYRRLLPVFIVMPYELVYMRVRVRIHEVY

SEQ ID NO: 1002237 - protein, 153 aa, Homo sapiens
EGIGPVPWCQSMCSLAGSIALCHSDACSVPRAAGVPPRPVGALVTSAGPAKESTPAKARALRVLRCGAVLGTCCDGVGHMMMQQSAKLLEPKHERVPRDDVSELPRWYLDQSFGGNGILSKSLKKARSDAGGKKALTCINGYQGLPGMDREKN

SEQ ID NO: 1002238 - protein, 248 aa, Homo sapiens
GDAKWSGKASFMKPIFLRPFGDLRETQLLTDCIRDKYEKKKYMDRSLDIMPLRKEKDDKWKRGSEASSRTTKLEPVVFEKVTNATRTKEDPPATSANSSPKSTAPVTASVGASDAPVGLLHWHIVQTSNSLQNASDLSASVPSPSSSGPSKGRRFHANCQGVPALFLTNLNLFPGARAATPDANTARNQLSTDSTSFTGMDPRRLKMPNSKHMSHRHSRLKHGIFPKAKPKLTPGITPPNQHNCGRMN

SEQ ID NO: 1002239 - protein, 174 aa, Homo sapiens
MAPGHLYNIARAYPTSERSFPMGQRGCLAVGLLNMDVNLQQVPSGRVRPTTDPVNCDSHRICHRGVVDLGCNFPGSSQTSPGRRKGERIWHRLASKKYDLPYENGMVHQYGDPLPSRSTPLDKWKKVNMNHLPFSAQTQNGEPPCNASERGVPPCWSYGRHRSELNGLTQFSLS

SEQ ID NO: 1002240 - protein, 370 aa, Homo sapiens
GCSPGSGQESRSTFDKRSERPVPDPCLPERRCCVLLPLFSPAPDGVPGAGGPRCHQLLLLLLLGDLGMAAALCAGPVAPTLELADSELCRFCALTDVPCATCAACWRLSVLLPIYCVATFSRPAQKFRPPAYDHDGLHLLTLSSSLRDNRTCVTPPGHCDPTGIFGPATCRPFNHPHARRSLRRRALSHRHKHASAPYTAHTLHTARFPLGLLEYPPPHTLNGGLPLLCSGTLSALRTNFAGNFTFDQVPKGASKEFATRLPITHTAHATRTFMPPYRRNPNSPHGVAPCDSLCAAQPVKPHRLPHTTPWHTRSLAAAVPRVNPSLGSPVTEPVTAFHAKPSRARFLTPRHLIATHHAYTCWTADNSWRR

SEQ ID NO: 1002241 - protein, 143 aa, Homo sapiens
ISLNCKKSYKDCVKIAEAYSNLIEITDVQTDYSSSTARGYVTSCSRRPYIKGFSSVNDAASLCRLQSVTARVTAGHLLKIEQGCEQRLMNHVLATSSQHDPVLGSSTMRPVINPRAIWPVTVVNVSKNNKNAKFSKDSEDGHR

SEQ ID NO: 1002242 - protein, 428 aa, Homo sapiens
CLGPHISAIAGFPRTSYSCVYSWSDRSLAPGIRANSLSRWTGGVEPSRFRDRVDNDSRGSGPMITRKAEAKEQHLNDRVLQKLPRIEGKTLLTPSPKRLLENGTKLEVPTSTVWLLSGLVDDACRVAGGGPAKWVAVCLTVEDSSALVSPNGYTVKPIVPHSIGLWLLSFSMPWCPEVAGSFSCLLIRSSSSTLTAKDMSVLVRPDLTPEGTNATLYVPTCGSSCPKTLFVPTQMLGPFCSFGYQESQRTGLDAYSCFAICPQFRLCPVETPLTLGVAPFLCGAPCDSPDRTPASSWGREPSCVPQTFFHFNVLHYPTLFIPLMNPLASGHKSPPLFQNGVEPFAVQIHAPFPQLGAFYPSCLPQEASFELAYGPTKPVRSQALGSLRVCGDFNDWPLGNLPLVHPFLSVIRNEGPNILLFNGGAHIH

SEQ ID NO: 1002243 - protein, 92 aa, Homo sapiens
MVNTWLCCLMYRWCVVPNRCQCLPLTPIKTKAQQSRSVDWLPQLASTVGIKLTSLTLQVTGGAPGQRTEELCACSSKTTSIGEAALPGPQVD

SEQ ID NO: 1002244 - protein, 181 aa, Homo sapiens
  misc_feature (56)..(56): Xaa can be any naturally occurring amino acid
RGRRIRIRVPRHLVGPPWTWTGGGGGAPETPVVRHIPSPKRIEPPRGKARSGQTVXGCQLPVTMACPPCPHPSEVVPGLHAFMPQDALAMRALAIGRATGCWPPRARATCTTCHLTVWSDWRNADRGLSEHSSFIASQPLSTPPNCAHLNGVLDCFMAYRGAARDPCSTTQDTTPPVPGVQ

SEQ ID NO: 1002245 - protein, 183 aa, Homo sapiens
AKLVLHAHRKELEVPPACDASNELILGMQLQEEEGKPEEPIDLFENLLVLSPVCGHPHMRPLFTQEARWADRGAGAFALVLCSRVMTLLTVSSSHYSPVPGPAERLCLSVSSSPCPQAVRPVRWSSSVCIPAMATRPCYDAPSDACRDGTGAHRDPRTRTRQQLEGLESEAILSDSSFLLWHQ

SEQ ID NO: 1002246 - protein, 312 aa, Homo sapiens
AHARTHAHTHTVRAQPLRACGRSGGLLCGAAEVAMCPGVAGAAVLCTVLRDSARARAGCAPAVDGRRGCWPRVSRARGSRLCCAVTAEGCCGCVCMQSMRCCPREAWNPHGVLPLCALAAWPFKLPLTAQARGFTGSSTLWEANLKQNFAWIWQLSPFNTNALLNQLLTLAGNGVPRQRLCYFPFRMCQWLDGAEREKPRYRGNSGHNRTNLFWRSWPISLENECQAKRSRSRKNLSSREATWPWPRFLRWRTRVLKSQTFPKPLARKGGFPWLDALFPTFPFCKTAPKFLNRRPPREGKKAAQAAEKFFPR

SEQ ID NO: 1002247 - protein, 205 aa, Homo sapiens
GDTAVPSGSSLIFWHLSEKMMQGYLDPFWSRICEPCEQESSGWLNPTSCTSEIVSLRILQEQTRKRVSIYALDLSDRNIYNIYEHYLAFIMYRTGLTVVTTGALSTTEDLVNYADDAEDYVAQDGGNLIPSKLGMWALYRHHMPRVQMTDFRHIVVVLGPNYDAHRHSSRIVDIRGKIGLIARRRWQIWIDHNALVGPCQLHLGP

SEQ ID NO: 1002248 - protein, 338 aa, Homo sapiens
GAGGYADNDIGAVSTTGHGESILKVNLARLTLFHTSNKEQTATNEAADLSLGLYEVKGNTVLGGLTRGYANTGDCGAHQLDPPTPCPAAKPPKAPASCNFGIDSLTDTTNQPSTIPKAAWKNLYFPDCLRLSQGPTVTKSSLDSGHKPLIHTKIFSNFATQLASPVPCHFVSRPPFNYSILEHGLWLCCGEPGFPRTAHCSKHTLTPGYLSGRHSPLQTPCGQRVQTACRLQSPSGNFTVPDLGQHPQGTLCSPHADTPPGEPPGLISKPPHRHPQTRAANPHRTSNGKQADATANGNVPFGTIIDTHEHALRKRPPNKDPLQRKPPCQRPAKTDRHH

SEQ ID NO: 1002249 - protein, 95 aa, Homo sapiens
DFYVIGSSYENELMLMAVLNCLFDSLSQMLRKNVEKRALLENMEGLFLAVDEIVDGGVILESDPQQVVHRVAINGVEGLVPPLREARNRWFFRLP

SEQ ID NO: 1002250 - protein, 138 aa, Homo sapiens
MYDHAGLTTLPGLENENSMPNDMTFLAAKLNIKAFSTRITSPIGLLPFVTLPDCLTGTGVDTGSCMGRLRLNDTLQLQLYLFSVLLAELILTESDFVFISFQGLGCLWASPGGLEVGNRERNQTHDCCPGWFCGLEAQ

SEQ ID NO: 1002251 - protein, 216 aa, Homo sapiens
RQWWRNGSRPRPPATCSRLGLPRPSPDLAANLLLYQTEGSGGEPGTAPFVSASLPFTLRLLAETLVAGACARYAAAAVTGSGCHWNNCLDRTGSGLAVPCHVCAGVCGACAGGHLLDLLSDFTFSLTHGLQQSWSPGGALDLGARRRCLHGPGHTRNTHRRQSTNTDYSPYLGYQEMGYVSSSALVTDLDTELLRTHFMSLITKIDAGQDDQSRLL

SEQ ID NO: 1002252 - protein, 69 aa, Homo sapiens
PGTGPRTFWICRPTLSAGLPGRVTAMVVLPPRSPRCTDTASASGRRQELLSEPMARGPADSESNSMTTS

SEQ ID NO: 1002253 - protein, 103 aa, Homo sapiens
MSDWPDVENYSGESSWNYVPTNGYNTGSYMISDSENACPAEHFGQQRISPLNLINLMTITIRLKWHLVTDIYIEKQETHHKGSSNLGYATRRKRVGLGIPGTD

SEQ ID NO: 1002254 - protein, 176 aa, Homo sapiens
MEGGPDVIFQEDTSQHLCRRRPLSSGAQNHPDPKPEVLCYCGGPALDDDKDEDTESRQSTVTDESEMQDMMTRGNLGLLEQAIALKAEQVQHSHASRAARLPSRASCAWAEPSGRQQRPLDNCAGRDSLQVTRSFKSCEAVSIKVSNTKAVDGTGPRYRACTLNTPTTFWTVHPKD

SEQ ID NO: 1002255 - protein, 230 aa, Homo sapiens
MSDGAAHALALHRLTSHLDLLAQEPCLALPPLCCGTQHTAFQPGGRTTHTSKTHRKIPGQEDRKQATGRHAQHTHGTPPQSGRTSIREGASDRKQPPRKRKTHTPSKGKQTHPSTFSNASTGKERDTAAPHPNTKLPKTTSSTIYQNESGGTITYITTLTPRNHNRANKTQASAEPNRYGVRRAATQTKRESRTELGQGRDEKYTSPNHYYDVEWQAVSIRNHVTLPRAY

SEQ ID NO: 1002256 - protein, 514 aa, Homo sapiens
TLFPVHQYSWPSLQGPVDLHGEQVLCQTLVSLFPGSLSSFQHATEGLAWASGASLIESGDSAASRSGPVRCQGSLDERMKGVLERQTSRRDRAALRTPYSHVTGDEACLRRTSRNAGTCFGRSLTDPGDMHVAPTMVTSKDEDECVSQSYVSTDHRHGPLERPSRSLIGLRVPYRKRTCSLLVRFRCKHLDENSPRYVLADLALAPYLKDAPKSTEEPEGVVGEWRPRSSCCEAMGPYAIGCFQKRFPLESNHSGVIHRSSNLRTLWGHRLQDLQIDASSHLVEVDSICFRYQIGDEIENTSTKTWDTVNREGPLPTGAHRNFDPGTSLQRIYGHQVWKRKAIGRPTTEFFTRVTLRAQENFDWGRDQFPRGPYIQFDLNGLGLSGKRKHRVNGRPRTQQVTLGSYRGQGFWTGRHANQPVGSTTQDEDHGRGRGIGDRLGFVASRNGFHPRRLWTKTDNTVPQATICARTFRHRVEHPSDRQILESGPSFGSKQASHGEEVKKGRGIAAYHEL

SEQ ID NO: 1002257 - protein, 107 aa, Homo sapiens
MRRAAVTSIWTDDCSGTCLAGDGHGGHLESDSARKGGPDRAAEGRVSRVSVSTGGQTNAGTKTQAPVTCTLIEMNQTRHQIPRQGSVTSSMLQVHSEGVVHASLTSG

SEQ ID NO: 1002258 - protein, 412 aa, Homo sapiens
MIPWDVGIAGITRRLDKRICIHLCREEAARCSDVTWFASCGEPFPHKLTDADSISGDWAPETIGEGLARGWQEHPSTSVDDADLVSNACPDDENGDKVLSQHSVEENESSEPPPSAPYPPEALNECALNHYTGELTRGLQLQERIAPVEIRLGQYCIVWSHWEIRVPLRGDSKEAAVDVGPWDGDKEVGNMGTRETRVSTFDAVIPYMWGHRNASPNSGAHRTRGSRHTLGPQASARNPLCAMGKHDRLRTIARRIFTTYRKGATLWLGEAAEWGKATAFLIGPWWHMAPVYPSIILDSGATNSVVRPKDDGIGGAATDATNGQIPPDSVSPKRQASSGVTITPVSMPHPPKGCAQERGGRPVRQRHPRVEQGSHPKDAVLAPTPPRLSHGLKAPTNTDVRDDTRPTGTYQT

SEQ ID NO: 1002259 - protein, 221 aa, Homo sapiens
ETIKVRQWHVIDTQFHVNFSKQDKDRSSEDRQFIRVDRRSGVGSRIWRGMDELPVESLLPLVVVTVRSDQCQPSLCLLLEQNSSFPCLGTRVTCCADAGCPEEQEVSKKTICRVQKPVTVQIGLPFNIWAGLAPGQGGENESEELTEREVGLRARTEADRRLWRVDEKRAGQKQSEREQEEGGTRGRDQQAKNKDDTPRRGGERQRTKVKGQGDKEQNGKP

SEQ ID NO: 1002260 - protein, 174 aa, Homo sapiens
MGVHPNTDAPFYLSGYDLSRHRPFLVVWTLVVVLGPCSRQPHDRSSLSEAYSFTSTVQSGNRARHQVRSCGYVALDFEQEMGTAASSSFSGRTSYGACRMGQVITIGNGAVPVVPDALFQASFPGSGTCGFHDTPLTPPDVDLTSNTCSHTSVADPQYSGLPRNPREPALPALI

SEQ ID NO: 1002261 - protein, 134 aa, Homo sapiens
MGCSRLFRSATYTGTYVYLNVRVRIQGTIYALNMDVRLLDQWKPLCGGEIRNDCAKVTTKPSLETLMVAEGRARIVVDGAILPDEARKRETMMRTVPEHWWNSSSGVTATADCMQAKRACDVASTLGYLLMVSV

SEQ ID NO: 1002262 - protein, 342 aa, Homo sapiens
EQVEFAGIDPVLSISLLGRLREAEEGGKKIEELFPTPGVTFYKEAHHSCDSHDPCLADGFSVGTVEDPGLGELSDLGLILVDLIIGLIRQGKENLSQLFSFIDSDDSIYLLATVGPQFSINVVIYECPMGPGAGSKIFLHLADRPLGLTCARYHERQENTWETKSEKNTADSPSCTTATDSWIENREPPLTRLRVGHREKGRTPKEQGPRRRKYRQHHSKKCENPKKLNALRNGTYTRAEIRAKLKREENRRENKRWQRAHGRQPGDPNRRNSPRGPSIQDDQLQCTRYTDTPDLRYGQVTHDDIEEQLSKTNDKQTTTHGTKQKEQNKTTTEAQVDDTAAG

SEQ ID NO: 1002263 - protein, 205 aa, Homo sapiens
MSAYQLWECPTTITSSLTGYAHLIDPINGEDTQFARPPVRLGIQEVTRDDASDVTMSSSQEVTHCHVGPRYDGFKVTDGSLHGGRKDPFGQILLDRSRRRTRERNVVVHSRQGTNDVQRTSSFDYLASCPGYLVALWPKVLLGQLETFLNADQPPVLGDTTTEEMFVPQAYLTRFGAGMSSQRGRPLTKLLLIPYLEIGASSRHA

SEQ ID NO: 1002264 - protein, 172 aa, Homo sapiens
MGLICRWVSGLSLSCSQTIILGLCPELYVIVQWSVIAVGVFLFLVAFRWRLLAGSSARENYCLMITFASLTSPHHVGGGSAQHMCMAYVFRDKVMSRRRNEANFQDMQHRTNLSTRMEECNSGLVSSWVQRCTGRNVTLLVGIGKLGEDLGRSIPYHVEETEVPRLCACINR

SEQ ID NO: 1002265 - protein, 39 aa, Homo sapiens
MRYHASDHIQLPMESVSTSMTLSEGNRIIDVNNAAFPVD

SEQ ID NO: 1002266 - protein, 233 aa, Homo sapiens
RSCNAPLTDRAIGRPWRPGVARGPDAVLEVAPRVAPRCLLLLIPLVAASIEPSRSCLFSEAQMKPVTSDLKNVSVSLVQRYQGLSGLPSSQSVSATGLPFVTCSVCTLGSTCWVNFELLLIIYHVGTLGEPSSWALPILLACLAARRAGQSEPVKAGSRHVEETVPIAVFWDGEAEYFAREGHVRHIAGTTSAVPKHTSMRCKPLRDITRHYQRQFVFTSRLNHIPLIGIVNL

SEQ ID NO: 1002267 - protein, 303 aa, Homo sapiens
SAIHLPKKMQEVVKDWYQDADHQPVEMLSPAMRGETCPSSGQMPCECPGEREGTAMGALVVHSHVTGPVANTDEAMAPETDETRALKTKACSLDIDEGPVDISHQWTCQGPMLKCSQKQCAVDAQWLRAGRTVRFMPQPKTHFLEQLGGPPERLERQGPDSAERAASPKYKRRQWRGVLWKKPPSVFGIARQRGGGTVAVPAEPVNAMTLDPYRGAVKNRTPNICTFRQRDKYNSTMEGPKRPKLTRPEITSSCMTRPGYSWYTVDDSASKTGCFTQILGRARGQGTPCSTSRTLHGTGPPPN

SEQ ID NO: 1002268 - protein, 66 aa, Homo sapiens
NEWYIQHHRRDIGRALVVEHWRIPYAVIIQRAKYEGMRLNHKMKKDMNDRDSKSLLDIVIYPDGKT

SEQ ID NO: 1002269 - protein, 497 aa, Homo sapiens
  misc_feature (19)..(19): Xaa can be any naturally occurring amino acid
MLAVKIALNPNDYLDFHAXEETEVQHSRDLGEIAHMTHWVTIGARRDESDLTLLASRTCGISLLHSASQEIERSLGVKERVVAMQEREAMRRKRSAQAREVERTDARGSRTLTPSISTPLVGHVEDVLHPLCQPGKGTHLPFTIEWRLFESPPRTPGRVGGTLLQLPRTCALTLCLLHLGPLGKKHSLGTLGGYTYYFVIKATSGQNSAFGELGPPVDEGNHKRRSPSSYNPPVLPRLAGNADWSWSLPYFWKATMPRDSNLPTPSTGQTLAPCTHCEVWSPVHEPRSANPPLRRGLTALSWVTGSPRTSRRPNPLSPKECPACPPRFRQFDTAEEVWPIRPGGTEHVGWPTAPNAPPPPGAPHNRLAYKDSTLRPYLLRYRHLADAKYEVAHHLNRYVSERVLHMQALVGFALCPSSLRLFASQRDCVSWCIPSLRLLWRLQTHSLLAVDRGGFSPAVVVSGPPDVLPPCAAEYRTRIIFTTLDRARDLRSGLHTP

SEQ ID NO: 1002270 - protein, 170 aa, Homo sapiens
ARADSQRAQGLSSWESEGSKKAGGHGLPAPAGLPLRVAFLPRGAPARPLVERLLRRAEIIVIGSREWACVLLSLSLSPRAPLLIRCPVGSRHSDVLGRSYLTQVPSVETGQAYATNSVAIAFISLSRTRVALILLVAWWGNLYSWYHVHPISPDYPRDLVTLIAGGRGAS

SEQ ID NO: 1002271 - protein, 166 aa, Homo sapiens
LVSERRREPRPSRASKRQSRVQGGPAWGGWGEPGGLLVAPALLRSGPSGPCCCLPAACLSPALATMCPGAGPRLSCSPSPCIPAGPPPGGHPQSRVLGGLQVFVPTLSSSACSGVPRSMPDVYLPVVLSCKQLSQHYHMRVPSYYQEDNIARERGWHSCANEPGEM

SEQ ID NO: 1002272 - protein, 268 aa, Homo sapiens
QNTKWLDDCRCMRVGALGALCVPCGWGTAVGFRGVFRHVVHPVGLLVCRPVDWGLCVPIACWMLCCDVHMAGGLTDVDVPVTRVGPVGQLTIEDQCPLDGGSSLVLPMAYLSAKLMNNSLDVFITLGGASSQIGLRVSDTIYIAHGCNERPWTPVAGVQGASQCFKWADFWLGLVLAAGTLSIFGPNSSATYGRMVKMFAFPRSVHGVVASPWTQFHLFGRSRSQTSTCGAKGFLPRFRFTALFVLPSKVAFSLLLCASLDSGRSGAR

SEQ ID NO: 1002273 - protein, 211 aa, Homo sapiens
YRTQIMSRGLPKQKPIEGVKQVIVVASGQGWSRKTSTSSSESCTCTSSETDSSKAMDWLDCGLCMDLQIPRDDCHSDKDNPDTYHRDNANEASLLNLCVLGVALVYWGSSGSDRHDEPTARIRTDAPYLVTLSCEPVRTNRRGGQSEVLSTDGEGTTRRASNAGRHDKHDVPAVQGNTVAASDMQARKPDTGTDRTEPTHNNTGKGLDAHK

SEQ ID NO: 1002274 - protein, 329 aa, Homo sapiens
LCAADVGVQRWSWSVWPPWASPGPQRACSCVPPAPCRRDLKNARDWGPVGTRPPAGRSHELQRGEPTPATSSCLGVQRTVTDTDRRPTQTGINGSLPKRREDLTEPPGHPLERPWAGTPNTAARYLYSCIEHLLAWRNVTSLSLPTPTGLLSLTTHSIHPDTVAAAHWPTILPQPVLNERTWTVLTPGSIRINVPASTINAALPDLIPKPPSSALHLTASAAARPWHSEGRNLTDGTLMPPLRGPRPGSPDNSQRECQPGRWPSAACGPTRSASGPPAPNDAPLPPHYPRKPSARAGPPSGVPPANAACRGPQWPNDSDAKRTAPQTAP

SEQ ID NO: 1002275 - protein, 169 aa, Homo sapiens
MSDGKPIVLTSVSRCSAPMRHESRMARAMAVVERALGAVPVTPGGNHTVACRGDHYTLADGREPLVALWDLSNMRGQTQSNAGSFSHARVRMMNIIVVDHRLNGRGAGRGPVVQRNHGVPPGHKPVETVRSRGDQRNAQSRDGAHGPRDPSEVQTSGKPTVTMDGGSHQ

SEQ ID NO: 1002276 - protein, 296 aa, Homo sapiens
GCLLVFMSQTMTTVCAPRCLSPAASGALRQPDMALAHGLCRERLVSRGPCAWLACAAVCALPCDSYPGGESDYLRPLVIFLFVQTTVPLETPPDNPESTLLEVYIPGKKPALHLPSVRLDFCRPWASADSSYAKFNLRWPRSCNRRLTASLGGSALLPVVPGPMTSMSWGPTLTVDPLAANTLWDTGSLRLPVPRRHPWPSTDIHLHGDTPLPFKMFHLACSLPIDVATPRTGASAGRNRGKLNPALSREGPTDRSSTGPFLSTQCCCNQMSHRDPYPLPGTLCADWQFGDLGALV

SEQ ID NO: 1002277 - protein, 253 aa, Homo sapiens
MSFRLGVVHGCDLSRLGEAEAVEDHCVGQALESSRGQGWARSRVSSTRRRRSVCHHGCISQKLMAALALNLSKTAGVKTTRRMCRLTHEHVLCPGHGLHGAQGETALHRWPRILFFALKVGGRDGDDPTRGFQTLLHRSEQEWARKYLLKGGQEALWGKVLVNFLSSCQQIRVPRKVLTKAEMEELDYYQGPVEKSRKHIDTWVAEKTEGKIAELALSGLSGIHRQGWILVNACLFPERNWDRTVDTDDHRGA

SEQ ID NO: 1002278 - protein, 412 aa, Homo sapiens
VPGGCAPAAAGAGAPVPAAPRAKVFRTGLVLCGLRLELVPVPDQTTLVGCLARAGCMPVWRCPAAAATKKEAGPSRAVLRCQYKIFRLVRDFYFSGGCIPLQSFRLLGDLARIVDPCEPGTFQVVYSPAHRLQSRPWGKTFRVSAIRCPGTSKGSCRELRAGTFWLCALCALCSPPKPFLARVLNLPSGPLVDRVGGIGDFTICVAVESGPTPSPFAAGNFWAQVPNGSRSRSVLLCVVPPVCVCPPFGGRRLLAHFARHFRLSRCCLWTHPFGVAPAGAVPPVPLWAREWVPARLWRGRQGVRPPLLWRIGCHSRDHKRDNGLSAACAPGHPLLLDDEPCWGSPNRAFGSATPALRLWASATNVSNPNRDSPQARVPWPWAHNSDPEDPVCNPPVIATPVVDLQPGNRTQH

SEQ ID NO: 1002279 - protein, 201 aa, Homo sapiens
  misc_feature (123)..(123): Xaa can be any naturally occurring amino acid
MPGKGHDESEVCGPNTIFVIRGYILDRGGIVGTKDGPKKPRGGIPVVDFYDQFFRQNGFLSTPPGDIFAPPRVAPPGTETRSPRITQLKERNTVGEKQDCFLHAKNPLLCTDRTSVTPDKKGXYGFQNEWALDPRMAENMQALGIPEQLEPRMCALGAQVSIGISVSASTHTWGESYRQGTLYSGHPHFEFDTIYRGIQFA

SEQ ID NO: 1002280 - protein, 225 aa, Homo sapiens
MEPSADGYLSYFQVHVYYFLLLSSSDASFSTGDPSSRFLCASLLGVHSNSTQVAAHCVADLFPQIINPSKSWSPIRLWRLGVCVRYIRAWTRSSVEHDMLLFFGPWGLLFSSSFTDSFGLSAGVPSPKGLGICCLGLSGLVLGVAGPFSCMGERPSGGLILVPGFHFRLLWGRQVSCVPPGDMVNPGLAFTPPRERLPPLPWQLRVPFAPWAPCVYLAPLWALDP

SEQ ID NO: 1002281 - protein, 267 aa, Homo sapiens
ELSGHFENQKVMYGFCSCRRTPKTALPKYVPHQHGWAEDVPDARNVQLCQSSVDLWPGKRGKGPPHSRVSPGPPRTASGTESHPGRVCPLLGIEGGSGSPLGWPSKAKGCAYPFSTFEMSCLSLAATFCDPQRKWKGEPPESDPSESLNSDPSGHLHGSWEPKTRGMAVKPKQLDKGRCAEGPKPDNVQGDPRPNVEGGTSKIQSLHVQGRDLLPQIRERSLLVAKRGITVRSMVIRNIINVLPIEAKSDAFIHCHVRTARNPQFTE

SEQ ID NO: 1002282 - protein, 183 aa, Homo sapiens
VDGRADQSGGDMGARMTRTDSFSSSCGTIAAGVVLMIQSGRPGRPGLCARDLWRLLEVQTQRPELASGLRTSAAPGWLLWQHTDALDSHLQCVLPRRKAWLSDATIRWCVARVQVWLAAGERMGRQRQTESRYWATREKHHRQNTYTTGAESLAQETLRRIVAPQREEGLSCRDLVVQGLSFI

SEQ ID NO: 1002283 - protein, 32 aa, Homo sapiens
MAQQTPRPPTWHHISPHTPHGTTLAALTSPPQ

SEQ ID NO: 1002284 - protein, 354 aa, Homo sapiens
MLEQVRHMSITTALFLCNVGRGGAVRRSTQMLQDQPSQNVVVKNAASSEALARTSALSYHEKHGKNYLTRLMGEDSRDPMALGLVHKERQLIKHVLVRAFARKSVGRQQHEKDKVSKGKSPLSGNPQEERERIAYRGGFHFPVISLASWKVQSGPINNFNKWTNTFHGGALIAILADEIVFAEQEIPEERRSGGESRPSIVVRQRYIDLRRTWPPVHVQHHMEKRAMVCTQPIAEGRPKDRIAEKKTGYLIEASTFSAERPIKGVPTAPWEVVERPEKPPRGGKFPDSGKGGPGHTDPKGEKQKTKGHLAKARGTGKNGKGDLPEPNGPAQQGNVEREKDHGARELEISNNRER

SEQ ID NO: 1002285 - protein, 111 aa, Homo sapiens
MGATVHVDAAGGNEECPSRCPVSATSQEVILSPACVAVNAAALHLIKGHSTSIMDWSGRHPCYDGRPLLGILPMTGREEFMAACACSQYCMGRGLYNAEGTVVTSLPRHYP

SEQ ID NO: 1002286 - protein, 256 aa, Homo sapiens
SLRRAREPGAACWFQTESYSLSRSGVQWRDLSVNVTSTLTGSRGSPASDLPSSWDRRDEHHHGWLHITRYIYVETGFSRDCPGLRSTQIHGLQATMTRVSPKSCVENSLSAVRDQQDIPRTQESRIRHKITTPHKHNHYWRKQDPDDETTHNTTYKPYINATNPQTEPHNGQLSPSTTARNARRKHGYNHKKITTNKKQHRHQEGHPPRAHSETTTNTDLQGTNNMAHPRQNAQTETHLIETPAKTPTYKAPNTWQ

SEQ ID NO: 1002287 - protein, 354 aa, Homo sapiens
EPREDMRGCYEGLPAASAIILPTACTGRVLSMLQTAHTNCACCVKSPAGPNMKPAWCALSWRTTNADGQTGPKATRNCLAQRPNRCDAGPNIIDAQPHDCHFYWLPPTNTLPSAAGSYANPTALVKPTNRISKLCLPTRASTQGWRQGVPSWPGLPINLWPGQPNPTDFWTHQRGWPPHMVFRIRPLARVWLPHTRGLSHWGLCKLRNCHQCQLPLSPRTRPRPFLSGHTPFNLGELTFCYAMFHTWLRKRLPIGTTHENTRGPPLRPLWPIGPSINRHQVPVYYGPRNRKQLPLYHMGHLTSQVILPPGPLVATVIRFPKGQLSLGLVILFHCASSHTFNLLGPVCSTTPPHT

SEQ ID NO: 1002288 - protein, 118 aa, Homo sapiens
SVVAAAVSGWHCCAHAAEASWCACRRAGPVGRGMSEAGPSPSALEHERCAAAGSILLRLGTPRVLDADCRLKAEPTPDRARRRHEPAQLQQRDAGMTAGAGQANGRVVAPEARYFSLK

SEQ ID NO: 1002289 - protein, 270 aa, Homo sapiens
MRRNVQRKSQVLYCCGVHCPISGPSSPNTSQVYNTCKEGGLHSLLRSPRVWLIYYANYNSYLRWEPVTRSECSSWSYPHAILAIHGSSHDVQSLMEILLETSHTHTWKTMLAHYRTAMHDSHGLHCKKPARRFGKNQSTQDHVTSDLADLTAIKPLGLPPNFSFQNMGNPGRVTNYYRGEDSDSEKPVTSRPNYVCAHGHGVPMNDVVLTIQLEKIECRNPPKFYATTRVRYNGVESTPLSRFDGLYKPPEFAAKISSRHMCSDMPKRIR

SEQ ID NO: 1002290 - protein, 250 aa, Homo sapiens
  misc_feature (33)..(33): Xaa can be any naturally occurring amino acid
LMAMEKSKATLACARQQEDTAALSPASCSVMQXVPVRTGAEVTFGEDLFPEAGCTCFTESGSLNHLERGHGPVVEFYEEIKKYEKLETEEERVARSREIFYSYIMTVSCWPARIPSRRVPLRHVQGHLWGTKQVPPDLFQPYIEETLSKPPRGTCSRQFIAERISSTRLLPVRRNVELTIHLTMNDFSAASQSIDARGAFGRGSIEGARDTAVIHSDKRCYRQCKWPVNSKAASKHDSQAENLGPEPKRI

SEQ ID NO: 1002291 - protein, 286 aa, Homo sapiens
VWSFGVLLWELLTGEVPYRGIDCLAVAMAELLTMLTLPIPIHLPRALRTAYGDCWAQDPHRRPDFASILQSWRRLRHRSYGKCRGLLPIPCRKAGSRDPGLFDELRAKEKELLSREEELTRAAREQLVKAEQLRGASTCFGQWELEVSERELTLLLQQVGTGSDARCAAPPGQSKRSKLRARDGGERIRHAIIDFKSRITVQASPRLDREEKTVFEVGPGDSGHFPRFRAITSWSPAEPGQALWGAISPDVWRTPAMRRGKACWDVVPVPQPAEARMDAKVRIASH

SEQ ID NO: 1002292 - protein, 326 aa, Homo sapiens
DRSERAVSSSSSCSVSSMTSLSYRQSSGTVVPFRECLRLAAPCRWGASGVALTLLPEAFIGGLRWAAGVSRVLLPAFVSSSVLGGAYPRRLQGEQIHEPAFRTVSAWRGNEESVTQCQESFKRRDMRSPYLGTTVVAPCEGGPNRDILRGAEDEFRKVWLPERARGGQWCPFAVRNYKSLVTYTRHKSKVTPARESVEFYEMASDRGTFQVELGALWRNRHPYGAAVLGCTIARFPEPRSFDPRENKGLRARQLTCWKGPGRITPGAHAADGLPLGHESVALPWGHRNQNHGRIASNSKRAHWRREKHAWAKPLNETQPMREGKLK

SEQ ID NO: 1002293 - protein, 237 aa, Homo sapiens
MSSGIFAALKLHRRWPTRYGIHPRGSTTILIGPAGRRQRCDNYCAEGRAGTQADTGGITERKTIPQREHQGAAPPNTNTGGGKRRAAATAGGPQNRLTERPQRGDQSVSEAKKGGSHTHIVIAARGIYTKQSQQQTIYKTRGIEEPKTGRQGATKRKGDSGHPVGAETAELWRPQHITEKKDSRRRGGHKPDNPDMRRNDRAGRTKSPEVGHTAEKSEHPSKNRKKLRQERTKRKKA

SEQ ID NO: 1002294 - protein, 111 aa, Homo sapiens
MILPPKPITLDAVGRSIRVNTKPKRDAYSHHVLTLDMPSARTSRLCQCLRGQSIYAGKVNLKTYLYAEVERYTVETGYQRTGPQGTARKCIAESTTLKQTMGTRINRTQET

SEQ ID NO: 1002295 - protein, 77 aa, Homo sapiens
GPDVDGGPFEQQSPYSLLIPPASPSRAKPSARFAAFSLLSHNPCPLMRVMLTPAARLHRFKNRGDKRTVQKLSASRE

SEQ ID NO: 1002296 - protein, 228 aa, Homo sapiens
ALSWVRLGPLRSWTSSPQRLGGDPQCALGFKCALCDGMFHAHSVGWRGMADVGVCCTNAMKMPWDHSLCQLLRRDGQLRSDKFIDLPASQLPVPGAVGDCMLMLNLAWPSKPHTSLDGATARLVPRDTMLPVSRATNAGRIPPVSCVPPCGRDLRVSMEAGWLCCAPFYQGCFTMVGTVPEPGKGIISVGHFWTSPKGSLREQLPWSQGCMTCARFGSPKRQPHQTLV

SEQ ID NO: 1002297 - protein, 49 aa, Homo sapiens
MDLKTKLTPRTCTYRMSSLEAGGEGQERGRKQAKNQHANTQTLDGEEPR

SEQ ID NO: 1002298 - protein, 222 aa, Homo sapiens
MGEGRVGQQTEGSAAAAVAEPSITVRSPSRPARDQASAPGGGRGLGTEAGGSGPKEGSAAGIALGKWVHLHLEATFPEAKHLRSPFTEIHLDSLWSLERELPCMNVGAGGVKRAGSPDSHSLLLGKTHFAGHSGFRWPPSGQARFPPWGALFPRGEFPCVRGPCSSGKDVEFPHLFWSFVPLFWFGSPPPGWVWPPRRPILPPPVGEHANAPPRGVFVLPSA

SEQ ID NO: 1002299 - protein, 313 aa, Homo sapiens
GNTTDDEEEEEVEEEEDDDEDSGAEIEDDDEEGFDDEDDFDDEHDDDLWILRIYDIRQTFSSESRKLSATKKLAATNGLQAALLMLELGSNADPDRPAEGWAQLYRSTWHYMGTLESTPDENWIQMPYPDSNAMSAYLIILTYSLGSVDPTHAGLLASIAALSPRRYTSHIHRQRIPMDTDVDSEISHKTRRPRSIESSKHAHAPATPPHTNPRRHAYGNQDRNTDSKSIRPPGPRKQTAHRNTTTQHDTLGKGPDDHAPRGAHPPPLAHTKPEQRREQHNCAQPGEGHTAGVAQTPPPNAPVAAPQPENGNP

SEQ ID NO: 1002300 - protein, 106 aa, Homo sapiens
MEGPSTACAQLEFTHALWEQRLKEVHCDVSRRMERRPSISKGRQQGRTYKVFDDTPVRNAGELTRPLRFGFVGKCRGTKALIPEDLTEGSPDGLLRDGNLVLSFLA

SEQ ID NO: 1002301 - protein, 249 aa, Homo sapiens
APLPLVPTCTDATDAFPPLSPLSRSIRGVGATGGVNRCRGPAIRRRQGDRSTKCRAETDDRGRNEREREDVRARTEQGKKEKQDMQDEKRRKKAKEKETRTRRKAREDRNEEKQTKQRRKKSQGTQQEKRTEEEQEQEDRDDRTKTKNKTKERNKTKKRKKKDKKKTKREEQDKTEERRATKRTRNTKHKKQATQTKTQKKKRQKKEKRKKNTPKEEKRDEKKKQTKSDKRRKNKKKKTQEKKKHKKKR

SEQ ID NO: 1002302 - protein, 227 aa, Homo sapiens
VQYGDLHVVGGFSSGLHYSASSGKRPAASSRGPPATTTLLLPYPQRARAPSSRDCTRVRARNPAELDELASRLLAIPGAGVSGAVRTFVSVAFQCTARWPGQLDAGPLMPLAAILARMAETPVLRHRASCDRRKTDAPTVVGDGAGRPNCRVAQNGGSSAMNSGEAWVNVVSDERRVSSSGGLHERAVRDPPLTGPWSPGYLSEEEVLDTENPFVQLLSGVVWLIRN

SEQ ID NO: 1002303 - protein, 194 aa, Homo sapiens
  misc_feature (140)..(140): Xaa can be any naturally occurring amino acid
MGHIGGTGKKEGRQGRQGSGGACGLDTQGPGHTCLEEEGVGRGQGDSRYARGWVGCLVRAVGLPLLVLELMGQPVQAFVQPVPVGWHRWPELSQSRGTDRGMQAQLVGRLSAGSIAKGKIRRLAKDKGGTGIRELVLGQXFSFELFRRGPTLSCSRIIGVSEPADFSDPCGVYRRRRWSPKGGQNLAPWPPKIP

SEQ ID NO: 1002304 - protein, 243 aa, Homo sapiens
MCGIRALLAVDDCLILLQLYWQVSMKDCGSKEFHDDIRACETVNRIQPNLLNLELHSAERLVETLLVWNCEPNNACEATSIRIEELCNNRLKIIENIKKDATRAICEIVNTQSQKWMVEISPIILDRRKEEVEQSKYELLAHGEDKRVEDRTRDQLRKYRKRDTEEINETQKEIKKNTRNNPKDKPQKEKRQARGKQKQSSGQKQKYEGENDKINKKKRRNKNNRRKEKKKRRKEEERNRRQN

SEQ ID NO: 1002305 - protein, 145 aa, Homo sapiens
AGHGPSMEDSSAVLMESLKSIWSSSMMHPGPSASGAAVNAALSRNSNGATRHHEPSHTEAKVATWNEGSINHGMLGSRDWTTQYPLQVDRPSYLLSRCQEGCKYTTRPAECARTMYARATKKKKSIRNYYTDPPGTIRTGEERGK

SEQ ID NO: 1002306 - protein, 334 aa, Homo sapiens
EEPAEHRGLGRSHPPLLESPRPLSLRAPRQPPASVPRQHGEVCSRTLATMYVSYLLDKDVSMYPSSVRHSGVLNLAPKNFVSPPQYPDYGRLPRGVRSCSGSELGQRAVPGAILAGSYGAPLREDWNGYAPGGAESADNAVAHGLNGGSPDADMGYSRPADYHPQQQPHHHPRQPDDEPSLRFTGLVKTLKPGPPGTATHDDDEQMSTGGQRRKLCEWMRKPAQQSLGQASENQDDRTKYRVEYTGPPDGWKLEKELHYRTIKSPHPGAKKPGGKPDNDRGDYSEKAGVQHLGSETGRSTRRRNTHTARQWKKKKRDNTRASPRHNAPSTAEPE

SEQ ID NO: 1002307 - protein, 103 aa, Homo sapiens
ALFVAFGQCVGSGPVDKPPEERLGSRARSPRMPPAISLVSRGVARHRYPAGYMDFAFPFIVLRSVEGASASKAGASHGGQPCREDIARGRDSPMEGRLAALKR

SEQ ID NO: 1002308 - protein, 143 aa, Homo sapiens
MANKRSRCTRGSSGSGVGSSGSSAGVVAEQGTEVASACEGLYSPQPRVCELPLWHGWKGASLDLGLQPWATSTEGDQEPEGTNPVGLDCVALSQCLPILGLGKRLDVTVPCRLVGGAQAGHTLNLSKGVNLFENARPRCCKRN

SEQ ID NO: 1002309 - protein, 83 aa, Homo sapiens
MVGTRVVCHLPLRRTPIEWIPSISPGLYWPSRIPLCPGPMGGLAHFPVRPFPVRAPLRPYPFSPADARSSGRRNAFVPFGGTP

SEQ ID NO: 1002310 - protein, 150 aa, Homo sapiens
  misc_feature (52)..(52): Xaa can be any naturally occurring amino acid
LIFMTYNGYLCIAVAAGAGTGYFLFSWKKAVVSGYHRRMPLTSNSMAWPYRXQWEVVEELEDVIPAPIIPSCSSLCTYTHTHTHTQHTPAVSSRGMSISMLLLNLDGSNPPKVVFSNKAEIPISLREKTTREYVFSFSIILRARVIVLRV

SEQ ID NO: 1002311 - protein, 206 aa, Homo sapiens
LTPVSAPNNLDGYVLPKANLSFRLLLLLASLSLKSCELPWPVLPESDQSSILLLLLLLLRVFRGSRTIRVSAMRRPSPRDDCHAVFAYVPGPMRLTSRHASAVRSRATGRGTEPALVRCLIRLPGVTRAPLCASSVVSYDPNLGGRSAPDLAAMALASGHSDDLRARKSSEGVGRDVGAPRVLCPDVGARVEGAAPYLTGFSGCRI

SEQ ID NO: 1002312 - protein, 292 aa, Homo sapiens
MERFRTVTDETTIPPGTQRPESSTFTTEPVALARVSSAPKSDIVIPLRRFNSLEISHKRGGAAYTEKIACQAKREAIFGHGFVAPRFLRAPTLLPPLRRATFALPALRTMTEITDLRDYGANQGGRYPQTGAAILPPGFHIYQFTAVVHDSVLYPHPNVKFTLALSRVPLDAPTVYQQLDFSPSPIFRQCSPKHHPKVPTFSCGGHFSSAKQLPCALGGGVTVGERVVCGSRQLAEEQHWDFKLYALAYIGYFRRIAYILALEVGAPSRTVDRPERNNRADPTQADKHRERY

SEQ ID NO: 1002313 - protein, 134 aa, Homo sapiens
MTSTNQCAGNGKQTELRASFVCCPVLYSGPRQEGGSMSLVSRADEPVTSAFEPLSVVSLSESVRFLAGDDRILYADMYRGEPYNHYCKIPPTSLRTLMCPGTGSFQTLSSPGNMSSELQRRVLKEKVSWVSGLT

SEQ ID NO: 1002314 - protein, 110 aa, Homo sapiens
LVLGELRVAPVFLGLACVLLPRVCHWPMMSPLADCACGAMCPVVLCACPDVWCLRAAPVWCILLCCALAWLLRQHCVPARCSTVSALLTPLSEYLCVGRPPCVEPLIHQA

SEQ ID NO: 1002315 - protein, 285 aa, Homo sapiens
  misc_feature (33)..(33): Xaa can be any naturally occurring amino acid
MLQAASRTIDACNVAGSAEARNGRIASTTHPCXRARSVALRRKKEPRRRGESAGRPRTSRHHRADQLRQMGLGAVSEPRAEGRSVVGSRTQRCHDERSAGVGTRRRWFQCRRLLATVAGASNARVCGQALFYREQLAVPIVYIPEMLDTETFGQKATAVFDWASEVDTGTETASTCVVLFLYYPCGYPGSTKLQGLALCPSNLPVNSHWTLVSGLVPYVPAWTIVDLEQRLESYRSSAMEPLDLATTLQSHRQPVQGVRGGPAALSLCLALPPSRSPSNVARAVT

SEQ ID NO: 1002316 - protein, 67 aa, Homo sapiens
DELSLSVSSRRKLSQVSGPLACPVNKGPKMFLRVTLAARTSRLQRGDHMLMFHYAQQLTYYYIDGNT

SEQ ID NO: 1002317 - protein, 229 aa, Homo sapiens
  misc_feature (103)..(103): Xaa can be any naturally occurring amino acid
LFRQYLRIRTCPAQGLTMELLWLSLRTTARQLGLGCQKVEVAPGYVVDRVDTGQATYTPYSVIHHIFGFNLLSTSGSDRLRMCVHMVEPYGKSTASPVLHESXHTAYLEWSTIYATGAQDLKCGSAFQYLEVCDGRLNVWTGHPVSPGTIHMTCVPDEDGSGVTKGMELFVQRPEFHALRAGFALAEGIANPTDAFTVFYSERSPWWVRVTSTGRPGHASRFMEDTAAE

SEQ ID NO: 1002318 - protein, 481 aa, Homo sapiens
LTSTYGGLARTSAFTERRHNKGAKKNSVLIQIFRKQEQLAHDAATATLAMLPHDQAYIIAIERTLDRPSDPKGNQIELPSAWVSTGFRDVVKIGARVPRIGASKCSCTGFATFYDDIVREAWSITLHHWIVSSWVKHSVAFDLKGFHNRASRNTLTRGCTKENGSLPTEGSHTKDNGAKANETRNSSTPDAPSRIVALRFRNGIVNPGTCGVHRLGLFSCFDLPWLFWGVLLTVYIPDTQAKNEESTGEINARTQGTAVRFKFVPSECARTPKNRKVWFPGARKMKFPPCATAGNTGTAQIWGTPTFAVGNPRREESGLAQRYTDNEVGHLLVQPMANNSLGGSPQIVQNRFCATFSADVKTQGVHVLRAHRPATVNLTFEAKRHKCGLMAPKKRSAYSCFNFSRYLSPSLKLGSFIRDCNVKTDGFTKQTCGAWTTRTQARPKEVSRRHFLGATQQGRFQCVRQRPFFHSCALCNNGGPR

SEQ ID NO: 1002319 - protein, 190 aa, Homo sapiens
  misc_feature (132)..(132): Xaa can be any naturally occurring amino acid
  misc_feature (144)..(144): Xaa can be any naturally occurring amino acid
  misc_feature (164)..(164): Xaa can be any naturally occurring amino acid
  misc_feature (178)..(178): Xaa can be any naturally occurring amino acid
VALWPFSPSDGALCVAKRRQGRCQVLVTSDRKLVTGLLDLEVTTLGAFVIHVRTGRHGDTLLWEASSWDTNSQARPGDVRYKGACELTSTRLGSVDRALYLEAWLMVSAGAQLVHARKHERRTTWDQYQHRXPVAICPYPLASXHNSLRSQPACCLSQEEHTMXARPMCPLVAHYSRXYVARRSVVPFAS

SEQ ID NO: 1002320 - protein, 269 aa, Homo sapiens
VCCENHELLHVTSRVTSDCYLCDYSYMLDMLRVVLTAQCRRVGSARKSAAAEALQGVPAAVPSGHLTARASPSNTGMNSSWHYNLGEYWIDGGDGGSGTALMRTCATTCTSMPAEHLQLLELKLPREVADECDPCPGLLGKEVLQDIQCHAQVGRQALTGIRSPERLDMIVTPGERSLGIIIAGLLRYRCQRPTQHSLCRWPQHGCKEALTQPLPVRPLGLRGVMPMADGTVLTQESLLGRTPEMPNLDPEAYIMARDNWTNCLDFQEP

SEQ ID NO: 1002321 - protein, 95 aa, Homo sapiens
APSWRRVRINHRWITNAVRRSLIEMMFYRSLGTTESHYCQQILRVQNRRTRSCSQRQTHTAYRYGHGIRAGFTVIDSLTESRELLKQAHHSTVSS

SEQ ID NO: 1002322 - protein, 134 aa, Homo sapiens
MRHVDQAPKAIILDKVTPTRLQAKTIEDLMRPRFLEGKISFMPIALVQPRSEAREHSGDKMVEQSSWLTWLARIYSYQMALTPVVVHSGTELRRSSVVQYSSTCGLWSVDWIFAEMFAKLSCGESEPTSGEILD

SEQ ID NO: 1002323 - protein, 239 aa, Homo sapiens
MKTETCETPTGKPATRSSDPATKHPPLQENTWNSPMGRSKITWRVERHRNRGRCDDAQEVSSRQNLSGPQSAPRNLKSRPPIAESDNPATPCTRRESPRAEKRKNMRELCEAQLRESCAHVSQPHTVFNLETGNNCAPITHRGTRVQTPSDNAINERLRREPLSRPENQPGTEDKYIARTQLYTRAHVRRDRNKGDMCDLKRRTQWRHTPPISSEHYDPTCTTHARPLVDQVTTNDAPD

SEQ ID NO: 1002324 - protein, 291 aa, Homo sapiens
MEAVLRGALEDAGQAPTLMRVDTPVFAGPVCCVDGADVASESTGGCGACGLHQAWNRMFTHVQSHSQKALRRCGEHLDWMQAQIAESIVACMHCRKPWRTQQDAVHVKATLVTTITVERGTEWGRMHTVGWTEKRQRSWDSRRYSEHRALRCCMELGAYCGYSAVRHGPPAVTSGLRLITIEINPDCAAITQRMVDFAGVKDKVTLVVGASQDIIPQVKKKYDVDTLEHGLPRPLEGTGTCRNTLLLGGMWLLRKGDQCYWADNVICPGAPEYLDTCAGAVLGVHTYNRPG

SEQ ID NO: 1002325 - protein, 79 aa, Homo sapiens
AHARRLTRSARSDIHDPYRTCHRCTDASVMVPGISLTNCILDSQWSSGYIVIDVYGGDKVDDVVMVDVWLVESKREGLF

SEQ ID NO: 1002326 - protein, 355 aa, Homo sapiens
RRSSKRSSPVIQKTNADINCHQMSRLHMQQCDPFIRAMQHYHPGCEAVGSLSALERKQTNQEERAATIRQDMHKHRQRETSVNPGKQRQSTDKPCNDTGTAQPRAQGQRSAYRRERPHEEGQHVGQPRSQKGDDTGAAMKVATDEQRNDKAREKKHKEQHAEQERRETEGETKNRTTKRRLEGSEPGRKETNRRTARRLKRRRERRRKEGKEREAKRNDTEKRQEREKRQDQGKERQQTQGRKREEETEEAQTVGASDSGERRRREKKEGESSGRARAEEGGGEGRARAGGAPRERGGQAGRTRGARAERGERERGRERARGRERERAEAQQEKGGGPEESEEHEGARGKRRKDR

SEQ ID NO: 1002327 - protein, 99 aa, Homo sapiens
MTGKRAEERMPEKVGKYNMRQRREKEEYQNRAVPPQHARLEKTQQTPEYGTLQSAYRQTVTAGRQGAPHVTDKTLATHSNVALEQTVRACLPLTGPCRT

SEQ ID NO: 1002328 - protein, 253 aa, Homo sapiens
ELRVVAIAGQRGCGTMCPPVGLPSAPVCPAPVPAPAPDHLSGHQAEDEEQQPTEIESRMHERVTCNGDDAPSVLTKIPFFREIIVSSVIPARHVCAGTTRRSSLAVQDPWTREVLRTTFVVSVTLLSDHDTEDSWLQDLTRDFANKGSALRHRTLAEKLRVARFKSQENGSIREHSVKEREVESAPDALSRHWATWGRRATTRAPVRAEQAVLKAQHRQLDDSHGLLTHTTTLDVDRFRVWVAKPLGTSGSAY

SEQ ID NO: 1002329 - protein, 197 aa, Homo sapiens
MVHLLRYVTRLRCPRIRQVLCWRAPNVTVVHHVRVASSRLAQDDLEVTHDHCGEEDDFSFEHTFVHVYDRGAWRMQTLPQVHDVMYDLETLSDQSDESFCNVVNRYQTSVFATLMQDCIQQRKEERIDLTTNYNILTLELGPTLANTNIVRTGTHSTLYPIDGLGERRDIPDKGPVALQPWLQRGGSISRTAYPMRV

SEQ ID NO: 1002330 - protein, 250 aa, Homo sapiens
GNAQASRWQAQVRELMAVEGWNDMCEVLRLRASLSWPFAAVCTLWTDSPWVSGDSLFLSLTIFQGAYPLALCCAMWIINRTLGVSPSFLVAFCGLLRGHARMNLVVLLINGLPTLSVSYSCWGTVAAGHVSGYAVYETTGDVQEVYITRLHGSRLEELTRTNQSISMLRILEQECMARLLTCVCGHARLRRDWRGNIACPVSHSSRAPSTSLLALNCLLVRHVEDVLVIRSKGRCLIMDGLVLRDRSGRL

SEQ ID NO: 1002331 - protein, 260 aa, Homo sapiens
GGDMETGAAELYDHGPLGHPVSTWVTGPGFPVAFSVASSIGRQTSYRLLRHPSERMGFPAGAAQALVLQVFKTLDHMARQDDENEKAGTSREQIRMTQEEEEAATVSAAAAEKEPVPVPGHGHSRLTSDQENWDGHQEVEKVQPPGPVKEMALWFTGGKKLQEQLLDAAEVPREPPILPRIQERFQKIPDEYDGAVRENYSWSQDYTDLEVRVPVPKHVVKGQRRSQWALAAAPLRVDMTGGRWGSAVSWKGTLTDKDQH

SEQ ID NO: 1002332 - protein, 136 aa, Homo sapiens
LICMTSNGYLCIAARQRGAGTATTSSSARIARHVRYVDTHKKHLLTCSIQTFLLDVAVTSRLQAGNDVLRKMLNDRDIPGSNVNPVLASVVLLTAVIQRAPRNTYHRATANNERSARVPLELRTVVEPYYKVLMET

SEQ ID NO: 1002333 - protein, 178 aa, Homo sapiens
MAIPERECPKRQSSTDATEGVRRIPRIPRSHEDKKIAHSVGRGIHGPPFYDLERRDTRVGRRGKREVTLTKELRTCTWYTLRGLRLDTHAKLAMVTREVRPARVVVLGSANRRTKEATPSAAWNLRPAEDSSRRTSLSPRIYMNKHRRRHADPVHSSVTCSRAEARPWSFSWHTRVNP

SEQ ID NO: 1002334 - protein, 134 aa, Homo sapiens
MTALVYHKHLKRVLPDRSQLVHTAAYLGVTIRLEASQALSNIPIDSSGSHIGSHPYKGHTALRDEVLRTSCSSVLVNREIDERLGWHDAMDRHFRGSLNSGRHSQRDGEYVSSRLELAQDVANQLVPKNSAGSC

SEQ ID NO: 1002335 - protein, 196 aa, Homo sapiens
  misc_feature (41)..(41): Xaa can be any naturally occurring amino acid
MPNYSRTGHTYSDYFPGIVYVELLHCLSIPSTMRSSAQEQXRPITVWTTWCSIPRPSYANGLSPLSGYSSSLGRVSPPPPSDTSSKDHSGSESPISDEEERLQSKLSDPHAIEAEQFQCNLCHMTYSTFSGLAKHYQLHCDAQSRKSFSCKYCDKEYVSLGALKMHIRTHTLPCVCNDLRQGVFQTLVCFTDTLEL

SEQ ID NO: 1002336 - protein, 43 aa, Homo sapiens
MDERWGQLLGSQLNGNRLVSTNVAWEIRVEHLWAPNAAGGKGA

SEQ ID NO: 1002337 - protein, 198 aa, Homo sapiens
GERERTSLEVFISSIFNLGNRLHSGSELGPWGCSGELGVPLEGRLQRQAVDAGTGWPMLARAARRHYKPELSAAESPCTTTSFTVKRRGHKGAQIAARLKGWGMPRGVRKAGFEARAVEPDRRLVEHLSQKRRSSKWGRSLDSWRHRAPCRGRVTVVGPGNSTKPRERPGVRPDKGRDRPVTAALRGDCMYLCNKPRS

SEQ ID NO: 1002338 - protein, 279 aa, Homo sapiens
MPQDPKLASCAGATSLSACLRHRAPRGTSWRGFWSDDSLKLHASASEGVRCAASKREVPSYVRRGLVVYHNRRGCDPEGVRRKNDTCRYVAHMVYSSSTEELSVLRSLEASAYEAEILEDSHTVNLALCLEIIKMLGAEWRKLLAKRKQQRYLDEAERDEAAVHERSCGRTSSLKPIRCARSKIQEKKIKTECTRALAAHERSPEWTPGVGDCEWLLQPYDSSPYFHLTDFLGTKITRRVEAAANGCLRESMNVALSRRQNARTDEGTRQSMSKGARSV

SEQ ID NO: 1002339 - protein, 54 aa, Homo sapiens
MRNAAPHLQSGATRCDSDDTRALHPHNPRCASTTRTNGRTHYLLDHICGKTTRW

SEQ ID NO: 1002340 - protein, 176 aa, Homo sapiens
MSVCSVAICLSAGKRLAAACARGVGKPRRVGDASLARAVQTRGRCPALSHACVPQCYFGGHERPWATLCRLRDIGKHSILGLPVKAWLQHQHQRSVLRLKPYEQTELDRQYPIEAHCCFLTWDMRQVYHVTHNSQSWKYVIEWCLSPETQVRGSYNDFRQDLRRSPKGCLTRNVAR

SEQ ID NO: 1002341 - protein, 177 aa, Homo sapiens
MWHFGAVYGLWPPTCGATPREQLLGANTPRCKENAPRVSPPHMQEHQRPNITSQETLFETVSTATHSGDPPDITRPLIPNVSTHREGLRPQEVPLYRRGAHTTIERPPREHISTGRPPPHKPHLCDPREFHRQFQYSPFDEFIFIPQIGCERRNRTNDISRGMRPTGVTVECIKCGR

SEQ ID NO: 1002342 - protein, 137 aa, Homo sapiens
GKTQLTLLALGAGGSETSWWGRAPFPLHHHRLLAAQDGRWPCGLAAMPRSGRYLSLADHVSDAARAWPRAFLLDGGSRTIGGGQVFRRAGISVLYDPPATLFAVVCRFHAHESCGESARLYREGIGGAFKLIGAQWL

SEQ ID NO: 1002343 - protein, 168 aa, Homo sapiens
MKACPGNTISPEVSPREAREEAALRGFPEKVNNLCPRSPPEENSLLWEDNRPRESFRKISRYRGSIFLPPPIVEGLFYQQKSLWGRGSPKPLETQFGALYPLPREGEKTCCGRPPRKCLLGTGLAPSLLSTGRARGEKKKHRGGNPHATPCGQDPQRLLAKTTDPLYG

SEQ ID NO: 1002344 - protein, 360 aa, Homo sapiens
TKWRMTPVQRGGARGPWWPWCWGNRGGFLRSVSAVCILVAVGLRAVDVGLGPECPLELRRQGLRISEWKPVTKLGRLVKDIEEIKVPWEEIYRLSPLALLERIRRFIDFLPGGAFSRRHEAFEALCQVQNGMDPDCQARRTQCFKALSFATLRDYTWANGQVLGVLQVASKWTVEPTAHSQVGCQSVTCAQTQHSNSVQRQLAAKDVLTLGRKPKDRAKDSTTTCSPLATAFDPCAQLGRASWCLWLAALQFRPLQPAWGPTLGHLRVPSRHTPVVALSGKQQPLSFNFGSWRHWSITSRHGDRLALSTAHFKERTQEAGTFGNIFEYQNHPMCAPKRFSEPRRGGTNPSYRNVDPKYLR

SEQ ID NO: 1002345 - protein, 264 aa, Homo sapiens
RCCVLEAGIELIIDDDIRSREARSRNAWAAVDPDNQSPEVSGSCTLVDEDVKLNDVSTTGQVVCSIGQRGLGSRINSLSRPRRADQGTHEDMQQTGLTANRGAVLDDDQARDDQAEGTWAHEGPVKPSYTDTTAPYCPSALLDHGALCRGVTEGHSQAYFRCELTDIGAVRAPCGRAWNAPWPSTFIVEPSYFVLGAVFDRVSTDALILDRYTRACFAGVARGRGRWDILKQSLRGRILALPGGMLSLVWQGPFDPRGLEVGGA

SEQ ID NO: 1002346 - protein, 183 aa, Homo sapiens
  misc_feature (155)..(155): Xaa can be any naturally occurring amino acid
MSDEDGLGSAITQIGRLTWLVFGFMRNHKLYILDISMAHIDTFRKSDRIYELGYFINRNPLWGPQAPRRIAVAWDVNLRAKEPRPCVSCRYSRITRHMAGVAEPHWLGITRPPGGHLHYSQRARNSDLLIVGRRIVRKRERNCAGKPLAEAFTTXTAGELKVLPVHASNREKLVPSSNSSRIE

SEQ ID NO: 1002347 - protein, 209 aa, Homo sapiens
MDCLVASVGGPGSAGPQTFLLLGLRELSRPRRLAALQCFPHCVGRSLPALWPSWPVASLAACIVTCCVLHPLRWWPGGGWWVEGGARRGDRRRQLRRNRTLESRTRTPTPTGTGERPRGTHTEREPVKQESHVKQVGVPAPARGGAPQRTAPTSLARRAHKQKRKGHTHTGNAAAGRAGYRQERRAEEPEDPRRGGQEGGGNVAAANER

SEQ ID NO: 1002348 - protein, 83 aa, Homo sapiens
MPHIYDQRLRGEQNIYVCHTRPPQSENNRLVRHLVLSLPEEEGVSQKRNLRCVGEKHPLHEGGEHNKEESGTCNEKSPGGDQM

SEQ ID NO: 1002349 - protein, 203 aa, Homo sapiens
MGTFQRSSLGEWAGSASPCEAQSSWPSAPSSPPCVKPDAPSEDDPWSKCQRMSRVLVLSRSNVNISSRGRPFLMTLHVPSLDRVDVSHVAYGDRCITAFHTVSHALLYGLSSHCWTLTVTSGVMVDGREHSASKAQGVLLRHEEHCQDFLAGHSRAMEPLPRWIHAEPADQDDRAQHVPHVCASFVCLLPWCPFNVCLSVGIG

SEQ ID NO: 1002350 - protein, 129 aa, Homo sapiens
MRRDQNERASRGWFPVATRGGAHQERSFTGRNLGYEPAESYGFGGGPDSDAARRTALSADLETTGSRSRSAGGTDKTAATRSGQNSRAPEARAHSTSDSGGVPRKGATKWGGGRRVRTAECRRIAERST

SEQ ID NO: 1002351 - protein, 189 aa, Homo sapiens
MWAFARNLSSKSSFSVINICMRRTGTMLDESVTRESCINATEGLARSLSHYRNSAIVIGENCGLTGGMNAVGMDNAEWGGGGIYQLCGKKRSGEIQVQINWEIGGKAWDQTWIHMKSETRTNYGAEHIHIGGTDSYTWNLTVTGSNDVPISGGPLGEFDPKRCRPKPIWPATAKLGTAAPEAPWGLWAR

SEQ ID NO: 1002352 - protein, 307 aa, Homo sapiens
MCMAEEHWRCPDVRATRVRYCVDTPTTQQSSRWSMARRYLRIEGQWAAGVNPLCTKLHYSLTHRLVSVALRHCTYQTSLPWKRYAWERRALRDPLRLGDIVMCTCEMRIVKSHDVKAWRSNAQMEVEACVCGPTCVCGACARYRIQGTFPITGSYSGERNALHSSSFAFLPMPPYSIRRYEVVATDVEKSDWISSIEVPRPPWWGAIENKFEIDTLTRGQFFHSHRSSLCHQIQNKCRSKCVRFQTDTSRSTGNEGGRTGVSYCTHVETSLPASADRIAPEHYSGFSQGHPGRSYFAPEWLEYKGTS

SEQ ID NO: 1002353 - protein, 309 aa, Homo sapiens
PSLAHREADTLEKNVLVVSVVTPGCNQLSYLESVEQLYRVTDKVSDHVFSSSSETVWWSSPRIWRLLDQDVVRKSAEGTFFINKTEIEDFRPAFLTGALLLDTVSAITCHSLVILDTLDVDGRYNKLKRCSTGLSDVDDPSFPYESFTISRAHENMGSYKPVSHMYTAQDVKEVIESRTGPGYPCACRVGQSWPHFVLEDQVSLDYYSLLLGDLSPLGTFGPSESQSSNNTYEFMSHMLLEKSALSSQNLILHLGRRMTVGLSPCWQVKPRDQDFMKERKGFGDGLPSSWESFINPDACCTYDSSYGQG

SEQ ID NO: 1002354 - protein, 187 aa, Homo sapiens
TPPLFFAPKNKLKPPPLFKGGGGKKKKPKTPGETPGFGAPRFLCPWMVYWGFTSCPVLVWGVGLGGWDPLWGAMGNCEAPFGKISGGMWTEGALCRAGCWGDSGCGSKKSREGEEEGGVVEEQGSPEGCQQRGGLPRGAPPRGGAHEGAQEMCARRTTGVNQVGCHQKSVPHRGEKRGRRPQTREKR

SEQ ID NO: 1002355 - protein, 400 aa, Homo sapiens
VARPRDGVTWLDTAGGAGHALRQPSARHTRTTTVNIHAAVVRQGLPTSSQLQDFNCGRLHRGGPGPGTWRENSLQGPVIPNEEAFFDGERKLRGEARSTFGSGEAAISIQGIVIPDWYQLSSEGPGVPGEPLMRTHSMRMTDSPEQGWAHPMTESGRSNASVPSLYSPWSLRLRESRCVWAPCDDNGCEHLGNEDEAFDAKHSKGNMTLSLMALANAKASKTDSIDWRLICKEGAKECSDVPAVVRPTLVESHNTGPRCTEQRKGGADPPEGVDKAPFGEIYSNTMPTVVYPSDTIHQGRGGHHYPSAPKTTRTEEDTGTNQREMSPPHRADKQNDAHRLRPLHGKRRKVCTQAERHNRQTHKRGARNLVAQDPRTESNTQSVRTTAQTPDEACVVRSWG

SEQ ID NO: 1002356 - protein, 435 aa, Homo sapiens
  misc_feature (411)..(411): Xaa can be any naturally occurring amino acid
AQASGPRGRAAVLRTRGARAAAPFRPRGGPVLLPRGSFPEHCGGGYRAPAYVAAAVQPVVAGLVVPVRADPNMMDMFTCKKTWASIVYWTWPDVFHWLCAFVIRHTQKQEIQSSQARAPAIDEVSGKTRIVRGLGDTSGDAKMGACDDVIASVIARTRRRIQLDTTIPGRRVPMPESVRVPIHESKEDIRPDIEKGRNVRASAPAVWFTTLDKVDTCRLDSLLLKFAKGDGEFRTGKGCTFPIGSWTLNIYRTRVHGRTTDSDTNAWPNASRAFPLGYMTAHIGAAVKRLETHLSTGRKILSSIPPGNEASHGTTELSVALQNPSLRRAPNLYEPLATDNTRNRVATEHALYTKPARRLTPRLNFPGSSTRVTFPTTDTRDIRGGHYDTPRSLCHTRKSDHGRHNFAPLFXHTSLVAQAVYTHQVNAFVYIRPRG

SEQ ID NO: 1002357 - protein, 147 aa, Homo sapiens
RSWNLRLSVALTVPNPEPCAQPALWEAPPQLRALVVVGQRTAAQATDYHADVGRVLRDFRNGAVYVEPTYPGPVIALVMTLDSVRDSGSLPWQKLLGQYQLGHRYIALLGTVVTVRVQPTRGLRCPASPEIQGRRHYRSDTQFLAAL

SEQ ID NO: 1002358 - protein, 213 aa, Homo sapiens
  misc_feature (183)..(183): Xaa can be any naturally occurring amino acid
MASWILATSTVDALRRLPYRYGCIGLVVTFRPLERPGVAKKLGDGPLDRTMMQRLITHTRKGGTQEVDGTHPKCEEGNHRIGNTSFIGERLYGSLCPDGTVGWADMNVTTQLQEQECNGRMHGLQGIEGGMFPREVRMERQSDISEAMGHTNGGAQTRLEPAEKARTYNGMTTFQGETRTLQXIPRNNDKGRYTVEKYTERDRSSNKGDTHIE

SEQ ID NO: 1002359 - protein, 279 aa, Homo sapiens
  misc_feature (161)..(161): Xaa can be any naturally occurring amino acid
  misc_feature (172)..(172): Xaa can be any naturally occurring amino acid
MAPVKRRNVIPHDIGDPDDEPWLRVNAYLIHDTADWKDLNLKFVLQVYRDYYLTGDQNFLKDMWPVCLAVMESDIGKFGQGTMMGSLLTTSGALSQDTRLYRWDGVDHRAPSGLTGGRVCGLAACGFVTGPECAALCGAQDHPGITFSFYPQSGAKQAYEXTASGQWPAITXYDTQLSALSLVSVYVVDQCAWNSGYLKACGHRSKETLRCFPTQHVVRALQTIFELNVQAFAGGAMGAVNGMQPMVSLINPVCSLMKSGWVVVYGLAVTMIQEVMHSF

SEQ ID NO: 1002360 - protein, 116 aa, Homo sapiens
MTTGSTSQVRQNTEQDSRGLPSSRQIKLELYASYVYLSMSLLLCPADDVALKELCQEYFLQPNLMRQREHAETQWMTAAETYRGGRNLPSKDLKKPGLVMTGAERGCTMQWAVCAL

SEQ ID NO: 1002361 - protein, 251 aa, Homo sapiens
MLTLFLLLWERIAPNLALFDLGEMEKDCFIDAIPYVSTRRRKLPGTQVSNSPRTLVPARASHGALRVCVKDNRTQYVMVYPVGPSVSHPEGWFLVSAFTHTPVLITLIVVFISRVSPELIPSFGVEGPAVGFLYETSPTDRVETSCASEVFMRIAAVIEDGWLRSASSLRNLQSTSWMEQSGRTTPDHEPRTTMEGPKSEPAFAGYTSKSTLTTRVAVAVDTADTSFVDEHRVSDLCGHLETSVMPITLVS

SEQ ID NO: 1002362 - protein, 229 aa, Homo sapiens
  misc_feature (95)..(95): Xaa can be any naturally occurring amino acid
MLMNPWLIDDATSSRNTEHIRKLTQSLQKRNSEDRPWEKSAITKRQHAMVQLVPKTGFHLSTLLIHQSNKQSMKGYNICGTSLRRLKSRCTEDAXYARRGRTSSWVEQSDFSDGTECGFRSRRYSQEHGASLSGRQDPSEVELTMMNEHGREPFDERASSRGACPGDLGTGSAIVVGRWLNIGLQTKYAQEPYILREEVLILEWPIEAAEGYGKTKKRLVDSLNSGEYK

SEQ ID NO: 1002363 - protein, 158 aa, Homo sapiens
DRGRVALTVSPKEIPVVERRSRGSQVTGTHFAVCHRKIEGCKPMQRYYSLFTLGEAHHLVLQDMHSFIASPTSSDASLASRLSSTHGRQQAARYLSEWCEQAMPAQAAYGFDVFEPCRANFSKNPGRGTYASTLTQRRSSLCGANFVSFHDHSAVGTA

SEQ ID NO: 1002364 - protein, 159 aa, Homo sapiens
MPRVKTYTHSLVQVPHTSRVRTVPTPHPHTQAIEHVANDTQHVLRASLPYSLPAYLHAASLVPASFLSCALIRLICKAVQAHRTRTVHSHSQTLAPQSSFPTVSTNFAQFVPTERLRIVLRTFANDQYLPSALPDGHARSSPSRHVLANSAFNWLTSVN

SEQ ID NO: 1002365 - protein, 123 aa, Homo sapiens
APLWISRLYVASHNEAIDPGARAQLIDTNRESVTRNNVQSGQAYNCLLERLLHDINPEHSVVDPEIHDRTIAIVDPRCVSAICDRPDDVAHDHSILEEFEVQSSSGRKFHAVEELARNPVDGK

SEQ ID NO: 1002366 - protein, 212 aa, Homo sapiens
GKDGVRKEGYRLYCHLFQLHRRRSEVKAKAKAAREIQPERKCTSTMAYVVLHHDTVKTLINERTDHTEPEVVHMVRASGSGLYEPLGFEIYQSVLFLLSLQSDTSRDACLHSCSAHGPIIQMATSHAAALSLMLTLVYLSFTLGVVLLGAYHSVLGIISVEPTGSSSVCTRTGVMLPHAFGPLSTTKFSSVAPICSRMPSRHQLSSKGIIFS

SEQ ID NO: 1002367 - protein, 261 aa, Homo sapiens
MTSINQWLEWEDDRAAASFVYAALYYYSRSNGNEGGTMYLDSSSGGALTHHIDHSLESTELNFPGLGREQNTTSRHMYKSGSPIRINYARINDLTSLRELEETLTQIGSRTLEVHHGKAIDRQRHDTKHLAELAEQTKVIQRQLRDHYHHNKADTRPRTPTKRGNARLDNPNIGRPVEAKRKGQHRARTPHNSLQGQGHASGANIESIGHTHGPERDKPSGPTYYHTDTREPTKQYESPPHTQDTDTNRVMRPKGTKSTPS

SEQ ID NO: 1002368 - protein, 246 aa, Homo sapiens
EHAPPRPGGREETMERQVLLSEPEEAAALYRGLSRQPALSAACLGPGGHHLQYWLATYLDGAHVSGPMRDHGTHGRTFRYLPPITVVFHRRGTHVVFSRTCSATSVETQGENSLTQTRLHSGHHWKLCLRKACMCTEALAERRTQFLEVMGARTRKLNELQPVSAGDNMGLIMRMTAEAACPGRTSETHYVVCGREEAPQGTSHILNRQKPEDTSRASDDEIARLKKPDTSHQGGISKEQTKTGEH

SEQ ID NO: 1002369 - protein, 260 aa, Homo sapiens
GRAFKALIAAQYSGGSVSACSPTTHFHFGQTNRTLNFSANFLPGKVPAFERVMMAFCVFESNAIAYYVSIIEDAAGKYSRGSSPGGCSGVSLADSDIVAPSHVPGLYPTLGIMHHNKQATENATVRNVRRILAAAACLLEDECTFLVGERSDIGLTSPVRLPPCLGLYKQVLEPFYPPMPYHNTNRWFLTCITQPTLSGHVSRRTGTCVAKDGPDRLRTHSLPQTRTLEGNTTDTDRVTGPRPRSPQDAPDRRANTAVLL

SEQ ID NO: 1002370 - protein, 137 aa, Homo sapiens
VNPRTVEDDLVPVDRYHAGHSASPFQYWTPQVLEEKNWNSICNSKVTITLDENDVSKTFTDITRSSYSQLLIPNEVERAMKIDHLSIEKLLMDSVHARAHQKLQELTAILRGFNANENSSIETALPSYLCTHLGALW

SEQ ID NO: 1002371 - protein, 212 aa, Homo sapiens
ESSGFPASTCACDCEPCAALFTHPCAWPAHSHALLSPLHLHPRDCPKAPCLPLQRRACHLTAACRLSLCRRHDRPASTSQCAPELPPVTQMACINAAIINLELYASYAFLSMSYYFDRAWLCAFERTSATYLSSPTLHEEREHADHLMKLQNQRGGRIFLQDITTPDCDDWESGLNAMELLHYIWQHNVNQSLLELRKLPTCTPPDPPLRCP

SEQ ID NO: 1002372 - protein, 252 aa, Homo sapiens
GALGLQSGMLYPQESPSRECKELDGLWSFRADFSDKRRPGLRGADEYRRALWESVPHSWTCRVPSSFNDYQPVTGVCGIFVVLGVVLNEEVILAGSDGPIDLRTMSGAAGLAVAHSYAIVWVNWGRQRYSMRGGYPPLRGRQFMQNLVQCWWPRATPGSGITYRHQTKTINTATACLAEDHPKYHDRDISKYPKGYFSPRTHNLDVIQATLDCRRSVLLYTRANNYIDDITVSTSVEQDSGLVNYQISVKGQ

SEQ ID NO: 1002373 - protein, 278 aa, Homo sapiens
MLASRTLLWTRCAGGMNNAGTPLIESQYLDFLDIDLSSSDNIIASWKGGLNLASQSRFETSGSSFPDIDSAELTIQARQALVTPCPIYQYSERHASFLVTLHQTLKLARHPRVRNTGGTDTPLGTVFAHRRSLVTGVHSTTDTVPVNSAINPESTPLKASTLQVENMPHTRWRHYISQGYLRNAEQAHAHRSRRPGSRTRTQDTGPTEEEANWCETNYGKQAMNRTQAVESKRGRTKPRRRTTEKRDSTQGQNHKDNTTAHAGRTQKHSTTRRRQVGE

SEQ ID NO: 1002374 - protein, 93 aa, Homo sapiens
SRKNRRGFKGEFSAPSLTLGGFLELWCCWGTRNPLLVLGVPPCRVSRVNLFIRGAGRLSVVGVFPLCLSGLSKVRKGQNAGGAPWARVCGGTL

SEQ ID NO: 1002375 - protein, 183 aa, Homo sapiens
MKALMVWGLSSFLLRVQWHRSYATGVQLAQNVCQQRFGNGWSTGRINAYQTGMCSWPQIGQTLMYNNDDAYINATNVWKTCTSFVTLMGISSSINSALLGRNDAPTAQGATFNAWSSVSLQCFASQDIHRWMLVCYVHKRGCPLDPTNGIPAAIEVAIGKHSRLVINTRRLSLSKYIVSNRLS

SEQ ID NO: 1002376 - protein, 206 aa, Homo sapiens
MAKRHQDTSRIVGKYGTRYGASLRKMVKKIETQPARQCTLALSVAFFRDERDASVASSGTVVSCMKTVVWRCLDVHISTFRVITVKLRTSEEQKEVDETSSTLLYSVEILCGPNYTMVLIICTHKHTNTTNTNTTTTPPHTHHTLLPSTLGEESGEEEEPARDIRKDKPPPRDPLSVGDKPEAEEAAPIHRHMHEGERTTPRQGER

SEQ ID NO: 1002377 - protein, 296 aa, Homo sapiens
AVPACGDAAVRRWCPGAALAPADFRVPVKTPALRAFPVPPEACSACYPEALTAGNDVRATKCWTVLRIPVILFWEATGETASCGVLRNAPPCVLPRSLAFSSVGVASDIAPAPWLHRRLSGGGLRTAVLVRCIPIDSGCAGNFTEVALAAETASNGHLELFDRLYRLPRVTVDMFTCRHITGWTPQGYESRIADRTRVARTAPLGGPSGAGTDGSLCTRHAGWPTQAGLDSYLPSYHTRGYGRYCRIGRSAFYLVTEIVECVPLWAQTNAPPIYVRNVPETPIHPRFIRATSAHIW

SEQ ID NO: 1002378 - protein, 137 aa, Homo sapiens
IEFTEGEDKITLRGPYRGCQCGPGTDRTAWSKTLINRDGLCGDSNIDHKFHQAPHLGRAVPQPSTDIKDTRYNGRPAAPMTIPAPDENRSNNGLPPSQTANRTGRRVQPKRHTGAPRTAHAPNRPSYQPSGKDLTPR

SEQ ID NO: 1002379 - protein, 218 aa, Homo sapiens
MSWRAISMNSHVQDRAMFLAVCEMARGLLNVRKDTSQLMRRKARSRECHSVGTQTRALRHPRDAQARLSSIIRGGDISWGLFDCINQIVMVTHANSKTQRGRVVCVGLKVKGVCTMALHLHSRLALGYTDMVHPYGFEHALTYVSLQRLPMKTYLRVPSRGATRKQEGTLSPCLCTYGAIITWLSSYREADQESSYPSAGVTPSLGRKFPLGLVFTEP

SEQ ID NO: 1002380 - protein, 119 aa, Homo sapiens
  misc_feature (20)..(20): Xaa can be any naturally occurring amino acid
MGMRDFKFTRYTMSRICVRXRQRVQGGIAMPPRSHDTDRCSITNILRPSDVRALACRVTRDLYIFNFLSHFRICPSVRLHSSHVLVMTHRNSVEALGRIAGNRFEKLRPGDGIPSEFRP

SEQ ID NO: 1002381 - protein, 155 aa, Homo sapiens
MAQGCWPFLPFFPWPGPPGLSLVATGCLNKVDTSRNRRPKGPPFMEARHTDDTRGLVAGRLGQDNGQRLGQAVGTHTEPGKGAGDQKRRGTPGGTPGPAGRTRARDGGNDTVPARLAIPFSAGQGRQATRGSLTWNAGGRLGLAFFQDGQREMRG

SEQ ID NO: 1002382 - protein, 343 aa, Homo sapiens
MERREVTIGLHVLPYSLHSMSLTCIVWRNLLELPGPLWRRATAFEGKSRLGRDAAKAYELIAKKGEDFTNGTARYERRGLICVLRFVPRGINCAKRLGPRRGFAGAWHRERSQGTIILGPVLDLVSVGPGFGGATGAGALYQAGSLRHLGNGPFVPGRDIGEPSFRPLGEGLTRNVKPGPSLVWAFRFGEPQLALFPRKNRRVYESFRKRCLQILSLGGEEIVCCTNDASGLHLRERFRRLVKVYFKAQLGPSGDVERVRKSPNPPRHKGGKPIVLSQGPGWPWPPRRKKHDKYTSQCEKQAEPGKVLPLDGNKAMTTCESLGGPERAWPTCDTTAKSVCGGT

SEQ ID NO: 1002383 - protein, 317 aa, Homo sapiens
MPNHRGFVRAPNLPSGKRGSPRLRRDQVGRGLWCRSGTRRLRVTLVVIPERLKRDILRFGAADAAWYDMHAKGKARFLALGIGLRKKVHKRRRPEGKLMVQIVWKVVRARLTQSLVAYGIVLLSPKVVPYTPQACTLSCPRVVSIPKASKAMDSPMARRERKTCGHLNGTVTIERTGNAYEGDPRALEKGDQDPLATGERKANLGGSDGIGDNGASESPVDTRTPWCVDLGLKPNSQRKGLLYDPPGAATRLSTQMALRTERRLELKRLGTPNLGDSIGHGVSYPPLVVKERGLKPVWGKPTAVPDSEGIMDTPCED

SEQ ID NO: 1002384 - protein, 241 aa, Homo sapiens
PGEVLEGAGRGSGPHGHAPSAGSGPGFGFTGSLCLSGRLVQVGGLGLPVCRSGLRRGCVAPLAASTVQWFALSASLMCLRSISYRVLKHFAAGRSRCALLLSAQASCMDLLLRHFIARKGSVSTVAWGTVVSMRACLTDPCLAALWLTWGPALHASAQDCAAVWPCSGSSPSTREAEEPLGDGGLSLRSRGLLGRIAARLASCSESTSIVYHRITRSVASWLTHFSANPWTSPRRYCQLHT

SEQ ID NO: 1002385 - protein, 176 aa, Homo sapiens
  misc_feature (42)..(42): Xaa can be any naturally occurring amino acid
AGVADPAGGASDNGGPGTTSSTTYFRSGAHRRYSGVALRATXLVCASTRNEFKPGDELKMHPSCVAKFCHPVVIQWGQCETIKAHDLGTPTWPGMPLSCAHQAYRRYVRVSCTMETTHGIGGNGTNSRKATLSTVEQTVCLALELDMDVCPCAPADHDRGHISRFNPIGVEVRGQT

SEQ ID NO: 1002386 - protein, 108 aa, Homo sapiens
  misc_feature (63)..(63): Xaa can be any naturally occurring amino acid
CERGPYWRLFWYSRRSLQEKLSQKSGALDVLQVKEEDVHCKYPCEKREPNLRVGTEVIDVPRXGASTSDEQWKKSSGIIIINQHLEGRTLGEASRWQLVQLVAIEKPV

SEQ ID NO: 1002387 - protein, 279 aa, Homo sapiens
MVLLQRNRVKGIKGIAAGWSLLLPISSGFHGRLEPGRDHPTQVPEELEKGSFVGNISKDVGSGAPGAGGAAEIRIVSRGRTQLFSLNPRKWQLGHRGQDRPGGALRSERAVRGESNILVEDRMKLIGIEHKKYVIQSENGRKIPSMKDLDVNINENVLREMRIPLPEAIDPDVGVNSLQSYQLSPISTSPKSSEPCQWRQVLGAGTGSTPLNREEEAIQPPWSSTGFRRGEPLRSWHCPCHVSNWLTDGKLNNARVFTFGRNTASEWSYENLLWVHPVC

SEQ ID NO: 1002388 - protein, 135 aa, Homo sapiens
MAVTIGCTIVLLRPCGSSNVEVLSVPKLRVLPTSNKRKKKRRTTCAGPPNVQGGAEHTREQKREKCATTHVVANNSDLLPVEAPEAIFREELHTVVDRTVTGPAFSPHNISAKLPLYNTSPELAARVCNNPGTLN

SEQ ID NO: 1002389 - protein, 70 aa, Homo sapiens
VCRQNTGVVEKLPLKAKMGKEQTHINIVVIWTRRFGQVHHYWPSASITCGGIDNKQPLKTFDEGRLTEHG

SEQ ID NO: 1002390 - protein, 116 aa, Homo sapiens
RAPWYSNCRANPQRDTLTCSRCDCHPLLVLGRAAIRLLLRDARQVPEITRLDNMLRRLAVHSEAALKRIVVLTRASLHADSRETLYAMDTSARLSEGAHGRYCNCSEIYVFSSFED

SEQ ID NO: 1002391 - protein, 270 aa, Homo sapiens
TGFRVLKGAGAGGSSSKGGSESLRSTFGGGPLCRAKGMVRGPYRRGGTLERRKESPSGLAATASKFGGGAFPVAQSPEKFSTTRRGPWGPGKSLHGPLWGPPCGRRGFPQVGRETPRDAGCGCPPWDSRATAPWAGALGETPGGTRTGNNLQGRFTPEGPSVGLRISELCGLFVPRGCALVKVVSPHSFRLVGPFFPSYVPVVAPPGVHTDVITGVSAALHCGPKQSGHAEKMFRGNHVANGEPRWISNKMYLGEEVFARYLLAIAPKKT

SEQ ID NO: 1002392 - protein, 291 aa, Homo sapiens
MAFRPESWNPTDIEGKKQLMTGELSRWTSSSVACTSEYETTLEGLALLIDGMWLLDNDRSLELQNCRNAETSGFALNLCSQREPRALGNQTIGADSLETAGPPLGGKEGAIPIVCELMWDDNGQTSSNLGPKDMKKPKGRRIQSTRVHRLQNERNVTTVDRQRARKRNAVDQAHEAKKTEGRRATRPTECPRKNNSGISDTRKGERLLSSTESQSDGKTGSIRFKALKSWGPSQSSSKLVPNGSNRLRTGQGRHAWIQWGTFLALVTGTTHMEWRHRRGLGNTTARVYMGT

SEQ ID NO: 1002393 - protein, 140 aa, Homo sapiens
NLAFCLTWMSPTEPDPGEDALHVVVVELLKATLIDSHEDAIFDAHWRTQRHRELREVGVMLMRNPMYPGRLQGALEARYEVTPNAQSECAETWVRAFQVLNFIRGHGAHYADAYAYVGKRTCMVRTPQMRTEQPLFIDLE

SEQ ID NO: 1002394 - protein, 118 aa, Homo sapiens
GRGDASGTNAGMAAQRRAPGPVQTCIGVVMVVLEKRASCHVIGLGESEKKYVATLGVEVHPLVFHDQAEDLYTFNVCGHRSGQEKFGGTDEMAIISKTSVPINNCFDVTSRVTYKNVP

SEQ ID NO: 1002395 - protein, 125 aa, Homo sapiens
PKQPQRVHRGNFRPQLYPRRVPGPWVLGIAPPSLAWVPPLPIVPGKPLYRGAARLSVWTLPTVLVPGSHIRCKGRSVGPHAPRVFGPTYTGLWGEKNRLWRLEITATQGKETRRSQGDFSWRRLV

SEQ ID NO: 1002396 - protein, 241 aa, Homo sapiens
GSEQQKPASSDAVLPATMSITGLVQVSENHFAVDEVLGIPDAQATHVIMDMELGTLVDKIEATRGYGYGYGYGQDSTSKYGYGYGQFTLLRKCLDIYYKNARHIVPRVAPCRLPFYPEINQRLDMVPHLETEHDAQGGVYGSGGRRGMTAYEYLDSRAVLSERELYRSGYDYHASLRPEDGNAPMRDNTMNYREQFSQCVVDRSSLRSQGTGHGPGMPGAAGTRPQAMGAMWEDPMGARGP

SEQ ID NO: 1002397 - protein, 254 aa, Homo sapiens
APVPPSLGSKDAIQCLWLVTQCHIQITVLASIVTMNCPQGNCGQQWTVDSRSRVSVVARLTASEASLALLDLVDSYHCLIRAGPGLCDITTSAMFTLLVRSDEALEGPCASAPRESRLLFTASGLLRCFLWLFNRAATIHIAEAVTHKSNTRERVRIGSRKTSRTMKPDIIAEQGKMKANAYYSTTYTLSGQRIQFQGPKEESFRRSRLAPMKGSVGIEPRHLIPRSRMSSGKRPTIAKTPGMQKHQVKAVRDS

SEQ ID NO: 1002398 - protein, 403 aa, Homo sapiens
MPRLPQPGLTPPARDRVAGALLRSASCEWERGRAWSLDGLPPAASGSERGLRPRTVWARGYRRQQTGVPMCGQNNNAPVTGGGPPPEPLCRQPGPDGTWRGPCGEGPMQALIRWTPALTARIEAPPDNIRRMQTSKTGHTNSRYPFEMAHQTGRLAKKYSGLSKSRKNCTSCPRGTGDPYTTHWSGGAGIKRTTTPSFGSGNRRKPGLIGIDWAGTPDQLRTPSNLHNDSQKKETLGSYIEQRPSRHMARDHDAQQGRHPRQTGRSEVDGERPWGREIHGHNSSWDGEEPNTPHGARKGSHVPTRARDTCPERESRDTHAETRGQTNTRGTLRTHREHNYREASRWNTEDQERKKKHTSHRTNKQCTTRPRTQNTKKPNASHKRQPEKRRNEGQRTTERRERQ

SEQ ID NO: 1002399 - protein, 404 aa, Homo sapiens
MLVEEMDWLLPTDIQAESIPLILWRSVMYLWLQKQAPWQNWCFEYSSYPDSLHETSERPIRTANNGKTTIKTGASVLNKWQMNPYDRGSAICNWAPRMVLCSLNTQANANGTWHGLESYYQDFMTQENETYLGHAMPVTSNPRDKKTEDSQDENLTPPASAHSSRRTRKRYRAPNTTRDQKGPPERRHHGAHTQTPQDKQQHTSLATTGTKQRQRKLTNPTATETTPTGHNEYTTRRDKLRITRGDEMEPNSIGDTKHTHCAQPRTRSAAPLGRTGHVHDATPSEHEEYERTRQRTTRQVPLCARRRLMKGKTSRRVRSKQKTLRSTVRERKRTREGPTHRKKRLRVEKRRCRQNDRLEVTENNTAGTEQQDEEKEQKAHREPKKQRRKRTTTQHQRHEHENKK

SEQ ID NO: 1002400 - protein, 344 aa, Homo sapiens
SSACGAPWSPEGLVTSADGDSPGAPSWAPITHTPSWPYEVGPAARVTPHRPAHLWCLHSSLHHVLVSGGLAVPDLPVVRPPHSGPLHDLLQRGLGDVPGAPKQWHSCQRMVRPGPSLRHGPTAFQPWTLECRQGYLDGGPWVLAVGTHGADEGTLAPVPQEAHLMHALDQRGLPEGCQGPSSLDTMQTLEPSEVLAVIAHWLTPDQEASQASTHVGNRLERTLGSVIRDIAPNSTTCLVGSWGTRRDPTDQGCPLIQSQYRCRIERRNQQTRDRDPERLRKIEGHLKPRHISDGRSSTGQRWNSKTEGCHVSIDPMEGGTHSAAKRLIALLNGVNLGTRRNIHR

SEQ ID NO: 1002401 - protein, 227 aa, Homo sapiens
MQVNYASQARMSYRGQSSAIGCIMRCKSVSNSHKVEYVRATGFMNQFILSLRCIATPRVYAITASNGYGTGVKKASVKGHYYREKDARYANRGRVRAITVAFLPLPVRGLDFIPFDNSSPFKNHGRHECPEQQLRLNARQGQHHLTLAENSDDGKKWRLPGKDVNARSAHTNLPKLTTRDELSRQGGIFKGGYITTNIPRGPHNRVNAILPAGETLAHLYRPLWRSE

SEQ ID NO: 1002402 - protein, 107 aa, Homo sapiens
WGSLTSTWAVGKNKRLTKGGKKGRQRTKRGLDSNFLKKDWVIDGRNAPWLWSHIIRDTYWEKTALSRRTQGTPKSGTICESGLLQKGSRGVCESVTDSCAVILRHKQ

SEQ ID NO: 1002403 - protein, 104 aa, Homo sapiens
AAHPGTSSDGSCASTSAVPAAHAGVAVAARLRLPALRGLCGCGPAPPAAGQLCTAAGICCGPVLCKRCVRAAGDNAAMVPPRSASDRDEGVGGSKVEAAGRVPP

SEQ ID NO: 1002404 - protein, 287 aa, Homo sapiens
AEKMQDLGVISSISLSWFLTLFLSVMPFESAAGHRLMCFFYEGMKVILQVALDVLDANMEQPAGLEREGRGMSMLGHDTWIIVVNKPRVSLLLYPNLRALLSRSDDRHLAEVDISELLEKCPHAVRFSEPEGRKTLYMMRFQQRLKVIQSLEDTAKRSVVRAIPVDIGFSIEALEDLYMVFKASTWTRPATGGAACTIGRTVWEHRHDLPGASNEIDASKFRELFASLNPWTCGLTIALLLGKGAMYSGYLDENKDSVIQLQGSRDRIDGMTKGPEEKDKVIKSRHT

SEQ ID NO: 1002405 - protein, 275 aa, Homo sapiens
MSILKIHAREIFESRGNPHSLGIDLFHRQRGALSELLCPVVLHTGIYEALELRDNDEDSRSMGNGMSSEGLLRRPVELNFCAVPVAIDREFLDRLLRIRRTMEEQMIEMDGTRRIMSRVPSSEKVAPSVKAVIHIVRSCVNLRGLASNKGEDPIFIDCLIRLYRWDLVILLDEFVAAQLHGYTQIGHWERVARVPSIGLCHSRFLWARSHLTVPIESLHTCPSWRYGTSHEDTARCDSPWADVPTIETWMEIGRRNGEHHGKAMRPIEGRLKDGQ

SEQ ID NO: 1002406 - protein, 396 aa, Homo sapiens
GCRFAADDLGPSGRRLFRAALSLETGTVTESHRTCMVQCPRCQTCLAVADRVLGRVASEDVHGLEPMNPCGLCAMVACRIARRTRDEGTTCRVGPDVEDISEGIKERSYLATVRRRCSSLCTRPFGEIAWFYSKLGRSDNLCRKADNIHRGATLDDYLKLVVVTGLCRRKGVEDIAELKQRDMATRGYDPEQIRKREHRKGAGQPGLSGNGKHVKRKSSNDTSASVTGLPQAAKRQANSGQHCSRGALDPDTDTRESGSGTQPEVTERRGHGVAEEPTADQYPEGDTLMRHRRTTCMGRPHSASDRCDFEVSASEAAGRQRASKQRDPTLGDAQQEQLAYRHVRQEPSEREPRRRGQDGSPDSAAGEANMAHGKERRHGGEPQERAPGGEGERPVR

SEQ ID NO: 1002407 - protein, 450 aa, Homo sapiens
AIEMDQCWTGESHYLPGAALHRVQTCVPELTVDQCVTLAALADGIKMLPAGTARCQPELSICLPAMWCAASLTVAVMPMPMTSLDCCLVEKLASVNIVKEAGEVSSRHSSLDELTPARKARSLDPTAGPWAHMELRAPGTTLTRNARRLVTSEWGTSHQKGDRDGWTPDGTQQYRREAKTRAGTWQNRNTHETHAHENDRTVGTQGNHQEGNRTDNQPAQWTAPQHEGDEKEDEENKRQAEAAERRKRAYVCSHKRHGTRTHANPTDEGRRQCHGRAPAEPRTRKAIVTRHPGTGRTETPSPKDSQRSDSADDTHKWPENAREQNKNPWAEPHTTGGRTAHRRTAQDQKGAQEEDNDKTTAGEQSPPELRLKPQRIEEGRQRAQSDTPKERRARTRRKRRRRGTRNTDENRGGTAKEANKERTRDTRDEKKTGSGRTGGTDTGEGRSQAE

SEQ ID NO: 1002408 - protein, 265 aa, Homo sapiens
  misc_feature (27)..(27): Xaa can be any naturally occurring amino acid
  misc_feature (75)..(75): Xaa can be any naturally occurring amino acid
MCPTHVQQGAFHYGVAITPTKLDVYKXATHATESRVAVSVGPRTHNPLRGCLNCLRSLSYMFDSYRMLGRSQKLXLRLMRDIQVNLGYLCHGMYSSSPAQSKDAAALLTGTKYGDWPSPSACCPAMSMMATVMHASAGPSLRPSSTAADTEASEQRGALHHQIQYGLLKILSKTLAALTHFTPDVCQILLDQSLDLAEYNFLFALSFTDSHLGLRSGPLLRDPSGTVNVALNMLGELDKKKGSPSPSAVGLSTPGRRDQDVQSPP

SEQ ID NO: 1002409 - protein, 110 aa, Homo sapiens
MYVIGHVDSGKSTTTGPSDLYSAVVIDYKNHGTEFEKEAAEMGLRAAFKYAWVLDETVDSLRRERGISIEYLLGGEFETSYSDYVTYRFDAPGHERLYCKNMHVQGTSQA

SEQ ID NO: 1002410 - protein, 74 aa, Homo sapiens
GVCPFTSDQEYFLFSHVTYSTFPETGTPPLCVSRGSDDYACAMTASASRGIDTKVSRRCLAWNTAVVASLYEDV

SEQ ID NO: 1002411 - protein, 306 aa, Homo sapiens
MARSHCYVYLATLVLSATGKELPEDSIQANRCMNPRWQNQGSQVVDCCSLLRIACSMVRSNSDETAQCINSRVGTTPDGKRQLRRTQWLRHSTELAVTTEVRAKEMTEHLGPPSSDHRMQWRKWQEQKNRGHPTRRGNDRQRQRQNKREWRTDPNAKRGQTEDCDDGTTQITARQTREARDNSPLRHTGRGDAAKNKTPPTKTENTFRRNQRPKERGEKPTKRKATQPNNRNRAPKEPVRKETTEQNKSRTERQSNHSGQRARDETNTEEDYGGRPRAKAMGTEKRARKQREAEHLEDETTQTRHA

SEQ ID NO: 1002412 - protein, 221 aa, Homo sapiens
MDHGVGRTLVSCLAMNYYSGIQAVVPICLYMYSSEECDLLAVGSYRSGKGMYETHAAPTRTEPSGVERAYFAVDDSVYHTRNNFKLFAKLLRVHLELGVVTCNCKGTLKGGPKGCALPKYEQVAGELNPGPMPRLGGTSATPLVCTRPPSRLKCAAAFPLKRAFTLDLRTANRFSYKHPRNISFTVVKRGNGWTASVYVITVVVAQCQSISHDRTGANQCP

SEQ ID NO: 1002413 - protein, 335 aa, Homo sapiens
SERRLANVRTSTPTTDRAYSSFERRQRVPRHDAGGHGSRSQKEFAHKSPPTQRYVGPSTFHSTGSGRTISMLIFQVISAISAVSRLSQRHTDTREISKDFVLVIDIRLNVDFPLQDSLDHTTGCTCWDDWFTISVGPLQTGRQTKTQRMRLLDSHDTHGRTHRVTRPASRGLDRTSTRRDTRENGTPATRDRHRTNQGAHPPMRARPDCRGKHWRADRADRRDHARMGKSARSTPTTSTSKATADRREAPTDVQADRASTKKGGQTDKATTINKAKRHSPTLRQRTRVDSQRLQSGSMAHRDRARKEADKDTEGRKRDGAQDTATQQHTRTEDGE

SEQ ID NO: 1002414 - protein, 351 aa, Homo sapiens
  misc_feature (137)..(137): Xaa can be any naturally occurring amino acid
  misc_feature (276)..(276): Xaa can be any naturally occurring amino acid
MTSGFCTSPLVCLGEGTECQSHTAQNSLTCMISESSKRYSTTAGILEEHVGHGILSRKSLHVARQFARSQTFQSYRILQDLAWCLFIPLHKWCGYNCHGDELAVGSSRQVDSKRQMGQTDSPDGSHMGWGSCHSPLXEASGCEGTKRLRYMSSSDSLNNRAIEGEARPFDALEEGNLIFGFGKRGYPNREEEGQGIGSSFVVPPNPKVPPKSKVLNSQVNLFLTLPISLSQGLKTTGLKPLQHAIGTHGMASVQKNGPLILWGQLGTEPYMQGPMXMKVGHTFRRLGVQEKRKSNPNNFERDITFVQSAADNRTERKRYCDMGRHPPPEITVGPEDDKKATRRHLTGGELQ

SEQ ID NO: 1002415 - protein, 197 aa, Homo sapiens
MKGDAVLLLDRDWGCCLQCSWASSLVPGGLCRKWMLDALSCASPRLCEQGERSHGSVSMVCTIGGTRCCRYCACWSRGLHAAGWRNLCTKAGVRFGHGYPAWPVVPGTRTRARHRMTCRDFRTLRDCMARVRSCRGHVASYCLVTCKNAQLFRLTKVRRTYDAVPSKIEWIEETLKGPRSRRPSFRNKSKKCTRSQV

SEQ ID NO: 1002416 - protein, 224 aa, Homo sapiens
GPPCEFRVAMLYFSLFWCELGLCMRCGQLVRMAIAVLSTGNACPDSSLRERKHAGSELAMDEPCQWLVILEDCWRCLLLEAENVTLQVLVAVDAQLASEMNFVHAELRMEALGVLSEATMYSEVIRGNESANGGEARRIGCDEGCEVMLVLQEALDAEGKTRMFENVWDAAGNIVERKIVLVPYDDLKYRGCTESARTRGVRIQYCRDVMSWRNHLVEAGHIQL

SEQ ID NO: 1002417 - protein, 174 aa, Homo sapiens
MKRYRSCRDVNANGKRTWGHRQFESTTGESRTSSPWARDGQQPVTRRGATEPRRPPNSDKVAKAPNKTSQLLTPAVTRPPRGHSPYSTRWLADPPNQHNNPTCSSRRYTIAEPMLRPSCNGRKRLYHALERTEANFDSVSAHHVTYLHLYSTRNLPDEFRINVNIYGVRSKRAE

SEQ ID NO: 1002418 - protein, 102 aa, Homo sapiens
SSLTFLKGSQNPVTNLWAQGGFPLKSYDDLKNVITLKRATRNKQKDQEVAPQKHFSLSPSRERFSRSAVCYTRFTPSLCIIHHYRHFKTVAYSVHTPQTRIR

SEQ ID NO: 1002419 - protein, 109 aa, Homo sapiens
GTGQAPKPPRPIVLDACGEARGELTSALSAGYLRRGEATKVCTRRWHWTCACTGAYMKTAVKRTNVCRVVIIYVDLVLSWDGLVGDPTRIYIRGSKEDASVSQPERDGS

SEQ ID NO: 1002420 - protein, 274 aa, Homo sapiens
  misc_feature (139)..(139): Xaa can be any naturally occurring amino acid
PCIIVTMPPVVAGSTLPTGMGVCVLGDFISWSGMKGEGICEAYLGAGDVAVSYQASVAGPVVVRESISSSCFSLYDVLELDEAMRRRLRVEFMDAGLMRGYHVPSPVALTRYPVIQHQDMSTQAQCIPGASAWVLSCGXRLAGGMLRDGASVIEWHTHCKPQAQACKQWIVHVACPCRTACYFTVTVVNWAGKESSLGDGLLGVQGLGEAAGGWNVVERWGRLELVDNDFAGGNRWVGRGRRLSNNEDARSDWEAWIPEKAIGLSTVGFGNGPP

SEQ ID NO: 1002421 - protein, 356 aa, Homo sapiens
MEATAPGRCLALRRCILLLTLALLRDQCPEDHLPPVARADTTAGKPPADYVPWGAVFSGSCVLSKKYGPVYTIYLGPMDGLWWSWLAQERCAGGPGTVRLRSSAGLGNRSDAGRDFLMAMAVFYLQLGELVEGSLSEVYRCLPHAATMAHWGKRRQGEELIQAEAPGDLDWRPFQGAPDRTTHFDSPQRDCMGTRQNIQTLALEFPPYSGHSEFIPYGGLRAVPRASSVRGKIGRKRLTCRTSRLPKGRRYTNRKAGMIIAWLSLRDPFTMGPPTKARFLTTKGSERCDLAFHAASPSNGRKAAHTWQTLESISGPPGKVNHVDLPFRWDDGWETRQGDRVRQGTHTLLSMEWQPV

SEQ ID NO: 1002422 - protein, 175 aa, Homo sapiens
RRAASAAFQENVGRQGTFPHGIDILTTADYFAVGNRSNCFLVISVFIAGFPEYTQPMIDHLVTMKISHWDGVILTSLAARALHNLAQQAPDVQRHSNVFPRLLSTDTELQHLHTEAWRRLSPAQKSLTPCTTLATPNENRPVTDHLDEQAVQGLKQIHQQLYDRHAIQGVWEDSS

SEQ ID NO: 1002423 - protein, 212 aa, Homo sapiens
EPFEPWGTLTDCVVMRDPQHKRSRAWVVTYATVEEVDAAMNGKANKVDVRVWNQRELSPEKILQDQVPTQLCNRSSVWWHYQQTLKNITYEIISDNSLDTSQVIEITELTDAVATTRGFAFVTFDDHDSVDTIVIQNYHTVHGTTVKLRKALYKARDGYALHPAKEVKWSLATLVVVAGGGHRWEPTNHGAGTGNTPRTSDGPRGRPAPAQD

SEQ ID NO: 1002424 - protein, 344 aa, Homo sapiens
VKAPHVVLYVYTGGSHCDGKNCHTCFWAGRRPDPHCCPHLTHFIHIITGCGCCPGLCLPSSFLSSLTYTWLAGCPLFLIGSSSYPHARRHTARLATCHGSALDPFPGHNRTGPPRPPLVPPAQPPFPPPLLAGPLMALVTTDISPHSLPPCTTTTLAHTSLTPPRKPRDLAPTLAAPPPHLPPRFSAPTKSQTPSPTAKPPCEFTGTNERKNSTRPPCGTAHPYQNLSCVNPSTPTAFSHAPYKAPLRGLYAATSLGLTPMRHHFSAQACIPILRASTPRTHGYPTAPDPDTPSRGPYQSPQGPPPKHTPSKPPLNDTPLDAHGPEEHPQGVGAKRGNRQLGPP

SEQ ID NO: 1002425 - protein, 386 aa, Homo sapiens
MASSPKRDPAYLTSGPRPLCGAIAPGVFLLVAPHCLRSTLIHASRTARSPRGLDATIGGVLGATRLQSTHQRDDTTGTSPSNVAHNDRTKSLRAKDSFFRRRFIHRPLSMPLAPATTLPNQTPTGMRKTVALPKGDCVLSLQAPHVAPHVRSIELYPAVYPPVNSEEAYQRVTLGRRRPVLCTSTNGRESDETGGRSRGGRLGHRSLEHPQQIARTVQQKDTANGGPNDDTRNETRTDGSNAGRAPETSRHSSKPPCTLAASITHATPAGAKATFGKTENAHNTTHYERSTQKGMRMGERLTQGDEHQPTSTSIADEQAITTEPTKRDIAQLDLEQPQHHVRHPTDGPRRNTQEPIATRTDTHNAHTIACNSGTTDKQSTHYKDTT

SEQ ID NO: 1002426 - protein, 236 aa, Homo sapiens
DDLGSQPHEDREPVDPTTKGRVASFSIPGSSSRYSLGPSLAVGHEVSERVQSSEMGTSVLIMLPILRFLQLLCENQTGTCINDIGRRKNKTRYKWVWETLQLLDMMCGRTTGGLGLSWGSTSMKDNVGLVIQELGDPQLRYWPGNPMTMRKPEYAYVTHRDPSGHKTIISRTDPSNDSRAHCASTDMDLGAEDQGQLGSKLLLALIGEPEMTVHNAERILISLRPQELMEVIKKAY

SEQ ID NO: 1002427 - protein, 158 aa, Homo sapiens
PAKGARVLPRKLRHAIGVRPSLHPATSTASGRRQPVHSPAPVGSVSEARLSVNSGLILSRQIEVTVTEDKINCPHLNAAGVKVLKPFWPGLFATGPGQRHSIWDASSAECTGPVDLLQAAGAASRQEVLAPCQLLLTPADGERHTWKTTEDDSNPRDV

SEQ ID NO: 1002428 - protein, 322 aa, Homo sapiens
SCVLTGLDRWCVPSPNCPPLCLAYLVDTQSLCELQLMESEQFEMRSTTIVILGFAWNLGASVWHESSYSRMSLIETSRYQIICKRNTLSGMLDYSRQQIGLFVYCSYVDRGDEVLTYVGQSMGVSSDYARHRMRQHHCMLASADSKGLAHGGCTYWLMWYLPVPANSMIDVADDQRDGGPVVRLEDLKLLLIQSQYSSEMIHEAAYQGEHSRPPAFLTHRKRSKDQPRGACISYLRNYYTPDRMVLAGRGRGARAIWWTVPEVPTGGPAGLEGAQRPWHIGQILWPQSTGGIANAMKRELSHLQPGPNPIPGLKHHHMRHLK

SEQ ID NO: 1002429 - protein, 229 aa, Homo sapiens
LLQCCELEAGELGMAVPAAAMVALVRWARAAPVSMAPWCSVEQRARRRYCAWDARSLFRGHSKTTRVPGAQRQGAHRVAMEVATGVALASGSFLTMTDKRLLAGEGPVGQRTTIYRGHGDTCGSSLCWHSNVIPDAIPCTVVWRLITHSQSGTVRIYKSIATVNTKGEQHSISAGCPRWADHWLIRQLRMTVVTVIVDAKQHTCSDEAEEQVQRFEVRRNLPGTMTISM

SEQ ID NO: 1002430 - protein, 79 aa, Homo sapiens
WMLPNFYGPAKEITRAIKTFATVRQMPNVLRKRKGRKGSLDSQHVKKKCGFRRPKNIGSQRLEKRFGVGNSRKGEIERY

SEQ ID NO: 1002431 - protein, 90 aa, Homo sapiens
APDVAFLCRSRWKKRSPRLVIDNGSEHVQKRGFAGDELLPQSLCCPSIVRAPQRLEVVMCGHGPEGLLTWVDEATEQGVAHPDPLKVALH

SEQ ID NO: 1002432 - protein, 229 aa, Homo sapiens
RIRPARSHSVEQQLSAKNSTLKQLEEKLKGQADYEEVKKELNILKSMEFAPSEGAGTQDAAKPLEVLLLEKNRSLQSENAALRISKQDETLKPQRVRSCKSVSLRLGTARAERAIARGAGLSIISPSSGRAEGAAEHRWQKIQSPSKRHCLSTDLSTSQGALPEGRDHASIISSRGTSVPNQTEARTLPDTSGLKELTAARDKSALEDKSCEYLRAGQDDRVGTVHREA

SEQ ID NO: 1002433 - protein, 83 aa, Homo sapiens
MAPGGERLEALTFTDNARVSSLWHPSRLIERDRGIRTYHRGNEDEREEDPGDRKHRVGWTRVSLGGHNTHQEGGPNLGRLPKL

SEQ ID NO: 1002434 - protein, 217 aa, Homo sapiens
MVPSKKSITSPHACIRIEANPSDRESGPNRGLSCAFEPMTGGLERSRSNIIQLSVFVSRDEAIAYMPLRIGVSPGGTIGMTLTDDEILAGPEFHKRSAEIPEAQIHEGFQELLRTLNQADRHCSMLSTRHMACAIETEGLKLVDKFLEDGGNLVRTENALRVGRSGGQREMAERPESRYCVGDGVHPAQGERSAPQELDQAGLRTGRMAGARGGWER

SEQ ID NO: 1002435 - protein, 243 aa, Homo sapiens
CKLVPGVHPGGLTELWSTEHRILLKSLSHKPVTDEHRTLHRMMTEDALNSDPTRHRSTTDTRTSPERRLSSDTSRGRLVCVRACPIPPMRASLSYAPEMIQTWDHLREGYTLAYEDHLDPEKSMTRCHRSSWGSQDLTHANTFDPALDIGLGPEDWHRRDSSTKRAQLDNGRRTRQQTNTRGLGRWPDREVVGSEVLSIMIRPRQRGASREAPRETQYGGQTRNWTLGQVWSQATHMGASLRR

SEQ ID NO: 1002436 - protein, 363 aa, Homo sapiens
ALSLSQRQVTRGGVGVESGDVAEHLVMACTRVRMSLPAMLGALGIGLGELVATCLALFCPSVRPLVRSQQPGSGPGMSLHVALLAGPAEGARDAQAVVTACTAWRLTGSHAVWIDDGPGSMFNTSLAPDTSYNKVPGLPEKRKDFIGSWHGDRTLETHEGANEKPPERHQDSIASSKHYLGIVAVNFTCRPHCFRLQIAIASTCITGPINEADGRPQMGTSNGCIGGGALREDRTRGGGYERLKKKGGPKVRYREDDVAKHRIMHTPADGSQYNFGVVPLSALPVVLLRGPWGNTVELLKRYARSELERELPVRSVERVKGSLTRSIYIPNPETWPRHDTGRKTSGGSNVSHLRHGAMQRPMV

SEQ ID NO: 1002437 - protein, 376 aa, Homo sapiens
GSAARSPAVPEHAVAMRPLRPRAGCCRSWLLLVVLRGPVDRRPRPRPWLRVDGGRARVWPLVRLLEEATRSFCPLLVTPYQDLTWSVAFQVGDASTAWTVHAYCWVRPVPIDLLGVPGPVFPGSLTLRLCWSPYRSSLRKGPFSHYVSVGAHEGLQIRSGHTLCAPGGSPWETLLFAVGGGRHASHSPSVAKARLEVAVLAWPSAAPRVSVLGPFRGGTECRGGVLVFGISAMGPSGVVPASLSSRRSDYRYEDKALRSNLVQPNCSPEGLENRFRRDRFTKVESAADTESIVNIIGARSGRIPACTANSQQRCIPPGSLNLTEMSFSFRREGLLVCRPEPQCPPAPPCGAFRQRTAPVDSHIHLPYSRPEPDGIC

SEQ ID NO: 1002438 - protein, 374 aa, Homo sapiens
AQTPRGAVDWSVCPLSCSSLARWVCLTVPGDTCLLGPCPGGYSGFSAAAPCVLLDWEEVGCVPSLSRPHLEPQVAPADPVCSCEMSCGRSCAWVRPVPLALLPGERVLNGYCASTCTGGLKWQRLGQYILAWLDALASAVPDECAVGLLGLWWNLGCDADGWSRGKNRCHERAELSQRAQGGDEARQDPRTAENINARAEGGHWHGDETSHLKTGPEARGWQQRPPGGVARGVRKEGDAMGWTGGTQGEEASPGPGERPEGAEPRERYAAQKGLQGARPGRDSGNATSPAAISTQREPTGEREGAQHVGRGQGPQGGSSGAASQGDSSEQHEAEEANVGAPRSEGLNWALPESQAKQARKQTRSPSAQKVAAPT

SEQ ID NO: 1002439 - protein, 247 aa, Homo sapiens
PHRLLPPAAAAASSAARCQPRRRLGAVPRLRAMGAGGLSMGAAWRRRMGGRQPRAARKLRAVSGGRGRSAGSTPLTAPQTAVPSAQGRRGAFCGRCCSREAGCSRAAAALCLAEGNLLGKVKPQAGLLPAHGMWNLQRTNRGLQASSTTPSQPNSGGVQDTEMGPCRRHSGPQVLQQTPDLRSTAGGSKQSTLPELVTIEAFYRKAGSARSSQGAAAEGSLLVLCIRIGEVPWQGSSRLAMEAPTLA

SEQ ID NO: 1002440 - protein, 136 aa, Homo sapiens
MNRNRHESRKENKRGRQQENSVQGKYRTKDTYNTKQRDPQNNKSQEEHKEEKHEKGWTKTKGEEKKTDKKENERNKRGKKNNIERTQPDQKTQRDREGHQSKEKTQQKEQRRNAMEAGNTHKRETEKRKRGKNTKR

SEQ ID NO: 1002441 - protein, 165 aa, Homo sapiens
ISSMRHSTQKADDGRSFPASYRNPMCGVVGIKGRQGRGPPGTGQLGETSNQGLDGLSERCAQYKKDGADFGKWRCVLEDWGTQPSQTHRHHGKCQCSWTRCASICQQNGIVPSRGALRIRPDGDHDLKLLSSTVTEKVLVCCLGGSDMTITIYLEGTLLKSNMVT

SEQ ID NO: 1002442 - protein, 277 aa, Homo sapiens
YKDAMEQCQNYNARLCAERSVACLSCDSQTGVAQSNCYIWTGKADTCGSMDWPPGQLYSYPALAAGCENTLAMPIPLRIHDFSFPSIKPDTDQTLKTDGAESLSDGSTLEALLAALTPCRTRGAPDPRVDDSTRLGEFPVTNSRARPRILEPDDFLELTSTDERPLNERLLPNAVGRTRGDHPKGPTRRVGAEARNGTAVMSFQSLGSDSGCIRARMPCCTTRDGKHRYTQRNPTQGPPSPPDLHRPNYHTIAYDRHGAAAPNPTDNTPTHHTPPPM

SEQ ID NO: 1002443 - protein, 215 aa, Homo sapiens
AFFLALTSKPNYSTETSSWTASEKLEYSLRDTILPDHQSKVHHRPVPSLRTPYTIHSTTVNASRPLIQSRVNVGHQWLLRPYAVQPNYGGAKCCQSPIILSPIYSYEASASTAISLTLTIDYYSRLECPHSYNNYITKTVLHLMRLSRTIRLKNRCNSRTSKPNHFHRYSTGGYTTVNALKSVAAKATDFNALSFLSNLIPPIKSLQHRARILPY

SEQ ID NO: 1002444 - protein, 108 aa, Homo sapiens
MRCAWLKADDQSAHQHAAVHRSRARFGGFMRQRALASQCAASTGGLLIYYERGRRSTHACPVAFAPLFLGPTIQSSIRAIVPWCSTGSIAFEASNRAFAFSGSMKVPP

SEQ ID NO: 1002445 - protein, 175 aa, Homo sapiens
MGLHGESGETNGGFPISIGTTPLGRALDPGALSPLDGHGGGLGPPAPMGPPPSVGQEIPGPFRWGFAKSGGGEVRGPDGRNFSPLKTENWLLAGERKGWLVPIHWHPLLRHPVRVGLGLTIVWKYFRKSLGKGHRGNGAHNTRKRARSLESFPRINSFPTRNEHFLPRTTQRTRE

SEQ ID NO: 1002446 - protein, 108 aa, Homo sapiens
MRRTTETMGKNTEKEHINTLELNATNKTFMTGNTVHRSFNTIPLTRNEREKGPLTTGSQGSKLQPIAVGKRQRTRGPTQKGDRTHEEIDRRKEQDTEANKDKDEHRKQ

SEQ ID NO: 1002447 - protein, 97 aa, Homo sapiens
QHTPVSPPLRQLVPRNAQCLQRTAGVAVAARLRLPPCAGLWACCGCCPRLLASSALACVALAGCPVVCFLQAGCRCWAGIGDNCGPCVAPEICLRKD

SEQ ID NO: 1002448 - protein, 176 aa, Homo sapiens
MCLIDFCAGVSKLYKVGLGLGYLELSQYQSTKSLLMEHKLVSQGWSVIARNAAAAESAVDTRCVYILDCWSDVFIWLVRKSPRLVRAAALKLGQELCGMLHRARHATVSRRLEGTEAQVFKGKFKNWDDVWTVDKTCNADAVLPEPGSLREEVKRDAEKNDQMKADSMRFSCRGSS

SEQ ID NO: 1002449 - protein, 110 aa, Homo sapiens
ANVTRVQDAIGIVAVLSGYQVLLDSLRIPSFRPYFGLSYPMYASRLLVDKFRRYIVMNENDDFMIILVLSDCLRYREVRGIARIMLSEDLMGTTTFKSDKVIACVVTKLA

SEQ ID NO: 1002450 - protein, 83 aa, Homo sapiens
QEGRTRAEERRGVVVDERRQCRRTEGYGLAVRCRRRPWRSLVSQTALSGEGLSREALAPELTSSEPGGSCCYVRSSMASQQSL

SEQ ID NO: 1002451 - protein, 430 aa, Homo sapiens
MRMRTVRGTRESRPRIQTCINESAVNRPPRSSFPATLAEFLLTMSVHAIEAEWLSPRYSRTARTMSKKSRDATVDYRNMITDMSTVDRAEAPQGAIYDLVPAVTERELVDGVDDTVAISGGIQWPLPENEMCGSINGTYASVGIACRRSERKDAEVGGPRATNASSTSRWSIWALNTTRSRGLREPSMLQAAKGNKRSTRAGNLISWALYRPIATRVAVQSHLVARGNPKGGSDRHGTKHENGRDEVAENAHVIWEDVCQPNTEHRFAYTDVEKKDERKVGFTHTHNHREGNAQNGDLRSCVPTVGRYTLPGMRKDGGEQAKNKRGIKHPPLAFSRTPWGKETIHAENHVFNQRKEVGTFGTTKKRMGPRQGECWGGIDARQENNGHQEGKDTHLWQSYGAIRGDTPQIGGNESPNQPLGGDTSGKGAFP

SEQ ID NO: 1002452 - protein, 216 aa, Homo sapiens
DLLGSGLRDVCRVLLGAPRRPAVPSEEAPTAIAGLSEGSWALLCYGGSLWSSSLSDDVVTDCHYGRCDTRIIHVLSDHSLVGSTWLFIIGGKVGVRVRTNPGRVRVMDLGQRYDHHSVLFGIMVTEDCMIDGFRGICITDAKDGEMRDMSRRKNSEKVVLRTVRTEKHKPLAIGLALQTQGDIHRKLLRRKRRQQAHAKYGIVEDTCKRERTRTRH

SEQ ID NO: 1002453 - protein, 278 aa, Homo sapiens
MPILVLLGLRPTFGCDPRLLVERAVRAAGSQDKSRQAGDLAEQELRPGSRVVCWWLDQIPGKHVRVNRSRYERWLVVRGPKCKKLFFVWTLASKEQGLTKKRTTSPEEVTDFSRNPVRVDASSIENTSKVPDPKDVLAPHRYTNAKKLRRKEQHMGEAGQAGRADPGGAQGTRPGILNPYRDNKGPRPGTQEQRRADLLRPSWDSDNPLDRPEVGQDEINLEQTKKKECSGSKHCKQDSPGAAVEDGASGATYNPSDEDQQTCTQRPRGGEQRRKRGT

SEQ ID NO: 1002454 - protein, 432 aa, Homo sapiens
LHSRPRQVRAVLMADHHSVEHMCRLDIRFLTIPSQPLDTVGIYHDTRLGPGLRTNLDGSTDLKGSMIKDRASVMWSYDVELASVMRTSSIYHSGWNASTSKWSRTGPRGDTGGSAVSGAHMSRTYPARAYCGMGGTFLRTMRIDREPVEGFPETSGRRRNTKCEPRQRDNIGQEKLLRGPPSKQISGNAHKGSYPSRSQPVGGELERTPNPSSGILARLSHRQENPIHLVAWLCSDTHTQEEKATSFVQPGDGDREKRAGGATDQSTSITDELRKFELRDLPNRVRSVADSALLNESTQQQRAWPTPTLVSRGTFGTLGARPVRRNTQNSRLLRDSTDHAQTNIENTSKAERDDTEQEILSYPTDGRSVSTSMLERNARHDTQWNIEKISAIERHTKSQTRSAKRTISGEERTYSREDKRIEPDNARYGVNR

SEQ ID NO: 1002455 - protein, 37 aa, Homo sapiens
MILNRQWSQERDITERGDGQKDQDEKQWTSMTRGKYT

SEQ ID NO: 1002456 - protein, 114 aa, Homo sapiens
MAGGLMHACFIVLCPGSCASSAEEIVFHDLNLTVLHGISHCHHLSGPAHARMAVSAMTLRGRATMCDLAQHGIHTGSRMMSTAGTMRHAIHEACGHRKPTMCENGTDSERRLQT

SEQ ID NO: 1002457 - protein, 107 aa, Homo sapiens
LTRRRNRAELSSLEHTRLPYGLGLWSLRVAAPPGCVAFYDSWVEACGSNGRGNFWAEELRHYYSKQSTAELVVKVIERSKCYMHTCRTATSFTEMSSAKVILLENAI

SEQ ID NO: 1002458 - protein, 192 aa, Homo sapiens
MGAPRKQMRPRSTYVAPLGSTPGIGQQRGLTIQECPPGAMWKSSWGRSTDPQSGVWEGGIPIQGNGFANLVKKIPRNMEAVHIRDLDRLHPTRGRARYKVSSTTQRGNVAHFVCRGKHHRDLARRWTTIRGEILLASMSHSKAPIEHSAPLKTTKRGWGNNHSLEGLKRQEWAWPTFCPQSMGENSERSKLP

SEQ ID NO: 1002459 - protein, 409 aa, Homo sapiens
VRCPSVNAVTCLLALRGRMGPLDYNTELDADGSDCRATRMLAITDWNPDLRGTVTISDTLECVLAAGLPYKVIDFIRARHSSRVALDVTGLGKPDAGRTVAGMLSGTNAWYAMGGANPLDGREPMPANVRIPLRERSFLWLTNELEHLSCEVGPRTLEFGERKRRYRVACSDANKKGRTLRFGMARRRRNASILVDRVINRYAVTHCWTHHRWAPFLVEYAHGTTIPTRSFVRNLGTLTIGHPWAMQKGKPDRKDPDTDRKIGSTRRRFNKRKGERERQLNRENAEARDGTRREWGKRIDDYQQLKHQKERTDQDEQDYENTVYAKVRTGNVRAALGVIRNRENRYGINVNGETYKTGSTKKAHRAARGRTERNISQGIGKTADTEKAKKENQNIYRGHSHNFHEGRAQ

SEQ ID NO: 1002460 - protein, 171 aa, Homo sapiens
MVLCAPVLLLVAPPGCLLASAALPASACLSLPLPALLGERGAWTRPLAVWPWAERLLDTCGCRGADAPALPPGMDQCVTVERRCLEERCCTSSQGYGQLCERGLEELIDYTELVSMHEILQSHGQDAELSGTLSLVLTQCCKQNKGYCSHNWPPTTKDIHSSVSRVGKAIE

SEQ ID NO: 1002461 - protein, 316 aa, Homo sapiens
AASTGREVGGSKALKATECAGRSVSRTSPTPPPSLPWPPTAKFRLRFSPLQSLRRRLGTAAPPSLRRRPLPLGSAPCRVRLGRAPRQAPAMSDACRSIMAFTQRARWRAVCDGYCKHRRNTCELPGPAFPVVHCTDMRPTCTQNESVLQAKAGGRLSTDGTFRELYKILESHQFSPHNTPTAATVADRRITVAGEKTARTNPWSPWATYRAAPKISTAEPTSATGSDDQDTWPSREHVRDGGPAAAPASTTPHLPLHPSRPPCRHPRYSLAPEAPPGHITPPPPTVQPTCITNEHRPAPTHNRDHTQATGHTSQPT

SEQ ID NO: 1002462 - protein, 351 aa, Homo sapiens
MRNPKSSGSSRNPTTIDPQLSAKGPCRQTMLLDNMLSHDPAATSTSSPRKPYIVSHFDWQLALTDEQTSLSPALPELTQDVIPQLVLQLESWTTYTDWQPKVDVLTVGLSPRSKLRFLLFAVHLHAVVGSTRVQYRALSGMLATTWQQQQVCTSPVEFGHSSIRTPMSPGSGTPRCHTRPFKVPCSAGHKAALGPKSFRDAVAYPIDLCKRYPWHEERSIRNETWPPKHAGSNVTFSNFDFLSICSIPWGPKRPRPHWDGIRDLYQGSCLVVDEHMVTFLRAYLTTASLPRHYNRGPTGWAKRVPYQGCRIDLAGKGPFLPQETQNPRFPPTKGEPNAEGARKLNLGPPYV

SEQ ID NO: 1002463 - protein, 350 aa, Homo sapiens
RDVSQRVLRSTDMGSLGLSCLVKRMSAEASLGKVKHAVLVRHDSVRILVALFTVTSMAITEAWTSDVDSLCAEVVQAVDPKDESEGEEVVGTAVTSCKKTPPSGGMLGTCAATLEDALDGLQDRSDELSIACSTVMWMHMQGRPFPIQRLGDTHSVRHEGSLHNDTCKNMVTVLRHGERKRAVDERDFMQALTECELPKSIPLSIAAALQDAALASLWRPGMNVPHLDGVSEGELGGILCAEKSWTVAQRRGVEHARVPVNQAVQGRMRWIERHQSGDHMGQGLPKGEHQTYGHTKKAAPEERTEGCAQVAWSGAHGSPAPCKAILCWHGAWARKGLTIHPKLRHDQNST

SEQ ID NO: 1002464 - protein, 176 aa, Homo sapiens
PGAVRSASRCGSGGRGSAGGGRADESAETEFRHVGQAQFEIFEDILNVGSAAMKVTIKCWNGVATWLWVANDENWWHPARMAFRRMLACCKVPRQTDLPCLVWGQWFPAAFHMHCIALSGCTHSEVQQQLPLVVPTGNGKFKGVMAQILVSSLGGGSPDDSFLMLWRRWLLGDSAT

SEQ ID NO: 1002465 - protein, 129 aa, Homo sapiens
AFQGSGCVIAHLREKMLLVSWRTLVAGEPRSDTPDICRAWCTDGLGGPPQQLGPGPTGHDPPPSATWQSPPWNEIQCVNSGLREVLCTVWLLVGVLSMWSDHTTDCGCPWIYVKCRMQGGPSKKYKGIL

SEQ ID NO: 1002466 - protein, 384 aa, Homo sapiens
  misc_feature (334)..(334): Xaa can be any naturally occurring amino acid
MDMHGEGVNIHEEIAGGYRGGATAPGGNPCATTEPRIITVICPRNTVTNGRLGSFVQARSYGHHALAHEFGRRDNDHARQDTHQSGKMGSVNHPPSRRSSIHYLNTGENPLVDTEVRKQPFRTKMLHDTAAQDHYTPQGVDNKHANLTVALYYNNHLGGTITVRVASKPKYLRQTVEKAHHELSPPPLPQGEEMTEEHRKVVPPRVIKTPRCEHGYTTKTSMKLGPPLENRERPRRKETHTKSGKDEEHQPSTRVRAYQDKEHRKPPQKYSGATKSNGRAHRDISTDGQRMPPHKQRIDTTGRGTNRTDIKEEEIAEIPSETTNGDPEQESHTXKGTTTHKQHPAEGDNHKAGDRPPRKNIEKDPERTTYTPQRERATQREYKE

SEQ ID NO: 1002467 - protein, 268 aa, Homo sapiens
  misc_feature (169)..(169): Xaa can be any naturally occurring amino acid
MSLVHISWDCLCPRNAQMAPQKGTPMCLYKAQLLHQIHSNGPRCETSSSPPVTLLGLIDSLYTRASGTCVRDTHRCHSGGIPRANRCGPSSAARVCPVSQGKGPKDRPRLLHWVGALARVVRGLGRDTPHLGPGQPRTMRSQSPHQTGPTTPQSAIGETHPQNKGTDPXSDHAAGHPPDPPGHPPHSKGPAPGRITEEHQPTPSAPTANTPTQHTKQTPRGTHAPSAPPHTQQTYNTPSTQPGPCPHPAIVTPNQQHKTRAPIPSSRN

SEQ ID NO: 1002468 - protein, 245 aa, Homo sapiens
  misc_feature (213)..(213): Xaa can be any naturally occurring amino acid
MRPSEPESADEETAGAAVVLCGLGVLCVRAVFATLPAFGGCDAPIVGQHALAAEPDRQVAGVFLLVPRDEFVPGSETFVVIGNGEHIAGADIAGMETLFPGHPFGGQKCVGTWDEGDLVDRHPRLGLRQHARPLPSAVAAEPGAEVVRRGVLRLAGDALVLPDGRPARNLGGSVPGQRDSAGESFADLATASLHAGSLGYGCHVFIMNAGVPXPIKLAGAGPASRGMRHDLPMRHIADFVPSPRL

SEQ ID NO: 1002469 - protein, 42 aa, Homo sapiens
MKVEESKGLGLVSFERHEDAQKAVDEYERKLELNVQNNTLCL

SEQ ID NO: 1002470 - protein, 160 aa, Homo sapiens
MAYEIFLAHDKIWFDYRFIDMTTARMGDSTQRDDTVPCGMCALARAKGMNRRPAMIRPVEHWRAGPEKNSPGRSSGLVSPLRSLGGPPADIASGDHGEHRSSGLPCLESGEPEFCVAWYIDAVRRTISNAGGPGERAGRRARLGTGPRYPTDRSYVSSHA

SEQ ID NO: 1002471 - protein, 238 aa, Homo sapiens
MARASYTRYATCEVILGARNSLDSNVHKEIVVAERTIKIGLIAREGLGKAMGSRLVSEGERKGPIARENALSVASGLLAVRRAQVSRLTLVIGENSEGTSEGGERAIRRGILGPPDRTLHWAQIGAEPWVGDTMLWWTQVGSTFCFGTDLRAPRHTRRTPWLPLVNLPWRRILFLDPIGDYLWKGTGDMAMRSGETFDPRFPGGGLGARSVHGPTGDSASVKGVPPSLVALGMSWPVT

SEQ ID NO: 1002472 - protein, 123 aa, Homo sapiens
MPKMELHSYVVAVAIVLSTIHVTFLYDVEHGGYSAIRYLAWCDDFGDLAKYICDLSLYAPVTLADFIYPTMITTWIIIESVTCCVLLNLMCLSGCLRCKLCKRGSLRNRRWCEEPQMLAMARS

SEQ ID NO: 1002473 - protein, 204 aa, Homo sapiens
QHFAIYSRGSRGGRKFRPLSDAWVGRSEDRAAPSLEDMELLSPPLRDRMTMSGPRGISLSSLCRHSGRLAMTDPCCRLPGPALSSKTLDPDSLYARGVALLETLKSTRYFPGGRVTSQDAPEASAVQDGGNDAALPQAGTHSGRAAGLTVGLQECAMRKTTNADRRKAATMRERRRLSKVNEAFETLKRCTSSNPNQRLPKVEI

SEQ ID NO: 1002474 - protein, 35 aa, Homo sapiens
MPLALAPSARGSGALRGPPFPRGASQAGLRRASLP

SEQ ID NO: 1002475 - protein, 365 aa, Homo sapiens
SLPRERTRKRLCLAFYLFYPPFPLTFRILSLYILAPTSNQKTNFTWRGGKPGKGTETRNTQQEREDKSRNTERREETKKGTEKRKRKKGKEERTKRERKDKREEGKKKEEEGGERDGGERGREEQGKRERGGGEDRRAGEGGRRRRAGGGGKGGGGGRGGEEGEERGGGGGGKKGEGGEGGEREGRRRGGGRERARGRGGGRGRGRRRTGRGRGGERRKRAGAEAKGQRTEQRKERPRRRRGEGEGGETEEGGGKGTKKRGKGRTEKRGEKGGRKGGGEGGGARDEETGRREGGERGEATERGEKRERTEEKRKKRREKREEREKEKEREEEKGTRKRREKRERKKEKKRREKRTKRRKEKKKRK

SEQ ID NO: 1002476 - protein, 344 aa, Homo sapiens
RASLLVTRAWLELGWDPDARAAAAAGAGPPAGALGGSEPRLAPGPTRKDGVGDADATPVVDCSCGFPVQEELRLELDDELYDTERPVQKRARSGPQPRLAPRMTCCPCSREPSCFQIVQLHVATCLPSWCPMSSWSPRSGGRAYRGPALPYRAREYTCNVYPSREALAVLEPYARLPPDKQCGSATEVLAGTHGPLSPFSLVTHGDYGKPGAEAASVSLEPEAAVLFQQMATRLAALSPAPVWSCVISSCVALSSLTGDRKKLGAWRSLEDSCCDWGQIDSCGDKHGVDQPSCDLRYSRQGASYSGKAPRLGAEIAPLHAGGISFRTELSVYRKGGGTLLGLAC

SEQ ID NO: 1002477 - protein, 315 aa, Homo sapiens
MFGQIERINEGARSGKVRRREKLRLMETVVKTCGKKCIEGFDEYGNGVQRQGAQETYWKGLRGGPLVSNFLILDLNWPTHEYCFAHQGPDEYTPSSTGLRTCGSADTEKKRNRHIGLRGTQEGKSDSDGEPPRKMQTRPRRDTCHRQGAAHGKAPQVHSEYRHNGVAKWREDPVRARGRPTVTLRKGPGYIRGPNGVCPTNSDSDPQTTPRFHRTRTRSQLPPKMGGEQIWKREGGESFGAHEVAIAELDNTRGKIGGQASTGPGGHGARETRYAHSRPQTPGSAGDRSSNTAAGSMRGDTKKLQETRETEGEAP

SEQ ID NO: 1002478 - protein, 163 aa, Homo sapiens
MANTDRQHRGGEHKNSAPVVYNHRNKQKDNAPQVVVSSRRGNNRTTINHLSGRQRQVGAQHDVSTNSYTKGGLMKEGPQLMLQPEQNGMKIHAHDARGSATQQSGGGWEQLVDRDNNGGPIGRHKHQPRAPTKEAAHLGAYKKQRITPQRKHRRSVDTVGVVP

SEQ ID NO: 1002479 - protein, 206 aa, Homo sapiens
MVDYVMPLWRDFSNGPMGTRAAVVRAPGIRGGQKGGGVTRNKSVQGEARRKRRECLGEEGTSPPGVDQERGFDLETPTGRVGHPCARRHAVLEPRKRQEWASPSGLVVKPREGAQIEEGGGAQGSQHGFHLRNTCEGDTTLANFPLSGEPTDLVHARLPIKETQWPDLIYPHKTRSPREEVFGGRENHLPIVVGANTVRRDVAAPK

SEQ ID NO: 1002480 - protein, 140 aa, Homo sapiens
MCIINDISLQDDMASEGEVCQSTCLTGQGGMPANAFREKLSVPIVERLTNLHDECTVQHTIGKKLMTVRYRQCMRFEDQYTMHHQAENASCKVLSEAPVIKHVVPRGGTPGRHLALRTETVENEQRLVDCGHAPWQPVMN

SEQ ID NO: 1002481 - protein, 168 aa, Homo sapiens
PAFPASGRGSASVPRFFLFFPPFPFLFMCRTVILSPIPRRGPVTPSGGRMQPGAGARRRRSTTEAEESAKRERESETGGEEAEEEQGRGRRQGGERGGGGGGGGGGGGRRGAGGGRGGGAGSGGEGRDEGGGGEGVGQAGGGGGGAGGGGSGGSGGGGGGGGGGRDGG

SEQ ID NO: 1002482 - protein, 120 aa, Homo sapiens
MGKGVKGGDEKREESGYRGSPSSMLGRRAGRNSRAQSTLRLLSLKEKSQSQNVWVLPRGDCERVVSKEGGAKNSEELSTLGRAKLWLSRGAINCVGEDSLARHSPAGIFPNKRREISPLV

SEQ ID NO: 1002483 - protein, 115 aa, Homo sapiens
AGFAMAANSPRFLAATQGLLGDYHGNHCAGAVTGTCMLQRPVMNFAELGSARGSLQMAAKFHRIITDFMIQGGDPTGTGRGGASIYGKQFEDELHPDLKFTVGWNSSAMASEPVF

SEQ ID NO: 1002484 - protein, 144 aa, Homo sapiens
MAGECSSTPELSVLFRRWPLMCPAWPGWWSYCPGRPAVALLVSVCACLLADVLSAGPAAAVWLSHALLCMMCCPCGWPVCPRLPEMRLLSCVCLASGCASPCVPLAVLWNPCCCVLWSARAGGSVPWDSGLGDQEVPVACARTR

SEQ ID NO: 1002485 - protein, 76 aa, Homo sapiens
GQQSHGGRPDVLPQRFKRDCHSTVHCLVTIECLYDFNKILENRYDPWERPLQKLVHEKILDDVAAFGNLDWKVAKE

SEQ ID NO: 1002486 - protein, 59 aa, Homo sapiens
AESEMCNPMRAREHDSDAGGAELYVTHSSTPGRSRSVPGSVLMSASPGSMSMDGDSAGV

SEQ ID NO: 1002487 - protein, 322 aa, Homo sapiens
ASFSLRPPEHQCALSCPQWSLTPPAAGPFGGRNDKGRLTSEDVYDFYRTTHMHMKPSANTVPFRALNHNTNKQSPPQLFYPRPQTNLNTTLYNNTQSINNNTPQHKFTNIIHQSQSPIPSYYHQEQSTHTQTQHSIDISSTMHPLHDTSSEYQSLTHKRNTQDIHTSLDDQENHKKHHTMHIHNQASQNVYNPNPLIIPHSLSLIYEFTTCHNPHITTHHQLLLVILIYEMRDLRINGGKRCEDDFRDKEERRCGRMSEHDRGDALTSRRTVLASKQTHRAQVSERQAQTRRSRGTGACQRRSIHMRMRVRVGVAARNSAGP

SEQ ID NO: 1002488 - protein, 230 aa, Homo sapiens
MACSPVQRGLLGGYIPESLLRKRSSRGKPDSKSWTTWDPSHSATGAAELDLILPSRHYGKSHSKIPGQGPMRRLERDEAGGRDEDNNLELVQEILSGTWQQLADAEQAQTAETCAHILQEPHFQIPPGDARLCGLTRPMRHQHHRPGLDPYVQQQTCTLPNAVTHWLVHSRMTARRHNLEVVTVHAVRRAAMLGRYERHPCNGSTFQVHARPADMVGTSIRRITGTMWPD

SEQ ID NO: 1002489 - protein, 33 aa, Homo sapiens
MPRQGHVRIKVVLFREEGATLAAESKGLGPLAQ

SEQ ID NO: 1002490 - protein, 105 aa, Homo sapiens
ERISSTRGQWWLLHASAHTMLTPPLLLLLPLLSALGLLCSAIDDHLKYIDSPQGMFALHEVSRNKTCYLQEGAWSVCERVMHGTCPMNGILIGVSSHAVILSSEM

SEQ ID NO: 1002491 - protein, 173 aa, Homo sapiens
MAMDLTRDKMCSMVKNTGRQGWNAHVDVKTYRWLLAFVCPREVLTNKNATIRYRKTSYAQHQQVRQIRKTDDCHIMTREVQTNDLTHEVVTETRFQTASRKDTRPGLPIYISLSMMSSLSNHVTMLKKAQVDSGKLMAAFMVNGQEFCKSHWGRRQVPQLNDLIASAHHQFQE

SEQ ID NO: 1002492 - protein, 93 aa, Homo sapiens
  misc_feature (27)..(27): Xaa can be any naturally occurring amino acid
  misc_feature (29)..(29): Xaa can be any naturally occurring amino acid
  misc_feature (32)..(32): Xaa can be any naturally occurring amino acid
  misc_feature (40)..(40): Xaa can be any naturally occurring amino acid
MREIVHIQAGQCGNQIGAKFWVRRITXDXNMXYSNPPTGXPTTGNSDLQLDRISVYYNEATGGKYVPRAILVDLEPGDPIGETFPWVFPGLSK

SEQ ID NO: 1002493 - protein, 191 aa, Homo sapiens
MAANQNHPLDVDLKAWFPELAFCSLCIDLGSLVRMAIRALSTATHAILRLGKQPRGWTGHESLSAHVTPEMWRVAAERHNGRRYMSVDSQLYCALHRTSLRERTCSRQACGVPYCPPGPLQVSSLGLSDPSCGAPPPVAGVALTERAAASPGGPCAPPYGRVWYDADGCLLLSPAHVRVPAAIAVPSTVPV

SEQ ID NO: 1002494 - protein, 32 aa, Homo sapiens
MQAAHCQTRFNDGILYGSTVAKAGFANSLPSF

SEQ ID NO: 1002495 - protein, 91 aa, Homo sapiens
  misc_feature (4)..(4): Xaa can be any naturally occurring amino acid
  misc_feature (79)..(79): Xaa can be any naturally occurring amino acid
  misc_feature (84)..(84): Xaa can be any naturally occurring amino acid
AYFXSCFPAAAPPIQNFGNGGGKKNFRVGQPFWPRPVACAGNQIGAKFREVISDEHGIDPTGTYHVWTCDLAAWNCINXVRSNXRPPCVGS

SEQ ID NO: 1002496 - protein, 218 aa, Homo sapiens
MQSKAPTNIVSKIDDMTAAPMDVRQWVDTDDTSSEQYTVVPPETYVTVAGHLRSFQNKKSLVAFKIMPLGETMNEFTTHILECDQCDTMVLSKANSQPSARVDATYQSTPRTLSCKHAEPLCVRDIRFMPANWPHCGPKPRCCNFDLTACPRPARVELFSDLKNQLKHMSVSSIKQAVDILSNERAHLFYLWMMTILNPQMQNNWHLNWVPEIFYSWT

SEQ ID NO: 1002497 - protein, 254 aa, Homo sapiens
  misc_feature (106)..(106): Xaa can be any naturally occurring amino acid
GVVAVYVTGRQGQPAHRLNRCVCAVACPFLTLASAVSSLAFSDFPAPLLPSFLGPRPSSPPAQMDVPVPRKNACFPALALHACLLISGTGFLPSRLMSPETGAGSXCPCWWERPMCLPDPAGNCRCFRPPREARQGWMLPLCGPTSPLVNTSTPWGGASFGAPWHAGLCAFSGHRHTALVKPPFRTPVRELRPTPPDRAPIRLCEGLVPGEPRNLGSPQGSPRDLPKEFAAGPGARRFDIGPVPEVFPPGGIRV

SEQ ID NO: 1002498 - protein, 235 aa, Homo sapiens
IVTNCDDMERDLAPQPSTTSCGVGPGRSTQMLLTEVPPEPQEANREMMTQIMFETFITPAVYVAIHVVLSLYASVAATTWHCHGSLETGVIHTGARIYRERYRSSRHCHPASVTWLARGPDRDTSGRSSPERGYTCSPPRPTGKSCGRTSRRSCATLAPGLLRQEMGTARILLRSLEEEPTRLPDAPLVIPYVVNERFRCPEAAVPTLPSWSMESLRNPRRPPSTPSWKCDVRHP

SEQ ID NO: 1002499 - protein, 86 aa, Homo sapiens
SSLGCVTRVGLLLEKCRGYRQIVTHYILSARIMVWCRLVTRHYGFLVYAHMGEPRETILLSYTLRWPGHRATIHIEGLLECECHAR

SEQ ID NO: 1002500 - protein, 228 aa, Homo sapiens
DSCEVEPEEPGWRRTSTSPAVKSKQGKKEAEGRADAPVHPVELADGAQPLSSLAEVLMVEVENVVHEDFQVTEEVKALTAEIVKTIRDIIALNPLLQGSSVLAEELQRLAQRVVWTTHIYLSDMGAALTGAEVPLSLQDVLGMRPIFLSGCTRPFSLLKKEFELSKLQQLPGAGGAGEDQCQTHRTIPCCRDQLQDHQRRSLALEKGRQGIAIRGRSSCGAPDGSSLL

SEQ ID NO: 1002501 - protein, 154 aa, Homo sapiens
MIVPIYSDYDADTGDSDSEPLKPAGSETLHPWSVLVHLLGHLAPVVGSILSVEKPCSQRKQQVSISSPWDSSYSLTLHTGEATDYHIGNQYQREPPMIDGLNIAPAREENTQRSCTPRDTSDAQKAKGLRAVTQTRKDFHDGATFLANNTISSA

SEQ ID NO: 1002502 - protein, 136 aa, Homo sapiens
QNELGARGPGAASTIRTIFNGLCDIIMLDVISKSYLQECAYLDRIWYDAADKTLPNGVVVMKQPKVRYLNGTRNTCRADPIPVCLSDAGQGRRESLSYLTEQYIVARTGKTYTETVSTKKSPVYTIRCEHYVLRGT

SEQ ID NO: 1002503 - protein, 339 aa, Homo sapiens
GVEVARPFRRGELALNDLGPLVPQACLQRRGMYAAGGTCWSPSRARPARLVYHHEGDLCPLGLRDPKPFPKLNAAVVFDVYQPRCLPTNGSVVAQGDLGLLASNREADTGWNLALNCGPLLRRRRANRVIANPPKADRKSETCPVPQEEEEDGAGTDTSPCKAHTPWRNACERALARTQRPGHGTVGTGPSPNNEWWPPCDCAITAHQSYIPRNTCVSYDTLPTSARLAYIGATVEQQRTHSTRGIINSTRTLWSKPRAGTPQYSQLGLHWQRWIVNLYQGDEIREDRQRPSTNPESYSAPTRARPQYNQNTSGRPEREMTTLYGIHVRPSRTSTLSWR

SEQ ID NO: 1002504 - protein, 335 aa, Homo sapiens
GARGARAAVGFPRARHVDLWLLGSLVLGLDLRMGLGPGLLTAAAVWCAVSLGGRSSPPRVPRGRKCILLYTPSPVAGHVAGGVFLELAVLLTGVAPGSLSPRDCVTRQLALVARMLSFFMCRFIGVAFVRVPSLDVGTAVTPSVQHYTLTRLCNAGDSYLPHGMSVDRPPGGPREGLLGVVSPEVDATPSPFGREPRFGRWALPYGEETTFQGDGSVGYPVDSACYLGAHVCGCKLPLELTRTESVVGPCRLSRFKKGVLFAPRPKRGNAARLPLTGAARSVLLAYWVPRCQSVGVLHLEFCAIGERPGESFHYRSDKPFRPLGLRWEPFGGPLR

SEQ ID NO: 1002505 - protein, 75 aa, Homo sapiens
VINNTRGVLITWGKQCKLSLTLLMLSSELGYESSQGAGGMVIRKSPKYALLSLGGTIGDIEVTAVLWRRLHNFQF

SEQ ID NO: 1002506 - protein, 107 aa, Homo sapiens
MLCLGCVDSTNSSWDPGCMTCGISVGNNAISDHLFLLTKDLHHTGMTGEYKYTPVDQSLVLCIANSGSMSLRIMRYKYESEVRYENAWEGTEVYSELLGHSKITDPK

SEQ ID NO: 1002507 - protein, 366 aa, Homo sapiens
MTLKMLQNWGGMMEKYYGMASSALRKSPMMPENAENEGDAFITIYSRVFFTDMVIAIRVINNWLIRSCIFKRPSYVKARGENASCYLPPTMMHVCKPTDVLLTKIAMEAAIQGAYICVTISLPVGLGSDHRTPTEHAFSLCAIDTFGKCMWTQTIRTLKTHGSGYPVYPDYYGKVDHCNDVVECDDKGTQSRYSCRITELTPHMAGQTARIKTTAPTNKATEYKKSTDGIATAQRPRTHNMVKSRNQQMTDNTGQNTPKKGHRPRSQKQKEQINRRRHKRHTTTRPARHARNPQNKHGETRRHHEDTDPRADPYRPNAPAPHETNDTKQGTQQRDAKTDDRPGTPRQQEKMRTGEKHKAQNKRHRT

SEQ ID NO: 1002508 - protein, 281 aa, Homo sapiens
FVSWMLVRKECENCRLPAGLPADPLAGRAARDSGMGTLLISNVREEYPDRIMKTFIVVPSPKVVRHGWWSPTIAKLSIHHGLVGEHGCRPTDIARIEALYDICLPRPSKLATPIYGDLNQLVIGHHERSHPSPLCFPGQRRTLSLRKLAGLTMVPFSLSLHFFHARLRTPSTGRGSQRVPGPCSVPELTQQMYDAYRYYDGRLRPRATARYLYGGHRCSGAVLSSEGRWTSRMLVYPEQEAARKLRWKWIPNYVTMWSGVDIPSPGLQMYSTFHRGTVRAI

SEQ ID NO: 1002509 - protein, 380 aa, Homo sapiens
GVQRRVWLRLLVNLKEAEAKRKTFLRHGDDAGGIALEWHDVLDAWAMTAAAVEEQLWNSWEISNGATCEHLSVNIWGDGISEMTPYDLTRQGMVAMEPRMSRSDCLREVLGPHSAQPGDRLEEDEFPGELPKRNGSIGLATSGRFCAKDFCLYQDVYKNVHHRGMKQRVYLEIDSYTISGMTVPLIEPGQAQCLAACTGRGVPAWLLPSNGSPRGDPRETTVTDPLPGAPVAGWAAMMPAGALDIEDQGEESPFDNRNTLRKSKTPKKAWLRHLGVVRDKCLGKKEHPRRNTGDPAETHKGDHQIWGFQRQQIKLTETLGSSQYSGSGPGSRITNPKLFNLKVKLPPRGTLGPGPPWCAPRKGIAPMETQEQLTQLNWTG

SEQ ID NO: 1002510 - protein, 225 aa, Homo sapiens
YRGSIHDFPGFDTQQDARGSVQLTMNGLLVSDKEAILDIIDLDVDNSARGRRSARVYKSLYGKDLIADFKYELDGQVGTVDMWSLNEGQLAYSDAKEIKDAISGIGTDEKCLSRDLGFPDQLSRCTSWWQHTKMPTSGNLEADINGDTSGHFQKMLVVLLQGTREEDDVVSEELDNRMSRDLYEDRGTEMGEQMKPSTEYIWEIAAISISGWSDDEYLKNHREDR

SEQ ID NO: 1002511 - protein, 305 aa, Homo sapiens
GACVDVPAGAGHVLSLMPDACCLSLRLICHPGLVQLAAAESLLPVLVLLALAVCHVLAATAHVMLENICAEHGVLLNGPGKCGWCEICKVLISNEMACRCSSSRHIMPVLERACGSASSCDYHSLLLMLAAHWAPACSREFLCHDGLELEAAAVAFLWMGVAEYEVTPDDNAEGMWAAANAEFSEPHWVLTSSLRSPGQLVTNCNPAGWSRVPAKTFSRNSPGLSHEYLMRGPFADYLDSIYFNRLLAVEVAWKGSQGPKTPSGNTEFLGKGGFGEVCALPGAGTGKMYACKKLEDKADQEAEKG

SEQ ID NO: 1002512 - protein, 363 aa, Homo sapiens
MELMVTCGCRVHVSVEDIGRRREVQFAHRRPYLKVWDYASSRKFLCKMDLQRLPDLERPQRAPKLEVRMHVAQGPTIGYHSTSADIMNGLSETRRKDREASRRLRAMVVSGGTSEQLFRPDKKEIEGGKTRGGLSIILRFKRADVRKLGVASHEPLTIGGKSGPWSDFKELHVWGPTGSNDRRKGSVRTNRGGCPGGTFTQSLHAWTSLYPHLYFLCVKRPPSPWVVLIGTQPLGIVPLCRAPLGVAFDIMGLDSQNGSTHMAIHVNGSLRERHPHDVLHQPDVIRWAIVQLVHTSRGEIWTGSLEDNKRREGQEARGGCHRDLDCFVPNGPGPLVYCHCLVVWHCANPGGYKGRRVGNWTTP

SEQ ID NO: 1002513 - protein, 340 aa, Homo sapiens
MAECFGVPGRTRAPLVADHRLFLATFARARSAPNYRNIYVPDVNQAYIEDVTDDSRESESESERDECMSLHKRGHARTAERTSDYDNTWAHISPHVILITHMLRDSATDSSICLSPFQCSTLYRMSELPSGPHTCWCARQRRGYETSKRQKKEKLMADAKAGPEILGHRQRTDPAQTHRRTPRTKVPACRKLANPRNNEDAPHATRGDQTTKNQKRRHHWGEAKTQPPQLAQWKRGKPARITEKESYPGKRTRSLPNYKKKKTNQNKIHKTKETIGHKSMTVQGKHTKSALRTWRGGHPWTKKDTAETQEQEETEKGSNTRKRTRNKDTQAKNEHKQRET

SEQ ID NO: 1002514 - protein, 306 aa, Homo sapiens
VRRRCGAAGLLGVLLSVPGPPVLYLEASEEVELEPCLAPSLEQQEQELTVALWQPVRLCCGRAERGGHWYKEGSRLAPAGRVTGLEGPLEIASFLPEDAGRYLCLAMRLMIVLEILTLITGDSLNLQEDDEDPKSHRDLSNRHSYPQQAPYWTHPQRMEKKLHAVPAGEHRQGSAVQVKGKPQGHHSVGLGCQGLSWGEPIGGIRLRHQHWSLVMEERGGLGPGHTPAGRRTLWAASVIVAVMCLSGPPTANPAGGLRAHHSGWAARLSCWAGCKDASPLQGGAHRITAEGRSQTVPFKFLDEDKV

SEQ ID NO: 1002515 - protein, 441 aa, Homo sapiens
ARLFPVLWTKMGNTLGLCTKWVTLPLPVSPLPRVNPCPTLCELRLMRAPVSAKTQQCQVPDMACLLGEYQGRRLHSHSDPSEILTCFGESVIMVCSLPARVLIVIWLGAGESEARFITWRASAKTCVAHLMQQHVLVNSYLVLEHLGVRQYRLCKSYGGQSPSACGARPTVFSHVTANLLHLVSRVTCRLPGCISSELFCDAREKLEWSRVYEMAGSSHRYRCVVTSCGAPTHTKLWGRIRRLRCRADLPPVYAHGWSRYEFPPARTEMCARALVPLCPESRVPCGRIEEPSADASPSEDTHPSRSLTRERQRAERPTGATRPGRPTANAARHAATTETAASSQAPPRQPDDAARGHDGARQRESRQGCATPGAPARESAERTDARGTAGRGRAAPSTTRCHQQGGATADRAGAGAEEEETAPRTRGDGDEGREGGRGAGG

SEQ ID NO: 1002516 - protein, 506 aa, Homo sapiens
WKQWRGGVLSWRSPTASWVERELTYPPAGSCCDDYVAQSIGRQVECARSCRLVGVLLRLCGRAARCLRHGLKQQWEQLDSQRSVGPDDGTCPTSMRRVPQVRSIACRMCGIQAGAAQGENDVRRDVRLAISRPKIHYGSYGLSCPFRVDHMKPEEVIPYRRTPHGRLVESTPRAQGKYRGRPLVTHSVNPIRQRFRQQLRYKANPFAHPYVRVVPLQRLYPGVTQGSPWKGRVVVNRGPLLCDDRIYHEPKLAGGCGAHSVGACLLAAEISRPLEPIDNPQWGVQGTFLRWGPNLLVPKGYCQARSWTNGRVNNGVVAGHTRYGTGADLAPGKSKPYGTGKEIGTGADTQGITKGLGPHGNGRDLGGERGSRYSKEVRNATRPGGQWNQCATRRENSYDNKAHACRTTPPELYIPVGQPVQLVEGPDRVRHVPRNSKITPVGGRFDRGIRPTGNWSATGCIKNLGHKSMSRDRHRTDSRGISEVCASVTTCHSHRSSQRPVFRKRA

SEQ ID NO: 1002517 - protein, 401 aa, Homo sapiens
MLKTSAWTENRYDVNRDETHSSDGFDTAIGRPNGGNLGYGHRKKWMAYTWKKMVTENPRIIAGGYHGWKFPYLASSSFPCQVKSQGTDIEDNHTIVANVDRERKQNDKEENRNTGSGMLDGCFLSFTNPGQYDETNQTHKLNVLVGWHGSSCGNHASESLIVIVVSQWDCVDSSNGNRANTTVWNLYKPIRVIAQIRYAKHSFPFTIAVLTDTAQAGIQSSDYTRVCKIPLKTHDVGSHPNKDTRTHRLGQQKRQTETRTPTPTSSRHVHTSRVSEAPHPILWRQLRANHFTLAFLERSQPWPKRTPFMITQCLTEKWPGWKHEVVYSPGTKRFPMLFPPGHRNTKRRTSQGQEPSALKRKRLKHRTHGDTVDNNGKQAGTGGENRRLGNDRTAQEGDAKQ

SEQ ID NO: 1002518 - protein, 351 aa, Homo sapiens
DKAPGLIMQTGTSAKAYTNVSGMERAVDGCCACDAGCYYDPCRHHTDGTRNHMNDSSLTAHDVARVPVLDDLLCLNLGRYGVDYLTSHSCSTVDKSIGSIALCTDCSLPLERTYRCTQLNLRIALSFSFNRAFFQRETRPDTVCTRVLIVHAIARSFPLNIYYPYETNPTLIVGLGPPPKIIKSGLGDRYVVIAKGTRGGPPLRKAPLNHRWRPRNRPGKTEGAHRVENSEQAFVSLQRKGLFRAPQLEKGQIGERTAMAVGRKSEPPERTVGRTTRVRTPEAKPKTVDLLAGGKGKPGPLRSPALVEKGLYGDRSIRPPAMSTVRHREGHHGSRTPGAGRTDKERGGAPY

SEQ ID NO: 1002519 - protein, 179 aa, Homo sapiens
ASRLNAVLRYLETQPRPPKADPSEKRVQRAQQPDARQGGPRYPNKRLPPSILGKRSSESAATAVDGPGKPLDRPGNMWTKGRTPPARAGMCQPASRRCCLDPVGVAPLAAEVNACGGLQTWTRRPRDDLCSYSGAPVGGPGEESGIGCSSFRLEDLKQCVPQPGSIAEPHRPMRPEGQA

SEQ ID NO: 1002520 - protein, 90 aa, Homo sapiens
ELAFQQQLLQMQQLQQQHLLNLHRRGAWISLQPNQGLGAPPDPSQAAVCPTDLHQLVERGEGAPGQTAEDSVKQERAGTSLATGRTPEYT

SEQ ID NO: 1002521 - protein, 204 aa, Homo sapiens
MGKVSVLNVAVLENPSPFHSPFRFEISFECSEALADDLEWKIIYVGSAESEEFDQILDSVLVGPGAKQGDTCLSFRADAPKPSLIPETDAVGVTVVLITCTYHWTGVHPSGATTVKQRSTFKPLRLAGENPPNASQDFIPSSKAETILGRRKPTGVNPDFQYQTGDNKHGQGWKAEKTRSPPWAAASNQLHSYQGLGGSLGWNP

SEQ ID NO: 1002522 - protein, 268 aa, Homo sapiens
MHSDCRPVGHPRGPKELFGHNKSRVLGNVWWTCCTRRNFGHNRWKTLGGYENTTFGAQMKKATPVWRKEQGAQHKRFVRPQLFGAGAAKQNTAPAERGTTNSTQPLFARGQTKAHDYSSASGRHHTQPTRTRARNTKTAAPPPPLCWVEDSVVTKTTETLDLDPPTSYIIRGGGRGRPPPRTPNHLIGGAKKSEAENKPQIKARRRRGGNNKHARWISQNNWGGKDEMEKIGKEEHKATNYRNSGSTTNKHTRRGADKKRQQKTRGRE

SEQ ID NO: 1002523 - protein, 85 aa, Homo sapiens
DGDTTILSSLHLFILSSGTSYEAEEKARSASDQSGLSVTWSSVPKENLPRTEYSDSVWSSSYGLGGMVEEWRVREVHEIKCGPVS

SEQ ID NO: 1002524 - protein, 286 aa, Homo sapiens
LAFPASGLAGRGASRKMVARCGVWLPSSGQVSALLDRPGVSLWLEAHYPHGVPEHRARTESGSRYASTPVMGNIAPRRVVSAVGGGAQETSAQVDSGFQVTSEEQTSAGPAGNTTHVKCTHAFVSTHVQRGIKTMRCGNGQWRNEDNVGLSKGKDPCVMGPTCVKGDHLLADLESSTIKQNTPDQVEEPAAGGCSPCKEATGRSMEDVNCIVPTGPFKFRMNRCHRRGRARGTPSFKEGGTDDRRLATERDSRRGGPVTRGNTGVETRGRTVETQSAPRGALGPWP

SEQ ID NO: 1002525 - protein, 68 aa, Homo sapiens
LDIRKNPLIDHSMMKAVIIKRPPEWKECQIDEYQGIRSPSVNGTIQNCKADKENYNSRKWSQIGISYY

SEQ ID NO: 1002526 - protein, 312 aa, Homo sapiens
LFLSSLCLPRCIKVSVVTRKLLAMPIDVGFPPGSLNYSYLKVCGRKWYRLSRRMGLNVEGHIDYTDPQRMLNRRSLGARRVMQQRANVLMRSSRAFRTVCSSWAIQHGQLPAWAWTTRLNIKTVCTYWEDFHSCTVTALTDWPWNGAKDMWDKLEKRIQETSTSKAAYSNSAAAATGRRGPCSRRSRCSWCLSRQDYSDLDFLLSVGPAPPERQPNSLHAPEIERKIHKFYGDVVILCDAENTHIGNSGKSMIHTRTVPTETRSKIGQMLQTGRQASTGKNRDHPEYKSRTYHNTKFRKRGKTSTIVKHIHH

SEQ ID NO: 1002527 - protein, 160 aa, Homo sapiens
  misc_feature (66)..(66): Xaa can be any naturally occurring amino acid
GGRRVGCAHGDKERDRGGRVGPGGSNGRTPLRLLAQGVYELVPACKVLREYSVTGLSGEHGERLTXAYCSASQYEGAARIPWLLDELPNTGASYRVTNVWPVSCSVGGVFARRRHPGPSSRGLEGVNVSLVRKLYIPYAVTWSSQSNPRQADQIKGAAIQ

SEQ ID NO: 1002528 - protein, 225 aa, Homo sapiens
VSLYVTSQGEVLVADCGNYRIQVFTRKGFSEGNPPSDPRWHWIDFVAEASLGQIYPTSLLSQMAMNCQGLIGVTDSYDNSLKVYTYGWSTAGGAVTGASRESTPWGITVLALVLAEFVVNQMWKVASFGVPQLIEDQGWSDTAAVCRCCAGPKVCHPVMLRAASYFTQGLRPQSWRTRTEVSSRPGGWSFAHGLCMARDGHVWVARSVNVCSENEGFPAEIVGMC

SEQ ID NO: 1002529 - protein, 284 aa, Homo sapiens
AAGACSVLCRVKTLNPNGLSVALMRSAAAVRVNIMLHALCGLHVTVLSDQPGVPTGHHEDARFWRCDDIKLTNDVQCACFTNMQHSSTQAAFLNMQKVATAQDDITGDVYCLLMVLIIWRACLETRRISYISCKCLSSSGIIHLHSGFDMLHSDHRPFSFLGTEGQHVTHDDDSDQRRQHFNYDLSRQEPLSFRTNTVSCLKRLHALSFIPDALVRWYLPILSGPIYKQVQRIDTLNLNTPFQCLAESPGQLSHASFNFWRTSLPDASHSSSALISGTPRAPTG

SEQ ID NO: 1002530 - protein, 329 aa, Homo sapiens
HNLCCIRGGLRGRRPHHRPCRHRHSAASALGALLLHRPLHHHLHVLAPSVLEKKHIRRISHLWCPGQQAMRRTGATCWPGSDTGRAWAGGQTLSTKRPYLHPYWQHYAPCVRHNIVRRNAVSEHSGSSPPISEPQRPSHYTPTACDAPPDQPFKYAFFQIRLQNSQRRSHRKPPTANTLFIRTQYDLTPRRDTLTLELPEPGLMHEAQQRHKHLEHKKQPFETCTGTPGSVTYNIITVMSSYNQTKFTWRHPTCLKGDHSGAHHLPPYPAHMRTPRTPQHITPQNFGHTHQHRSTSHSGSLGHHGNATGLRTYPTGDHPQQGTNSAFPA

SEQ ID NO: 1002531 - protein, 316 aa, Homo sapiens
LGLRWCRGHRWTEKTLGQADGFSCGRTWGPSVTPEISPGTRSRLEDSKELQPVVSHQETICRGPVWSLCRQFQRRLTLRAVNLNLRRRDLLETPGKPQSQVSKRTPGMQTRLSIRVLWVPCARESRSPGKDGTKWRGGDQVKARKAERAGAQDRARRDTPKSRGQEDREEDKPGHDQGRQDTRARRRERTTPHGEERKTMKQTTQKNTGRGAQQGTANTRVTEERKGTENRDRNQARRRHAKKRIQTRRTRTRHKPKERRTRRERNKGGTREEGGRTKEGIRQKRRGTQRKRRKEGKKRKGKKKRGDRKEKKERDR

SEQ ID NO: 1002532 - protein, 211 aa, Homo sapiens
MHWQDVTLIWIQTHVIHITTVRSGEMEKETREGDPNIHSSTDDTATVKLDRHYNPLNGPVARHELRPLNMKDIPLSKGQRHLGGELKLLEPDRHSYFTHSCDWAKQAVAHFIHIRSNPLASTPRDPEEGNIPETDMNGRAINEYRTPKDRIVSSFGGENPAKTAKRHGNKDHRVNCLVTRGTRCTQHQESQKTENVAHTQENKEHKRKKAE

SEQ ID NO: 1002533 - protein, 439 aa, Homo sapiens
QRRRCSVSSLPSPARGAPRKAPRLVSLEHGRLREREWLVSWQELRGREGSMAAANKGNKPTESGDIRFAASQRCRQDPTAQRPLLMRSLHDSGGHGHARRDDRRLTGTRYGFLKILHKDEITFNHDPQMHRLSKDVQRGTMSPRPLQPSRRPHSQWMHLSPCTVNRWSQLLRYTREAQTRADTSKKEHTDSPDERWHTGNTRRKRPMNGSARPQTDPRGAETPTGDTGPQYCQRHGRLKRWMQETARKPGDTYTEPTRRPQRRTGDNRTYRKLKRPPVQGPPRDTWALTGKTPLQEQNINRTPNILGCRTTTTGRYSWKATASTQSQCNPHINNARGNRHINETEMKRETTRKDNATQQHQTRTTDREEARTQHHNNHDNQTDRHNRQQETAKTRRREKRNHTEQEREPRHTRDVRHAKQSKRDKNTKNQEKHDKERDE

SEQ ID NO: 1002534 - protein, 332 aa, Homo sapiens
GGGGKMLLFGVHRNRLGIVAQNQVRSESSDEEAAIGALNTSEGENGFDQERQMKSIARSSKRNIIPKSSTEGSFILPNAKDACQMRSPKDRSKDKGATKESEMRRIAAGTESPKRGASAASSASSSTRSRSRLGRSSSGSSTQTRVAQSSGSMLFLSIQADSVKLQELPGAPALASSSGSPSPSRGRHDKRRRSRLQNRKSPKNRLRTERKEDGSAISLRPDAKVHIRGELSAEMDEEDHHTMEDNLPTMGEHIQRGTWSNASWNNGNGKTRESGHKRDKPIREQPEKYQNERPEKGGRTTLEMNDQKKMGQENTEHNEDDATGPRDSTAGA

SEQ ID NO: 1002535 - protein, 200 aa, Homo sapiens
AGAVAVNRISAAGESVGGSSAVAAATQSGLGYARGSPRPPTTRLYSGGGGTGGPLSGAGAPPGMTGTIFQKAMGNPCEFFVDIMCLVAHAPDLPEVGSWRSCRMQSSRGLAFVGARTGGRWGAGWTTASALAAWLLQLLTAPVSEQPCGGAPSLTSAEARNSQALVSGGDPSWDEEDPLGSRLTPLLTGVPGPQGGHAGT

SEQ ID NO: 1002536 - protein, 74 aa, Homo sapiens
MATGFDSLWGPRGTHNYRKETVTPVIELIRSEGALNAVRKEHTCKIMHGRSKWRFPRLDRNDIVNEHRLSGNAK

SEQ ID NO: 1002537 - protein, 220 aa, Homo sapiens
RRGGMEALLLVLRCCCWAAYVLVYYNLVKCPAVRPCMCATLLGHDGVVTWWVLECWVSAELAVAQLERSAWAWLVCSVAQSGSDSALVPAPVGPQAAKQLASENERRAAGDMAAAVGSSSGLVHSACPPDPSELRGDGGRAHSTILPQEEVGHTLTVSSFNWALGTFWAHRYWPFWVGRRTFGQRCLFLQHSCSPTWLGTFPTFQQIDQVSRFLDGPRPG

SEQ ID NO: 1002538 - protein, 171 aa, Homo sapiens
MKGQQDDNTHKRKYRNMQGNDHGDHNTPETQHNPEKIQKGKPHGKHQETRGTKQGNREIEHNTWEPQGNTPQKHRTMTTKRKGESNAYQPCQQHDNTVKRSGTNRTTSHSEVAPKTGQDRIQPRGNKKKDTKRKTKSVEGTEGCVETQRTQSQENRTSQEAWDTRKHRKKA

SEQ ID NO: 1002539 - protein, 505 aa, Homo sapiens
KDSYVGDEERQNKRGIRDPESTPVDHGIGTKLGTISGEDLDHAAPFYNELCRSGPGWEHHKVAEHERKRTLVKPTKANREEDDISSYVSRPYGTSHWDMIAVARIQGAVLVPSKHLLVDANPTVATLLVQWDIPVEGKGVSIATKSGVWHTSYSKEDIAANIPRTDGQNRVDSLVRTHDGMNVPQGRTSMKRRTSTVRVKMKSDQRRSRMDLPWVTTTTKQGHDAGDKSGAANQSNGIDTADDITVRPMGPFQKPREGLRQTDPDIPHTFLFVPGEGKERLKEGPGYAELGTHDGSIQLHIWGAHSEQQRYTQGMVLTERGRHGYNHNGTFFNLLPFVGLHWEHSFSPEDIHQRKKRSAVITSFPKSIAQGGMRQWGNKCAGKKDTIGNRSKPTEIDLVHEGTGGKHRAKMDKLPGVDHYGPRKQRENGKQNRKETQHRAALCRPPKRPNVKRHPQESIYGSTRQEDGKDNQQGGGTPGGEFQIPRGTYTMDTHTFHNRDTDRKS

SEQ ID NO: 1002540 - protein, 231 aa, Homo sapiens
ERIHPMFTSRISEKTWMNERLQDSLGKFGPALSVKVMTDEHVENPKDRICEALKGTEDAQKAVAMNEPDKELNGKQIYVGRAQNTTVERQTELTRKFEQMTQDRITRYQGVNLYVKTSVMMVWMTERSPEQEIILQERMQDNKMQTGQLQWQEDENDTPKGENENRTMKTYRNTERQANKQDQKTEKEKRESKKKEHKNKPKKKEKHQKTSKEKKKKKKQREKNTHKNHKE

SEQ ID NO: 1002541 - protein, 262 aa, Homo sapiens
MLLDWFTAVDLKEIPVSVLLLEHPCLVAAVVSSVLAKSEDLSFMLGPSSILDLRHVNRKRLRSPVIKLVFPVSSRCAGPIVIFSLAGETSSLVCGLSSASQLPGARPGFVHCDVEPRGESCLSGGDWAVCVQNSIMGSRLQGVLGCSCVRPQRFDSVSCERSELRTFVALSEAPGWHALVGAGESPCGWSAVDSSLSPGVDTLFVDLLLCVARFSRVQVLPTWQSCGETVAPGSDACRGSTRIGPLAWGSLVLKHCSPGTED

SEQ ID NO: 1002542 - protein, 233 aa, Homo sapiens
ENTKWRMTPVQRGGPWGPWWPWDGEPAVASAECFGSVHPGAWGRVPWTVGLGAWGLLELCVRQGLMDNVMWIATVTNVGPAGQRDIEGIKVPVMEIYTTSSHDPFTVTSGDHLHFFLGGAVSQRHWRVMRQNYSQVQQSRTRAGTGANQRLQGHYCHAYRGDIQFVTTSEYLGLYKVAPNGQCGLTRASGWGRRSFREPNGSSIRSPDARKQELTWREPTIRSKPHTTCSPLT

SEQ ID NO: 1002543 - protein, 210 aa, Homo sapiens
MLAMCWSLKPELSVITCLGLPKCMGITVHEPSHRDPRMLDLYNFVCRGSSMGFRCQARLWVQILSGSLVVETSFWYRNLPYPDAQYSIICNTWEHKITCFSGGLFIVDQVSNIDRCWISMREQDTKKQQVCGTRDSHMRKTMYQENSKLLRGIITRIEPHIEIKDKYLGRNVDRNRDKQLISSYHSERADMDKGQDVSLAQACRGFKTDI

SEQ ID NO: 1002544 - protein, 320 aa, Homo sapiens
  misc_feature (215)..(215): Xaa can be any naturally occurring amino acid
LAKGSGCVIASLQRKKMFSSVAHLARANPIRTSPDLQLVHEWLSRDLRHVMLPRGPRAQPRLLLGTWTACRRVTSTVVMFGSAKYCALCGLGGVLSCGLNTSSAVDSPGSLRGNCLYAVLEPPKKYKGHIEAGFSVTLEEDGVRGSGVKRWASDVFRMGVLQCRDSATLWLSSGKSFKALGNQQVCSGGGRNTNTLGADHLILRDGVLTMVLNAXCWAFGPGSYVKLRRGSEYAKPRRGHAENLWRDASPKRVYRTQGPKQQFYKGGCSSLNDTREPYSHDEVRPGSGNGTGATPVQTSGGPKPRDAPVKSEELGATLQQ

SEQ ID NO: 1002545 - protein, 158 aa, Homo sapiens
LDKKRDKDYRRKEILPFEKMKEQRLREHLVRLKGARAMEFDRRREIAETTTRRRRDEPHYELHFVNGNDTGTPLTRRRRRRTRPTTHLTHGTNTTTTTTRHGHANAWTRDTHSYVNHGTSYRNADTGLLETRRGTQTRQQQHASYMTQEKRNSLKEPT

SEQ ID NO: 1002546 - protein, 298 aa, Homo sapiens
MADVGEIIEGCRLPVLRGNQDNEDEWPLGEILWREGHQWPERYFYDPISIDLQQTSGCMGDSMSVLVAKRMIQFPKKEAKIPTKTRTAMGPCPGLSREREVTGLWRRLEMGRPCAIPVQDHSPHSTCPRRRDGHTRWQSLNSRSPPASMALRDTDHPTSSGNSEGWRAGLTSRKASRLTKQKEEDTRDYESIENAQKMRAPTRIRGKRGDDTTTTGTRRRWTKIRQIRSPGHTTEFEVNVRPGKHAYVNWETSPWEEEHAKAAIALGPGPGVLLDSRTDQTERHKSDTRQRALKCRQV

SEQ ID NO: 1002547 - protein, 113 aa, Homo sapiens
GCGAGIPELGNAAAAVAWPTCWCPGGSEPRCAALVPTLERWGEMLSHRLWLLLLGSLSSEEAGWTLDGQLRYLSCPVQETSSKWAPSPDLHHRAMLPPDATHLLASKDQSQAC

SEQ ID NO: 1002548 - protein, 69 aa, Homo sapiens
AQHSGRKGQLPSKCLLVHEILCKLSCAGDHLLTTPRELHMGLSQPILICDAERDAVNIERAIMDQIGCG

SEQ ID NO: 1002549 - protein, 418 aa, Homo sapiens
QNTKCADDCRCSGGARGALVALEMWEPAGGFLRRFLADGILGPSVAACGQGPGAVARRDAQLVVQMACWISELDCPVHQVWACLCQCDMTIKSLEEIYLIHPLHIRGTLRRISLSIPYRVEGPSSYKGTDGYLERTILRDVATIRQGLPVDPGPRRPPQWVSHGHLGYRIIQEEHLNQVGPNRIRRYFGGLRYRLAYAKRARVGAQSLTQYTLCEVAHYNYSYETQYRLLRKSMVRPSCRAKKDSVTLSDVEMETEFRGDTTAPKRVGSTQYGPKGLGSEGDAAFWTWDISLGGRRAKQSHFHFTRLLYEPQEGDHSMGSNLRVAFAEQLRYSNGPFQRKQAYRRPLGTWGPRDSSGQEEVWITQHFNANMGVPIGECGANRRSGGKRFEPKRAKPLFGSSPITIKEPFHKRLPLEHP

SEQ ID NO: 1002550 - protein, 144 aa, Homo sapiens
GVHRWLSLAASGCLCVPCVSERWSNEAWARGVAETPLTWDPAAFCMPVSTVTSPGLRAVRAAQCPGPVRVELVPDGPVAVDAYCSCTCDRKHGESLRGPPTPMQRKPRMVRSNGKCAIPTCLYLLMVLYTSLTRFQLRNRRPMS

SEQ ID NO: 1002551 - protein, 104 aa, Homo sapiens
MAVARYNGAKGKNSDSSAESGKSRTVSKEMVHCCKVNDLKDKYKNMELNLFNDVPITQMKEAGDGTTTATVLARSIAKEGFEKISKGAKSSGNQERCECELLML

SEQ ID NO: 1002552 - protein, 114 aa, Homo sapiens
MWPCERKAYDHVYGITTNIRVSEMACTEPDLVPGLDCHNPCALLGTKKGVGQRQAGAASVPLNPGRILGLENPLYNRSPIIPPGAFLTCRTRLVEAKTLKEAGESSLTYVRASF

SEQ ID NO: 1002553 - protein, 216 aa, Homo sapiens
MVGKLAAFHVVLRGTLGQNDCLCIWFCGTMCKEVEALGSSVTKEDVYKYALMRRLPDKHWIVAAIHTAMSAEIGEALKEDSGTRPSCDAYGDGDMKPENSHKPGATHQKKPSPAGHSESRAHRRKALLGLTHQARDDIVEAQYLHANRAHKEPNEHAGQNQTPLTPPKEMAGPGNKTTQRIRTHNTGKTTAPSGPRQDHWEALKGDYAKQPEDTEQ

SEQ ID NO: 1002554 - protein, 424 aa, Homo sapiens
  misc_feature (319)..(319): Xaa can be any naturally occurring amino acid
MGLRSGGLGASEQESLSVPGLKRKGSTSKELFVLKMYKRQGLHYYLTRLTVQWCDHSSLHPESTQAQYHHFRDLKSSTRVRWATYKRQRSTHYCHEQIKFIYTFNKGRTDLEISTYCMTRDMDYNKSWDSKDRRSDTMGLQKPSTQGSRQNQSAPRGDDSSRKRVTRGTAKEERHTRTTAIPHHTHNNKQGGPGENQTTTTHERVHSPINRENPTVGKKPGEKRRRQRAQEDKTKQVYTKTHTVRDHNKRHSDIPSTDTRENKGETQTRKSNKRHEPREDRKGALATGRKVIHHQGQKRTNEGDKGHNTISEWSSRPVXARTQRHTEGATRAASNTMNEEETTTQDEATQVAQQTERQRATQLKEVRTQEQPRTDVGAPRAEIAHNTQHGHKRETRNYRNNHHAGERHKPEREEEAHENKDDEN

SEQ ID NO: 1002555 - protein, 302 aa, Homo sapiens
GITNGVWKAVRGSRKTNIKTSSGGFSPKINLTGSSFKWFTQNTKRKNVRGLVFSERANRDPGRAGGKKSYIHTQEGGGASRRGVGAHRVDRLCPSWQRASGLWVRPREHSRAREVLVERDHTRGGGENRRDTQLSGATQSGEKPGGDIQKVGGLRGSLTKDESCACEKGVGIEAGPCAAHNQSGRGGPWSGPPPKALCGTPGVGYTGWGQPTEGENKSTRCGPIARTSAAGGETSQREGNRGAKALRGEGENSIHQSEVTPPKVRAETKLEDPPGQHSLHRSREPPTPNHNAPYEVGSTPES

SEQ ID NO: 1002556 - protein, 297 aa, Homo sapiens
GLCTTGATSQCSLMSVNPGMARWIKELFVPERAVCVLHGGDCKHGFFSLTAVEGHQRWAPYRIYYDRAPAHKQPKAQQWCSYNDFSFVTADQIERAVPMRKWLSTWASSTWAPHIVLIFEAHKDFNKPSCKTVTDKSCLRRTALVLAHQQSHFLDSCACYTGIYFQRQQMKGLYQAGRPMQAILVCGLTQAVVLGQSDQDRPCNDFGLAPCIQRCKTRRWQRATHHAPSSYASTILGYKQTSGRIGTESRVSIWTSWRTTNWVIEREKKAMRNFPWNQKTFKSGIIGDRYENLNMYE

SEQ ID NO: 1002557 - protein, 120 aa, Homo sapiens
MPKFHVPELLPNGPYAGLEHRGSSSRREKKANSLFDPVACWTVYTPFSSMDNNGQQWNMGVLCRVDIRAPPSYNRGHQKGRNQRGGVGNGKRSNYPGKPTRTGKAEHARLCEPQRRYMLQ

SEQ ID NO: 1002558 - protein, 228 aa, Homo sapiens
MLTERRNSRLYTTTQRPQRCTAPTGYYEPFACRHKNVFTERSARKRACHDLPYTTLTIDLSPYALSVVQRTRVIAHYEAPRSANTTSRHWVQALKRICDLSYSSVYDAALLDLRQEYVKYRHDSVGEQQNIRDYATESVATAEQKGQKKSHMTVSLDIIRNYTSITNKWIHGTSRRLIDNEQRASSDYLLAIHDSIGPEYDGSSSSKQEDPNTKHPLSTVDPTGEIRQ

SEQ ID NO: 1002559 - protein, 364 aa, Homo sapiens
  misc_feature (55)..(55): Xaa can be any naturally occurring amino acid
IVSWDGRWADIFLSLLRAPFSSMAKSPSRWAYISPSRWLCTLGRVCLRNGSPVCXCNQLRTETASNSRMRHRLPGLLKCSPGRGARRPTGSPNSDLPVNECLPSFSLEPPAMQDRGTKTVCSRQCPPCKKTPFVSARASPTGKRPRRSQRREIFYVAGKECRSPIHLFGEEGPSCEEVDKSPIYLLMCCTLALLAFVGNWLPQHPLCTLSATFVFTSFHCRSTRAATIRGLRQPLRKELPRRRGQLYGKPPIHETSGYPSKKENRVVKTIRDYIFAIDVPLALHTARLEPTLLVGGFREGLPQEWLNRRHRWGVIILVDLLTTRGSVSRFAQICAKNCPIGRVGSPNFLRSPLGQNHLVFSTIW

SEQ ID NO: 1002560 - protein, 105 aa, Homo sapiens
GVCESLFQDAEAQIGAGPEWVPRASPACLCRSYLPACVCPCVLGLMCCRCRTVACRCPEPHGSRAHVCPPRCPFQVSCNAQEVKAFDHPVCLTSKAIVLLWTELA

SEQ ID NO: 1002561 - protein, 197 aa, Homo sapiens
MKSGSTSCRVGRASFAEGGFRGLWGTRAGARSREFRSYREFRGDDGREVGQWEQTSLLSPRSHCQRDTERGFTSMRNSPSGPADGLKTGSETHESDLAPSTRGSHSHGGNTHPGPSRSRRIRSRQLQQAQAESLPWGGRGFTPRRVPSRRGREEGGPVTQGRAGRRPYKTQRTEACTRTTNSTYDQQRTGGLTGERG

SEQ ID NO: 1002562 - protein, 239 aa, Homo sapiens
MFTLLDRYDPPVCGRALQIDATLTTLTLSCLLRRYSRIHALLQALYFRSHLPTWADLSMTLLRTRNLRKVPRCYVAHNIAFGKSWPLTVPAAYSPHTRTPFAFRTSISPIRPPSTHHVCKLGLIVARSMVTHTVTNPFTSSLPSAPRTAHPHLLYCTGPPFLIARTATALCALNVLLPGPTGHGRSSPLEPNLLHLGTPSLTLAAPFPTITRARSELDGAVVPYRRYATYMTISRATSD

SEQ ID NO: 1002563 - protein, 244 aa, Homo sapiens
TKWLDDCRVQLWVVPWGALVALGWGTAVASAEVSGSGILGPGAAVPVDCGPGWPEACGALRSARPRISEWMPVTKLGRLCQWTGMIKSLEEIYLFSLPITGIRDHLISSWGPLSRDECFEGLCHVPECMSLLPGQGAPVFTGILLLIVGLQVASVVSRVLRLLQGWLVNRHSVWAIILAKLSIVPRAAEGYLGEQDRASPTLSLQGDRPLRALCWYASSLHPGALAFVSWHLCLRRLLMMAGID

SEQ ID NO: 1002564 - protein, 71 aa, Homo sapiens
KSRFDSLSLLYRYRDGRWVVVGVMGKRNANDVCLRAAGTRVRCQCSAWAVGTKLVLSAVATCMLRSWWLPR

SEQ ID NO: 1002565 - protein, 215 aa, Homo sapiens
PNARIELQEWEHVTCIECHRHCAERRRVRASNGYVAAGTCLMQAERGHSDRGRILIMDVIDGGARAWPALEQEQVQSPLTEKEQKGPVTAHVHSAIGRPGVCAIGHEEFILMRACCAQLQLKGMALSSTTQASTYDQADHAINGNVTVLGKPTVGELRHLRCLRIPRTESKTHEALDVAVMPTTPVKVVQTLAPFYLHVSIYGPKPGSIYLAATS

SEQ ID NO: 1002566 - protein, 251 aa, Homo sapiens
TGQVCRGEGLAAVTYRAQASSSTVQVFGRKKTAESCGALKTLQWSHQGEQERPLEMIEPRTLQYKLLEQFCFSDKDAICWCRHPDVRVKGEKVTVAQIYAIRQIHLQSPGWPITRNMWMRLPRTEIKDILIQYDRTPCWIAEPSYAAKSKKVMEAPGCTDASLPEHPTDKTHRDSELTWYTIHQEHTHGAYRQRIPNRRQPKQPRKNNKRNPHGTSDTRRTKRTRYHNKWPHKGHQKKATPEPPHHPHEPQ

SEQ ID NO: 1002567 - protein, 135 aa, Homo sapiens
DGVMSHRNVLRLPDMGPSASCPRKRSSRYRGKVNSFTHKDDLCPSRCVHLYRLFPGIQGWHDSDIVLGSRTRPVDPKVNKEGGVLECCDHCRDTNQMVDAGAFVGHTCETSLVERPSEDRVRSTWSLCVVANNQR

SEQ ID NO: 1002568 - protein, 253 aa, Homo sapiens
SGFRQMGPTLAAAARRALPDGDTQLQLMLRWRIMTGPYFRYRTYLVLAGAEPFPRGRVAQAVRLPVCACVRGRSLASSACMFLTLRLTFFPLEAVREDAFNVPAVGRPDLFYMSPRHSSDFRDDVILTLAWIAGELLDCSCAAGLLACLTSQWSVPIDHVRPEGRGRGPCPEMAELRLKAGFPRITRTETFPLGRILNLIARSRYSIYNYGLAKRGQQEFPADAGMRRMAIASELGNIDRCQVDELGRKNYTT

SEQ ID NO: 1002569 - protein, 485 aa, Homo sapiens
MRPPRGRQYASPYRPHGRRQIAAFAISAAAEAGRRGRETSEPASTSTSPCPTPSPRQASSSLLEQTVSVEDTRVRDRLASARIDHCDSIIDSRVEEHTGLTIAAQEGVHWRTGDLLLVTRKLGEKRQLRGEAAFYGLWIVTSTAIRESDRGNNSHRAITSCIVETFPGNWVCEDAFTGLDLDVGRVLLHTMTFDKRGFVPPYDPMDVGRGQIDSDECCHTRNLSQLDLNRRFPLGIVPERLRRQKFGRFCYKLWGCIAIPVKSRLNKRKSPDAYWGRTCRDSEFERPQWVTSVAVPIGHPSQRPVDTPSMTHAHEGHSIPSPVEQHNEPYSRTRIGGTRRPWFPGGLCVGTNESEQRTTDTPFNEQAFGTRTRLPRRDHSRSQYKRLEKRDVGTIPGTYLRWQLRAHPHTEHKRRPRERQCNWEHKRVKAGGERLKEMPDSHTKIQHKSGHNVKGGARNNDTLGTIPPREETWKTRTEQTAGHHE

SEQ ID NO: 1002570 - protein, 279 aa, Homo sapiens
PRAPHGRRVSSSRAVGQSLCLSLGVLDGGGHTLYPGAVVLPEPGAEGLGHPPDQVSENHKRLPYPLVQIKSDKQQLGSVIYSIQDPAVDEEPRGVFSIDKFTGEGLPQLAWWNGKRMDGHGLKGLACGPGEDPPVGGPQDLEIVVVDQNDKAASFLQEASTGRVLEVQSPGTYVTREEATDADRPRDGQTQRCGFSNPAAGQPRALQQSRSSQENPQKCKVGLDRGGGRGVQSDPEVADMSGDGSQPLLSIITLMTSMTLPRGHQEESSGGLKPQGVNV

SEQ ID NO: 1002571 - protein, 107 aa, Homo sapiens
LAAISRGKSDSERALQAKQLCLLIASVPSVLYEKRQYSMCGADTVKPPAHPRASSAGPSSWHQGACMLKCGNLPIFQTMDMVSFHEKRKLDLLDSLSLNPFKGTCRQ

SEQ ID NO: 1002572 - protein, 283 aa, Homo sapiens
MRESKMTIYQRSPSQIETNGIIRDSGTADKESSSIYQENEAAPDTRRRPRLTNTYQDPLTGKTVEWTQPTRSHIGSGTNTHCTQNNRREHRSKSLSSEQLTHHLTMAERHKGSNKTWNKYMKYITDYVTHTTDQQPLNRHNLTNNQYETKSLRKQRHKAIDRPKHENHIQSNTWNPGEQNAEQLADKSMAHNPKLQIRMDTYNTQDKHSNIDTPETGKKPMDQHDKQEQNQRTNSSKHNNNHNRNKLPIQNNKHIAYKQHKAQGQPVRTPLGKNIKNHKQHRK

SEQ ID NO: 1002573 - protein, 160 aa, Homo sapiens
  misc_feature (29)..(29): Xaa can be any naturally occurring amino acid
MTRLIGGRTIDLRYIALLFFMMKLGCWQXDMMPPGPWITASTCESHKSILNETSLLGDFYQNSVFHPLKQLIAGKEPYVLATLTYVLEVCQLSTILRDRQYHCSLADMPSRTYRTKPGMNLVGPPRRSTRAVLWVLTIRAFLEWRARNLVFSSEYSRLRR

SEQ ID NO: 1002574 - protein, 284 aa, Homo sapiens
RLCIPSLVRRGSGGSRTPGWCTVDARDPPVENPASHTPNANRSAHTEPTNLMVDSMQGGTLPHGRHDGWDVGMPIGMTNLIECCIENTEASIQVRARTLYHHGRPVQLESLLCCPNILCPHHKIGNISVPMRAMNATPILCMPLLATCHGHAAVPVDAQGVARLYSASGRSVIVAAYDDRLCVYVAVANGVGTPPRRHKREQDPHIEDTEESDGKCAQITSQAREIDTNCRGHITSNGSEDDQETTTMHEHTMGIEITRQASQQVTNTVLVTTSEENPKWMGTN

SEQ ID NO: 1002575 - protein, 246 aa, Homo sapiens
MGSWRRGRVADWLAALGAVEGAVEGAVEGPRLSRGAAPFHSPCLALVPTGLGRNVCTALLPRGQRAGRAGEVLHSSTPRHLHQDKVRAERRKAATLITRTDFAGRVDRDGLDNQDRDEDEGGNNRTNKTRENSEQKTETTASKKATNETTANNKQTSAGRRRTRDLETAGREGGGARVGSHSNTEGSTQGHHHQATKHNSTAQTNTKQTTERQPPTTHHKETQTERTHRDEEARHTTEPAAAPAPR

SEQ ID NO: 1002576 - protein, 278 aa, Homo sapiens
PALVAGAHGRGSGQCIVGLDREVVSGVQSDPARWRTCLETASQPLPQPSSPVDDINDNAPTSSAGMSTFMEAIEAVSWVDVGRLEVEDKGPAMAPQTGVARFTILEGDPDGQFTHTARDPKNNEGVLVHCEGPGHMRAVQHITEHPTRSRVARTCRAPLDKAGIAHKRAEDWRTRAKGSDSSIDAKDKQTKAPPGYQRKKTTNFRNQELSTTRRNTPKRNIIGIGQTILLEPGNPMKHKKPTMAEEHQANITRDHNEHRKKLACKDGHQANWPAIKNQ

SEQ ID NO: 1002577 - protein, 177 aa, Homo sapiens
GKHSHVKIGRYHSDTLQVAAGLRSLTFGVTVMKCYPEIKEKEEMREDHSGRYGLTGKQQVSPKSGTCQTGQKCRVCLAWLAMAEPHTVLFLDESHSNHLDIETIRGPGRMPSMKFEGGIDCWTAHDFRLIHAGCTGILGSVTKQTIHQVAWRHPGLRGAPHSPSCDADEAEMRASRI

SEQ ID NO: 1002578 - protein, 146 aa, Homo sapiens
MRGGEKGRRGPSVTSIPEKMCWENPAPQGNNRGENMGHGGLGSPLGGKSNMGRVWARNRRKRENPREREGGARTQRRAPKPGEHTHKRARTAGGPPPGSKEGEARESRGETPRNRQTDNKERYTTRATAQNSQSALRRKPGIDTRT

SEQ ID NO: 1002579 - protein, 227 aa, Homo sapiens
MCKPLGPQWPRGDYTPRRPTHGNGRGRENPVHKTAQNTREQTILARNTRGMQRWNSGGKTDRQPREIHEENANNRDTRQPHHVRTHRGHRTNGANNKFRRPSPLQGRQHKQGEPRERRPNTQQSSNTRKCVSPNQTRGATIQSQQIGTINYPAPEGHKTAPKTPEDTQGGPPRRRHKQPPETKGTHGTADPTTNNPGKHTGGERRAEPQAAKHPKNTHKAPSPPTPQ

SEQ ID NO: 1002580 - protein, 169 aa, Homo sapiens
MTCLVLPTGPEAPNCACTHLPCTPVMLPQCFPTAMCHWLLAPGNIMSGGGEPQGWQRMDTTDGWHTRMNWKPRNDLNRDLKPSEQTRRHDNTGRAPGAEGTRQTLLQLVGTSHDTQRVYTTTIMLGKASRASRSHEPTRGPTSPRATAGPCPPGRFSPCARPSQGKRVC

SEQ ID NO: 1002581 - protein, 352 aa, Homo sapiens
MLDTQTNTACSSQLVECDLGLMWCQPDRRPGLSAPEVPQRPSCVMEDDVRDLPLRPTGIRLHSAQARPCLPPESEKGWEQENMKPQEQVTLGVHMNRDQCRGSMGVYRTSRPKVKKREVQRWSGLREMCVDTVVTVCVLLLKETHLVAEKKRKMKERKMVWRVCCVGGGGKRGGKRRGQVVKQGSSLLGTPKFHLRVPNRVVKQLRAVHCRLNKAKWSPMKLLPMKSPRGVKHRGFLEQDPQGGKTTAPPQARDGMALGQRPQERHDKPSPLCRKPPKLGTCLGGHQPRNTRYGGPGNRQEETQEGRRTIQERATRPPGRDTQHRGNAKPRKDRHPQEGTEAPATAMGKGPR

SEQ ID NO: 1002582 - protein, 308 aa, Homo sapiens
GVNAAGRGSGSVSAAGAGARGCVTLQPVQPWLWPWPVGMPLVVPALTGALVAKACSVRLALSWMPSLPASTTDDCGGTSRPETDQRAKCWRQLVCLRCQNRMENMRPGSFSFIAFSGYRGVVLFPWQARLYDRDVASAAPEKAENPAGHGFQMEVKGKTHTYYQVLIDARDLPTYISEIQTEAVTFLANHDDSRAFYAIPGLDYMSAMKTSSPTAPIDQGFPSNMNFFERFLLYDQTKSTFLYVASGERYRGLANDEESPLGLELSDCSSGKQIEERYVVTVIPFLIGIEGTPEFHCVLVALLNPEGD

SEQ ID NO: 1002583 - protein, 209 aa, Homo sapiens
GNFKIPQKRFIIQVSLESRGAYRVGFLGSRARAPGPPNFWDSQRQRVSYQQGPVIRDEDVLDLLLGSLFHYYFWVIRPPGLGKWDWTDSIKSGATWTTTLYTGHGLSTPANRLLARKAKLGLQEVLVTGDGWRRVPIILQGARPVTLLMEDLVARVFAHVAAQKLCRLSAFYGCSEELWHRIGKGTSWDGALGSQSCGTEKQTFTRRRG

SEQ ID NO: 1002584 - protein, 134 aa, Homo sapiens
  misc_feature (128)..(128): Xaa can be any naturally occurring amino acid
NPSLAFNALKNQFKPPPPFNRGAVTKGKERTEPSLWRTTSVPVPPAIFLARDWDLWFSISVSPLLAWGWSCDGCETPSCGGALWAHCESPPFGREKSQRGGSVDKRPSVFADPWSIFVGNRVCVCVSXHEKSLP

SEQ ID NO: 1002585 - protein, 317 aa, Homo sapiens
QRPALVTMEEIGIVCVEKAQDEIPDTVRCPGPRPACPSWALSHEDLEDLVQPAYIEAAARAWSSVEVQEADTIRDEQREPAKRNFSECPGGGEAISKRLSRLVIVTICVGGVWIRNTAIVGSTMRTSNYECAHHVEHALRSGYDCIEGAQSRHSDRTLLRMTTMAIVNCDGSSDVNAPESADQLAIMDAVSSEPEDRMWVYADIGGMDIQKQEVREAVELPITHNERLQSRSESIPPEASSCMAHLDCGKTNVGQGGGTITQQMTVQSGVGGSGGRTESILGDGPPTVVRECVPPWHKENDTGNQTTTTRRKPRQPE

SEQ ID NO: 1002586 - protein, 180 aa, Homo sapiens
MSTIKYAVRTHSRKYTTGEKYKVEEETSRTEDEHCTNNRDTEEATTHRERTEQGGETQSTTETVETRHKCATVARRQQGTSTATKAEKQTVQTHGATERYITPGQEMTQSIREQKLVSTGKGHLSSAATMRSRAVTNRAKDVGTIVEDDPTTDGRLHTSHTHSSKQTQHVDQHESERLKA

SEQ ID NO: 1002587 - protein, 341 aa, Homo sapiens
  misc_feature (53)..(53): Xaa can be any naturally occurring amino acid
MGAGLSGCLGGPTVPTPGVGPRARVSLLPLFRALRDYRSHVASSREREAEVCXPKQIATVDAPRESIPTYLSFKAHRFPEEGKVVLVNAIRPLVKKSLPSKLGTFPTATTGLFPPLSRCPSLICCQTYSRTGPIRVRTDVRVFTCRLGSSRGYVRTVPPGFPLLPPGVYPFISQSRSPLVPRCLCPVAGALKATKPFSRKSVRESAYTYCIVACFNTAAIGAIGFWAIPQKLRAREAACLCSLWRRKRAPISFGDRLEMWPLPLFDLAFKLILEPSRSQANTYKDRVPFPSYGGRKVGATFLERRDTVCPLLAFGAHRQGKEATSLKVSKERKRLLSLQSP

SEQ ID NO: 1002588 - protein, 177 aa, Homo sapiens
AALCEYDMVRDSAVRCLLEGPTSADFAVGQSGAWLAVPGRKNHEFMMILCEEPNSPVWARKAIDPALDACDGEEDCSAQQTSDDKEEPLYIELSAGSERAVLRDSELPNDEIPVAESQSKAVWNIGLRAVPIADSRKIEDGSLILREALNLPTLPKLQCTLRKENVQYTIPGSLDEP

SEQ ID NO: 1002589 - protein, 195 aa, Homo sapiens
MANSDPCRLRERKLLHTQRWGAPEGLWALGGPPARFARAPAGEAPDLPAKCVLERARCVGATTDPFLATRRPRDSMGALGPIGSPERCGRARLRHSGGALWASQLWPRGTRGTHRDNAHGYGMQGDPRDNADVAGNLYCDQCNNGSTVCCATHHLHVPEGTQLVLATGIQRRNSAKSNSQGGDPPFVCCTKCPTI

SEQ ID NO: 1002590 - protein, 363 aa, Homo sapiens
MRAKGVLIRSRNGTWCRMTIYFILKEIVTFDGHMGIASGFMHIGIELGKRLRTRIADGTYTYLGPEPGMEFRKALADCVGQAEHMIGFLYSSWALAVHGTHYGRVRVGSLLVATCSGRIPAIRDGHLGFAMPYGGGVPARFGIPCADYRAFVHLVCVFRRGRPAFERGYRFPFDAIGTPSGAGYPHWIPIPKLVPDVSFLIAIGDPNRQGLGPHSQGQGPDWTFPSHRGFRVAQGEKTIQGGIAAELPAHFCGTPRNGGFNPERRALEMKLVHFHQGKKHSTLGDSSEFAQPHKLLAGGQLAHADAGILDIRHKHQNYRLGAAQLYDVQCRPHDGRAWLRHMQPWRLLCAGTNGFVLYPPHAS

SEQ ID NO: 1002591 - protein, 401 aa, Homo sapiens
MVALRMIADSTWPLLLAVDVHLSLSGDVDSCDIDLSQKGLGWKSQFGGSHSPGYSIIHRSDPLDEYSRRSMIDALTDRSVVISNLSQDIYPCDMAQWSIGKVSQCGFHYGYLVDWASMGLCPKGLGFALEPLLALPDYPPDRRNPLEAPLPKVVLLQQLTVRATSGGPSSTHLLLHSHWPTIQEMHTLAKDVRRIAKEEGANSNPFASVCGKVGGQPPDGFQRFWGGCPHSPKVLLRAEGKGQGLSLPPGEDAAMGVPYHTTLVPGLPKLALGCTGDWWSEMVAAFGPCEPLGLLSGLRFGTTELPRPVAFGIPTSGCFSPFDHGISSLRDSRDDGLVCRIWSSNTRKDSRFVCPPGFRPTAVPVGLCPALWTRERTFGSFSTPGDVAVWRDVVPVWGGGP

SEQ ID NO: 1002592 - protein, 142 aa, Homo sapiens
GRNGGCGGSSGVVIRGAACGSGVSARVFYSEALRDGHYIVGREQIKKYTGMRTQVVLNVPETRVTCCMNSGLRVASEDSGLSTCTVGLWIDAGKLDTTHEKNNGSSTLSGSIWLSMGTKEEHPSVDLEALQIEIYGCSSQCL

SEQ ID NO: 1002593 - protein, 115 aa, Homo sapiens
MWRGDATCGVRLPGVLCALVGALPSLSPQNRLEQFRGSSESLFPPQVWERCEKETGAKRLALGLQTEFCFRGEVRSTPSCGGAHKRNVNGQKGRKAVGYLENHTTSRGHINLGGK

SEQ ID NO: 1002594 - protein, 234 aa, Homo sapiens
MPEPHDRRNDWRWTGSAGAPLGPVNGLNPAHTCCLCSWPRTWPCLKPCSFDVTFDVGDEYEIIETIGNGAYGVVSSGRRRLHTGRQVWHQEDTLMLSIVVEQCRSGASAELKIHQALINEGENTIIEHLRRISERPTWAHEGAKSKITSKKWVPGTLMGTRRTRDTKIIRILSQGPLSTESTVALLSCTNLLAAALTLHATSGSGHPTVNLKALQNTYGLNETWCSSRLGALGV

SEQ ID NO: 1002595 - protein, 101 aa, Homo sapiens
STVKGELAEYGLGFCFTCAGDDSCFDETLKTHHDIQSMFRNDRLACKFASLAINRLTAVSGGIGRIIWPKCEFETIPTFGMLVHLKRDTTTSLSSSVALQV

SEQ ID NO: 1002596 - protein, 47 aa, Homo sapiens
MRESCLVITRDCCSPSEQIILGLLHVIPGNLTPSMQTGSVIHEGRHQ

SEQ ID NO: 1002597 - protein, 115 aa, Homo sapiens
LLRVPSRFASPSMLRVAGSSGGTSARISLMTSGRRTSSIASSEIVPPIPSGALTRTFARPTPTPRASPCAFTAAISASVVDQSKRTPVISSPRSLKARAANCRTFPRLTLACFGS

SEQ ID NO: 1002598 - protein, 356 aa, Homo sapiens
  misc_feature (158)..(158): Xaa can be any naturally occurring amino acid
MSTSNSSHPIRAYLRFSCMRASLRTVLLRCNDCIPRTSSNCRVTILSGRYAERQTSKPTGPLQPYSGASITLMWSPHAASLARVDVAICYTESLHGLNAISFVAPQCTNMAAVSGSAPCNRDDFAVDRIVTIHVQLVTYCELASVRGKYKKLDRLLTXPGRGLLSLALHFIASASISDEQVGTQLLVSFPSSNTSSNCLLRGFPFVHPVTKVKPNSNPPPIPSSSNIITGSVLGLQAKTTRGSRPGNPLTWRASVTLRVSPEGDSEIGVMWEQFLPNVPRAKPTRIGGGEEMPGQWNGRATLALTEGYPLGGGPLVGPFSILCGVLFNFFLCGASVASLYIRFSAMLGGCSPFDGY

SEQ ID NO: 1002599 - protein, 270 aa, Homo sapiens
MVEGIRCCPYRICAYYLDYARTLTKGSRAEKADSHCNFQFCVAAGQVTVSRTFATLVAVRMRLSFTDDSPSLPRFEHAPLFVLPKKVGVRRDSLEPAIGRFGPKSSKIPPFPRYRPIRFPRSGFRGSGYICGSPICCGAPILVRLGPVPQDRTANFGTHANVSAVWGVGALRTEGGITYAMTLLLRMFRTDYADRTIAIRRKMWLHLLIEKLRFRIFHACLSCYDTFCPVPSMKLPPISWGGPTPCEPENTTRGFLSPFLRECAGIDTTD

SEQ ID NO: 1002600 - protein, 272 aa, Homo sapiens
  misc_feature (124)..(124): Xaa can be any naturally occurring amino acid
MKPHRGGHAFVCGPYYTLLQLVSTHLLWCGVLNSRVQNAHRGLSSATVVVVLCACVLSLSPSLVLFATTQEDSSLLLCPPLLCAPRVVFSPSKPERPTTHRVWEKSARVFHCCGSGPHTLWCYXAPRCVGGTHTISHTQQTLVRTVWSPPTLWGLLCEASGVGHNCGGTHMFWRPLLLLWEETPQPCCPHPPARVSQTSCGPSSLAAPPLVFFFVPPCCAREGGLPPFFSPTPHPLGAGGRLAASLQTRRSRPLLGGGANSLRGSQPVKQER

SEQ ID NO: 1002601 - protein, 140 aa, Homo sapiens
YPENWRAFKALIAAQYSGAQVRVLSTPFIGNTHLISQFCGRSSFEVDGSGVESTPCYYVSTEELGNTPEAEPVVQWVSLLIRLVPQQYLGVPLGICTNKRHECKEKEGIWGCGCYEERILWANDDMVTQVSAPVVVYKQV

SEQ ID NO: 1002602 - protein, 453 aa, Homo sapiens
EEEIQRFQTTFTLEDADLTSLPSLTSGVLFLQGAGLTWQSVDVGALLCQACFRHRVTAPCYSGDSCVADWSHMRFCFLFLMSAYPASGLLEPLCLPCFRVLPATLIIAGARRFLSICLWHLVVYSDSLWFAESLQAHRGHPNLVRRHACLWLQHGDYCTIAKDNNHLHHVYHICQLLSKASQLHCVCTCMSSGSLSWEEISACFSKDGPNPLRSERSDRLVLSQVPSRGPQWELAPNPALSFGIRNRFGDMAGWRLVCNFQGPCLEWGLPKAEGPPRKACTLWSPRGLSLVGPLPHRLGTFRCPPKALAIPCASLPKGGLADKVQRGITPRETRKKNRVGSTKSPLGKGGCGLFPRDRSLWAPQTFDPDRSLSPNGPLGWAPSGPRDKGSPKEEVPFRRWALSKGQQGKDQSFRACDFHFSQRVAFSLQGNPFGHGTNRGLRPKPIRFRNTPM

SEQ ID NO: 1002603 - protein, 118 aa, Homo sapiens
MVVCKKACKGQRKTLRNWDRNTNQNKFTQWKALGTFPRCHGFRPEGRRIAQITNLAGGVPLSHNAKLVKRWSGGFLHRVENSGGTPGVGLCTTLGNTFPIPTGGSPNGNRSAGFGGGN

SEQ ID NO: 1002604 - protein, 209 aa, Homo sapiens
MACKTANRRGATTLGACPTEDVHTTGLCRYLSVVALGDNVCTQGTEVVFPDRGLVVDVASLGHFHFIPGKRYERVTHVEEDAAKRGAKTHRGHVTPVEHEVIPPPTEERKYRRKTHDCLPIVGEESPPQRWGWHTSKKAPELSMMKYQDVENTTKSHRRRVQALSETSMSKDSGENAEPHDPTTRRKETDEWTRAQLTCGTGEQRRAHG

SEQ ID NO: 1002605 - protein, 74 aa, Homo sapiens
VYCTEVPRDAVRAVSLCLLPIWEALDAMGSVVNNGSLRVWEGRNPKVRAPGMWLSVGLHSEEEMRASTLVRRMM

SEQ ID NO: 1002606 - protein, 61 aa, Homo sapiens
MKKNKDEKEENTEKKKKEKRKQKRKEKEKKGTEKKKKRKREETRKEKKNRRREERKEKSTL

SEQ ID NO: 1002607 - protein, 206 aa, Homo sapiens
CAPPLTHSLPSFYSPSDSRAPARSELTPGSLPRTPAAHMEGGSKGKRSRHRGAETEYPAQKPVQWVRGAQKTNRHKKQNKKKQNKNKTKERHKKQKKKKQKKRPTKQKRKEKRESKKKHKKKEKKKQKTTEKKKKEKKQKEKQKKKKKQKRKQKAKAQEETQKKTKDSKKKKRKMTEERETKTKQQKRKKKKTEKKTKKRRKNRRR

SEQ ID NO: 1002608 - protein, 391 aa, Homo sapiens
MFCSPGQARQSTPWPWVMVVGLSGCSGLLQPRLELGAACCPAEASSPALLGVICHTDLRKNLTVDEGTMKVEVLLALTDNYMYLVIDDETKEAALWIRCSPDGRGRGEKSTGVKPEHSASPPTTLGPCCGDMRNLVKLESRTEGVPGVTTVIGALTSARSRQLVPHWQVASRERSSAWRTRDTKFRTHICHYVEQAREARRTPITEINTVNNLGGWLDSGERIYEREPADEECESFMTGGYMGRHAPGDEESTRWTKKGSSIQQTDTGSRNGQEWKTGKQGRTARRRQAEQRPQKADSTRIGPRPKRGQSKPGKEERPAHKKPNTVRRRRTNNTKKRKKETTDGDKRKQRSGEAAKEEKDRRKTAGEKKRPRQNRKRRQDTHRTESRQPGN

SEQ ID NO: 1002609 - protein, 492 aa, Homo sapiens
GLWEMLMQLSWLDLPERDVSVEPEPPCLPAASASPPRTVSPGPGARHACPMSLSLVLSMCLPRVAAAASERGGTGTMLSCCCLCEDVLCLDPVAGAALRCCGVRGKPACPGRHHCNEQESHVHFNIPHKAHITNILYHTYQHIHLHTSSYQKHATNHHNTLAEHQIAHCKSKYVHSHNNTPTRITQHQHYHHSTQLNYTRTHPASTIPLIASSRTLPPTYPPHSVPSTPSRTSHTKPNTTIITTHPHLPTNHGLLPEKHHHNIAQQPPSARTAPPTPHHTHTDKAYTRNTTAINRTSRSSTQPSSTHSPSKPLYKHSRTHPSRQTIVSHHNPVIYTDGGEGDRAERDTPSRKLSDASPHALARQRRAAALAHRGRDAQGSTRRAAVRNALGPLALTRAFIPVHSPNPVRPPHQLPCTHHTPSTPLSRSHYTLNTPYPPHHSSTPSSSGVNYHYTHIQLTTPTHYQTYSHTSTLYHLTTSPASAPHTPTISHN

SEQ ID NO: 1002610 - protein, 120 aa, Homo sapiens
MSHFGAHASDNACPTTQTWANANTGAWTVPSEMPCRTPDPEIVGDVRLQSGRQGHVHVSVAPGRLIAYRETSAARRCDWRPWGSCLNNKYSRGLSWQEIPMGEQRWMRVTTIRALRAMAR

SEQ ID NO: 1002611 - protein, 257 aa, Homo sapiens
GGTTQSYDTPDAGASFSRHFAANFLDVFGEEVRRVLVAVADDSWALAVSAEAMEPELADTSALKAVLPYGHSRSSEDVSTHACTKAPRSQRASRCRNMSLCRGGPRVLQTVCAPVLRLCPEPRRGMLAPCTVRAPATMWTAVPERCPRNAGLQGGAGGHFNARGRCASWCATTRPRCSGGSAQWQTLPPLLCAGAVADGTLPLEVLRAPKASGPKVRIPTWSALLEVRNHHAPWKLQRRITHFVLTGREWERIHLGE

SEQ ID NO: 1002612 - protein, 299 aa, Homo sapiens
GGSGYSAARGVTMALALARRSLGFPHGVPSIVAERADFREGTDQRLSGGLARVSALNMRPVPVGRPPGSVTVRRLEAGGSARERRRRAPGGSVAAETARLPVSREPLMGRQSHTRWPSGLRSKKGLLVSPQRKTQQTKVSTARPEVQGESTVKNGRRLASCFRNAVRDVRHVLQNIAGVSRTCAARLCRNSWGQNSFSSLLPDADLENDPYAFHSSGMVQQFQDELISVFQIQALNAFFNFWIPDIHYFQHQFFWIGHEKSGHLEIRAHSRTTDIMNSTMISSKELPRTQGRHCSGIAS

SEQ ID NO: 1002613 - protein, 138 aa, Homo sapiens
GCTPFHFVKFVFIPLYVCRGGRGRVTGWSEGLLPWNRERRTVIAAWLLCGTVLGILWSEADTSGVTWVPSGVPCTPPSLCMCVLSPTVIENRAREHHRTTAARCSRVKPREWRADMVRVPHAVNRPHNEQRRVRASKG

SEQ ID NO: 1002614 - protein, 206 aa, Homo sapiens
  misc_feature (100)..(100): Xaa can be any naturally occurring amino acid
MENTWESGHNYNPLEGAAHKEHTPPGRTGYEHNNGEEHTGADNTAQRDTGTRRAVEQEGAAQKRNVEQPNDERNANRQAVHNNHEVGRHRRNTTKARPHXNPNRHSQQNEKLRKRNNTENGENHIKKMQQEEVEEERTKRRSNETEDTRETDTDRGERTTRTEAGTDQQTNRRTDTIDKTYRTHSGRKQHNNRREGVQPLKNGYGR

SEQ ID NO: 1002615 - protein, 121 aa, Homo sapiens
MIGVTTTEMDNEQHSITNGLPPQGTLEGHHEATPTATDTPSRRDTKGNLEQPAPEYTLSATRSATTHNQRSTKREHQPGSQHAQPGTTYSVRRSPSTSVPPGKQDEHSGGTKIQGNPTPGT

SEQ ID NO: 1002616 - protein, 148 aa, Homo sapiens
MALLILDIAKQIGADRIHKNRVGNIYNTQFPENKGAVGHTAPPPGKVALGGTHWGGRTAEIRPLYREHKGAFKAFRSQRCHSATVTQRRPPFCAHRPTVTELLACGRRGDTPRFVSQHSGQRLTEGALSVGAIRGYDSVASLPNDLIV

SEQ ID NO: 1002617 - protein, 132 aa, Homo sapiens
MLLGRLCAVGTSTAYHHVKTRGTPPLVARDTVGDSQRRTTNSAAHCDQHIARRPTEEKSEQKAGEKKHTKGGATDTKTATRVSTRHHTPRGHTSHNNVHCGRTKQASTTPPPTQKHTRFDAQACRYQLSEQT

SEQ ID NO: 1002618 - protein, 40 aa, Homo sapiens
MEGTQGDHPVVSKRGTQRCEEGENRAQGGQEKGGNKREAG

SEQ ID NO: 1002619 - protein, 393 aa, Homo sapiens
MTLRVVRVSGGFVLLLCAGCVDVLLWLCNCGHPGTPVSRYLGRMASEPRTADEQGQASVPLLTLSMAPQTLPMLFSGDPGAKRPFSHFSLWVPDLEGLRPSRRVVFKATAGEQHRTWPLNDIFLLRVTPSWNYLQTRVPCYGLPCSETLVPRLSNLGKAVMVVSSRRERLVGLARKRPPSPGLQVAKKALAPENLENFVAYQHLAQGQAWDKPLGTDGAVALVGPNCADINPYSITPGGVKKSKEKPTVYGNQQDVLVRQLIKGTLGSLAGVAQSRRNIAMGAIAHIFIFPLHNKCCLRYTHRIGHCLLFSQDTCVNTADSTLNAPCAPIQKTGLGAPKKLSHQGFHTPFRTVGGTEVSLCPLCDSNCLVANGKPLRNAAIGRSIYGGREYHG

SEQ ID NO: 1002620 - protein, 71 aa, Homo sapiens
NDDRTVKECAKETRSVCSGPSCREEAGGSDENVVNSPCYEEIGLLRTFGIVTVIIQSSGRDLSRFVTIGTR

SEQ ID NO: 1002621 - protein, 204 aa, Homo sapiens
MRFPKENNIAQTGHKLTTDIAADFTLCEKIYNFFDDTHTNRYEVNELCYAMDFTAAATGLMALPHVQNSTMDHTMHYATTLVGLDTGLVLSAYPNWQHPYLLRFTRFLIRLVTRFFLHVAHHDDCGTNLFALNGPLLPPCTTFARSGYPLTNSIPTTKATLAPVHALPTHKRYVTIDPPCKQHGYSCNTTCIMISLHYSTELII

SEQ ID NO: 1002622 - protein, 715 aa, Homo sapiens
MATSPATYYLAICRQTTVTQRASIIPGFTPRSSNAICPHSTRAATDVYSGLTAAIHHLPSAALTTRIALLLSPVVASTYPPPPRPALPFPHRPPSPFSYCSSSAPYLTLQPTLTLGRYTHPYRSVPTYTAIQTTGTIHTITLKLHLQSPLRNLSTSHLYLAYHLSINQSPTAHPTPTSVSALFCTAVNVASMFGSYVAAPTLGAPRPPTPYAFFRSPPYVYIAPRSPFGASPFSIPSPSPANSQYLPVYPVVTHSACQLLPPLLYVREHMLPPYSTYAPPITHLSPTDILHLTHTTTNHNMLQHLYSLTRFAYPPHLLILYTYPLNTPPSPTHSHHFCALNLPPLIPPTSTHLHTPTTPPLHPTHPLIITPSRLLPASITHILSTITTITTPPHLHQQHPYYHPHKPTLHTLHPPTPLASSTPSSPPPHPIILPPPPYSSPHTQSPHSSQPLTTLRPICTHTYRHHHIPPRSHYTPLPPHLLPLLPSHIHTLVHPLYTPPRSSLPTFTSPIPHSLPPSNKLLHYSSITHHLTVYIILNIALDLNLLPLPTTITSYSFVSTYYVICCLQLHSVTYARLLSSIRRVSSQCLLTPLDYTLPIPLSLPLLYDYFFSLLYAPHFFNLYALVSLRSASAASLSAVPLPHRRLSSPPLLALVYFSHSSLLVVSPPSIQPTIRYALTISSSSSPPSSSTLTTSTTLTHFHHTYHSYPPTLSPI

SEQ ID NO: 1002623 - protein, 279 aa, Homo sapiens
ALVLRALATVGVASWPWGLGRASDLLQGLRPCVCWLSCARRTWSVPSMWHPAVVRLKNVCPDCAMHFANLRRCNPAACAQGDHCRTAPVMQDWSAHRCLVMRCMAPDPSVLSKPMCSAGRFLPDDVDGRWSILRSLNNDIGMSQRSFEWRSECASWHPRQAGRCVSLYLYTLGTTQPAQSAGYCDVTMHLRGTPLGSVCGLVPYVPAGPWVTGGTLKVRSCVRWKPGPGETVRPQEPSAVVEGPQCWSCGLGLSIAKQGHPRFAGGAVPLVTVVGSRDL

SEQ ID NO: 1002624 - protein, 372 aa, Homo sapiens
MAPVQRRATTKLPLGLNNIYVPVRAELKLVRELNDNRDARAQDGSLAMGTRDKVVRQEESGQVCCEPDPRKACARSPAKGNLMVAMCPRVSLLARGPRGRPVEHGIGAVGFEKAYEKWRLQRVDREGGPLMKPDQDSTADTLRADVYSSTSGPIGVPDARTLAMGTTAVRYASAERLVAPWTQVKEDFHFRASPIIELRKSGDDDRSRAASTASNSQRKDGLQRCQQSGHHSSTTWVTVEATVPRYWSARTQLLITQIPVTRQSRRAPRPHPGELVSLQEQRATYIAARHFGSFTRGIGPLSHWSRALTKRTLLRSYSVEEYPRPKVYSPTVYPLSEPTMVHLRKKESTADPARAENYKQNNKIDGRLGKAA

SEQ ID NO: 1002625 - protein, 268 aa, Homo sapiens
HREYDSDYVMRPTTPRSMYAGHPCRAVPSTSSEHSTGIVIEYQGDGVNQAVPILGRLLPRPQAILRLDLGLDGDLMQTITCTIFTVARVHASNSTVANGNVIDATIDREKAVLRYRSLSYSNMTLGPTDRSSLSTRGAPSLLSLSDGSGYQSAIWCQLSGFHVSVKCSCYQAIPVPGYGRLDLQSTDNSRFNFQTLKVDSGHSDNMNLVYDQQRVLSKTAHYHGSPGIRRLGNCRKSDDHRACAPQHQCKIQDHRTHQSAKVLGGGSV

SEQ ID NO: 1002626 - protein, 291 aa, Homo sapiens
RATFPALRAGGEGQRRNGVLASSGPYLTHQSKGVAGFISGRYCHLESWCVHDQTTYRYFACYDESPVGEEHNEVKKDMAEEAPMLLKEADERILGNVSQSTRAYIFPRDFSLGARSLVRRYDSRTRLPELVREDDVASIREKANCKSLDWIVYAQMHEEPRSGEKTCGEGEHGWGHTHDALCNARLRTRRETPPTRGWLRSIVAMPFSATLSHGYKGNAENVCPAPSLDADVNSSPARTPGPPGHEGGDRQVVQHRWKNAGSTCYVLLRMDLWQHAWNINILGSTTEPLTA

SEQ ID NO: 1002627 - protein, 135 aa, Homo sapiens
  misc_feature (15)..(15): Xaa can be any naturally occurring amino acid
  misc_feature (22)..(22): Xaa can be any naturally occurring amino acid
  misc_feature (25)..(25): Xaa can be any naturally occurring amino acid
GPNEVVEVAKRGGDXRWPFWWXLLXCLPQSAKALRPSQDFQHARGRRDGAGSSSESNRDEERLRQRPETIEHQQGPVLSNCKREKTATRGGSRMKVQTLPDIQTEGHWPYAGEESTRPTWPGEQQEAGGPCPARA

SEQ ID NO: 1002628 - protein, 116 aa, Homo sapiens
MGKTRAPHEWWGNHPTVSNTSPAEALEGGCGEGTKRERAPSYDHEGTLYIYLLALTALSALALSPTYTRWHPDSGRLTRGGDTAGGANKQRRGGSPEKKNGRRAPPPYISRTQRHV

SEQ ID NO: 1002629 - protein, 209 aa, Homo sapiens
MSHVDLGHLKGDKLARVVGNDPGHERSMPLPRSLGAARMSGLSGQAEAHLRFQGVHCLLRLTLAHESDRENRASPEARAEPNFARVRSMTNRSSPSPASLSLALTTYTRLDDEYDGRKTCTQDACCFSQRGIARGQPLGVFVVALGGSFAYPSFCLFRICLGHPCTLNIRSPRLGVAGGPHEECCPPGSFVYLGDPWVPVVVLYPIPRV

SEQ ID NO: 1002630 - protein, 153 aa, Homo sapiens
  misc_feature (79)..(79): Xaa can be any naturally occurring amino acid
  misc_feature (85)..(85): Xaa can be any naturally occurring amino acid
MWSTDTLGMAPASAVRNLLACPPGIIPHPGEASATELTRRSMELHSPCDEGAEGCCDATAKRQTTCGVRGHLAPSGPVXARVGSXHPGTFLSHASSTHIGGIFLYPSIEVPSALTIFRRASMAQRPLSYDLGLTGRSDKCRGLGFAGLQFGGV

SEQ ID NO: 1002631 - protein, 168 aa, Homo sapiens
MPRYTHSTIHIMDIVTTPMTNSIVIIARHDHVVTHDHHHDQTELVTRDRTHTTQQYPAQEPSPRDNIQRGGNSRETKRVNRQGEEHKDKKQKADKEPKMGQDKGQETTKKDRRRTNAQKQEGKKNRPTRQTTNRQNQENEEKQQSRQTQPEKMRGKGKDGKDKKGEKR

SEQ ID NO: 1002632 - protein, 112 aa, Homo sapiens
MGGDYHKEASWDTEKTRLRTLRGSDPKMVVRTNQPRPPRAYTHWGCYKEGPRGAPVGVGGLPATSGHNNTASPPRWEGSPLKVERRRQKRLFQKNNDCCGRLNNPLVVWLFS

SEQ ID NO: 1002633 - protein, 259 aa, Homo sapiens
  misc_feature (154)..(154): Xaa can be any naturally occurring amino acid
MSSSEEKSTPYHACRRQEYGPTNRKFRPVPTDPRFNKMEEHAFLAKVVYRVEMVTTVLSLEIICCLNDDINGTALNRFESPRDYTPKRSSDYTVSRFSPEATSCTKFITAIGWDPEKLESTVCNVAICFHVLNIPQDSAARIASMRRMFKTLLXRIRLLTAELERSTVPVESHVVRIGPHNMCQYQRRTMGPNSGCLIRACYPFGVFLRMKSQPLRHVKLCCRQNGTVVSEIRPRLTPDLEWVPNWLLKVWSRKLVNRA

SEQ ID NO: 1002634 - protein, 156 aa, Homo sapiens
  misc_feature (57)..(57): Xaa can be any naturally occurring amino acid
MWRTAYCGTRRKHFRQEHTIIAFRVNPFFPRIFPTETGYRRLEAANIYSPLTQGLMXETLREGSLSRGVELSQGALFFNIPQDILSMSRAHISTCAPGVCVREKPRGEKATFVRPLCARPACEGHPGRDLCGRVNARCSPCGCQRREVFIGAPVAP

SEQ ID NO: 1002635 - protein, 362 aa, Homo sapiens
MVHRSWAMLPTKLFRYCLYHLLKVQPVGSAGRLNDAGQFWYGTRRDVCALRIHNSDGSPGLLLTRIPGRGSRHWVAPNLSMEVASQGRSLLTTTQPNRIGTFIWMQGKGMTKKAGPLPCLSRPLWPVPLQTIAQEFVLGAKNALGGNAQVKGDAKPIIGAFRGPSPLRPPLALVWGGLGPGPMADLGALGTRGGLSNRLGFGESPGILLEAWGLAACPPGHFAGSAGTEKVQPNFSFQWTVGQEKGPFFTSSKLLDPLVASLAWGRQAKAAWWFSPQGPCIFGRNKPQAMTGPARSYAVFPRWFLEVGGVPQGILVCTRDSEEPWEGTGEDKSGHQELEAVCREVVAPSRWIALETGCADWA

SEQ ID NO: 1002636 - protein, 99 aa, Homo sapiens
  misc_feature (54)..(54): Xaa can be any naturally occurring amino acid
AEASWCRHGASPRAVVIGIVKKQAEPKSRFCRGVPDATDSHFMNLVAGDRGRHXCGMQVFLPVVLRAINGMSCSEVVQCSLLPAAQALARMARKCWWPK

SEQ ID NO: 1002637 - protein, 141 aa, Homo sapiens
  misc_feature (1)..(1): Xaa can be any naturally occurring amino acid
  misc_feature (93)..(93): Xaa can be any naturally occurring amino acid
XASMCRSSMRRPRIMPRFIEWWLVALHQASYATALVIEVGHPCVVEDAGKYLLLKTCVPDPTELRLAQDTGYIEQIPWWRQMVVLLGGKAQAXLLSSRGLPVHQAQPPLENPIPARGPMDGRNSTERIPEYDQIPEEYVIT

SEQ ID NO: 1002638 - protein, 120 aa, Homo sapiens
MPRGRMCRRASKLVLLKLGQLAEKWVQAKGEKSMSLAFSCQCKIWRGAGPEGVVVKAPFLLSGGLGDKLEYLQKYMKRSVVRMVRLPPGYQYTDSMPAWLDFGILLFSTDVFIFSHLRLT

SEQ ID NO: 1002639 - protein, 200 aa, Homo sapiens
SLTWLNGWGGENKAWGLKNSWSYSYKRGNGVKRLKTTLSSPILPFLVDEAGQGPAPCCWGLGREGSQSLEKVTVSSPCVLSRGLDRFHEVWGLQHCSVSQDATVSLRLSATDWSRELQRVDLGALHRHGASCVETLGRQRYGSIQLDLFVWEPPVDQPIAQGLVSHHLAGGEGQLVDQALVPDDLGQALQCPYIGSQTQV

SEQ ID NO: 1002640 - protein, 155 aa, Homo sapiens
MATCRSKSRLLTAVCCVRRAAAVLSDREPQHEELPWPGQPVAAMIGKLCWDVGENCPLLWPGDKLVPCGRMHWYNACGDGNTVHGMCGPCDIQTHVPMALRSSKCTHIVSTMRLKLADHQERDMRGQAQALLCVRSTDRTDYGHRRLCQELVVRS

SEQ ID NO: 1002641 - protein, 114 aa, Homo sapiens
  misc_feature (108)..(108): Xaa can be any naturally occurring amino acid
  misc_feature (114)..(114): Xaa can be any naturally occurring amino acid
GSTRVQLVSYFDTSELDLPVNECGHWTQAQTRYVPYGDSEFIKCNHVTLDETLPGPNIVCEDLSIEYTIVGVGGQNRREARNLHSRSRRLVRWLGDLLASSNSVDLLXTAIVSX

SEQ ID NO: 1002642 - protein, 118 aa, Homo sapiens
WRRLGGLSLATSPPRTWTAIGSDVWRIAKKGQVGGSLLAVVRTLQENLKKIMQAFQKGISGFCPAVLWVFTPVQGTSKQKSKDSVTKLKDADVAFGPFNLRNFTKDRVVEANLESVGA

SEQ ID NO: 1002643 - protein, 121 aa, Homo sapiens
MSESNFRYREESGRKSVKRSQGGIEPEAKIPNKSDQGDGLARCVLRPFFVRDRHKKTSRAPYVERRERQQEEFAKAMKHKLGVGRYIRVGGLSIWEGKGCAKERFVTKGFATRLIGLKYYG

SEQ ID NO: 1002644 - protein, 78 aa, Homo sapiens
DKSTNPFFTKRINCTLEKKGASSFPSKALMCPFSQRGEASRGKQERNPEGLQPEAWNLRTKRCDSGVSGKAFDLCQNI

SEQ ID NO: 1002645 - protein, 115 aa, Homo sapiens
WKNVSLLSPRLECNDLSLLQPPPPRFKRFSGLSLQKLGLRAHCHQFRGIILVFYSRQRGFRQCLARRGLDSSCNLSVIVPTFGLPKVLRIIDRSHRSPNPLLTFSKSSSPFSHLS

SEQ ID NO: 1002646 - protein, 427 aa, Homo sapiens
AHSLSGTRDLRTRFVRDMLALRPPKLAYAHVTDYDMHFSHYHRYEPKLSVPSTRGCPCVRSSSLGVGTPAVRAPDVLTYSPTLHKGTTLRVAAIIDVRLSSNLIYQVNVQERLGIKTTVHAFGDLWYVCLDTSLRINSVSKSMFAYGYVYTSTLCDPDAGGIVCGFSTHVDMLRLQYLTQGAIMGTENLPSDSKVKAGSGHPSKAWQGINQSAIVEGQYGGRRIPKLSETAVWGRFDWSTSCHIFPRRKLTFRVYENPKGYDLGPGRYAIIRSGEPFIRGGVCNNSHKTKAVMMRAWAELCDPPFVGFTIEAEYSDGNSSPVVLYLIGMENQDSFPLQDSLADCAIRCGDDGNKFFRSPAFRREVGRAPKCYTTPPEGGETPTPIDESSIRAELKGGSGCSSRIRKAPRLHRRGVTLMRPFENPERV

SEQ ID NO: 1002647 - protein, 112 aa, Homo sapiens
YAKDWSMVASDMMVSMNTFFSCHKEFHDKFHLYSFLRSPMRAKNWQLCIVSKSFITATSVDGSIYSANFAGGYALRLIPWDLPLLIQMLSCGTLSVYSDDLLLERRKCLAVE

SEQ ID NO: 1002648 - protein, 134 aa, Homo sapiens
AISSPCPLRESEIIDFFLGASLKDEDFMKISASCRSRPVPDQTTTEVQGHLLAIRRYYNGHVRSGRDLRCSKGGGPTSSDPCGAHQSMDQSSLIVPVSAEADWWENNDSSRVPTAVTLQKVDKSLRRQSSGCIG

SEQ ID NO: 1002649 - protein, 110 aa, Homo sapiens
ADDSVPPLICVPSPSDETQTVGLDGNEDHLGGLDTDHRFTSGRSLCALLHLRAEHRVLAMKKSCSLTRVDRLNCCAYWEADAQAKDGCTTSDPAQLRLHYECALCAMLYA

SEQ ID NO: 1002650 - protein, 89 aa, Homo sapiens
MKCRVHTGGYHNRESIAYGGTTSPVCKPRGSRNDNKRRTGVITGKAPWAQNRGSPPWGPGANVVGGGPSRGPPKKTRRHSGSKLGTKDE

SEQ ID NO: 1002651 - protein, 54 aa, Homo sapiens
ALPEAGVSSPPTAEHPVPEAAGSATVIAGLLKARWDQGAEAALAAYVAGKFRTI

SEQ ID NO: 1002652 - protein, 189 aa, Homo sapiens
HGSNLQTACCGTRLCNRETQSWKTWGKYTMVLSTREIFEATFIIVKRCVRDGICELCTIVSPRVRPGFFMLRIGEYPYGMSYCLDLAVTTHRSSHDSGLRTIAHTHLSWVERRDEMTDMTGEPDATQMTGTRTARRHGMMYQAQGNTSDQGTSNPTPLIGSYRQNTEKSSLYASYRDSTFTGAVEARGR

SEQ ID NO: 1002653 - protein, 108 aa, Homo sapiens
MNAVGQDTWSQLVGHRLGLDSSVAPPAFVNVLLTHKPVEITIVRGGSPLYVFGGTKLFSTWPARKGARRIEPGSSKKRHIPPKEPGARRRIAQHDTCSSMEWKPNSGM

SEQ ID NO: 1002654 - protein, 136 aa, Homo sapiens
  misc_feature (131)..(131): Xaa can be any naturally occurring amino acid
TRQSWCRDGVSVSLPKCRGRHWTDEGEQGYGSSELAVRGELQCHDSTRASDFTVLVAAHLRAPHYIVANHVSRINVKDRHSLACSGCVLVDGRRPESSRPDGYLGYSLGPRTQRHKIHIGVGVQDESAVRXACQSR

SEQ ID NO: 1002655 - protein, 140 aa, Homo sapiens
RFRKWVSSPPNRMLLCLKLSGVCYGTVGVLHEIPAWAKGWAVCRYGMASQCHYSNAIDDGVTRGFMGKGTRRRLVKKADRLWGVIARGTAAWHAAWSRRNRESDARKSMRGLQNPLIGHDPSKFPYDDPTYDKLSWKTLD

SEQ ID NO: 1002656 - protein, 109 aa, Homo sapiens
MSLPLVAVSIYVGLVVPLAPFSARHKTTVWKFGRTEHLDRKSHQEGLAPLVEREGKRALCERAFAPETSFYGSTSEQQPLLHYELSRKCSGTRLKSGVRHNKPAVASFV

SEQ ID NO: 1002657 - protein, 164 aa, Homo sapiens
  misc_feature (37)..(37): Xaa can be any naturally occurring amino acid
  misc_feature (39)..(40): Xaa can be any naturally occurring amino acid
  misc_feature (64)..(64): Xaa can be any naturally occurring amino acid
  misc_feature (117)..(117): Xaa can be any naturally occurring amino acid
  misc_feature (123)..(123): Xaa can be any naturally occurring amino acid
  misc_feature (132)..(132): Xaa can be any naturally occurring amino acid
MGSHRKAPHTTGLPSVPGDPVDTSAPSRSDDVYDSEXIXXKEAYHVGRSFWHSLERDSLEGSIXCRVWVDTKERIDAVPTCSDVGCWIGRSSRCSYDLGVEGDALHAEVTRTNHVRXNEEHSXHFDTSLGTXNPYLVGTVSSIAVQRGHPERSHCPGQSKRYRT

SEQ ID NO: 1002658 - protein, 199 aa, Homo sapiens
MRGDHCGIKRAPPQEGAGKTFCRAQPPGNAAPHSSLTWPHRRRPTRRKEPLPDQRHHKTRVDLHSEGPNNHTPHHGGSPRARHHQQKAGAPQPTLPCGSCHDPENNQSCAHSSTNNNIHSIRFVAIIYLLSFCHNTQHCAVISPHQHTLRIILILNTHQHILLDQHPATSPILFECLIGPHHHHYKIIYQLNVDFVYLP

SEQ ID NO: 1002659 - protein, 270 aa, Homo sapiens
RCLSPSAREMALRPEGASPAVPGTLRSPGLSASVGRKQLGPLIFAGWPNGISYSSLDYTGTWSSSISSTSDSFPSGAVASFWPLGLRVKIGHMRAGKNHMPLMVFHKSPGSRLTMQYSRVLQESNVLYQSTMLSNEVKQFLQSKDLEDSQWMIARIVARMPVGRITAFLHDLHATVGPENGGPGQTAHQSAVVTEKQQMLEQHLQDVRKRVQDLEQKHESGRESPGMTFDFNYQNPQESGDIARSELENNHVSDQAEDAQVEQMLLALDL

SEQ ID NO: 1002660 - protein, 150 aa, Homo sapiens
KKTRGPRGGGTPPGGGQASLSLLFLCVIILFLSGVAPQEGGGGGGGSSHYCSPADGGRGVLSLTIMRFCCSSERERGVFLHKIIQRRISLYNFRAAREKKRRESERVPPKRERREECVSNEWGVMVLTTHARGMHTSEYKQGEELSFRAR

SEQ ID NO: 1002661 - protein, 157 aa, Homo sapiens
MPSKGPLQSVQVFGRRRQRQLLAHRANSGMVSSKVNGRPLEMIDPCMLQYKLRGSSVCFSARSDFAGVHIRCFRVMGGVSRGPDLCYPSGPSPRARGWPYYQKICGYEAFHTKEIKDILVQYDRTLVVRCPSSLRVQPSLEALVPALVSRNPTDSPS

SEQ ID NO: 1002662 - protein, 496 aa, Homo sapiens
  misc_feature (427)..(427): Xaa can be any naturally occurring amino acid
GQVCSPGGQIPTRCPHHAVTRNPQDSSSGPTLYLWNLPCAVQGPQSMEAPWRVRTDGASRVNVCHESVGKALVLLHSKGDVVSCADLDGALAPGFILTACVSFLVPVMGPQGGPLPTMPLWSQALTSRGEAEYQVRRTKANDFAKILQTPGESGERSVALAKGEGDHTWVTCTRLIGGPPFEHTELGMIVMLGTCVHSVGAIRPNRPMRMSRIECLGAPNPDNPHEVGEKGSESAWGIMGGASLAHDAEQMCPHAKCVEPRVSSCFGLVLISVRGKARFIPMRHLKTVRVTRHEGMFHHIPLGVWTVSERNPRRRCHRSKGGASMRAHSAPRAVPEFEHVLTCLRSVGARLTSGYPSLCLLATVLASLGFCVTLGPSQSTFTQVPAICPRVWQNQVYQGPFHHLPLIPPIGAREDTPSRGAVIGRIXEPHPLVVVPQEKYTQGGNVKQNTKIGPKKRPRGVFHMARQKDKEDNRHRGRVGRNRVCKTPQQSSSQDR

SEQ ID NO: 1002663 - protein, 41 aa, Homo sapiens
MENPQSNSNTIFPGGFTIPTPSFAPKGPSQGRRDPQKHKAQ

SEQ ID NO: 1002664 - protein, 261 aa, Homo sapiens
MNPDDHNMPLAGQEQMALRLHERRKSHAVRDIERVCIPWSRSRRASMLVDAGLAMGAMESKRSSVILICRRWHSGKGIFATSANGTHDARVQNGQRQNLQGCLESLVRPGRVMSSDSVTTAARGKVGPAPRGLKTGGSAPAGKNQIFRLRTGASQRVASRGCCGEETRGGTPGRTPHKGGTAPPGREAGCWAKKGPGPPGEPKNWKGKKGPPAKLFPPNQKGVVAPRGDYSLGTQAQLLGLSKAPGPPSPGPSLVTQGGTP

SEQ ID NO: 1002665 - protein, 251 aa, Homo sapiens
PGVGERGPPRNPKGPPWAPRTLRSDSDKLTFSGHGGDLEFGGDLEARVGSSRFRLWTSRTPRCRRSARLSLGALGVIRSECPRTRPAFSGVALGAQGPRPGFLGLPGIAQALRVKMRVTPGMDVSPWRWRAVGVKQCAPVTEGGATVSPRVPCMVLVVDELDMAGDPGTCMEAHRAPVGRTWERAGASMHVARRALDRTVALRPGGAPLSCVGNGCHGARMGHEVALLRCPVWDLIAGDSWSCRVCAGVSR

SEQ ID NO: 1002666 - protein, 113 aa, Homo sapiens
MAYEKDTGEGIPQGVNRLHRQKRPVRNGGTETQRITDRWGETFRWEHLVCTSREQELPCTSERMGAPPQGDVSHSKWGGQFSIGTGRRLGLQVRTPPTSIGGGQFRTNKGIGT

SEQ ID NO: 1002667 - protein, 103 aa, Homo sapiens
MDTQHVQTSCRARAWDPSGDWSISLRAENKNAKIVERSGILSSETTVSCQNGTGICGGLCHMMRYSDRQGRLLADLNLHLRPTLSFANLRDPPRHLRPTADLQ

SEQ ID NO: 1002668 - protein, 382 aa, Homo sapiens
GPADKYADPVSAQHAKLSLGRVQTTSTNACCTLRIRLFLRLTLGPQRHSTTSDKETCDYHTAQDHVAFRGAHAELARVVAYGPLDREAVQVQHCVLISSRHSRLVDQVNVWIFRLRNALLTQISIRSRRHETALSPVVPANLFRIDDWLLVVHPHFGNNEPIGDEAVIVAGIDGGKRRGVLEIPSRSPPWGPLAPRDGCTGGTIYLASVSRMAPSQESSKRPKKDRMSHSPTNDVPFFLIPYGLERVLSGVDPVSIGRRADRNLLIPITKPEDTVRLKLPKIGWNLWNQRPASLMPKEANHIETGATESLATEGTGPIRCKSNAILREATRDTVACVGPDARGQGTETRGRLDTKEPNEATSSALAHGVKRRAGASKNLSQN

SEQ ID NO: 1002669 - protein, 78 aa, Homo sapiens
MGRKQPVIALVPTTRQKACSRCGGGIAGNSGSAVPRGPLGTPNPVMFRDYSNVGGTQEAGASIHLKDPSPETHHGACM

SEQ ID NO: 1002670 - protein, 96 aa, Homo sapiens
TLRIGRATDTLPASIPHVIARRHKQLMGSPYTRTVGSYREVTKINQKVLNKDKNGLITWCDHSKYGLKQMSNGTRRIPVSPEQARILQSARCDLQF

SEQ ID NO: 1002671 - protein, 137 aa, Homo sapiens
MNPVLADDRQFIIKAVVSIRLSRVHAGKTTSMGGQLQLGERVTIVLGAIYSFGKRSLVLIRATEEVSAGSLCVKTDPPVRSYLVPCACEHHRITHCRPITAARVTSPLTIAFVYSVRFRAPFFDTGESAYIKVDYNA

SEQ ID NO: 1002672 - protein, 170 aa, Homo sapiens
EPKEPAPETADGPYLVIVEQPKQRGFRFDMAVKAPPMEDCRCSSEKGRKTIPLIKICNYEGPAKDLTVDLGNNEQVDPNLVLMPHSLGGQAMLGAWGSCAGFLWGPKGTWLPNLTNLGVLAMLTKEEHDGDYDTKTSEAAVRSRPQDLTEAETGELEQEAKELKKVMDLR

SEQ ID NO: 1002673 - protein, 74 aa, Homo sapiens
SRELQSAQVVALNTVPRGNKTVKANYVTMSGCRERGTAVDVDDAALLKLCDEPVNCVTCETLGCWCVVCVPDVV

SEQ ID NO: 1002674 - protein, 446 aa, Homo sapiens
MGGIQNEKETMQSLIRPPGLLAGLSEEAWRPRNRRSWRAKLRGRLHWYQEGTPDGHYVGFGSHSLFQSSTSVWYLAVRLITHSGENYVWASKCTAVVSCHVLTICPLIVVLTSDIVMTVRQAIVDGDLGSLMPAWILCDEAESTPMGSSRALGVNIELSNREVISNRTLRGVGGNEEESEGVVKRGGKRCSVALQTKENRAEQEGKVEQGPYRARKNCPKLVGLDPVRRDQDCHRKISSDPSAQTEIHLSTEQYPVSPKIIEQKAWALRNDNPVGTVMPYGPMCHLVFFKAEGILGRDGGQPTKSGYNDDQSGVRCIAGVLENSLWRQKDRNRLQTMEGFERRRVTRIRKGYPLRKGSHEDPVHHSQFDEHNFFEQGDPKTFGEGKPWTFETGATLGERPRASNSTRFQQDILERHTDVQTTGKFPFSFAQPFWNVQQKDLWGNKE

SEQ ID NO: 1002675 - protein, 336 aa, Homo sapiens
MHFLQVCICPTIASNSNTQQAQGQLCSNVALFYQLAQGINQRQVAEAIEITYIPSSHSQHYISWTTRNRKLCTVMVIDRPWKSINAQKGKVLIGIDTHVRRHQGTESDQTYIGKYTRHAMYDMAHNGSKEPMQIQDRISRRARDRNIVIDATEDNKTRTSKQNKADVERTCDTGRSKTRTDMNAPSTRRHKHNTGNKTTHVDTPNAEPHKTNNATKTKQTNTTQQTTQENRKKKNKEHTTAAQAENTTERRRGRAEEKAEKTNQQDKERRDEHNKRQPDTRQPTARQIDEHNRRDTPRRRTATHLEAGSRKQREAQPEAGTKRAHNEQKKQSNHWQ

SEQ ID NO: 1002676 - protein, 320 aa, Homo sapiens
ADAEASSPAPDRRRCCLCSCSRGLLPTRLASGNRTRVSSGVPDPAYSRNHEPLTCARCGKIVYPTEQGERVVDKFWHNSMHSIARPARCTLQHDKNYKGYEKKPYMQLQTTPKQSFTMVADTPGKPFDSSKQSELQSQVRYKEEYEKNKGKGFSVWQTRPELQRITKTQEQISNITYHEEYEKNRKWAHRRRAKGNGARKTDRRITKSRPAANRQGHNEHTQHDSTQSHRHRRPRKNQEQGPRQKGRRGTKYLLGTKTKEALQGTKDTYHHQPAKTPQREQEGKKGRPEHGSQWTYTRDKTKNTQKTQPDKDQRDNNDHT

SEQ ID NO: 1002677 - protein, 137 aa, Homo sapiens
MSACGGPRHGASGCNAGDRLSSIMKRVAVHPMVVPGTRQSMNQPFKLLDGGFEQKGCLRQTVCQRALPKDLVMCPFKQGMDAKKQRGWRPIGAIPTERRPHLGRTLVITVSLSTVGAKTQANGETFKTNWVIGPTIE

SEQ ID NO: 1002678 - protein, 134 aa, Homo sapiens
MCTPASLCVTLGPGFSTRATTSWEKGADKCEWHKLLKGPLWGGHTNIQQHWVWWNTAGVLENGWGHMGAKHFEHFFGGQPTSPHGSPTQGQDKAIDTSPPVAGTGLPIFTAISVGGRMGPHKDKGHMGVKSLVA

SEQ ID NO: 1002679 - protein, 170 aa, Homo sapiens
AGVMTKDADPRLRPRWKVILTYLVGAAILWLLCSHRKENRKEPTNQQSKTNRKRLETGSKTYCIQRNYKRKRNKQKGNRMTIRHKKRKKTKTRTHRSKNTKKETKNKEKGNKGKTEQPENKEIQRKHKEDKIKNRTKRHKEKTDTHNNKKQRNTGSKKTEKRKAKRSKET

SEQ ID NO: 1002680 - protein, 103 aa, Homo sapiens
MNNGSGSKRLCPSGERAESQLELYWTWDLLALVVTIEAGYRMGPRRQRTKAPALNPCRGTIEECDGTGVGRVIALPLIANSEDATKRGLLQLEQLDLCEEESL

SEQ ID NO: 1002681 - protein, 358 aa, Homo sapiens
  misc_feature (163)..(163): Xaa can be any naturally occurring amino acid
MSAMRLGSLETSSMNMVMTLHGFDLSVRCLMSRSRPQDGTKDWTINECVGQEKHSMGLELELIDTLTDSGTRLVQVETSSLSEEHFSSMRPWRAPLVHTSLSNGGHYTHCPLTHFMRLVVYSLLRRFRGIVIGPSHYIVNAGRPLSPPERPDLKLARRVPICXTHESDYRHDAAGMGGKAIVHTANGVASGCGDFCGGGSLATGRWRAKAVAGSKVKVEDNDVGTSGGLRKVLRNSIGLWPPGGRYNAANQRLFPVVALTKGKEFGAMGVGWDTVETFIVVDRPKGLGQWPVHRVSLNGLEIPGSVDSAKEWPSAKHTQGTSSCGGRNLLGDKTKTDRMEHAKSVGRILDAAGARKGT

SEQ ID NO: 1002682 - protein, 58 aa, Homo sapiens
PGSVIAPCRHHPRAQNQRGAHALPRALLIIGRHPMMAQLCCPLALSSQPNAPVIPLHP

SEQ ID NO: 1002683 - protein, 309 aa, Homo sapiens
VASRATSLRHHGGTVKVGVNGLGRMWCAMVTSLLVTLCKVAICWPLNDPLLIDLETTWLEHVSQSMIPHAWSNAMGYRVKAVEREACHQHGNPISDLSRSEIPPKVTWGDAGSMRYDRWEIHLDVVSADTVEERLGSITLLQGRVMPKHGSTQYCEPRAALSDPPVYRVTWGGRKPMEVTVMEQTTRLQRHYDTRRELPRSPGRTPRTMCTMRTLPPSGDEGIEPSGAEPLRVNTVCANGNLQLDTQQVTNCTSFHSWAKDTKEHGTSAWEIGAQRLHLVRKQMSVDGEYELWDTTAAVQDTIPKQKTT

SEQ ID NO: 1002684 - protein, 164 aa, Homo sapiens
GRAAVGAAELHGGTRRRGTMKKKKEGVLLFPSIKDHSLECPDVAPLNAWQQWHRVWRPSLVSGPGPPVERRFNRARAADVGVIASSFDDGNLALILFVMLLRGHSGHSACACSGCWRHRSMSSCGGACIVRLLARMLRMNHNKGFESKTGLTLERGCGAGRIPD

SEQ ID NO: 1002685 - protein, 175 aa, Homo sapiens
LSRRLKHFPRGAAVATTCRDITQADPVPEPVSRGARGGVRSWCPWQGREPLPQLPEMPEPSLGESHRGTCTYSAKPQSEDQAVSCCPPYILPELPLRVLIVSKQTSWEPCPLTSGTLGSLRQLEVEQQRAPVPALGDVCGLSSLRELKCPEEASLSTLPEELGELPTESGWISPL

SEQ ID NO: 1002686 - protein, 104 aa, Homo sapiens
EPDEGGAEQAGDRQPELGLGEIALLHLQHGEAMVMEENSSIDVFDRHDRQVERWSLGEGPGRSELRPSTGVGGRTGPRSMRQSAHHGMIREVRAIVLPFRVMLS

SEQ ID NO: 1002687 - protein, 284 aa, Homo sapiens
GASGPEFGGWVWTPTQTRRPPCPRGGRDQKRIVDLPRPVAQSSCVSLGPQRLGLQTSGVSAYQLPIRAVLRGRGEASTWVWQSASLGSNGAARLVWALDARGILTYTGLDSMTRSGFPASWLSAGYGLHVPGPEVLRSTPTGTRAPRLRSPFARRLLDSPWEEPVTAQSEDQIKPGRTHGGKSRSEVPGSSFIVEGPAMVFARNSRESREGSRGLQGRDGGCGGAWSRFFAPRRGTYLPPEPTGPLLPVRGTAGVVERRACARLTTPRVVGGLRLGGVSRHEGT

SEQ ID NO: 1002688 - protein, 233 aa, Homo sapiens
MVPRHVPPQMLNIPQTSLQAKPCGLHRMPSARVAARGSMGPTRDSLSEPAPLTLDTSGKNLTEQYSYSILVLSAMGKSHSRLYERSSPINPAQSGSPNHVDSAYFPGSSTSSSSDDEEGSGGCDKAYQAGTRLAGDDRLVNATQRPQARGDPGDQCKGRRLCPLPLQRTPTSRGLWEARWALSSQSRASCRCPPWNHMDISMSSPCPPDRTCGAERWSEHRHKKGLMYPYIFH

SEQ ID NO: 1002689 - protein, 110 aa, Homo sapiens
GLEHRVLILDGSYDKVRVPRPLPSYKGSTWQSVRRGNPVLGGGTDVCGQGLPSSEVSLSSSGALAGGWLLGPGGLNSLGGHGGAMMCPPPCWLVRQHCGWSITPGRNEPS

SEQ ID NO: 1002690 - protein, 409 aa, Homo sapiens
  misc_feature (102)..(102): Xaa can be any naturally occurring amino acid
  misc_feature (121)..(121): Xaa can be any naturally occurring amino acid
GVAETVWWSEAGRAGSRLVPSPSPGASVTPGPQTVQGMGKGPWWTTSRDLVPSLLQYLVSGGSVLGQQCTTLFTLKLIGVVRATANDPRYKSTSKEVSLLLXPTGKERGRSGVHRARTGGXAAMSGMSWHSDPLVAQSVAVSSGLVDAVGPTVVPDVPVASPVNGCNLEACGNCRSCEVGAHGVFKGAGATDMVHVVIGLAAEGESVRRARSLADIVDVVRRYFPLIASENDEPNAWKIDSVPARVDSRSFRALRTPCGPPFLRGVTHAQLGPLCPTVGSIGAKFNCAHKQVGVRVAQYGESRKRTPFILRKGHERCPILSNLGDLHGFNQCAAFAQKGVSRPWFPSKQIAQRATPMLCVFGGNTHERALTGVFITTGLGGQFYTAQSVSSHGLRDRPERSLEEWARSQ

SEQ ID NO: 1002691 - protein, 319 aa, Homo sapiens
  misc_feature (40)..(40): Xaa can be any naturally occurring amino acid
TLARSESQWSYQEASWGPGESRELLAVAASVWSVAFSSLXVTCVGLDVMRGWEVRLRCLRACVAQPLRRASRVCPSTVCLRRLRRLYHDMAQLPRQKALSLVNAVSRWGVFLVTCLLDLLPDYLAAIYEALAGLQRERLQFPSCKEFDPGHGLLPGPGDGRRSHWLTRKQLRAVTSGRKATGICWEHVNGGARYALVDDWGQGIPRGWVVAAEIISSQLLTCLVYCVFSLGLSDSGVRGAGGRAAARPGFGPLDAVAWLLLVHKGIPGCQPCHLRLVAEPPLGAQGGGLVVGILFSCMTLWASGWVQVWQSRQGLLTVG

SEQ ID NO: 1002692 - protein, 111 aa, Homo sapiens
MWGWLAICKCAGFSVCFSCTPLWLLKTFILLQNHAGLAKGWGRWEDRPQRGSQENAPANKTCLVGQLPRDGATAASASWSAAPPVLRGDLAPFLTSVLRALFPASSSPLLA

SEQ ID NO: 1002693 - protein, 166 aa, Homo sapiens
MSSEGSVIDQVTVKTPESFLSKWKEGKQRDRSYSNLRLLSLWLCGHLPSFLVPPRKPSSPSKASPASVPPNSVRRPSSYHHLRPPKPPRASTRTPEATFTLRFGPSPRVTLFPSISPVFPGPPLAALGILLTVEVYKTKPFGRTQFPGSVTILCPETEPSNDSLKA

SEQ ID NO: 1002694 - protein, 66 aa, Homo sapiens
MKGTEPQFLPLLQLTVAPEEQRRELEDTKDHPYGGGKGELSTSVTTAPGKMSSGNGELATPPPTTL

SEQ ID NO: 1002695 - protein, 103 aa, Homo sapiens
WGGGEKGRRKPWAGNPKKGVGPLFPPPRGISIFRNCRNLQEKQPFIPGAGCSPPAFITARPPLPSLGVLPRRRENTLPHLWCAHAKTAIYHHYVATGEKYVAS

SEQ ID NO: 1002696 - protein, 108 aa, Homo sapiens
ANSSWYRRRTVEPEREPAVKLRLGVERRIVGRAIDCCLSQQHAEDVVISEDQLIFSEEEDTSSARSDGEEAEETKSRLDVQRAVRNDTKSLAGQNAWQAGHTEGSEIS

SEQ ID NO: 1002697 - protein, 176 aa, Homo sapiens
LCGVVFAQHLIMALWEVPFLSLTAFYPRPWSPGGTSGTGGAGLLWALSYLCLTQAGSPLSRPCCPCWDIPCALAAGQLIAMWRHISLECPRTPGEGETERHGERTYRRNDAVHKRTRGPWQSRMLKGIHDLSDNYVPCRGEIAWYDGAVTEGLVVVGLINVNHPMGILVGSYHLAP

SEQ ID NO: 1002698 - protein, 125 aa, Homo sapiens
GANPASGTHRSRLSGPQADSPARPGARCDSRGCGPGSIGLILMWMIAVVRMPDFPGIWLQVGGGGRDSLLDSGRDLTSVSRPHRKDAASRRGDPMSHGCALWVQHWEHCGACLTGSLKGPGPLKS

SEQ ID NO: 1002699 - protein, 166 aa, Homo sapiens
MQCCETRRACDGLDNVISVNNGVLYLYIMDPYKVSYGVEDPEYALSILSLATNETYRDTPASSENSLVAPKVIPRQARRSLNASIVDAYQTKLLTAWVIRCLRYAASRISIGVTPGIEEESMQMHVARHERRKAGQSARSLKGPRKVGINVGRSEETGQTPGLSKR

SEQ ID NO: 1002700 - protein, 108 aa, Homo sapiens
MTTTHGSRENPTLSPTTDDVYNKTRIFPHLYEAQTTCSTRTCAYRHIATTLVTIYPPTGGLLHTCHHFFANYAPRIPPQKNSFSLQRLLLTPIHTPHVVAQLLSPQES

SEQ ID NO: 1002701 - protein, 213 aa, Homo sapiens
QSSGKNLFYLPHGLSIDKDGNYWVTDVALHQVFKLDPNNKEGPVLILGRSMQPGSDQNHFCQPTDVAVDPGTGAIYVSDGYCNSRIVQFSPSGKFITQWGEESSGSSPLPGQFTVPHSLALVPLLGQLCVADRENGRIQCFKTDTKEFVREIKHSSFGRNVFAISYIPGLLFAVNGKPHFGDQEPVQGFVMNFSNGEIIDIFKPVRKHFDMPS

SEQ ID NO: 1002702 - protein, 81 aa, Homo sapiens
MFDGTVDNRRGLRWPANLETGCDRDRSNPKRGLGAQGVDLGLEAGAPGDPGEPEPWDVIAMHPDTGPEKGKKLGTKPEKKE

SEQ ID NO: 1002703 - protein, 176 aa, Homo sapiens
ATMYHRSISMREHRTAWFNISFDIIRSLPTISTADLKSRQDICPASLLKQRFRAARIRVGATCRCEHVCSLPWLDRVRGGRVSLLSAHEEARGDQCDRGGKLINAVELKKPQVKVCRSCPVVQSSQHLFLDLAKLEKRLEELVGEDIAMAVTWTPNAQVYHPCLASGWLKPRCVTQ

SEQ ID NO: 1002704 - protein, 345 aa, Homo sapiens
QAAGKMGDFQTERGLPKAADHLSKQRRGSWLGKKLGKEKLPRYYKNIRSGAYKTPKEAYWRAPTLTRKWPLPLGNGVSIQKGEILSGKWVDQDRKWQRGPLVNPPKTILALTIRQCTSRASKRGHTRNMCREHRESPREIQGSVQKSGDTRAHRWDRGAGPRETKKVRHSSVCLKGSHKGACARDTKKEVSQKVSVKSVRQLGTDIHQKRYKEELNIDTHCTQKKTTRSQPENNKTTKNTKKTRTRGINYKGGLKKNDVEQQEEKGRNKQRKKRPPAHTNQQTRTTTQEKHTQQKHAKAKQRHNARGKPNKHDQTEAKKDEARTGENTRKKERKQQETNTETRRN

SEQ ID NO: 1002705 - protein, 129 aa, Homo sapiens
ALHVDWHLRELKLNASSLLCCSIRLPTQQSGLMAPGSPHRQDEVIRAGPEPHLKSEKMFQYTAGLKGFRLPGGPLTLAVVAEGYVASCYKNSQYHLVIHPPVSYNDTAPRILFWAQNFSVAVQGPRGED

SEQ ID NO: 1002706 - protein, 267 aa, Homo sapiens
MGLCSWICDQQTPARSGPPGGGADGTSLTRSRPRTGPNVLLGSAVETPDIPSDEKDFSLPRNISAGIHWASHAGAITHGQCGLRVTPKVTETLFIGRVYHENPAAEVRARSCETCLPPEHNRDWHSTRPPSPNTSRLTPSLEEPNFLVRNCRAAPTCMRHMCVRLRVMFPSSRTPNHWNLMLPESGESMLTTPRRQAWIGPVARIPMMRLSRLPCLASAPTCCSPNNCAHTTETRYAYTLHATLCATHISTRPPSLASQRQERITAP

SEQ ID NO: 1002707 - protein, 282 aa, Homo sapiens
MVTGGRESGNQCDRLLARRPTVDRPRAHVPPEARAPMNAPEDSGWAIHRHGLAYSIGLGTDVSHADMRALTVIFCRDGSTRYAHVPAFLQTSWPWSYVTGRYCIMDILELAESRRAKQVASHSSARWQARSPKRKVGVPPACPNTSPWFRPRQHRRAQSQEYTEGLLQKKCSGYSIRRANAIHPEEESPALTFPSAPRSTPGLPHLEGTWNRNWAYLELSPPWEERDWLVGFRIPGEKPSLPFTFRLQMIEGGPERAKHLGKAETGLAGKELPPDNWTVSSN

SEQ ID NO: 1002708 - protein, 274 aa, Homo sapiens
RSAVTLPRNGRDQVGAADPVERPHLLGLVQGASLALRACNPTALIPLQPVPGVPCCSVPPASPTDACAASPEACTCCAPAGERGERRNANAGGSPAPVRRRPEASPVQKKEKKDKERENREGRRVPSALGSAGLKKRQSAARLPTLTRLSGSTDLLSSGPNPRPGHPLHSKSWHRPASPLPKARTKGDTLPPKANHPPEVTIESPKAGGDSGRDSAGRAKARDPEDDAEVSPGGTRDPDTELQEGAELNGGTVQTGPGGITGHQPTWASPGQRH

SEQ ID NO: 1002709 - protein, 66 aa, Homo sapiens
TTIARKQMGGAWCPTNSCYQLAVDPRGPVGYEALSVDDALRVPSNSTVLVYMADQLRGKPWFHWKV

SEQ ID NO: 1002710 - protein, 128 aa, Homo sapiens
MRSDTGRIVGRRGTQADEHKRHTRGEEVVVTHHPPMLQQHVGRAYIEFNTIIVARKKGPHQRLLDMFVGENNHRHPICSVPRETNEKTTRLEGTGNWPQQVSSCRERLAGAYTPYPDEITHRQETEIT

SEQ ID NO: 1002711 - protein, 327 aa, Homo sapiens
MECLVEVCTRSSLLFVHRSKARRQPTGEPSDEQMTLVQVTGNFYWESGGLMTQNLSYRGHFKRTPKEMDTARRGCEGGNCSEPHTFLLQMTMDRRRKESNTGVRSRMFSLATSQKAVWSGRRRDSALVVPSCVWHGQDPMLQCSWGAVAGPQGSVLASQSGSLGWSPSRAKGDPDSRYRGGPAIASRRAIPSAGGNRAAVYDASSEGGSLVNPGRSAVWNPGGPNSSVPENATYSNHAGDPGMWTRETSGPGQGAQVPTVVVGSRPLPLTIFMTFEAWGGRNLTLALSRCQNEPSASPVAKKLSGDLVIAQMSTLAVHQEVSPGYYS

SEQ ID NO: 1002712 - protein, 398 aa, Homo sapiens
MTKITLNESRGKTSVNPEPDHQKTVSEARQQSTCANMRTIQVRRLGAHDKRELGGGKEDLSGTAARLRKERGQQELLCQAHDLNSQHVYSSDAKARQRLVETAGAKRADPAGEETKDERVDEGNRKLQRPANGARKALGQSLDDDGSLPWPGSCPEGLQDWVRALLSKSGKGHRPSGLHTGEHLERRNVPPKRPRKRDREAIRGRSAQHGGEEETGFEDFGLHSPYGWNSGNGLALTAGTTSSKRTVPLSLRHKGRKGAGDLEVQTENRHVEGASLPAGITALATIRGINSQDDYGAYIAQQVQATKQGGSGTADDPGVGNDKRHLPMRGLTAARQRSDHVVAKSTARGHDQPTTNVEQTEQLHLSNDTPNRYWQHTSGCAGGPRHTRQQCGSNTQWS

SEQ ID NO: 1002713 - protein, 265 aa, Homo sapiens
MTGVALGVAPRCEFPRGGPREVQKFVPVRGLKSRTLDTRVGPQYKFKPIHRPKKCGGTTKNEPWGLSEQGQEHGGAPFVCVHRGDFSHQQGRKRAPVGNCDFPGPGVTKVCDASHTPGPLTSKTKKGLETPHSTGPQEGAKQGSPGGSSERNPSSTSGEKTPKGAQDTPRLATKTPNVSPNTTHGAVEQRPKLPGGGADNTPHRTRDPNLAHTTETATEQDPTPTADTPNTNQQGTTLQGTHHPHTNNHLAPSNRTTQYRDSPRN

SEQ ID NO: 1002714 - protein, 127 aa, Homo sapiens
MNYLNPFVAYVVPGVVGAWRHQLAQFLALVAHLVWERLARPIGNVCARFDLGYAACGAYVGVRALAPLPYFNALPPRGFLSILTSPRRQSLGTRVARGGCDQLESCLARCLLPGRPLGSVRDLFFTL

SEQ ID NO: 1002715 - protein, 301 aa, Homo sapiens
MAKFAQGVARCHPRGLKVVTVTCEYQSPIMDTRSLRATGCRKTNPSCPSWVAQGNGGRYPAKRHPGRGLVHLCKGTRWWGFAELLCLPPDSPRAPGGQIGDSFGHERIGPTGFGGGPPSLGEHFKTPRSEVVAHLMVPPKMTNKVPLEPLVAQDPGQGAPGITGTVAKHPFKDPHLLEKKVAPQEENTSEPRNTLKWARENNNKSFPHGDDEQIRCPDKRGPPHCLEEHTTHKNPRHETRKPRALSHGRQKREKPPRLTQRKPRETGATNKRQAPRPPRTAEPQIFYLKHPSRNRDRTRHN

SEQ ID NO: 1002716 - protein, 38 aa, Homo sapiens
MLKLSVRTQRDLSETTAVAKGVYAAEILDPKEGGPGEG

SEQ ID NO: 1002717 - protein, 304 aa, Homo sapiens
MESLSLSTFSRLRGFSTHGTRSWLSFDEDRTKFKFQTTFTLEELTAVPFVNGVLFCNGPGRSEPLLSPGTTVNYSPLNHQRAGQAGHGGPVQLVGKQGAGKDPALPGDCPMPLAEDMQQLLNVQTMPVADWWPLYLCPHSLQEHWLLRHVFTPPGPCLRCSLVLVVARGHDRLRNPATCDCSDCLSCLSAVPYLVYWGNLLGASSLCSPCRKRLASSPGKLSSPLALHPPGTHLALWKAPHSAYGPSLGPHSLVPVSTCASLSPMGAIGEPWPLLAAPYGRVALRNHSPHTARGFISHETPDHL

SEQ ID NO: 1002718 - protein, 346 aa, Homo sapiens
AGSDPRGAGGQTGLQRSHPRRTDTMPFDFRRLDIVQEGAQGTYTQPSVQPGPFISICLLPLHRSSSSSRSSPEFITTRSCERAPMSIDPRSRTSGGKIDVRSEHLFTQSALRVGWADIQDDSMGRHLKLGRPSTTPMKIPRDQWGRLPLRGAASSITKVPGNVPTCPHHSATSPATEPRHDSMFQSTSSAFGEQAYRSRTSTGAFQCCSGDASTDSASKPLCFQDYLLKIVPTGFMTDHEWATQRYSVTRYTGGHHGTYVAYSHTGAAHPCKLGRVNDLSPITEHEHQQQKRTAALHASPPPEWGHYCGDPSPRRRPGPPAFSRLTPAHDQVCEVCGHPPWPRTRP

SEQ ID NO: 1002719 - protein, 297 aa, Homo sapiens
AGDKCAGGRGVFLLLAVNVVLLSTTDADAMLILCARGGNELQLRLVLCHVRRLFLLVHPWCPEDEARAERLAELVALEAREHGDVLQWAFIDTFLNLTLKHLHLLDWLAATLSAARFLLSGDDDVYVHTANVVRFLQAAVNPVPALFSVPGHGGLRCPSCDQVEQVLRACLQLFPGFRFTLVYCSCAAGFPPVRHQLARALRAVSPGHTPLFPIDDAYMGMCLEARLALRPAVHDGHSVPYGRAACWPHRRSSFDPCMYRELLAGAPVTRPYEMLVHVERRLPGPGLSCNRGHGVTS

SEQ ID NO: 1002720 - protein, 394 aa, Homo sapiens
GKVEQKRGSQIYAKSSLWMMLQKSLRGNQRRKGVIQNGRERWKKRRMRMRMRMKMTDERQLLGEFETGTGRGSCFRQTETGSVRHVTPLAWQRAHWNHIIQETDESSWTQTGPDRRDVTSRDRRQCLASHSPLSNKLITKTGGKQQSPELVKKHKNTHEGRPQKASPITPTYRGGSWGTRVRVRVTKLRLARVLPQDLNCPSDDDTGQQPTAEHNTRRWLGARTLLDDGDGPPAAVAETFAHHKSFRPHGGLTGTWKPRGPLWREPDDGHLKTPSTEDPQPLQQGQPGSLRTRPVKDQAAGQHKRQSNTTDAQHCTATYYKVVVAGKQGSRHETCYTPKNQNTQSNPSHSTQTNYTRAAHTQTTTEEHGGNKKENRKSVRATEARSNETKPHRR

SEQ ID NO: 1002721 - protein, 230 aa, Homo sapiens
GSERCVEIVRPGQEVLCMVLGSQAPASPQRLRDKSSECCRGRPWVLLLHSLERDVHRVRMLCQQADSPIHDPEEYSLRVTWALIEGRDDRFVLDRILVCELRVARSYGRVLLRRNSDATIHRSSNSYIGNETVVSTVRPSFCECRQDGLCEGGLWRSLRCHDTLTVDVDLSRAQDRWVPTTWRWTDSLRENGRMAAGNGRRIHCADERHAHCLMAHGPLKPQGVTCVWLA

SEQ ID NO: 1002722 - protein, 198 aa, Homo sapiens
MRSYPRVLKPGGLSRVTPGASCGAYVLALHLWGMCPSEKSAVYLEHIPLTPSGYQAVNNTVGNRSSIQNLSGILSEAARRKILHSPHPCCTFSMAFGPWAVPFTFTYAHVPALIRGAKGVFPGIEPGKWTVTELGNDPAHLVMSFRILLDGQWALGDLNLGCPMADSLAKLTEVCLAVLREARYPKRLRPQKEAKAMG

SEQ ID NO: 1002723 - protein, 150 aa, Homo sapiens
MVGRWVQKDSYVGAEAESQRGILSLKYPIEHGIVTNWDDMEKIWHHTFYKELRVASRGDTTVTADRGPPLNPKDKRREDEPDHVLRHFNIPRHVRCYPGCAYPCTPLDVPRGIVMDIRDGVTQTVPIYEGYALPPCHPEIWTWLCGTLTD

SEQ ID NO: 1002724 - protein, 214 aa, Homo sapiens
  misc_feature (2)..(2): Xaa can be any naturally occurring amino acid
LXYVVNRTGAEANWCSSAPLLRTSVDQAPGQASQCPGSHQHCLIILIPLNVCSSTALVLERTATPLSPGTAGLARQVPPDGTEWPNPGLRNNSTREVHNGGSILRASVELLDEMKSSLEKLHQGITVSDPPFDTQPGPRTAFPEDPGTQLFPTWTDGHTEASAAPLARCERQGIFPPALRRRTKGLCRRGDTDRDALRTRSWPALEAPTNLFAG

SEQ ID NO: 1002725 - protein, 105 aa, Homo sapiens
  misc_feature (5)..(6): Xaa can be any naturally occurring amino acid
  misc_feature (8)..(8): Xaa can be any naturally occurring amino acid
  misc_feature (14)..(14): Xaa can be any naturally occurring amino acid
RAFNXXYXKPHGFXYILAYNAETAVIDRSDLSSSPTDELTSLTSHNYRPWALSSAQLRRPAVSSAAASMQALGALVPIRSSHQRVGCTDTGEMSQRRLHAHPPPP

SEQ ID NO: 1002726 - protein, 55 aa, Homo sapiens
MTIPCAITSQRMIPPKMLTIIASTFLSEVMKLKCFCYLMDCTTTTNIKEVGWSVT

SEQ ID NO: 1002727 - protein, 152 aa, Homo sapiens
MGALRTCGYWICRECWLWPLGPGRYWLDLGAEVIKVERPGNGDDTRAWGPPFLKDAYGENTTEAAYYLSANRNKESVTIDFTRPEDQKLVRDLAAKSDITDENFKVGGYEQANGLNYESLKEINPEEDLLYYYRVRSDWALCDKGELRIHDP

SEQ ID NO: 1002728 - protein, 88 aa, Homo sapiens
EPALFIKRFRQFQHDVADEPVTHHHIADSVHDVAGFHISDKRKHLSREQGIGFLRQRIALARLGADIEQPDARFVDSEHIFGVQIAHH

SEQ ID NO: 1002729 - protein, 69 aa, Homo sapiens
SQISLRFYSPPEKPTCTERVNKSSGIFRRAIFSSINILKIKAVERFLAAIAAHRIKCRLQEKLVTDTWN

SEQ ID NO: 1002730 - protein, 63 aa, Homo sapiens
PCASNQPHSYLIAIIANCLKRLMMIIPIRLKCTYALGLNWSNSILGGFNISGYKTYSYDGDND

SEQ ID NO: 1002731 - protein, 90 aa, Homo sapiens
CTQPASQFQCFGVGHTYILVIQRFVVMRSQICVDLRTCAIDHHQTDAEAVQQPDIINDTGEILMLNGFTAEHDDKRFSPVGIDIGNRMAE

SEQ ID NO: 1002732 - protein, 97 aa, Homo sapiens
HSDEPVLFAASTVSGLLITQQVALDVKICPDDRLNPCAMSRSENFTRPQRLVKSVIASAGIPNAAAFFTNGAVLARPSIIEYSLCTRRCTKRGSDIF

SEQ ID NO: 1002733 - protein, 143 aa, Homo sapiens
MYPNGLSTGDSHVTIMGDYSSSLVGSAYTLQGARTLRIGVGIAVGSPPPAGSKEVVLRLRSVSSIVMPAAQALGSSIRQHSRHCCAFRHGSAQRGALGIGFMAGGFILLIVVHANEMAPKIAGRHLLRCKAHSWLGLRSTPVG

SEQ ID NO: 1002734 - protein, 70 aa, Homo sapiens
SRGSRRVVGMGRRTLRGRRGQSKRGIPTLKYPIEHGIVTNWDDMEKIWHQEHTKSHAKSHTMSHTKSHTK

SEQ ID NO: 1002735 - protein, 34 aa, Homo sapiens
SLEDRKSLIATVLPRRNAQSVSCATEMQASQQLA

SEQ ID NO: 1002736 - protein, 74 aa, Homo sapiens
PALQIFKAGYRDICYATQKRQSAVRDLSKLVDLILVVGAANSSNSNRLREIGTEAGVASYLIADGGSFNPDVWS

SEQ ID NO: 1002737 - protein, 71 aa, Homo sapiens
LSVYEKMLVYRGPSGLINCWWGVTAQPVPAPASTIADASMSKREGGKSQKLVLFMRGNAISGAPIIRGNSQ

SEQ ID NO: 1002738 - protein, 90 aa, Homo sapiens
NNNVTILTSQTLRKKKPSELSCAVIILLQIALPSLRILYITDEVNDPSLTIKSIGHQWYWTYEYTDYGGLIFNSYILPPLFLEPGDLRTY

SEQ ID NO: 1002739 - protein, 40 aa, Homo sapiens
AVPLTSSGLKILSIKGSSGVELQDFTPDLKTRLRTLYADA

SEQ ID NO: 1002740 - protein, 66 aa, Homo sapiens
GHTIEETPFYTNTYTDNGHPEVSIHILPGYGILSHSVTYYSGKKEPYGYIGMVCAMISIGYLGFIV

SEQ ID NO: 1002741 - protein, 173 aa, Homo sapiens
RFHCGYAGSVKGGNDYVVWDYAHQHGIPDETCNNYQARRTRSVTMFNQCRTCNEFKECHAIRNYTLWRVGDNGSLSGREKMMAEIYANGPISCGIMATERLANYTGGIYAEYQDTTYINHVVSVAGWGISDGTEYWIVRNSWGEPWGERGWLRIVTSTYKDGKGARYNLAIEE

SEQ ID NO: 1002742 - protein, 135 aa, Homo sapiens
IENNTPIRRDWTPRGITQINPHRSPTPKHIQYYSPQESQSPELTISLIENNRNQIIQALLITILLGLYYTLLQASEYFESPYTISEGICGSTYIVTTGFHGLHVILGSTFLTICFIRQLIFHFTSKHHFGFEAAA

SEQ ID NO: 1002743 - protein, 83 aa, Homo sapiens
MLASTMVGVIGVNGGTGMSSSTAARTIRAMDMEQRMTLCNMSIEAGARLGMVAPDEVTFDYVLQDAVRTEGFRRRGGKVKAAG

SEQ ID NO: 1002744 - protein, 183 aa, Homo sapiens
  misc_feature (27)..(27): Xaa can be any naturally occurring amino acid
  misc_feature (33)..(33): Xaa can be any naturally occurring amino acid
  misc_feature (38)..(38): Xaa can be any naturally occurring amino acid
SRDPQSSTYVYQMVCAVNTGDEMGMLXYKCQVXSRALXIPALEDYISETSTTLCQTLFQACSVGADLNGQAVYAACQTILKRLEPYKKKKSSGSWEDWVTAAYMDTVSLSATGFYRTPNLGYSFETNSGNPLHYFSYGVACSEVEIDWLTGDQKNLRTDIVMDVGSSLNPAIDIGQVEGAFVQ

SEQ ID NO: 1002745 - protein, 97 aa, Homo sapiens
MAIQSYCRTSEVEYNVYVSCSTMSSDEFANTMPVRPPTVKRKMNPRAQSTAADHFIIASVECGESAKYFDAGGDSDDYGSGGEICSCVYVYSYCKYM

SEQ ID NO: 1002746 - protein, 81 aa, Homo sapiens
PGTPYDCVIIAVRSVMAEMKPDLVLSGVNRGQNVAEDVTYSGTIAAAMEGTLLGIPSIAVSQAYMAGDRTKIIWDCALQHA

SEQ ID NO: 1002747 - protein, 70 aa, Homo sapiens
EILSFGKNTSRRKSNESLAENVKSGKPYLGTSAGSNIAGLNMKTTNDMPIVYPPSFDCMSLVPFNINPHY

SEQ ID NO: 1002748 - protein, 94 aa, Homo sapiens
SSLKPRLVDIEQISSTHAKVILEPLERGFGHTLGNALRRILLSSMPGCAVTEVEIDGVLHEYSSKEGVQEDILEVLLNLKGLAVKVQNKDDVIL

SEQ ID NO: 1002749 - protein, 236 aa, Homo sapiens
  misc_feature (231)..(231): Xaa can be any naturally occurring amino acid
PCALDVSAQSLWFDQDIFTQRESSPGYENAKLDHLFQDEVATAQHLREEQQRQQHQMEHERQRLVASMEEARRRQHEADEGVRRKQEELQQLEQQQRQQEELLAEENQRLREQLQLLEEHHRAALAHSEEVTASQVAATKTLPNGRDALDGPAAQAEPDHSFDGLRRKVSAQRLQEAGILSAEELQRLAHGHTTVDELARREDVRHYLQGRSSIARLLLKATNEKLSVYAXLQRQL

SEQ ID NO: 1002750 - protein, 41 aa, Homo sapiens
MRGNAISGAPIIRGTSQLPKPPIMMGITMKKIITNECVRRS

SEQ ID NO: 1002751 - protein, 66 aa, Homo sapiens
YRKAIQEQLYQEQLYQESVYSRQPALRGGRYTGVISSSQETKIYRGNPSCLRIMASAFIGYVLPEA

SEQ ID NO: 1002752 - protein, 133 aa, Homo sapiens
NILFCILDSTPALLAIQQLPVGAISLSTPDMTYHQTPWYSRRLPRHVLLGPLQGGLQLGQLGVGILDGQLSTLLGICNGGLQGSPLAFEALNLSLQPADVPVHLRDLSLCAPQVIPVLPSQALQVLILNLVHA

SEQ ID NO: 1002753 - protein, 87 aa, Homo sapiens
GRLGRVVVDTVTDTLDAGLVQRPDHLFELAHGVLDRVAGLGSEVANGVVAPVVARAELHQPMVVHERMHRHQLDGRHAEPLQMIDHV

SEQ ID NO: 1002754 - protein, 98 aa, Homo sapiens
RYSSHTSANCPSAERASELYPSCSSVDDTPAQMTTQQPFKQFSTTPVSALSVSSIALDDLSYTPTHEHHKNIALLNAQSKPHPTTRPPPSSSSANQPN

SEQ ID NO: 1002755 - protein, 38 aa, Homo sapiens
YSLTFRRWYRSVAAQQAQYKDQVAFFHGCFVNYNHPQL

SEQ ID NO: 1002756 - protein, 53 aa, Homo sapiens
MAFLMLTERKILGYIQLRKGPNVVGPYGLLQPFADAIKLFTKEPLKPATSTIT

SEQ ID NO: 1002757 - protein, 144 aa, Homo sapiens
LVMKVMAPEDIERTAKVYREDGLVYGGSRMGVVTLLREGRLVQTVPAPASTIADASRSRSAGGKSQQAYVVSCGDKPYRGHRIHSGATQSVANSLRFMHGSFTMQEAFFTNAWAVHAYTLSDVVVHPAQHCLVGGILSQSHCQA

SEQ ID NO: 1002758 - protein, 132 aa, Homo sapiens
  misc_feature (132)..(132): Xaa can be any naturally occurring amino acid
IELVPLTDYSMSLCHCRRDLKITEGSTVSVNYVSGSSGDRIEKMFLSKRSLKAGSRVLIVDDFLKGGGTVNGMISLLREFDSELAGVAVFADNAQEEREKQFDYKSLLKVTNIDVKNQTIDVEVGNIFDEDX

SEQ ID NO: 1002759 - protein, 74 aa, Homo sapiens
MFIIIQSGCGEINEDLMELLIMTNTCKIVLSSRVTAVIPCFPYARQDKKDMSRAPISAKLVANMLSVAGADHII

SEQ ID NO: 1002760 - protein, 80 aa, Homo sapiens
KISPAVICVLAGSLPLVANLFDGKGGIVDLVCYVQDAYGWEGDEDKMIAGRVYFRSVSYCPERLRCSYLVRCVVSVKTMA

SEQ ID NO: 1002761 - protein, 50 aa, Homo sapiens
MIPSRARIGGGVLARGCNNEGKDEVKGKESCEGGTGRRVTSSDSLQHGLS

SEQ ID NO: 1002762 - protein, 95 aa, Homo sapiens
HFWPAVSDPTPGPEDAVIRVEASGICRSDWHGWMGDWTWLGLSPQLPITPGHEFGGEIVALGREVRDFQIGDKVTVPFHYACGHCEHCHAGVPNR

SEQ ID NO: 1002763 - protein, 75 aa, Homo sapiens
LSHRQLGFHLGHPTVHIRCEEIVNANVNTYFKKIGYNPYTVSFVPFSGLNGDYMLEPIANMPLFKAWKVTRKDCD

SEQ ID NO: 1002764 - protein, 83 aa, Homo sapiens
DNPLADHLEYPRRTWDSAGPPYSQKRYEEIVYRSQQLYFKKIGYNPYTVSYVPFSGLNGDHMLEPSANIPWFKGWKVTRKDCD

SEQ ID NO: 1002765 - protein, 80 aa, Homo sapiens
MQSISSSSVDSTGIDILSVVTFHPCNQDMSSLGSSMLSPFPSDIGTNATVSLVVSDFLTVSADFLYNFLISLLAVGWPSE

SEQ ID NO: 1002766 - protein, 58 aa, Homo sapiens
LEYPHTATPTWIHKLARWCRRCKCQFRTVVFFSAMTSRRITRTAIPHSRPGEIFGPHV

SEQ ID NO: 1002767 - protein, 62 aa, Homo sapiens
MTAVTFLNSLKISSPKRATSARLCGSICADVESGFIRAKNTVPIKESRCVNYRNPAAACVRR

SEQ ID NO: 1002768 - protein, 65 aa, Homo sapiens
TWRLGHQFHHNNYHYETPYHNPLPNAPLRLIRPSHSIPTSPSLPVLAAAFIILLTDRNLNTTFFD

SEQ ID NO: 1002769 - protein, 104 aa, Homo sapiens
FSCCYWPGKRRCSTPLAIWCMVRAVRLTAGRCANPVATINVLMYAIGAFFLSHLLYTIYFASQMTLSFFWPLPLVLLVLGALLLAIIWTRLEEYRWPICTFIGM

SEQ ID NO: 1002770 - protein, 72 aa, Homo sapiens
HERDLSGFGNMLFMALIGIVLASLVNFWLKSEALMWAVTYIGVIVFVGLTAYDTQKLKNMGEQIDTRDTSNL

SEQ ID NO: 1002771 - protein, 71 aa, Homo sapiens
KFQQHQPLLVSLESLGRHTIQMLHDVLDAFARMDIDEAVRIYREDKKVDQEYEGIVRQLMTYMMEDSRTIP

SEQ ID NO: 1002772 - protein, 117 aa, Homo sapiens
MLPVNRAEGFGSALSQRPCHWWPCTGRTSSALISQCTPKVDFPQDQLTALTGRIQEAGTEVVKAKAGAGSATLSMAYAGARFVFSLVDAMNGKEGVVECSFVKSQETECTYFSTPLL

SEQ ID NO: 1002773 - protein, 150 aa, Homo sapiens
GALMAHATQVSLQLLYFPFIEKLGTFHDHALIIIFLICFLVLYALFLTLTTKLTNTNISDAQEIETVCTILPAIILVLIALPSLHILYITDEVNLIPPLPSNQLATNGTEPTSSTDYGGLIFNSYILPPLFLKPGDLRLLDVDNQDHHQY

SEQ ID NO: 1002774 - protein, 62 aa, Homo sapiens
  misc_feature (2)..(2): Xaa can be any naturally occurring amino acid
VXSQTDPLLADFLLFMRGNAISGGRLIRGTSQLPKPPIIMGITMKKIITNAWAVTNNVVDLV

SEQ ID NO: 1002775 - protein, 62 aa, Homo sapiens
MTIVDVSYTRITCRVVGCLVHALANTMPVRPPTVKRKMNPRAQSPAADHSIIATVQCGESAK

SEQ ID NO: 1002776 - protein, 141 aa, Homo sapiens
IRCSIRSGDICKLRKGNISCNLKSLRVSSLLNFGSIEINSLNDAASTPTSAVSAISITTTYNRNGNGALYSPTNKPGDERVEDDGKKQRQYQLHNDICRCVNAREDHYQRGQLEQNVHARFIGLRGFHWGFLVTFCIKCSG

SEQ ID NO: 1002777 - protein, 147 aa, Homo sapiens
  misc_feature (24)..(24): Xaa can be any naturally occurring amino acid
LRGSRVAVSSCQRPCISDSILSLXRTLVHSRDIEYTIGIMSKRLQSEEHLGLQEVCCEFNLPAGCYLVMDARLHKLNKHTRLVVRIGSEGLCLLGRNGGITLDEDSHDSTSSFNTKGKRSDIQEQQILNILRLVSRQDGCLDSCTIS

SEQ ID NO: 1002778 - protein, 97 aa, Homo sapiens
MSRGSPSSPTIRIKVVALRFPIVMVPVLSKSNTSISPAVSTALPDFVITFALSALSIPAIPIAESKPPIVVGIKQTNSEIKAAIVIGVLANQQMVLG

SEQ ID NO: 1002779 - protein, 106 aa, Homo sapiens
RSESHPVLLHEFKTFTWFLRFDLQNNVTVLTATTRLLNEFTFDFFACFADCFAVRNLWLTNSCFHVEFALHTVNNNFQVQLTHTADDRLTGFFVSFYAERRIFLRQ

SEQ ID NO: 1002780 - protein, 157 aa, Homo sapiens
DHTKEKGGKKEVSVTMARTKQTARRVAEGKAQRKQLATKAARKSAPSTGGVKKPHRYRPVTVALREIETLSEVTELLIRKLPFQRLVREIAQDFKTDLRFQSAAIGALQEASEAYLVGLFEDTNLCAIHAKQCNNYAKRHPASTPHTWRTCLRIHYD

SEQ ID NO: 1002781 - protein, 124 aa, Homo sapiens
PDSSETTLPTALAALVEAGMMFLESPGVITPQFPGGAIHSLLGGSDGMDCGHESFHDTKVVMDDLARGAKQLVVQEALLMILRLLSYFSWFTPMTNMGASAEGAEMMTLLAPPCKWSKCNQGIL

SEQ ID NO: 1002782 - protein, 153 aa, Homo sapiens
  misc_feature (140)..(140): Xaa can be any naturally occurring amino acid
  misc_feature (147)..(147): Xaa can be any naturally occurring amino acid
MTACAWLTLLGWPKVQMGIESLQAFLRAAFALGVWVYTFLERILIPTGLHHFIYGQFIFGPAAVEGGIQMYWAQHLQEFSLSAEPLKSLFPEGGFALHGNSEIFGAVGISLAMYFTAAPENRVQVAGLLIPATLTAMLVXITEPLEXTFLGIL

SEQ ID NO: 1002783 - protein, 102 aa, Homo sapiens
EQISRVTTLDIVRAITSVAELKGLDPARVNIPVIGGHAVKTIIPLISQCTPKVDFPQDKLTALTGRIQEAGTEVVKAKAGAGSATLSMAYAGARFVFSPVHA

SEQ ID NO: 1002784 - protein, 99 aa, Homo sapiens
MYKSFINDYPVVSIEAHIEQDDWGRYGISTQTSAGIQVVEDDLTVTTPQRIAKASEEKSCHCLLLTVNQIGSVTESLQACKLAQANGWGVLVSHRTGAT

SEQ ID NO: 1002785 - protein, 112 aa, Homo sapiens
VNYLCMNLVESVLLIMTYLSWFTLWRCSRLHCHAFDFIYTGQSIRDIYVQVNSMVMNGPKLPAPFGKVKEKKLYIDDSSALPPTEVRARARRIAKQHDGKLGLHHGRLLTAD

SEQ ID NO: 1002786 - protein, 128 aa, Homo sapiens
RVIPAMLLQRWIDLDHNVYVQVFMATEQSQTPWIRPCYRPGRLDRIIEFPLPDRRPKRLIFSTITSKMNLSEEVDLEDYVARPDRLQELIFTPSVRTVQCRLSVKTATLILATDFQKAYHTAILQEQH

SEQ ID NO: 1002787 - protein, 109 aa, Homo sapiens
MNYGYAGYYLLSKNFSLAMPSLIDEGYTRGQLGLAMSEIAIASGLSNVPHGTGVRTLQPALLPALRTPGVRRGDVPFRFRTLGYVQRAHACHFASHPRLGPGNGLDAKW

SEQ ID NO: 1002788 - protein, 150 aa, Homo sapiens
NLECFRRIRKPSMNGGNRNETPQWPNSCRVPRWARQHWGCMRLEPCDSLRLASLVHHIHCLVHTDRLWQWPQLLIKRYRAFGAALRATSPYNTLCDLPRIMFRTSRKETSTVSSPATAILAHKLPVAVVGAEGKGALPYMCQALLLMRTM

SEQ ID NO: 1002789 - protein, 108 aa, Homo sapiens
EGLCSGSISGWREIFLAVSALSVIAFIWRLIYVPQDITHHKPLSLLQHLLLKKQPRLLLVYAMTAVGYGGTFIAYTFLAPSPQEISRFQLGTVRLVLLYLRYLGYPLE

SEQ ID NO: 1002790 - protein, 66 aa, Homo sapiens
MTATSTPPSSSPPEEETPLYTNSYSDITVRLEDNILILPGFGIISHIVTYYSGKKEPFGYIGMVRA

SEQ ID NO: 1002791 - protein, 80 aa, Homo sapiens
MPLLSGTMIGAGTIAFLLRSRYLTNSSTPPEECISSRFSTAWRMSDSTMWTPELRKASSRSRCSSVAKSYSTFLKVSVEA

SEQ ID NO: 1002792 - protein, 102 aa, Homo sapiens
FSTYRRQAPVTLGIDIAQTQFLLLAELDARDGVGHLAGDELDAAQRRLMVEQNAAGRMQAEAFAVVDRDPVSIQLGNAVRAARIERRALVLPFGLDQTEHLA

SEQ ID NO: 1002793 - protein, 198 aa, Homo sapiens
GGADGAGKRSRCAWVVVGIDRLREHEPLVGIHGAREFLNGAVELEMNCRLERRRPGFRQVTESREIAPMFRVADLRAEGRELVKGFSSGRLAHPCQCRDGLTICRQQVGDEVVHSLFGCWREVPSGIKFAEASAHGRFNEGDAALPSSLERRGAVEDTTVKVEVLIEKAELREEARERYGVPALPRLPLVKAFVDEHS

SEQ ID NO: 1002794 - protein, 47 aa, Homo sapiens
KAFGPHFEAPIMLANSARNRSASIRIPYVSNPKGKRIEARFPDPMMN

SEQ ID NO: 1002795 - protein, 157 aa, Homo sapiens
RSLIWPGWFRIITVSSEASCSIGGSLAVTRRLHENILDRHILDIEAHIVPRKSFTQSFMVHFDRFYFRCNVDWSKGNHHTGSENTSLHSANRNSTNTTNFVDILERQAQGLVSWTSWWKDAVQSLKQRGSTGIAILTGDFPSLEPRHVSTWIQHVVT

SEQ ID NO: 1002796 - protein, 150 aa, Homo sapiens
CVSIPRSTRVLTEAPDPKTNARRETQIMYETYQHPNAMYVAIQAVLSLYASARTTGIVMDSGDGSPTTVPIYTRGMPSLYAILRLDLVGRDPDLTNLMKIPHRARLQFNLTNGLKREIVRDITEKLCNGRPLDFRARDGPRLVTSSLPGE

SEQ ID NO: 1002797 - protein, 190 aa, Homo sapiens
VITLVLRDSLALEMYKGPSLALLERKESEELEVNPDPLACRGPPGDRCGPGSRGFPGADCVAGPKGPAGERGSPGPAGPKGSPGEAGRPGEAGLPGAKGLTGSPGSPGPDGKTGPPGPAGQDGRPGPPGPPGARGQAGVMGFPGPKGAAGEPGEAGERGVPGPPGAVGPAGKDGEAGAQGPPGPAGPAGE

SEQ ID NO: 1002798 - protein, 110 aa, Homo sapiens
MSGREKMTSICETFNTPARYSGHPGRAVPSTPLGAPLASSWTSERRGHPKRMPIYEGYALPTQTILRLELAGRDLTDYLMKILTETRLQASPPRTRREIVRDIKEKLCYV

SEQ ID NO: 1002799 - protein, 172 aa, Homo sapiens
MIYITVSADGHEYVVKRTTITITNDKGKEALSSGLDWDNSISIELLVPKGVYLRETRVTHTQVIYGFYLELISFLGRLSKEDIERMVQEAEKYKAEDEKQRDKVSSKNSLESYAFNMKATVEDEKLQGKINDEDKQKILDKCNEIINWLDKNQVCVYIFFYFLPHSMEGKGM

SEQ ID NO: 1002800 - protein, 99 aa, Homo sapiens
SRGPPESSIRWAHFRYRNRKLDRFLMCLSLGYPDPAAERALLAGDDRRQLLARLHPVMQVTELLEAQQELKQIHVSASLLDYVQALAQATRKRRCIRRR

SEQ ID NO: 1002801 - protein, 134 aa, Homo sapiens
MILSFSCCQSLTSSPECAVRSPVGVFQRPFTFRHPINLTTDSQHRIDKAIQFYLAFRLGRFNHQCTRDRERHGRRMETVVDQTFGDIHFADAGLFFQRTNVENTFMRHAVIATGIQHRVSVFQTGLVCSSGVQV

SEQ ID NO: 1002802 - protein, 196 aa, Homo sapiens
FVNHAVAHAWATPGLLPEAAAPGTWGALSSRSRHWSCSIVSCLHLHRLLSVETRSFQNHLLVLLVAVAHSVLEPPALVPNVQCEMCTHSGPRDLEAAVCPQHLGNEPVLCVKEGVVLKPLTLGAQEGPAAVLGMGWSLFKTEADSVFERVQRPGAVAHACNSSTLGGQGGQIMRSGVRDQPGQYGETASLLKNNKN

SEQ ID NO: 1002803 - protein, 77 aa, Homo sapiens
PEEDTEWSTGAVTCCHCYCQLLLPGCVCTSRACHVYLPGASVDLPTTTSSRQTTQNTTDNPGTTTGTSVDHIDKKYN

SEQ ID NO: 1002804 - protein, 215 aa, Homo sapiens
VEEKRTAMATVAAKSILHAAVRACGCAGKRRVTEDERATALRSCQCLDMPVAARYENWRELGDERPLLWPGESWFLVEKHWYKHVEMCILCREGTMDSSTFPGCINNATLFQDEINWSLKEGLVERRGLCAAPKQLLGNYLVSWYWSRSMARHPLNARSLELPNIAEGRSVPSRTCCFVRHNDLGNLTTVQFSQYRFYWLVLATARGPGYMVEPR

SEQ ID NO: 1002805 - protein, 183 aa, Homo sapiens
MNGSERKGHMQCQCAHQCGKGLEVEVDHAHVREMWSLQQQAEWVTRVNIVKPAQPRAHSSMNFHLIYLISDDTKSPVMYAAGLEMHVRVTVSITLQMTPMEFTAILDASGLPTYAGDCRAMQPRTAQANSKMYYYVEMGSTLLLGVDWFMNILLIKLIRAAYNFNISDWGPVLSHQALKYQWH

SEQ ID NO: 1002806 - protein, 157 aa, Homo sapiens
SDRVRSESSESRSAKSDHLPTPLLPIFNTTCVANKSDNSSSRRVISRDFSTLSRGFPVVLDSAAVFATSFSASRTDMRFGDNLIRQLNLGCAIGRQQGTGMAHVNIAAVSMVCTGFARFNKRSRLDTALRELADGICRLFMSERKICDQTMYALRLF

SEQ ID NO: 1002807 - protein, 143 aa, Homo sapiens
MRLSSKRNLKMDATHEAAIGKLSFVHVIVDTYSHLLNATCKTDQRAWSCTMGIVWSFCVIMGFLENLKERQHKQKNKNTENKQHNTNTRTKQQTRNTTTTTQPNKTQKKTTEKKQTERGAGGRTAADKKNSPASRGEAPSKID

SEQ ID NO: 1002808 - protein, 157 aa, Homo sapiens
YALNPVVALPCNQPAFGFDSEGKAKGGFTRDGRADTLAAQAATPFLAAHEMANKDAADVVSKVQQGSYANEFKAAFGSTIFSNTDNAFDRILYALQQYQKEDADFHPYDSKYDRFLAGQAVLSDAELRGLALFNNPVKGDCAACHTSSKGANGLAPL

SEQ ID NO: 1002809 - protein, 153 aa, Homo sapiens
MAASKSCVRQQVGQQPLYLSSWECVCGAVRLRTSRARALGRASRDGQLGFCAVWWHPLLLGQRVPYTCGVRQQRRREARGRGDASGLKRNSERTDPGGQGQCGPGQRDPMKVPVLTMDMNLSCITSHKQPRLQGDINIKQRSEHNMNKPIQWL

SEQ ID NO: 1002810 - protein, 286 aa, Homo sapiens
HTSPTRSGEGRGHRRGDLGSGATAGQPRAPAPDARLHVRAAIRARTRMLDMTRGTAPSLACSPVRAPPSSMSARGRTPDIATLPPISQTAPEGPVAADEGVSASGGSTGDEPRQERRRHDARSRAMTSADDQRSAGRLQKGYRHATSADHMHGAASARRAADDSKAQDRMLTARQMTRHSIGSEAAEQAPPAQLCRTSNAGPATKARRSAKTAEAKLMAACMSEQRASGPFVGRKAEPPQRTHASNKERKHHTNYESNQDTGARTEAHNKPGQQADSRLRAAEAAD

SEQ ID NO: 1002811 - protein, 102 aa, Homo sapiens
MWHENDGRQETLELRGHIGNREVRGLGKATWELGNLKEEKGSGKTIQGTTDVRPQRALENKQGGLSSGKTQGWRRDKPRGHGEHAGTHGRGGGTLGAPKETH

SEQ ID NO: 1002812 - protein, 318 aa, Homo sapiens
ARLPPPPAPRLPAPLPPRLLVALSAPQPAPPPRKGPGRSSCPGSSSATLLKAKHKPGGTPNLQQKKSQARPGPRSTRCPASQYRKLALTPQTGILTLRRCCTNPNPLRRCAPTLPHTRPPRTSDPAARLPRAQPPPTHPGPGSSLPTNLPTCHGPHPHSKRYSAIPAEGPNPPRPPPDPCLAARPPPDAPTPHRPRPPPRPTPTRPDPPPPPRPPPAPHPRPLRHPLPRRGHPLTDRTHPPRPPPTAPPPPPPPTTTPATHGTQPGPNAQPKRPPPPPPPPTTPHRRPPNLTQARPGNAPPPPPPYPAQAHKAPPHPP

SEQ ID NO: 1002813 - protein, 51 aa, Homo sapiens
EAPAAAVAAESGSLRAVCVLVHAGAQCEPEDQRSPFGAGREGPMQVGKHEL

SEQ ID NO: 1002814 - protein, 71 aa, Homo sapiens
GHRCRPVFSHGALVSSLCHSLFRRQRAPGGPPCTLSTRHAYYSSALAVSLWLQKPVCLCGSYSLCSSRAVT

SEQ ID NO: 1002815 - protein, 183 aa, Homo sapiens
  misc_feature (52)..(52): Xaa can be any naturally occurring amino acid
MTIQGSGELWARANTYNGRATTSRCTTEPRDRLSRSFPLLSSSLRLLVPLAXLQKPGAGPELYALARRELANYATTPHPTGQRTLSASPTPLRYPAPLPDTEPAPPKSWHSSKQRRHPHTPLQPTPPRRKRRHTPRTPPPTRPPHPAPPPSRRHQPAPRPHTTCTHPPDAGTTHHLPPDALPT

SEQ ID NO: 1002816 - protein, 342 aa, Homo sapiens
MERVPWGPGVRWARGCGFPSGTTWQTCALRGSLVARLGPRWGWCPGLLTGLLSVGGSWAGAASTIHAPENLVSNLAYTNTPCPGSWSCHNPVPSAREEPPGMDGTLAAGTPPPTASELARPGSAWEAEAVFGCVASFPGLAAAPVPSRSRGIRPLPRAPSLRFARPGEWSGLPTPCLWTGRTPYPTDRCLNLGDTNASGSALRRGICMTKPLRRVRAPRGCHEKRLPCVNGDTVTDTIPPPPSSTETLSKPHSNRHHPLPKHTAPRSQNHLHPLPLSCFNHPVPYADQKTTHFLHQLQNDQTSIHRILRPMTCTPLHIQCFPPSNPTHVTTHRTYPLHTTQL

SEQ ID NO: 1002817 - protein, 35 aa, Homo sapiens
MRAAPFLFLLLTAKTILFHLVYTVTLGKGINVVPY

SEQ ID NO: 1002818 - protein, 39 aa, Homo sapiens
MANDTTRTTQRTDSTAHNHPGRPPQDTNATPPRPENNKR

SEQ ID NO: 1002819 - protein, 131 aa, Homo sapiens
MPSCPPQTEKAQYRRTTTANRTHSRHTAHTLTGDPTADDNVLLNNQVAIGSTKFVERILPSRRREKNPPSLRVQCHHLANITSRASTIATHTLPAPLPLSPSIRQQQEAEFEGAAAGMCDLNLAQALPIKN

SEQ ID NO: 1002820 - protein, 533 aa, Homo sapiens
VERMDEEFTRVRMQTDTSLTEEYVEHYERIEAQDVCQSSSDVQASNWRRRALPEEVMPHSTIGCRIHEQPYVPSKIYNGPQGATRLNTEPEGIINSHEQEPEQTNDGAKRLGQSLDRTKTEDKDTLYAPRTRKDTGYPQPMHSPMHLCPAIPKQTKDTCNTGKHEITKGPAETTTIAPNDAQLCQEKKQIAKTMTTGTGHKPWKKYQFTNERQPNGSQDVGDNHKLTHTQHRQNHRNTKGGKTRQNTNGHTMARGNKFPKDTQRLRTQKNQKGRHNHSETNQQAHEHRRGKGQAHEKGENPKTTNGHARQQKRDEKNSDDNNQKKNHHKLTKTTMRRNSEKPLGRKPQSTHDQDGRTQTRGTEHSRATTETQHRQKNSPAIQNESTRTHKPRRKAEKAHSTDKQPPDTQATPTSATATTQQREPNRTHLKRTTTTPIPHRSHTTEKTQQSRHHNDMTANTVDRHHKGHEPKNKASRLPRRHRHTTHNTAAHPRLNPQRQEHAHPQQRHTQRTHTEPRTRQYQETPRPNKQSKT

SEQ ID NO: 1002821 - protein, 259 aa, Homo sapiens
MRLASYVNHTNTNPYNQWYGAMEIIEKARIRKVHTATHKPVPKHGLRIRGIIAMFITSGSQVLRRNYSLSACVSQHAADPSHLTLAQIEVGTLGAAYLGNRSRRKIALEIAISVRHIPVFTLDDRKVFEIEPVTTHPEVLRLEKIKRDPPELEFARERGYDLTTLHSVASFSLFIAVLTKSLRVTMASSEDRPSFSNSDFVPGIRQGPKRSLQDDFVIFVTRYSVPLPTVIFSLRSTCYYGPSITGSRVNLNRSFQSPS

SEQ ID NO: 1002822 - protein, 251 aa, Homo sapiens
GAADGRSAPAPARTPDRTRGCTFSKSHNALKLATTASDECPEPETPTSNHNTGPRMLTPRNMYADAATPRRTPETAPNDVDRPSSRTGVHNPRDTRHINEPTRLQVAAPTQDVLPNARQRLVKRTPIIERTAHRTRIQSPSRASTQAPDTSKPRTTVEARSEKRTMGTPPNQIQLHSSHYGRACSQPGATRAQSKHETKALDHPHAHEESDQSHQSGKTPRPDHPLRKHPQPTRTAKAPRQPHQRQTVTTT

SEQ ID NO: 1002823 - protein, 31 aa, Homo sapiens
MSTGRAELSGDGHGVTMDAFDVHEFDQVPAP

SEQ ID NO: 1002824 - protein, 662 aa, Homo sapiens
QDTLTVTNPAQALPSHPCPAGSTPSSSPLAAGTDFGALSTPGWLPAHFHACPALLRCARYRALRRYARLRHCAAPPRHARLSPNAHTLHPANPLRPPPSRTYFSKNTACPYPLSKPIPCHQAPLHPTPHIYNPGLNNNSPERKTNHPFSPFSPRRGNPTANNPLAPPVALHTTNLARPGPKRRNLGPNHTSQPNESQTPSSTFSPTTTALATPRPADLLITPPPLTHNPFVNPVPTLASTRKHKHTFHTTLLPNPHQNPLPLNLYYQRPYNTTERPDPFMVAPTKAGVATQTFGKRPPWQSASATPFTSHKQTLPPLPPHPSPLFGHLTPAGQTGSGAMTVGPYYSWTPRQTAHILGARTPNKHLCYPSRRTILPKYWLARDTNTPQTAQNQTRRGRISILPLNNILPPPWQTCGHFWDYQPAQRGAPPARPYTILCGSPTSPHLLHARSPPPYVISRSYQNASGLNRTPATPTYRRPTTTPSVLGSLPRTSFIRLSPPMVLPRPPILSMVAASPTLFPKVVRSSTTHDKLGNVTPRTRLSFHHPTTPLDYNNASQKSTLLLFTLDTHSTRRSNLQSSLYYLPHIKRIESCQLPPINPPSYAPIGNILHPNTHHNTRYTLLPLIITLPLPTLKQQSSIPIDHPTTPNQPIIPMPLDTTIPSH

SEQ ID NO: 1002825 - protein, 441 aa, Homo sapiens
MWKTTLWFLYICHKRRRSTQKTHNKQKHNRRLCVARVRGINHAVVRVSSPPPPQLSCVRERVHNACVTHICAVCATPPPREEDVFYPPACDRRQQPCRVVQPCAELMQRDEPSYNHAASMCGDHTTTTVDVRTTPRCCWCHQHHNHTTTHNNTTPQVAASRALLLYLFIEMMMSIFCSVCVDDVGVCITSIFLFFMLSVVLSPVVSGSPAVAVSCPPHHGGARAPPLLFMLLSSSTARSSSLLSLLARPLALSARPPSAPARADLRSSVLALRHSRLVLLRSLLWLVVATYSRSASLHLPSPGRRTHSLRPPWSAHARRALPFSAPYPSRAGWRSSSVASRSLLSSIVAAHPPPPSVSPSSPAWSLSSSPPTSLAAGAASPSLQLPLLPDASPLPPPRSAPPAPAPALLPPASPPPPPPPHLRSPCSSAACRLLPPPPPPP

SEQ ID NO: 1002826 - protein, 93 aa, Homo sapiens
MGKPALTAHDTQTRKQQANTQPADRYATPQRPPLAADRARPRDRDRRQPRAYHTTPQTHQPKAHYTNRPTGRVTTDTTPRPPTTTPRRHTTPA

SEQ ID NO: 1002827 - protein, 142 aa, Homo sapiens
MTEKALLGTPCFLSAGHPRFPTSRAAQGTPSLQTPQVPRDPCAQGTAVPCDTTGTLRPVRSGDTRPCGHPRFPGVPCASGGHPSLQTLRGLPWNIVRFTGPRSPAGGAAVRGVPGGQRDPVSAARALAALAGLADRRGLSRV

SEQ ID NO: 1002828 - protein, 129 aa, Homo sapiens
MYQISTQHTKRHHPCDRLIHNRSVHKNNNQLPFSGLLIRQAHIQHITPYNSRIATSYTQRQQRTFLPNRYHRPNRDCHQQSTLESSRDDSHNIQRNTNILQWSAHKESITLNRRTTLTSRHSHHGKHVT

SEQ ID NO: 1002829 - protein, 402 aa, Homo sapiens
AGHCCPGDCSGAGSRWPGPSPGVTVGFESRDPVPYGRVVRSWDPAWSAVLRREDLWVAVLRGSQPGTPPPLVTVGETECLSWACAWPPLSPVPLQAHTWTMKVASPHTGLGWPCSSAYYFGDDNLRPRPPAELRVLLTRGPNAGVRVTDAWPIHYARSWAHNHGLLTDPRLRALLAKRRGWDIPRCCNHIRADSTGTGNEKPRRRPGQLGMDSIARVHVCRTLRSQLDRPHGERLHQPLTEQQRRSLGGMEVPIPLLHEHHYQQIPATSKIPIPTETWTTLLPPLPPAFTYRHPSHTRTPSTLSTAHARNTAMRPTSQPPSITAIQATHIPRPNLQQRPSPHAAAQARGKKLSKATRKRGLIGRGPPWERQNGWTRCHHCNTSQTTARRYEGGRRLHNKHAA

SEQ ID NO: 1002830 - protein, 121 aa, Homo sapiens
GRPTTHSMEWQEGTKACSMRPWEDPSAGRARLPPPFPTSHLGNWEQTHPTPFFLKRGLNPRAPAARARVEEGAPAVPSPGPTACVHHECDSHEHASTGTGVLAAENAAPEQPALLRLCAAW

SEQ ID NO: 1002831 - protein, 223 aa, Homo sapiens
YSDCLRNWQTTHVMLDIRLCNTNQYVISVTKEKSKYKFQHAILVNFKVYPVAVQLFQNGGMGDFKLQHTKTINYEISCLTLAFFQPRQFNNCYFYSTKMCKITGFISSHFHCLAIQSFQCSSIFSAQFQTQHNTPFQKNTNFRKQEHFLFTLQVAKRLGTSMFYRQDSVLATFKLLICVCAVCSVVVCVCRELAVEPQLTQTNYHRHSLAYRDTREEEEKNID

SEQ ID NO: 1002832 - protein, 134 aa, Homo sapiens
GAFGNDNQLQIISIPGEHRRGESACTSSCSDRQRELKELHRKGGPIRLTLPSKSTELTVGSFAELRLLRKPGKPQFGTSPIVIQVACADAPHHNCLRVMAAEPCGPRHVMEDAGLRLLSGTASTDARMVLEPCG

SEQ ID NO: 1002833 - protein, 517 aa, Homo sapiens
  misc_feature (369)..(369): Xaa can be any naturally occurring amino acid
MCLPSVTVEFGMLEVGLEQSVLPREERKQERQVTKDKRKEKEEAREKKEKTKRSSEPSARRASGEERETGGAASEGGGRQQTRGPEGRTRGEGREGRTGGGRGRGGEGRDEGAERREHEKQPHGEHGREQRRRQERETEEATRPRDRQKEHREHDERAGQAAKGTKATERGSRETRGERRTETDEQGETETGPERDTREEEDERRENRQARRRDRQPRDERQQGSRSRGEMDRREKKEETREYGEQHGAREQRKTQQGRQASEAEAREKENRASEKRGDRAEMETSDRSSADEHEEPQARGSREEVTREGARAAHDEQKREAEHEKETAIESSRRRAEMRGYESERDRDDESQGQGEAKGRGRERRDEXVRNEDSSEWAETRERRREERDRDEDEERERRDERSTGAREQDRTAEQGGGASKRTGEAAKKRGAEEKRRSRDGRGRATQTHQTSNERKERESEARHEERDSRSRRRSEQTKRREERGSRPRTRRREETETRRKQGPQEDEARDEGKEE

SEQ ID NO: 1002834 - protein, 333 aa, Homo sapiens
MPNSDNCMVYRKFPVPSYKKPTQVYSSKGEVAQAVTPQDPNTRGRRKGSGVNGCLTVSVNVTKSYKKLHHLAHIKTSTSTQELTGGLADCPATVAMDDPYDEGPTQQNITRHEDNDKRRTHTRDNYCRHTTPTTTTAPNAAGNTHPPRLSDQPGRRKRKADTTHSRGAATTRPQGTNNRHRRTLRNQTKPTRTRRQAKHPQQATTARPSTTNHTPPHKTAEGEAGAVTTREGKRSHTNSSRQRAGSRPKGSDTRTQRATTAATLQNDPGRPTQQEVRLDRPHAQQAKLRERSSNNETRETQTKQRQTRKGRSRRAANAEDSTVTPGRNRGGDT

SEQ ID NO: 1002835 - protein, 407 aa, Homo sapiens
NAEEPWLSAGAEHPGQNKPTDAKTESGHTGQTSRQKTVLAAGLRCPPPSPRHLRPVRMSPDFRAMDVEPRAKGRPSWSPLSTRYVWGTSCVLRYNRDKPVASPWSQREHQYPTRAIPAEDAQKFTPQNKGVVSVRFEEKMRTGTLLSTIAYPSDQGTHWNSRTIVDNSQTEKPRTRHASYTRTTKEKTIMLSDTADHERVTDLGASSTAQEPRTLDRAVKRRRQDPAQWLKEHLKVMPPHHCEQKSNGGNSAVPRRHSTAVRKRVWDPRTRGPPRPTSATRGDARDDTAEDNRHTAGRSLEAPAGTETEKSDTGNRQAATRGYRCTAQRKGGPQRNQNKRGRRQREPDGENGANTARRDAPQPATRETDKQPDASNWNDPTTAHADDDAEAQQTDAHRDDANSQNPR

SEQ ID NO: 1002836 - protein, 146 aa, Homo sapiens
QRVGVYLLCWEQPPDFFKPEVYTILNVSSIRIAEVSCCLCIHRLEHVDRLPGNWANCSHQRPLAKHSADSMCTLHAVGEIELLSGTRGSCSIAGIACPSVGVLQTKKGYGGDAGGALSSEGLDRLCASEGRYLPRGESRRMSGPVR

SEQ ID NO: 1002837 - protein, 300 aa, Homo sapiens
SVYSALYPAVMQSSLRHAPGCVPPEPHPRKPDVLRPSLTSIAAVPADHLQLCGATIIRRGARRTAITHQGHSREKKSTPEQTSQSLAYAHTTDTPQDRTTKNTETERDHNNRKHPKDEAPDQPRTGPHSTPSETTEHTDPPTETNQQKARTNEKQRKTARPHRHQARHRSAKNTGTEKTRTRPHTMNTEHSGRAKRQGKTTDRANQRERYNQQHNKMQTHRAKRGKHKKSDAHKNHTRKKRKEQTSKNSKQTNKKKHRETKKPKNHHTKKTNPGKKSKPKRKTDNTKTTQTAQKQKTHNK

SEQ ID NO: 1002838 - protein, 229 aa, Homo sapiens
DEEARGGTRPRAPKSDLSGAIVRHGPGGVMVSTHPIIQCFDVRCISVSRCSHMHQDMSEALACHDRLPRYMLAAWFEGPCENGAGPGLLVRRVSCAGSMVAEDLVKPGRFIGNQGLKQGRWRELGLHGMGWGLRISLAKERAPATYFVEPAIDLIWRTRLIGGIVGVQRTSRFHVEQGQGINTLSREPLNAPRIHFSPEEVAPPFRSERIYSTPVPRMMVMATFGLGCL

SEQ ID NO: 1002839 - protein, 85 aa, Homo sapiens
SGANLRDSPSYPDSSPEGPSEALRSAGVSERRTEVTHGRYTEHAKGDEDNSKETKTTREKAANNTGERNDKKIKQRSKKIEEEGR

SEQ ID NO: 1002840 - protein, 264 aa, Homo sapiens
EDNAGGTGLYWVPAGLRVCCSQRSERPEKEEQPVQNPRRKGTKAGANLDMAKTLQCKMKECLRIKESIDNEEQPPHEGKPASSLYSGRQEVRKRGKHRKHGHSRVEEPLTGYKKSQSSSGQQAKGARHTVQQQARAHSPQHARAGSNSTEGNSPAEQGRRARGCTGSSQTSAPREPTRVHGRSQTSEQQTGCRDNSAQLTDDYPQAKPQKKQHQQGAGSVAQANIRKPYHDMNFSNEDMIREWDNMARVEGSQGKTSKKKLGGV

SEQ ID NO: 1002841 - protein, 103 aa, Homo sapiens
MWASLSPIFAFPQKYRFKFPFPEGSLVGEGAAIRASVPSGPPWNTSAGLGDIFHTRFPCEPRLCPQHILSLGGSYSRFITDNSTETSVHFTLVDATLENIPNI

SEQ ID NO: 1002842 - protein, 149 aa, Homo sapiens
MTFFARGRGTLRVWGPINGRLGLERGVHSTGSTGKEKTHYRRRVGFPLLGASGGFEPMEVGLWVEKFRLIGGGDERANHSSSSWAELQGGDRRLGNIRGYMRGTSLNGAVKGNAFGVHIWKLAPWGLSAENGKMVWTADVFDSNTGGRG

SEQ ID NO: 1002843 - protein, 119 aa, Homo sapiens
MTKIQRNQETLHNIDCTNTDLPETTSHNLNARKLTGESPTAAYMKELSHKVASKTPIRKQTKTERTQEHPDPHIATTEKGERSRNIQRKPTEPTSNRALSDTQYNEQPRKEQDGEQHET

SEQ ID NO: 1002844 - protein, 112 aa, Homo sapiens
  misc_feature (51)..(51): Xaa can be any naturally occurring amino acid
GLKCPLPVPASAGLQHLSCVLAEDGRDVMTGEGYSACVANDDVRHECGGQXENKKRDKNQKKERERHNRIENIIEEGAVATRITLFASLCGAQSFFSANEESLLSSWRERGR

SEQ ID NO: 1002845 - protein, 127 aa, Homo sapiens
MDLRLLSVNSAPPDPPTPERGTEHLPAPQIYGGVTKPTYDPVSEDQDPLPATFKRLGLRKPGCHRGLWLAKPYGRVPGTKAARARGAEVHAHRLGEEHWYRAYGPARPSFGQLAMDDLSLQDETPLK

SEQ ID NO: 1002846 - protein, 30 aa, Homo sapiens
MGLSSTTASTEGGESWGSDIGVHLNKPCCL

SEQ ID NO: 1002847 - protein, 407 aa, Homo sapiens
MDAGAGRPWLRGARSRASRLLSVLEASPHPGFLLGSALTPARLTGLTTPHGTHRKPRETQGRESEQHNTNTTKTHRQEQRQTRHTHTQNDYQNTTTTNDTRPPFRTRQRENGAREETSTRNATADAEPSEDKQRRPGEPRTRRHATSASERSTRADAPQPSGKRPRDGERGRQHQEHTDGAPEHDDSEHPGQRRTTTRAHTHRRGAAQEDPRVHPDSQKETTRPQPATTSNDERPGARRGKAQEEAPHPAPRRRGGEAGGGGGRGGSGARESGEAGRERAEEEQGSEDRGGPDTGETRGRRGRDRTASGGRTGKCAPGGRQQRRGQRAGRRTRDKTAKTTNKKYHPPHNNTIPNDKALQLHQPPEPNPTITDQHILQHNTTPRPNTTPPQPHPQHYPHYPPNPSTPP

SEQ ID NO: 1002848 - protein, 281 aa, Homo sapiens
MTCKPDYGCPLEGCTRGSLRRALHFLRDNLLEERATQLGGASDAWLAAQMLRQRDKAAQVAAWVDGGQCVSTSIHGLNSCVPLDALWATIVGADIALVRGSEEQGVPGCRNCSWRVDPIGRRETVVHEMLVHPAFNGNPRAWGNRPFPKGTPPCNSKKNDIWDPKREKEDSLGKTRKRGNEGHRHQMGRGHVITGATGKFYVGHRHNQGTHTTRMGKQRGNRVVTSQDETPSEIAREGIVATKEETAGHTNRNKGSTQIGKEGETIHGEVDHRNVKITTQV

SEQ ID NO: 1002849 - protein, 403 aa, Homo sapiens
DCGAWLALGHLAWGGSGGPRPWCTPCRDTAECPASRTLAFQRPESVPLSVSHGPKQPYSAGMACSYPEDATAIWADRKAATSSREKTKNEIRSKNAGTAGPDLLGPQSGTAEDTGPASRKTVRTPRKAKGIPRTGDVEGAPSASNNKVGRPKATRGLGDARLARHNHGQDLGAFQCTRERTKPPTLREMTEGETTAKGITASTAKFRKANSDTPEKGKRPAYGPPEDTERRHATQQSCLTIHNMCHGGHGTVRKGGTLLAIMRQNWPSHTLGPDCNAAPPEQGGDTSFHRQALVLALHIFHGAHKKGARAQKYTVGIKQKIVGQCHQTPNGKQTATKRKFTNPAAAHIHLRQNGGTTTYRTRSHTVLTSRCTGKRGPHHHGRQLDSICREPDSLRPASANIGN

SEQ ID NO: 1002850 - protein, 85 aa, Homo sapiens
MFFTKDGASVVENYRVPYYKLWKASRIPIIESDWYSERRADLRILSAANPKRHINKSLHTPHTVRHLVALVPLPTPQPHQKNTTS

SEQ ID NO: 1002851 - protein, 317 aa, Homo sapiens
GARWRTSPWTNSVSEARGGERKDGLMPDTGVGGVQISSWDPDKAFSGQSTRTATFQQRFDARREDWTLRCPGQTGSQGCPGEAFAERCPISNQRESAGCQRDVEHLARQERPRCPQKTQPGELMPGRKISSEEECHHACLHKPTHRDRRHPSSESSHKTIQNLNMNLDEDDCWYSISRILLQQMKVEQTQAAYSSNMAGAKKDTKAEHNDAKGTQPHSQAKGGYSKECITKRIHESYHMSVLKADTEKAIGTQTHGTTGENMRRNNGKKTHHKKGSMTSIGRKPARDVKSQKEKGTKEEVKKYNRGTQQSNKRQTDQ

SEQ ID NO: 1002852 - protein, 221 aa, Homo sapiens
MPPNPMNSTQPSTAGMKCVSPLPSALQRSLRLPISHRPACLSYLMHPHLSSSRHRKRRRTSSKSEAVSIGVEATGSKAKWAEGAWGGRTHTQQHTTALQQASQKATDSKFQYGNYCKYYGYRKSIPVRMGSTSDVEAWVVSEARDVLDHGLTKVRPILDPLKHFGHCKKMRGPRYTGQWVRDLGTHQNTHGHPIPLHAPASKRNPENDSLFRKEQCDNPKT

SEQ ID NO: 1002853 - protein, 118 aa, Homo sapiens
MLSALSVLENERGRVRVSQETMSSEKRCRANGPGRAVPILRQNTFGFWFCFVHLCLDATFVPPLFSFLYPYSCFVFRTQPVPALYIDGDVADTRNYTLAVMAAVSVRTRVHYECDDIP

SEQ ID NO: 1002854 - protein, 409 aa, Homo sapiens
MSGQRSAICTLHPGADRLVPPSLHAMPNALACFACPCPTMPLDRSSFCSLLVWMTALLLSTCDAFCLLGMCSTAVDFFLVAPITMLQCACSALCAHQCAPCSVLLCLIAFSTATIPSHSFHLTPKLCASPFHHSSIHPSHSIATCTPCAHPSCSSHMPCPCSHVVPPCVIVVRQVPQLGVLAHFGWFLTNPRGSIPKSWPPQVKPYTFVGQRYSGLGHLLVPFQQGSPFPHLPFINVRKLPLQVFPPNRWRHAVWAHGGNTFAHGVGQLFHAFGQLPPFGPMWTLYTIATVWELCGPVSSTNDAPPMSQSRSQLALFFRPPKGPAVWLTGHPQRFNIVWQFQHQWCQWRIPLELENAVRGHTPLVGTHPFPGQRPFGKAPTEPPRFTSGNNCWLFPTDTGIDHINATST

SEQ ID NO: 1002855 - protein, 232 aa, Homo sapiens
PWLWVGRGGGGAEPRQDLEPGPWLCRRLNAANGRSRMEPGEELEEEGFSSVAVRMASSVEHLAAEAMAVDMDPWLVFDARTTACHMMLDAWSWPMYLIHPEVTRYGGPSVHPSSEPVGLDCMCMGRATCPKLSGTCMGLHACLGSSADQWAGHHTGYPVASSPSTTTLLSGKWLYASGTGASSWTTAWGLGICLAPSVEVPAFRLAKVGPRCQGGVGAMSICVTRTIPAVGC

SEQ ID NO: 1002856 - protein, 239 aa, Homo sapiens
MCGTRAILWRALGGWWRSAKEAGWRPGLASRSLSELVRRARPGEPALASMLCVIYHLDNPVGPDVQLAAVQETSLCPGPDPKPGSNCSPAQSVLSEVPSVPTNGMAKNGSEADIDEGLYSRQLYVSAMRQLKRLHDIHVSWYQCLRWPWAVALAKQHHPLVAVKAVTLHDQWALPRWADLSSQFYLREEEHRVKNLGRGKYRPRLAELSTAMCLSLAYTGPLVRGLLTATPVVVSPKTP

SEQ ID NO: 1002857 - protein, 103 aa, Homo sapiens
PRVRRSQDFQEIEPVPCALGNKFPKDSIRDRYLRLPGFPALSQVPDMCQAWGLSQTVLLRSFHGEGSHPTACCESPSLEKGSRPVRRNGLEFELEWILSHGCS

SEQ ID NO: 1002858 - protein, 647 aa, Homo sapiens
MTSPEEPTFDANGGSASTDLMLDNLSRLQNITNADSKRSYLALSVSQVVAHTAADEDELRLVKAYWNTATRPQHTKRLENLGTPKPLAWRKARAPRSKALESFPMEAKPKYSFDKTEPQKSLATPPYNNLMAMPSTTPRPFTFLWGTSEARRPIYQHTATWQTKRWPTSKEPHLPRPRFNRQRQKSLRSNSWGNTRHGVTFCAATHPATTFPGQPRVFGKDYLGQHNVSQRMAQPYVYNPPGQNAGPIMWFDGQNNGTYTHNTRGGTTNRRMATPIDGWRHYKTAPSLPWRTARKTHRVIWQHNLPPLDSIDQQKFNKWEKVVADSKTFIQVDNHHRLSRPNNIDTLWRIVNTPVWAVTPELSKRMQHLWYCGQHTRDRQLTRNIKRSKRAPTRRLERSTSNYKRPRVTRRHMRNHSGGVPLNGSFGPRLSPEKVQTARQRETHARTTAYPDHNGRVTTRRANTREYLAGSSYTTGLMRRGTKNRQRTQYDQKGPTTSEQQLGAELTTRTSGQQQTTTPTAERLVLDVTAQALIGAQDNNTRVGTTPHKTDRLLVTRRTAEPRGTWPTINTNRADNHTARYTHQQTPGPPGTGPADTEVADMAGRQLTINPADDMRSTPPAATEGASAAINRCENNGGRSIGREEHT

SEQ ID NO: 1002859 - protein, 396 aa, Homo sapiens
RTRGRTRWWRQPPSRARMSLPNEQTKLQHPSSKANLLADSWRRKMTCILHHMPVAYSQGHSYDNYCNDIGELPVLQQQPEQTAIHTIQERTRDSTKATRSSVTVSKPRRHGRTRSPSAACRGPSIHSQAPDPDPCGQWSRSTSRIDKSRQLPHSTANTRSRLAVAEAEDPRNNAHHSLLVHDLLHSLNNLDTPGNHREKAATHKPKIQPRPDHRMNRQRTHLAHETTPKTTLSRRQFVRGQTLGTPYQTFHLQIIRRPGNTKHPMGNYANLARTQQVSTLGTRPIEISAHTAHIYTRVPTRLSEGNVHTGPDIAERPRRRHPLTNIPGAYLDPPSVHPPTAHLCNFARGISAPAEHTRPLDMHTNPKSNKTINRVSYENAIPTMKNYRGRATIVNQ

SEQ ID NO: 1002860 - protein, 270 aa, Homo sapiens
VNDWQEDWVVSYARQRIQPQMDMVAKESGDRALPSMLWSALQLTDPMSCFRDLEIILSLYSTGDLMGWKHSRGFLLGRLIFDPASFYGHSVNMSWQYAGMSGGFEPAPFTPATTVKVPKDPGFDEAPSGCISSFTYLNHWNLLDRGYRGSSLNIMRNLVKVSVALLWKGGLRGYSTVLFWANSCFFTNARTKHYDLMAAAYIQGLAKVYKLSTQETASRSYPNVVHYMWGFVRENGTITYIARTEQKGCMTIVLTLTLTCLLKRGYLSWT

SEQ ID NO: 1002861 - protein, 302 aa, Homo sapiens
PRVAHASPTRRYFTAHRGRRGPVSCEGPGKHEGRQEEAMKGQEESPSNHDTEQGDDDEPASNQHEHGPDDKQKQKHTQATTLEQQDTEQKTNETNKETEERQYQGHSNELDENNRKNKPKDTDMTQAQATNKRRDDTETEKKTTKTHTKELQTKLKNKHSKNSEQKNTNNHLTRKKKADTHKEKRQEKQTQQIKNNKDEKKNNTKLNNNQKTRQTRTKKKKKRHKRKETATRQQARQQQNKTDTTTKKKAHRHRAKQNTTPTNRTSTMPTHSENTADKRDQTEPTHTPNNTETRQRKRRRKE

SEQ ID NO: 1002862 - protein, 96 aa, Homo sapiens
CDHGSGAEVLIVLSMLLLAGKKPYGAISHGVVEVDPMLTLEEQQLRELQRRYENPIYRFLEEDPDPDRLPLQRDQTSPLSGGAEARIPSRRGAGMS

SEQ ID NO: 1002863 - protein, 368 aa, Homo sapiens
WGKNTFIKKKITNQNIEQQNGGFKNNGKIKIETRGCGGRECPGGGTCEQGPRMTRPPREITGHRVEVQARGAAKELGERKKSSRAASGISASECPGIPRPLLSIPRGGIRARVTEPPVKNRLSGEANTHEISPPEDVAEPEDRGRERERRTHPADMRGRDRVLAPHRGPTLCPEFTRRDYGGRRNTMWCSPRRIKHHQRWGVYPQPGVETEERRPRDTTREVWDSIAETVRRAVDYTRRRGARIYLPPHIFNQSRTSNITTPTEGTKAAKALTREKVQPQHTAAEHTPRQSRFNPTGDKESNPKATTPAEQPQEAHHINDNHHKRESHHQRQSISPQEEEASPHAADRRRRTHKSGRNITNRDGSKTA

SEQ ID NO: 1002864 - protein, 123 aa, Homo sapiens
MSWKYSVHIPCVIRNLPGIRILSYSMRKRPGQDHEQQQGDWNNTGSITTNRHLTTRGNHKLQQTTTGTDTTGSKEPLKTRTNTQHLAKPLSKESSLATTNTQRRGRNRRSSTTTETQSTAITN

SEQ ID NO: 1002865 - protein, 189 aa, Homo sapiens
MHEGISIQNAARQLGTNAHGKEHAWDLYYNEAEPPPQCACPSQDLKPAHKSESHDKHKPGNKRCKHTRSADGHRRQERAQDMVLHRTKMRTSPTAPHYTRQKRRMLVTPRDKTKKNARHRGHHNTPCALQLANYAQDQTASIRPTVTADASGPPTHGHRDIPHQQTEINANQPNRGTATDTTLAHNKTT

SEQ ID NO: 1002866 - protein, 242 aa, Homo sapiens
MGSHAGEGRPWGARIVRTHGAPGKYHLQAVPRVYACAHTTPREPDAISARQRAVLDTEGRENHTVGGNDRAHYHHDEFIRRSALPRHYIMARIGEAPSSCKSRCYHNHHQYYGVRRGANWRQTIYQGQSVGVRTRTRRLERPVGAAPLDKREHTTFLGTALALEPLKVSHWAGRSNFNDDTLSAGYCGPDHNPGKRSTHTTPKHSSSPLRTQFKNDAIAAPPHTSLRLPRNPTRDNNANSNN

SEQ ID NO: 1002867 - protein, 106 aa, Homo sapiens
MSILVISLSTHKHTRRNPIYVPNTKRPSYPKKASTRRYTLVAKSNISDSPMGVILNLIVVSGPKIPKIINTTTKNQQHTTTQVTQLSVIKTMSTNTHGAPPRSKPV

SEQ ID NO: 1002868 - protein, 223 aa, Homo sapiens
HVEPNKERREAVKLKITKYLLDWAEEIFNCHLQRLLSSGASPSAGFSSLRLRPIRTLDSAVEHAEGLPGVVRCVIDERAAGPVTQSNQEGPYVVKSLPQVTTLGDAGKRADHHPTRKSPYHERSLLQVRFVERGGTIPVHFPWQPLRRTSVAKGKGSIHTLGSRQPWARPPRGRKHSPGKQFNLGAYKTFLGLFHNPPGEERNRNGAYKTFQNATQHYKTHSN

SEQ ID NO: 1002869 - protein, 270 aa, Homo sapiens
RRAMQKAGRLGSTVFVANLDYKVGWKKLKEVFSMAGVVVRADILEDKDGKSRGIGTVTFEQSIEAVQAISMFNGQLLFDRPMHVKMDERALPKGDFFPPERPQQLPHGLGGIGMGLGPGGQPIDANHLNYNGIGMGNIGPAGMRNGHGLGLWNKLKWDGMEGPFGGGYGKHGIDMDLGMNMGRIKGNPQVMHCKRGEIIEKQGEQVEVRRKATPGIEKDWGPGHLTDLKGVDRQLDAPEERGPRGHGHGIDVKHQEDSSAMRTRATRNRQ

SEQ ID NO: 1002870 - protein, 272 aa, Homo sapiens
MPVQQCGGPWGALCGPGMGNLWWLPAGGFGQWHLWAGVCVRVTGPGAMRSRSIAVGNGLRIMELDALYTNVGPPCVKDMTDQVPGGDLLVFSTVPINGIHDDSLTFVPGGPHLNGIEGISARLMAMCRQARTPVTGTQANNQGYQGAIHVWLLGGPTNGAHPFGSLAVVTPWHSNGKWGAQPGPIPMLVWAITFRVAKGTPSNSDPARLLRKTGATLGRNTRGLRGKATRRSVCSAFANGVDQWAQALAAILIGHGVSRHVSIYGIGRPKVG

SEQ ID NO: 1002871 - protein, 143 aa, Homo sapiens
MPLVDFFMRDLTSEALAGGHGGTSSHRMLNRELTTTVRNEQVRKPGLSVHFQQNSWTTQNEVEIHITPPNDRHEKITQGNAPEDPKNTSQKANNPGPTMDNRHSNNARNGRQHQTRGTDKTRRRAQRHSRHTKPGNPPTPRED

SEQ ID NO: 1002872 - protein, 130 aa, Homo sapiens
GRSPGEEFDAADSRGGRPGLRLFATIVDLTSGQSSPGPGSEARGIHGGPSRIVPKGSSGSEKVPRLLSSPVIGLLEKLLYQLLLAVGRMYPPSTTKSGAHAQSQLPVKKLPSARHANLSASIPVTSSDSD

SEQ ID NO: 1002873 - protein, 80 aa, Homo sapiens
MRGQNRLVLNLVTPNRAIPRVLRQRDFLHRASRVHPEGTLVELTWACCLADCPRLRFCFFYLLVFLLVCTRGDLFFTVHH

SEQ ID NO: 1002874 - protein, 69 aa, Homo sapiens
  misc_feature (6)..(6): Xaa can be any naturally occurring amino acid
YVYPEXQCDRPRGIEHTRCNRMYRINLNFKVQIEQLKQQNYQQASSFPPHEELLKVISEMRERNKWSLE

SEQ ID NO: 1002875 - protein, 71 aa, Homo sapiens
  misc_feature (8)..(8): Xaa can be any naturally occurring amino acid
MSVRPRVXDIVDQALAHASGAGQIGCGDASTSSFACLATCRLAATTQLGGPLVSPRPWRDPSLVAVAHMVS

SEQ ID NO: 1002876 - protein, 248 aa, Homo sapiens
MSTSVATRRTHASTSSRSRAVALFCFFGKNGVSHWSETAVVNDRQCLVYTTHYGTRSTTKAEIRVHNAGPSNGHTLRASAHNRTHHHTRVPQKKPRHKPHRRRHNQNTTPLTTPNRRPPTQQHNAQQHSGAHNNTLTRVKHPNRRDHTPHITQSEETITTSAEQQKQHYTQTQATPTPNQCDDRLKENTNQPTDQKQDGKPNTSTEDRTRNTPQQQHNENTLKTQQTLTANAPNTTTEEAQKQRKNTE

SEQ ID NO: 1002877 - protein, 311 aa, Homo sapiens
MGYVDQASSGITGSSRVKGAKAVGHPDAAAGPRAVRRSVGRRELGAVAVNGSHGTDVVVCGCSLAEDAVLCLCHAHACVHAVPTDSHVPLCYLLPGGFPPVSHNPLIQCAYTSWCVGVPTQWVNPTCPGQLELPVPPVTLTMCQPLHKYASHGNALMAGNPVQDVHFAATSMLTSLRAMAPMSPALHGSRGSLACVLARYCTTLGVGALRFAGVCHGRGRCTVCGGRTRLGTTHAYCPLARLSLSHRLLDKHTSVYTQTVIMERDSIIIAHVSRDAIGTIPKPLLSGGDPFLGLKEEPHRGYSRIDPHLLH

SEQ ID NO: 1002878 - protein, 151 aa, Homo sapiens
MVFKVPNQCLLRTDPVPEEGEDVAATISATETLSEEEQEELRRELAKVEEEIQTLSQVLAAKEKHLAEIKRKLGINSLQELKQNIAKGWQDVTATSAYKKTSESLSQAGQEGLQGALFVCWLSHHTKQLEDCKELPKLYKSFERTGRKLKV

SEQ ID NO: 1002879 - protein, 107 aa, Homo sapiens
VHDVNMSTTRSFQEAEAAVSVQIMSRALQPPPPGFKQFYLSLLSSWDDRHAPPGPANLFIRVSETEFHAAAQAGVQWCNLGSLQPLPSGFQAILLPQPPEIAGTTPS

SEQ ID NO: 1002880 - protein, 427 aa, Homo sapiens
MLGLGICRPTLSAEELLGPVELTCAPADFRGREKPCAAGPSQCPRWPVRRSRSPTGVNESSTKAGLVLGFRSFWSPDETPLCGSTKLPRGAQFPASFGPSSETHSGARVVGEPRTWGPCDRAHMIRVRTSDVAAQELNGLPCGFCPGAGRLGEFDAPRESEPETRDGARASGQEEPLRRGPHVRSFIPHGGDAKGSLSGPKGAHLEQGPSEGQDNPVVALERGTLELLLLVRRMKKPRLWGQVCALHAAPVATPLEPLPFLAQARFLVTCPLAHINPCHMCFANAAGNLWLPPFVEPQSVSRWVHAPNLHTFGPHSTLPRFATSPPGTPYISRFACRFKAHLGKGVDYTHTELVPGKHLSFDKEHWYWRGPPVRKCAVSLSGPFPDPGGTPHREVKGWERNTPSKSRRTSLLDNVFRRLRRRKLRAQ

SEQ ID NO: 1002881 - protein, 68 aa, Homo sapiens
LVRPGVMGYVDQRCLGSAWVALGWGTCGGFLLECFCAVAFVVPGLRACVTGAVVPDVPGVSLRVMAMA

SEQ ID NO: 1002882 - protein, 262 aa, Homo sapiens
AGTGLRMYLDIVDPQLSGPRPWLTHLPAILPVADGLFRRRPWGLEQIRRTPSPEGLFDKPPPEDPPAALRAQCRLSACGARTCLVRQLLGVECAAVVVPAPGQPPCQACICAPPAAQKEGAITLARRRWLYSHTVIPAPSSILSYYRKRDRPFIHSPVHGNHFTRIIPTFLPEHLPLKDGPMRQANMGVRARTVHLQLCATRDNVRQPQRDFVAYYGALQTHMQHAIRTISLVSFIELRVVFVYQDRNCIVDVVVCGPIQDN

SEQ ID NO: 1002883 - protein, 107 aa, Homo sapiens
MSTHAVGAGGCDNSLLVRALDRFHLALSGSRGPAGLLPGSETLPRRLVERVARERLVHHLQGLRAAFLGLPDRRPSGRCETPRCSGKEGPGLAELLANVASSILSHH

SEQ ID NO: 1002884 - protein, 101 aa, Homo sapiens
GSVTSASVTWGCLWGLPLKQSGMLLGSRESSLPGSNPCRVGELLTQVGAQVTVIDSRDGLGCCPGPGEQNETSGFSLEVIHGKMWYMVVMSIFLNEQCPIH

SEQ ID NO: 1002885 - protein, 101 aa, Homo sapiens
RECDQAADTYEYWLQDFRGKPPADYHGPSDLMSSHKCKKVTFLMIGNGGYIVCLMHISFFLFYWRQSLCPVARLAVRWCNLSSLQSPPPGFKRFILPQPPE

SEQ ID NO: 1002886 - protein, 209 aa, Homo sapiens
MAYVTAPRVGRDEVGEEEMVEGNDYEECGAYGGYGTLTSFDIHILRAFGSLGPGLRILSNEPWELENPVLAQTLVEDIADWIRKHLPMMTVPPCAANCMPCCLPPPTCAALGLLPAAAPYLPSVKVVASHLGGHGREVSRRRIPKPTNLRLPEAHGAHAHETNTFFFRRTSADRYVTSKHGLPPRLRKTLRHRYPDQASPGPGRLLPEG

SEQ ID NO: 1002887 - protein, 161 aa, Homo sapiens
SRAEFGTRKAKKEAPAPPKAEAKAKGLKAKKGVLKGVPRPKKKKIRTSPTFRGAKTLGLRGQPKYSWKSAPRRNKLGHYAFIKFPLTTESALKKIEDNNPLVFIGDVKAHKHQIKQAGKKLYDIDVAKGNTLIRPDGEKKGYVRLGPDYQALDVANKIGII

SEQ ID NO: 1002888 - protein, 35 aa, Homo sapiens
HEELRMHDNRIRKVPKGVFSGLRNMNCMKMGGNPL

SEQ ID NO: 1002889 - protein, 45 aa, Homo sapiens
TRLLYSSSYSYYYSSYSYSSSSYSYTFFRATLAGPCAPSNFPLDL

SEQ ID NO: 1002890 - protein, 35 aa, Homo sapiens
ARGATERAENSVPPNRPARASSFRSRRATPSMATD

SEQ ID NO: 1002891 - protein, 121 aa, Homo sapiens
WRQSLALSPGLECSGSTLAHCNLRLLGLSYSLASASRVAGTTGTCHHAWLIFVFLVEMGFHPVGQAGLELLISGDPPASASQSAGIYRHEPPHPAQMCLLFSKQIGRNTKTNCIKGGYGES

SEQ ID NO: 1002892 - protein, 111 aa, Homo sapiens
RLQKNNGGGLSVRHLDEAAVTAAILRASQCQAKDYKKKKDAGKSAKKDKDPVNKSRGNAKKNNWSIGKVRDTLNSLILDDKATYDKLCEEVPNYKLITPAVVSERLKIQGS

SEQ ID NO: 1002893 - protein, 62 aa, Homo sapiens
KGRDDRIEKREEIREDRNSRDGHDERLSKKRYRNEGSSSPRQSPKRRREHSADSDAYNSGDD

SEQ ID NO: 1002894 - protein, 55 aa, Homo sapiens
TKDRKEKKEGAEEAENGRDAPANGKAEKEENGEQEADNEGDEEEEEGGEEEEEEE

SEQ ID NO: 1002895 - protein, 68 aa, Homo sapiens
ARGESMTDGFQFEYGGQGSDPVDVAIQLTFLRLMSTEAFQNITYHCKNSVAYMDHQTGNLKKALLLQG

SEQ ID NO: 1002896 - protein, 45 aa, Homo sapiens
ARAARGGLPGLKGHNGLQGLAGLAGHHGDQGATGYVGSAGPMGPA

SEQ ID NO: 1002897 - protein, 54 aa, Homo sapiens
DRFCAGVWFCAGVWSCAVVWSCAGVWFLCYADDVLYNLTHWREYSVGPFSTRTN

SEQ ID NO: 1002898 - protein, 48 aa, Homo sapiens
MELCVLVETILSVTCINSVLAGHGKELGDQAKAAVEENPFISESTVSG

SEQ ID NO: 1002899 - protein, 40 aa, Homo sapiens
VSLLVCSCAGLSGFGASSVVVQGAKNTRQTRTHEQEHMHQ

SEQ ID NO: 1002900 - protein, 38 aa, Homo sapiens
DLEDLFLCWNDKQGFTMKQVFDHGVSLLLSKGHPVTEQ

SEQ ID NO: 1002901 - protein, 38 aa, Homo sapiens
LCGRPQHLLDSEDKALSPGSNIASGEEVAIKLECVKTK

SEQ ID NO: 1002902 - protein, 49 aa, Homo sapiens
IFLCRVVCALWSVLACVLVLRVFCAACGSMCFGGLVLGVVLCFGVVLCW

SEQ ID NO: 1002903 - protein, 64 aa, Homo sapiens
  misc_feature (54)..(54): Xaa can be any naturally occurring amino acid
CVWFTFVNTQSAKINRIEAKEQEALVLGTERTVSDTESKLGSFELLLAVGVAEXLHQVARAAVP

SEQ ID NO: 1002904 - protein, 103 aa, Homo sapiens
PPGGPYGQGAKIPFPKFFFSNQEKTRNVHHELPLKKIFSKESPWAKKGKGPFFREKNFMGVFTDPAQPKKFPYKNSPELTPGLFKKRPKGSFVLQIKGDNHPQ

SEQ ID NO: 1002905 - protein, 96 aa, Homo sapiens
VVLVLVVEQWHGILSGWELLGRVGTHWLFLLAFCSLRKVGGSVLMDVQFDDYSLVCLVLQDAVRGDEDSICCLMCLMRMDATSVSGFKSMIVTEDF

SEQ ID NO: 1002906 - protein, 216 aa, Homo sapiens
LSRERSQSQQSGPCVCLTSSLWCVLWCSCRGDLYTNVTIFKKLQKPCRHAQRLTLHSCNVNPATSTSHTAHHATCSFLGFEHASTMPSQRHITACTHPALGARPVCNTSITFSQSQGNNMQQHLHPHFQDNSSFRVCRNFKPLRHFHRQQSSNSIHMHTFTNHTVYATRQHQPKANCDGFPGPGSHRPIIAHLDAVYHQQSSKLEELEWRMEYDTI

SEQ ID NO: 1002907 - protein, 152 aa, Homo sapiens
QKKLTPEQFYVTREKGRDPPFSGIYLNNKEAGMYHWVCWDSPFFSFEKKYCFGTGWLSFSEAHGRSGFDESHTGILRGLDTSLGSARTEVVCKQCEVHLGQVFPEGPGPNGQRFCINRVALKFKPRKHCPFSRVRFPCHPFRGTLNFHNSLE

SEQ ID NO: 1002908 - protein, 318 aa, Homo sapiens
GRVGRPTRSARGNPEQTDPVTPSIPPEDSEIITKHGITVERAHQSPISTLAICREQAGAERNASATQTYQLSRWTPIIKDIMEDTIEDKLEQPKHYPYISTLFLCLLQHHRRQAPAMGTGIRTRPQAKYRSGTPTSSIFHPWRVWRPAMSMRLSLTRVEPRPNGNLGGCLDRESKEHSLSQQKMWMEHHVERNFELKTRIEGNITQVKKNTDRTQSKNEGTTQKWTNKEASSDGEVATTDQTRPPTIDEEGPHIRETNRTGPDDPHKPPMATHHKVNTKDNHLQTAHAMRKRPTNTGNTKGDIAEHHTPGDRTEKQRT

SEQ ID NO: 1002909 - protein, 105 aa, Homo sapiens
AGVSPRLTLLAVRKAQCFPVNPSPAKRRGALIGWGGASSSKVMKRASSPVPLPACLGSQGCAPASPWGPRKHESCPEWKFKPAQCPPCSHSHFFSGQRNKGFPPS

SEQ ID NO: 1002910 - protein, 70 aa, Homo sapiens
KNDPHLCVFIETHSLNEQVKPIKELGDHVTNLRKMGAPEFGLGENFFDKPPLGASDNEIKPGVNFPKPVG

SEQ ID NO: 1002911 - protein, 119 aa, Homo sapiens
MRRWTEYSQLGAEGDFVSTQKLVRNRKGFWKHRKGGDEALPARVAIPSDELATVTPKVCTLYGPQGQRNSHDPLGGRPLTWRGIGKTSLRNDAGQGGIDTDIAAQQRWDTGFGPRAHKR

SEQ ID NO: 1002912 - protein, 40 aa, Homo sapiens
FTLGLRGLLPEAAQTNQGIRTRQAALERGRTPEQVYYSNL

SEQ ID NO: 1002913 - protein, 213 aa, Homo sapiens
LPLPTVLRSPCPSGIIAINDEGLFTVDSHMQSQFAQIMTCETGRGSALAEYITTDIIAYRHCDTGKRVRSRLVAYGPHIKAHTRKMRTAHYEVMPDTGNCLNGISTRHGKNRTSQQKRDQRQITKTRKNARTKRKHNKQMSNNETHNRKEAVTPKNIPKQDTQTRTDTTPRRATTQNPTGERNKHKPRTEQSTERNKQNEQHKTTKTTRTQQR

SEQ ID NO: 1002914 - protein, 242 aa, Homo sapiens
MAIFRSFLLSPLKLTCGAGPWGVPQGDEKRVEGYTFNTTLNLYHKMWRLHTDGDNFRPSLGHSQGRLDTSGRDNANFSESVCPAVYTNLISAKRHPRGKQPVCGEETRVESTYILACEPSKEHSRIISPRPRKGLSTVITLPLERQISCGRNHKITHLSPQYMRWDNTGSHAPLHRTTAHHLKRETRLYISATHTPWVVTTLHTHTVSEPQSPPHTRGGLTLHTATPHHRQRNPIRAPTARH

SEQ ID NO: 1002915 - protein, 166 aa, Homo sapiens
FLLWGLPLPTHKHQSQALPMTEGAGWPPFPPSRLSQGWSCLSSSWNAGPLSLLSPSSLMRLSASPRPLPPGGGGCEGGPAGLDCLLGAARRDGRSHIERPGPPSDEREIQGTTAKSPGKENQGPRNARQGTQRSHTADRHPKRQQRPTTQAKNRIENGHKQAHTHT

SEQ ID NO: 1002916 - protein, 30 aa, Homo sapiens
VSRFACSFRSHLSSTHSVPSIVSTSVCHKY

SEQ ID NO: 1002917 - protein, 169 aa, Homo sapiens
GLLTPTPLSWVGACLPLSAFSSWCTLLRAPVAFGLGGRAHLFQWTPVRCPLAPSDCVWVPGWWWGWWMKGRAAVVQREETPHHGEPKTVVVPYPSEPPLVTPPACTLAHFHPSNSLTHLRPGPCLALYPYPPFSQRCRLNAAVGIPATHGRASAIESELAETKQPPENH

SEQ ID NO: 1002918 - protein, 121 aa, Homo sapiens
MQIWANLHHHLPGDPGYIPSHHCRLRLLLWCLWLELNAVYPPSRGGLDWSLMAPPSFPSAGIGVTGTIIVIDMLMENISTKGLDCDIDIQKDHPDGAGAALRACCTTDAQYKFIYVAFANH

SEQ ID NO: 1002919 - protein, 206 aa, Homo sapiens
PRVVLCWEKAADASLALLEIRCTIRTQGHPIELETLEQKDNRGNLASSASAQATAEESGKCGGHHLFADHIERILAPSPMFVQLFTNRSLNPSLLPNGHCVTDSGVVYSVGMQWLKTQGNKQMLCTCLGNGVSCQETAVNPRLTVAIQMESHVSYHSPNNGRTFYTPAPQKGDRDGHLWCSTTSNYEQDQKYSSSTRTKRQHKNQA

SEQ ID NO: 1002920 - protein, 34 aa, Homo sapiens
SKKLAFIGNYFTPRVSFKNSMLWDNLLIHWPNTK

SEQ ID NO: 1002921 - protein, 86 aa, Homo sapiens
KKKKPPGVDPPQVSSSLSPEGTLTVEAPMPKLATQSKEIPIPVPFKLGAQFGGPKIAKSNENPPKYNLSPDAPPSCPHGMCLPPPL

SEQ ID NO: 1002922 - protein, 41 aa, Homo sapiens
WVCSLMGLECVMLDLDYVVADTSKDNDSSQKINSFFGSTDH

SEQ ID NO: 1002923 - protein, 46 aa, Homo sapiens
WLSQHIFIKPLKLRGGGHEAGPTGKANFFHKVLGLKALFWATNENL

SEQ ID NO: 1002924 - protein, 231 aa, Homo sapiens
VGDKGPAFWTSCRDLPCLQWRKMKGLRKRRGCGLPGPCSATREDGEFEIQAEDDARALEAGTWNDPLGYRSPTHRNATLGCGRLDTREYWCVPRTKEEEEVLEASSPIGPGVYPGCSNGIMNEAGTEFANTPNRRVIDAFPSDSYGIGKGTEVAIGRRIGAQCRGTALRYLPSQLYRAGSKTPSVAHDRGRRAPSFLLRPTAESVGRSRPVKVHYSDATVDVHLGLQRTCP

SEQ ID NO: 1002925 - protein, 178 aa, Homo sapiens
MSSQVVGIEPLYIKAEPAALTVQRVPRRQRPEPPVCPGPLVQLPTRCLPGHRGKQEAWGGGWAWRAVAVGSWCSAPLPKRLCLVCGDVASGYHYGVAILGGLKSLLQEDHPGDASKYSCPASNECDDHQAEHAGLPGLAASASACEWALLKEGVRLDRSGVGRQKYKRRPKVDPLPFP

SEQ ID NO: 1002926 - protein, 50 aa, Homo sapiens
LRHLSLTSELSVCVLHVILGLNGSVRDLGLLRDVLTLARCFLGEGGASPF

SEQ ID NO: 1002927 - protein, 134 aa, Homo sapiens
MAPHSSSLLYSILLITWLKHSNHHRTTSPCIRTVTASTIRPISYLSMQVTTRSHHLVLSNHLLIHVASFYTSSTSLSTNSKVTTLLELLLCLSTNAPLWVHKIIESSVIPTPYGKEHPKPENTAPLQNAMAGNG

SEQ ID NO: 1002928 - protein, 90 aa, Homo sapiens
  misc_feature (49)..(49): Xaa can be any naturally occurring amino acid
VRNSIINMLLSTVLMWRQRVFIICVLTESWSLICLCWSGCNYLMFRGSXCKKVASAIVPARLLMCKTAVIQYSEGSALGRVQETTDPFST

SEQ ID NO: 1002929 - protein, 159 aa, Homo sapiens
DIAFVLACGLCWMEVFNLFFFMLLRASVPLSGGAMHPLGLPGWSHSQVMAFSTTSGSVAPALSPCSLRANLTFCHAQTPESGPLTFGILVPFNVITAALPVQAQLHLITLQAPLPFHCQGQLLLVPFNVLLGSGHLCLELHLFFLQRLNLKVSGDHLLR

SEQ ID NO: 1002930 - protein, 99 aa, Homo sapiens
VVWIERDARWLLLYDLRSMSLYGVAYEKTDIEVQYTVRGRAILNSNGTIQSTASSDRTKQAEKGGIVAGLLSLLVSVFLLWFLLPLDVKIPGSSAFGTQ

SEQ ID NO: 1002931 - protein, 46 aa, Homo sapiens
EEEGGEEEEEEEYCDSEEEDGDEDEEAESATGKRAAEDDDDDYVYT

SEQ ID NO: 1002932 - protein, 99 aa, Homo sapiens
GSRVLVWCIYGVQHLVAVEEDAESEDEEEEDVKLLSISGSGLPLEVGRKVPPKKMKNLLLDEDGLTMMNEEDDDEDDWMDDDFDDEEAEEKAPVKKSIR

SEQ ID NO: 1002933 - protein, 91 aa, Homo sapiens
IEEEKNAFAEPWRYMSVYDDSPEMYETISQEFLTPGKLEIKSVELLKLHMEEEKRRSEEERKHKLEMEKHECEHLRQEMGEEEEHNDTFGL

SEQ ID NO: 1002934 - protein, 33 aa, Homo sapiens
GFRVIFAGEKMETDSNKPKNQNSFHTPVNWPQT

SEQ ID NO: 1002935 - protein, 208 aa, Homo sapiens
MPFSNSHNALKLRFPAEEQFPELSAHNNHMWQGADPQKLYAELRAKEHAERLHAGRRHPDTAWTTRATRTVMTVGCCGGATKESYEVFTGSLTTPSSEGPARRATKAQAIEHQAPDHQNPDNHSRADATNLRNPKPTLLEAYDGDADTGPASHPDGHSMHIPPSNVHTRRGQAPQAKLGRTAHRSGKPPDPDLEQATPAEARKQTQAQ

SEQ ID NO: 1002936 - protein, 383 aa, Homo sapiens
DGNKGLGCMRYEVGVLVPPLEKWDLVRVKEKGLRGTCPLPEKQRRGRDKKTRGSVTCPVPGKADEGVRDKERRGWGICPFPRKAGLAPKGEGPRQASLCGLTPLKRGRIIREVSLQVIKHQGKAAFPVRDRCRSLWAPRHKNVLLLMLSTRNLHQAIRNFKQPRRDHCTLWCQRIEQARTEHCARYVHGKRSDAQTTLTQLIAPLTRDLENLGRRPVHSAPSRWALLDGPLTAGPAGLPLHSAPQLSPEDAADLTLLTGEGSPWNPKLNGAPQSSMRADPAPARRTQATRGAYAARAPWRTSNDTPAHDKARRHGLPEHTTAHAAPGPNRAGAAPRRNTRHAHTRTKNLQRTSAVRPHCDAERRDAHRRAQRARTQRDHEEQR

SEQ ID NO: 1002937 - protein, 36 aa, Homo sapiens
MIDDFTDHRSATIIAVFIFSDDLGLHPRYELNRICL

SEQ ID NO: 1002938 - protein, 46 aa, Homo sapiens
VLGKSRGMQIQERWENTKQGRGKHSSLGLWNLKRDCQELVSWVSIL

SEQ ID NO: 1002939 - protein, 195 aa, Homo sapiens
MFVYCTSLGSALTSSVPMRGLGLSGPSRPIFGALHVFDACYSPLCLHPSIHMSPTAFTHGALKSVYPRKNHPLVAHTNTRCDTLDHDPLLLGSSHSTILVSHSAPRRTLDTVTILGLIDIARSARPCNTSSPTRRALRHPHSLPTHTTPSHAPPTSGAQPTIQLRFKLSSSPKTNNISYSGSALSRLRHMLWSRA

SEQ ID NO: 1002940 - protein, 129 aa, Homo sapiens
MEDLFLSGVLRFGLHLEARGSSAVVHPNSGIPPRVDIGLRQGLHRGSPSDPSRAHQGVTPSHKPCPSALPHAAGVWTHPTPAALRPPHPRAPVGPKTYGGNPLPWLEQTRGPSTLILWPTGLRILKTSW

SEQ ID NO: 1002941 - protein, 326 aa, Homo sapiens
KVAREAIPPQKLTMQDSSGSEAQISKTKYKNERTGIELGDIQSSIESITTPNTRHSNIATSKSFMALRQSILSFQAKTGPRHYFLPTNTQHSLPSFSSCILLQVHQSTLPCSTVRQFLVTHCNQVQLSTQQSDSGRGHPVFQVGLGSFISHNITNHSAQNHKNTTSGSHPTLSSRSIAPFSAHPFHTFPPLAQQSQLHTSFWHLISHRCRRHAASSWPKGTHFSLSFFRSEQMVSSHTLQVINIQKPQNTAHHHHTCSSLSFDNLPLTRGTETTLPYRYTLLNHGSHGPRQHHLTPALPPHSGLPIQPQQAPVASIATSFNTTFTP

SEQ ID NO: 1002942 - protein, 109 aa, Homo sapiens
MNLPEGSEQQKRRPEFLEKKGALNDMGGDVYIYKRNEESEGESAVYIKNKLRSWWRVDKTRSYTLEEGRYFVCGRGTGDNHFIVAWEGEEQKIICWEHKKLLSYYRERL

SEQ ID NO: 1002943 - protein, 43 aa, Homo sapiens
MGTIQWLERKGTFDPAEGRGLERRVRMYNGASAGEETMASDLN

SEQ ID NO: 1002944 - protein, 257 aa, Homo sapiens
TRGHGGMRDNTSDHQRESGELGEQGNKLQFRYPFQRSQEHPACRQVSRVAGYAASKRGDHADEQDGDSRFSDVILATMSATKSEMCGLKKFGTDRLIMCESMGTQHCVTAMLRGRSAQRKYSDQLIKHVCIYLFSVVSATVLQHEERRCQYLTREAKLILALQDEVSAMAAGNEGPQSPFHHILPKCKLARDLKEAYDSLCTSGVVRLHIKQLAVEVSFCRDPQEIHYACSSLIAPEGIERSLKASGPTMPAVLSDE

SEQ ID NO: 1002945 - protein, 81 aa, Homo sapiens
GRVGRANCDRYLLVWDVRWTTYKRIGLYRGPSHRLMVPVHITLVSAFHDVGYSTFNHPADGGWTVIYDLGREGSNREEVRT

SEQ ID NO: 1002946 - protein, 112 aa, Homo sapiens
MESALPPRLECSGAIPAHWKLRLPGSCHSPASASRVAGTTGARHHTRVIFWIFSKNRVSLCQPRWARSPDLGIHPSGPPKVLGLQAWATVPGLTGLIFLKKGTWIKVCKLKE

SEQ ID NO: 1002947 - protein, 65 aa, Homo sapiens
  misc_feature (63)..(63): Xaa can be any naturally occurring amino acid
GCYAYDLFKFKFTSSDPGKHRNIKQIHAETNLSPHVKNTAGIRALPAAKVFRIRYSRFPLHGXAD

SEQ ID NO: 1002948 - protein, 279 aa, Homo sapiens
RLCRWEREASRPVGCWAPAALVLPAAARRRQSAGGAGGMESLLENPVRAVSTSMELTGIVQEPCRASSIPDESVIDELERRWTDAEPLENRSLWEQTASLLQSPASDRVLVPPPSYGPDAWPVRGHTGFLAAADQGARGNLSEGPGDRAQAARRPDSRAPDRCTPRSSNATGQGSWKHATQGGGHLDKPKGASRSIRNGSAPKKASWGEHKKGGPVARDPTGERDGGTRPEGLDAAWFAREAPITLQGLTAIPPFRSLRAKGEVLSASEHLEVTGRTRE

SEQ ID NO: 1002949 - protein, 51 aa, Homo sapiens
  misc_feature (5)..(5): Xaa can be any naturally occurring amino acid
MVLSXAADGGALSLAEASRQVSRDPQSCTPTDSRFRELRKRYEGPANQCLR

SEQ ID NO: 1002950 - protein, 294 aa, Homo sapiens
MSVLAVGSRPDWWKMCKCGARYKVCWPVMAMRLTPCLWTVGGHAEPLGDTKLVICCEGNAWVPIEAGLRLHAPGMLGIFSPGLESSEALLDRHGGVIPARMRLKCHGCGGSSYAISANWCFQAPRNDHLSSDSVLPIWAVSLDIDGAMRMFRTSECLVSIDPGIASFGLDLCALWVLKRHCQTAWRGLVDHGPVTAAVSILNKRETPRCVKIPWVPCTCRDSVRTNGMQIISTRRVPDGTIYVSTRRAMILLVECSVTAIGIARVDGKKRGSLAVVRQWLEGLLDRSEESSFII

SEQ ID NO: 1002951 - protein, 42 aa, Homo sapiens
LQDLCCVSKCTSRQSTRLRLHSAQDSALLYYRASRMGYARCP

SEQ ID NO: 1002952 - protein, 175 aa, Homo sapiens
KGYGGHEPSCHWINMAALVTSPRTHHDSPPVSPIPQIPSLPYVQTLPSCDEDELISCAENHGGWCLTQPALLPQGAFRDTSFWHCSTNSLHSWLVISGGVGAKARGKAISSYERENHTETTKGTFVPATTEHKLSIQVVLIPNAMQIMSVPTKQDGTTVGDERGRPGLECSGATH

SEQ ID NO: 1002953 - protein, 41 aa, Homo sapiens
NGQAAATCPVRVEALGLLQEALDKDSGYPETLVNLIVLSQH

SEQ ID NO: 1002954 - protein, 109 aa, Homo sapiens
MALDYVDNRKPSPDAKPNRPNNYISTSDMTFQEDSIIGINIKQPQPNELASSLVLFFNQINNNLICCSPKTIGLRTPNNPASVMTELTVTPIACDHRMASERQLIQVNH

SEQ ID NO: 1002955 - protein, 54 aa, Homo sapiens
MAHLTPEEKTAVMALRGKENEDAIGGEALGRLLVVYPWTQKVSEYYEDLSSPDA

SEQ ID NO: 1002956 - protein, 195 aa, Homo sapiens
MRQREPRSKRDREQRGQARKDNESNNAERADTEGGCGEKKRGGKNAEEQTRRESKRGEKKEGETEAGKKGRKTRAEESRGQKQEETLTEQNREEAQTQREEKRGRSEEKGGEEREEEGKEEKGRGGGRRKRKAEQRREMARECQTARQKSAVRGEEKDKERRRRGTKKEKEEERDSREGQESKKTDKGGEEEGQR

SEQ ID NO: 1002957 - protein, 219 aa, Homo sapiens
MLARRQRLQMTLVSAPGTGQPGGFPKPGRSARGEGEKGREGGGGRAKRESQRLLVLLSCGWRPGQTHAPALAACGRRNEAHPGPRGTGRGRPVCVKELNGLKTAQCGKVQGCRLRLLQKRASKQFSLNMDVWKAARGPETVGKQRDLQGQGTHSGLTGTGSRVTRIAENAKVPQMDGPNRGPTTKEGGARKKSNGWKRRGRQLEENPKDNRNARENDQI

SEQ ID NO: 1002958 - protein, 315 aa, Homo sapiens
SALVLVKDPGMANVAQAGSNPGAPASASQNSGDGEHLEPPHSAAFYIKSRDGVLSRVHPGVELQGPPSGLTCSLEPPRLSAILPTSSLSSSRDYRVCINAQTRPHLHHCISRQHGGTWADDPPKREETPRGAPNNAPHRANHQTPQGAPTVNLHRALKMIPKDKGGLQTGGVRPTQTPGIVETDTIVGKHKGGISHSGWPPGAGPRKNPRAPHRKNASQREGQAPKGCGDHTPWSPRRGHTQSHQRAPSVGAGPTPEEKETAPERIKRGKETAQRDGAAAVENPHNSKRKWPKQRGAPGEEDKDTTLADTHKHGE

SEQ ID NO: 1002959 - protein, 102 aa, Homo sapiens
ETESRSVTQAGVQWCNLSSLEPPLPEFSNSPASASQVAGTAGRHHHVRLIFGWLLEMGVHHVGQAGLKLLTSNDPPALASQSAGITGVSHHARPAFLSKGDF

SEQ ID NO: 1002960 - protein, 289 aa, Homo sapiens
PRVRMSCVPRPLLTLAQSPPRVSAAAAGHEPCTRRRPPEEATKLRSAADQPQPMACMTWPSVFRAPMLVALCPWLQALQHLADVLEGDSSEDTQLFTLCCNRGTDSANCRGGSERTPSTDPFAQRTINLAGPTGPDADRGMVHWSIILQRLKGGPLSLSPVWPEAAQKSALRWGASEEVDHRIQTRCQPDETITRDFPTMDNIDPCSITHRQIRHQHRNVYTPWDGMYAGRHWTSHKAEIKVVIRNTACMEGIHGKWDNSQCTHDRRYDSTARDPNVINKEGRSDDMYI

SEQ ID NO: 1002961 - protein, 259 aa, Homo sapiens
PEPSVLSEVTKPPPCLENSSPPSRIPEPESPAKPNVPTASTAPPADSRDRRRSYQMPVRDEESESQRKARSRLMRQSRRSTQGVTLTDLKEAEKAAGKAPESEKPAQSLDPSRRPRVPGVENSDSPAQRAEAPDGQGPGPQAAREHRKVGQDSWTGAAEGDRQRKPGETRTQRVPDTPEKGRAPSSRAGQAVASGDLRPRMLRPDIGRARRTAEDRCMQELRKGDRSGFAEALTEDHAADGAAPGGAGRDSKGRPLGDK

SEQ ID NO: 1002962 - protein, 184 aa, Homo sapiens
MVTPAYRAFYSVLPVVSKRTLGICRTRNRSALRVLEPHCMAACAWDHTRGLGYCPLELGDSCTQMTFLGRHHLNSTCSELNACVDGRAGGFVGLPVSLRPMCGSVSLSRREARAPRELPGCDAGRPFVSVELCLLICTCDKAPPFLALRYFYPLFTAFEVHCWTHVRLVYDWQVALKEMGCDCE

SEQ ID NO: 1002963 - protein, 156 aa, Homo sapiens
MCVNKGPTKCVSWGHIRGTSFNGGHANTYWRAPNTINSDEASPRRETTPSPVRTIVGPLTTRRRMMPLLLQTSNTQARVLHTLCCAAVLLPHECCSSPNDRRKSRKKKHPQLVALLGDEIYSSIKNTLLKAHKGWQQYYHTYTTRRRLRARGTLPI

SEQ ID NO: 1002964 - protein, 214 aa, Homo sapiens
APGAADGRSAPARVPGVLDRKARMPVHPTATTQLKLRIPGPRNGVLAVRLDRHTINHHGQQVADPRSSGTLVAVSSKYPRRVGLTPAWTTSSQHYGPCDPTLSEPNTLLTGPARNHARGPRPLARAPQTRMERITVTPHNDTFATTGGIPFILKNHPPNLTMPCLRHPHDDTTRSPAAITDNRPPEECWRYGKAKPTQNPRDPTYAQLPQLGND

SEQ ID NO: 1002965 - protein, 75 aa, Homo sapiens
DKKNKDKKKKKGEKEEQEKEKKKGPSKVTVKAMLEALAKLKEEEERQKIEEEERIKRLEELEAKRKEEERLEQEK

SEQ ID NO: 1002966 - protein, 148 aa, Homo sapiens
MAMLRIQPEAQAKVDVFREDLCTKTENLLGELFPQRRFLSWMHLYKKEPCFSMKPSLSNCEWPRLVHLAVPVTYVNGRNEETQDAERRACMDERNDKGMKHERQGRGLNEQKGPSRVGPTLNLSTDNTSRWIRYCSRLERAEDQRTVT

SEQ ID NO: 1002967 - protein, 267 aa, Homo sapiens
MRYSISHRVDALRSVVGRDRFTAAYPYTVLGDTLIQTVGVVITGKVRLRSRNSKAFGVGVTYRSLRPHSEQLGQDRARILVAVHSNNNLSEHEYMTSDRPMQRQQRSKDARDCPPMLLTEPCDCRDMKSFHNAKWSHRMFTFLLELTRKPKIEVLGTTSSKISVPRQVRMHAHCVSRVIGWLRRRCSAMGIESGIKRHIGNVIRPQWIAIDCRPMSPLHKQQARTWQDVCLHPQDNDLPKNTNTDRTLCKLRKADAPSKGQNRRNPQ

SEQ ID NO: 1002968 - protein, 97 aa, Homo sapiens
RLRWQIVSAGGGVNVKQESNYEYDGFQLDARRVSIGNFEKQRLAFHTVRYDFKPASIDTSSEGYLEVGEGEQVTITLPNIEGSTPPVTVFKGSKKPY

SEQ ID NO: 1002969 - protein, 149 aa, Homo sapiens
KILLHKSSINREGTRLRSRMADCISIGHVKVQMAASIGRDSSQVHPLAVLLLTDGDVHIRDDGRRAHHRQLSDSDLLRLEGDSRTVRLAEQELRRALGRMVERNLRSELAALAPQRYYGGARCKLLLRYVCMSMLQRTTCGSFDVRKTS

SEQ ID NO: 1002970 - protein, 94 aa, Homo sapiens
MGGGVGQAGLKLLASSARPGLASQSNGIIGMSHGPIELLSLSFVVDADGLWLNKNLDFEEPVTFEDVTLGFTPEEWGLLDLKQKSLCRGVLQEE

SEQ ID NO: 1002971 - protein, 68 aa, Homo sapiens
QQGGITLFMIETVQISNQAGVTPLRHQKKWLPYGYIGNSIIGFTISLLVFFRARTAFGFDTFAWDMTN

SEQ ID NO: 1002972 - protein, 78 aa, Homo sapiens
HASVKLEVGCGNGLGVIGDERDIEDIMKPVNSTSEKDTAEREKRYLQKRLMFSGYGLFFWDEEKNVLELVRGVGCAAS

SEQ ID NO: 1002973 - protein, 816 aa, Homo sapiens
  misc_feature (466)..(466): Xaa can be any naturally occurring amino acid
DAWALKSSLVTGRASNTERIYWNGWSPAGTDKTYHQTSGYTRQPSGTGILQSSELTQDACDSDHHKHSAGPQMNLSQLLGTRLTWLSAALTSTAFLQAVTLHRARLTLTGHDYLARADSVLATQRQKRDHDLCPKNKHSLSTTPEATSTTVTCRVQRINKLATKRQRKTLYTIIVGAFHTALTAHNIWTRGQFLRPRLVVHTPDISTAQIPVIQRITNNQRYNLSREPLLRPPSLGHTFRRAYYQLGDDNLCNQHSSRHYSRPHTATLNPSGGHLTNTSIPIRRLTRTHRAGTLIIGPTHQIIDRTELMRHPPTHMCATIVPPKPTTVITPDISFSYYYTAHNKARGHTLASTHTTVRRAFTLNGAHNQSDKSLRHNETSLQIRHTIQTMHSNSSWAVPDFPHNRAAYQIAALYDRERQPHVINRPNKDYYWSAQLLSHRNAAFYNADPVYKTPQVSYLPPANRDXSVEHSILNSPVGGNTPLQSIPPQFTNPTTGQTKLLGPKLHKEEIMESNIGHAPPTSSDKTHLEGEHKRETTPKEAHRTTNANSGLIPPQPMSADNNQHAPPKPVRQPAQNPTVEHAHHARNHNSRAYGQPHHLTQQHELGFNQKEESQPQEGEKRIPKPPRNDALSGKQPEQHAHQLVTGKIRSYSITTLCCRRTQSPTRRQQGQKKASTTPNNQVGASHQEWYTTQHRGGKETEVGYDTNHSQVISPMIFTADAASQHKQPRTRRTALMMSKHHHFRHTTQKTITNSPIEQQHRYLGTTRQQQPITNSPWSIMDDPPTSFILTELEPHTRLGAASQIDPHTQFIHHMIV

SEQ ID NO: 1002974 - protein, 236 aa, Homo sapiens
HSVAHASAATISSVSAGPLALRAAPPASPGSPGNGRHRNTGARWTASPWRSKLRCQQGRTGRLPYSHNLYLAWSPRDGGSGEIPSTRHFHFPRSHHPQHHACLASSRPLYRYSAFYFPAIQELRAIELVEHGDRTLLMRFRPFHTIGATQQAHNGALACYLLQHTVEISTLPRSVRVAPLARACKTRGAWATSDGKGPCRAAGLKRASLVQGHDCTQLQNSTWTPTHAVALFNPGV

SEQ ID NO: 1002975 - protein, 214 aa, Homo sapiens
MCVLCQTADRHVGCPTNERTRVFPPPKWRHQYSQDIGTRALVWGKPPRGKRTPSPLRSINPPPCGPLLFLREKMPPSGFKHTLSPLLKPRGELFTHRPKRQRREFSVFNTRSFSTHPRGLAGGAAPSVGDGGAGRAMVVSPLWCRPVGMSFFFSPRDIAGTHHPALARVAHNTVLGRGPAFTRRAGRSEGGLAGFPPITWGVPHSLAVAPDTGL

SEQ ID NO: 1002976 - protein, 67 aa, Homo sapiens
PEHTGVLLLTDAKSTFSKTGLKAGPQRQQDTTVPFFGAKRRVPGKFKGFSGEAKGPNNIVNGRQRQE

SEQ ID NO: 1002977 - protein, 235 aa, Homo sapiens
SRSAPPQSQLQLRGTEPCTRRRPREEADKLRSAAEHNARPWVACSMDQPVPCPVTGQPWIHEAQASMQHLGRCSRKETAQKDLQHIFAMRISGPTAPTAGRCSAAPSTIPLPPPRTLLDTRTSPHGLCMGLIRGVQRGHISMSRVPSGGHEGAVGSRGQCGVQRVDTEGPLSRGIPARGQLARGGYPQERYGTKPNGPSPWAGYTPKPRSTHKDIHGYIASQMTKRSNDTGALDR

SEQ ID NO: 1002978 - protein, 57 aa, Homo sapiens
RFTPRHMLLAVANDEQLTQLLKGVTIASGGVTPNMHPKLLTNKRCSKGKLEAIITPP

SEQ ID NO: 1002979 - protein, 342 aa, Homo sapiens
RDFVGQEYRPLSRHTNISLIYGPSIQEDSQLTVLDIDWSTVEDINVLWDGSYSFFRGQTQANGDRVAPVVCPGPMAPRYQMPVDIIRSFAHKKDVNMALRSLSVTFEQVPMDRKTSPGSRSLQLAKRSNKKGTQQPHSKAHSTADGDVDECDLYATGPVSLEHSCIRTRTHGNLYSETNTTIEDRTRPRDQGRIDNGQYQAKSQSWTIEAHFLAQRGIDCECQAAFHKHCGGPWKTVRAVIPVHVADGSVHDLCGILAFERSTSENNGATAMEFNYDAADRKPAAGLSVFTEAAKVNATRFHGQIYSVKVVATRDKLAGNTDTMRQTGDNLTRTASPAAVNM

SEQ ID NO: 1002980 - protein, 233 aa, Homo sapiens
MSSCMPPGILQWGRQTTNGEKKVLLPGHSFYQFKLAKYHYATHTRLDPAFPSLSYNFWQFQSVSRLPLVSKESSALGLKLPTHTTSARHAQAWTGRQPLTHAWAPGQRGPWHALNVSTACRSEVNLTPGPPRATAPTPPDPPQPNNRLATPKAKTTRSQPVPSPTCRALPPRHCDTLRTRPTHVPKGRAHPPHDAHGELPTTAHTPRPRPATSLPGVTHARPTRTHGPPQHGP

SEQ ID NO: 1002981 - protein, 47 aa, Homo sapiens
MSGRRKGRKCSMNGGANRHLNVLCDNIHGITKPDIHRWALLGGLKRI

SEQ ID NO: 1002982 - protein, 110 aa, Homo sapiens
KKLIPALMDDFEELRMSVEEVPADVVEITRQLELELGPSGEMKLLETHDETGTNRELLLMDEQRKYFLEMEYNPGGDAINIVEMTTKDLEYSINLVDKAAAGFERVYSKF

SEQ ID NO: 1002983 - protein, 421 aa, Homo sapiens
RGLSQWRYCKFHPEASDGILVSAAGTTVNCWDAAKQQPLTELAAHGDLVQRAVWSRDGDPGGHGVQWTSSMRIFDTQNKAAGPLRARRPMRPPQGEPAGHGWATWDAPCVYWIQPDDVSDEVKLLWTRRYITPDALSTPSPWTPSLEDVLVPLHGPLTLGSWSMDRKGREASCTMLRRESTHAAERLAQDDPDVIPGQAVHAHGSMHPTHAHRHSATYAASMNTRPETPPRVTNEACSATHKTHPSTHTTATQSRPPGKGTRARTTTERETLALPRDHPRPAGMPSPMTNRNHPQIDKRHEHQEAHNTHTTVTHNNGTENDGRRHELEGRRQPNQDDGHTTTSNRTTEVETQYQEAPERQRQPTDTRPRQAEHGSTPQRNRRRDPNARGRTGHTHAEAHNQPPTHTAHAHPHHAARRQQRA

SEQ ID NO: 1002984 - protein, 109 aa, Homo sapiens
MFARNLRDDPVRYPLRVSGQRALFPSNVYLYLYTLWGDLYSWAKGVRRLRTIDVAFPVLMNIVLHVFMGVELLRVGFSRQARAASDISQEDEEVVTVYLIEGIQLKNNV

SEQ ID NO: 1002985 - protein, 491 aa, Homo sapiens
GAAAGAASGSAAEPEGAARLPQDTRTPEKRQWHQKSTMEKIRNVLKRGRDTANIRSGTPCAYRRRRRPQKKGLERRMQGTHQETRAADVHEDEGKSRRPSPNRHHRAGYRHQTHPQNEARPTQQNASGDRTTTITNRPQQANTTYGEKQDDTGDNSTIAQREKLSRDHKRTRDTTTEAPEAPQKWTHTGTQQGAPNGNFTERTQPSHTRDEHETHDHPEEEDTHEHIQHTLTNVATHARQRGHHPNTGPRPYTQKRKATNRDTANRHYTTSDTRAHHTTEDKTTPPRTTNPTAHARRHQQTETSHRLGTTHKQRARTNPEPIKAAKKEHSEHQRRGEHTTHHNGQQPETKPIAVTHDNDSKPHHRKRRQKHGHKDRQQTAGSTENTKISDSTARGKNHTTERGQRAEEGLTREPAAEEDEEDTDPAETEREQASTSGGRGANGRRHAREGTQRSGREQRRARRRAGGDAHDSTDKQQRRGQREGHATQASA

SEQ ID NO: 1002986 - protein, 58 aa, Homo sapiens
EADHSGYAGELGFRANSGSGTRLDGKKKGVQPIRSAIKPGDIKRGIPNYEFKLGKITF

SEQ ID NO: 1002987 - protein, 146 aa, Homo sapiens
MEDGSDDMDTSVEDMVVVHVITRFVRTLLLIMEHGVKPHSKHLTEYFAFLYEVCKKWVKKRANFAFIAMLYLQWYMFTWEQKDLKNPQVEVSSEEEGDRRRGRKKISSLWQKKNYRPAALENDDSFSCSYGLNSLDSDKAFDIITD

SEQ ID NO: 1002988 - protein, 70 aa, Homo sapiens
YVGVFFLLPGPECNGAISADRNLCLPGSCNSPASAFAGMHHYALLILYFQQKLGFSILVRLVLNSQPQEI

SEQ ID NO: 1002989 - protein, 209 aa, Homo sapiens
MPVRDPAPSPGTRPPRTTTSGCSVRVQLWAGGPAVVRGRQCRGLRLPRCQVASRPAVGPVAGGPVYPLVLQPLGCLATAVTLGVAAEARCGPKCTRSPPTLGMTVLEALASTDERVKQPKRACQQALGHRLTGWPWPLGTWGSRRTHKAPGGDPGRRKELAQRLKHRIGAKPRRAFVSALKAGSLANTAPPGAKWPGPTTQRPVKWTAG

SEQ ID NO: 1002990 - protein, 326 aa, Homo sapiens
THAVRNERILNSCTDLMKVSGLCPGVGLHLEWPPVIAVLVSAVLSWLLVTDIHCLQKADRGDAAVVMGAWLAACGTVAQGSLDPTGLVPTLWPLRTSHTHVPHGSASWDCALMARSDVGTMGRLEGPLSHLLVSLELAMYLPLFSPSDHYVWAAHCSSDIYAKNSALDRKASSSDLPRLCGLRSHTAWWSAADQGCVPSHGASSRRSSIGPCFTTEIADQHWPHWWLAFQSVNGQAKHKPPRWDRLQGTVLATGQLRGLPMLVASHQVRPGPQYEAHENAHGLSSWTWSPHSSMTEARAHLSSRMHVLGSWPTQLEADPTGLAERG

SEQ ID NO: 1002991 - protein, 277 aa, Homo sapiens
MSHRKFSVSQIWWSLGLPVLGSAAAGIVEKVKSFPKDDPSKTVHLTGFLGYKGVHESHRAVKSDHGLEYPVVNNEGGGGEAVTIVETTTMVVVGTLCGYRGITPRRPPGTFHSTCLLPAATIKLHRIAQQGWFPYSSQSRRSRSYTKKGPFYAKTLTLQTVTWARRVHGTGPKQRQRYRRKCEAMHARPMYTDRIELAPKAAIPRWLQLCPNSTLLVIAVAVTLTIIVRPESAAPVLAERLPFVHASPRACTRRQGQPWMRPRKQKTFGELGRRPAG

SEQ ID NO: 1002992 - protein, 50 aa, Homo sapiens
LSRLSGPETTTEEMPSLLTSTVQVDSDNLIPQIRHKEYPEEMPHSPLGSM

SEQ ID NO: 1002993 - protein, 284 aa, Homo sapiens
HASAAAAPMAAVASGSSGPKAGAADKSAVVAAADTSLRWQMTHHPPSCRNNERYHTVSPSTRCLLPGPALHLPHTHSYLAADGGSWRWQHDMGARVSLTRPHAVHADRCLHCIGQSGMTWLDGHARWTKATLPQTHKSRVLWPDLLQHRHRAGPRQLADEGQPDAAASYGPRPTEIPEARGAASIVPAAEEKGGIAWPCTDNGRAVAGDRRHLNGASPEFTPNMGRYTQIKHKAVFNFMNPPSRMEVPVARETRPEPGRGPGLRYHQCTGNKNAHRTIQNHGTK

SEQ ID NO: 1002994 - protein, 137 aa, Homo sapiens
MCCDVGRCDVWEIVTALLWTHTLPEDSARVSCTIVAFQAGPYTACCIFITSDTGCTTSSVWSHERTGHAWLCMNEPHTAPVTIQMAHSETQTGTQPMLQESRSSETKTLSSLIGDTSSMAAKEPRRTRGPCCYGGKR

SEQ ID NO: 1002995 - protein, 61 aa, Homo sapiens
MCLGHFSSFTGKPGGKDCFNFSGFLFVSDDQGVKGSAASNFKLHVGLIFLDLDRFGIPSGG

SEQ ID NO: 1002996 - protein, 354 aa, Homo sapiens
  misc_feature (120)..(120): Xaa can be any naturally occurring amino acid
VLTVTAASTAPNCIRLHSHVRTDAWWTRIGRRDGGSISRVGERIVLQKSGGKGRERARDVQSPGGPPEGNLVDPVYASRVIGQSAKAVTSRPRGPPEGTSNKILRWPVSRTGGSVSSYGXMKESSRLRYIRRNVSGKDDAMNCRRVFGRHELALRIHHVIPSRAGSATTTKLARKRAKIRDENTGASLEDLELAQDRGELDLYIDGRAHLKMGWARYLGAVATNVVAGGKWCLGNRLEAERGILAEIPFRSQKYLDSPTVVETSSLYGGSKGGSKGAVGVARIPGTPEGHLEPLLNPSQDVGPLFPRKFGPKDPPEWHSERRKERKLDYNGSNDYQAPSKCGVCGIGPWDRERP

SEQ ID NO: 1002997 - protein, 39 aa, Homo sapiens
EEGSDDDETENGPKSKKRRPPKAEKKKAPKPERLPPSMK

SEQ ID NO: 1002998 - protein, 248 aa, Homo sapiens
MCVSVTVRRRVPGCEPRGGVYPNDSVTHVRARVCVCARRGESPAPLLPFPISIPLSSPGQSASPSASSPSIIEETAASLQSHQHPAPFRSAAQRPLGADERGSQGAVGAPGGNGLMTLAQARQEPGRRGPRGERFAETDGAGGLSQSFAHRQSRIRSVWLMLIMIISVTSGQAPLIMARGGVRGTGVPRQMLALCYYLSGTPLQVPQAKGKIKSCAELNGHVDGDQDEDPGEEAPEAYRDDQWVDNNT

SEQ ID NO: 1002999 - protein, 44 aa, Homo sapiens
MEANGLGPYGFPELNNDTFVLAAWGEETDYSPVWCMRQASRYLP

SEQ ID NO: 1003000 - protein, 372 aa, Homo sapiens
  misc_feature (229)..(229): Xaa can be any naturally occurring amino acid
  misc_feature (255)..(255): Xaa can be any naturally occurring amino acid
VWPSWSPRPSAVSVGGDVRRELTFCRTTGLRGDGNRGEYERLHVPTLHGVTPGVLLQGRRGAGPDSPCVCTSLGSVPLEPCAHEDPGGWATTSSRSTPGAPTFACTSPSIAQKILDATALRAIPRDVRPPLQTAYPCGPHKGLVIQASQEEQKEGHGAPGPPGGHLQGSHGPQVQAVKAWNEAYIPQTQGPKATKRIVVSTRGDSILTSGRAHSKDGAGGGSEAGWAFXQKTFDEAHGSGRDPVGHSIHITKLRXDMHVPHCGHQWNETVEMSQPQGQGGTGKGTLVGTYPSSGGPQGGRSKATPWGSRQSTDGEERHREKEAPYGGAQYEPSEAMAREDRDRTRGKAPNKTDDPGGSMTHRNTNNTEPGHD

SEQ ID NO: 1003001 - protein, 322 aa, Homo sapiens
NNNMMAKTLEECRVTLEGLKMENGSLKSHLQGEKQKATEASAVEQTAEQLRQFQQHVDTVARSSRKIYWQLSCKGAQHEAIHSKAKRCNIKPCFQVCWPRWQKDYSYLKADHVITKAEPAVSRTSLQAASKHRHPEQCMQRIERHERNQYLTLARSVWQQHRAVKLHNNQLISELNSSVTQAGGTGSQDLERQLKTLTKQMKEEHEEWQAAQADLQTAEVVANDIKCEAQQELRQPVNDVKPGVGASDGARNGPGMQNGDCGGNDCQGHKGKGWEPKETAGHRTTLAASPQQKDHVKDRKEAGTDGPGAHKKAEQKTRRHEE

SEQ ID NO: 1003002 - protein, 246 aa, Homo sapiens
MSSPACAVAYSVHFRSSRTDPFSSNTSWRWRPWSLTPASEGTLGKTKPRHFLEPIPHSTPTRTATPFLAPTATTHPPSPHTSNSPHTHPPPALPHPHDPWDSTVLRAWGPKLPGPLACGIHPRAPTTPHQGPANAGHPGKDTPRRPNIGGDVSPRCATRGIPRRRHTATFPANPKHPKALALMAAPPITAPQPRTGPATHQHPPAAGIPMPVHPLQPPRGLPPATTDTPHNLLQARPQPTSPGHHG

SEQ ID NO: 1003003 - protein, 101 aa, Homo sapiens
GFLSSSLTIQFHKKIPFPLKTPIWFSPSSREFPPRGSPLLDLPWVWSPIAFISVPVYTLASCSQFAAQSPPPFPCVGPTRGSLGKVLPQVCLHSPCQVLLL

SEQ ID NO: 1003004 - protein, 287 aa, Homo sapiens
  misc_feature (191)..(191): Xaa can be any naturally occurring amino acid
AAAARRGPRGGAGLRLPRPRCPAPPCLGSRPLLPSSTAAENNGQPLLCGQRGGPGGWQQLAVWGTGTLGWLRVPGEAMLSGVGLAPGVGGWRGAPGGVPLSNAGLPYCRAAANGDVEARWCPGNAFLRGTFFDCQLGTDLPRLNRIPKNCQLNLGLPKPWKPGGFGLSGRAFQEPASAINFSGPQSSLLSXCPKRDIFNSSRELSVAPRLNLPALSGPNFAKQKVAHQGATPGALSRVAKRPSRGVKGDKGNAKRWEPLAKEVYARAFFNTARLARNGDTFVKTRAV

SEQ ID NO: 1003005 - protein, 233 aa, Homo sapiens
SDEATGPRSSSPASETWGAVVGNSPDRLSSTLSTANYTQFYVARKTPNFYSHKDRYHDFKFHAEPSKAEDKEDECAPSCNFHFPSGDLMKAMTAHDGPTAMGEQGHASRHAEPAELQIPRHPSLAQKERTVAAIRPSRVTRGPVQNAHAAGQPGNPKRPPSVILVPFLHEKKQSPLEWPSLAIQGNKARGPPLSLPIALGDTFTNRSGAGPQATWLPPNAREPLGAFKGHTRT

SEQ ID NO: 1003006 - protein, 41 aa, Homo sapiens
  misc_feature (7)..(7): Xaa can be any naturally occurring amino acid
IDTPEYXYVTGVASVDLPLQAIMKGLILKTWHRLLEAQNRH

SEQ ID NO: 1003007 - protein, 305 aa, Homo sapiens
MADDAGAAGGAWGALDGPGMGNRGGFLRRISAVSIRGTGVADVDVWTEWTDVTEELAGGGKAEDKEWMPVTTSLGRLVKDMKIKSLEEIYLFYPAHYGNQEIIDYIPGGDLISRIEGFEDYAQCKKTDPMPGTDATKVQRQLCCISRDYTIGHGSGHEGVKSSYHRTGRATMTIRRGPIHTLGQRSSNTVPTIAGRQATLRRKTKIQAKPHYKYDHICTRDAQEPCFDGNPCMALGNDAYKYRCKPSGDTWAFDTTRNHNVALKGKDIGTTGEGLRNTNNIENKHPRTRRGIESVDQPPMKGETN

SEQ ID NO: 1003008 - protein, 504 aa, Homo sapiens
DSAEWNKAPIPTGLLVAELQVLTHDTASLTKQLCARTDCNAQSALPIFLCVLMCPLLELKCPLSLPLVHRCHKLKPEWQLHVIQCNICLSLGSLPTPWPSSNHPKPRPNHQACNTHNAGPGLRAHTPHTRAALIHCLVAHPCEPPWLYPTRHYSTLGHQAHTHTAHLRRIIFSPNPLAHNATLAFPLRPRTGIFYDPPARFSHSVGAKMHMSAGWQPTFRHFPGPLTSLFSTTPARYHTEFPRNTAASWHDTYGNVSMDRVPNWINPHFPNQWLQTMSSTRRSPLLITTWTVESKSPPRCRAVQRSRTRLLFVTDPTVTPFSRYSLSPTASLRRLGLRVTYSRFAYITGPNTLYTGHTRMRITPILPTRSSSFFITPILSQPPEHSPLSAPSALNQTAIWSAQLRVCNAHLPHLSSHIIPRLAAHNGSAPHALRYHLASLQPSLICVSPLTLTSVSDLHISPVLAATNPYYFSVNNPALGCTPPTPSSYFPTFVSSSRMRPSRN

SEQ ID NO: 1003009 - protein, 332 aa, Homo sapiens
EFHSVARLECNGSLLQPPPPGSSDSPASASQVAGITGTRTTPGYFYLVEMESHHVGQAGLELLTSGDPPTLASQRCWDYRHEPPGRPQDFILSLLALKQNKKGFNYSHFPDESHERCLLVEYQGLGLCFLVDTHTWSPSNGPFLKLPENTNMARESYDSTGNGTPSASSRIAPRRQWRRPLGHVCTCRLLPKHGYSLTRVAHTPMADRPTHRPQPPHHTPTPPPHTPPRNARTKQRPGRRKERPDQPGPPRTGDGETPKPGAPNAFAIDASASGTRGPSYERTTEARRSIGRISRPLRRTTTRTCRSPLHQGRHHESKLTKPRRHARAYALP

SEQ ID NO: 1003010 - protein, 134 aa, Homo sapiens
RNSERLLDQLDPGAWLLSGDLTATRKSKQERQPLRMQRPGGPSANVSKVRNPSCQRFASEPREDETSWSSEAPALALPVTPQKEWLHMDTVELEKLQLDPVTCLHCLGVQHDTRTWMHGSVHVFRENYWTLTWT

SEQ ID NO: 1003011 - protein, 43 aa, Homo sapiens
VVVAAVLLLASRCLVCQRSPWVPGCFRRGTVLTVGLGCQWERR

SEQ ID NO: 1003012 - protein, 59 aa, Homo sapiens
PLLLSKAFCLLGLSCSWWSVLEHLCSCQFHVCPLETSFNVINSHSSSLSSGSFQHVWAV

SEQ ID NO: 1003013 - protein, 34 aa, Homo sapiens
YTHLSLTCRVTHLASSRKHGGGFGYPRSTFVLLV

SEQ ID NO: 1003014 - protein, 78 aa, Homo sapiens
VWAGKSVHLIYGSRKAVSQRPKQACLENIALYLTHMLKIFGAVDEDSSLGFPVGGPGTKPQVSRPHVMPYLQVSSRLP

SEQ ID NO: 1003015 - protein, 63 aa, Homo sapiens
MRAGMIEKLVKEGAPGALVDPRSVQQIHQLRGPNANSIKQMLLHVVSEPRTRGYEALSTSENF

SEQ ID NO: 1003016 - protein, 49 aa, Homo sapiens
GASVISKNSSTSERKKFPSSSSSSSSPPPPRPPVLSRPNGPPMYEVPEH

SEQ ID NO: 1003017 - protein, 33 aa, Homo sapiens
AGSYGCAGNYSGSLLALSGGICDLNLKIPEINS

SEQ ID NO: 1003018 - protein, 45 aa, Homo sapiens
SEDPRDTGEDAGIWEQWKRVPTLGWDQPLVAVNSASRIPAPRVPA

SEQ ID NO: 1003019 - protein, 45 aa, Homo sapiens
  misc_feature (39)..(39): Xaa can be any naturally occurring amino acid
MRKFKALISIARRSVMMIIAIGSIYRAGVIITSGRRPMXIRIRNH

SEQ ID NO: 1003020 - protein, 51 aa, Homo sapiens
MRSRCSGLLSLVRARLVLLVLAVLCDLVLRQPVTRLYTVPVCPGSPGPRHT

SEQ ID NO: 1003021 - protein, 56 aa, Homo sapiens
MDQRMKISRPKLTGTQPGISPKEQGSSMGLSQGLTGDFDRIGATGTSSLRQQGYRS

SEQ ID NO: 1003022 - protein, 41 aa, Homo sapiens
MLVVSDDLVMDSAPGSWQVILNLTCDLPTLAPKWWDYGVKH

SEQ ID NO: 1003023 - protein, 87 aa, Homo sapiens
RRRTSLSASPLGGRGIVMSQELFHLPSGEKFHSSPSSSSSSTSSSASCALLAQDPAMETGLSMYSDDFGSFMRPNSEPLAFPARPWL

SEQ ID NO: 1003024 - protein, 42 aa, Homo sapiens
PATENPRNQQQCYVGHVTAPLACVPRGSSIVPTGARTHNCVL

SEQ ID NO: 1003025 - protein, 73 aa, Homo sapiens
MAHCRRRIMHLGYTYTGVYVAGNVNNRTSRTIASMRKFKALISIARRSVMMIIAIGSKYRARVIITSGRRPMA

SEQ ID NO: 1003026 - protein, 38 aa, Homo sapiens
MGIELKGRYDAALTDLTLRGSSALPGFPFLEDLNFILK

SEQ ID NO: 1003027 - protein, 99 aa, Homo sapiens
DPKPPPFPRMLPRTGFLPTWAIIEESHKHNSLIIPHIIAHITLLHLYFSPTPNLLHLNHTTPHIYNVHLNRQFEHTKANPFLPTLITLHTLLLPISPFI

SEQ ID NO: 1003028 - protein, 76 aa, Homo sapiens
ALSEHSHAGLYSLGRGLSSVRDLLTVCFVSVAVWVTYLGFVGFSSYRLLLLYWGGSSTTSPSRPSPLEPWPSYTPV

SEQ ID NO: 1003029 - protein, 36 aa, Homo sapiens
MYALLLRLLCVTRGGFWGLLYDVALPGLHAWTWPVV

SEQ ID NO: 1003030 - protein, 79 aa, Homo sapiens
LPRRLYRHDLDASSLSYDGGGLHPSPSSRWWARWVAFFGSLAHLSHSSPLLGFNPGSRLPGRRPGHSQSSHTPPGIVAG

SEQ ID NO: 1003031 - protein, 72 aa, Homo sapiens
GCHGFQFFIDSQDSWIDCKHVVFGKRSRSGIAGGADIVESTKTDRRDEPLKDVILGDCGQIEVEKPFGIGKE

SEQ ID NO: 1003032 - protein, 66 aa, Homo sapiens
RPALVKYLFKSSVMAQWLTPAIPALWEAEAGGSRGQEMETILGNTAETLSLLKIQKKLAGHGGGRL

SEQ ID NO: 1003033 - protein, 66 aa, Homo sapiens
MTRWAGDGCPTSRCVGCSEAWGQTPAVSGSGPWGCNQWLAGLGHLLTGQYGDVRKNYGRGIHAEAG

SEQ ID NO: 1003034 - protein, 141 aa, Homo sapiens
SRFSSGGGLRAPALRGRLSVSSSRSPLGEPMGWGAAMAVASAAAAAAFGSGLGGGYGGGLGAGLGGGFGGGFAGGDGLLVGSERVTMQNLKDRLASYLDKVRALGREANADLEVKIRDWYQRQSGLVEINDRDPMPPGTEL

SEQ ID NO: 1003035 - protein, 32 aa, Homo sapiens
MAKSIRSECLTDNVLTARSLGTYGIICMDSAG

SEQ ID NO: 1003036 - protein, 39 aa, Homo sapiens
HGSVHTLSLPESTLLQAVDATLRSLMAFFVQLHSMTLNG

SEQ ID NO: 1003037 - protein, 87 aa, Homo sapiens
VCRGGWAVGTTRVRHVHLQVSMHSCAFGGRRVPCLHLGQGGTRPVLRLEHEAEGGARKQLLTPGDVEAALSLSEKHRFYAGGQQGLN

SEQ ID NO: 1003038 - protein, 59 aa, Homo sapiens
HGVEEYWAWLDMAGWLGMLRVVGDVGRIGVQPPEEGSSAGLMRGLLCSMGAKHGLCRGS

SEQ ID NO: 1003039 - protein, 63 aa, Homo sapiens
WRHGSVAKQVGSGRWAGLLGAPLQGHGLDGLFLSTAPRNEMGQGAGSVTGVQARTETGRPAHA

SEQ ID NO: 1003040 - protein, 53 aa, Homo sapiens
SCGMRLYTYRDGGVYGAVTYREGGVYGSELPAMKEGYMELNTYHEERGILVLY

SEQ ID NO: 1003041 - protein, 108 aa, Homo sapiens
WFRCRMYWVTLAHIVFLAPPHPEWIAPSVTQLLSGPLRPSESFLRYLQRFHNDHTACHLICNHNRRLFVLCPLYDPVCATTPVRLPPSCVRSSDLSHYTVCATTTSVS

SEQ ID NO: 1003042 - protein, 37 aa, Homo sapiens
SREIIQAACVNGSLLFIAAWYSVVYALAPMKDTWRCF

SEQ ID NO: 1003043 - protein, 45 aa, Homo sapiens
GSLVGRSVGGVVDSVVVPRAQVHELVALAPAAPDSHRCWLHTAVQ

SEQ ID NO: 1003044 - protein, 49 aa, Homo sapiens
MNHPKRNEAGGTCTRRAADPAGNTKQRIDEFEALNSQCRTMGRGALIVG

SEQ ID NO: 1003045 - protein, 74 aa, Homo sapiens
  misc_feature (54)..(54): Xaa can be any naturally occurring amino acid
AVTEGVEGEECRLNGEGVGQVNVSVVQSTISSGYGGAAVSAVASGLVWRKQLPXMACGPWHLDGGFTFHALRVA

SEQ ID NO: 1003046 - protein, 52 aa, Homo sapiens
GGIGSGGGSSSSVKFVSTTILLPEELQELRTCCKVTAFQAAATHAHGRLPTS

SEQ ID NO: 1003047 - protein, 68 aa, Homo sapiens
  misc_feature (57)..(57): Xaa can be any naturally occurring amino acid
CDERVEDSGGEGVGPVNISVVTSSVSSGYGSGNGYGGGLGGGLGWRPRVEVLPGGSXWELLLQLLGSQ

SEQ ID NO: 1003048 - protein, 46 aa, Homo sapiens
TAYAADCGYACFTFCGQGAAQEAVKLCDSYHIRPGTHLGVCISVAN

SEQ ID NO: 1003049 - protein, 90 aa, Homo sapiens
AAELSGHGWCTSVRQQSQQVQLWQSKSFRISVISSIRSPSVLCMVHPFVLQVQLAFSHCWVVIQSVVACSIFGGGASLEGAHQTCISSDG

SEQ ID NO: 1003050 - protein, 59 aa, Homo sapiens
VVRLNFAGGYVHLPFQACCTSVLAGVLCDTQHQALSIFNHYRCSSVPSSSTAAMCTCSS

SEQ ID NO: 1003051 - protein, 61 aa, Homo sapiens
MTDPAHPDHVRLGVSRFLSRSLLSYSILAPLGAQPTRMHRAGARCLLRGMTGARSVLLGAS

SEQ ID NO: 1003052 - protein, 37 aa, Homo sapiens
MRSLVLWKVVSQSSSKHILSQRHGLGHLDYAADNDVK

SEQ ID NO: 1003053 - protein, 36 aa, Homo sapiens
PQRSPSTQKGIDAFCRHRGCLSTALCHWTAPFLGAS

SEQ ID NO: 1003054 - protein, 70 aa, Homo sapiens
GEYAQPWKQDSDARHTLWQGEVTDKSLALRKGEVLKAKQMLPHPANPEPSSLCSMGIEALARHLSRSRVP

SEQ ID NO: 1003055 - protein, 34 aa, Homo sapiens
VWFLSHAVPSIPSSCASNREHQHFARKDCPITDR

SEQ ID NO: 1003056 - protein, 66 aa, Homo sapiens
SVISDLQIIHGVMLTSFGQSYLPELSRPRTFSSQPLQIKLMTHNGLFRPIPYVTAASGDNFTASKQ

SEQ ID NO: 1003057 - protein, 49 aa, Homo sapiens
  misc_feature (20)..(20): Xaa can be any naturally occurring amino acid
SGSKSKTPKKTRRQRQHIRXALLMTDVQERKGRAAPEEVATPIASLAHR

SEQ ID NO: 1003058 - protein, 79 aa, Homo sapiens
AGKVTGLYVTCGAGWDRQRRSRPKQSLCDGQWHSVAVTITQHILYLDWDTDSSYTCWTDPLPICQDSRANTPLAGLQPI

SEQ ID NO: 1003059 - protein, 51 aa, Homo sapiens
MDILYSKYRAATDVYALMFLADVVEFIIIISGLWAFGKHSAGRDITSSLSD

SEQ ID NO: 1003060 - protein, 101 aa, Homo sapiens
TGESGSETKYEALQVTAGRHGDEHGKTKQEIAEINLHDPKELRSEIEHVKKQCANLQAAMADAEQRGEMALKDANEQAGSGWRMPCREGKQDLAWLVKEYQ

SEQ ID NO: 1003061 - protein, 42 aa, Homo sapiens
EVPMKPGTKGRPGSDGPKGEKGDPGLEGPRGLAGEVGEERSQ

SEQ ID NO: 1003062 - protein, 112 aa, Homo sapiens
MVGVPVSGRLPVLVLDKRVPVMPVIACGGEDTVQILTSHHAIASINKSWRTEASVVHSYCSRAMASNHSPPTLNGAPVTATEIQQGSGLLHIICTHNSAIASALVVFEKSAS

SEQ ID NO: 1003063 - protein, 82 aa, Homo sapiens
MAVSESQLKTMVCKSKYRDLTVREIVKVMTLYKDSNLFGIRYVLNDGSSRALMNLTGTIPVPYRGNRYNIPLCLWLGDRYPY

SEQ ID NO: 1003064 - protein, 61 aa, Homo sapiens
TRRSGADWCPGKMAKGLLVLWVLLAQLASLEIRVKVVPPGLPVYSLDLPCVPSWGYRRLRS

SEQ ID NO: 1003065 - protein, 100 aa, Homo sapiens
MGLGVLWLGKGSALVVELTLPSPQVQPNSVHICAVVVEYETKAGRITTGVGTTWLRAKEPVGENVRPALVPMSVRKSQFRLPFKASTPVLMVGPGTGVGP

SEQ ID NO: 1003066 - protein, 70 aa, Homo sapiens
LTSPAHLVWGIGVCYSRGHFDRTKKGTSSKKVIYMPASVPEVKENSNQTSIIPVCEPGSAHAPSHMQLAF

SEQ ID NO: 1003067 - protein, 87 aa, Homo sapiens
PQRHKEETEGERTTNFLNLSNWDKKDRARLGERLQWLEGAVRVEHRVLHKPRTHVGLQHNSPLLFQTKHTSDLLLLQQQEIILGSRD

SEQ ID NO: 1003068 - protein, 40 aa, Homo sapiens
  misc_feature (15)..(15): Xaa can be any naturally occurring amino acid
KGRVRGSERGSGLVXGCPYNSSSVEYRQMSRVRYGRGRGS

SEQ ID NO: 1003069 - protein, 43 aa, Homo sapiens
SVLRIPKGSRVSNAADGDGVDEHSLVIDTLKEVDEARKCYRYG

SEQ ID NO: 1003070 - protein, 95 aa, Homo sapiens
LRVLGWETDLVITGEFTQILLKLSEKLLISLSLIQRHKGVDVGKSFPCDRCEFRGTCQVSVVQESQWNHAVNKGNVFIFQFSSCTGQGWFQSGSC

SEQ ID NO: 1003071 - protein, 93 aa, Homo sapiens
MEKKLKVMAALTESAPTSTSFGLVTAHWWFRKQKPTNHRKVQRAEKSRSPMTRYLRSVALLIWGEIRVDHQEEGLGLEGQHPDGTAIPECLDL

SEQ ID NO: 1003072 - protein, 34 aa, Homo sapiens
QAPFLKAAGPHCRCEYPRDEIHTLRFSLSMRSPR

SEQ ID NO: 1003073 - protein, 143 aa, Homo sapiens
VITGSLRQTLGELVTKYTGSVTLRPKDGGDEILAQGLDPGYAHFPCEMQLQQLSLGLLHALWFPLDADQMALLTVRRDAHGHLVLVLDSVDVGTALPNEVPVELVVDVDLHIVHPVNQILDHAFYLCLGHMDILGRAPQRVGL

SEQ ID NO: 1003074 - protein, 40 aa, Homo sapiens
WNPITIFQCSAHSQLKWGCMLALQQLCQSSGVFAPPWQTK

SEQ ID NO: 1003075 - protein, 51 aa, Homo sapiens
LLVSIEQEMGSLNLEANVTADVSLVPWKRDWPLCTSEMSGRWNVRSWQRHR

SEQ ID NO: 1003076 - protein, 63 aa, Homo sapiens
MREYSYGMASLQEQDAMLDSHSCLAYQIRMGLVSRREKHYMQDILKVESDFVTIFEKVVWLYK

SEQ ID NO: 1003077 - protein, 75 aa, Homo sapiens
GDLAGSLRQTLGERRKFMSQGEQGLLLDLPHRLLQRGEWDHHVYKGFLGLLPMLWTLMNCASRNQISGMEDPHAP

SEQ ID NO: 1003078 - protein, 105 aa, Homo sapiens
  misc_feature (85)..(85): Xaa can be any naturally occurring amino acid
QDLKTDTRGGARGWGWADLRQSWALSISEEVVKKRDFLFHFLNFLCMLVEDMLAHKLRTLEFLATERTQPLYPGPGSGGVGGGRXFSSFRARGVLAAPVFVGPLP

SEQ ID NO: 1003079 - protein, 55 aa, Homo sapiens
  misc_feature (50)..(50): Xaa can be any naturally occurring amino acid
AGVYVSGSQELILLLIFGLFFRRQWRLGAAVVSLLSEFMSKLRPCSVLLXPACLF

SEQ ID NO: 1003080 - protein, 139 aa, Homo sapiens
MNEQAFQCPERGGATWWEHLTFDVERDEEPQGWELPFDAGTSHCAQMYPNDKFTQNPMRGVGLSPEHICLLPTSLHLPSSPGANEQEQVPPTVLCLPVPGLESVVKPHGVRPCRYGTNPSFRHGNAGCSGPHLSPYPDS

SEQ ID NO: 1003081 - protein, 78 aa, Homo sapiens
SGRDGIMSQGTRCCLTFHTDFSNEEKGTIMVYNGLPGLLPRLWTCDDCASREQSKGSEDPTAPCARHLGVTIYGWDGY

SEQ ID NO: 1003082 - protein, 37 aa, Homo sapiens
CRGSLKGVRVAEVRIPESGRSRLQRAVISPLYSSLGD

SEQ ID NO: 1003083 - protein, 172 aa, Homo sapiens
KTDTWGKSDTLDKTDTRGKDNTGINSRGVSSPINRQPQRPVPCSLGPQRQPGWPSHLPLPHRVAEHLWSPRGQVGAILQGGISALTAGHGAGSLSSAGRGGSSAMQPRAGSFYNMPVDRELAPPSPGPCQGQTGNTREPEGQLEGRYRGQETKRAGAGVNGRQVKSPVACGA

SEQ ID NO: 1003084 - protein, 94 aa, Homo sapiens
MDGTEKLLDKSWEEIRAHTKAVRMGMRGRLTRVEDRSSDHLPGCERLEKYQISEGLREMPWLGEHETWNSFACWKNGVSARSTRPGGRPGAVIT

SEQ ID NO: 1003085 - protein, 51 aa, Homo sapiens
QRTPEDKEAGHWLNITRELIKARGRDWDPRMKPSGAEKLCAQDAAIKIIKI

SEQ ID NO: 1003086 - protein, 64 aa, Homo sapiens
SHTRSDWRYDRYALKQSQYNLSGIQPLLQDIEELGDRSRRTYENNRVILEIDNARLLVDDFRLK

SEQ ID NO: 1003087 - protein, 42 aa, Homo sapiens
DGNAGAVGRQPEAYIVYGNPSLKPSPLNALSAMPPTPECLVL

SEQ ID NO: 1003088 - protein, 65 aa, Homo sapiens
  misc_feature (24)..(24): Xaa can be any naturally occurring amino acid
RLFQRHSTAGSGLAWHRPGVSSFXAPDRTGGSGQQAAGPEGDGEPTDTPKAYSISTMPLGAGQQG

SEQ ID NO: 1003089 - protein, 72 aa, Homo sapiens
MTTTLMADFVGRNYPKVWTTDDRSMCIIQGLRHEEEHQEMVLTLSPTRHNKQLCQGPTHVPSDMTSPIHYPV

SEQ ID NO: 1003090 - protein, 70 aa, Homo sapiens
MGFGTGSAISTFSLHKGASRQGSGECMNSCTMCSRTSFPRIGSGVFPGHLCRSLVLLAHHPDHVISLVPL

SEQ ID NO: 1003091 - protein, 48 aa, Homo sapiens
MCLSLYPIPVYLCGVGSNRLHTYTLLQTNTSDGGGADSLTWIPRGIAW

SEQ ID NO: 1003092 - protein, 64 aa, Homo sapiens
LVDADGVSDLGILHRSYSKVKSHVTIRRTVLEEIGNRVTTRAAQVDKKAQKTKVPVQTLSSDRG

SEQ ID NO: 1003093 - protein, 31 aa, Homo sapiens
MPRREETGSSQNLRNRNAGSWRSGLVARQFR

SEQ ID NO: 1003094 - protein, 60 aa, Homo sapiens
AAIAYHLCVGSTGTDRSAKPVPAHSPAMSVCSSSGRWCDRSQTAYAICVWRIDVTYELAR

SEQ ID NO: 1003095 - protein, 72 aa, Homo sapiens
YKGHGTNGRTQASLQTPEGGQHWEGPTHMNFPMDQPLSTRAWETAESHGSPSRHMETQGALGSLVPFSPGFL

SEQ ID NO: 1003096 - protein, 39 aa, Homo sapiens
MTGHLPQRPAAAKMYCLELQGVTLTLNYPQGRTTKEWSV

SEQ ID NO: 1003097 - protein, 38 aa, Homo sapiens
LRRTTLDTVVEENTQCGGGGKIRATDPDEGLNAQIMYQ

SEQ ID NO: 1003098 - protein, 69 aa, Homo sapiens
MCDVIRGSRCVMQVSTNSFRCRSRESVNKRMVVVLHVSVSICAGCVHVCSVQVMCSVRVWVSAYVCMHV

SEQ ID NO: 1003099 - protein, 64 aa, Homo sapiens
MRVTISMVQGRGYLQKLGLNSTCDDSILVKTVCGVLLQEARTAVRRRHGLRLRTRSARTEDWTV

SEQ ID NO: 1003100 - protein, 47 aa, Homo sapiens
IPCQTVLSMASTQHGHSSRGQGVPSPPPSPAPSPCPAPTRARVTAAR

SEQ ID NO: 1003101 - protein, 90 aa, Homo sapiens
MQCSNAVAEMAPPERLCAGISVCVVTNGVGGGLGGRMPSVSWELGLDGGNLQRSRVWYTPQAKRPELNAPLIACLWHCLWGLLTSKCQGC

SEQ ID NO: 1003102 - protein, 103 aa, Homo sapiens
RYLEYRYECSDSDSMYIVNIQVAGTLIGDIMGGELTCETSVHQLLSLLLFYKGLGRDPSLTVAAERIGPSRSSAGENTSKLLNESIPSLRTTDRGGRDSPKHI

SEQ ID NO: 1003103 - protein, 59 aa, Homo sapiens
MGGPRYGSCSRPGLALGRREGSDQCEGVVASSGSPTPECIWDWDLTVDPFPHESPIPDW

SEQ ID NO: 1003104 - protein, 34 aa, Homo sapiens
SVLKKVHEEEIVSCRLSYRNSRIQVEMDMSKPEP

SEQ ID NO: 1003105 - protein, 65 aa, Homo sapiens
LRGSSRRHKEVREDLRLLRMTWKEIEQKYDVEKEILITVLSAGQRRQCCNQGHGKITGSQDGGGG

SEQ ID NO: 1003106 - protein, 37 aa, Homo sapiens
GGEDLSVIKGAPRPERGWAASVLGAKDLSWVDTTLHR

SEQ ID NO: 1003107 - protein, 51 aa, Homo sapiens
QCARFLQSLQTTPLGADPTLEAGYVPHRLGWWRCSQRSRIGETQQRCKRQP

SEQ ID NO: 1003108 - protein, 73 aa, Homo sapiens
CSDELPRCVLPRSRPLQWSSQVMGGMGAPAASLHRSWPPAQLPGALAGLGWSGLVMPLPCGAWARVSSLTRGT

SEQ ID NO: 1003109 - protein, 36 aa, Homo sapiens
FLCVEVSELHLVTKTPPRDLPPFRGVQALSSDEPPM

SEQ ID NO: 1003110 - protein, 66 aa, Homo sapiens
EGVVVVKVLVVVVEVMVEVMVMVEVLVVMMVVVKVMVVMVEGVVDVPVLVVVVAVLVAVLVVVMVM

SEQ ID NO: 1003111 - protein, 65 aa, Homo sapiens
ALEAQGGRGTSKGVRVKQRPACEVAWAGRGDLPGGSVSTLGGLLGLSWGWRSLMFCGAEGPGSVG

SEQ ID NO: 1003112 - protein, 178 aa, Homo sapiens
EGPGLDFFKPISHPYGRRSSIAGRRMARDSSHSITLQATANPNTGLVEDLDRTGRLSLTTQQSNSQQLLYITCKAWQKLEHIQTKFSSDITHIGMMSQVEEKTQIILKASSHLLARYSSHYPHTKESRIFIPVTSAKSGSFGVTAVYGGRFQILMSVVPYQETKTKFHPSGGSHTTHG

SEQ ID NO: 1003113 - protein, 60 aa, Homo sapiens
CHRGGRLYVVTVGFSRTWAKGSNSSQAAQNLATSTSAAVIGPRSKVIHGPGRTAGTATLV

SEQ ID NO: 1003114 - protein, 39 aa, Homo sapiens
VGRQLGKGRNGSQVKTPSTKALVASGSSPELSPLSLSVT

SEQ ID NO: 1003115 - protein, 46 aa, Homo sapiens
ATPGQSTRRPPDSSPGSLLSYSILAPWGPKPTRHAQEHGAEVSPGE

SEQ ID NO: 1003116 - protein, 47 aa, Homo sapiens
TFTNDDWGSTLTFAFLPVTYDTTVLSAMSTSRHHKPHTTHGYATYVS

SEQ ID NO: 1003117 - protein, 52 aa, Homo sapiens
RYEKMAEPNVKDAEEWFFTNDYEELNRRGATNSELVQMRQELRSRSSGAPLQ

SEQ ID NO: 1003118 - protein, 70 aa, Homo sapiens
APEAQGGGSRGLHFQQFPSFSGSGFFPSGDLGLLIWDKHRQRGAGVVGGFLDAAARGLDLALQLLLLGAS

SEQ ID NO: 1003119 - protein, 53 aa, Homo sapiens
KKQNKTKNRSLGNRIRKLSSSSSSSSSSSSSFFFTNFFSFSFSFSFSFSFSSW

SEQ ID NO: 1003120 - protein, 54 aa, Homo sapiens
RGPPEDRRIYKGRDGSPFKLWTTKCKGTLSTSKKFYIFLKLNPYSPKGLYHAFS

SEQ ID NO: 1003121 - protein, 55 aa, Homo sapiens
VCEKDGSKKVGTLWEKRGLVEGISPEGQDMGAFVAEQKGGVYPGRGVGSPLAERA

SEQ ID NO: 1003122 - protein, 45 aa, Homo sapiens
LEDPPEDKEAEANEDEECGYTFLCRLKACRGASYWEARSISIDFS

SEQ ID NO: 1003123 - protein, 39 aa, Homo sapiens
  misc_feature (4)..(4): Xaa can be any naturally occurring amino acid
ARVXHKGDNWKKSLEDVNSEPMEEPKQDRPTKTGMIQDT

SEQ ID NO: 1003124 - protein, 141 aa, Homo sapiens
EGLLCGWLLWCAAVHPGEWGTGCAVVVSGKLRGPRAQSMTYVDGLMIHSGDPVNSYVDTAVRHVLLRQGVLGIQVKIMLPWDPNGKIGPQKPLPDHVRIVEPKDEILTTTHISRTAGWEGQTRLPCPRQSPQNNRVSLDAV

SEQ ID NO: 1003125 - protein, 47 aa, Homo sapiens
MLMMKKRQIIDISMDIPFSFIINKENETELNIVNLQIRKTLASEITA

SEQ ID NO: 1003126 - protein, 80 aa, Homo sapiens
CPMWPLRRRSCLSAASRGPAPPASPWPLSGPAPLMPPGGLPKPRFCLSVASAGLATAQPSASRRPAQAQPLPHSGLSTHS

SEQ ID NO: 1003127 - protein, 90 aa, Homo sapiens
MGCVPDFELLSDPEDEHLYATLMQLLRESLARRGWALDALRGLVIASQLVSQVGKELLGLAYSEPCWLRGALLDVCRGAGQELPKRWPSW

SEQ ID NO: 1003128 - protein, 79 aa, Homo sapiens
YQPHDIVRLAHDVGRQDMASSDVHRCIDRVEVRALRSQSSIFHTDLNKPYMYGPRLVHRGIMSRWNRKRPSRNWYGGDI

SEQ ID NO: 1003129 - protein, 108 aa, Homo sapiens
MKSQIAAVCRACLQALEYLHSNQVIHRDIKSDNILEEMDGSVKLTDFGFCAQITPEQSKRSTIDRNPNWMAPEVVTRKAYGPKVDICSLSIMAIEMIEGEPPYLNENP

SEQ ID NO: 1003130 - protein, 38 aa, Homo sapiens
DCSTLSWFFFMTEQLLLEQPRSLSPRCSREILGVSIDL

SEQ ID NO: 1003131 - protein, 48 aa, Homo sapiens
MGSARYSCHRSLQTALLSKAHHLRLELYTLCVMRMLLSTWCSSAGGRD

SEQ ID NO: 1003132 - protein, 128 aa, Homo sapiens
LLSPLDALPPPPPAEAPPAAPSQPTQLVITQRTVSRVARNATEAGRVLKEEWQVLLHKDGCPPSMRAAGQLLTVWQPEDRDRQPPSCHDHTWVSLNVAPEGPLNTVLRTAEKITPKTNYPQMPVTTPG

SEQ ID NO: 1003133 - protein, 38 aa, Homo sapiens
ENEDQQTLEDLRAKAAEARGPWQQVELRNLAQSKLYLV

SEQ ID NO: 1003134 - protein, 181 aa, Homo sapiens
MLVLSAGRRRAWRYFKEQFLDSETGCDFALVRIQTRVMILANSYSVPGKLYGDEEKDKGLQTSQDARFYALSASFEPFSNKGQTLVVQFTVKHEQNIDCGGGYVKLFPNSLDQTDMHGDSEYNIMFGPDICGPGTKKVHVIFNYKGKNVLINKDIRCKDDEFTHLYTLIVRPDNTYEVKID

SEQ ID NO: 1003135 - protein, 107 aa, Homo sapiens
AASLCFPGRLSVCVCWAPSGRSQHRPRKDSAKGPGQAPGSPAPGHAFLSTPRTPWFLLPSSGLAEEFRFPGPWVLMCGGRLWLNTCAMPSCQCDFGCRGVHHEPCNG

SEQ ID NO: 1003136 - protein, 43 aa, Homo sapiens
TQWKQRFYNIKNETNRLGAVAHACNPEHFGEARGGRSSMVPTL

SEQ ID NO: 1003137 - protein, 92 aa, Homo sapiens
PAAVCCKCAGVGWRSTQTPFAWVSLSEAAEQQRLLPVPSSGSFVPLAAVALLSTCQMPNRALLYEVSFGPYWEVSPGQDTRRSGAHLRGSTP

SEQ ID NO: 1003138 - protein, 56 aa, Homo sapiens
TGSLIEEGEVIKRFAAQLNAVQKAEWLFLVSPQGEISLSDKPGHWPKPKGEGTDND

SEQ ID NO: 1003139 - protein, 74 aa, Homo sapiens
GRVSDEDPKYAGFASPAGIMCSQLMSSFLRLTNCSAMTHSPHATVSFPAGCRNEKVQGEMTLNNAEVYTTHARA

SEQ ID NO: 1003140 - protein, 109 aa, Homo sapiens
GNKAIARSKILEKNLDECITRITNTEKCLKELWELKAKARELREECRSLRSRCDQLEERVSAMEDDMKREGKLREKRLQRNKQSHPQLQLQPIPHQLPAESIPPPPCCL

SEQ ID NO: 1003141 - protein, 57 aa, Homo sapiens
MTDINIDSFLCLVFFFGARVYISLPRLECNGHNLQFTDNLHLPWFKQYSCISLPCSW

SEQ ID NO: 1003142 - protein, 76 aa, Homo sapiens
RGRRRVRQDIVGRAEGTRLEYKEEQDYKKSVPGYRIYVRIPNVAPSATGAKPVYHLATYILTTTYTRLGIVHHRIP

SEQ ID NO: 1003143 - protein, 69 aa, Homo sapiens
RYSNRLHDADDTAGLQAWLQPVGGVLHVGHVNAQAAILTQQNHRRPLLHIAGRVPNSNHVFFFLLKQDE

SEQ ID NO: 1003144 - protein, 71 aa, Homo sapiens
VEYMAPPTSQDRGRLTGTESPGLPQWYGQWLRNIKQILFFQGARKRCYFPMSIILTITETQVWGRPGGLAP

SEQ ID NO: 1003145 - protein, 72 aa, Homo sapiens
VLAGSKRHKGGPLRGIGSRKPGTAPRRVARSPLHGSSGLWLGAGGQTRIRALSVPVVAQVQRKLSVLSSGTV

SEQ ID NO: 1003146 - protein, 37 aa, Homo sapiens
CYHPYIIATSPSLTSTSTYAYFTPTPVPMNSEVPINS

SEQ ID NO: 1003147 - protein, 40 aa, Homo sapiens
ADALRHKEETQAGIAAAVPDPGLMGSVEEQLAQLRCEMEQ

SEQ ID NO: 1003148 - protein, 75 aa, Homo sapiens
SATLVNTTPTHYTVTHTDMTLTHMHPQTQGLTPRRDGRCAYLDTHVFIRTIIATITLLNLYFYLRLFYTNPGADE

SEQ ID NO: 1003149 - protein, 52 aa, Homo sapiens
MALRYHRHSLIIGTRYHRHSLIHRHIAIIGTIIATITLLNLYFYLRLGVDEE

SEQ ID NO: 1003150 - protein, 37 aa, Homo sapiens
MSLLLTAQADIVGLTLPESDNRWSERRTVTVKSAMQA

SEQ ID NO: 1003151 - protein, 108 aa, Homo sapiens
DDRRTWLGVASPLLAPDDLGNGDAPNLLSLLTAAEKGSVGLIEKKAVTYLFADEADDQPGLGYTERTGCMGSDVWTVTGCTGFSDLPQGGDLPVSDPVAPDDQRLVTV

SEQ ID NO: 1003152 - protein, 107 aa, Homo sapiens
  misc_feature (1)..(1): Xaa can be any naturally occurring amino acid
  misc_feature (12)..(12): Xaa can be any naturally occurring amino acid
XVLRSLKTDSPXTSDPDCYTDVDSVTLGRQQQTGFQEPVLDEARTEEQASKQQFVVKIGKESRSQCDLVKDATADRNGRANDFGGDTLRKHGLPGQDATRNLVMTRY

SEQ ID NO: 1003153 - protein, 49 aa, Homo sapiens
FRLADVHGLLVELTGNESSDALLVVTGGHLGQVGVVVTLHLQVQDPALG

SEQ ID NO: 1003154 - protein, 48 aa, Homo sapiens
MYTWIRAMVSLTILSFGYSLPSLSLLVIKLYSAKVWDGCGDMSYGPSN

SEQ ID NO: 1003155 - protein, 51 aa, Homo sapiens
AHLTQRVTARRMKLVRFLMKLSHETVTIELKNGTQVHGTITVCGLSRMTYT

SEQ ID NO: 1003156 - protein, 68 aa, Homo sapiens
ALQIPAHLTQTDVDGLRLGLEVHASPPLRSGSETSQVSVPGPHLVKRLQAVCLEPPSNSMGAKCNSET

SEQ ID NO: 1003157 - protein, 130 aa, Homo sapiens
RPQRHAAGQIQEMIGSVEEQLGQLAARWSTQNQEYQIVLDVKTRLEQEIATYRRLMKGEDAHFSSSQFSSGSKSSRDVDLLQPPNPEPRSWMCTMARLVSTQDQVLRNQELRLPSPATGLGGPPVWTQIP

SEQ ID NO: 1003158 - protein, 74 aa, Homo sapiens
  misc_feature (48)..(48): Xaa can be any naturally occurring amino acid
VRVALRRTPGHLTTTGRVTYRTLWLYTYGDGGPRTVGPHWGWTWSASXSHTLSTLLSARTNTVPLTDTDLTPGD

SEQ ID NO: 1003159 - protein, 33 aa, Homo sapiens
MGVDRDRGYTMVTNGYLKNIPCKHVNFALTSRF

SEQ ID NO: 1003160 - protein, 50 aa, Homo sapiens
LRERHTSSRNTLPPKTVCYSRHDGLWTWTRPLDVATASGRGSGVTTVARV

SEQ ID NO: 1003161 - protein, 32 aa, Homo sapiens
MTHQQHGPTRLDGPDDVRYHDLNGVTLPTPNV

SEQ ID NO: 1003162 - protein, 50 aa, Homo sapiens
YQLRGLYVAIQAVLSLYASGAHHVAYVMDSERPGSPYTCAHSTTGYAPPH

SEQ ID NO: 1003163 - protein, 30 aa, Homo sapiens
MAHPSWAVSAGQKPSRTWDHGKPAGNRSPP

SEQ ID NO: 1003164 - protein, 135 aa, Homo sapiens
QRHKEDWGGSVCVGLDRDWRSDLAEHSTDVILKWLSANPAKQSIFPGPRWRGMVSDTEEFWDEPRTSGGVLYRTDLDENLEFTPVPSVGKEKVKMEKLKKLWATGEDQGRNSGRSKGLRAWGSALVQLKDAGLVQ

SEQ ID NO: 1003165 - protein, 165 aa, Homo sapiens
MVYRGSLAESSQIKILEKQLEETKAVLNAAVPDPGLIGVWRSSGQLAVRWKKKSQEYQILLDVKTRLEQEIATYRRLLEGEDAHLSSQFSSGSQSSRDVTSSSRQIRTKVMDVHEGKVVSSKEQVLRTKKLRLPARVRHRRPPCGHRSHWKIPSPAQALHSWTLL

SEQ ID NO: 1003166 - protein, 72 aa, Homo sapiens
  misc_feature (2)..(2): Xaa can be any naturally occurring amino acid
IXWKKILSSGVFYFSGPKEGSRLDLLVRTQKQGDDSSEMGGHSFVLTAAKGFASGACGGLLGGTRRLDTSYV

SEQ ID NO: 1003167 - protein, 50 aa, Homo sapiens
EDSFLYGRGATPLEISLDLYQTVYARNIFNEAAEYLSKWNQVVEIYLFIL

SEQ ID NO: 1003168 - protein, 68 aa, Homo sapiens
QRHMEVEATSELRWKKTERHEEATLPKITAEQRTVTKIKRFKKTFLEGVHISVYRVRNLSTPAKTFQT

SEQ ID NO: 1003169 - protein, 38 aa, Homo sapiens
MRTLSDQTSRSAPLRPVRGRAPADMVTLDNLGAIARPP

SEQ ID NO: 1003170 - protein, 153 aa, Homo sapiens
ELEEDKEDVIYVRIEGIEGQESGDRGSGPGIIHQLTEELGPLWIKSPTVKMKERVQITLEPFPPRCIGIQRRGQVQSSTACGVDAAWEGAGSMREMRVLMCSKVTIFLIGPGIVGLIVGTVAFSQQNPGAHGGPIPILKAWVIQPGLSFLGAS

SEQ ID NO: 1003171 - protein, 35 aa, Homo sapiens
ALFSALVIIGTKYNIKYALTSRANGAMNREVPTNS

SEQ ID NO: 1003172 - protein, 49 aa, Homo sapiens
NWEEERGASSPLQQAAVVAISCSSGVFTSSRILYSWVLLLHLAVELGQL

SEQ ID NO: 1003173 - protein, 95 aa, Homo sapiens
TFDVKTLIKCDVGRCLQDAMLRSETVVLPALSKPRRSILTSWSGALFNLRNIESKPILPPSPSSSSSSCCLPRYQGQLLLVPPPTFLARTAEELS

SEQ ID NO: 1003174 - protein, 83 aa, Homo sapiens
  misc_feature (3)..(3): Xaa can be any naturally occurring amino acid
WQXTGGRGCRLDHGRTEKRERTYPRKTYEDSERRVSRKYTRFPVRTFCLPIAEGELSDRTDWGRLLGQHVVCSGVRGPEAVGV

SEQ ID NO: 1003175 - protein, 41 aa, Homo sapiens
MLMMRAILLLPGGRCQYLYNQADEVENQILYRDVQGIRQEQ

SEQ ID NO: 1003176 - protein, 35 aa, Homo sapiens
ACDVIASRGAEWSRRLMRTVQRVTGRPRSSMRSEQ

SEQ ID NO: 1003177 - protein, 49 aa, Homo sapiens
TLTPTVTHLAPGFAAYPSLPNGTHGCRFLRTLTPTCTLLAPHFSCTAHP

SEQ ID NO: 1003178 - protein, 78 aa, Homo sapiens
LEDLRRGTREENKISKRELEVGYREMESKEETPGTEWDKVAQLCEFSPKSRMQMKDVSGLGSVSHVPEADATVPVVAC

SEQ ID NO: 1003179 - protein, 87 aa, Homo sapiens
FPQPFNLELDIQQGPISGDCGYITQGSHFQHPAYRESLLECNTSYQLRILEGSTLLTFLIPIISSCSKSSSIITASTTILAKKAFCW

SEQ ID NO: 1003180 - protein, 65 aa, Homo sapiens
RGTRRAEGGSGVIFWAPSFSASVQLVLDLLVQFACNSCLIPVSFFLMASLVPLASLVPLASLVPL

SEQ ID NO: 1003181 - protein, 158 aa, Homo sapiens
MHKGRVLCSPMRTLLTILTVGSLAARAAEDPSDLLQHVKFQSSNLEKNLDVGQLGRRATPDTVYSIEYKRYGERDWVAKKGCQRITRKSCNLTVETGNLTELYYARVTAVSAGGRSATKMLTGSALLQHTTLKPPDVTCISKVRSIQMMVHPTPTPIR

SEQ ID NO: 1003182 - protein, 90 aa, Homo sapiens
SEDKRLGPRAQRQRTRRQRHKRQRLQWTEIMPCIQLGNRSRFHLKRNDNTKPDLVWWLTPCNARTWEGHRWDDHLRPAWATWPDPISNKK

SEQ ID NO: 1003183 - protein, 44 aa, Homo sapiens
RGSQSRASTPRFFWYAFHYCMTFKINERRHLETQMTDANLRAQF

SEQ ID NO: 1003184 - protein, 118 aa, Homo sapiens
MRVVSDLAHKVWAAMIAFPVALIPAGIPMSLTWPPVSGAYVDFQIKIESIHSYPQHGGFQKKYEAELHQPSPFLLQPESPAFDLTQAEKLQPCQPTALAESAHTGDTRQWLVAKLSPQ

SEQ ID NO: 1003185 - protein, 72 aa, Homo sapiens
  misc_feature (56)..(56): Xaa can be any naturally occurring amino acid
MTDPSEAQGGRSTPHWKHGLGFGSLVYWGQPRAGLPIMVAPPNQGKKEECGTGGPXKPEGQGGGQFPFPGVY

SEQ ID NO: 1003186 - protein, 70 aa, Homo sapiens
  misc_feature (26)..(26): Xaa can be any naturally occurring amino acid
  misc_feature (58)..(58): Xaa can be any naturally occurring amino acid
MIHHNSSDEVQSQRRVLPQIEFKSQXGCPSITPNGVSQWEEPCRALFMVLISTAIGSXTDTTEKQEVGAA

SEQ ID NO: 1003187 - protein, 82 aa, Homo sapiens
MEDTSHAKDTYGADYQKALLYRDVVVRGLKPDTAVSVQKWCSPCFQLPGLDNQLGIPVPVAIPDEGDVSITPNLILVAEARS

SEQ ID NO: 1003188 - protein, 85 aa, Homo sapiens
  misc_feature (75)..(75): Xaa can be any naturally occurring amino acid
MGLVFQARVRILGSGTLSRWMYMAGSVLGSAVATRAGARRRPGPHPSSAKSWGETASTGEEQDSNTREASLVALXSLVALGVPSS

SEQ ID NO: 1003189 - protein, 84 aa, Homo sapiens
SAGTTHTLRDGRQQQDYGLIDVRAQNDLFSHISAMTWVLLNLNCDEAITRVNYDERELGGRFRLTLQTRPLGPSRLINSGTDSL

SEQ ID NO: 1003190 - protein, 48 aa, Homo sapiens
RLLRRIPRRAAVQGAGVNESLIATLQHSLQLSLPGKSGSSPSQVALPF

SEQ ID NO: 1003191 - protein, 69 aa, Homo sapiens
SSSGAQVTMLVLILRASIYRNSITYSWSKAWEKFITRSIGNTNGMTHWVMHYIPPVELSIEMLLCSHYR

SEQ ID NO: 1003192 - protein, 53 aa, Homo sapiens
  misc_feature (1)..(1): Xaa can be any naturally occurring amino acid
XQRDKEEVLFVTWLRRRRKVANEFSAEKSLGMRVEGCTGVMHGRRVLGGRALG

SEQ ID NO: 1003193 - protein, 71 aa, Homo sapiens
SDVLDVLADVITTRVMKSGFRCGRHGMKGLVPVGYTSLAPCRPGDPFPCAMLSTSPCPPGELDMCQLTHHS

SEQ ID NO: 1003194 - protein, 71 aa, Homo sapiens
VIGMKDKIQIRSCQPDDWDEDCPARIPDEEATKPEGGLDDEPEVRNLIQTQRKLRIGMTDWLANGRLLRLA

SEQ ID NO: 1003195 - protein, 57 aa, Homo sapiens
PVDGGLQTRFTTVGYFYKKNLFGNEVSLCFPGWSPTPALKTIFPPGLPEVLRIIRRE

SEQ ID NO: 1003196 - protein, 89 aa, Homo sapiens
ALTCTHSHTHTYLLAHRSSLERQKDCIDPDSDSTPAIGAVAKVLFGQGPVKILKGLSREVRVDRELLSLKGWIVTGASSEWPLRMSVRI

SEQ ID NO: 1003197 - protein, 37 aa, Homo sapiens
MLIQSATHEVDSVNLEKTAADTDSTETTCSDDRYGLT

SEQ ID NO: 1003198 - protein, 38 aa, Homo sapiens
VAWLYFTRQVLIEAVLQVIVRFLTVMMKHGYIGSEITA

SEQ ID NO: 1003199 - protein, 47 aa, Homo sapiens [sequence omitted]

SEQ ID NO: 1003200 - protein, 34 aa, Homo sapiens
MTGGEHDNIATDGYHARVASQKREDVCMGLGGKY

SEQ ID NO: 1003201 - protein, 49 aa, Homo sapiens
MRVTERYPFITRSDLLTERGRITSMNITHYSSSHDSEKLWLQPRFFQGT

SEQ ID NO: 1003202 - protein, 138 aa, Homo sapiens
YIGERGIMGRRYNMRNTDFGTGFEYCLDDEEELDVKSWLEAVYEHRRNATIFSHKTGVVFYLDFQEFQFQFNNEYVINRLNPDLEKLKKDGTEKVLRKLDRPVERSRFKVSKEISESTEVPKKVNEVEVLIGRAMGLL

SEQ ID NO: 1003203 - protein, 38 aa, Homo sapiens
MDPTQEEIPDLPEQEFRRLVLHQEKAQRTVKPNVRKSN

SEQ ID NO: 1003204 - protein, 46 aa, Homo sapiens
GWLYTLAILQRSQWRNEEKGGEITIPSVTVSLTKYIMVYCVIVHAY

SEQ ID NO: 1003205 - protein, 48 aa, Homo sapiens
MALGVSPAIGRNLNDENFILKHTGSWQSMYLANAGSNTNSSHVFHLAL

SEQ ID NO: 1003206 - protein, 122 aa, Homo sapiens
SRDPWRGTLKDPVHFLYHSETVTDPVHFDDTRDPKQYPVILRLHHETHPKTPSYFFNQHTETTSTVLQFNSLITIIETTHRVLPSFTSLITTSENPQQQYSQLHFFDYHHRDPLKQYSVGVA

SEQ ID NO: 1003207 - protein, 102 aa, Homo sapiens
SCRALCSSPPLAQPIYLHLQQTLMTATQYAQYPRKDVRSMVEPMRWQDNGLHFLPQKTTIALMPLKGRRLALRTYTCGRYSAEVEQRALERNHGYRRSHTVL

SEQ ID NO: 1003208 - protein, 50 aa, Homo sapiens
MYNTYRTGGFTTVGQDGLHLYDLVIRPNTDSQNAGITGVSHQVWRVKLRP

SEQ ID NO: 1003209 - protein, 77 aa, Homo sapiens
DPSQQPPSYGGSHPCQGRGGHLPAAAALDEGRTTTCKGYTPTDASPRRPRRLHGPDPGFRTCELVTITKLESEITDR

SEQ ID NO: 1003210 - protein, 89 aa, Homo sapiens
GYQLILEQYVPESVPKTSLENSSCSWMETKLKALGMTASQDRAVVNTDTQGNEDVSREGSEGPRENGNTKRKAKERGARANAEKPSNSM

SEQ ID NO: 1003211 - protein, 82 aa, Homo sapiens
LSGLTGAICACHLSFMKMGVTVLSTHELTSLLEKGAGAVARTEASDASVSRTRLTARTMREWEAPVALWMHELPCDGAYCAC

SEQ ID NO: 1003212 - protein, 40 aa, Homo sapiens
AGPPKSGGWPKAGEGAVESQALERVGSSSWTSNEYEDSRR

SEQ ID NO: 1003213 - protein, 113 aa, Homo sapiens
SSIADTAVLLEHWDTRVEVIRAIKFHHQVCGCLPKKSVMGEGTGPKLADPESVIQFNSHQGVEVCHKRCPSLIARQKQAEVMLCFMWRQSLLIPEGSSKVETQLLVYQHYCLH

SEQ ID NO: 1003214 - protein, 93 aa, Homo sapiens
  misc_feature (61)..(61): Xaa can be any naturally occurring amino acid
AFYYVGHAVITPSYRRNSDALGRGCVIGHCAEKISETADISVTAGDAREEEAEVFHGGRGXCVDHAGGKNPPSSSCAQEIQNSNPLQAYLSNT

SEQ ID NO: 1003215 - protein, 86 aa, Homo sapiens
FRIQRWTYYGPVVPEATRSLCLYDAKKVVLWEDVEWPETEKPTEFPGVAVEGMSSELGDVQEAHRNPGHQVLIFNVLVVVKETCSK

SEQ ID NO: 1003216 - protein, 40 aa, Homo sapiens
  misc_feature (33)..(33): Xaa can be any naturally occurring amino acid
MASQPHSGYDRGDCNTLRIDSCTSVLYKQHFLXSDERKLG

SEQ ID NO: 1003217 - protein, 82 aa, Homo sapiens
LAGADNRDGDIRVTSRDAHEEEAAVFPAVEVVVDHVVANPPSVLCSKIPTSAPYSLLELIPNQIRLQTLMPANLITVLTVVS

SEQ ID NO: 1003218 - protein, 67 aa, Homo sapiens
QISDVPSRPMLVSSLSGIPIACEHETRTILGLLGLGQCRVLVISITDRFHVEEFVLGDDAFLIQDHT

SEQ ID NO: 1003219 - protein, 38 aa, Homo sapiens
MWSPHQKSGEMVHVTASWRLVDWPGLRTARTIMMSSRI

SEQ ID NO: 1003220 - protein, 77 aa, Homo sapiens
LSLTSILDHRLEYSGVNSGHCSLHLPGSSNTPASDSRDSSDYRLPHTVDCDEMPVEAPVLRAYGCYKLTTAAVKMTL

SEQ ID NO: 1003221 - protein, 59 aa, Homo sapiens
DHTRELYLVHALMKQARNSSQDSFSLKFRLVQQGLQLTFLRPRTVSSIYIKITAVMTRD

SEQ ID NO: 1003222 - protein, 35 aa, Homo sapiens
RDMDYRYSCSPERFITYTTGRISLHVGCIMCAPHF

SEQ ID NO: 1003223 - protein, 41 aa, Homo sapiens
MSSSLTSYSLQSTRLVPFPIARDFSRFVRFRIRATGSHSVI

SEQ ID NO: 1003224 - protein, 104 aa, Homo sapiens
LYCSSTSQCLLPEGSSLLLISCPRDQWRGQGKGESSPPLGGHPSRNCPVHQLHQYVEGFLLHGLLPAHVIRLLLKPHVQAQQDLQLLLELLEKMGLCYWLNKPK

SEQ ID NO: 1003225 - protein, 37 aa, Homo sapiens
MRSSYPGVIMVSLDVENFNADKEDCHTSGPATLGVEP

SEQ ID NO: 1003226 - protein, 130 aa, Homo sapiens
MWYTNVDGGVVLCGTTGDRYLYLGQAVEDETLLVNDGNVLVAVGPKGVVVVIEVTVYMEVIEEVMGGVELTGVLKDPVEMSEVGVSVVVLGDVAVELVNVVCPVPVVATVDEGVSIFVHVVNDMVVVGHG

SEQ ID NO: 1003227 - protein, 95 aa, Homo sapiens
MLGAVLVCFHATDKDITEIGKTKRFNWTYSSTWLGRPQNHGGRQKALLTWQRQEKNEEEAKVETLINPSGLVRHNHYHKNSTGKTGPPGTAPRIQ

SEQ ID NO: 1003228 - protein, 99 aa, Homo sapiens
VGARVLLDVIARRPCRYAQSTEGTQFLGSAETREAGEALRGVAQHVDKVDVELREDGSVEVWELSPIILIMIVGELLRSWAEAVSVWARQGSTFLSELL

SEQ ID NO: 1003229 - protein, 55 aa, Homo sapiens
RYFVFYSLAKPKRMYLSRLFCPGSFAQVRERSDHEIYHLSTLLSVSPGLKAKVKR

SEQ ID NO: 1003230 - protein, 48 aa, Homo sapiens
YGPPGVLGVLPECVTRSPRYARVFTQVCCVLPVCAGFSCVYLSPSWDV

SEQ ID NO: 1003231 - protein, 51 aa, Homo sapiens
MMTMAVLSNRKGGNVGKRERSQIAAVSVKKEVDIGDSILFCTKKNCSPRDT

SEQ ID NO: 1003232 - protein, 74 aa, Homo sapiens
  misc_feature (16)..(16): Xaa can be any naturally occurring amino acid
ADEMLRRSAGYRTSGXVITAYYNGVHCKIFSLENETNENHAQYFLRLELQLRADLKVHNLALFRRTSARVPGSG

SEQ ID NO: 1003233 - protein, 35 aa, Homo sapiens
SPIWMPLDAYDFNMKKLHSHSKNWISGIKVILEQS

SEQ ID NO: 1003234 - protein, 140 aa, Homo sapiens
HHLDAPYAGQGCSQEVAVLGRSRYCGSSPSSLRLTIPPRNPDTVVRKRETAGDHKATGCDFGPSILQVATSRSNEGVVSPVSVLLVTGVLVLVVVMSQRVTSWWSYCWMLISWPSSITPGFRPLMVVDLLVAWYGSFLPT

SEQ ID NO: 1003235 - protein, 139 aa, Homo sapiens
APGCRRGGPVSVPLRARPKSELSCRDNQDGTCSVSYLPVLPGDYSILVKYNEQHVPGSPFTARVFTRDDSSAYVPPKGRLLLSDIPINISETGSQPARTATVVPPSGREEPCLLMRVRFGHVRIAFVPQETGELLVHVK

SEQ ID NO: 1003236 - protein, 124 aa, Homo sapiens
RPSHSRFASRIGKAGVFRTGNANLAIKGGHAGNNPFIHENLDALGAQVRSAQAARMKKFHSDRMDAALGDPWVHMGIDLADDSLTGLNAAQYHRLITFSLEIAAFAFEYYSRIRQLPFKEALNF

SEQ ID NO: 1003237 - protein, 124 aa, Homo sapiens
RIPHLMPLDAVSLTGMRRYLSSCFPAESHPLSGSRRNAFRWSWIFALTSSSCVTGLHLKGDGLVHVRVFTKICISTSENGGSRCRVALFLDLVIRPGAPIFQSRFPAEDQSLLVRMDAFLILDL

SEQ ID NO: 1003238 - protein, 164 aa, Homo sapiens
PAIGQSARVFDAQLARARETACVAQHMASLWSERFAGDMSTQKRLTDHFARLLERPFVGPLNEERVAQAREALRGESLADVVYRVLREQARDLEPLRLAEGNVFAGIAPSVPGFYTKRYLQYFETQAPRLVDTIARDNWVLGEGADLGHQDLSRLMAQLQQRFF

SEQ ID NO: 1003239 - protein, 51 aa, Homo sapiens
MRGKWRLPVLAMTLPICGNRCEFINSSMSFVQVLGPYSTGVKKVTNVNNLQ

SEQ ID NO: 1003240 - protein, 50 aa, Homo sapiens
MAFSRIQAIDVTVLIVKGSIPEVLGQLKCYLSWGYCDFFPMPYVNFTTRI

SEQ ID NO: 1003241 - protein, 72 aa, Homo sapiens
MSVHKTRACSWQIAPFSVQHEASRVLHGLLLIVGPDLLFLLLGGLLGRQQGLVVGAAFGGEVDLGERVLHQQ

SEQ ID NO: 1003242 - protein, 77 aa, Homo sapiens
YFQQDTYGATTRKALLYLCGGDDVKPDHGAERPERVLTRLPANRSRKTSWRITVPGAIPVRVTLALPPNLILVAEAG

SEQ ID NO: 1003243 - protein, 59 aa, Homo sapiens
GVWGDEGSPTRAERQKGGVTRLPGEQVWKTSWRLTVPVAIPVRVTLAFTPNLIVVAEAG

SEQ ID NO: 1003244 - protein, 59 aa, Homo sapiens
VGSPDELKGTVSSPESSTKGGWVIYGILLYGKFPDTAHFGALTQLRSMPGIPLFPPFSS

SEQ ID NO: 1003245 - protein, 33 aa, Homo sapiens
KALLYADVVEMTGSPTRPERPERVLTIFQANSV

SEQ ID NO: 1003246 - protein, 83 aa, Homo sapiens
GGRGQSSVPGHDRVVISHDSVDKVPGVKAKATQVIMNSLITKQTQESIQHFERQAGLRDAGYTPHKGLTTEETKYLRVAEAGS

SEQ ID NO: 1003247 - protein, 60 aa, Homo sapiens
ASPGNSSVLGKDTTQSKPVSSPLPTKPWEGQAEGDRGECKGGDEEENDEPPKVVVAEARS

SEQ ID NO: 1003248 - protein, 101 aa, Homo sapiens
PHLMPLDASHIHSLSLSSHDIAQALVKNPPPPTVDQARRTAQSFPDKSPPRQASVGILQLPTAAQARTDTTLFPALLFAPGPGLEGGTYGLQSEFFIATTR

SEQ ID NO: 1003249 - protein, 84 aa, Homo sapiens
LKPAHRTLHQQPAMMWSFGIVMCRGAELCGDKPYRERMSNQRGYELSIEVWVPGCPPPDVTALAPSCLSLMQELLGSLTGARRA

SEQ ID NO: 1003250 - protein, 46 aa, Homo sapiens
MDEDADSENDYQGVIFKSDKLFYDLGKYASCRPTLRCMCHASRGFM

SEQ ID NO: 1003251 - protein, 47 aa, Homo sapiens
MPSQGESSEAMELSDLLCATMLELFFYSSYFKTKAGCGKHVPIAPSY

SEQ ID NO: 1003252 - protein, 43 aa, Homo sapiens
MDLVDMSHVTHSTEPLFKNVSPWETSTSSYSSYFVLRPLVPIF

SEQ ID NO: 1003253 - protein, 34 aa, Homo sapiens
CGRSGPLTLWHVLSDAAGEDVRADGTPPGAPGRP

SEQ ID NO: 1003254 - protein, 121 aa, Homo sapiens
LRDIPKAYCLIDIIGVHHNPHVWRILRCMPTPFNSTHPIHSNKVCVYTTFRFDPENSKGEVNSGLYSFIRQGPGTANGQAFAMEEMKVVLALIATAPLSYTGWNAVALYQLTAGLTTGVKP

SEQ ID NO: 1003255 - protein, 43 aa, Homo sapiens
NDWCAFCGLDTTSTELSVVKSVYKDTEQKYIIMVHKYYMSQKH

SEQ ID NO: 1003256 - protein, 59 aa, Homo sapiens
GVVGDAVETVTSDALASLEELGGTTIKGDPNGSQFYEILTDPSDDTKGFFDPITIHPHP

SEQ ID NO: 1003257 - protein, 100 aa, Homo sapiens
VNFGHTASTPDDCSKCIIPEVQCLETKMRRTLERNFEDSSSTCHKCDKLMAWPCILSIHPPIIDHLSILELGYLRVAKSMLRNVSLQGRALSPHFHCFTK

SEQ ID NO: 1003258 - protein, 55 aa, Homo sapiens
TVYSSAIVTLKENERFFGRRCSKAWRLENPKATHTLLPDTSWGTQADNPTCSSIT

SEQ ID NO: 1003259 - protein, 34 aa, Homo sapiens
LNGRLGILESLEAHRLSLWRRAVGTAPPSGRLFQ

SEQ ID NO: 1003260 - protein, 35 aa, Homo sapiens
RHFSWDVCLTTVSYTGLWFTGTLPLWGLLYDVDLH

SEQ ID NO: 1003261 - protein, 44 aa, Homo sapiens
ERDDLRMEPSAGQHILRSQKPVMVKSKRTAHQELLSPLAPKSMF

SEQ ID NO: 1003262 - protein, 109 aa, Homo sapiens
MSIYAAAHAGELAVGMSVSWAREMLQALVLFKVYITGEATLTGLEWMDGFPGEETEYMRSQGQGTLSVDKSSSTAYIELTRLTSEDSAVYFCARGDYYRRYFDLWGQGT

SEQ ID NO: 1003263 - protein, 47 aa, Homo sapiens
TVVLLAVAALRCVAAIPPRHRLSSSPLDALVAKGRHQRPGGIAATTA

SEQ ID NO: 1003264 - protein, 187 aa, Homo sapiens
WGAVWDCSGNELGKQQVGVGLVLGEYQGRDEVVDGLALLQLVFHLDEELHSVHQHLHQLHLSEAQGDSVGDVEHPGDRSRGHTVCASLLKSQPRKRLREVLMLAQVGQLDMHTCPQAGAPVACAGEDVGQVRVPDELLVLRLEQSYNLGEAGAQAGEDVLHVDAVLHGDDLQVDSSLTTSGRCLDMC

SEQ ID NO: 1003265 - protein, 62 aa, Homo sapiens
VGLTLLPKCVRTPDGRFDGHGHDPAQRPQNYLFGGELKADKDDRIEVDNDENEHQMISEEAD

SEQ ID NO: 1003266 - protein, 35 aa, Homo sapiens
MTLIDRVCSLRCCYVLVGFRGSSLGSPCGLGAYSG

SEQ ID NO: 1003267 - protein, 76 aa, Homo sapiens
GYAYRWAVQAAHMHLGYNIRKYVAGNVNTGPLEAIASMRKFKALISIARRSVMMIIAIGSIYRAGVIITSGRRPMA

SEQ ID NO: 1003268 - protein, 74 aa, Homo sapiens
MADLKWLSHPRPLFGCEADLGHRIRHLPPLEQLASLTDSPVRVERKQPRPRSTVVSPCRRCWGGTMMAWGVIWL

SEQ ID NO: 1003269 - protein, 39 aa, Homo sapiens
MRKFKALISIARRSVMMLMAMGSIYRARVIITSGRCPMA

SEQ ID NO: 1003270 - protein, 39 aa, Homo sapiens
MPQIKALISIARRSVMMIIAIGSIYEGGVIITSGRGPMA

SEQ ID NO: 1003271 - protein, 39 aa, Homo sapiens
HVCAQHKLPAGLLRTQKHQHYQRSARAGAGVELMQKWNF

SEQ ID NO: 1003272 - protein, 54 aa, Homo sapiens
VHLRYPWSPKPWSPTLEHQTLEPPIPGDPSLGALKVGLALILGPLSSLLSSDFW

SEQ ID NO: 1003273 - protein, 57 aa, Homo sapiens
  misc_feature (39)..(39): Xaa can be any naturally occurring amino acid
  misc_feature (44)..(44): Xaa can be any naturally occurring amino acid
KTTTVTETLVGFLMYRKQESTVPELKEVSLLICVWTNFXFKTPXLLTMELILPCNVI

SEQ ID NO: 1003274 - protein, 88 aa, Homo sapiens
SFRSFNSSTTQQYLHLLSTTSDLVEEATSYDSSRGSMATTHFPESSTTSGRSEESTASHSSPDTNGITPLPAHCTTPGSNVLLKLLET

SEQ ID NO: 1003275 - protein, 34 aa, Homo sapiens
FVVACIHHCGACSLYKFRREVSTVLTSKYRSAGA

SEQ ID NO: 1003276 - protein, 78 aa, Homo sapiens
EQMAYYELRAEHSVDIDVAMLAYAEQRVLRYGYLGKAKLKELSLWVGTIDGCLTNGHIYVLRTTQKDIILLLTVEDCY

SEQ ID NO: 1003277 - protein, 34 aa, Homo sapiens
KSSEQIETVLYPTEKEEVAKSQDRRDRQTPSPGL

SEQ ID NO: 1003278 - protein, 34 aa, Homo sapiens
MMPFPVPLPVFRKPVCDEETLKKKGSQGPFRCSQ

SEQ ID NO: 1003279 - protein, 30 aa, Homo sapiens
MRISVINSNLVPRDIASVYARPVRVKPVYS

SEQ ID NO: 1003280 - protein, 106 aa, Homo sapiens
RLWGSSSSSASASRVAKMTGMCHDTQLIFYFCREVSLCCPRWSQTPGLKQSFQLSHTGITAASHYTWVNQLLPMNVSLLNFYEYPQLKIQRSHILCNSIHYPFRVD

SEQ ID NO: 1003281 - protein, 85 aa, Homo sapiens
DAQRKRVLFSSHFLQMAFKSFRNTQFIRRFMVSLNMPHSVKSDVRRPSWWLELSFMIYLRSPVKDTFSVYLPIMILFAIETSKTR

SEQ ID NO: 1003282 - protein, 64 aa, Homo sapiens
ARQVQNEPFAGGEDGTTLSHAGQSLQPGPPGCVRRRRTPPHGPAAPGLGGPGSLLTDAGHVPQC

SEQ ID NO: 1003283 - protein, 33 aa, Homo sapiens
RWMPLLQHHGYSGTQHPKPPACHVMHLSSQRLD

SEQ ID NO: 1003284 - protein, 67 aa, Homo sapiens
PVELGHRIPLVSFGRTCSVFADFSDLDASVGEALLAVTAPTLRLMSSQASAVCIFGLGLSLELPRCL

SEQ ID NO: 1003285 - protein, 63 aa, Homo sapiens
MHALCLHSRCSQQLVNQPQTHSCQFQPHPFHYPHQGTSLFSSHFNHLISNTLPNARVLHVHIK

SEQ ID NO: 1003286 - protein, 62 aa, Homo sapiens
AAAVRSVAVRSSMTNLTNMMKPVFTNNTKISRAPQLLRRLSQANCLNMGGGGDCSELSSDPQ

SEQ ID NO: 1003287 - protein, 41 aa, Homo sapiens
DFEDEADVNGVDWYRGEDNRTLVAGSSESLRYGSETEHPPG

SEQ ID NO: 1003288 - protein, 36 aa, Homo sapiens
MLTRLLLVDWSSSSTTGRMCCWGVVGLGAIDTFSNS

SEQ ID NO: 1003289 - protein, 47 aa, Homo sapiens
DSSWYPMLRKPGSSASDADVRDGAVDPAVLVAAVQPDATSGAYRITT

SEQ ID NO: 1003290 - protein, 39 aa, Homo sapiens
ATDNFQYPTVTLFLRSPSTEAQDLKCQFYVGKDTGINYI

SEQ ID NO: 1003291 - protein, 36 aa, Homo sapiens
RYRQNRAEPPPIDAMALLLYTSAGCTRELTEEGEIV

SEQ ID NO: 1003292 - protein, 73 aa, Homo sapiens
VGPSFRSITSITHSRLLIEIFLDSFPHEFRKALRCSVYFHTYSVNHLLGGAGDNTLLQVVGLLLKVFTSLVIS

SEQ ID NO: 1003293 - protein, 74 aa, Homo sapiens
MIELLIGAAVAAGVGRYIIKGYSATGVLMVGGLLLLGISALMGKTLLPSGAASTGGRATDIIEYVKILLMSRGG

SEQ ID NO: 1003294 - protein, 35 aa, Homo sapiens
LWLYSLSSLFQAARTHLSLKLKLIQCRLRRIHVTI

SEQ ID NO: 1003295 - protein, 45 aa, Homo sapiens
MLPITCLESSSQTTALEELVGLKGAGARAKPKAWSPRLVAKAGAC

SEQ ID NO: 1003296 - protein, 33 aa, Homo sapiens
  misc_feature (1)..(1): Xaa can be any naturally occurring amino acid
XVCRRVFTMRSWLPVQVPSRSEHVLTSKYRKLE

SEQ ID NO: 1003297 - protein, 60 aa, Homo sapiens
VDKSCRQVSTCCPPNIVKLEPGRRVSPMGPCSLYKFRRHVNTVLTSKYVKLEPGRPLDDP

SEQ ID NO: 1003298 - protein, 53 aa, Homo sapiens
MASSMICNGCRVTEDLVTIITLVTSPYTMDCLMVNKCRLCTTGFPWCREHVEF

SEQ ID NO: 1003299 - protein, 94 aa, Homo sapiens
LLSVSPQLTPFDPHNPSFLAHIATAPTKKFRTLSLSTSDSTFVGSGTSSWSPDVEKGHGISPPKNNTMIPPASVCSSSCVQVYLLCPDKMLWES

SEQ ID NO: 1003300 - protein, 104 aa, Homo sapiens
RYVSTILDDAKHLFQAMLQKATVDADDVREESSAALIRLLTLLPQAIFYSLLQGKEIKPPLPLIKPYSGPRLPTDRYCLTAPKYRLQSLQKKASTSAGRITDPR

SEQ ID NO: 1003301 - protein, 124 aa, Homo sapiens
NKFPPNGQSHSPSSKYLHALELIDSLYYRKSICFSSFSSNQYSIGMTKLDVIRHSGQDFMIYALKLLSTPPLGMHLRTVGVVAVGEDPEAALTGVGFLKNTSMQIPHNMSLLRCTANESSMSLS

SEQ ID NO: 1003302 - protein, 78 aa, Homo sapiens
ASDSVTVAIEPKASISNTTAHIFFSTLQLGVWHASRDPATWKAAVQKHPLQPGNLQASVQLMHCIHCTPSLRPTRGIL

SEQ ID NO: 1003303 - protein, 39 aa, Homo sapiens
HLNDPILNKNGARRWTALSSAFSSLGDPGTGAPLRVELR

SEQ ID NO: 1003304 - protein, 62 aa, Homo sapiens
RCITDVSLVCTWTCLALDVCASLSGPPQCDGLALAHHDLGALSPGSHGADFSGVPVPYIQPG

SEQ ID NO: 1003305 - protein, 48 aa, Homo sapiens
ARVPHESRSVLVCTWGRRHYWDMWTFNNRGLLYDVDPAGLTAGDLAVV

SEQ ID NO: 1003306 - protein, 39 aa, Homo sapiens
HVNRTRKSVQEACEVKKGKDPNAPKEAHVCITICVFNAS

SEQ ID NO: 1003307 - protein, 51 aa, Homo sapiens
VTSADLLAEKSCWDMKIEDYFPEFGRYTTPEDATPETRKDPRVNRAKYFIR

SEQ ID NO: 1003308 - protein, 56 aa, Homo sapiens
DLEDPPFSGELFLLLLLLAFSFFTVGFLALPGMLSCCLEPAAWDFTSVSESLELLL

SEQ ID NO: 1003309 - protein, 82 aa, Homo sapiens
LDVTGSMLTDIMEVSTGAHCVDGTVYREACTDGGEYTSTRLQLNRYLEVSMVLMCRRNLSRAACIAVVNTRRAGGMHALVGN

SEQ ID NO: 1003310 - protein, 35 aa, Homo sapiens
ARRRVITTAVLAPCTSSVDTVSTCADLQDIVKLEP

SEQ ID NO: 1003311 - protein, 52 aa, Homo sapiens
MSRSSLTRYSGVFQAAPNSRPAPPTLEEECRLLGAQAGLPGSFFPRDSGVWC

SEQ ID NO: 1003312 - protein, 63 aa, Homo sapiens
RAVTFSHCERSTRTQAKPSTLCLETSYTPVIPATQEAEAGEWLELGGGVCSEPVSHHCGSSLG

SEQ ID NO: 1003313 - protein, 36 aa, Homo sapiens
RTHPGLLLLGLPGRLTGGLLYDVDAARPERLGPGLS

SEQ ID NO: 1003314 - protein, 50 aa, Homo sapiens
CGSIAGWPGEQLHGWHCVEGLPAPSLVFGLVRQLVDLCIQPSSLSQSTSV

SEQ ID NO: 1003315 - protein, 39 aa, Homo sapiens
QRSASGCPPHSRFSTCRQVCGSGSPITSAIGLQMGRNII

SEQ ID NO: 1003316 - protein, 50 aa, Homo sapiens
MSRSRVSLVPRLQSMCITAHASLTFTSASQVAETTGMHRHGWLFFNCLFL

SEQ ID NO: 1003317 - protein, 33 aa, Homo sapiens
MEDPDMTQACMLARRRVYTTAVIASLYKFRRDV

SEQ ID NO: 1003318 - protein, 34 aa, Homo sapiens
YKQSQHIDGGSEALPPPMSACQIAMVLAPPQHLI

SEQ ID NO: 1003319 - protein, 59 aa, Homo sapiens
PRVSLVYQSVHFDPKISFISGLRPGVQGAGFVQLLWLSLPKFHCVSFFPSQEVILITFR

SEQ ID NO: 1003320 - protein, 35 aa, Homo sapiens
MTHGRPRLTSQRTFFCTTFYYDCTYPFNLTVTLHC

SEQ ID NO: 1003321 - protein, 51 aa, Homo sapiens
VNLSTLGGKAGITEVGVETRLMEQNGKPRNNATHRYDHLIFFLFLERERDS

SEQ ID NO: 1003322 - protein, 74 aa, Homo sapiens
TTRVRGGSLESDEAPALLIFWRSALVLTVSTELCTGRHAPIVGEYTVDHGSSLYTDIMEVSTGAHRVDRNLSKG

SEQ ID NO: 1003323 - protein, 47 aa, Homo sapiens
MTGIPHAGGNGARLGFIQLEDTLLCWLAGPVVLAEGSAVLCHPIKVQ

SEQ ID NO: 1003324 - protein, 63 aa, Homo sapiens
WDTIFVKTRDWYGASPSTVEPSDTIGNVTAKIHAKEGITYLISTRLIYCVGNTLEGMDAPLCD

SEQ ID NO: 1003325 - protein, 61 aa, Homo sapiens
GYYSRCTHDTYRHRFTDHNLTDDKTYTTTDTTQYDMTTDVTTTRTTTKTETTRTNGHTYYT

SEQ ID NO: 1003326 - protein, 41 aa, Homo sapiens
LRVRSLLSLFCSDICHLYSITQCPLGPGVMARTQRLYDEDG

SEQ ID NO: 1003327 - protein, 40 aa, Homo sapiens
MQSSWQSGQGCPPCIWRGRQLLCAVMELGRGNMRRHPVFP

SEQ ID NO: 1003328 - protein, 89 aa, Homo sapiens
GGSVGTDRKQRLTEVTRQVEQAGLGSKSVPVLGCEAAKGTGGRLGTYLSLEPRTVLGFVLGPCRLCSKPKVSFIAHFLDLARLFFYSFF

SEQ ID NO: 1003329 - protein, 60 aa, Homo sapiens
TPQFISNHQWSVDRYFQKESVLGPLALRAHPGVTGQPPGSKGSHQVLPMEGLAATSHCNP

SEQ ID NO: 1003330 - protein, 53 aa, Homo sapiens
  misc_feature (11)..(11): Xaa can be any naturally occurring amino acid
CYQEEGRLAHXCPQCLQTLASCSVLARVPFRLSRGAFLPRIIIVPSLCLFGDP

SEQ ID NO: 1003331 - protein, 65 aa, Homo sapiens
KADLGGWGLMAYLPPYASGKRVPEARWYSTLVLREKCMCRVLSSLTVTGDFLQGLVPTCVSKNTL

SEQ ID NO: 1003332 - protein, 77 aa, Homo sapiens
  misc_feature (77)..(77): Xaa can be any naturally occurring amino acid
MGVACFWANNRAKYSLMAGVAVNVIVTTTVKGSQHCAFQVILDHKICDNAGEEIYTLILIIFTEHGVAPSIKITEHX

SEQ ID NO: 1003333 - protein, 71 aa, Homo sapiens
MNIAGWGHGDLCVLMWARLSTDPTPLLSRCCQIRTACYALYDAIYETKFPPGSPVVGEPVFFLTTSPFLTV

SEQ ID NO: 1003334 - protein, 37 aa, Homo sapiens
GPICAYINGQIQSLRRPLQSSWEGSDKCTSNKYGAQG

SEQ ID NO: 1003335 - protein, 41 aa, Homo sapiens
VRRATVRSPLDAPAPPPFPVFPAVSLRGLLYDVDPAGMTRL

SEQ ID NO: 1003336 - protein, 57 aa, Homo sapiens
APAITIFGGQHGAHCVDGTCTREACTESGEYTYDQCSSLTDILEVSTDAHCVDWNYV

SEQ ID NO: 1003337 - protein, 44 aa, Homo sapiens
YRFWFRKAFVLQFYNEPGAMAHACNPSALRGRSKRMLGPRMSKL

SEQ ID NO: 1003338 - protein, 147 aa, Homo sapiens
  misc_feature (84)..(84): Xaa can be any naturally occurring amino acid
  misc_feature (118)..(118): Xaa can be any naturally occurring amino acid
  misc_feature (121)..(121): Xaa can be any naturally occurring amino acid
  misc_feature (128)..(128): Xaa can be any naturally occurring amino acid
  misc_feature (137)..(137): Xaa can be any naturally occurring amino acid
MLPSVSVCFHAADKDIPKTGKKKRFTGLTVPHGWSQNHGGRRKALLTWRREEKMIKQQKRKPLINPSDLVRLIHYHKDSMVETXPMTQIISHQVPPTTHGNHRNTIQNEIRVGTQSQXISXRLVSDSXAQAILLSQXSKKCCDYKHK

SEQ ID NO: 1003339 - protein, 45 aa, Homo sapiens
VRATRPDSAAQTTPRMEVLKAKSKTARRPIRLKVTEEYNLPLHLD

SEQ ID NO: 1003340 - protein, 34 aa, Homo sapiens
MRGPCRRSWPYLMDYRCPWNQVDGAVYSQYFLGL

SEQ ID NO: 1003341 - protein, 102 aa, Homo sapiens
  misc_feature (72)..(72): Xaa can be any naturally occurring amino acid
  misc_feature (87)..(87): Xaa can be any naturally occurring amino acid
QKAGRWQMCVGESRGMRWWEGERQEDSGITPEGCDHRRLGKIEVKKPFAIAREWGQGHLSLSDGLWQACSPXQGSELHWPGCWHLVXRTTRLTFHRAMDSLS

SEQ ID NO: 1003342 - protein, 79 aa, Homo sapiens
  misc_feature (27)..(27): Xaa can be any naturally occurring amino acid
  misc_feature (72)..(72): Xaa can be any naturally occurring amino acid
LGDLEDLLGLTRVAMWTARVVFAEATXSRLSGPDAAHFPSSKLTRQSMHLRYQHKSVESLSGLRPRLASETXILQLNPS

SEQ ID NO: 1003343 - protein, 35 aa, Homo sapiens
SVIFDYRLRAPEISHQQPTESPPNNRLIKLILKTN

SEQ ID NO: 1003344 - protein, 73 aa, Homo sapiens
  misc_feature (18)..(18): Xaa can be any naturally occurring amino acid
PVLHHEVKKLVDEKHVVXGSLEGMEVVRKVESTRKTAGINPLKDVIIGDWGKIEVEKPFGICKEEGTGTSFFE

SEQ ID NO: 1003345 - protein, 37 aa, Homo sapiens
RDLESDFGEDAIDGVRGAIIKHKIENVAEVTPPLDIV

SEQ ID NO: 1003346 - protein, 39 aa, Homo sapiens
MRKLKLLISIARRSVMMIIAMGSIYRAGVIITSGRRPMA

SEQ ID NO: 1003347 - protein, 37 aa, Homo sapiens
SDTKYFELCNVAVEMYAYRWRSWQAANMHPRPINIRE

SEQ ID NO: 1003348 - protein, 40 aa, Homo sapiens
ADCCGSAFFPPAATLSEPPVEEEVRLLFVSARFSVISSDG

SEQ ID NO: 1003349 - protein, 95 aa, Homo sapiens
LRRGSPEASTLSTTPVDSNSPVVTSTEISSSATSAEGTSMPTSTYSEGSTPLRSMPVSTKPLASSEASTLSTTPVDTSIPVTTSTETSSSPTTAK

SEQ ID NO: 1003350 - protein, 35 aa, Homo sapiens
NGALLEEAQYTAAVFPATLFLLIKTQSEEQVLLAY

SEQ ID NO: 1003351 - protein, 91 aa, Homo sapiens
  misc_feature (64)..(64): Xaa can be any naturally occurring amino acid
  misc_feature (67)..(67): Xaa can be any naturally occurring amino acid
WFLQNGGRCHQVDGAGVILRGVHHQSDVWSYGVTCVGADDFWVQTYDGIPAREIPDLLEKGERXAQXPILTIDFYMIMVKCWMIDSARNPE

SEQ ID NO: 1003352 - protein, 37 aa, Homo sapiens
SPEVEQHRHIPNQLFINLTDLLYLDLCNEPTLVPELE

SEQ ID NO: 1003353 - protein, 51 aa, Homo sapiens
RTVAGGSRSGQLTTSLRASYPKYGSVADSLTTLSKCRGVHLGELVRNWYGG

SEQ ID NO: 1003354 - protein, 100 aa, Homo sapiens
VSLEEEIVSHCTQLLRQYRGGAVGRLVICKTGGIPVFQQGMKNKILIFGLFEETGLAAFLSYWPGGWVEKENYYEAPVLHAVEHQGTQSGRKPRRQGAEL

SEQ ID NO: 1003355 - protein, 143 aa, Homo sapiens
RVVLATETVLRRHCERKACADDEQDGPRPVELQWSPRSSNRLSRGIVQNVNVIISTYGEGESGPMGNIMIDPVLGTVGFGSGLHGWAFTLKQFAEMYVAKFAAKGEGQLGPAERAKKVEDMMKKLWGDRYFDPANGKFCKAPT

SEQ ID NO: 1003356 - protein, 67 aa, Homo sapiens
EIRVVLADIGCCSATGRLVQLMHALADVSLLSAVLQLSLMAWFCRSSSSCASCSSSSARVSDRARAS

SEQ ID NO: 1003357 - protein, 95 aa, Homo sapiens
ALVIHIFLCIPPVGEQMLLQFRWGLLDLSAEEGTFSFTPMFGNDACTRPSEIVRHSDEECWFTHRLSSDGDHGATLLDGLMVSTSELPDSWTQFG

SEQ ID NO: 1003358 - protein, 129 aa, Homo sapiens
VPVARLESLMNSTLTDELGKLKGKSERSSEDPTDDSRLPSGRKRRREKDQLRTQVVRLQAEKADLWGIVSELQLKLTSSGSSEDSLVEIRMAEGEAEGSVKEIKHSPGPQRETVSMGRALSEIIGADLQ

SEQ ID NO: 1003359 - protein, 62 aa, Homo sapiens
HPECHLAEALPAAVSLDDLARATWAHSPACLTLHILGLKRTAQIRLFLPVYFGHFIIIKALS

SEQ ID NO: 1003360 - protein, 91 aa, Homo sapiens
RSLPLLSSLLLSSSFTSLTTGWSGPRSAALAAFSRSCAFSFRPSLIFTLTDRDSDSEPSSSPSSSSSFSSPSLSSSFSIFCRTLVKTDGSG

SEQ ID NO: 1003361 - protein, 39 aa, Homo sapiens
EPVFPFCPLTAGPFRATRVPCFTTDSLTYWTDSLLDPFY

SEQ ID NO: 1003362 - protein, 37 aa, Homo sapiens
LTDDIRSSICPHPRTCWQLSPSDLQWFTGAEERADRL

SEQ ID NO: 1003363 - protein, 50 aa, Homo sapiens
QHNTLTTNATTHYNYQRRLHTPLPTTTLLHCTTTNTYYYYSTRTTSYTLT

SEQ ID NO: 1003364 - protein, 48 aa, Homo sapiens
MGSGGGAICILAYKYSGVYVAGNVNNLCTSRTIASMGKFKGGDIDSGA

SEQ ID NO: 1003365 - protein, 61 aa, Homo sapiens
  misc_feature (41)..(41): Xaa can be any naturally occurring amino acid
MQNEDESRWVIPMPSASIRDHVQCCECVTQPTTMTTTTTEXPTPRAITTTTTVTPARSPSP

SEQ ID NO: 1003366 - protein, 35 aa, Homo sapiens
MASTGIGERYRTLVVVLRSFLRIVVSRELSTQRRY

SEQ ID NO: 1003367 - protein, 59 aa, Homo sapiens
RAGELGRILSVPESQKGACRLPGCCLQWAGCCACRRFSGLSAELRNQLDVAKVSQPGRA

SEQ ID NO: 1003368 - protein, 187 aa, Homo sapiens
  misc_feature (85)..(85): Xaa can be any naturally occurring amino acid
YNRWWRRVYGRVQEGRGRKMATSGANGLVRHGSCSNPRKFSEKIGLRSSVQAEETAAFEEVMMDIGSTLVTGPKNCDVGITSELXIMGGSLAQLLTQIWLLALAEVPRAPLHSTFGIHLREHSCTNGLGVNGGAVRILEAMVSPVRAIQPATLTGLPIVLPTYLLPQSLAGEGRWAGAIPLQRKGQW

SEQ ID NO: 1003369 - protein, 98 aa, Homo sapiens
MKTNLKFILMDCMEGRVAIHRVANLLLCMYAKEHVGFGMLKAKAQALVQSLAGSPSTQVAAIFNGHWWHSWGQHTEHCTICQGRGLLTSNFFRNGGQA

SEQ ID NO: 1003370 - protein, 33 aa, Homo sapiens
IPPRGPVSALSGVFRVPAGLLLFLWWVTCPHCA

SEQ ID NO: 1003371 - protein, 59 aa, Homo sapiens
ARLSPFLRRRSPRAAGPTAGPVRPGRARCPFDRPLALCCTVSVYDGLPAPTFTPLTCRP

SEQ ID NO: 1003372 - protein, 38 aa, Homo sapiens
ELCCRTHVWSPTSQLMAFVPPPMFLGASSSSVCRQSLG

SEQ ID NO: 1003373 - protein, 70 aa, Homo sapiens
  misc_feature (3)..(3): Xaa can be any naturally occurring amino acid
WRXRDSHHSHDSEDFWTPRYQLKTLWAVTHETRQHRESDQAPASTMGLHCMHGKGSPLPQTSRPPTCRSP

SEQ ID NO: 1003374 - protein, 43 aa, Homo sapiens
  misc_feature (18)..(18): Xaa can be any naturally occurring amino acid
LGDSSGAYSAPQLDQMVXFDRTSRARGVRKPKLFYAEHPFILP

SEQ ID NO: 1003375 - protein, 96 aa, Homo sapiens
YLHHRSARVTARAGSQRAFAPLLTPARHPKCSVLLLTPSAWLSSAAGLATTGSSELLPLALSTAVCQVCAALGWNKHSQACLFCLSSIFVDLVCIR

SEQ ID NO: 1003376 - protein, 49 aa, Homo sapiens
  misc_feature (2)..(2): Xaa can be any naturally occurring amino acid
LXFAHSAERRLSLVEVRTGSRTSKSRKDRSGQQDCLSLRKLTACGVGAF

SEQ ID NO: 1003377 - protein, 44 aa, Homo sapiens
  misc_feature (37)..(37): Xaa can be any naturally occurring amino acid
CGVYDLSAPQLILYIKVSEDCNNAGRKKRLSTSILLXVHYHFDL

SEQ ID NO: 1003378 - protein, 33 aa, Homo sapiens
FAPTAHQHHDTFHNTLQPLTILLYYINNSSYIF

SEQ ID NO: 1003379 - protein, 47 aa, Homo sapiens
RGSVRCEKEQQNQEYKIVLSVKTRLEQEIATYLPLVEGEDANLSFSQ

SEQ ID NO: 1003380 - protein, 42 aa, Homo sapiens
FTLDVEIATYRIAVEGEECRLNGEGLDKFNISVVQSTVSMCY

SEQ ID NO: 1003381 - protein, 40 aa, Homo sapiens
  misc_feature (7)..(7): Xaa can be any naturally occurring amino acid
  misc_feature (25)..(25): Xaa can be any naturally occurring amino acid
CLEDPRXCETRASRRTELLIVFLLXEEVVVYLMVGTCRPP

SEQ ID NO: 1003382 - protein, 71 aa, Homo sapiens
YDDSVWFFDHDYLDKHVWTCLMNVTCQAKEYWLGTTQALNYTRMTLTSNDAQGQRYLSYIPVLGHHLNVNA

SEQ ID NO: 1003383 - protein, 68 aa, Homo sapiens
  misc_feature (51)..(51): Xaa can be any naturally occurring amino acid
DLEDPSTRKNGDTRQVRTMWKRQDGKVISSREQVHRPPAEDSATPAATQEXGRQPAHLPHSLRPLQPQ

SEQ ID NO: 1003384 - protein, 63 aa, Homo sapiens
SQILSEPRSSAMGRSVSEWYPGEEAATPWQCLGLRRLVPAAESTGGASALLEAEFHHQVHHDL

SEQ ID NO: 1003385 - protein, 86 aa, Homo sapiens
MNFLQKSPGAQTGTVTMTPNASISGYTSCAILRVLANECGNRTKQSRYHLEICDEILQPVLSMFSSLFCKLSSFVLQEDSLKYILY

SEQ ID NO: 1003386 - protein, 81 aa, Homo sapiens
MLYMSAGVAYRWAVEAAHMHLGYKYLEYTYADSNNRYLWNIARCEIKALISIARRSVMMIIAIGSIYRAGVIITSGRRPMA

SEQ ID NO: 1003387 - protein, 37 aa, Homo sapiens
MTGGKSFNPGWKEITGDLQRDSSVERFSCSVVGLSTD

SEQ ID NO: 1003388 - protein, 47 aa, Homo sapiens
MTRSQAHLLLFWDAHHPHGLHALLEHVLVLRPGHVSTQGGLESWKAA

SEQ ID NO: 1003389 - protein, 35 aa, Homo sapiens
YSRSFDFMSGILNLKGPKVKGDVDISLPKLEGDLK

SEQ ID NO: 1003390 - protein, 56 aa, Homo sapiens
LRIPVTRRPEGGAVQLRVAKVTGGCGLQGSLRSESSGNHAVFTVLTSTSREETQEF

SEQ ID NO: 1003391 - protein, 68 aa, Homo sapiens
VKHSSSQSGVLTPAVFKIWTSGQVVGANSSSPFTSNVLQPIGMLRLQGHMYTYTHKPPRLRPRADVGV

SEQ ID NO: 1003392 - protein, 203 aa, Homo sapiens
STGLTCSEESTTVTSSQVHWNSTLPTRSELSSCWRTYNVTISSGSTETTALPGSNTTAGLSEISTNFYSSPRITGKKNLHLPARQAQGSVKKSTTSHSRPGSTHTNSIPWQYHHARRQSGIYSFPQQPRLHRHNTVPWQYHSIIPWSQNLLPSTAAQAPLKQHSYLTSPQPPASLKHLRPSTAALDRHTQHCPLPALQPVRGY

SEQ ID NO: 1003393 - protein, 85 aa, Homo sapiens
IPCISEDRGKERRSLRYRVILSGGLTPVSQGPERNSGVGSDQQVGYAGIIEGEPEPAFRRKLEVLWTGCSGLRWGGRLRSRNCPH

SEQ ID NO: 1003394 - protein, 87 aa, Homo sapiens
  misc_feature (21)..(21): Xaa can be any naturally occurring amino acid
SLHVVRTQREEDYDLLEALSXPDYDVILMCFSIDSPDSLEKIPEKWTQKSSISWSKRCPSSLVGEEEGIFWNDYAHKGGELSPMIEC

SEQ ID NO: 1003395 - protein, 35 aa, Homo sapiens
MACSEDSHEFKWVSFGSCSGPWRRYFWVYEVLARV

SEQ ID NO: 1003396 - protein, 209 aa, Homo sapiens
LPPIRRARPDPGLHPTPTSSHPTSLRLTGLHFVVKKGFRPGAVLTPVIQHFERLRRADHLSQEFETSLANMVKPPSPSWVSPPSSVPTMSCAGDLLAALIVLAVLEAILLLVLIFLRHGIRMAIALLKEASKPVGQHDVYHVHTHVVPFVLLLICIATWAMTALTWLIRGNPSMSLGIHISSPAGESAITPHAPQGHLVNPRASVVCVP

SEQ ID NO: 1003397 - protein, 62 aa, Homo sapiens
  misc_feature (25)..(25): Xaa can be any naturally occurring amino acid
LRGSRLFWTLTGYCAWAMRLAGALXPSTGLPQAPGHPNFPLILLHRTLRYHTWSLAFGALCL

SEQ ID NO: 1003398 - protein, 64 aa, Homo sapiens
YSRDPGSSGPYWVLALGNASRWSFASFYLGFHKPRTSLTSPLNSGSIRTLRYHTGSLAFGALVL

SEQ ID NO: 1003399 - protein, 42 aa, Homo sapiens
NVGRTDMGTHKSVTVDKRAHVSDACIILSNRSVRDNKQYYQR

SEQ ID NO: 1003400 - protein, 87 aa, Homo sapiens
MSLRERHQEVDFLVLVHRCSAVRCSELFDPLAEVGHPLDDGHAGSHRVVVQLRGKIPFTSSLISVRKSVGLLLLSFAHLDDICKEPT

SEQ ID NO: 1003401 - protein, 60 aa, Homo sapiens
  misc_feature (45)..(45): Xaa can be any naturally occurring amino acid
GHVIECIAGEWEVGNGMYKEEEMERKVDEGYGLGVQRLEGSGVLXRDLPEFFRINEVDLA

SEQ ID NO: 1003402 - protein, 69 aa, Homo sapiens
DDLEDPIARRTSSPVEVSQPTTAAELNSNNTLFCQFHNLGPVVRNQQQSTAAQVQLEQHSSLPALPGTH

SEQ ID NO: 1003403 - protein, 39 aa, Homo sapiens
MHFPESDTTSGRGEESTTSHSSTTHTISSASSTTSARNP

SEQ ID NO: 1003404 - protein, 35 aa, Homo sapiens
RPAATALEHLIRSTDRLRFPYYIVQHAEVSLGDCC

SEQ ID NO: 1003405 - protein, 66 aa, Homo sapiens
DSKRSRVVLAEQTRRTIRNSVTLPHPGMVFSMGEELPMHTMFLLNIVEDGLALDTTEQLADLWKET

SEQ ID NO: 1003406 - protein, 60 aa, Homo sapiens
MGTPQAGPCVWFASRGRCSAGTEGCVGLQTGALQARARHEAAVEHAGIVVVLRGHQCVAL

SEQ ID NO: 1003407 - protein, 36 aa, Homo sapiens
AGTDYAHRRVCSFSVLGSSSGFGGLSLGSPCRQERN

SEQ ID NO: 1003408 - protein, 44 aa, Homo sapiens
  misc_feature (8)..(8): Xaa can be any naturally occurring amino acid
  misc_feature (16)..(16): Xaa can be any naturally occurring amino acid
LYSTYLTXPYVPGDRXLTQHFYCTFTFFYWTTFYHTWGGLLYDV

SEQ ID NO: 1003409 - protein, 70 aa, Homo sapiens
HLGKGPVIMPLITPTVSLLTPKPLQQLEVPLISRETCNCLYNINAKPEEPHYMSKRTWWVLGYVEGGKDA

SEQ ID NO: 1003410 - protein, 51 aa, Homo sapiens
MSKVNYSIYPNYYRSPYYYTVKLQHHNLTVIAQTETYYPDYNRVLHTRSSA

SEQ ID NO: 1003411 - protein, 39 aa, Homo sapiens
  misc_feature (4)..(4): Xaa can be any naturally occurring amino acid
SSVXFFSIATGYLKAWCSDVVLVPYYSPELSVDLHVLLK

SEQ ID NO: 1003412 - protein, 79 aa, Homo sapiens
MPRTLAGATESDPSQKKKKFIWESREDPIIPKTILSKKTKAGGFRLPDFKLSYRATAAKIAGYGNSQNKGGPSKVDRRA

SEQ ID NO: 1003413 - protein, 44 aa, Homo sapiens
DLVAHDCITALPTHGALYAWELRARDDVLQVRVDGQVTFNGTYE

SEQ ID NO: 1003414 - protein, 63 aa, Homo sapiens
MAVIDSDLFTQRALMQVYKEINIVFMPANTTFIWQSMNQRMPPTFKSYHLRNTFHKAIAAIET

SEQ ID NO: 1003415 - protein, 43 aa, Homo sapiens
MQSRELDSLIRDQVACVSLFLPAPGSYEVDQIIWCVVKWLSKG

SEQ ID NO: 1003416 - protein, 92 aa, Homo sapiens
GCSVKLQCGLKWSKHPYDVTGCSWSKSNQDPLLYLVSQSILQDSYECEIRNPVSARRSEPVNLNLLPKLTRPYINIKKLNPSREYRDVFAFI

SEQ ID NO: 1003417 - protein, 161 aa, Homo sapiens
NRCGEGPDIEAPAPRVREGPPRALPPSRSSRAGMARLSGYVVGRLCAAGGLLLGTPGGIPGGDRTGRDGILRRGCEEVTVGMHALVVQAVDGIGGAEKEAAAPTGTGIRGGPGVGPLTAGGRPGGCMLDTGRRCGVGLWLLALWSQVSSTGGGTGVDTVLV

SEQ ID NO: 1003418 - protein, 160 aa, Homo sapiens
  misc_feature (151)..(151): Xaa can be any naturally occurring amino acid
TVYAQEVMCSIKPTDNQRPRALARAGVVVIAENERENDGEWGARSPGVAPTSWGKAGCVLGTLHNRPSAGPAFRGHCLMYGEAPWIVEADLASATLWRGLPSKAWGSSVGGPGAGGEIVPSLPFLVPFWYCWQKQLEGPAGGTGLMRVVTXTRRKETERL

SEQ ID NO: 1003419 - protein, 48 aa, Homo sapiens
GLSQKRHHAGFAAGSALKRAKKRESDICLKKLRMTQQLEEYAVAMVLL

SEQ ID NO: 1003420 - protein, 37 aa, Homo sapiens
AHGGHNGITRLFQVVFDVLLTVKLSPTPYFVSAGIVH

SEQ ID NO: 1003421 - protein, 55 aa, Homo sapiens
VRSYHKCSPQTPFLNSSLKLPIASLKSAMIKGCRETPYPSILTDATMEKLALAKF

SEQ ID NO: 1003422 - protein, 58 aa, Homo sapiens
MAVRCMSIPLKAMMSHTMIRLTTTVPGATGAQELLSGPASLMMRLRPEWAGSNFPWGR

SEQ ID NO: 1003423 - protein, 40 aa, Homo sapiens
TRIYRGDVSLHSSPTLPTTLYQSCDLSVGGPSLLTWGRAE

SEQ ID NO: 1003424 - protein, 53 aa, Homo sapiens
MPIPASWPGRTVVHSERFCPVPLGPSGFRRLSLEKPDFVVLLFTLSDGGIKKA

SEQ ID NO: 1003425 - protein, 32 aa, Homo sapiens
RTSYIDEAEAADYLWPGVRDQSRQHGETLSLQ

SEQ ID NO: 1003426 - protein, 64 aa, Homo sapiens
MDRDGVTPHHCLTKGTWPRAWEARSMGGPEHREGSPVSSTVVGLGPSYRTTDPSVEQAYTGYEE

SEQ ID NO: 1003427 - protein, 48 aa, Homo sapiens
MGFTAGASIAGLWDPVTQLEAWVLLRRVKDPALAPPPGDAESLGAGRG

SEQ ID NO: 1003428 - protein, 67 aa, Homo sapiens
RQYFDEANEICPYFEIAAGDTLSADIRDLLVNEVVITPLNRYMIQYKSMVDVQQCQMISIYVGKSHL

SEQ ID NO: 1003429 - protein, 77 aa, Homo sapiens
LETHTLVPARLEISTLSGSNTKTQDSVRDLHLLQQAQINNHNTLTCQLDKPEEEVKESTSSRRQACVLLTQTVSPWA

SEQ ID NO: 1003430 - protein, 79 aa, Homo sapiens
QNYAGVRARNVGPSELSAPGIDMILKVIVIGCCAGLQRHRLGFLGAVLGLGGHGAGLEQEVFVAISASSLDDLFAFLGS

SEQ ID NO: 1003431 - protein, 62 aa, Homo sapiens
HCTLPLNSASTLLKVAACHTSTPGERSTPLTNILVEHHADWPHSEASTLSTTPVDTSRPVTT

SEQ ID NO: 1003432 - protein, 32 aa, Homo sapiens
ELTSSKKYWDYRKKDYFGPGTVAHTIIPALWE

SEQ ID NO: 1003433 - protein, 64 aa, Homo sapiens
AFREWPTSIKTSEPSLRSPSPELPYPIISKYDECKLLNDPINTVLSISTLIQAINCFHLYHCNV

SEQ ID NO: 1003434 - protein, 74 aa, Homo sapiens
  misc_feature (64)..(64): Xaa can be any naturally occurring amino acid
VGTGKTVSKLLFVMHRCVELRARSGRLARRSKRKLRNRTCISVIDRWRVSCIQFMEYFNMGIAXRRHPGEQSTG

SEQ ID NO: 1003435 - protein, 80 aa, Homo sapiens
MELVPATGYLRSLHAVHVSRAYDEATGTSILRIWTDKRDLEMWAQLEADPARPARLPLFHRSKRLHAIRHRSRPATRAAA

SEQ ID NO: 1003436 - protein, 51 aa, Homo sapiens
VVWYSAPTHTPVITQTVLTVLIYGLTPVLDTAFMGATWETGDQFDCPTLLT

SEQ ID NO: 1003437 - protein, 40 aa, Homo sapiens
  misc_feature (26)..(26): Xaa can be any naturally occurring amino acid
LDDSRVGARTVDVTCTLFLRRTTTDXGLNGHGTTATTAPT

SEQ ID NO: 1003438 - protein, 59 aa, Homo sapiens
TAGLLYDGLPVRSGLVGRYLALVGCYCALVGALALCGRYWPWWALLCLGWALLALSGLH

SEQ ID NO: 1003439 - protein, 48 aa, Homo sapiens
LLSWWALLALVGVWPWMGAMALVGALALVGAMALVGSTGLRWALLALG

SEQ ID NO: 1003440 - protein, 53 aa, Homo sapiens
MDPQTTLADRLQSWEGVLQLPWHSSPLLAEAVITAGNWSCIVQAPMCNANRDN

SEQ ID NO: 1003441 - protein, 45 aa, Homo sapiens
DERIGYEVETVPVCSQATAAQYPGMRAMWSFCVVRSDEGEIMVEM

SEQ ID NO: 1003442 - protein, 39 aa, Homo sapiens
VGILFSPLCTVLTPLDTVGVLGPALAFVLLVLAVSCVPF

SEQ ID NO: 1003443 - protein, 56 aa, Homo sapiens
SVVRFPQSNPHFPIQHFSHGVQAASCHSNQFKHSQWLLLTPFQWPEPVGSCSTVFR

SEQ ID NO: 1003444 - protein, 49 aa, Homo sapiens
SSQQGHGRVVRHRVAAATQAPAPACGITHPVHRHRASICQHLRAKHRQS

SEQ ID NO: 1003445 - protein, 70 aa, Homo sapiens
VLEVSISSTTHRYRSAPSTTSALVEEPTSYYSSPGSMAATHFPESSTTSGRSEESTASPGSKVLWKLLKV

SEQ ID NO: 1003446 - protein, 60 aa, Homo sapiens
QIESSRYPEFRSLTSRHLFHHFFGLVCRPRRSCFAGVIAWGFLDTGLVLVDILLMGWFDD

SEQ ID NO: 1003447 - protein, 41 aa, Homo sapiens
MRWLLVCAVLSLKLRGILPYVADTGIPMLCASCADSELVFT

SEQ ID NO: 1003448 - protein, 35 aa, Homo sapiens
MAHPNPRKRQRRSHAHNRPRTYILITILLWKLLKL

SEQ ID NO: 1003449 - protein, 41 aa, Homo sapiens
MIWGSRLQVRPVPIAVPHSVAFTNAHPCTTQWRHLLQTFDS

SEQ ID NO: 1003450 - protein, 52 aa, Homo sapiens
PEASNDSLWGGEQHHQPTRFDVGLVYGQQWNMEAAGVSSRHTYTAIETSKTR

SEQ ID NO: 1003451 - protein, 50 aa, Homo sapiens
  misc_feature (42)..(42): Xaa can be any naturally occurring amino acid
FSASFNQPHAAVGQGVHLNTPSFTPVSHSTGFNRVHAVGGIXLSSRTCQA

SEQ ID NO: 1003452 - protein, 86 aa, Homo sapiens
  misc_feature (58)..(58): Xaa can be any naturally occurring amino acid
MHRIHQARSAEQQQFGIATWQHLQVSIHAMHHSPSPHMQGRGHHLHFQRTCGHHSQGXTFNPPVNTHCSRFHHKRILNMRPNGTAQ

SEQ ID NO: 1003453 - protein, 33 aa, Homo sapiens
QVGLVGMSPDRSTPLSLLYACTLPSSFAQEAFS

SEQ ID NO: 1003454 - protein, 94 aa, Homo sapiens
MISGVQGPSYNCNTDRRQPKDLRLSVWTKRLQPVSDHEVIRPQTADLLCEYNQKVLALIPMSRGNARAWTGQDGRVARSWAPANDVLGAKAWTS

SEQ ID NO: 1003455 - protein, 58 aa, Homo sapiens
VTTHSKSRKTPRADRICVPKIYVDGSPDTTVDQPLKICQRQGGGKGLPVCVTTNRRWG

SEQ ID NO: 1003456 - protein, 92 aa, Homo sapiens
MGDGVVDSPRRTEVVERAGRTIVPVASWLLWDAVDSSLRPEVVDAVSDTCVVAVDARAAVVRWYGSSTRADCGARTLTDIVCVVLLLKPSKT

SEQ ID NO: 1003457 - protein, 38 aa, Homo sapiens
LMQWRFPNQAASQPGLLPPMGCVIQIHWVTNFLFNTSG

SEQ ID NO: 1003458 - protein, 66 aa, Homo sapiens
MLKTNERHILKGDLRVYESHLRESCYETPIGRGPKVESQIIPQRALAQKPMEGDESPPNPVLFQGQ

SEQ ID NO: 1003459 - protein, 44 aa, Homo sapiens
  misc_feature (38)..(39): Xaa can be any naturally occurring amino acid
SSPSGVIIHRMQATQRSKPATPGHITSLISHTPQSALXXSPYTP

SEQ ID NO: 1003460 - protein, 37 aa, Homo sapiens
RIETTEGIVGTQLEGSRSEVPKVTRARWFTPGIPRTL

SEQ ID NO: 1003461 - protein, 63 aa, Homo sapiens
SPIKPAVTVKLEREELAEASCGGCRQPPQDEEEDFGKEAEEEAKAEPPITSGFSVPFSRLAGA

SEQ ID NO: 1003462 - protein, 122 aa, Homo sapiens
PALFQQHRHAGTIQAVGNTTPIATNIQHTPVAMHSTQHQAPFHNQHHTLSIIFLHSNTTTVSSRPLNHQHTMASAPQPCISSSTAGKPAHSIQSHQAITPAAQHTGSISNFSTCTQQSSSFH

SEQ ID NO: 1003463 - protein, 48 aa, Homo sapiens
MLPAGGRLKSLANCGRHQHAKTGGAVDRLTDTSRYTVLPQASASMSSG

SEQ ID NO: 1003464 - protein, 89 aa, Homo sapiens
  misc_feature (89)..(89): Xaa can be any naturally occurring amino acid
GPLWGGHNPSMVPAAAWSGFSFGRPGLGHISSSCSICNAAGISLGVPPITSCQTHSKHISLCAHEVHARAQRLSQHMACSWHHFSQTQX

SEQ ID NO: 1003465 - protein, 75 aa, Homo sapiens
NPGPFVWVGKDSQEEEKTEALLLLNRYIETDPPMGSADAPHRVKQGSKPPSFVGWFLSWDDDYWSVDPLDAAMAD

SEQ ID NO: 1003466 - protein, 41 aa, Homo sapiens
  misc_feature (39)..(39): Xaa can be any naturally occurring amino acid
NPGLLCHCLLSSSLLFFFNLFRISVEVQIRHDLPKVVPXLG

SEQ ID NO: 1003467 - protein, 46 aa, Homo sapiens
MVPFHQHSNRSSAVIIRAGRFSHSTLNTQVPWAHPVASNTHMQHTT

SEQ ID NO: 1003468 - protein, 32 aa, Homo sapiens
  misc_feature (3)..(3): Xaa can be any naturally occurring amino acid
FHXRTTLPHSDFTTYHTHDHFTSRTTTTHLRT

SEQ ID NO: 1003469 - protein, 49 aa, Homo sapiens
HPYGKSVERGGETGEPKASPADYQMKPLVYQVNVSTPLVIAHDKRSFPI

SEQ ID NO: 1003470 - protein, 59 aa, Homo sapiens
MGGGCKAASLGAGAEGYNQIEPGGPGKLRGSMRDLSGPLQPKLEDPFLVRDCMEISKTR

SEQ ID NO: 1003471 - protein, 41 aa, Homo sapiens
AYICSRCITLRCAPVKFRRHVSTCVTSKYVKLELVELENPP

SEQ ID NO: 1003472 - protein, 79 aa, Homo sapiens
  misc_feature (47)..(47): Xaa can be any naturally occurring amino acid
LLSTIRSNSHHCLASLCGEEVVVVVPLENYPHCPRTKAVPGLTRRPXFGTRANSTPSKHGHSRAPLRIHVQLQLGLQSV

SEQ ID NO: 1003473 - protein, 132 aa, Homo sapiens
IPNPARLCVLNGIIHPSLILLSGRKLIHPSLICVWKEVIRPSLICVLQDVTRPFLICVLQEASTLSLICVWKEVIHPSLICVRKEVIHPFLICVLQEVIRPVLICVLKEVIRPSLICVLQEVIQPCLICFLR

SEQ ID NO: 1003474 - protein, 41 aa, Homo sapiens
CRYPEELFIGLHDIGHGSFGAVYFATSAHTNEVVAIKKMSY

SEQ ID NO: 1003475 - protein, 59 aa, Homo sapiens
HLVGHGTNLIGIISPGSSGTIVSLLLRWLGQEAEVRNQRWEDQCGPRRSTEGRGNPTGP

SEQ ID NO: 1003476 - protein, 32 aa, Homo sapiens
  misc_feature (10)..(10): Xaa can be any naturally occurring amino acid
MITEPKGHWXMLFLAGNQDKRKEVLKSLNEEA

SEQ ID NO: 1003477 - protein, 41 aa, Homo sapiens
MTVHRHSNHLDKDGLITSAPELAWFFILTLALAEKTTIMQS

SEQ ID NO: 1003478 - protein, 67 aa, Homo sapiens
TRRAPLQDHIPIHSHVYSAGIVVVAPNWALGFQLSAHSDEPFIHINHITFILLETKSFSGSGWRAAA

SEQ ID NO: 1003479 - protein, 45 aa, Homo sapiens
IEICSLSEHRSPPVDSTVTLETYKLNPEETADVDILTLNLIYNLD

SEQ ID NO: 1003480 - protein, 76 aa, Homo sapiens
MDWLAGQEFQGTFITVSLATEDLHSYTAVDVEVGGAAVAAIAVVAAFKGRRDDPKRGGWGWPYSVLRKYDLGRNGH

SEQ ID NO: 1003481 - protein, 113 aa, Homo sapiens
YQGHKNAHGRICSSGVGSGWSLSTVIWMVAGTYPLPSLPIWTGSVVRRASLILGLLGLELLELRKTPGLRHPQLTRHGTVLGTAWLAVLSLWRAILAPADLGTGDAPNLCVAE

SEQ ID NO: 1003482 - protein, 93 aa, Homo sapiens
VPRGSIEVTVLKKALDEETRSHEAQVQEMRQKHCTWLVELSSQEHAWSMFNDGPMAEPYDNELMHDCFVRNDELHDSVPVGACVVSGAMCQCS

SEQ ID NO: 1003483 - protein, 168 aa, Homo sapiens
MGALYTREQFPRLNMDFPVSHSSLQYKTVSTSTLNKYHPAFCGRSTGFLTAATDLTSTFTVSSSSAMSTSVTPSAPSIQNKEISTLVSTTTTTSPTERMTLTSTENTPTSYILTTCPVTYSFSPSTSASSDWTTDTESISSAPAITSTLHTTAESTLAPTTTNSFTTS

SEQ ID NO: 1003484 - protein, 40 aa, Homo sapiens
KNQNGGNPAVYYVESTLTVAALEPNIYIHKARHRANAPAE

SEQ ID NO: 1003485 - protein, 87 aa, Homo sapiens
  misc_feature (81)..(81): Xaa can be any naturally occurring amino acid
ISHVIRMRNSIAIGTGTHASDLLRMCVWRGFAWVAVIIVRIVLIIYFLEALLQVTDSSRPEFDASSFGHPNRGCSDFSNPXQDLLLG

SEQ ID NO: 1003486 - protein, 80 aa, Homo sapiens
  misc_feature (1)..(1): Xaa can be any naturally occurring amino acid
XRSMWSCTEVSFSHFALLLGRRLCRMPCQPGFLAYSFYAPRCLQLSIGMSLAVPASLGPLIPWTGCHVHAVRLAFLPMAS

SEQ ID NO: 1003487 - protein, 56 aa, Homo sapiens
EDGDVGHGQSMQCRKNLVGDRSSTSCVRVDGEAVGNDTCEEKAEVDVRAGEGYGEV

SEQ ID NO: 1003488 - protein, 45 aa, Homo sapiens
MILEQEGCQGGDPELDLGEKGGVEKIGKLERKFSCESKQYPQWQW

SEQ ID NO: 1003489 - protein, 40 aa, Homo sapiens
PSSASGPIYAEDGDREINQPIIYSIFRGNVNGTFIIHPDS

SEQ ID NO: 1003490 - protein, 69 aa, Homo sapiens
LEHTNSEGQNLGPQAIPQDGSITHQISSAVILQISGPGFVNRFTAIKQYDRVAPARPNMLLQHARMKLS

SEQ ID NO: 1003491 - protein, 50 aa, Homo sapiens
LVTSGTPPRTRMSPALPCEIVASGVPLQQSACRLPLPCEKVTSRVPPPHS

SEQ ID NO: 1003492 - protein, 45 aa, Homo sapiens
YPRLCLRYWLCAMPAVVEHLLQRVGGEMSPYAGPSRKAACWAVEG

SEQ ID NO: 1003493 - protein, 45 aa, Homo sapiens
CVYWTYCTVSGVSDEGGSGGGGGGKVREEACPIGGSHMSYLATTS

SEQ ID NO: 1003494 - protein, 95 aa, Homo sapiens
TEDLHVSTRDSSPSPPSYKAGKGLPIVGSVIQVSFLESYGEATAAEQHITNMMELEKVKCSCQVVVARKVREVAEPPHPVLWPERHACINSVMLG

SEQ ID NO: 1003495 - protein, 78 aa, Homo sapiens
RCGGSIVSAPAPQCRSPEGLGLKENQLEDNLYLAVLRASEGTHDERDRGQKPYFAILLNVVGGGAPEARHLLLSRSLV

SEQ ID NO: 1003496 - protein, 44 aa, Homo sapiens
MGSSRVTCSRVLPSLKCKDIDAVQSDPDGFMGSLAVTKNDGHYR

SEQ ID NO: 1003497 - protein, 50 aa, Homo sapiens
GSRQRQLAISSEIRGGAGIGAEAAHSWPVAARKKLEGELEELKGSVCASA

SEQ ID NO: 1003498 - protein, 72 aa, Homo sapiens
MLPRASLCPWTSPKAVLSPDFLQRTLYSAPSLPGLAGNLLSPASRSRPRRHLLSPASRHEDSCRHEDEADIE

SEQ ID NO: 1003499 - protein, 123 aa, Homo sapiens
AWHSSRGDKSETPSQTNKQPNKLKTNRSLTLGNGSRGMAWCGFLQPTIMTATNYFRDYTVYLPVFSSPYYTYHVYYRDYVLYSLRYTTTLPAQQQTTPSAYWGLSSYGDDDTRTGSTPGRDAQ

SEQ ID NO: 1003500 - protein, 101 aa, Homo sapiens
CMLSEELKTPCGGGEEALWILVLGRSAYSTTNSTSVEGAFWTPTGSSREATASGNIPMCSTWKVRAGSDKIGEVSITWVWGRSSSFEIQPLLPKENDIDLI

SEQ ID NO: 1003501 - protein, 98 aa, Homo sapiens
SLQLMTFEEEQAGQGSVYLESHQEPLINLQVGTKHELITFYVNSGVARSSICFPPSNIACSSEELLVSGVKGEGFKAKILESTEVKYQDRLTHIQFLL

SEQ ID NO: 1003502 - protein, 46 aa, Homo sapiens
ARYADTSTVAEYDHNPILRPGVLNPSDLSSPPLPLITVVNTPLLTY

SEQ ID NO: 1003503 - protein, 33 aa, Homo sapiens
DYRHDHRRWRDDPVVISKHAGQSLTDSLFYYCF

SEQ ID NO: 1003504 - protein, 123 aa, Homo sapiens
AHYRQAVVEGIVHPSSQGALVSLDTTLTPGQLHKLLAFREESTTFQSWPSSSDTTPSPPGTTAAPVEVSTTYHSRPSSTPTTHYFCQYHNLWAVVRTSTTVHSSPGATENSTTSLTRYCNLQF

SEQ ID NO: 1003505 - protein, 61 aa, Homo sapiens
DASEDPDEVMETCSHLPGNHGLGPRPREGAFDAMDGTRRRVPPSVHDGCLSLLAVQDGLCA

SEQ ID NO: 1003506 - protein, 39 aa, Homo sapiens
VIESATKERSKLQSYTNSSGGQVLWLMPVIPALWEVKAG

SEQ ID NO: 1003507 - protein, 35 aa, Homo sapiens
MLMGPFTTTNRERGQVHRFTRAMLIHASTTVNREH

SEQ ID NO: 1003508 - protein, 39 aa, Homo sapiens
GSELHSIGRSAARRTLLHADAVRLLPERVRISPDRSTST

SEQ ID NO: 1003509 - protein, 58 aa, Homo sapiens
  misc_feature (21)..(21): Xaa can be any naturally occurring amino acid
MPSPSVSRSSCRCRRIQSRTXRCRSSAFRPSTLGSRSFCTSATVNGSTASVRRFMNVG

SEQ ID NO: 1003510 - protein, 109 aa, Homo sapiens
MPLGGGASFTYVFSLISLGIDDLENKSKDSLVDLIGICKSYEDATKITVRSNNREVAKRNIYLMDTSGKVVTATLWGEDADKFDGSRQPVLAIKGARVSDFGGRSLSVL

SEQ ID NO: 1003511 - protein, 40 aa, Homo sapiens
PNDASSKSTGITGISHCAQPCSIISNNKQLEKLNTAYTFF

SEQ ID NO: 1003512 - protein, 69 aa, Homo sapiens
ALVSSSRSRMSPAYSCEMVGPWFLSSTRCRLTLHVKWWRPRFLSSIRMSPDSSCEMVKSGGPLQDSHFA

SEQ ID NO: 1003513 - protein, 55 aa, Homo sapiens
FQTRIRCSSCNVGQVLLSTRMSLPLHVKCGVGYLSSTRMSPALHVKWWRLVNPPA

SEQ ID NO: 1003514 - protein, 122 aa, Homo sapiens
PETYLPFMRMHTDSPLVKAFLPRTIPPSPLQLVLKQRRLWYPIGHLPMPRDIYGMPHWLLVSRGQKPRMLINILQCTGQASTTPAETSQCQAEKTCSKGEAPSPSSFPAPTVLARISIIAFR

SEQ ID NO: 1003515 - protein, 45 aa, Homo sapiens
MVGSGVPLQDSHFDCVFHVKWWRPGVLSRTRLSPGLSCENGGTPG

SEQ ID NO: 1003516 - protein, 92 aa, Homo sapiens
DLDHPYHVHVSSRSSQTVSTSRLPLGRTRADSELKENYSVLQISGAPEKQIVFPGPIWTVYRRVSAQGGGRLRNKPKNIEGAGRPFPKWDVD

SEQ ID NO: 1003517 - protein, 35 aa, Homo sapiens
FFEISSETEAITSECFKFENQLFLLDAVVQCCNPS

SEQ ID NO: 1003518 - protein, 45 aa, Homo sapiens
PLSRLSWASPAQLDLPQVLVDVSLLRVAAGADVLVGHEALLPITD

SEQ ID NO: 1003519 - protein, 57 aa, Homo sapiens
SRLIEKSDDQAQLVGEMLRIFHALKEALIIIGDISTSTVSTPVPPPVDDTWLQSASR

SEQ ID NO: 1003520 - protein, 43 aa, Homo sapiens
EPSTRAEAAKESRGAHASEDYKVRIDEYEDSKPIQGPQKKPFE

SEQ ID NO: 1003521 - protein, 34 aa, Homo sapiens
ADSQTGHVVLVPQDSQRLNISNQLVLSEAASAPM

SEQ ID NO: 1003522 - protein, 105 aa, Homo sapiens
STSPAHKNFHTPEPQQPGLPREPRPPGACYKCQKSDHQAKECLQPRIPPKPCSICAGPHWKLDCSTHLAATPRAPGTLAQGSLTDSFSAERLKTDACRSPRKPRR

SEQ ID NO: 1003523 - protein, 60 aa, Homo sapiens
VDIQNSGGTSTEAVHLLQLLKYQHANLNSWRKKHSINKYACQTHASGQFEASTLSTSPVD

SEQ ID NO: 1003524 - protein, 49 aa, Homo sapiens
ILSDQVGQVLTCSLKTGLTCKNDDQTGRCNTVLQRTIVRCAFASERTTC

SEQ ID NO: 1003525 - protein, 66 aa, Homo sapiens
VLPVRIYHEDLASQALRRSTRCKVDSYWIVVVRQGTTILPASFPAKINLLLGQEGIAFLCLGYFAL

SEQ ID NO: 1003526 - protein, 38 aa, Homo sapiens
  misc_feature (1)..(1): Xaa can be any naturally occurring amino acid
XVHCSGPLVRCVVVLHTALHVASPRPATGRNYVGSTLC

SEQ ID NO: 1003527 - protein, 69 aa, Homo sapiens
SLITVQGSASAVSPETLVARIWAAIWASTGGAPRSLTTLKLQVTSDNPENFPCNPQGAGQSKSSLHIRL

SEQ ID NO: 1003528 - protein, 41 aa, Homo sapiens
IHYIEEAGDMRVLERNPVYATISHVKMQCDMLSAEEERLTP

SEQ ID NO: 1003529 - protein, 48 aa, Homo sapiens
TYQPAASETCCREGGCWLGVRTVLSGTSCGSHLDLTCPPASVLGISLA

SEQ ID NO: 1003530 - protein, 44 aa, Homo sapiens
SPHGTMLTALNHCKFLGEGYRIAEVQKNYFGLLHVNIQRKRFYS

SEQ ID NO: 1003531 - protein, 66 aa, Homo sapiens
  misc_feature (2)..(2): Xaa can be any naturally occurring amino acid
VXTAVISPASRSPAYLCTLQSGAHRSFILSVTRQATSGKPAPAWTRIYKHVVLITAEASFAATTRW

SEQ ID NO: 1003532 - protein, 54 aa, Homo sapiens
EITTFQQSGHWNTLLTCRSAPLASLESHTLTPQSKLNRNNNFTRQSHNAKHQLR

SEQ ID NO: 1003533 - protein, 87 aa, Homo sapiens
LSGCLTLSCNSIHRILLIILLKGCDIFRGLCTVAFLRPLFRFAVNNGLLGVHQVVLVFQASPGLRNGCPVALHALGSLYLAQVSIRH

SEQ ID NO: 1003534 - protein, 45 aa, Homo sapiens
LPLHMEDGAGGLLSQEFDTSQPNTQGSAGLDVTAGNHSQMSRYGG

SEQ ID NO: 1003535 - protein, 72 aa, Homo sapiens
RAALRVPRFAFRRLCFAHMPLPVLRSMQSTCVYVVFMYVSSLSPPDFCFELPSFCYLYFLKTCYSDRYFCYF

SEQ ID NO: 1003536 - protein, 59 aa, Homo sapiens
  misc_feature (51)..(51): Xaa can be any naturally occurring amino acid
MVAGDYPCPFLRIPWLSSPSLSTDCCDRSKLSTLPSRALILLAPLEKIFSXAASYRISL

SEQ ID NO: 1003537 - protein, 68 aa, Homo sapiens
MYLEDQTLHVLSVILFRKSDLPWFTFCLEKAQLNSSQKESATIVTLNRYWKKIFHSKLTNGLDLLVLF

SEQ ID NO: 1003538 - protein, 82 aa, Homo sapiens
AAAARPWLLAFVLGGNDWRCMPLTRTRRGDNALPVTTDNRLNASFPVILALFGRKGALPLLFHEVAAERNDCNLTSRSIGFC

SEQ ID NO: 1003539 - protein, 57 aa, Homo sapiens
GSAMNVKVSYRDHGLSPPPPGATASTLKVLTSTATDTHSHQLQSHSLLQSRDCNRPS

SEQ ID NO: 1003540 - protein, 71 aa, Homo sapiens
PPETHCSCVGSRAEIGVRGPFHGPTGPIVSGPWLFGLWALMGPGAGCVTGLGIPGACSENMAVPWRETPPN

SEQ ID NO: 1003541 - protein, 61 aa, Homo sapiens
MASFAGFSAPLCFVALWVSSCSYAPPCGLQPWLQVPGDLMTGVFKSTLSLRAGVTLGKLFN

SEQ ID NO: 1003542 - protein, 52 aa, Homo sapiens
GRRLWRSVMGQTCVGREPVVGSCGVVGGCGVVGGMQGTHTALLVVESFSSLF

SEQ ID NO: 1003543 - protein, 54 aa, Homo sapiens
MLWQGGKVWLLMTLHLRSAQERRKALRLQGSVTKLTSPHSGLSFHEFRNSSSLD

SEQ ID NO: 1003544 - protein, 91 aa, Homo sapiens
PSLLLVLLVLLVLPGGQGIAGSVVWSACLVREEREASLGLPGPYLVNLGKQGSLLRRVGGHGCPPWVPIGPPPWIWAWDPPLVEFLDVEGG

SEQ ID NO: 1003545 - protein, 76 aa, Homo sapiens
CLVGEEREASLGLPVPSGEPCELGPSGARRERAPPCPMCPPGLAGSPGESRREVARGAEGSPGRDGSPGAEGDRGE

SEQ ID NO: 1003546 - protein, 52 aa, Homo sapiens
APWCLRLASFDTLRWPAGAGVFSTKSLMAESWVEPCWTSIMWLRGSYFDWNI

SEQ ID NO: 1003547 - protein, 66 aa, Homo sapiens
SCNVRQDLSASHVAASSMWMVASGSLQHSHVTSLFHVTCWRLRFLSSTRMSPAFSCEMVASEIHPQ

SEQ ID NO: 1003548 - protein, 74 aa, Homo sapiens
VLRRPPGPPPTLPLTDGRRPCDAPETEPRTAATFPLERRHGDHCDDADGRTPMDRHLLSHWNDGSGDNCDVLTG

SEQ ID NO: 1003549 - protein, 50 aa, Homo sapiens
HAALHVNVRRGSPQHRMSLLFHVDVHQVLLSTRMCLPLHVKWWRQGFLLR

SEQ ID NO: 1003550 - protein, 35 aa, Homo sapiens
  misc_feature (31)..(31): Xaa can be any naturally occurring amino acid
QVMWVRFSSASHVAALHVNGGSRFPSALACXPALH

SEQ ID NO: 1003551 - protein, 44 aa, Homo sapiens
GVLSLSELLVSYTHPLFQSLDTLSSGVGTDALGLRCSSGRVAEA

SEQ ID NO: 1003552 - protein, 41 aa, Homo sapiens
TELPLHVNLGIGSLSTRMSPALHVKWWRQWNPPPHWEPPPD

SEQ ID NO: 1003553 - protein, 32 aa, Homo sapiens
MVGVSVPLRALACRLPLPCEMVASTGSSSALA

SEQ ID NO: 1003554 - protein, 38 aa, Homo sapiens
MVASGSPQHSHVAALHVNGGVRVLSSTRMSPALPCEMV

SEQ ID NO: 1003555 - protein, 108 aa, Homo sapiens
MAIESNFRMIQYFNKAYVDDKVCLEVAGLVKETKVHSFLFLENKSNYRYLEHPVLICSFIIVFYVDTFEHSPAFILSLQERLGEGGHLFFGAGNRKYHGSTSSKENIG

SEQ ID NO: 1003556 - protein, 99 aa, Homo sapiens
VVESGNPASCFSSSRTRTYCAGVLQQTLVFLADLASPRDDTCQLERRLHLYVVSRHGLGVLTTGQRGPENSFMVFFCRVSPSALDSQGSPRPSYSLLHS

SEQ ID NO: 1003557 - protein, 76 aa, Homo sapiens
HKPHTLVNNLQPSTASPVRTENTLLPDDRITSGLVEASTPIHSSTGSLHTTLTPCQLHKRWLQAEIYYLPELAKFK

SEQ ID NO: 1003558 - protein, 55 aa, Homo sapiens
LPAAVPDASGTTTSSSHSKNSGRGESTHSRISPGSTEYNNVNGSNTTPGLREAYT

SEQ ID NO: 1003559 - protein, 33 aa, Homo sapiens
EASLVSLPEAKGEGVGTEEIPDIILALLTGVLP

SEQ ID NO: 1003560 - protein, 63 aa, Homo sapiens
GLVGLEKLVVEVLAGERSYSYTLDRRPVLLYRGWSSSSTERAASGGTHMELVREEGDTRLASC

SEQ ID NO: 1003561 - protein, 46 aa, Homo sapiens
MAAFGLFPALASALNSHPACTWLVEPSTWRPGHVSGPALASSPQIL

SEQ ID NO: 1003562 - protein, 33 aa, Homo sapiens
SSSQPRAYWRCSGLRCVTDRLASSMGNYKSRGS

SEQ ID NO: 1003563 - protein, 34 aa, Homo sapiens
VTQSSHLHEDRTARVRPAQFDLKRYETTRKKRHP

SEQ ID NO: 1003564 - protein, 72 aa, Homo sapiens
LTRPGVVVLPGNVVISVEPGVMHDVVDSPRRCGCVVCGYRVLRPFAFGLLWTIVDSSLWPEVVELAGKCVVG

SEQ ID NO: 1003565 - protein, 34 aa, Homo sapiens
MQIPSADSRRGTTITLNHEVISLLDLTDPAYHLE

SEQ ID NO: 1003566 - protein, 110 aa, Homo sapiens
MSLSPRPAPHDSSPRPCTTPAATLSPQLLRASPTLRTVALDSLPVSRRSFLASFEALLKCHQFPYLKCTPSGQAQWLTPVIPALWEAEAGGSRSQEIETILANMAKLHLH

SEQ ID NO: 1003567 - protein, 98 aa, Homo sapiens
MVDELQGPFSYDFSYWARSGEKITVTPSSKELLFYAPSNGKPVVQWRTAAQGKADRESTGKAGLVFEEGPDSNPEVGKEFEICHSGEQGSAQICESGY

SEQ ID NO: 1003568 - protein, 61 aa, Homo sapiens
EDIAELTCLTRSLGACTTSMERYYSGLIYTYSGLFCVVLTVRGHLVPLLALVLFHNLFRVD

SEQ ID NO: 1003569 - protein, 88 aa, Homo sapiens
SQCEGLIAHPQLLSLQAQHGRYGPYQTWVSSYCRSLMVLFFDSMNILQLAGTPASGLQGPWSEASSDPRRTAPPSSPQRCSEPCRLRF

SEQ ID NO: 1003570 - protein, 78 aa, Homo sapiens
TVGRECAPRGDERPPSMFPSSSPDPSSQMCCRAELLLARLSAYLPMTLKCSYVLFPYDKHRDTCTPREIEVCLPAALS

SEQ ID NO: 1003571 - protein, 56 aa, Homo sapiens
YVLPGRASSPIPKRCPYMAQPVCYGALPDLRSCSYLQVLDWCCSSNSLNIPPALRD

SEQ ID NO: 1003572 - protein, 52 aa, Homo sapiens
HLDNINTIDAPGLGGGVCHIERTGVMMGENVAAYHHGFRLAHGATVKHGDAQ

SEQ ID NO: 1003573 - protein, 34 aa, Homo sapiens
THRSYLTEDKYVNINGASVSRMTFPILVPCCQMV

SEQ ID NO: 1003574 - protein, 68 aa, Homo sapiens
LADLMQERTVASAYGINGCALTAVPGRCRCVGQCSHCFHMHCILKWLHAQQVQQQCPMCRQGMASSTE

SEQ ID NO: 1003575 - protein, 46 aa, Homo sapiens
PVNFSKFQSASMHGQGKSGNIITAQQPSSNGSEFHQPSQHPSMEVF

SEQ ID NO: 1003576 - protein, 80 aa, Homo sapiens
GGRGRQIEEVNRSRSSGQHGEQPISTKTLHTNELGVVACALQSLANSGGCGRKHGLRPGGGRLQGTQDRADCDLQFDAES

SEQ ID NO: 1003577 - protein, 41 aa, Homo sapiens
MTTLEVIPLGLQQADVSKCGVTEKTLLVLRSKLTVVGDGVS

SEQ ID NO: 1003578 - protein, 186 aa, Homo sapiens
RIELGPRSVESLNSKDSASYRGSLLQWRLRVTMMPDQRSEEKAVRMHFHKLPSLLSYDDVNMRIAAGESWALLFEWARGIESDFFYEDMESLTQMLRAWATDGNKHRAKVDKRKQRSVFRDVLRAVEERDFPTETIKLGPERMYMDGWVKKHTYDTFKEATDIGRRSDQVNAFELVDRRSGRQLEL

SEQ ID NO: 1003579 - protein, 44 aa, Homo sapiens
WVRMAVCYEGYVAGWRVCNELILGLYVEAPIAGSIVLAIETSKT

SEQ ID NO: 1003580 - protein, 30 aa, Homo sapiens
MKETVDMLSHISYFCRCLSEQRSFHVPRLK

SEQ ID NO: 1003581 - protein, 91 aa, Homo sapiens
MIRIELVPIGFKVYVVERIRSQVHNDGSLISGGSKLITPCFYGCPPTFKTHRQSGRVSCEGSVNLITSNTIFMETVFFWKTFKSQFYWVIK

SEQ ID NO: 1003582 - protein, 43 aa, Homo sapiens
MHVPGCIMCTEMQEFLDFIAQEVKVSQKKLCLIANAIDYQADS

SEQ ID NO: 1003583 - protein, 94 aa, Homo sapiens
LTLEELMGACMCPGQPFSPHLQQDTESPPSPGRHPGHTRGTSRTHSHMHTQQDPHLEPAAQQPHIGPHNHGGDHGPVKPQVCLSQQWPGLTANP

SEQ ID NO: 1003584 - protein, 56 aa, Homo sapiens
MASGGNRLRWVGMRDSHSIPGPVAQKLDPSSPDFWIAGLGQVGPVSLSFTYLVSRM

SEQ ID NO: 1003585 - protein, 142 aa, Homo sapiens
RRTGRQIYAREISSLVDNKELRTGAGGQWVPDGAHSSLLPQSPTGLDGEQLVVLTTRPSQAHRRMSLSLALINRAKKVAVLVMGRMKRENHHTLVSRVCMSPRSWPISGVLPHSGQLVWYMDYDAFLGGGRLCPFAGFAPVL

SEQ ID NO: 1003586 - protein, 38 aa, Homo sapiens
MIRIEPGTASCKKFNSNLRSLQIDFHEDIWCFRIKTVP

SEQ ID NO: 1003587 - protein, 44 aa, Homo sapiens
RFSPHTCLNTAQEPTGQLGQPSSHHGVPCAASPQSPTLSLRSFW

SEQ ID NO: 1003588 - protein, 43 aa, Homo sapiens
MTHYNNSSIKKILRVFCLLRHGLALLHPLECRGATMTHCILDL

SEQ ID NO: 1003589 - protein, 47 aa, Homo sapiens
MLLGAMLLNGKVIIWVLTSSRMMLYTQESKLRRHSCWKNSMRMTSRD

SEQ ID NO: 1003590 - protein, 76 aa, Homo sapiens
VVLEVSIAKTGFLDVSGTQSLLDPLVQAASASLGNLLEIRISGPGPARGLLNKKACGGAWQRVFKGRPPEIAADAL

SEQ ID NO: 1003591 - protein, 101 aa, Homo sapiens
PEHGNWSAPSSAIKPDEVQCELGEARSSSASSRKGFRLVAMKFLRASEEHLKQHYIDLKDRPFFPGLVKYHELNGQPGAATWEGHHPYCIVAGKDLSQRIT

SEQ ID NO: 1003592 - protein, 70 aa, Homo sapiens
  misc_feature (70)..(70): Xaa can be any naturally occurring amino acid
RIYLHHSASHVWCGLIAHCPPLTCFYRDCCWCTLLPYEMLLMWDALNQPNLTCGNQTQIYCVSIRVPSLX

SEQ ID NO: 1003593 - protein, 30 aa, Homo sapiens
MATADKQYSDRRRAVASEIAEQDIDSVLVT

SEQ ID NO: 1003594 - protein, 60 aa, Homo sapiens
GDSKDPYSAPQHDNKYRMKTQRFKGEKEEVWVDLESPRNRFHFALSSLYKTKATQFKFEA

SEQ ID NO: 1003595 - protein, 47 aa, Homo sapiens
SNSGLNSVFNVAQLIDLRQIRSKVFQGLVYTYLSQIRVSSIIHFHLR

SEQ ID NO: 1003596 - protein, 85 aa, Homo sapiens
VTVHILVAQIPLISALCDSKSNCFRTGPLESPGGCPLSIPQMKSTPSKPFPSSWATLSVTTTASICQKPRTLPSPLPLSRVHQVP

SEQ ID NO: 1003597 - protein, 83 aa, Homo sapiens
  misc_feature (24)..(24): Xaa can be any naturally occurring amino acid
ILCWLSALRVVTTVTQAHSKHQYXGNTDFCIQTQFKRPFNTFSDYGVSVTFITGSTATKHFLDSSTNSVHSEESTVSHYAAQV

SEQ ID NO: 1003598 - protein, 96 aa, Homo sapiens
GPKEQEGEEEIRRREKKDKEEKERKEKAKKASRPKMLSHRPRRNRRKRRRQQSRRYDEHQHQAQGFRSRAVGIPMPLTSTELWPPGVGTKLLPSLA

SEQ ID NO: 1003599 - protein, 81 aa, Homo sapiens
GHTDCVQGTGADAVTPDIWAGQSAIALSAPGRRPMSIPRPDRVSSSEPRKSISWPSELSTCTFRQSDFISLTSTLKDSGIP

SEQ ID NO: 1003600 - protein, 50 aa, Homo sapiens
MGLDGKVEVSTGLKPRLGVKPGVGLKLGFGGRCLVVVPSSSPSFSGVDFP

SEQ ID NO: 1003601 - protein, 101 aa, Homo sapiens
  misc_feature (24)..(24): Xaa can be any naturally occurring amino acid
CTVPDEVSDSGAPKDLSPSRETIXSPRQKTLVFLLGQVFLAVKSSPPFSLVDQLVLLITQYSEFATVSLMLLLLFTTSIFCILLWSKYTYLEKVFPLFSPK

SEQ ID NO: 1003602 - protein, 94 aa, Homo sapiens
  misc_feature (49)..(49): Xaa can be any naturally occurring amino acid
SRGSHTGFEFHAIERILATVQEKVCERGCVPCRCPQAYCQALPMARLLXVLPPVSERIPGCKLGLHDNHWVPACHSFNRAIHKKAKGTEAEEEY

SEQ ID NO: 1003603 - protein, 33 aa, Homo sapiens
  misc_feature (29)..(29): Xaa can be any naturally occurring amino acid
VLTLTFPARAVNMDFTSKHAACYFQCSQXTPPA

SEQ ID NO: 1003604 - protein, 48 aa, Homo sapiens
IYGCMHVPEEENCLTPEPTIREIINQQRKRLNHLVDSLQAAPPLTNRL

SEQ ID NO: 1003605 - protein, 34 aa, Homo sapiens
WVHALVSLEDVGWLTRSGRTSTSGTHGNSEVGCD

SEQ ID NO: 1003606 - protein, 113 aa, Homo sapiens
  misc_feature (31)..(31): Xaa can be any naturally occurring amino acid
  misc_feature (63)..(63): Xaa can be any naturally occurring amino acid
MLEYNVVGCVEVLYVMFGVAHGSEVMVYVAXVFLFLLVLEIGSCYVCQAGLKPLGSSNPPTSXSQTAGITGMSHCTQPYVAFGHWGLRRSNPIPFPQGIILDVVLCGQNIPES

SEQ ID NO: 1003607 - protein, 65 aa, Homo sapiens
WRLIETVTRIPWRTGSKVVMIVRAGMVEIRRLVMEAKVASVEENPVVGGAGPASLQPTLVLPDNT

SEQ ID NO: 1003608 - protein, 68 aa, Homo sapiens
MGQTEVLLGARAVLLYLGCCIVGGDQGGKGNIDRGLGLSCLQGRPHTHTLILTVMLTIHGQMLTCMHP

SEQ ID NO: 1003609 - protein, 52 aa, Homo sapiens
SPWRMEAWARLLFNPRIIALQQSARADNLIPSARCAQQLEQILQGHPEISGS

SEQ ID NO: 1003610 - protein, 44 aa, Homo sapiens
NRILDNGDMLWYLPGTMLCLWSLVLLWRSCRFLTDAWHGGTASG

SEQ ID NO: 1003611 - protein, 47 aa, Homo sapiens
MSRDGNRRSKVTSPAHLTSGQKPGSHDTSDEEHYRFLRFLAERRKRL

SEQ ID NO: 1003612 - protein, 48 aa, Homo sapiens
MMVVTGKAALLEAAPLQQKLEVLLVCVWVVEVDSVVVPQVGQVHELVA

SEQ ID NO: 1003613 - protein, 42 aa, Homo sapiens
CGSSTLTALTTLSAQEQLVSLRAATSSAYLFKEDCHQKIDRP

SEQ ID NO: 1003614 - protein, 178 aa, Homo sapiens
  misc_feature (30)..(30): Xaa can be any naturally occurring amino acid
WVELANPSNMFHIHSPHHCAVCIRLCERKXYSLPGLSAPVLPQLLEQHCSVLVQYGVSVGVSCMAQDCPLRTPEDFVFPLLPNEELREKYRRYLFRDYVESHYQLQLCPGADWPMVIRVQEPRARRVQCNRCNEVFCFKCRQMYHAPTDCATIRKWLTKWCRRTLKQPTTFVLTLKTV

SEQ ID NO: 1003615 - protein, 61 aa, Homo sapiens
RADSLRGADTPVAMQDTSQTMSNQIIEENDDMSSRIDDLEKNIDGLMTQAEVEELESENKI

SEQ ID NO: 1003616 - protein, 33 aa, Homo sapiens
AWAVMLVTHSLGLSLGVAPPKQWPQAVASAPAA

SEQ ID NO: 1003617 - protein, 72 aa, Homo sapiens
LEDPLHWVRVEERNICLPGESWASKLPDLKDAEAVQKFFHLEGKYSLVKSYQASQKGEYGEKGGVDHLDQNC

SEQ ID NO: 1003618 - protein, 71 aa, Homo sapiens
DSGLGGKLGRSVDAEVVDPILWHVAPPPRSRLTLKASCKGSGAIILQIGCCQPQRPSGPEACLVPCISGDF

SEQ ID NO: 1003619 - protein, 81 aa, Homo sapiens
LWGLVRPHQIYLDVVPIIPMCRGRDPVGGNRIMGAGFSHTCSRDSEYISRKSDGFIKGSFPARALLPAAMEDIPFCSFFAF

SEQ ID NO: 1003620 - protein, 36 aa, Homo sapiens
MAQRTFLYKAKPLAVTQRVLSAYCPKRVGLPEKPVT

SEQ ID NO: 1003621 - protein, 66 aa, Homo sapiens
HDGEMTLMGWQEENLKQSKAAAAKEQVFGYDRSGESTGGKGLGARPSSQAKNIGNRMRDSLIDRLN

SEQ ID NO: 1003622 - protein, 79 aa, Homo sapiens
MAVRVDVYSATWVCNVLPGDKYPGRDVEQPVLSYQISVKLGAWVDAVFNYCGCMPLLYRVLVDDVSTSADLQNIVELGA

SEQ ID NO: 1003623 - protein, 74 aa, Homo sapiens
QYPSMHEWLQVDVYSATCAACLPGLSIRRDVSNRAELQISYKLEPGRRVFTTAVHASLYYFRRHVSTVLTSKYR

SEQ ID NO: 1003624 - protein, 31 aa, Homo sapiens
KSDKKFILCFSQHKAGDKTGERAGCGGGVED

SEQ ID NO: 1003625 - protein, 41 aa, Homo sapiens
MGPCAPKCLSLLGFHLGSSPVSGDDISLCVLWLPILQSVIP

SEQ ID NO: 1003626 - protein, 33 aa, Homo sapiens
SGPAQGRHAWRCAAQPAGGNRLKLAGGATPPLR

SEQ ID NO: 1003627 - protein, 50 aa, Homo sapiens
MISCRLRVSVQVLAARLESSYSGALCLTGYRSELQNFTVSVQLISSVWTR

SEQ ID NO: 1003628 - protein, 65 aa, Homo sapiens
HSGVVEYLHPLDSEKQKRGRHLQGLCGQSCKTNMPWLMWAFIPQVATIGLTCGGFMVALSPVACI

SEQ ID NO: 1003629 - protein, 73 aa, Homo sapiens
SVPAHASVVQKRAMQQVIDVSVAKVRLLSQMLDANNQMMVVRREMLIRQGDDRSSDEKRIADLVKRYEASWSA

SEQ ID NO: 1003630 - protein, 46 aa, Homo sapiens
VPDRLALWSEALLSRIGTCTFYGTANTNQMVMEVMGLHLPGASFVH

SEQ ID NO: 1003631 - protein, 62 aa, Homo sapiens
LARYPASSCGAEDWLTVGAMRLRIVVNDLPMHPLPRVAEFSVNQIVNCIAVTGYRQCGLQAR

SEQ ID NO: 1003632 - protein, 109 aa, Homo sapiens
MECGYLYNAGEVCVSADSHMAASGIWDIHLLCDELYTDATLQERAERSLKPEEENTLKSQKSLIYPLAFFQWGKIQGINARVHIFPRLYLKSNENHSVLSVTQKNTKRG

SEQ ID NO: 1003633 - protein, 48 aa, Homo sapiens
CTAMHHCNQKMWMASGNCGVIGACSQNIFLLYWRCQVWAGHPELNGKL

SEQ ID NO: 1003634 - protein, 47 aa, Homo sapiens
RSTLAEILLTTTAATRIVMIAIASIYGKACSVLNELCYILLNNPKRS

SEQ ID NO: 1003635 - protein, 77 aa, Homo sapiens
LAWAYWQEYENLDHRRLEAQGEEKRLWVLFRPVSVGVDTSLHSFPFTNIKQLVHKRVFSNPTLRTGHFSSYNFLSQI

SEQ ID NO: 1003636 - protein, 46 aa, Homo sapiens
SWYPAYLVAFKFQLFRNLALWQQALMVMVLSLAVDVIVFWAEFLVI

SEQ ID NO: 1003637 - protein, 33 aa, Homo sapiens
MILKVIVMGAGSRRGHRLGFLGAVLCLGGHGGV

SEQ ID NO: 1003638 - protein, 43 aa, Homo sapiens
SSSVPISRPCITQGMVVYAYHADCLNLYRTVRAYTHARAYTYA

SEQ ID NO: 1003639 - protein, 46 aa, Homo sapiens
SDLAELMVHACGEYDIISSGTKCERGLTLANTAGWMPHQKVSTSPL

SEQ ID NO: 1003640 - protein, 68 aa, Homo sapiens
IRGVNDPTEGLVLGKYWAQQGISETIHTNDTATFISCFTFNHDSLNQFRLYGKEDGQEATGVSLVFKK

SEQ ID NO: 1003641 - protein, 36 aa, Homo sapiens
MGDDVDPHAQESTANAQSSSTTPSQHSLSSSSSSSN

SEQ ID NO: 1003642 - protein, 121 aa, Homo sapiens
SVYIGYRGVLVSSLYQMVDDAGSKQSSVDVFVTRRTPLEGGVLRPLNRGEGLSVELRLLILQEVELKAVDSQLWIFLEGLEGVLAGIEGIHEHQRQSSAESLASREHLCSDDVEEGLAVTN

SEQ ID NO: 1003643 - protein, 138 aa, Homo sapiens
MHVDREVNNIRDRKQVWCFISIDHCWLCKKNYMTVVMDCSQLEEAAGPVRAATPRVVFLPQPTNIASVLGVWLASWQIFSSQYPRSGGSEAVHLHRQTAALLPCLVLGLWLLLALLVGGIMSPKDVHLLPPGTCEYLT

SEQ ID NO: 1003644 - protein, 49 aa, Homo sapiens
HEQVISDVKLKGECRRVDVDIDESETSHYLWVGLLGGVLRVEEERDVGK

SEQ ID NO: 1003645 - protein, 46 aa, Homo sapiens
ARSVPGSACLPRQPRHAPRERGGGQREPGDPANSAGGGSLAMRLTR

SEQ ID NO: 1003646 - protein, 118 aa, Homo sapiens
  misc_feature (29)..(29): Xaa can be any naturally occurring amino acid
SLRCESLRESEHSQSREAHLGQACHRCSXGFLALVPMPGEVVLRDRCSAVGEVPPAASTGESDSSLLGDSEGEPLSPRQCGLQLIPVLRDTAWGLAQLNCAPRLLQRQGQASFSLWNP

SEQ ID NO: 1003647 - protein, 74 aa, Homo sapiens
NRDRSGIGPEAPVLVWRLLPCETSLEFRRNSVDATRFSRMRRAVACLTRAATGFSVWKYTSCPIHNAIFRILVV

SEQ ID NO: 1003648 - protein, 76 aa, Homo sapiens
SCLGLRKDLMGAVKSRRLLAIQAMKEREIQEREMIVKLKRQAEEERILKHKAAVEGSFQEGIVKAKLVILQCPIFT

SEQ ID NO: 1003649 - protein, 152 aa, Homo sapiens
LGACMWVWWCVSQCWKGVESWTGGGSGLELVTVGVVAVVVRLWEGELFSEVEVGGGVDPVDAVVVAVVVGFVRIQVVPGVEEGVAVELVAGCTGAVAVVVTAKHTHVVVEAHVEPACLVFGLAGQPRLQAAGQHLPEPGPMRNLGGSSPAGT

SEQ ID NO: 1003650 - protein, 98 aa, Homo sapiens
VELKKNESREELEKQREPVDKSPPSHNFQLEERQQACTKTKRRVWVNNHPPQVRGSSECLQDQLKTLQRNYGRLQQDVLQFQKNQTNLERKFSYDLSQ

SEQ ID NO: 1003651 - protein, 38 aa, Homo sapiens
PGIPPMIAKYIVDDLSLVKNEKLNLELGQQEFTKCLHS

SEQ ID NO: 1003652 - protein, 53 aa, Homo sapiens
LEDVIPTALVTRGDIRICVRPLAHMACLDGQHPGVVHFQRSCGGDYRNTMPNF

SEQ ID NO: 1003653 - protein, 43 aa, Homo sapiens
PLELFGTIFGAKTGMRSAIPCLPFAITCIPSTGPGHFPTRSQA

SEQ ID NO: 1003654 - protein, 91 aa, Homo sapiens
  misc_feature (4)..(4): Xaa can be any naturally occurring amino acid
PTPXIYHTGTRTLGFLNLFLNYLRRVGLGDIGKKSVKYSLLLIFTSAPTDKFTDSAIAMNSKVNGEHNREGASAAGRRGDSNQGRLLTLDV

SEQ ID NO: 1003655 - protein, 50 aa, Homo sapiens
TGKNGEKCRTHALLTQEFHFLVPTREKHVMHCAQAGCVMTTDRTATVCNY

SEQ ID NO: 1003656 - protein, 37 aa, Homo sapiens
MICGGGEQWELAETVLRQGAGYQGRGTGASNFANSLA

SEQ ID NO: 1003657 - protein, 133 aa, Homo sapiens
LQIHSAPTAWIGLEEWEGRWRRHCAAVGSSLGQPVPVPDSVCMMMVTSGRRMTGTGCLHHGDNEEAPVSRKVGQNEGEEEGLGPERRWNRTLVSSPPRCGEAVEDLLLLEFGSDLLHVGPGRLVIVHAAWDVG

SEQ ID NO: 1003658 - protein, 43 aa, Homo sapiens
VIPGWECGGANLCSLHPLPPGFRRFSGFSLLRSWDNRGLQPCP

SEQ ID NO: 1003659 - protein, 70 aa, Homo sapiens
  misc_feature (55)..(55): Xaa can be any naturally occurring amino acid
MAIMKSQETTDAGDVKKRNAFTLVGGSVDWFNHLWKTAVEIPQGIVELANTHSTXAIPLTGLYTQEDYEL

SEQ ID NO: 1003660 - protein, 101 aa, Homo sapiens
  misc_feature (39)..(39): Xaa can be any naturally occurring amino acid
  misc_feature (42)..(42): Xaa can be any naturally occurring amino acid
  misc_feature (92)..(92): Xaa can be any naturally occurring amino acid
MGDDVGVMDQHRGLVIRDTFRKWSDDGQMQRKRKLESKXQIXLKTDYQGIHSNHSIGASTHRLGMRTKTPELAENWVQSLTVLFVPTCFFPXLVNFWVHSE

SEQ ID NO: 1003661 - protein, 80 aa, Homo sapiens
MANKGDSLQKRGERQVPIVCPGPNMHNTTGLQTSHPLRTGHQWTLADTISFALHLTYERRQTSTEALFSTAEHRTPPAMA

SEQ ID NO: 1003662 - protein, 78 aa, Homo sapiens
WVLIPGYCLCEQTPHEQHGGWLHHALPRPWGSACKLGPNAGDVTTQGCCWNSQSQACASWPMQDQHPVDTGARNSVLH

SEQ ID NO: 1003663 - protein, 44 aa, Homo sapiens
MTCLGQFCGAEWWCLPGFVLLAGNNVEYVVAGPVTQPFAFWRVA

SEQ ID NO: 1003664 - protein, 67 aa, Homo sapiens
RGSMGAHPPAAGMAWCLQYVCHGGQVPSAGYTNTLDNVHGTRGPTQLTLVVFEGLWGLHSSHCGFTA

SEQ ID NO: 1003665 - protein, 92 aa, Homo sapiens
MLWVSSPNSRRLRRAGLHRLNEGLLLFDAGDIGAQINQRKWETAIEGGAGGRGYLGGPGAVELAPQNTVEKREGRTLAATGNGPPKNGIIDL

SEQ ID NO: 1003666 - protein, 44 aa, Homo sapiens
MVSSPSVNICGHQVLLSNVNSGARKARPCPPGVPFPKGHYWEIF

SEQ ID NO: 1003667 - protein, 106 aa, Homo sapiens
  misc_feature (31)..(31): Xaa can be any naturally occurring amino acid
YVLLYVLGLVRMGGEASMPKLCSYPGPLLLXPITLRELCLCVCVRVRAAGAGMLGCVSEPELPFQSVLEGGGQANDRKEGVDWLHPLCILLLVFFLLTQEWVGIPG

SEQ ID NO: 1003668 - protein, 63 aa, Homo sapiens
IPALREAYQFCAIDEHWTTRPKDMFDPMAGLRTSYYEALAKGQKIEMDKLEKGKKEETKIEFV

SEQ ID NO: 1003669 - protein, 33 aa, Homo sapiens
SSGIPPETIHELTNEEKDALSPSEFPGLGAVSD

SEQ ID NO: 1003670 - protein, 105 aa, Homo sapiens
MVRFKSFDLSRTREPSTLCCRSLVELVPVVWGIASLRVQQQGEHHQHPPQQRFTNSPDSKICFYDVETWAQVTVFDFKTWDTIDRERRRFPLMSQRLIKSPLFVG

SEQ ID NO: 1003671 - protein, 54 aa, Homo sapiens
RFYLVNTASQCAPREQKRRSCRVQKAGSSCLKVIAFCLQEKYLLHLSYFCVIKE

SEQ ID NO: 1003672 - protein, 36 aa, Homo sapiens
PHWVRVQSEGQQTARQQRLQRHGLFEEENGIRRTGR

SEQ ID NO: 1003673 - protein, 36 aa, Homo sapiens
VSRPCNRSLLHTNCCIEKNMFRSHGASTCGDGLQMR

SEQ ID NO: 1003674 - protein, 122 aa, Homo sapiens
MSTSSPHTVGDQCARNYSLCCRQFAHVENASLVKTRGLESLAWSGLSLRTPEDFVFHCFPMIELREKYRRYLFRDYVESHYQLQRVPGADCPMVIRVQEPRARRVQCNRCNEVFCLKCRQMY

SEQ ID NO: 1003675 - protein, 179 aa, Homo sapiens
VALEDPRVTFCSVDGKSTHIPYLGLKAYRLLQDPLCNPDCDGATWAASYNVEETLTILRYATVPKTIMNKPRVMRTQDASFENSRKRLLGSRPSWKKRSIGRRKRREKAEEKVVAVVGVGEEEEEEGEEGEEEGDDKDDYWREQQEKLEIEKRAIVEDHSLVAEEKMRLLKEKEKKMED

SEQ ID NO: 1003676 - protein, 111 aa, Homo sapiens
AGSCVTSALGAWPDRDLGGSHSMRYFYTSVSRAGGGEPRFISVGYVDDTQFVRFDSDAASPREEPLGPRGMKSRRGPEYWDRKHTGSTRAQGTRLDRRERCGNPCAGYIKT

SEQ ID NO: 1003677 - protein, 37 aa, Homo sapiens
MSEQFARYIDQQIQGGLIGGALEWKCWGSYTRGPGTP

SEQ ID NO: 1003678 - protein, 69 aa, Homo sapiens
HIYCQNIKEFTAQNLGKLFMDQALQEYNKLMKVEVSSKRSLHRTLVIHTRSNSMEEIYLLYEIAQSDFY

SEQ ID NO: 1003679 - protein, 71 aa, Homo sapiens
LLSMNKVNDDAKLKMSHKYVPDREGTTVISTASVLTGTMARVSSLCQSAAALSRLATTSLHILSNENPMVK

SEQ ID NO: 1003680 - protein, 54 aa, Homo sapiens
MQEPSRFDEGCEFGPSLFDATSASNSALFQGPELRFHKPPSSTPFHLRKGNSII

SEQ ID NO: 1003681 - protein, 56 aa, Homo sapiens
AARRSVVLVCWPRETKAPEVTQPSIGPNLLESLQVFTALVVQTIGKALAVFSIPLG

SEQ ID NO: 1003682 - protein, 54 aa, Homo sapiens
MAAEGLGAISCIPGTRHHSHIVVRTQDQEGPFTKDGGGHLRVAGLGAAVDLPPY

SEQ ID NO: 1003683 - protein, 147 aa, Homo sapiens
PIDYLMKILTRGGYSFTTTDEREIVRDNQEQLCYSAPDFEQEMATDESSSSLEKSYELADGQVITYGNERFRCPEALFQPSLVGMDSCGIHETSFNSIMKCDVDIRKDLYANTVLSGGNTMYSGLADRMQKEITAWGPETMKTQIIA

SEQ ID NO: 1003684 - protein, 116 aa, Homo sapiens
ERTEQRSLNRSCRPPSARHSQGQRGKQKQRLRKWRHVLEANVANQPRPTQSEQTLRPARTWMRRGARFLYIYLSDKHGSKASGTGSMVACVNKACTSYVTVWGNGSLLVLVTWVPV

SEQ ID NO: 1003685 - protein, 129 aa, Homo sapiens
TIDYSEDLTSAAQFTPRRAGIVRDTEEKVCYVALDFLRKRLARLLPKLSLLRRATSLLYGQVITIGHERFRWPEETLPDFLELGMESCGIHETTFKSIMKVLTWTLRKELYANTSAVWRHHHIPRAVNG

SEQ ID NO: 1003686 - protein, 45 aa, Homo sapiens
GPIDFGGRRPCPGSRRTTDSSVASLRNGDSRGHRLRGPGAFPGLL

SEQ ID NO: 1003687 - protein, 60 aa, Homo sapiens
PGIIDRTCFSRHLATLVTPVIMPRRACPAMYGQRALRHGPPSQVCPWGEEAAPGLSMGPG

SEQ ID NO: 1003688 - protein, 65 aa, Homo sapiens
ADIDQVLLQTLHISLPDDTLTDETLMSRPTKKGPHCQAHNDEDSTDQDLTGQGLTDKDSWTKSLL

SEQ ID NO: 1003689 - protein, 74 aa, Homo sapiens
ADIDLDVMKWLPYTQSNHENIRQIPTEGHLTKQSALILKTVTLQTVTVKRSLGRHVTSNVTWGPEWNRGTGRGH

SEQ ID NO: 1003690 - protein, 114 aa, Homo sapiens
MIPPLIDRSPGEETTVTWKSLENQHRHVPPTTLEDIVAKETETDIDREYFNDFKSFLLTQPELRPPHWWKTKEAICTSGCFLTPQTSSKHKYFTLHINSVYYSRSAENKTGRMS

SEQ ID NO: 1003691 - protein, 43 aa, Homo sapiens
SLAACTFCMRYLHCIAHALIAGPETQKGFLGGFGYYPSRSNLP

SEQ ID NO: 1003692 - protein, 121 aa, Homo sapiens
GSCRSGCCDANGRPRAQEMAEPWIFLHGSAISSALGVAVVARLLSPQEPTTLWAGQMQRHPSGKTVRKRGRNGQLCQYIVVERENDHGRNAHDGCALILAQPCLSSKSYSLPTWTLKGRAK

SEQ ID NO: 1003693 - protein, 69 aa, Homo sapiens
MFGSVSTVLTMLDGILYRKACTAVVRVHVDQAPSLRYLEVSTVLTCRRNYVQGGMHRSGEYTSTCRDSM

SEQ ID NO: 1003694 - protein, 43 aa, Homo sapiens
CVWFILSPCDTTGSDARLQYGLLILGAAVSVLLQEVYRLDYYK

SEQ ID NO: 1003695 - protein, 49 aa, Homo sapiens
GRSRRIPLSTVYWDKYQHKKHAGTVCTHSTRLVYAIIQSSSAKSLYIRF

SEQ ID NO: 1003696 - protein, 56 aa, Homo sapiens
SLNILSTVSGMMLDLTFCRISAQCSILCVSPARDPDALRLDDMGGVGRQMGRTMGA

SEQ ID NO: 1003697 - protein, 60 aa, Homo sapiens
MKSSPEERERMIQPVKEELRLEEAKLVLLKKLRPSQIQKEATAQKATGSVGSTVSTPPPL

SEQ ID NO: 1003698 - protein, 130 aa, Homo sapiens
VSEDSNSLEYSNSDVLLSVLYLLIDNRLTYFLCRDLDNPTVHGSHGQRQAQGHHGMQTNLLWMLPPLIPQMLGGFHEMLVLPSGLLSCILLRLFLCLAPGILTGFVLNLPNSRVLHLLIMSSVCLRLAEF

SEQ ID NO: 1003699 - protein, 41 aa, Homo sapiens
  misc_feature (4)..(4): Xaa can be any naturally occurring amino acid
GCSXLSTGRVGPLSNGDSPAVRVTERTPRDYWKKVPAACRV

SEQ ID NO: 1003700 - protein, 48 aa, Homo sapiens
EVEISPWSAVLELFLVQEGERLRKQTGASGQTVGKSKCHPLNGLNFST

SEQ ID NO: 1003701 - protein, 166 aa, Homo sapiens
MMWYRSPVLGRGPPACGRVCMLGKRSFDFGYEADLDVVRLCFIELEKEKGPVSWAHQECFQKPQRFVAGIWGEASDSWVCIVWSHTGCVIPGSSWVEPSTCIHTLSATIQTLSCLWGLNVEIFVSLESPQAKLLLAGASLGELHGLLFPPPALGIEVDIDVEHGGK

SEQ ID NO: 1003702 - protein, 110 aa, Homo sapiens
MHVERNTWIWTQAEVLASLPSHVLKNDHVRRFLSTSSPPQQLQSPSPGNPSLSKVGTVMGVSGRPVCGVAGIPSSQSGAQHHGQHPAGSAAPLPHCSHAGSAGSALAYRT

SEQ ID NO: 1003703 - protein, 106 aa, Homo sapiens
  misc_feature (54)..(54): Xaa can be any naturally occurring amino acid
MFGHGGRWGVVGRAKQAMKPGVQAQAQRVIHLPQSVQALIKDFQGTPTFTYKAXHIFFTDNWPEPLFSELGRSRLAKVVKTLKEIHLAFLPYEAQVFSLDAPHRNY

SEQ ID NO: 1003704 - protein, 48 aa, Homo sapiens
HDVDDGTRFLFFFPKNFLKVLNLDFFFPVLTIPKAILQPSPKAYMSTQ

SEQ ID NO: 1003705 - protein, 34 aa, Homo sapiens
LWCMHVDDSGIPECDFRDERASKKVQGEIDNIQN

SEQ ID NO: 1003706 - protein, 42 aa, Homo sapiens
MTPFLLTSPKILVMEPNPAATRKVQVPALVGSSSGCRTRFFI

SEQ ID NO: 1003707 - protein, 60 aa, Homo sapiens
AIWQRYRLDKAPYCISTVGQEEYKVKFDNQGKSLLSGNHIAYDYTLLLTSCMWRSRGGRP

SEQ ID NO: 1003708 - protein, 69 aa, Homo sapiens
ILMRRLSNRAYGTNGVLQKDLKLDMLFCSSEKVALDYTKAVVINKKTGKERCAPSRNLLGMEASRRFNC

SEQ ID NO: 1003709 - protein, 62 aa, Homo sapiens
MGELLTCTHILNVTGESGNGNYSVLHIPWADCLEVLWQERTSITCYGPTRHGKLELKLQLAW

SEQ ID NO: 1003710 - protein, 44 aa, Homo sapiens
MRMRCLSWNAYHISLPGKFFLLIQDSLYLLILNLKYQVEVRFQI

SEQ ID NO: 1003711 - protein, 55 aa, Homo sapiens
MLWGAFSLLFTQGSHETVIPKKTYFIDQGLIPPGTSQMVDFDTNGDSAIGTIGGL

SEQ ID NO: 1003712 - protein, 83 aa, Homo sapiens
DERDKVSNLSVVLLESYELTCDQSQIRETAPASRDLSHIRLKALIIGYARRSQPLRTGEEGCNAFSQSLGMKLLNAIETSKTR

SEQ ID NO: 1003713 - protein, 55 aa, Homo sapiens
IFGSLPTTHCYWNTFYTHLRGDSSTTSTRARHAHACGTWPPSFYHTVVDLGTGLP

SEQ ID NO: 1003714 - protein, 57 aa, Homo sapiens
SFENVNERENSKGAIDALQDDITSQLARKCKGFEGASGLSSLMAAGGFWCYVLWKLL

SEQ ID NO: 1003715 - protein, 71 aa, Homo sapiens
MRIKKRRVCAKLNESPSNARRVEVLEVGAVKAVFVVVRVLDIDRLTQGALEGPALHLGQIACESKKHPVPR

SEQ ID NO: 1003716 - protein, 92 aa, Homo sapiens
MGGAYCLRTATFLEDCNLSDRCYSFPVTFGSLSLRLFQLGDCYPGIWRKLGSIVTEGTVDNSEYCPFGDAIQLLEGGLLGMSLFLQLGYRAS

SEQ ID NO: 1003717 - protein, 42 aa, Homo sapiens
GSLERRFWHMNSLVVQVLLYNATSCDALVCTISTVLCRRPKA

SEQ ID NO: 1003718 - protein, 51 aa, Homo sapiens
LWDGADWSFRAVASLSCKTLSGELVTCVSDLSSDRGKRRDWLHRYTIQSPA

SEQ ID NO: 1003719 - protein, 94 aa, Homo sapiens
LLLGTAGQAAYSWMPCVNWHLSRTYRHRFPQRGGQLRLVAGLELTWPPPGCYWVGSSRSPPSEKERLSEQPRLSRDPQSVCAGSPLEGCLRTLG

SEQ ID NO: 1003720 - protein, 33 aa, Homo sapiens
ALGVVSSDHYLVILVACRGLHGVLSAFAAYQST

SEQ ID NO: 1003721 - protein, 38 aa, Homo sapiens
  misc_feature (21)..(21): Xaa can be any naturally occurring amino acid
MVLIPLVLNFKLRAIDDLVPXQGRKDEFGPQPRCSRGV

SEQ ID NO: 1003722 - protein, 35 aa, Homo sapiens
  misc_feature (3)..(3): Xaa can be any naturally occurring amino acid
MSXRDCCRLHGDLKGRGRAKLHNLIYFKSGGMEHA

SEQ ID NO: 1003723 - protein, 75 aa, Homo sapiens
LVLIPRDRHGCSVQCDRQGHGGMCAGRRRATFCFWVVRLPVTVSGRSPGFSSHWPGWHLARSYSLAGEGLRSGNL

SEQ ID NO: 1003724 - protein, 146 aa, Homo sapiens
MNALKLNVCRIVQEVNIRDDYRKCPSNCGQKIKIRRVLMNWPRRLVSIGIVWDSEHSDLTEAVVRNLATHLYLPGLFYRVTDENAKNSELNLVGMICYTSQHYCAFAFHTKSSKWVFFDDANVKEIGTRWKDVVSKCIRCHFQPLL

SEQ ID NO: 1003725 - protein, 109 aa, Homo sapiens
LGDLEDLRVHHVTHSHMCTYPLIHLGTHTHTLCIHPMHTPHTTHPLIYLVTHAPTHTPMHTYPHTPIHTYPWAHIHTHICTHPTHTFYPCTHPHAHTPARTHTRAHTPC

SEQ ID NO: 1003726 - protein, 41 aa, Homo sapiens
LIQRISLGLSGTSELSNDTVAPSSPISQPQVEAATCMHPGG

SEQ ID NO: 1003727 - protein, 61 aa, Homo sapiens
HSGCMHVYLCVVVFCLCVRVCHVVRTSVHLLYTCPRPSMFAHGGRWGVAGRPRQPLSLGVQ

SEQ ID NO: 1003728 - protein, 64 aa, Homo sapiens
LVYIEVNGTEAKQQVECGSDPEENSARSPDGKRKRKNGHCSLKTSMSGISKLLDKTSTFVVGQA

SEQ ID NO: 1003729 - protein, 81 aa, Homo sapiens
MSGRFGRVLSWQACSGMWTNMHGGSAGLKWLTEQSDGTAGNTVKLAPAGSFKFPFNGGLVSPRPLSTPGNLPLQPKALPKL

SEQ ID NO: 1003730 - protein, 50 aa, Homo sapiens
RCCWSSKICDHAVEVFVLQIWQGSVLGPFRACDMCETRDSRLNCGEKPKK

SEQ ID NO: 1003731 - protein, 67 aa, Homo sapiens
SRDPASAWYGQAQRLSTDKGGVAGYQARGTPGTGHHNPMLSKFAQKIGGSELLPPYAARAVYCCGDR

SEQ ID NO: 1003732 - protein, 70 aa, Homo sapiens
SLDDVMRCQAGHVRVKDAGDGENFSYDRFLHCLSVGQIGWYSLDFLAAEVYALGVNDEGEQLEEGHTSLV

SEQ ID NO: 1003733 - protein, 105 aa, Homo sapiens
MVQRSNSTGAARETAAVFEASETESKVGKQVTLEKQCRVEEASAVGPVHNSVPSNPVAAPGFFIHPSDVIPPIPKRTPLFMTPPFTPPNEAVSVVINAELAQLIP

SEQ ID NO: 1003734 - protein, 53 aa, Homo sapiens
EALVLGLVGNLGGAELGLPFRRAGASELALGAWSSEGQEVTEDSLGPGIRCRR

SEQ ID NO: 1003735 - protein, 110 aa, Homo sapiens
  misc_feature (36)..(36): Xaa can be any naturally occurring amino acid
RRGNGGEAEETSYYHYFLETVSLCYTGLKCRAQSWXTVTSICQVQSILLPQLPEQLRLQVCATRPANFRFFSRDRFRHVGQTGLELLTSSDLPAWVSQSAGITGVSHCTP

SEQ ID NO: 1003736 - protein, 111 aa, Homo sapiens
MKVNDSWWLGELLMFARLEWETRRFGGGDGDALSSRRVYEVKPFFSLEVEKESISSVLEESIFQEKVSADVGEEKESFVVFLVWESCAVRREGREKETVAFWLGGEDGLLL

SEQ ID NO: 1003737 - protein, 88 aa, Homo sapiens
TLTLFAVPFSIVLYLCGEVRASLTWDNPVIYCAHANGDAHSAGCACVMGVPGLRIEEQTPVVRYLPGGRSRKGTDLVGYQRWYWEQNG

SEQ ID NO: 1003738 - protein, 137 aa, Homo sapiens
EVSDPTAIPSFSIGSMNHSSCLSRQEAEFNKSMGELLTCTHILNVTGESGNGNYSVLHIPWADVWWYCGERNLHNLLRSNWTGTCALVQLAVPFTLAFHKIPENSHGHQNRRHLTNSFNPNIYIDTVSPQGGERAPQ

SEQ ID NO: 1003739 - protein, 73 aa, Homo sapiens
LYGVDYSGYSRMHCGSYTCDMQIVWSCYLNTGRFQYLERIPLTLPIALVARDIITNDSNTADSYWAALGAPDL

SEQ ID NO: 1003740 - protein, 105 aa, Homo sapiens
NHHDIYMCSTQSTRTLNKLSSIPRKATSYASKTPGLVQHGDMGSSPPEDINYPRGYTGVSFTYTEGAQKHQLAYKFQHETMAPQQLATQKPHPGTGLTLEKGPGK

SEQ ID NO: 1003741 - protein, 43 aa, Homo sapiens
IFAQARVQRLFTGAIKAYYSLKTPGAKQSSSLSLLSSWDYGPV

SEQ ID NO: 1003742 - protein, 39 aa, Homo sapiens
EYNVVLRTEQHIFESMHVRFDWAVCDSQETAMQRGPTGT

SEQ ID NO: 1003743 - protein, 74 aa, Homo sapiens
  misc_feature (28)..(28): Xaa can be any naturally occurring amino acid
KQVRRSLQDIRSSEDDVGKPRAMKAGMXLEKKWTRPFDLHALGSCRTDPHLCDFLETHFLDEEVKLIKKMGALE

SEQ ID NO: 1003744 - protein, 47 aa, Homo sapiens
GTLRSGERMAARWMLLLCLLRRVVGAGQAMEKVTGGNLLSMLLICCA

SEQ ID NO: 1003745 - protein, 41 aa, Homo sapiens
LRVIYIRRVMVTLLIQHFDWLRQKDCLSLGVKVAVSYDRAL

SEQ ID NO: 1003746 - protein, 40 aa, Homo sapiens
IRRMMAVMNKVLAVKDGWLWNFLKEENNKAGAVVTPVILT

SEQ ID NO: 1003747 - protein, 47 aa, Homo sapiens
MAGEARKLTITAEGEGEAGTYGHVGAGETERVEVGGLHAFKQPESHK

SEQ ID NO: 1003748 - protein, 72 aa, Homo sapiens
  misc_feature (44)..(44): Xaa can be any naturally occurring amino acid
RINDPVMVSYNPEVGSEIKTANDMEKPVSSKKTELAGCVCTWLXSSYSGGKVGESLEAGGSARGLRVEPMIH

SEQ ID NO: 1003749 - protein, 81 aa, Homo sapiens
  misc_feature (44)..(44): Xaa can be any naturally occurring amino acid
MYCDLRCSQNEAAVDRNSKRVVVPSSAHQAVKHEGNRMGQNHEXPTVIAENELLGAAAAIEACSQKARAAEARATPKEADE

SEQ ID NO: 1003750 - protein, 50 aa, Homo sapiens
  misc_feature (3)..(3): Xaa can be any naturally occurring amino acid
ASXWFRLFVSDVAAGLRSAQWCGCNALMDLEVVFPLMKSRRLVFGRREIN

SEQ ID NO: 1003751 - protein, 90 aa, Homo sapiens
  misc_feature (24)..(24): Xaa can be any naturally occurring amino acid
  misc_feature (54)..(54): Xaa can be any naturally occurring amino acid
MVLHLQEKYEWTKGLLKTHLTKLXQQLKKDWTILFTTFPSQNSGLSSECYRVQXIKVLYRRSFLSKAQSHSRHQNNLDCAQKNNKPQKLG

SEQ ID NO: 1003752 - protein, 42 aa, Homo sapiens
  misc_feature (21)..(21): Xaa can be any naturally occurring amino acid
RSAMAGVIVTVATGNQYKPWXWPFFMSLPKLQAHMGTCQDQS

SEQ ID NO: 1003753 - protein, 43 aa, Homo sapiens
RRSEWCIEGLTVAGPAQMKGFHQMSVKNLEENTSQHTPVSEQV

SEQ ID NO: 1003754 - protein, 43 aa, Homo sapiens
  misc_feature (15)..(15): Xaa can be any naturally occurring amino acid
ADDGQKTSSVLDAVXQHSSTYLTQHHSFSDHSWICVTHARLHK

SEQ ID NO: 1003755 - protein, 56 aa, Homo sapiens
YSCGFLATRQTLLAPGASLSPGVGRVGHSYGPHTQPETLEGTADNRTLQRLKRYLP

SEQ ID NO: 1003756 - protein, 105 aa, Homo sapiens
PGSPYVCSLLGSSSGKEQPLECDRAVGRIALGATYPSFDVQDQFEPGPPGKEETNERILLWSFLVKITFRGSTWAEDLSICSLVRSKHLTGELLLSGVLTHHQLP

SEQ ID NO: 1003757 - protein, 48 aa, Homo sapiens
QYSRLPQDRWSPYMPTLWSRPDEAVYKLHESGREVMEEGHYAQEPLVA

SEQ ID NO: 1003758 - protein, 96 aa, Homo sapiens
RLVLHVEGTQLVQEGVEHGLQGSLRRKSKRNRISREGPLGHRVLANSPLRMPLKPIFLLSLARLPGPNLRHLCLEYTFMALPVTGVSPKPTLGTLP

SEQ ID NO: 1003759 - protein, 43 aa, Homo sapiens
SIECLVILPHLEHTICILQAWHKHFLCETSFAATQGESSNFHF

SEQ ID NO: 1003760 - protein, 50 aa, Homo sapiens
  misc_feature (42)..(42): Xaa can be any naturally occurring amino acid
IYRILCSPSAKMGSMACGEDLRLFWDSKNELKKKHRWTVHTXTTSLHQEA

SEQ ID NO: 1003761 - protein, 74 aa, Homo sapiens
SPVTHTQEHVGQFSKYSTQGTGNKKLGRAGTARSSACNPSTLGGRSGQITWGQEFENSVGHTVKPCLWLKNTKS

SEQ ID NO: 1003762 - protein, 38 aa, Homo sapiens
LLIPRHVICLRNCIHQFRSHEVKFLHPSYPERSTSYRY

SEQ ID NO: 1003763 - protein, 59 aa, Homo sapiens
SNIPNSHCYRLGVTWGIGPGLYGSRRSHVAADQITYHRRPEYKNLAWEDGIHDCVAQYL

SEQ ID NO: 1003764 - protein, 97 aa, Homo sapiens
MVKLAEETDRIISLPIDQYRDLVLEESREVKQSSETPAALASGKPLHGTDDPLGERPTLDKYKEASRTRVTKASILPGAKQNMVNSSRGAKRKKVVV

SEQ ID NO: 1003765 - protein, 52 aa, Homo sapiens
MPCLLILINRRDHGSGSVCPDLSQKVLAVKRSFPRVILLESDLAVHAKRLGT

SEQ ID NO: 1003766 - protein, 39 aa, Homo sapiens
LLVPLYQRSLYMSTGETYRLVFLEDHSSSSFFFDINLHL

SEQ ID NO: 1003767 - protein, 35 aa, Homo sapiens
GLSCSGWQEGAGVLSTPEINLIICAALLKRKTTDQ

SEQ ID NO: 1003768 - protein, 122 aa, Homo sapiens
DSRGPPVVCIWNRISVRDAGVGHFYYELGVQHYRSVPALKHRNGGLITLEELHQQVLKRKGKFAQDVSQDDLIRAIKKLKALGTGFGIIPVSGTYLIQSVPAELNMDHTVVLHVAEKNGYVT

SEQ ID NO: 1003769 - protein, 47 aa, Homo sapiens
SRQVPVRGLAGLGATVICTSTWSLVQQNRMQLSGARGQRVDEYKTEL

SEQ ID NO: 1003770 - protein, 43 aa, Homo sapiens
RRRASGTLAADDDFDTTLLGHRDCRTDNTVTDTPTTPLLSRTT

SEQ ID NO: 1003771 - protein, 43 aa, Homo sapiens
MCAFNVLRSSGGAGTKKQFQKVLSAGHRPAPHNEIKLFSTENK

SEQ ID NO: 1003772 - protein, 49 aa, Homo sapiens
GVCSCCMRREFGAMSHTILLVQPTKRSNLPDTRYSLITKKALPGSEVTK

SEQ ID NO: 1003773 - protein, 61 aa, Homo sapiens
MDRNVVGEHCMQRRSMTERACGAHGRENAGVSSGTWVRIPRTDGPRSPEEGSSSLGYSGPK

SEQ ID NO: 1003774 - protein, 98 aa, Homo sapiens
SVYSGVILGITDNLTRDWVYILYGQKVALKYCKDFSHAKQLFAACYGVGTHDVLTERLRTGSCLHETVAFWTTSYPTDSLGTTGHGTDDDDPATPDRY

SEQ ID NO: 1003775 - protein, 125 aa, Homo sapiens
YYCVYALTWSRRAVELLKWGIGESAPQAFSLSWSTGSKQHFKPKVYNSFCSHCLRDMDRSRGLSRRRSEVQGWQRDQVEDRHFSSQSRATQFQAEAATVPLKASVPARPMNHFLLRGLPDLALVY

SEQ ID NO: 1003776 - protein, 50 aa, Homo sapiens
MKTSGAYGFHMWAMPEQYSTSTLWENSSKKLIFGVKHKFTITGTGIHLGI

SEQ ID NO: 1003777 - protein, 44 aa, Homo sapiens
MLQGEGRAALTLEGAVEQQVHEAVVGELGTHLRRAYEVSGGDAN

SEQ ID NO: 1003778 - protein, 33 aa, Homo sapiens
FEQDFFCGSEQGLYHIVKVRGLLLKKKKIFFQH

SEQ ID NO: 1003779 - protein, 53 aa, Homo sapiens
VSVHALQYLRFPEELAGGELGPAGGEMEVVRNLSGLEAGLRRRAGGTLASYPA

SEQ ID NO: 1003780 - protein, 51 aa, Homo sapiens
KVGSFVFMEMSDNYEKLRKHVALKAGSGKLGRDVLSSKPGKTLTIVNALLL

SEQ ID NO: 1003781 - protein, 54 aa, Homo sapiens
MVSLAVQCPGKAEGAPVYRHIRILECVLYGRLSECRGMPDSQCVLRSVWFIPIT

SEQ ID NO: 1003782 - protein, 39 aa, Homo sapiens
SVRAVDTAHRLLESDAQTTESLRVIPEMWPTRDSKHRYT

SEQ ID NO: 1003783 - protein, 40 aa, Homo sapiens
EASAKHVSACARCSCPEGAATVPLRCLLGAWPQRMGWAWA

SEQ ID NO: 1003784 - protein, 55 aa, Homo sapiens
  misc_feature (39)..(39): Xaa can be any naturally occurring amino acid
ILSDLSTDAKNQGKIKYCERRYHGIKVLEMSCLFNHQAXYTLQFSMLSNTVARGT

SEQ ID NO: 1003785 - protein, 77 aa, Homo sapiens
  misc_feature (44)..(44): Xaa can be any naturally occurring amino acid
GHGSQEEAQQVPQDTRKGQLKHYSSQTVTGGRIPEAVWPPQHQXKGTTEQGPVAEDVTKASAPGVSGDTGREAPFSQ

SEQ ID NO: 1003786 - protein, 44 aa, Homo sapiens
  misc_feature (43)..(43): Xaa can be any naturally occurring amino acid
RGGPLCDFNPMSSNAVQRCVRLRSVLSVLKQTPLSRYVPASVXC

SEQ ID NO: 1003787 - protein, 66 aa, Homo sapiens
VAAVGEQRTGFDHKQVTYGGYFRDQKDGYGKNEGYIAAVATASSSLQTATELSTLFPAWGIQALKS

SEQ ID NO: 1003788 - protein, 48 aa, Homo sapiens
GYPTGNVTRADSNEQAVFDVHSVLRVVLRVRHGTYMLPWCATPVLQQD

SEQ ID NO: 1003789 - protein, 36 aa, Homo sapiens
  misc_feature (34)..(34): Xaa can be any naturally occurring amino acid
VLRRYVLRDGYFTLTVLGRSGEEEGCASIPLSPXPP

SEQ ID NO: 1003790 - protein, 63 aa, Homo sapiens
VASVFHTTRWVPPLYRGAVRGCAPQRSALSASHGFMWYTVSLMPSGHLVSCPSPLGRNKCSAE

SEQ ID NO: 1003791 - protein, 61 aa, Homo sapiens
TVAHKASKTLRYVKEARAQKITIMYDATYMTISRINQSTETECRLMVTPGLEARAELRTHL

SEQ ID NO: 1003792 - protein, 53 aa, Homo sapiens
MLVNSLYADGSSPVNVPENPPSMALQAALQQVPQFLKAAEDYGVIKTDMFHTV

SEQ ID NO: 1003793 - protein, 105 aa, Homo sapiens
RGYVVRGCVRGAGLFLGRTRLSAVLRDAWGTPTRVTRPRWTLSTGFERVNGSCEDVDDVRDWRAPDNTESVPKTPRRVHVCVPRTGFLLDSPRSQLHTSQHRDLT

SEQ ID NO: 1003794 - protein, 89 aa, Homo sapiens
MYEPEDSQRGVTGQTNVGTESRVMSIRWTWKDGAGGCPQQKHLMCLLVHLLAWGKEVLSEGLRSVVFCVERKARCGVGNAGRVLSETSF

SEQ ID NO: 1003795 - protein, 35 aa, Homo sapiens
  misc_feature (9)..(9): Xaa can be any naturally occurring amino acid
SWVLIPPAXHESLYYADNQTQPVCQTPALVPPPAQ

SEQ ID NO: 1003796 - protein, 86 aa, Homo sapiens
DSRNRYSRAVLEVGSLTTIMPTCGILGNLRDDSGVERSRVPLNRARTTRAKKYIPSTFGSAMRKSIASARSRIDAIFVAAPTRSKM

SEQ ID NO: 1003797 - protein, 61 aa, Homo sapiens
  misc_feature (7)..(7): Xaa can be any naturally occurring amino acid
MEAKGTXISVLRLLTGVIAHVSVDCQAGDVKSLNDVAVPFLAVLNVVEDVVECLGWHITAL

SEQ ID NO: 1003798 - protein, 72 aa, Homo sapiens
LEDPWVLIPRHLPLEQTPPPSQHSRLAPIHALSEAMAVRADEGRMQETSQHRDVAGTLKAKLRLKAHARQHP

SEQ ID NO: 1003799 - protein, 37 aa, Homo sapiens
HISFPGRFLSTHSEGSPSLAEEHSGALRTPGSVMTNP

SEQ ID NO: 1003800 - protein, 52 aa, Homo sapiens
MSLVHDVGLLRGSCECGQVTDSHGLCYAGFYDGNRECVHVHRFTRAMLIHAS

SEQ ID NO: 1003801 - protein, 54 aa, Homo sapiens
LQDLIARLVSPLCRGREDIQAGGTVLLSVVVLLHALLSMGWKLYFFWRHRLAEL

SEQ ID NO: 1003802 - protein, 33 aa, Homo sapiens
SRGSGTRLGEGRYGWGVHDCSCARALGNSERVS

SEQ ID NO: 1003803 - protein, 44 aa, Homo sapiens
DLGACMWSETRGLDSGLRYLASLPYSRVAQLTMSRRFLSTSISP

SEQ ID NO: 1003804 - protein, 60 aa, Homo sapiens
  misc_feature (33)..(33): Xaa can be any naturally occurring amino acid
  misc_feature (49)..(49): Xaa can be any naturally occurring amino acid
DREVCCTVSGLDTTAIKDAGGQCLIVTTDIPTXVPQLVVAAQPEGWAKXRMLNGLHPMVS

SEQ ID NO: 1003805 - protein, 39 aa, Homo sapiens
MQPVAEVEEAVVQGEQDVGDQAWHFGQQPARDFLGGHLD

SEQ ID NO: 1003806 - protein, 99 aa, Homo sapiens
  misc_feature (20)..(20): Xaa can be any naturally occurring amino acid
  misc_feature (84)..(84): Xaa can be any naturally occurring amino acid
CGVRGSEYADSHEGIIEVRXRGWQEVPSRKNNLFDFFLGQQVVGVTHFFLRSGQHEGEGEHSTCGRSSCRSCISWASLAEKKAXNNAPLQAQHPGARVD

SEQ ID NO: 1003807 - protein, 49 aa, Homo sapiens
MRVRWWVGVVRSRASRLYTPSEDIESLLLFSHALCATPLWVPSLAFDFL

SEQ ID NO: 1003808 - protein, 76 aa, Homo sapiens
MHVDIEHENNNRFEEYESVWTEADTGHHSPANVAFRGSWPSSMLQRATEQPGPVTAALGLRDWAMTPLRAMANATN

SEQ ID NO: 1003809 - protein, 49 aa, Homo sapiens
ALVALIYKARMFCQYSLSKWFQEFDSQVIVIHKLIVCHLHVTNSYSQTE

SEQ ID NO: 1003810 - protein, 34 aa, Homo sapiens
MTPFAYAFGTPRGDFLFHRWYYFLVFKLEHILAI

SEQ ID NO: 1003811 - protein, 38 aa, Homo sapiens
TLAEMPDGCSSPAAERLFRPHIHWELPVTLCTSGHLMP

SEQ ID NO: 1003812 - protein, 83 aa, Homo sapiens
  misc_feature (32)..(32): Xaa can be any naturally occurring amino acid
  misc_feature (50)..(50): Xaa can be any naturally occurring amino acid
  misc_feature (58)..(58): Xaa can be any naturally occurring amino acid
TRVLLVCLEHREMRSGLLSCSDTPATPLRKSXVEPGVYSFTTVGEDPGAXGSGTCTSXEKMCEHAGSCTLPISAHIRGKNYCA

SEQ ID NO: 1003813 - protein, 67 aa, Homo sapiens
FCGQVPAFEGDDGFCVFESNAIGYYVSNEELRGKYSRRQQPKVVHVGEALLSSEYSGPRQVPGLFPK

SEQ ID NO: 1003814 - protein, 69 aa, Homo sapiens
GCSSPTQISTEDINKRYHYQLTLAAEGYLEEADPQEAHSLEKALQGGGSGRVKPNSEELGFGETGKNLH

SEQ ID NO: 1003815 - protein, 66 aa, Homo sapiens
MLGSPQLVSFGPQPHLGLANTCSVLENPGLGGLVYLCLPHTPTARPAQVAQAESQVLLVGVLLESR

SEQ ID NO: 1003816 - protein, 37 aa, Homo sapiens
MCAALGLTILASISNWIDRQQQMIERCGEDHRGTSGL

SEQ ID NO: 1003817 - protein, 58 aa, Homo sapiens
MYSKDPLSLWTAEPVGAMLLVTGCTQIWVLIGKHLHSKGFLVYAGCLMKDQGHDGVTE

SEQ ID NO: 1003818 - protein, 48 aa, Homo sapiens
  misc_feature (34)..(34): Xaa can be any naturally occurring amino acid
GCSSPNDEVITEVQEFYKDHYKNAENQGLSPKGXTLKGFNYAFELACG

SEQ ID NO: 1003819 - protein, 58 aa, Homo sapiens
VLAGTVNITHNGNPLSPLLGAQVRQNVKNRLLVKQPGCQYFNTFSPQTSNFCTNPCAN

SEQ ID NO: 1003820 - protein, 36 aa, Homo sapiens
WDGVLYAELWYCSGRTVPDGLVTVCATSTRRTPCCL

SEQ ID NO: 1003821 - protein, 64 aa, Homo sapiens
DELIAVGSLRGNHPEARGAIHTVRGSRSRVARRYILELVKNGKRLPQGFTSQDSQEDKAPTHQS

SEQ ID NO: 1003822 - protein, 56 aa, Homo sapiens
SIQEAPSAFFLFCSEYSPLNQGEHPGLSIGDDTQKWRYYRKKKSFGILTKITAYGK

SEQ ID NO: 1003823 - protein, 40 aa, Homo sapiens
PAVSRTVTTRYFTETPAGRWTTLSRDPTLDWAFSLNVQLL

SEQ ID NO: 1003824 - protein, 54 aa, Homo sapiens
SHQKMVFCRTDVRICGMYRARFTFSFVVDFNFHIQFFLLQNQSHTNFTHVTAHN

SEQ ID NO: 1003825 - protein, 60 aa, Homo sapiens
MHTLGRTSPLLGEVDRLKPSSLNSSKPFSIQLCSIAGKELCSFGGGEALRFLEFSAFVLC

SEQ ID NO: 1003826 - protein, 41 aa, Homo sapiens
NSRGSPWVLHVHTARCGDMDQTPAYPSFTAPSTQTVPECMD

SEQ ID NO: 1003827 - protein, 88 aa, Homo sapiens
MGAALAQVAQLLEYCLWSDSREKRKTCCEADWAEDRHCWSSVSEESPLVLDISSFRSTLSRAKVRTARASFSCLAVGSSTSVPSESRA

SEQ ID NO: 1003828 - protein, 77 aa, Homo sapiens
  misc_feature (3)..(3): Xaa can be any naturally occurring amino acid
MYXIHITEGREDKQRRAPVGMLITFMQLPLDLNTHDTLNEIIIWEIHNTLLSSIQSSKAVCKSPQFDAAGDVVVEGD

SEQ ID NO: 1003829 - protein, 51 aa, Homo sapiens
MHLVMESSASGNEVTDWRTALDGPADSGSSISPGGEVALFIVVVIVAIALR

SEQ ID NO: 1003830 - protein, 101 aa, Homo sapiens
  misc_feature (8)..(8): Xaa can be any naturally occurring amino acid
  misc_feature (31)..(31): Xaa can be any naturally occurring amino acid
LHVHVQIXCPQYLSYRSCSRASDLLSLRVTXGWPPVPPLRLDSVWSVNWKELEGLHRREGSALLVPVCLLVLAFVVCACPASWWGRGLSVTVCREFSNTQV

SEQ ID NO: 1003831 - protein, 39 aa, Homo sapiens
LLMYLQVAYVNSYVGQCTLSLKAGTSSKFFKPARPSPLF

SEQ ID NO: 1003832 - protein, 113 aa, Homo sapiens
  misc_feature (69)..(70): Xaa can be any naturally occurring amino acid
MLVLSGSFLAACWSLCRMKASGDPTLPVDSDEERVLVLSLLLLVTSLPCLFHAQCVLNELKEKYPAPAXXKHHAEHILRGDLFLPSPSGKFPGGQEHLGICLVAPFGPLTKAS

SEQ ID NO: 1003833 - protein, 79 aa, Homo sapiens
LYRALHSSMASSSSIRRTMAPRSMSPYAVRLSTWWQELVAPQYLATAANLLRHYPTEEAEQALDLLSEMEENEPYRRNM

SEQ ID NO: 1003834 - protein, 90 aa, Homo sapiens
LEDLINEGAAVACSQPVPRSFCQVRSEARSLVLHQDEAHSLSVQFQGAHPSKPARCRASPSLQVAQDPFLAKRLKLSSQRSLWARHEQQS

SEQ ID NO: 1003835 - protein, 42 aa, Homo sapiens
LEDPPGCMHVPWYHACAGSYFLLLTSPEAQDPGGDGRSRERS

SEQ ID NO: 1003836 - protein, 44 aa, Homo sapiens
TPSLVPPPWEADGSDCLSPGIQWLHGSYDHTCRQPLHSNLGKAL

SEQ ID NO: 1003837 - protein, 34 aa, Homo sapiens
MCLCTKAAIRSLYRTMLSGFLEHAAEITSGTELE

SEQ ID NO: 1003838 - protein, 90 aa, Homo sapiens
GEAALFPGNTAGFTTWDWLQWCSCCDLLRRGEHDPGCECCAWGPWGVCVNVTCGGGIRAPGFGGCWMTSGVGSPCLLTPDLRRLREGREQ

SEQ ID NO: 1003839 - protein, 38 aa, Homo sapiens
RDEIWPGTENEKKLKSSCPRVEADLEWQSQEYQETASP

SEQ ID NO: 1003840 - protein, 95 aa, Homo sapiens
SCLRENSARTAFRMYRFNCWHRSRSRSTMSCKGLFSRLSLFCALSNFSFQTRFTQLSPVQTAWSSSARARLFTLKRPRTGELDEDTRSCQQCGHI

SEQ ID NO: 1003841 - protein, 44 aa, Homo sapiens
DAYWSRDGSEQRKADVQEGRGRVKAEHGHAFHVVLTVALARHHV

SEQ ID NO: 1003842 - protein, 44 aa, Homo sapiens
CFGTADTEGRDVPHLLVDLIWRWRISTRALWMDLGKARLKNWVL

SEQ ID NO: 1003843 - protein, 46 aa, Homo sapiens
RISPSSGAPDTSGVMVGIGQKDSYVGDEAQSNAWHTDPECTPIDAW

SEQ ID NO: 1003844 - protein, 59 aa, Homo sapiens
GPHSRVDPSWRLRNSLNRASFLKWQTLSPQGPKLYLEDTAPWASAVPFLRVLGVRPQHI

SEQ ID NO: 1003845 - protein, 50 aa, Homo sapiens
TDDRPCLSSACSSLISSSSFLHSSHPEVCPDKPWQKGRPSITKCGSHTDG

SEQ ID NO: 1003846 - protein, 74 aa, Homo sapiens
MAEESEMALRSVIRLGVSRPSEVDACRRALTLSQESVVHAEGSSYSPHVGSSATEEFSLVPGPGSATSVNLEGM

SEQ ID NO: 1003847 - protein, 40 aa, Homo sapiens
QDVMPVAGSTAETHLLFNDAHFLMASLVHMNPRTQQGAAE

SEQ ID NO: 1003848 - protein, 53 aa, Homo sapiens
ALTLATQVTKPHVLKVELKDMYTAIKQIPRGTAQLSIHRSNIRQQASTTPDAD

SEQ ID NO: 1003849 - protein, 34 aa, Homo sapiens
LGRDAVAYVCLQPVSSTRMLMYHYEDWLIVLGSM

SEQ ID NO: 1003850 - protein, 63 aa, Homo sapiens
MRTRPYNCNTHPCKLNGIRSHAIANTHKACETIHVSLPAFNHTPSQTPHTCLNTSCNPLQAFE

SEQ ID NO: 1003851 - protein, 78 aa, Homo sapiens
GSYCFGTADDILRPDSVSGTGSGEDLKRGPRPRNSVHCCQLLLEDLLPGSCHFLRLFDCCEGGTFCSLLCHGRRPKAQ

SEQ ID NO: 1003852 - protein, 43 aa, Homo sapiens
YGIESSDRALRCVHKGQCTAACNHSFSRQQEEYIMPSQALKQT

SEQ ID NO: 1003853 - protein, 54 aa, Homo sapiens
  misc_feature (20)..(20): Xaa can be any naturally occurring amino acid
AFALGRRYCFHYYFIEALHXTAAGVMKDHWDNLEFLLAGSGGCTYSGIDAVPQH

SEQ ID NO: 1003854 - protein, 77 aa, Homo sapiens
SYVLWDGDGPLTRISVVACVGVVIVQVPINALRCSQNSIMVRNAVGPASDNSRRIYAGHQQCSTKAHLLSSVIRPKH

SEQ ID NO: 1003855 - protein, 132 aa, Homo sapiens
  misc_feature (49)..(49): Xaa can be any naturally occurring amino acid
MTVDGLSFLGTSLSGQRAAFTVHWWWGMDLELLVSAPQSSRTHLPPWVXAGASAALAFWLQPQWRLQLPGGHCAAMTVGSSGSTHSVPFMASAAWMSSVTEPATRFECPVNCCFSSGLGFCRVSSTWSSSSR

SEQ ID NO: 1003856 - protein, 133 aa, Homo sapiens
SGYCNQHSRVDLRSSSQARTIGKGSSGEVYKGIDNHTKEVVAIKIIDLEEAEDEIEDIQQEITVLSQCESPYITRYFGSVPKEHQAMDHHEYLGGGSALDLLKPGPLKETYMATILREILKGLDYLHSRRVPS

SEQ ID NO: 1003857 - protein, 40 aa, Homo sapiens
RYLSQTTVYHQMLVSMWNKNSPSLYENQNTTIHMGFTYWG

SEQ ID NO: 1003858 - protein, 47 aa, Homo sapiens
MMRVRRTGGEMRLSVEWGKDISEFKKYEWIVLVGLGGFAGQAKIQYQ

SEQ ID NO: 1003859 - protein, 49 aa, Homo sapiens
TSDHLMQQITPAIILCNSRRPSDHLMQQQTPSDHLTATDNTDTVIILTA

SEQ ID NO: 1003860 - protein, 58 aa, Homo sapiens
LDDGIRVDREQNETVIVMRFVVESVSGKCRGNAFSVFSMSSVLGHMSRGAATPPAIAL

SEQ ID NO: 1003861 - protein, 46 aa, Homo sapiens
WAPESKLCSRRSEASSAAVALQAHGLIPDNGFPGQFFPSGGPLRAQ

SEQ ID NO: 1003862 - protein, 70 aa, Homo sapiens
CHPGENAGGQSGFTTTSASGVQAVLLSRASEKRGLQGGDHQARLIFGILTRDGVSPLVGQAGFQLSVTLR

SEQ ID NO: 1003863 - protein, 53 aa, Homo sapiens
DLEDPEKTTEGEAGGVPHTESLLLILAYLASCPFVISLLCEMALGRLAEEIAG

SEQ ID NO: 1003864 - protein, 122 aa, Homo sapiens
  misc_feature (49)..(49): Xaa can be any naturally occurring amino acid
CGDLEDPRYVCRRASNVLTLQFAWRLLCSMSAVSMNRVTSHGWLQAVFXRDMSCFNFIFVAKASWMTPDESDDTCFSFQVLFNFPNRLQQALQAFLDTLRLGNCFLQQRRSLSQAIGEALEV

SEQ ID NO: 1003865 - protein, 102 aa, Homo sapiens
TDSQITAAPLLYSILSITAPTLFCDEIPQITGHAPLLRVTGFPQLTTDDISRLPVTDVYSGSTGQVSPLAVTRLSSVSTGDTTPLPVTSPSSASTGHVTPLP

SEQ ID NO: 1003866 - protein, 81 aa, Homo sapiens
NCDYTKFVECTRNPKWGDLLASGWGSIEPENFSFPDDLQCVDLNILPNDECEKAHVQKVTDFMLFVGHLEGGEDPWVGIPG

SEQ ID NO: 1003867 - protein, 46 aa, Homo sapiens
MLELDQRNCEASSEVATLHLDGTVKAGTATDSHGQAHALNASAQWP

SEQ ID NO: 1003868 - protein, 86 aa, Homo sapiens
MTSSELTNWNKNIFMVRLFSINPVWVLWAVRKFSNPSHCPLFHHHGCSAIMHTFIKLHDGRPVHGTCDDLWQSRSYLGIGSSSHIQ

SEQ ID NO: 1003869 - protein, 58 aa, Homo sapiens
LVLEVSIAPTFSPQNNETHLVSTFPHPVLKTEIHVRAFWLSESSLPRQQGAIETSKTR

SEQ ID NO: 1003870 - protein, 71 aa, Homo sapiens
RDWGCPIIDDTKKLSFIRVFYKKSVGDSLILKKEEEKHKTCNHQWLGEHGNSHQIRQYKPVKSVCVENTER

SEQ ID NO: 1003871 - protein, 31 aa, Homo sapiens
MISLTLFSSHTICTFIFLEMHRKAYKKLKGI

SEQ ID NO: 1003872 - protein, 67 aa, Homo sapiens
  misc_feature (33)..(34): Xaa can be any naturally occurring amino acid
QGRPEALGLIIAIAHAGLPAGPGRRFPPSRLGXXPPRPPLLPALLLPLSLGLSLPLLPASPSLASPF

SEQ ID NO: 1003873 - protein, 35 aa, Homo sapiens
YTIELLYPEQHQLALIHATVTAIKLMAVAGIGSRI

SEQ ID NO: 1003874 - protein, 57 aa, Homo sapiens
SFRELLSRHPAGLPAVTGRRFAAVVPGLTKARRLRDLEGQGAVRFPPEGSKIGRGLA

SEQ ID NO: 1003875 - protein, 45 aa, Homo sapiens
MIESSRYPAVACTCKAICGKPQEDAQGAGINETLFMALITLDAQE

SEQ ID NO: 1003876 - protein, 45 aa, Homo sapiens
SESSRYPRPFPTGVLHVVERRYSLGVKRADYDRDFATVLAVAAVE

SEQ ID NO: 1003877 - protein, 46 aa, Homo sapiens
RAVQRFALLRVGGGGVGGGGDAAEQVGLVKDTVPCARQVVTGCVDV

SEQ ID NO: 1003878 - protein, 139 aa, Homo sapiens
  misc_feature (101)..(101): Xaa can be any naturally occurring amino acid
AVTQRGERKAGLSQKTMVFQEIGGPFQNKAKGSQTSRMEAVSPNSITYTTGGMAFGENPFFQGAILALFTLPGSKSNMASRKVRLMQLGHHCDAAGAKGGXVHFSQIHLSPTWVLSQGWYWGRQVSDLVENPGSRDKSN

SEQ ID NO: 1003879 - protein, 43 aa, Homo sapiens
MSDEPMNHRHEYLYNGLRWNGKKHYQMQTYGGSDAWTFRVEGL

SEQ ID NO: 1003880 - protein, 45 aa, Homo sapiens
LEDAGGLLLTAVDWNWNCLEGEESPLDIIVVWVVDLVLVTPSQST

SEQ ID NO: 1003881 - protein, 80 aa, Homo sapiens
DLEDPSVLWDGGNFKDLDNELLANPVEQLAVSQAVTVFRPLMSRLEPQQQLLIYDPCTLQGLVLESRRHYMPSLDSHHLC

SEQ ID NO: 1003882 - protein, 62 aa, Homo sapiens
LLCFGTAVAEPEVLYRLNSGLMPKLGLSKHELTGIFHTVSYIEVHTFQRYHAFWRRSLKSLA

SEQ ID NO: 1003883 - protein, 33 aa, Homo sapiens
  misc_feature (25)..(25): Xaa can be any naturally occurring amino acid
MRIRALRLVSHKGTSGTCGHANEQXLAESQRRV

SEQ ID NO: 1003884 - protein, 40 aa, Homo sapiens
MLSVISSGLSYLTLLISDRVALSSHGEQVVTDSDAVQAQG

SEQ ID NO: 1003885 - protein, 37 aa, Homo sapiens
MGRGIAIHSTYGWHLTPLLQELTKDHWDTLEFFLCGI

SEQ ID NO: 1003886 - protein, 35 aa, Homo sapiens
TGSMMRKYYREVLGYRRRPPIKRGRRLRRRALLLG

SEQ ID NO: 1003887 - protein, 51 aa, Homo sapiens
  misc_feature (18)..(18): Xaa can be any naturally occurring amino acid
SLDEERTGIGMYWDEERXFCHLASPQLSLEVEQQSQSSELNSLLSKPQLPY

SEQ ID NO: 1003888 - protein, 38 aa, Homo sapiens
WRTGIGGQAEHACMMCMMKMVRPGEDVGCKGVCRSSVW

SEQ ID NO: 1003889 - protein, 34 aa, Homo sapiens
PAVITSWKVYFEGHWVVMGSLVLVPVNMALVRGV

SEQ ID NO: 1003890 - protein, 57 aa, Homo sapiens
TGSYEERHWDAERYGMRNVTVDEERHWDEERHWDEERHYEREQAALTWNHSTPLHCS

SEQ ID NO: 1003891 - protein, 33 aa, Homo sapiens
SLIGTYWDEELYWDEERTGMRKYWDEERTGQAV

SEQ ID NO: 1003892 - protein, 52 aa, Homo sapiens
LETAEQPHLDVSYVLLNAIACGAVCRDPGGHDTWRWAAAGDMLTNQPGRRLI

SEQ ID NO: 1003893 - protein, 45 aa, Homo sapiens
HVVITRLFFCSGEDSAYETPTSVSGKKSTGSPSQETQAPYIAKRV

SEQ ID NO: 1003894 - protein, 98 aa, Homo sapiens
CSDHAFRRCLTFTGVTSESRGQLVRAKAGSPSLYLSQTSSAPSCDKGSPHTDMRAAVQSKCSHNNIHTATHAGVDNTHSLNALLNVTRLPPAIPAVST

SEQ ID NO: 1003895 - protein, 37 aa, Homo sapiens
MIDALELLIGVERAAEALVYISCQLNQGRSTEHEHFI

SEQ ID NO: 1003896 - protein, 91 aa, Homo sapiens
QPSRKYCFVVLKGRPCNIVDDVYFEHLASTGTPRSTLVGIDIFTGKTSEAICPSPPNMDVPNIKRNDFQLDWHPGWVPITAPGQRDRYLED

SEQ ID NO: 1003897 - protein, 53 aa, Homo sapiens
NGRVVVGHDAGRDSQEPQHCAVHGGEDPALDILDALAAVVLPAPKDVHAADPG

SEQ ID NO: 1003898 - protein, 31 aa, Homo sapiens
MCEKMESRVHNKYMRIEETLTIQREKYNAEI

SEQ ID NO: 1003899 - protein, 37 aa, Homo sapiens
MSLLPCLLAALVHKSYRFGIHLIVPFTDTPLTQKGHR

SEQ ID NO: 1003900 - protein, 35 aa, Homo sapiens
DIALQYIRVGSEQSCDSYQTQASLWVCPNAEAGLS

SEQ ID NO: 1003901 - protein, 52 aa, Homo sapiens
STFWLLHLHDWVTMFSPGSRLAYLKEQKESHRTGNMDQTAARVHTRCALQTL

SEQ ID NO: 1003902 - protein, 46 aa, Homo sapiens
TLDDAYDGVLEIFLDCILEIEFCSCPLRRKCRGGIWAHGNPPPLGF

SEQ ID NO: 1003903 - protein, 40 aa, Homo sapiens
DLEDPGDACLSDQSAGPPPAGERADGWFDLINARIPPGGG

SEQ ID NO: 1003904 - protein, 108 aa, Homo sapiens
MVSVVVIKELKLVVLCEVVLVLAITKVNLGVLCKVVLVVEIAKVNLGGLVEVVLEVAIEEEKPGVLCEGISVVVLEEVKLGELCEVVSVVTIKEVKPGVLCEVDLVLV

SEQ ID NO: 1003905 - protein, 135 aa, Homo sapiens
MVALQSHQSTDYILNGSPSPNRTLEPFHFEESYFTFTVMESRPRCSHDWSNILWSLLAYPFGFDITGGNYDQSLSMWTRELEPIIVCQNLLIAETESTNYNLTVEATDRTTTILHQVFLQVNRPNDPRPQFSTIK

SEQ ID NO: 1003906 - protein, 173 aa, Homo sapiens
SPGQIDMNGAIITWDLPSLGQGPNPNSRFAQIRTTLTSYEETQFNFCFFPYKSREQPVSATGPFLGKQRTEMGSTRRGIFMHFLGTIPFAEKLGVAFIASEPPTALSQWAAWPPSRCFPSLLRAAWRHRPEQHSHILVSRCTCLALTTVWTQVGSTLPPRLFLCIFSICVTSG

SEQ ID NO: 1003907 - protein, 115 aa, Homo sapiens
YGGSNYTGLVSTNKLIEGEDHLLPRRRHFICRCVKPSTTINMLKHDTTVLQLYPLLKTPRVQENNKSQVDQIQYEKMSVELENTVFRGQRGLACPFYYYVHYYYVKITSLGFYVS

SEQ ID NO: 1003908 - protein, 47 aa, Homo sapiens
WPIILKISYKRSNFYIKILAVISDEQFESTIGFRAPKPPVIARDCLA

SEQ ID NO: 1003909 - protein, 47 aa, Homo sapiens
WYILAVGFHVDDDFLSGSNSRSFGDFNRLQNHLKATGNPGSPRLLAK

SEQ ID NO: 1003910 - protein, 92 aa, Homo sapiens
HAGVSQESTAFSGSQPPPKQGYLPHSQPQTSVRNQLPTTPGHSEESATVHSSPDAMATTVLPAGSTPSVLVGDSTPSPISSGSMETKAVVGS

SEQ ID NO: 1003911 - protein, 45 aa, Homo sapiens
ELLQSDFTWMLIFSRSNSRSFGDGLHEISICKPLVTQAPRDCLAK

SEQ ID NO: 1003912 - protein, 54 aa, Homo sapiens
YELSLCCKQNTSFAKSQTGACMSIASMAYSTWYKRPSGENIVVLGSYLRDCLAK

SEQ ID NO: 1003913 - protein, 68 aa, Homo sapiens
KLLLHYPPGALWQYSSDGGLGGMRLEEVLLGVLCEVILVVVVTKFVVGTVAVTVVRKEEEVGRREVTV

SEQ ID NO: 1003914 - protein, 124 aa, Homo sapiens
  misc_feature (28)..(28): Xaa can be any naturally occurring amino acid
SLYTQIIADSQLTAHSTDDIPMFDDSPXPHTTTPVDYEDEEAAVVQYNDPYADGDPAWAPQNYIEKVVAIYDYTKDKDDELSFMEGAIIYVIKKNDDGWYEGVCNRVTGLFPGNYVESIMHYTD

SEQ ID NO: 1003915 - protein, 66 aa, Homo sapiens
SDSYEKKILLSQSECMRSSNASQMRSVYVLGIGAPVMHVQSVMIVTGACLCPLISVAALLYVHALA

SEQ ID NO: 1003916 - protein, 110 aa, Homo sapiens
LAELLRRCLAETQYSFEKHIRSILNVVLQSSIFEKLLRRTYALLLENGFSFLSMSSQVFREQYILKQDLDKEEISGGSNYYDEPKKKQVEDLSYCREERTSLRDMAERIA

SEQ ID NO: 1003917 - protein, 55 aa, Homo sapiens
FQWSWSYFLLMAGVRCVGRVIPSSLHLWVTSWAANIARIWGRIISVCLKLHPTSH

SEQ ID NO: 1003918 - protein, 46 aa, Homo sapiens
MVDPIFAFTISLRWSSRARTALALDTLAGDMTNSYVLTFNPGSIDL

SEQ ID NO: 1003919 - protein, 118 aa, Homo sapiens
WCPSMVILEAVGVSAFSLLFLLFYTFFIFFFLFFLLLLLFRVCYYFYMNCVSFYLFCLLITGHIVPNHPIKTAQNLLLLLVQQEVMSLPLLVLLAWVALPLTMTDIGFNKQPDFPYGC

SEQ ID NO: 1003920 - protein, 157 aa, Homo sapiens
VNPGNSSHPPISASQVAGKTGTSHQTGLILKIFGSDGGLLVFPRLISTSEAQSIPPPRSPKCVGITGLDDGAGLGLLEKESSGSRKFSGMSLWVGQSLSLDDKFGSGVESGHRDRVGGNYRDTGGPRMYRGDPRGEYSNKEIRVLMQAQVGPESPSS

SEQ ID NO: 1003921 - protein, 67 aa, Homo sapiens
GRYYANSAPHQPPSTAYLTKINSFLGNGSKIRKINFLKFHYDLFIYMTAKHIKKSEGGAKVLAFMVI

SEQ ID NO: 1003922 - protein, 147 aa, Homo sapiens
DGAHIFFLALGVCNVPKKAKNNSPNGSHVLKDFARGNSVLMMWKKLNLSHLNDIQWISNITIIARAEHSMCQPGLRGPRGKRPRNTSGGEGRLPRGRSHGHEACQSPRALRWHQDTTRTNLAIFVSLRFQIEVDLALGRGISVPRRN

SEQ ID NO: 1003923 - protein, 45 aa, Homo sapiens
TGTVHEHLPCAMRRIQQEALITPDVGTFCLDFPASRTVRNTFLFS

SEQ ID NO: 1003924 - protein, 57 aa, Homo sapiens
LDLQVITTLRLSPAAGAGGGAQRVHHQLLPKDTLYYDSFAPLTGKPADELKAWGGVV

SEQ ID NO: 1003925 - protein, 119 aa, Homo sapiens
AGTVVEWYVVDVKRRGIHSTMVDVIDDVMRRGAINITAHGRGSPQDLLKGPGESSGYGSVPHLSSKVDNLIKGDIPTVFKVFRYLSVSGGSLEGLDDQGRGRGHHLNRGLSGPEGSVPW

SEQ ID NO: 1003926 - protein, 84 aa, Homo sapiens
SSRYRLIRVHGQLSHRIALPQVPGYEGAGVIVDPQRGRSTGRRALAVAGDGSWQTFVTLPEDRVVWVPDDIDDNDAAQIYINPL

SEQ ID NO: 1003927 - protein, 74 aa, Homo sapiens
GFHTEGQEKPVQDLWRGLGYGDGLHLRGSDETFQCWVWDVNDDFPEELPKQKDLMKECKHFGKESVPNTMMFRR

SEQ ID NO: 1003928 - protein, 110 aa, Homo sapiens
  misc_feature (106)..(106): Xaa can be any naturally occurring amino acid
MDMALWERPPWAPASPSEIGIGTQQCPDRFRASPCQTQGNASHRWAMPTESIFLQGLVNRAVKSLGLVLPGGSVLSTRRNVLKGPSRIPGAEFPQGPGVKKVIPLXLFAP

SEQ ID NO: 1003929 - protein, 107 aa, Homo sapiens
YNSHQGVSITGAHHSLLRKQPGNQIIQARFITISGGLYLPLLQASEYFESPFTISEGIWAQHFWVATGFQGLQVIRGSIFLTIGFIGQLIFPFTSKHHLGFEAAAGY

SEQ ID NO: 1003930 - protein, 74 aa, Homo sapiens
CPHSGKSVYGASLILEEQSYSAADRLYNVGKELYRAGVLMEGESILASYGSARGSWSACRRLTSGGVCTQREEQ

SEQ ID NO: 1003931 - protein, 57 aa, Homo sapiens
MPELNTVSEVVRFAILLENGFLLEYLCGHPHGEMALTPKAASAQAAPGRLGFSFVRP

SEQ ID NO: 1003932 - protein, 82 aa, Homo sapiens
MNASSIVYIITVFWVTTGIYGLTSKTKTGYLKIMLRDFKLFLYDQFYTDSASCLKVLHSPKSKPSFRGVEIACALNHNNKQL

SEQ ID NO: 1003933 - protein, 59 aa, Homo sapiens
MPQFSLSLGHIHLALLEASTEGSSMLILSYETSGVSLKTHALAGRSGLMPVIPALRLVP

SEQ ID NO: 1003934 - protein, 53 aa, Homo sapiens
RVGCEWGISACLSGAAEWGAEWSISADGAGASADRAGCLGPDGVSVLCADWST

SEQ ID NO: 1003935 - protein, 50 aa, Homo sapiens
ITGLQALFLQLPRARVMSDAWDTGRRVGELLRDGKELDSPCYVIPVSNGE

SEQ ID NO: 1003936 - protein, 70 aa, Homo sapiens
CVQLTSWSPACVILWLVTSLGAADRPGDTYNSESNSSSDALSKVLIWWLSATLGCRNDEIHSHSTGGDTR

SEQ ID NO: 1003937 - protein, 104 aa, Homo sapiens
HIRIELVYPRGCSVVMLGRVVPPASWTPGPAVPASAGFDFELPAPDTSREGSLIGVPLSYRADDANVVRDRDLEVDTTLKSLSQQIENIRSPEGSRKNPNRITR

SEQ ID NO: 1003938 - protein, 142 aa, Homo sapiens
MFSASLLRYQHRGHLTQLSQLDFCDCQHQDHFTEYSHALTSLTHDHRDQLTQYPRLKYFSRHHQDNLTQYWQPHFFDATTETTSHNTPGFNSSIATTEITITQYSQLHFFNHHHGDNLTEFSQLHFFDHHHWVHIPQYCQLH

SEQ ID NO: 1003939 - protein, 55 aa, Homo sapiens
DPDDVVHVAKEEPGAGACAWTSIYAGRVLFYGGAYLYKIFGTSTTMTCTTCGHKR

SEQ ID NO: 1003940 - protein, 51 aa, Homo sapiens
FLSVIAECLPPAQSNYRNKYCMSMITSRNNLATFSAAHGIYGHKSCSSDIP

SEQ ID NO: 1003941 - protein, 88 aa, Homo sapiens
MEQRWTPKAETLVQQASQCLSKLVQIASRTKRNFILDQCNVYNSGQRRKLWLFKTFSRKVAGGGPIMTEDCDEERCSLSEGKQQAHDA

SEQ ID NO: 1003942 - protein, 98 aa, Homo sapiens
SFTLFKNVVRPHRSLLWKNLGENDYWVHNEMKGEIKMFFETNENKDTRYQNLWDTFKAVCRGKFIALNAYKRKQERSKIDTLTSQLKELEKQEQTHSK

SEQ ID NO: 1003943 - protein, 61 aa, Homo sapiens
MNYDNPNVQSVNKWMSQTVVYAIQQNTLKPKKGTRHWYMPPCGVSLENMLLSWKKPDYSKA

SEQ ID NO: 1003944 - protein, 46 aa, Homo sapiens
AEPFETLVDVAATDCKMDSVMKWSEKCHGLMESGLHLCGALEARDF

SEQ ID NO: 1003945 - protein, 103 aa, Homo sapiens
MTGGGIYYFSLVSVGRPVHEAVDRSLDFYERSSMTFWLLVRDTPGENVEPRHTAIGRLVLNVVPADLRPPWFLPCTFSDGYVCIQAQYHGAVPTGHILPSPLV

SEQ ID NO: 1003946 - protein, 51 aa, Homo sapiens
SAVRLCLRRWPAQPEPLGNTGTEHASEAWEESQVRTSIELAADTLCEPGCV

SEQ ID NO: 1003947 - protein, 108 aa, Homo sapiens
  misc_feature (96)..(96): Xaa can be any naturally occurring amino acid
QKRSEWIAKIPNFGVTTLVNHPQVSARLGEEDEEARHYWTRVEVTELEDIKSGYIIDFYLDENPYLENKVLSKEFHRSESGDPSSKSSEINGKSGXDVTKRSSQTQNK

SEQ ID NO: 1003948 - protein, 80 aa, Homo sapiens
FVLNEKPTLSFRHETTLAPPILTGLSYSYQKQYVWCQPDMVLAEILYFISWRKQPRSSTSRYSSVATEEEQSAHVGGTEL

SEQ ID NO: 1003949 - protein, 72 aa, Homo sapiens
PVIDNAQTPDLGLLYRCLPSCRLLLLDLSLTRIAITFITISQHQISTLHHHLNPGQGIVKLYFLYFFFPLIL

SEQ ID NO: 1003950 - protein, 132 aa, Homo sapiens
MSDDAMYVSMFGQSVLVVLVPIVCDLDPWQANWCRAMPLGAWPVSQPRLAYGDRGGGMETELSDVYLRAYSQAMIERRVSAQRGLNLDWIWRHDTPVKSCCVLAFSADSAGSGDRPPVPLKSLVPLHSSSFG

SEQ ID NO: 1003951 - protein, 53 aa, Homo sapiens
MLNWVRVPHDEIIMAVSTDTRVQTPPGGSSSVSANTVSMSAKLAKRRAIILPQ

SEQ ID NO: 1003952 - protein, 50 aa, Homo sapiens
SSHRWIPPIFPRVTRETLVSRYAVPAGSWDTDAAASPEVTSAPLWVGTDA

SEQ ID NO: 1003953 - protein, 37 aa, Homo sapiens
IEDPSHWVRVPEVHAFDQTSTTAKAQYRSLARNHPGG

SEQ ID NO: 1003954 - protein, 58 aa, Homo sapiens
SSSAQVSLTIFKRYNSCGNKYIHTVCATITTIHLQNFLIQPKLKLYPLNKNFTIPPPS

SEQ ID NO: 1003955 - protein, 110 aa, Homo sapiens
SSCFLKSPMRSKRALLSYHASKIHRQSPNMKNPLNNLRIMLKLNPYAKTMRRNTILRQVSIHKLRVDYGSCCIIGTTSHFRLEGGGCRREACGRLEEDVTLLLVSSKQEL

SEQ ID NO: 1003956 - protein, 108 aa, Homo sapiens
GGRVLRSPLFLLLEKAQNDSRGWPSESITQEDPFSSSYLQGRHPTEQYLRIMLKLNPFAETMRRNTEFFAMARNSQSSACGIGSCCIIGSTSQIQTENGGVSQCKKPV

SEQ ID NO: 1003957 - protein, 82 aa, Homo sapiens
STGSPQFLLLEIMDVHPCNTKAEYLSRIEGGSECDIQLIWAILIWYSETVEQDDTIKGEQTRRKYSRRELAAVRPWFQEAGD

SEQ ID NO: 1003958 - protein, 75 aa, Homo sapiens
DTPSSCFVEINSMILDTPEVGDAAREPQFLVDRDVSIFLPCTVYLDPQLREIIARIWFQKARNGGYRRSIFVLCC

SEQ ID NO: 1003959 - protein, 66 aa, Homo sapiens
LRENLLRPSGYVSPSSPYPFKWYDRNVSSCSYPCQVIHGLKRYQEQNHYAGPGELDSTISRSRNWV

SEQ ID NO: 1003960 - protein, 114 aa, Homo sapiens
MHDPPSSCFLKITTSWSSGCKMCVSAPVHITDQHLVPVEEDAISSEDDEAGGCDTLKLYLSKRVCPLQAGIMVPQIIVELACLLKMITIIISRIMITDDRVESYTVDSICTLKY

SEQ ID NO: 1003961 - protein, 99 aa, Homo sapiens
AIALHPINKSETPSQERQKEEIKKERQTETRKKGKKEKKEKTAERKKERQKESKTERKKERKQRKEKEAIDKESGSSTAEEGDFSKVCLRCDHCGYYTN

SEQ ID NO: 1003962 - protein, 138 aa, Homo sapiens
LYAAGDSMTDPPCSCFLKWEKRCAAYLSEAESNLTHTSITRLSEQKLLLHVVSQNCDGLHLRSVLTRTAISISTVNMFIEVCTSCVPYSEKYVRVFDVTDRTALHRHQYRPDLSQVWDPAVALHCATWGEGDVGAVSE

SEQ ID NO: 1003963 - protein, 69 aa, Homo sapiens
NTAHSSIAISLSWSFYCHKPGALMHKLKTNLYLFKTSVLQGFSINIFSDYDQQAYWCSIGTFQRSTELA

SEQ ID NO: 1003964 - protein, 30 aa, Homo sapiens
MLYAVILGSPTLYSVLVAPSISSKQELGVI

SEQ ID NO: 1003965 - protein, 48 aa, Homo sapiens
MLNGRVETAGNAENPSLLKVQRLGSRGGAHLWSQLLGRLRRENRLNPW

SEQ ID NO: 1003966 - protein, 35 aa, Homo sapiens
MAEALLAGLAWFDPVGGFRSVKLDTLSLGKAMLSS

SEQ ID NO: 1003967 - protein, 139 aa, Homo sapiens
  misc_feature (97)..(97): Xaa can be any naturally occurring amino acid
RWSSAAYQPQFLGCLGRSEHCVRRWPSIDAKKFAETQSYRGHTTCQRRVHGEEKQKPQAERKEAKRAVAPAPEEEMADCEQALAAEPKAKDPFAHLXKSTFVWDEFTRKYSNEDTALCGTGNISGSTLIRTAGPCGTQS

SEQ ID NO: 1003968 - protein, 94 aa, Homo sapiens
AGDGKCWGVQWTASFLRNVTWSSLRWKTSLARCDNEFDTVVEEGSLPQVSQQDDDPLFHQFQRGDWGCSEGRLASCITQRTMHGSQPLALKTRY

SEQ ID NO: 1003969 - protein, 128 aa, Homo sapiens
MTETGSGKLHIIRDLVIVLAECTHTLLEGTACHTPALTGEPNAYEATNLDSTVLSQTLYATVTQWQVDVSTHRREVKTQSDHLSGPPVCMVRREQKHREAARQQDHCCTGGLETSAEQRSNSCRIPES

SEQ ID NO: 1003970 - protein, 84 aa, Homo sapiens
SLRVCASEVLVDSAEEGSSLRGEWRQKREQRLRKFRELHLMRNEARKLHHQEVVAEDKRLKLPCNFGRQTKLVLDVGTYNGTTD

SEQ ID NO: 1003971 - protein, 130 aa, Homo sapiens
PLRIIAANVVAICCLTSRPSPPSGNLRDHARGREPQSQDRRLLGGCCPRVPRMQPQHPAPSVQSPPAVLKTVVWRPTWEAPPGDLAPQVTPLGLTCSLALSNCCVWTSPESSAPRVLLQNTASFGVPAWQ

SEQ ID NO: 1003972 - protein, 182 aa, Homo sapiens
YSRHPSVVLPQILYRPIETSAGCFGASHVLLSIHVLSLNSVLYSILRKLAGTMGEWLGDQMQTGFGGKARDRVEQDYVASANARGTAMTGYERLTSVSSSVHYDQRDNGNCTWLTAIFRIKDAEIRDKLWGRCREIPVLSGGTSSGLLVVVGVLSVGIVLPVNFSGALLETNAYSFGRNTIA

SEQ ID NO: 1003973 - protein, 45 aa, Homo sapiens
MVIFTASHEDTFQRTPVTSSLTSASIDFLNSRNHRMDKPGRGTEL

SEQ ID NO: 1003974 - protein, 114 aa, Homo sapiens
  misc_feature (7)..(7): Xaa can be any naturally occurring amino acid
MSHRPFXSYGQCFRFSGVNIRSRFCSKSSNILSMVVVSLNHQNRGWHGEKASFDEPLLMEMVNCFQVFQRNDLLLFPGISSLTSGNKSQDWSEGKVSNQQTRPCSSKIQSNHSE

SEQ ID NO: 1003975 - protein, 180 aa, Homo sapiens
  misc_feature (4)..(4): Xaa can be any naturally occurring amino acid
  misc_feature (142)..(142): Xaa can be any naturally occurring amino acid
MVLXLQDIRVSVTEDECGGAQKLIEGRLCVMRGCLRDALILLGAGCLPQGQPAPIVGRVLLLLPPDAWARMLFCLDFVPSQGSGVSLLAGPRLCQATGVFSLQHVVGAEEFSQVYLRGVPVPVLDQLLKLFHQHIRRLLEVXHLGRSLVPQLIGDVHHHLDPLVYQVVNVSKVSDMAYEL

SEQ ID NO: 1003976 - protein, 98 aa, Homo sapiens
KNRPFSVVQAGAQGHNHSSWGPQILGFKRSSHLSLCEERELRVCPTTPGVNNGILGMGVRQVAGAGLELSPSDRPAGASRKGGDNRREQQCRVRLYFF

SEQ ID NO: 1003977 - protein, 64 aa, Homo sapiens
MVLSLVTRWWSGRVQAWCAFFGWSDFGLLWFISGPGPPQKRMLLHSFSKVPVMEASAQHFGVPS

SEQ ID NO: 1003978 - protein, 154 aa, Homo sapiens
MVLSSSCLSRGQLRLKGSKGHLVAGHGPQHPPHPGVPVAPGSAVPAAAARSRPGLRNGAQLTARGSGTLPAGAAGGSGHGAALSGSAPPPALPPTAPGAPPADASPPEGVPAKVTMGHLIWHLIPVLLGLPASTVRGGQFLRQPQHLRLQVRTI

SEQ ID NO: 1003979 - protein, 82 aa, Homo sapiens
SIAYLFYFYKASITLVRCNAVDHVYLTVLPLSHQRTTDNEGRACLTHLSIYLAGRARQELACRCRQPWGGRQWGGTTFDIYD

SEQ ID NO: 1003980 - protein, 80 aa, Homo sapiens
RGNLTRLFTFHFICLHYAVLAGLHLLFLHETGSNNPLGITSHSDKITVPPSQILYLPLHLALHYCSPSSTPPPILAQTRK

SEQ ID NO: 1003981 - protein, 45 aa, Homo sapiens
SFGYVLRKEQCSTHERVTEGHRGDRGQRLRRLINIQLGPMEAQAL

SEQ ID NO: 1003982 - protein, 53 aa, Homo sapiens
CSSRSTYRCSYQPHGGRHTVHVTYAGCAHPSQPYTVTVEQACNPECLAGRVGR

SEQ ID NO: 1003983 - protein, 175 aa, Homo sapiens
SQSESALIFATMPPTRGLYPSSRPLRGLRMLLADQGQSWKGEVVTVETWQEGSLTASCLYGQLPKYQDGDLTLYQSNTILRHLGRTLGLYGKDQQEAALVDMVNDGVKDLRCKYVSLIYTNYEAGKDDYVKALPRATEAFGDPAVPRTREGKTFIVGDQISFADYKLLDLRTGLW

SEQ ID NO: 1003984 - protein, 85 aa, Homo sapiens
  misc_feature (77)..(77): Xaa can be any naturally occurring amino acid
GVAEGVSEDPYAGRKSRRAHWSGYLNQVVCLDDTTVKFEIWDTAGQGAISQAEPPMYLQGVPKAANRGLRTLLSQEXLCAEQETL

SEQ ID NO: 1003985 - protein, 85 aa, Homo sapiens
MGSALAGFMGGSSWKAGDPEMVGRIPLGGVLVTGEFRHSIRNFLVIDDPGTSRGGAEERAAGGRAVVPGRELARRRRAPPGEWRE

SEQ ID NO: 1003986 - protein, 152 aa, Homo sapiens
AFEVTVSTLSVVVQSDPDVHLFCSKQVVLEPFSTPPSLSTPEFRAIEVLSLALTIRTICSGQFKPSALNGTEITQDNPSSGKKPGSPQAKSLQPAVAEKQGHQWKDSDPVMAGIGEEIAHFQKELEELKARTSKACFQVGTSEEMKMLRTES

SEQ ID NO: 1003987 - protein, 42 aa, Homo sapiens
SHFTLSKCEVMAEEHLSSPTEGKLPYLMMTHLPHDRSQAHHL

SEQ ID NO: 1003988 - protein, 50 aa, Homo sapiens
WRDFCLVLNALITLGAQEKKKTIVTDGFPGFNRGSSLKKFPHPGSASRKK

SEQ ID NO: 1003989 - protein, 37 aa, Homo sapiens
LIRVCAAADHNYQSYILRALGQLMLLCGWNAGRWWPT

SEQ ID NO: 1003990 - protein, 133 aa, Homo sapiens
QEQLVVAAATERREPPKADGSPGRTVDLFSTWGRCNPSPQTRARLRWSPLMIEWGTDATVVVANLQTDTGNIADTPPRKRECRVSSVISSTSRVVDAAIVEHLLDDPPQGDEGEMLSMFSSVASLAPTIVSQS

SEQ ID NO: 1003991 - protein, 65 aa, Homo sapiens
MRSQLLSDELIRHRVHVALDYIEVIGDVEWSSRTGACDRPRYLDVTKAAGPPPGGPERGWNRVGF

SEQ ID NO: 1003992 - protein, 68 aa, Homo sapiens
KDLSDCASMVRVSYDYGLISSSYWLNMFVVYDIVIEMLGGSVHVKAKRGRDEGCKGIVKKASLRLRTE

SEQ ID NO: 1003993 - protein, 40 aa, Homo sapiens
EDLMVIFRVVHLSGLCIFPGCASSGLCILPGVCILPGFCI

SEQ ID NO: 1003994 - protein, 100 aa, Homo sapiens
FLLLRTQQNDAACPGLSAESVRDAATDDDLGCLNVQVFLPGNLWTSDCVPLSTRYQVSQSAEEGSTLQCRPTCALILAPGGASSLRNASWVWEGGTVDLR

SEQ ID NO: 1003995 - protein, 145 aa, Homo sapiens
SIMCDQSDEQLSQEHENREKKPCLTHFRPLILRGNSPIYLNFVNYGQFIADLQQTRLKNTVLPSGLLFVAHKYDPTTPWINARKMADKFSAPLLTINGDGHTLALAGTNLCVDEAVVRHLLFPGKSDDLTCQGSGTGDTNLISHK

SEQ ID NO: 1003996 - protein, 65 aa, Homo sapiens
  misc_feature (12)..(12): Xaa can be any naturally occurring amino acid
MAYGGTQTTAWXPLVRSSTPGELYLTDPVDSDEERPCPAPRRTVSHMRGIHQAVNVRRSNLALHP

SEQ ID NO: 1003997 - protein, 134 aa, Homo sapiens
ASYDDWRRKVLYLPRPSFSYAKSIVQVDGKIGLFRGTESPVLMSNASLYCDSRNYEEGFPPDQIEQVSKKDDMKTSLKESSEVDRSYEMMMQCVSRMWAQPLSCHLNALHGPVSGTGGQVQWCAELHWEDFQRG

SEQ ID NO: 1003998 - protein, 39 aa, Homo sapiens
LLVESCSCLLISLICPYPLILYCLSTGLSLSALILFSLY

SEQ ID NO: 1003999 - protein, 38 aa, Homo sapiens
MLLCHCGTAETEGYCVSCASAEFFQLWVPDARNSVNPL

SEQ ID NO: 1004000 - protein, 95 aa, Homo sapiens
LFLLSLGNPAPMKSLAGKGEECQINSEEELEKELAPEPEETWVVEMLCGLKMKLKQQRVSPILPEHHKDFNSQLGRRIPQRAPPILFFLKRGNFQ

SEQ ID NO: 1004001 - protein, 46 aa, Homo sapiens
KLARRGDTNRWCQLFRIQWGGSLETRKSRLQGAMFTPLHSGLGDRV

SEQ ID NO: 1004002 - protein, 147 aa, Homo sapiens
LGNGIMLLRVMAKVEFCRRVSVTPGIAEMATPMADIDLFDFMSVRVSVSARVVRISGSADGLGPLQMCVPVTRTSRSGSSRSTMVLMSSQRSAESVEQVLRIHRLRSVTTWSFRLRPRVQLPLRLHNELLQAAPIGFVDVFIIGVQF

SEQ ID NO: 1004003 - protein, 66 aa, Homo sapiens
DGPQLYERPLKFIPPVKRKRYPWTNISRFPHCLPGPHPTHQRSVYIDCFSISTSMKLEFSRNPYYK

SEQ ID NO: 1004004 - protein, 96 aa, Homo sapiens
GPSAGQCTEKIPDMLRLNTQHVRCYQAVLYLYRLWLYTGIVMDSGDGVTITVPIYEGYALPHCILRLDLAGGDLTDYLMKILTERCVTASLPIGPA

SEQ ID NO: 1004005 - protein, 68 aa, Homo sapiens
MACGDHVVLQQGAFQVDVVVTQSLVDSSQHLLGHILAGLQVMVPIREDLRLHDGHNAVLLADTAIGPA

SEQ ID NO: 1004006 - protein, 58 aa, Homo sapiens
HYRTKLAQTALYRDIKLGWAQKEQQVYTAPGTKLQIFEPELAIEHCDTLNVSLALSQG

SEQ ID NO: 1004007 - protein, 58 aa, Homo sapiens
LTDGSQIEELPITSRWVVVPQTLSDDALYTRIWDLHCKGLFMTWSNSGQQQYDIYDED

SEQ ID NO: 1004008 - protein, 65 aa, Homo sapiens
  misc_feature (1)..(1): Xaa can be any naturally occurring amino acid
XTLECLELNAWLSSGRGSSAGAGLTVFGVLQAKQVQEALLVQGVTRQELACGLILDPWSCRHIGS

SEQ ID NO: 1004009 - protein, 99 aa, Homo sapiens
PGCEQTAHTSKPMRRKQWFDVGVIKGTNVLVTHYFPGTDYCVPEDDDLGTVPDYNQLKKAELGAEATPNKFRVAGINAWWRGAPPGKSQPLRRACLVSQ

SEQ ID NO: 1004010 - protein, 69 aa, Homo sapiens
  misc_feature (41)..(41): Xaa can be any naturally occurring amino acid
TATHSVWCFHFDGTHLVFVQDTLAVELVLVVIATKQNGIIXRNFSFTSRVSDVSSNSFWGYTSTAIGAA

SEQ ID NO: 1004011 - protein, 66 aa, Homo sapiens
  misc_feature (49)..(49): Xaa can be any naturally occurring amino acid
VHLSEWYAVFVRPDCRHHLEVELSDTIENVTAKIQDKEGIPPDQQRLIXCRRNSWKMVVPLYVTYN

SEQ ID NO: 1004012 - protein, 73 aa, Homo sapiens
  misc_feature (28)..(28): Xaa can be any naturally occurring amino acid
LAADSGWGGTARADVMSRWFSSLIIIMXMSIPVAERVLKPKTMTLEASLAHSHTGRYRSLEISSVWNSRTCRT

SEQ ID NO: 1004013 - protein, 37 aa, Homo sapiens
LDGNSEISGPRGQMKKCKAGGRHPGGTLETDPPASRA

SEQ ID NO: 1004014 - protein, 47 aa, Homo sapiens
MRNPKVLSESVGMHWVRADSPRSPSSPVCGFRLRHAHPKLSVSRLPG

SEQ ID NO: 1004015 - protein, 116 aa, Homo sapiens
GGQWNLKTSQTTCCQVVVGMVCALCGNPGTQACVGSGVPFRMKHFYFPFLPWGSQAVLLVRWAGGTPQSSHCVAGGRNLQYDRAPLLEESSHRRYGAPSFLVTWLGPLGQDPSSFM

SEQ ID NO: 1004016 - protein, 75 aa, Homo sapiens
ALEDLSGCASEKELQAERRQVILNRGGNKYKSMEVCERDDQGTVENANSNAYRDQAGNINEVKHISYKKINDNDS

SEQ ID NO: 1004017 - protein, 92 aa, Homo sapiens
PTHPGVHHRNKFACMGGISGSDGRFSGWVTEGISSIAVTAWAGWDLGFAFATSCCSTGSLRVDLLVLVYRTTYAEQGSTHCPWDIELLALLA

SEQ ID NO: 1004018 - protein, 52 aa, Homo sapiens
MLVIVTVLVLLFKSLLLGGCRVLQLVKFLWLFLFLLLHIISELTSLTDPLNE

SEQ ID NO: 1004019 - protein, 41 aa, Homo sapiens
MSILLICRMQVMCAQKTVWVRSWDVSTLMMSEVVRDAKIML

SEQ ID NO: 1004020 - protein, 41 aa, Homo sapiens
LPMEYTASSLVRIYYLPQRPGSTETTLFTLTHHSSGSLKIY

SEQ ID NO: 1004021 - protein, 34 aa, Homo sapiens
RSPLIILLTSCICSRSSSSSQSVAILLVFFLLLK

SEQ ID NO: 1004022 - protein, 69 aa, Homo sapiens
IRGSTLANAPLGLLPTAGEAEVTPGRYRCIGGTGGVVWCIEDIRMTASLWSTLNSFCIPHSYGSYNHSL

SEQ ID NO: 1004023 - protein, 37 aa, Homo sapiens
PGCILPVCIFRVVHLPGCASFRVVHPSGFGHPSGLCI

SEQ ID NO: 1004024 - protein, 54 aa, Homo sapiens
LSSDDDEVTVTEDRSMPSLKQPCKCGAFWAWLVAKALANVNIGSLTCNVGHGIS

SEQ ID NO: 1004025 - protein, 55 aa, Homo sapiens
HKAGCALGVVSLPGSCVSLLAGPRLGPGNWMSFPFRHVRGAEEFSQVFLRAGSVY

SEQ ID NO: 1004026 - protein, 70 aa, Homo sapiens
LTCRSEEVVTAIVPALAVCVLKVIVSFGSLGVGLRNLCVQSSQPLNEEGSEKRLLGENSVPPSPSREQTS

SEQ ID NO: 1004027 - protein, 41 aa, Homo sapiens
ITLLFLFVLLFIILRTLRHRYQILLLFRIGGLLLVFFLLLK

SEQ ID NO: 1004028 - protein, 177 aa, Homo sapiens
NAGVLEGSCVIVCLGSRILTRHDKCETINVRVYTMRMQSWEFAIQPYTTGKQLFDQVVKTIVLREVWYFGLHYVPHHRISYLAEAGSEGVCPGGQEENPLQFKFRAKFYPEDVAEELIQDITQKLFFSKVTEGILSDEIYCPPETAVLLGSYAVQGKFGDYNKEVHTVWDLSSERLI

SEQ ID NO: 1004029 - protein, 50 aa, Homo sapiens
TGDWNEAEQIACMEARPTSAKHRLDNWIPSLAESQLQTRQHIKKLEEVSV

SEQ ID NO: 1004030 - protein, 45 aa, Homo sapiens
RSERRNKETCAKSYLVLPQRPHALPVLERSRVCSLGISYLSVGVA

SEQ ID NO: 1004031 - protein, 63 aa, Homo sapiens
MHGDATSERCAKVPPLVTGITFLSGGRGGGGVINLNAINKCPHAEALGPDPSPTAAALHGPLP

SEQ ID NO: 1004032 - protein, 53 aa, Homo sapiens
VPSRNSHHYSITEISAYSNLRVLAVLFIILNHMGMVYITSIWTSGLSHQTPLF

SEQ ID NO: 1004033 - protein, 59 aa, Homo sapiens
LITCIVDTGEFSCTHVCVDTGESSRHTHSAVDTGESFSPHTSAVTLENPSTHTHVAPWT

SEQ ID NO: 1004034 - protein, 66 aa, Homo sapiens
NRNTESIARSLYGPGWYRIITCSREPSCFHEVDHFMQSPDNVAKHKHTLTDTYLNIRQPTSYPRKK

SEQ ID NO: 1004035 - protein, 105 aa, Homo sapiens
  misc_feature (46)..(46): Xaa can be any naturally occurring amino acid
MSVSMPMEISTLGTTILVSTTAVTRFPESSTPSISSVYTSMSMTTXSEGRSSPTTLEGTTTMPMSTTSERSTSLTTVLIRPISEMSPSEARTLSTPPGDTSTPLL

SEQ ID NO: 1004036 - protein, 118 aa, Homo sapiens
LLPPGYAQQRNALHDVGCQDKVLDADHLVYVELRVNKGHARQFTGPQEPASCRGRRSRAGGRLLIMAVIEVVPEPGQPLSTVTSSLSFTSRRRSAPVTALCHCNGHLMSAIDQNGSGY

SEQ ID NO: 1004037 - protein, 153 aa, Homo sapiens
CASAAEVCSGCTLLIPDIVPPASTWVFPTLAIMHHNKQATENAKAEVRRILGLLDAYLKTRTFLVGERVTLADITVVCTLLWLYKQVLEPSFRQNFPNTNRWFLTCINQPQFRAVLGEVTLCEKLAQFAAQQFAEHHPKTDNHGTRRVTGRDA

SEQ ID NO: 1004038 - protein, 82 aa, Homo sapiens
  misc_feature (40)..(40): Xaa can be any naturally occurring amino acid
LQERQSGGTYRFHDMQNQQAVIQTTARKSSFLSPCTIYRXQEREGSAPKGLGSSGAVALQCSAPAAVLMGWATVEHLVAFPQ

SEQ ID NO: 1004039 - protein, 33 aa, Homo sapiens
SQSSNRAHASAIAQASVGIWSLQALHILSIHRS

SEQ ID NO: 1004040 - protein, 36 aa, Homo sapiens
MHVVFGSSNTVQAKVIPELNAQACPMVQGRLQVQQR

SEQ ID NO: 1004041 - protein, 51 aa, Homo sapiens
  misc_feature (33)..(33): Xaa can be any naturally occurring amino acid
IPPVSSPRLLFILATSSLAVYSTPLISDEHQTXNYALHQQGCTTPGKVTES

SEQ ID NO: 1004042 - protein, 49 aa, Homo sapiens
CYGCASPSVCMTLADLPGDPSTTAACPDRWWLEHRKAQVAERMASLPLD

SEQ ID NO: 1004043 - protein, 84 aa, Homo sapiens
FPFSRRDSRVWGQRRRARSDVRVEVAELGTGGVPGQYHCSVTDLKLGSAEEYTRVCVRQAKRDGCRNGAVGGPGSGLALSALTD

SEQ ID NO: 1004044 - protein, 41 aa, Homo sapiens
CVLQKHCVAYRSCGFTYTYDEYEVVRDARLMPGEVKSAQAA

SEQ ID NO: 1004045 - protein, 70 aa, Homo sapiens
TKLLQNISRMRHDRAMETLKILYKYEQNKANALLILGDAPRSKVTTFEHQYVMCIKTLWQDPGIQECYDR

SEQ ID NO: 1004046 - protein, 56 aa, Homo sapiens
  misc_feature (22)..(22): Xaa can be any naturally occurring amino acid
MVSSLSSTRPRGLFHRFNEPLXSLVWGPASTIQQQCGLSNPSLKLFSLLHLRGGRY

SEQ ID NO: 1004047 - protein, 38 aa, Homo sapiens
PEFSPSPGISNEASDCLYSFCNILKCTCLPLPLSLQQP

SEQ ID NO: 1004048 - protein, 54 aa, Homo sapiens
RGVCASLCEVGELDEKRGYFDSGPCSFLAVPAWESDYQYQSAVRQWRLLLCIRL

SEQ ID NO: 1004049 - protein, 57 aa, Homo sapiens
MTYGPLPLLRAFQRLRSTPMRLSYSFSDHNCTFISHKAALTKVEAGSIHPLCHNGTW

SEQ ID NO: 1004050 - protein, 54 aa, Homo sapiens
YRSNSSVMADWTESSSSAKDSRGYIFFQNLQLWTYTKPSTETGSTVLPDHNGPC

SEQ ID NO: 1004051 - protein, 73 aa, Homo sapiens
RGSLQVEVAEKVQKSSAPRKMQKAEEKEVPEDSLEECSITCSNSHGPYDSNQPHKKTKITFEADVSVVGTGAR

SEQ ID NO: 1004052 - protein, 64 aa, Homo sapiens
  misc_feature (11)..(11): Xaa can be any naturally occurring amino acid
RDSVGFGVGVXVVVVVLRVSVIVVCVPVGVGVGVPVVVVVLGVVGWRLCAGACWGWCHPWHVNH

SEQ ID NO: 1004053 - protein, 76 aa, Homo sapiens
QTLTLPPSWLPWATPFLVTLEFQVSREAPLYRPTQLGYDYVQTSLVGALGKLSGSPRQPSRFPSGQPLVSSGQALA

SEQ ID NO: 1004054 - protein, 103 aa, Homo sapiens
LEDVILHPQLSSEKYACFHVPRSGPPARYGKKSSLIQRAMPVFTDIRYAGKWRRWDTVQSVGELEAVVVPSGQVDDTVIELIPFPGDQLVLAGVTRRGLWVAD

SEQ ID NO: 1004055 - protein, 98 aa, Homo sapiens
PEAARLQVTIGRFQYGYPEATDQRQESLLPEELEDQMPRWVAEESNRGSTTINKEASHHKGRLVAVVGVAKGVRDSGAPIQLIPFQQSRSLPESTQKQ

SEQ ID NO: 1004056 - protein, 68 aa, Homo sapiens
GSLILHPQHTNYGADWVMRVTSPGLPGNEAATPHFLLLLQRKAGVLGCFSALTSGETPKALSERAVGG

SEQ ID NO: 1004057 - protein, 131 aa, Homo sapiens
YGVTGNPVAVLNYLIIAIRDATHSGGFANEMPEAREVTKGRSEEILHLSPSQDSCLKLFKLVRDTSEPLGTVAGRGLRVATLLFHLSSILLHITVTNTAPINTTAKTARPATMTTMGIVDWEDRSQLKVRG

SEQ ID NO: 1004058 - protein, 64 aa, Homo sapiens
HTDSLSHNSETIRAVNSVTVRRHHSPRITSDQYGLNSAKGYMTCDELTQRQLLKENAWWVELDR

SEQ ID NO: 1004059 - protein, 68 aa, Homo sapiens
AVQVISPSMTIRFETPCMSILLTCLLQCPLSLSTFPNLRISFCPQGVLFHCQSAKVSRSVQTFDTGSV

SEQ ID NO: 1004060 - protein, 66 aa, Homo sapiens
TSTDSADAYDPWHGLIDITNLPLYNVTHLMLASLNWNYSSDENIVLKPVSDFRTGIENLESDLDLV

SEQ ID NO: 1004061 - protein, 126 aa, Homo sapiens
VPDTCKPRGTPHSRKSRHHYGLHGLTAGPRQLLTSRSDLSLCTDPPHGFSQSLTPIHRWLKIPGDAVHWLQWTLLHLALEAAVVEKKSLRVFLEETLCSTGGPWVQLYIEVAKSGPIQPLCHEGSK

SEQ ID NO: 1004062 - protein, 46 aa, Homo sapiens
EILITCIVGTHHLNQDDAVVRQRIEGEHSGIATYVEGLEGSNMIWV

SEQ ID NO: 1004063 - protein, 122 aa, Homo sapiens
MYCLRHITLVGTEFENGRVEKESEEWGVHDKLELKVNSLASAVPVTELGETEDDAEKMHVDMGDCCCKGYEQEKTPYRNTLTNGCVNQWTIWTSPPRPRSVGWARRQWPGLDRDYPNGPWIG

SEQ ID NO: 1004064 - protein, 99 aa, Homo sapiens
TCIVYSAERQLLGSEDPDSRNGAAIVGSKQDDTGEGILPQLVQSLAPSRDEIAAHEGLSEFFQGKRYSEYHRDQPSLSKCSQKYWKCHRECVLIGVHAL

SEQ ID NO: 1004065 - protein, 39 aa, Homo sapiens
AWQKTLRGDEARASVDPAPEVAIEHGIVTNCDDMGSEPG

SEQ ID NO: 1004066 - protein, 41 aa, Homo sapiens
TTAFEAASACGVLCRIPVSYVKLVAEYFDSITHCDVLETLL

SEQ ID NO: 1004067 - protein, 75 aa, Homo sapiens
ILHHSCSRCISALPKLLFSGSAARCHRCRVTHLYFCNYPVLLIGILAAVPTMVVPLSPNPGPAQRHLGWPKPPEH

SEQ ID NO: 1004068 - protein, 115 aa, Homo sapiens
VPLCKFITCSGGGHKQALLYIDKHLLTLSFQKQHVFKDTEQLGHLILTNSILFLLFFEMESCSIDQAGVQWHDLGPPQTPAPGLKKLSWLRLQSSWDYRRVPPWHVDPQWHVAGY

SEQ ID NO: 1004069 - protein, 36 aa, Homo sapiens
VLEDPITCIVRKVQLHPHEGCMLWAHRLLFFTNLDE

SEQ ID NO: 1004070 - protein, 58 aa, Homo sapiens
MVAYRPCQQADIYKGTCAGITLVIEGMTSFLRRLGGRVLVPNTLSLEGSVCVVWFPTT

SEQ ID NO: 1004071 - protein, 45 aa, Homo sapiens
YDGLPRAIVGLTYGGGLHGTDVRGTASWQLSYPTDTLRLTTRLYN

SEQ ID NO: 1004072 - protein, 68 aa, Homo sapiens
RQAAGECRECTQDVRQQHKEQGNSRRQPGEGRKAHRVVCSRTKACWCFLQCREPVPTAGTGLEKEPPQ

SEQ ID NO: 1004073 - protein, 101 aa, Homo sapiens
VTQPLTQDNTITSADSRHNRAQSKHSSSSQGLNHPSVLTSTAKIHSYQLYSHPLLHPVDHVDRPSTDHHPMYTMSTIHTFSNSRRHPKLHSADHHSHNGTW

SEQ ID NO: 1004074 - protein, 139 aa, Homo sapiens
LLFSSSLAAACGGLGGGSSDTRAAGRLRAVVSVVVIDAVTLGGLCDLVSVVVMAEVKLGSLWAVLSEVVLGSTVKLGSNVVAGVSSGGHEQKCSWEILREMIYGGGDRRSDAGSKCVRWSSVVVIEKMTLVVLCELVSV

SEQ ID NO: 1004075 - protein, 40 aa, Homo sapiens
SITGELSHSQNLQNNFIGIIPLPTNTCRRALSIVTADSEL

SEQ ID NO: 1004076 - protein, 43 aa, Homo sapiens
MEKHSYVDTNTIPPSTLVTTLPTPNARYDYSETTYSNSPTGPV

SEQ ID NO: 1004077 - protein, 105 aa, Homo sapiens
DHRAMSGQWTVCDVIQSKCLSKETATTDLLTILPAHTVGDVQCDMEVSCPDWLYLAACLQYGGLGAAALFTQCCVHVRTTLHCCRRGDLRCDTARIFTVCNSGPQ

SEQ ID NO: 1004078 - protein, 39 aa, Homo sapiens
EIKRKTAGCVQSGSTGDFREKKLYANMFERLAERGEQGQ

SEQ ID NO: 1004079 - protein, 139 aa, Homo sapiens
  misc_feature (43)..(43): Xaa can be any naturally occurring amino acid
MGRTWRELKVSNMIWVIFSLLALGFRGGSVEQGGVLFRCYTQXIVEGVVADVLHVIPVGDDAVFNGVFESEDPSLGLSLIPQIAVFLGHSHHHTLVARAGHNGGEDSPGGIISCEACLEQARAIVTHERGGLLFTQWHV

SEQ ID NO: 1004080 - protein, 41 aa, Homo sapiens
MWYLILALAIWVRVSNDSQAIFGSEDVGSSSYVAVDILIAV

SEQ ID NO: 1004081 - protein, 101 aa, Homo sapiens
  misc_feature (7)..(7): Xaa can be any naturally occurring amino acid
  misc_feature (65)..(65): Xaa can be any naturally occurring amino acid
YAGQWQXWGHVDRVGLVPSCHGEKSSSASSSAWRAEKPNARGLASGTEVESSGHQAKQCSSGKHXPHACWHRWGFRRQNCLGLWGCTEGAGKSMDDAMGPA

SEQ ID NO: 1004082 - protein, 50 aa, Homo sapiens
MDERKLSQIEKKYDEELEELVVEWIIVQCGLMWAADRGRLGFQVWLKNGV

SEQ ID NO: 1004083 - protein, 57 aa, Homo sapiens
SITDASTQEDRMCHAHESPSLRTAAVRLRCSRFRSRSCLAPFPGALLSPCRESVVFA

SEQ ID NO: 1004084 - protein, 45 aa, Homo sapiens
KVGVGESGCVEVVIAHKGDVVVGGAGIVSFELAQLWKVEILPDVL

SEQ ID NO: 1004085 - protein, 35 aa, Homo sapiens
MGESSCLAGMWRMRCSETFPAMESEAAPPSPFLTL

SEQ ID NO: 1004086 - protein, 57 aa, Homo sapiens
  misc_feature (32)..(32): Xaa can be any naturally occurring amino acid
  misc_feature (49)..(49): Xaa can be any naturally occurring amino acid
  misc_feature (52)..(52): Xaa can be any naturally occurring amino acid
SIKAPGKSSHSPVSAISVRGCPLQQWCKMSGXSSLHGGQQASVVQQGSXQLXNSVNP

SEQ ID NO: 1004087 - protein, 66 aa, Homo sapiens
DPHSCIQPSSNTCKLPQHQASKHISQHIIKPSTHNGLRCGWQQLGHLSSQFCQSMVHQLFPCSATW

SEQ ID NO: 1004088 - protein, 32 aa, Homo sapiens
MVYWDGISLGTWGNSDTEMVIWIGPLTGNVAI

SEQ ID NO: 1004089 - protein, 39 aa, Homo sapiens
NNTERCSSTSAGVQEESTTFQSWSSSSDTTPSPPGSGAA

SEQ ID NO: 1004090 - protein, 109 aa, Homo sapiens
MLPNLLLSSPSLPAAGVPAQQFDVMVMPNSLWQHLSTMSARELVGGPGLVAGANYGHVYAVFETVSAGATARLPPFLLFTDLVEAHSYHQVSPVNMHDTEVTRIIPGLY

SEQ ID NO: 1004091 - protein, 46 aa, Homo sapiens
LVIPTLMTDSLDLKLYSFSKPSLVKQTVKSHTETDVETQQRAGTLT

SEQ ID NO: 1004092 - protein, 48 aa, Homo sapiens
SQHHWHTDPTQHAINTTTIVIPTPTPPAHISLSMRPISTTTMVTPTTN

SEQ ID NO: 1004093 - protein, 36 aa, Homo sapiens
NPCWLPWLRSLDYSSMDVPCPKRIIHPAVRTFPARP

SEQ ID NO: 1004094 - protein, 33 aa, Homo sapiens
MTQCVYKKLSSFFCFSLRSVSEGCRMITPNDEV

SEQ ID NO: 1004095 - protein, 65 aa, Homo sapiens
MSVQVTSLLLEDFSNSPDPSKGPLFFVLIKALTMLRDCITSYQGCLRFLTTPVVSPPFGQVFHLF

SEQ ID NO: 1004096 - protein, 61 aa, Homo sapiens
CCFSPRSGRHDRDVRDDGDGHGLLGWVARLMMAPAQAPAVPVARFTVYAVGLGLPKVLKKQ

SEQ ID NO: 1004097 - protein, 127 aa, Homo sapiens
MELVRIEGFHKYRAIPLPYDYILASEYLLEQSNSTHSSLIAWTTYGLDYDRKKVSKADILARINRTGDGNYKSEAELGVPQVPYSKNSQAEVLNSQFIHYESCYQDAKDDDVHPFQYSILLKYKSIA

SEQ ID NO: 1004098 - protein, 41 aa, Homo sapiens
MYSASKPGQGEEREEEEEEQISESESEDEENEIIYNPKNLP

SEQ ID NO: 1004099 - protein, 64 aa, Homo sapiens
MSLRSHLEVDSKALACGRHIDLDDDGSSSCEPSYAVFRNMAQAGCRHGGTSHGGQAVHIVGGRN

SEQ ID NO: 1004100 - protein, 51 aa, Homo sapiens
YRVLENTLTESEACYSSSLPRCMCMITKLLMAQLAEIWADLERQNQEYQCA

SEQ ID NO: 1004101 - protein, 115 aa, Homo sapiens
GRPAVLSSALLVIYYHTQLSINLAMAVPFCMSGAGIDGCRSTIKNALAHFLPQGTPTPLIPLLVILETISLLILPIALGVRLNGNITEGHLIMDLIGSANLAISTIKLPSTLIIF

SEQ ID NO: 1004102 - protein, 97 aa, Homo sapiens
NRVCPCIRVLLGLIVSDSALLLTIHGIIGLDYLHNFSDILPKCCTNSPYESMQHKLVARICVILISMQCVCDEMIRVNSTLGWYQYQIRVYVRLIPL

SEQ ID NO: 1004103 - protein, 72 aa, Homo sapiens
YGIFSNRRLFAYTENLILGRPSGELAAASTSAVAASSCTFVMEMASFLQSQDLTSASFQLFFCSFLTSIRIC

SEQ ID NO: 1004104 - protein, 127 aa, Homo sapiens
WTGCCHHSSCHPCLMGEHISWTLTCLGHPVENYRFQGRCPSWLGGSDRQSYSGVEEAAWRGSPHLHGMPPSWGWLAQLTHGGTTSVLPLPNSRAHVPLCLAHKHAHRVSICLMFQGPSHVMEGTWAG

SEQ ID NO: 1004105 - protein, 66 aa, Homo sapiens
DPELCPVTPSILRPTGSAARHGLFRRCWALVPVISVSRSTIFRERHGVRVRLATGDSRGVWQRHGR

SEQ ID NO: 1004106 - protein, 33 aa, Homo sapiens
SSWTSASCGLSGGLPSFRDFQRYHPSDIHLLAI

SEQ ID NO: 1004107 - protein, 120 aa, Homo sapiens
RIAHFSTNYLVPGLCTGSPATGARTVSSADRVYTGAGGSGSRISVYRSTSFTGRHGVRAPGHRDSRGSGRNGRHQNETETMQSLNDRLASYLDRVRSLETENRRLESKIREHLENKGPQV

SEQ ID NO: 1004108 - protein, 49 aa, Homo sapiens
  misc_feature (45)..(45): Xaa can be any naturally occurring amino acid
LARIARHEALRGGACQNRLGIPSEPCGSKAAALFGPVDSEQLSRXTVTA

SEQ ID NO: 1004109 - protein, 74 aa, Homo sapiens
RDFSITYLNVLTFMKNACQDHSTFKNYSRKGYIGTWGAPKLCASGIFWFLSMPRMIFSSYGLLANLANSFISIS

SEQ ID NO: 1004110 - protein, 38 aa, Homo sapiens
MPIFSQGSHKSDPECEAPRKDLMKHLIGIEAKNVVVNT

SEQ ID NO: 1004111 - protein, 49 aa, Homo sapiens
MIAGLNRRWRLLLRAWLRLQEWRGHRGCDRRFHGPSDRAGGWGLHRIHM

SEQ ID NO: 1004112 - protein, 121 aa, Homo sapiens
MLLGCVESRQRFCLSRARSVRGSVDYSGTVPGLLTVLERSVDCIIFAYISDPNLYQQQPALEWCVAVYAICFILADIAVLLNLGECTNVLPIPFPSFLSGLALLSVLLYANALVLWALYQF

SEQ ID NO: 1004113 - protein, 55 aa, Homo sapiens
YRGWDDDYGRPYGPVCDYGPDSRPTTTVASWYLWLLCTGGLYYSDYTLSGDWTHF

SEQ ID NO: 1004114 - protein, 41 aa, Homo sapiens
  misc_feature (35)..(35): Xaa can be any naturally occurring amino acid
MCASPGHCDVGTTALFVECKPAKAYGIIYAETHNXHGRIHH

SEQ ID NO: 1004115 - protein, 120 aa, Homo sapiens
RKEVTPRTALLTRTEPPVRPADYLATASTPLVDLTGEILAPRRDHISRSSLASNPTSSYKCTDTRPMWGQSLLPPVSTSNHHVVGCGYPFPRNCGEEIQNGAGASRTRNIFLNGNRERSL

SEQ ID NO: 1004116 - protein, 33 aa, Homo sapiens
SQTREDRVCSQPVQGCGGLLIHTHHLLHVLKAV

SEQ ID NO: 1004117 - protein, 55 aa, Homo sapiens
LVYSSIQEEKEGVWSSSLECLQVGGHLYSDSLLRIDSFSWRADMARRMCSFRCSP

SEQ ID NO: 1004118 - protein, 58 aa, Homo sapiens
TELYCHSIRIQVVCTLTQTGGLGSAIVQLAIISMVGYRVRQPARLVIQAVVLRDQPHS

SEQ ID NO: 1004119 - protein, 101 aa, Homo sapiens
LIQVTLLQTLSCVRCHDCFFKTRLTIWKLLVSVSAPYPYSPLWSRTRVIANLYCRRRHFKAETDHSIQVKHKETWHNVRFNSSLHAVAPFRCQDIGHEASL

SEQ ID NO: 1004120 - protein, 125 aa, Homo sapiens
IPGCHQDRVEQIGGIAQELNELAIMTHPVSTPVDKKICDQWDKLGALTQKRREALERTEELLETIEQLYLEYAKRDRTFKKWMEGAIGGTAENLHCAQHKKEIQGLSTGHEQFKGTLPDSQQESL

SEQ ID NO: 1004121 - protein, 62 aa, Homo sapiens
PRLDFSCPLSCVCILHFIIKSLYGLVDSGLHLLHVIIDDLREKLWPCGGSSRRRSACILMVS

SEQ ID NO: 1004122 - protein, 43 aa, Homo sapiens
VLRKLVLFVLKLIASRHQRGKMLCTLLVTQRAAKPLWQCDPCC

SEQ ID NO: 1004123 - protein, 142 aa, Homo sapiens
MSDFENSRNMEPMTYMVMPLRSLRRHPYGEEKKSWLAPLRCTTETKEAKKAIKVIQGGSRVAYIDFLLQSLHRGRRGPGRSPGSLDWCRRLLPDTIGMIFRIMSILGPSAPGVPTPCSKTCLGFSYCPQRRCVPSSVTSKPG

SEQ ID NO: 1004124 - protein, 38 aa, Homo sapiens
IQLQGGLLRDIALHINPRMGYGAVVRNSLLNGSWGSDG

SEQ ID NO: 1004125 - protein, 97 aa, Homo sapiens
HSPSSTPGTDWILTKLSTTATTTESTGSTDAADSPHPGSTWILTEPSTTANVKVANGYTDTDSYNRATDGSLQSSRPARTTKHTVIQDPRDIPSSSP

SEQ ID NO: 1004126 - protein, 52 aa, Homo sapiens
  misc_feature (46)..(46): Xaa can be any naturally occurring amino acid
DEGEGMKGRRSSKWSSEASKVIRTHRQRKHKRVPKRVGYNSSPWLXRSAGYL

SEQ ID NO: 1004127 - protein, 121 aa, Homo sapiens
YGIQSSKQIRQKGVRGRRSVKQNAESQKGSEAGSHCFHSSFQPLPVSSKASLSNFLRTKEIETFSSNRLVWSNTPVWFGSACAPSRLVGPLCYRDNHRRAAIKRLCSILKIFYRSSCLVFR

SEQ ID NO: 1004128 - protein, 36 aa, Homo sapiens
  misc_feature (35)..(35): Xaa can be any naturally occurring amino acid
VRLTARILGEQKIHPEKNTFGKIVAVKEFESHLDXL

SEQ ID NO: 1004129 - protein, 44 aa, Homo sapiens
TVTLKKQAGTASLLGTPRYICNTVDEALPSSYAIPMPFLTSSGP

SEQ ID NO: 1004130 - protein, 53 aa, Homo sapiens
VCLLKFPCMLRRVCTAIYTPEGQETPSCTPLILFPKHLRSELGEDSMNEHGKS

SEQ ID NO: 1004131 - protein, 45 aa, Homo sapiens
PGTSRLQRAMIMPLHCSLGKKARPVLKKNNVFGRMIAETKQIIGN

SEQ ID NO: 1004132 - protein, 114 aa, Homo sapiens
SAISVLYRHKTVLYIPFLFGYFHSTSFMRSIWAAALAVANSFLSLYDISIDRTYSNSFFLSIVDGHRAISNSGYGKNHSYEHGLVFCTRLSGACLHASPAGVPCPGLWAGRTAT

SEQ ID NO: 1004133 - protein, 44 aa, Homo sapiens
MIPAPLCGKRSELEMDHSRRSQVCNDVSCGHVWIFRKNINKLKT

SEQ ID NO: 1004134 - protein, 35 aa, Homo sapiens
  misc_feature (3)..(3): Xaa can be any naturally occurring amino acid
VTXVRLGCVSVYQRERLLQVTTAFSYYKRKYLKPK

SEQ ID NO: 1004135 - protein, 74 aa, Homo sapiens
MYPGWSRTPELKQSSHLASQSAGIIGMSHRTERQPSFLTSFILPTTSVNYYTRPLPHWRSLAAAQRTLQHHSSA

SEQ ID NO: 1004136 - protein, 88 aa, Homo sapiens
MWRDVVAVVVSRSGGVHWSVVLEEGVAENQWPQLYVVVVSTVGVWVGPRRCSEGVAVETSGSWAVRGLCLTPHLASRCAARLPLSPGR

SEQ ID NO: 1004137 - protein, 87 aa, Homo sapiens
MTSEVKTMVKQLKAVRKPPTESNKQMDENEQGDEQHVSYVISQHEAKIKSLTEYLPNVEQKKRQKEDSVDALREELVQLRAQEQVHE

SEQ ID NO: 1004138 - protein, 120 aa, Homo sapiens
MLLVSCTVAFLPCVWIILTKEKNNINENNYKLEEVNDNLNSRPPQPTFSPLAKFHNLPEQRHCPGGRWMVTSFPWMQEVAQKQDGHERDTYGPRGSSTCLGPQRDLNVTTASVRGSTGTS

SEQ ID NO: 1004139 - protein, 41 aa, Homo sapiens
  misc_feature (2)..(2): Xaa can be any naturally occurring amino acid
TXCAASGIGFTATVIYELLENGQRNLQMTAAARCPRMVLLA

SEQ ID NO: 1004140 - protein, 105 aa, Homo sapiens
MSSFTTFLLIREAYKEWKIISSFTPTSTDSREENRPLVEVPLDKPGSSQGRSLMVNPEMYKLLNGELKQLYTAITRARVNLWIFDENREKRAPAFKYTLEETFEI

SEQ ID NO: 1004141 - protein, 40 aa, Homo sapiens
MCAAKRSEREMDHSEGVRCCNDVSCGHGGFSRKNINKLKT

SEQ ID NO: 1004142 - protein, 45 aa, Homo sapiens
MPESRTNTELIRRIAPPTSNGHAAAPTESKKSYQGCQIVYPARGT

SEQ ID NO: 1004143 - protein, 96 aa, Homo sapiens
VILAAVPYLRLQSTSSAPPLLVSVLSGVVELGTLVHYCPIDVFTERCFMMLFLYLSPCVKQWLSISTSLLVSGEEAPVSSWYVCGPPSAGASCNLL

SEQ ID NO: 1004144 - protein, 54 aa, Homo sapiens
TGYSAALHRIRTYSFSSEKLDRLKPSPLNSSKSSSVQLCSIAGEELRSRGGEAA

SEQ ID NO: 1004145 - protein, 107 aa, Homo sapiens
MLPLRNRTLIPRHPWSPWYARRLPSKVDRADVRMGRRRHGGRAIGPRLSRVTKAAGARPPGRGRRGADRVGFDLINARIPPAKGVSARRHVLALELPQLSKEERNTG

SEQ ID NO: 1004146 - protein, 33 aa, Homo sapiens
LARSPPIDASLLGSVQVHLKFDYFIGWLEEGGF

SEQ ID NO: 1004147 - protein, 62 aa, Homo sapiens
DSRYALEYTKVCPVFSIKAFDYEKVYSLQWTNEHEFMQQTGRSYTVQISFVKGCGQCYTAPV

SEQ ID NO: 1004148 - protein, 67 aa, Homo sapiens
STTAGVTRIYSLRSSSLTVFEELRAAGSVMRLASYYRFEILEAFRRAVGAAAGITLEEVSGSGGLGS

SEQ ID NO: 1004149 - protein, 38 aa, Homo sapiens
HHHYGDQPQHPPDTDPNPTPITSTTTVTPTPTPTGSAL

SEQ ID NO: 1004150 - protein, 36 aa, Homo sapiens
MRRSIWVPKLSRNYLKEGYMEKRGPKTERKVLPGQR

SEQ ID NO: 1004151 - protein, 72 aa, Homo sapiens
  misc_feature (51)..(51): Xaa can be any naturally occurring amino acid
ILHHSPHWRNGFKSNLENHFLMWYTLNTTLQPTQSSLGCEAVPGALSLLEXTMSQTAQNSCGSARALLGLPQ

SEQ ID NO: 1004152 - protein, 49 aa, Homo sapiens
DSLTSTLSVHPQSYYNIETPGRSVLTAGRFHPTVYYNLETPSERKEMHL

SEQ ID NO: 1004153 - protein, 64 aa, Homo sapiens
SDEHAVVRNTQIDNYLGAEERSLARKMPFVRGQSFSVWILCEAQCLKEDGLGWVQPPQNGGDKR

SEQ ID NO: 1004154 - protein, 83 aa, Homo sapiens
DLEDPNSAAHQGQLFAQCTQWVPLKNYYDAWCRQLLHAGSTLECASLQAYAGPRVPSKNIVPRGGGTTAMGPCLVDVPISRGS

SEQ ID NO: 1004155 - protein, 90 aa, Homo sapiens
MGVHCDCSPVGTMYTLMPERSPGRCGGHPVFGRQSGWSTGVELQQVLPAYSPSRLADPGPWDALPPTLESSGIYPLARAGMAVAVSPDSR

SEQ ID NO: 1004156 - protein, 35 aa, Homo sapiens
LSATTYPLYRNTLGSVVTTNKNGRLLIWYLTNLTL

SEQ ID NO: 1004157 - protein, 67 aa, Homo sapiens
YLADLFCTTAGEVVFVVQVVTGDGGDGVGGDDVDDNGDGVVMVVVVSYGGGDGREVMVMVALVNRGD

SEQ ID NO: 1004158 - protein, 53 aa, Homo sapiens
ILHHSHNHHHYGDPNPTPIATTTTVTPSPTPTGTQTPNDDTHTAPTTTVSAKA

SEQ ID NO: 1004159 - protein, 43 aa, Homo sapiens
PRISTSHSRPGSTHTTAFPEQHHHARPQSDSTTIPQTAQSSTG

SEQ ID NO: 1004160 - protein, 69 aa, Homo sapiens
TKTAKRAARFPSQQHPSRHIGLAGNWLWADTIPLEKNVNLDICLAEWLVMAKEGSSPAAVAWRQLSGTY

SEQ ID NO: 1004161 - protein, 66 aa, Homo sapiens
ASGTVDDEYDCIMSIAVYEYGPYNELAVKMSMGGIDEYRLAVDEYRLALMSIGGVDEYRLALMSLA

SEQ ID NO: 1004162 - protein, 105 aa, Homo sapiens
SESCTCLDSLPLYLIYNVSWNHNGSLFMLSMQGQKACCIIDPTYEAPVVARAVIEVLMSGSLAPCGPIIPGRMARVYTTWLQPDYTSWQIEHALAQPMNSLVGTH

SEQ ID NO: 1004163 - protein, 34 aa, Homo sapiens
MAYTVECLRGDVDILMEFLLTCHHSTGVSSLGSS

SEQ ID NO: 1004164 - protein, 37 aa, Homo sapiens
SVIFQSILLQPQTSHHSPHNSRDKAKGQEVPHTLAGI

SEQ ID NO: 1004165 - protein, 63 aa, Homo sapiens
MFAYYGEDYLHPELRTCCSWYRGWTRADSDSPTQEVNNECLLTAEAPREAYRGRHIDVELAST

SEQ ID NO: 1004166 - protein, 46 aa, Homo sapiens
SQTLVGSPSSQSLGYHPFSINNLMSEQTPDTYQNKDVGSIGRLQRA

SEQ ID NO: 1004167 - protein, 32 aa, Homo sapiens
MLTGKERGGDHADWLKGYEKTPGDLLIAVRCA

SEQ ID NO: 1004168 - protein, 84 aa, Homo sapiens
IPPNGVTLTHSSRLAGGGLRNLTITAAGEANTSFFTWWREREESVPIEARKTLIKPADLMRTDSLSLEQHAGTADTVKSTWSLP

SEQ ID NO: 1004169 - protein, 46 aa, Homo sapiens
VALEDPGTIVLATRTLVRRVAGDQWHTLEVYGRALQIKKEKRAFRT

SEQ ID NO: 1004170 - protein, 106 aa, Homo sapiens
MVRGRPLPGVTVPIHLTLLLCSPPLTPFLSLNWQVISVPRRNPALKQELCSYAILGLALSEGVGLRCLMVAFLILFASVRLLGGSPGCRYCKSRPFLVLGGVKLYH

SEQ ID NO: 1004171 - protein, 30 aa, Homo sapiens
MQVKLRTAPRRAAGSQDGRALTGNKLLLNP

SEQ ID NO: 1004172 - protein, 38 aa, Homo sapiens
MCGKRVSGDGSQPKENGAAMMLAVATVDFSKNINKLKT

SEQ ID NO: 1004173 - protein, 64 aa, Homo sapiens
QHFFDHDHRDPSHSTPSLTSLITTTKSTSHSPSSFTSGDRHHEDHLTQYSQLHFIDHQPRDHLT

SEQ ID NO: 1004174 - protein, 68 aa, Homo sapiens
LCMTSLLLSLGTVKAVVSEVCSYRFADSWLFFAVLGSSISRQVPSGASIASLDLPCFIFQIVVWAISV

SEQ ID NO: 1004175 - protein, 65 aa, Homo sapiens
  misc_feature (3)..(3): Xaa can be any naturally occurring amino acid
LCXIGWRAAPLRLGLAPRGPRLTVVAVDADVPSPYLSATATHRVPTLDTSYLLVTTLFPSVPLVL

SEQ ID NO: 1004176 - protein, 137 aa, Homo sapiens
CCDLEDPILHHSAGGTVGSRGRQCPHLSLWLLQKKQVCDCADLCHRVCHCVWLECPIPDAPVVTNVTVKARVWNSTFIEDYRDLDRVGVNGWVNPNSSEPESPASTWRTRTTWFSVDIDSGAGGGAAGRNRAVDGAG

SEQ ID NO: 1004177 - protein, 103 aa, Homo sapiens
VLPGRSTVLFIVQIHILLIQAIPQAKLQMHLMILQMTGLRILATSGKTVLLQLVDTEVSQLAKPKTSGLHKQHQQTQTARKHSMASNTSFSPTSIRALPDSSR

SEQ ID NO: 1004178 - protein, 33 aa, Homo sapiens
MEGCVAVAVCQVDDIAEDIWGNGLKFSYVVPHY

SEQ ID NO: 1004179 - protein, 88 aa, Homo sapiens
PMLVIASGDSIQLLADRTDKHGTFFQGGRIKHDCQQWTCQTLIKPSDLMRPAHYHGNSLEETGPMIQLAPPGPNLDTWGLLQFKVRFG

SEQ ID NO: 1004180 - protein, 51 aa, Homo sapiens
STVQVHVEGSLNPRYKEGVVIRVLFQVCPRPPSQPLPQAVTWQFTVCTLQA

SEQ ID NO: 1004181 - protein, 39 aa, Homo sapiens
DAEKVSQMTDFDRFKDYEGKKMRNRIIQNEGKKVQKGGL

SEQ ID NO: 1004182 - protein, 45 aa, Homo sapiens
GTVCGMLRSLATPFPTSISSTSGSANTTEEDTLCTPPPHDLVPEP

SEQ ID NO: 1004183 - protein, 94 aa, Homo sapiens
LAAGIGGGHKEEAADSYFSVLNAFIDRKDRYYSIHQISGKLQNVEGPPGLSGEGGVVGFPFRSFLVSGDVGAGGCKPLNTELLTILSLVVTSTP

SEQ ID NO: 1004184 - protein, 30 aa, Homo sapiens
MLRSFQRIPAPLVLCSGDSDFTIEKNKGVN

SEQ ID NO: 1004185 - protein, 43 aa, Homo sapiens
QLARLCLENIDKNTGDAITAEGFTDIDLDTLVGVLERNTRRER

SEQ ID NO: 1004186 - protein, 38 aa, Homo sapiens
VRRWNENACYEQQQDGNARVSGRSFGERGARSLGLSGR

SEQ ID NO: 1004187 - protein, 48 aa, Homo sapiens
SSQPLQRGDDPAANALICVSNSVREYVQRHYPSVPEQTLQVIPTWRRC

SEQ ID NO: 1004188 - protein, 67 aa, Homo sapiens
SQAPANDIRTVSTVLTCRRNYVQEGMHRNGEYTSPGLHVNDNEEVSTVLTYRRNYVQRRYAPQWIEY

SEQ ID NO: 1004189 - protein, 40 aa, Homo sapiens
TLSQYVLSRYSRLATTVTTTVTCLPHFCTGFSSFDFTDLP

SEQ ID NO: 1004190 - protein, 107 aa, Homo sapiens
  misc_feature (28)..(29): Xaa can be any naturally occurring amino acid
MQALVQDEAYKHRASGCHLQGQCGLAIXXPVALRTGRWRAWQDDGPRMAGATSLEHFNTQTDVAIVVPGSNKCLEPGALAGTGLLLHWHNLQNLILERGPQEEINDL

SEQ ID NO: 1004191 - protein, 86 aa, Homo sapiens
LNAAPQQPGDTETTSYLTHHNLRPRAAIYTHPQQHWLATHNTDPCQLHKLLAFRNESTTFQSWPSSRDTTPSPPGLRRCSLWVARI

SEQ ID NO: 1004192 - protein, 48 aa, Homo sapiens
GDWDLAEGFGPVGVGPWDVGPCGGTLLVLTLQQARVVGGDGGEGGVVP

SEQ ID NO: 1004193 - protein, 97 aa, Homo sapiens
MLIPQIYIPGPTSGLSLPLVETPTTHELPQRVQDRVHRDLGKEAELCRDVDRCMLRYRLVVEETQSYFQAHSLSPKAPMNSRWSSQCPRTGLSSFTL

SEQ ID NO: 1004194 - protein, 116 aa, Homo sapiens
  misc_feature (60)..(60): Xaa can be any naturally occurring amino acid
  misc_feature (74)..(74): Xaa can be any naturally occurring amino acid
CLEIRRVMVETDILQHKQASGSEDALSTGSANLRQGASRFHDPRLLFPQQQGDLGLGTPXQKPFQGLESRTQQXSLTPLSTIKAFATQSGSQDLKALNTSYQSQLIKPSHCTPAGY

SEQ ID NO: 1004195 - protein, 50 aa, Homo sapiens
MMNNLPPQNKAEGKIKIHNLYSLKTGDQQYAVHMQIVAGGKHGQSDRSRY

SEQ ID NO: 1004196 - protein, 38 aa, Homo sapiens
MKELYWKEQGLNLARQWNNCAFLESSATSKIYVHEIFY

SEQ ID NO: 1004197 - protein, 42 aa, Homo sapiens
MAAASSQELILSNDCGVLWVYPFCSLHGFSSLDELSDGTSHT

SEQ ID NO: 1004198 - protein, 37 aa, Homo sapiens
MDHLPGIVLSGQRAAYSALVVWNGIGSVKYLLLKVQG

SEQ ID NO: 1004199 - protein, 58 aa, Homo sapiens
SRVSPPHSTEDAATDTQVAGQRLCWFSLLFQIYSLQQKCRSLCNTGLSSHAHLMFYFH

SEQ ID NO: 1004200 - protein, 127 aa, Homo sapiens
MLSYSPGPISQSLSQNIFITQAAPDIKLKLQKLNSGPQTPQQDLINLAFKVYNNRKKLQFLASTVRQTTATSPAHKNFQMPEPQRPGVPPEPPPTGACYTCRKSGHWAKECPLPGIPPKPRPICVGP

SEQ ID NO: 1004201 - protein, 76 aa, Homo sapiens
STSTRIPSYTVLGSGANVDAFLYGEGTLELWSLRTSQREIPEYVYSEPVWVKVLYRVVIEDKLTRESQVRPRSALR

SEQ ID NO: 1004202 - protein, 54 aa, Homo sapiens
DLTARLGGGGLVMSCSDTGLPVAGCHSDSDGADLIVSEADSTIMSLKRYLPSPW

SEQ ID NO: 1004203 - protein, 77 aa, Homo sapiens
SAAGSTLTDSRHHCAGIIVIITEEYTNEQRNVKSAVSLAEQLCRCGLQRLHVRMHFVFLPDMIPVSSHVIVDQSIGC

SEQ ID NO: 1004204 - protein, 32 aa, Homo sapiens
MKRSSSLFYVGPVAVTQVYCIDIIIQVPGQVC

SEQ ID NO: 1004205 - protein, 42 aa, Homo sapiens
RLRSKTSEIMLWTVLKRETCSCLEEMEISSFLGLNRPCFFFE

SEQ ID NO: 1004206 - protein, 31 aa, Homo sapiens
DRIELVPMRRSCSLPGFVGMCNRANKRSLRE

SEQ ID NO: 1004207 - protein, 35 aa, Homo sapiens
FDNRICNINVHLGSGDIDVGLGQAHIQMWTLAFEA

SEQ ID NO: 1004208 - protein, 35 aa, Homo sapiens
PFCPPVGSVPCTRAPLYLSLLNCNSIYIHGQIHVW

SEQ ID NO: 1004209 - protein, 53 aa, Homo sapiens
TESRIPRLLVDDWLTPCMTSGRDWTNQRLNTQITQWSWSHYMEMEMPEPGPAG

SEQ ID NO: 1004210 - protein, 47 aa, Homo sapiens
MCVLTETEPGADRKQYAQRAELGHGGRAARLCRHVGVQASCLSGEIG

SEQ ID NO: 1004211 - protein, 56 aa, Homo sapiens
MSVDGRLTGSLSRSAVCYKSGHQHSHTRLVHAASRVLTPLNVENRLRSSLAQRPSN

SEQ ID NO: 1004212 - protein, 59 aa, Homo sapiens
VQRCSWVQRSACDNLRAIVDNCLCEDRRSHEYLRGVHSVPQTSEPVYQGSSNNCRTVCT

SEQ ID NO: 1004213 - protein, 91 aa, Homo sapiens
MLLLEGPISAGYPGPPIGGPFTVSPQLTWASQQRWQASISSPRQVVGIPVQFMHMPHSTHSHGMHKPQPLVSLQTRNSVNHVSIKRVSLVV

SEQ ID NO: 1004214 - protein, 92 aa, Homo sapiens
TVAAPGGYTAWCWWWRWWSTAYSLVLAARETLGGTCGGSCWPGSRAMSIQICRTNWCTCAFCSSSSSTMSSLILPDRGAEKAWRGAICAMSA

SEQ ID NO: 1004215 - protein, 102 aa, Homo sapiens
TVALHGSLSDFTGIVTTVLTAHKTAKYCGVTTKLCAQRKASACYPTVKPVHVNRPDHTLPVTISATVTTFLTKVTTQWLSKTHDQHGLAVCGSTVYNSLSTF

SEQ ID NO: 1004216 - protein, 54 aa, Homo sapiens
MVWDVSVVSSYCGKERLEDQISPGGCGTVSYDMPIHYSLDDKQDPPSKENKAQL

SEQ ID NO: 1004217 - protein, 58 aa, Homo sapiens
EWQPLAEGLMRRWLPAGRRLVADDHLSYLPSPVTGPVEYRCAAPVARGPRDDECCHGA

SEQ ID NO: 1004218 - protein, 69 aa, Homo sapiens
CLGIQALAQLDPPCGGRLNTKDAAIHLSRLPQDYPSQQNCEWIVYAPEANQKIVLKFNPHFEIEKHDCK

SEQ ID NO: 1004219 - protein, 103 aa, Homo sapiens
EEQSSSSPSTLCGVMHGKEVGSIFWKKGELYNGSRSRAVPGSTLSGGSCPESINTINGSTAAVFHAVSMIAFKLDEDLCAAPANGGNVSRPPVTLRLVIPASQ

SEQ ID NO: 1004220 - protein, 141 aa, Homo sapiens
RYLGRRNRQDTISMWLENVDTTMKVHIKNRDDLVLSVSPAVPLTTPSCLPRTQGSALRPFQEVAPVTRAAQAPAVLGQDETVPPNSILFPSNLAENHLETQFTSRLFPCGILGQSSTRPHFLNLQNGLQHSFMIAHAVPKH

SEQ ID NO: 1004221 - protein, 62 aa, Homo sapiens
VHRPPVPVSTSCVYGDMAAVAYLCLSVLQIQADSAVPAAQASTVLSDWQYAAHHVHHTVSRH

SEQ ID NO: 1004222 - protein, 101 aa, Homo sapiens
GRDHRDHRITTPSRDRERGGEKGERGDQETHKVRETGTGENPENWIRRRTAHVRSPPNPCAQQPQPKTSQHSKENPAAPGFLHQAQLILVFSPCWPSWSRT

SEQ ID NO: 1004223 - protein, 116 aa, Homo sapiens
GTASDTQCQWQQTLWDIEHDDADEEDDSLKPGCIREMRGEELKKETPSEDSHAVVMSLDEVLNLEWRWGVFAHLPSPCCQGWRLRAHDQCWSARCPTTNAPEAVYRRLEISVIHGS

SEQ ID NO: 1004224 - protein, 112 aa, Homo sapiens
PIAVSRSIHVFTVRGPSVYTMCYGDMAVSPPCVLVSPNPSGFSCTFRTGLNLLSDGKICSPCIHSNLIFARRIDIRIVSLDIPYVADVVVPLNITIKNTIAIGVNPQEGNVY

SEQ ID NO: 1004225 - protein, 47 aa, Homo sapiens
AAKGVERERDLVGPISLPECLLHNAPSRGAPDSPLRLTLCLVMSERK

SEQ ID NO: 1004226 - protein, 77 aa, Homo sapiens
SSQSLIHLIEAYPCWSAVCVVTMVSGAHLRYRLRQMWHVRSYPSIYHYFPEQVTLIVTHSNQALQQLYETLVAFDIR

SEQ ID NO: 1004227 - protein, 72 aa, Homo sapiens
RLYGSLLLWDGAVLWYGEAGGSRGQEIETILTNTVKPCLYKKYKKLAGNGGRCLWSQLLGRLRQENGVNPGG

SEQ ID NO: 1004228 - protein, 60 aa, Homo sapiens
TVWPSLQTVCFVIQAPSVTAVFQIIFPMDHRLFLVWLVLATAVQPVAQRLKFRLNLYELE

SEQ ID NO: 1004229 - protein, 165 aa, Homo sapiens
DSTGVFCFGTATVHIGHAGSSSDSPLSTLCPCLPEAGSGCRSPRALEMKAGPCSCREGGGQWAHGSVPLQTQHALRALGIFLCPGETLSASLHWNPIPDHPLGSIIGPQEESAQPSRHPEAPPSVGTEAEERSRRSSPQDSYGSDPGSPAGPSGSPLPTRRPKAQ

SEQ ID NO: 1004230 - protein, 96 aa, Homo sapiens
LAQCGSDSLLRLLKAAIKRLAGQHSFMEALVEESASHVHSGCWRNSASLLALSWRPLSHLKAACIPSYVVPSSFKPALLLFLMLHISLPFSCIRGI

SEQ ID NO: 1004231 - protein, 69 aa, Homo sapiens
VTTLDPRPAGDNFVVQACSLQCFTGWTQLEETQLVFLSSQGGFDKGMWPGMVAHACNLSTLRGCTGEIA

SEQ ID NO: 1004232 - protein, 33 aa, Homo sapiens
PPITPAPTHSHSTLTHRSLQRMRWGYDRSLSAR

SEQ ID NO: 1004233 - protein, 58 aa, Homo sapiens
IDKFQKSYYPASNIILISIPAMPRWHPHSPNIRPSFQDDRSHCKASVSADNSHFDYFH

SEQ ID NO: 1004234 - protein, 61 aa, Homo sapiens
FEDGGQDLIPQCLRATRPRPGSREVDDIGRLVLEVQEGVPRDREGTGVTNSPYQTTHTNPH

SEQ ID NO: 1004235 - protein, 41 aa, Homo sapiens
EQLSVRSFTDQAGRALLSGLALSAEFANAQGALRSSGEGTT

SEQ ID NO: 1004236 - protein, 103 aa, Homo sapiens
VFHSVATSLWMKPSAMVSSSRGYKEKIIQMEIFFTQPAGNAMIVATRIEGNGLETRTQLRPCLQSVPESFLDPSLTVRHRALHSERAPSVSTLAGTIPAVPKH

SEQ ID NO: 1004237 - protein, 43 aa, Homo sapiens
SGGARSAALECSSGATRSSLYKVWCQYLTTIVVPDWMTIAMLQ

SEQ ID NO: 1004238 - protein, 43 aa, Homo sapiens
KIISRSAQLVRQRLGAQLHHDDAVCQYSSPASAPTPLPFLHPA

SEQ ID NO: 1004239 - protein, 49 aa, Homo sapiens
YLVSLVIPGSAVEYVGPWKAAPQSWSRVGRNPQEVGQECLVWKSLPSLH

SEQ ID NO: 1004240 - protein, 85 aa, Homo sapiens
  misc_feature (70)..(70): Xaa can be any naturally occurring amino acid
  misc_feature (84)..(84): Xaa can be any naturally occurring amino acid
SVWVSKSGDDGDLGHELVSMSAFFWRSLRVAGLQAMHHAHVLFVFLVKTGFHHVSQAGLELLTFDPPNLXFQCWDYRHEPLCPXL

SEQ ID NO: 1004241 - protein, 71 aa, Homo sapiens
LRDSDNVLCESRPGTVPTEGAAVFPKWLHQIHSPAAMSESCIWAMSLYTFGIVSLHLSATPVGTEPHLTVG

SEQ ID NO: 1004242 - protein, 106 aa, Homo sapiens
RSHADHLESHCHVILVTINCTVVRVFSLDLQVGLDQDLAPVIHGSAFHSVSSSPATSAHASDDHNSALFPCAGYQGHSCSGSLLVRMILQTPPHIHPCYWGGPVGN

SEQ ID NO: 1004243 - protein, 79 aa, Homo sapiens
IRRVHGYEVNGGTIKGNCNHKDVSFPDGGLSGEISVLLVYPSPFSLINGLRPVHENQKNNPRRFGGMKIKDLAGSEQII

SEQ ID NO: 1004244 - protein, 61 aa, Homo sapiens
WLGRNAEINSALSITAGKGLRARIPGLGQLEVPQKVQFCFLQAFETPRHSRYPEVKVAAPV

SEQ ID NO: 1004245 - protein, 82 aa, Homo sapiens
RNVIGSVVADTSMRVYCHYRTFPLQWLVAVDAMMSWLMLRLTVVVIENVLVKVVTGFCVTGVEVEELLKATCVVVTQKGVRL

SEQ ID NO: 1004246 - protein, 44 aa, Homo sapiens
VRDNSLLMAHVSPESQICGALSGLLGLGLGAGQLITTFLFWLIL

SEQ ID NO: 1004247 - protein, 65 aa, Homo sapiens
SESLCVTVTDRLVATIYSQSMPHYSSAAMTSGCADSGAQKMLQDSQKQRSAHIPITPFPNFPARA

SEQ ID NO: 1004248 - protein, 68 aa, Homo sapiens
WTTSGSVAVTRVLPTVNSVSYQSLSCELCLERTRSCITEVELARVLLLSPETPRPTLMSQEHFDPNST

SEQ ID NO: 1004249 - protein, 86 aa, Homo sapiens
MGALIEPFYNNRAVSKSTEVSQMKKLDDGPIAGASGNQVHEGKYPIRRWPIAKLIRLVQMRTGDRLRLPSALRTGSNSKTRASGEG

SEQ ID NO: 1004250 - protein, 47 aa, Homo sapiens
CLALTCHPYMILIGFTLYVTKKIKLTHLPFLRTTANRDPPKTNAMDE

SEQ ID NO: 1004251 - protein, 122 aa, Homo sapiens
MSINAFLSSSPVLRICDSIECCPSPINGLVRAEAVGELFSVVVLISLLLFQPVSIASPFPILNIYILLNHCSLSIPIAEDITMYLLASIAVLFLSGIKSFVIVKNRMRVMGSASKRSCNKGA

SEQ ID NO: 1004252 - protein, 113 aa, Homo sapiens
GVPHDWSRVFLSLWVFFFSWGSLAVIDHAGLHTTTSKISPEPAYPGFKRFSCLSLLSIWDYRHVPPHLGDFRIFSEHGVSPCWSGWSQTPDLQIHPPGPPKVLGLQAERITGR

SEQ ID NO: 1004253 - protein, 78 aa, Homo sapiens
VRFRPVLRSRSLSTAGDRRVWARHYSAIHFERLGYSAGEVSTHSLTDCDLHGQPPAGYINQQPFWDLMNATTGGGILD

SEQ ID NO: 1004254 - protein, 48 aa, Homo sapiens
  misc_feature (40)..(40): Xaa can be any naturally occurring amino acid
NKALKLLAREKIKLLAHNPILVRNVEIRFIGQSHLKSSFXSSMNKSSN

SEQ ID NO: 1004255 - protein, 48 aa, Homo sapiens
PGTCVPQIYFSKSHMPPQVVCRPSLYLLVGPAACEALSPFRLVPARGP

SEQ ID NO: 1004256 - protein, 71 aa, Homo sapiens
RSLITYYSCSEAPLGNSDVGAPARSREGYRQATDEAPSRCPSAVKSISLPGLPGTPHMQYRNLYHREGVQE

SEQ ID NO: 1004257 - protein, 54 aa, Homo sapiens
CYVLFSYSFSYKHLNATSGSANTIEEDTLLHPSHPYDLVPDAPSVTEHNSHIVA

SEQ ID NO: 1004258 - protein, 40 aa, Homo sapiens
VTAAVAHHELPGPPVLAGPPSVSSRVPRSHIRHIHGPSAV

SEQ ID NO: 1004259 - protein, 108 aa, Homo sapiens
TGVFALGRRAEQLKLFEMLVSEARQPLLRHGPVREALLTLLDACGSPVPSKPSNWIEGFGATSSASCVFVVAQGAFIGSKFFAADHLLGALGAAPPVFFLYFYAVPNA

SEQ ID NO: 1004260 - protein, 31 aa, Homo sapiens
MRTRLINSTAEEVAMRKLMRTVTVVEDDENE

SEQ ID NO: 1004261 - protein, 65 aa, Homo sapiens
PSILHHVKAPAGRVPSVTCCGEKKGGSEAGTPLQQPWVIRPSRSDPSDFPWEPHFQYLENGLNAK

SEQ ID NO: 1004262 - protein, 42 aa, Homo sapiens
NSAPQPKQRSWLDQNKLLSCHHQLQPGLAELAGPWAPWLDSY

SEQ ID NO: 1004263 - protein, 32 aa, Homo sapiens
YLHHSSSRVWQSCHQCQHVGLLVSWYATACLS

SEQ ID NO: 1004264 - protein, 116 aa, Homo sapiens
TCNHQHLYTFTADSVQRTKDLYLGAFQPARWSLSFRPQTNTLVLIVAADSSPAAFFLMRLPLFAFSSSSSSLSEAKIFNAAKSSSSARIRPSRMRPWILQSIPELLHCFIAISIYL

SEQ ID NO: 1004265 - protein, 91 aa, Homo sapiens
  misc_feature (21)..(21): Xaa can be any naturally occurring amino acid
  misc_feature (43)..(43): Xaa can be any naturally occurring amino acid
MCRPRGPTVIAENELLGAAAXIEAAAKKLDQLKPRAKPKEADXSFNFEEQILEAAKSIAAATSALVKAASAGQRELVGQGKVGAIPAIALR

SEQ ID NO: 1004266 - protein, 104 aa, Homo sapiens
SLGSDAPLPFTGGCCMDLAASSICSSSSMTHLLLGLGPGFRCSSFLAAASMAAAAPKSSFSAMTVGSSGSTPSVPFMASAAWMSSVTEPATRFECPVNCCFSSG

SEQ ID NO: 1004267 - protein, 63 aa, Homo sapiens
WLLDCVYMYCDRRSNARTEQQLQDIKRVGWSVTELIRLLSHEGTECVDPEGPTVIAENELLLS

SEQ ID NO: 1004268 - protein, 109 aa, Homo sapiens
  misc_feature (20)..(20): Xaa can be any naturally occurring amino acid
MDLAASSTALKVKIICLLGXGPGLQLLQLFGCSLNGGCSSQELILSNDCGVLCVYPFCSLHGFSSLDELSDGTSHTLGMPCQLLLQFWAWLLQGQQYMVQQFQVAIALR

SEQ ID NO: 1004269 - protein, 40 aa, Homo sapiens
  misc_feature (17)..(17): Xaa can be any naturally occurring amino acid
MLLTVDLILHKEMGLLXQVGATVSAHVTLKVAVTVPPSQS

SEQ ID NO: 1004270 - protein, 173 aa, Homo sapiens
QFRWEEYTFHGRLLLLLARVTTTIPTLSWASCAPVGPQTSRTNLRRWCCWLTRKKNVVVFKSDGSVLLNELQVNLTHVTASFSVFRPSSYHIMVSMAIGVRLQVQLAPVMQLFVTLDQASQGQVQGLCGNFNGLEGDDFKTASGLVEATGAGFCQTPGRHSQAGMTRWTGWTI

SEQ ID NO: 1004271 - protein, 48 aa, Homo sapiens
SHVQVQGLCGNFNGLEVTLQDGQRAGGGTGAGVLSNHPVNGTVKQHDK

SEQ ID NO: 1004272 - protein, 107 aa, Homo sapiens
SHLYFCCAASVRSADAYLHVPGDDTAQIRGLQMSCTLAHQREVEVVEIVENDISAFTYEKNTMMEQRSEMLKQMQVSKNEQEREAQLIHDRNTASHTCGGSQEPSAG

SEQ ID NO: 1004273 - protein, 39 aa, Homo sapiens
  misc_feature (23)..(23): Xaa can be any naturally occurring amino acid
MSHLLGPDMALGISTRACGWTWXASLKTWVWRRLSKKSS

SEQ ID NO: 1004274 - protein, 140 aa, Homo sapiens
  misc_feature (78)..(78): Xaa can be any naturally occurring amino acid
  misc_feature (129)..(129): Xaa can be any naturally occurring amino acid
LTISSQHVACSLYMCEHVIACHLLSPDANTRQLSFVSEIRILMGLRSELEYLGLLALSKILKIHPKSVQSHKDLILQXLDDKDESIRLRRLDLLYGMVSKKNLMEIVKKLMTHVDQAEGTTYRDELLTXIIDICGQSNYQ

SEQ ID NO: 1004275 - protein, 47 aa, Homo sapiens
AFLQGFLGGGLGHQDTREHAPGYAIDTVQVHGQEKYLILFEVGPDCL

SEQ ID NO: 1004276 - protein, 65 aa, Homo sapiens
MVTSWGDAYGYEELDSEEERSELQLRGGQAACRAQAQGVSVGPPGVGRTQRGRGGGPFGAREDVF

SEQ ID NO: 1004277 - protein, 93 aa, Homo sapiens
GRRWHRVCASAPLLSLTQPRSSASASRCNHTLVIQQAPKPWSPIRPPQVTLTQTPIVALRQPHKRIMLTTPQQIQLNPLQPVPCVETRRRKGQ

SEQ ID NO: 1004278 - protein, 92 aa, Homo sapiens
MLGPGIVYVSVWVEKDGVTSSVGTVTTGTAPQPSGGKPLKSWRAQDQTSSDRPWTLGRVPPRNGAPKNPTELHLRLSTSDGADAPKPGVRLN

SEQ ID NO: 1004279 - protein, 76 aa, Homo sapiens
MTELVTCGYASGENQRARHNQKYCRQRTGVSLKHARHVPGWKPRSRHWMKASLTLTSCPWDHLLQPVDMSALSSKL

SEQ ID NO: 1004280 - protein, 99 aa, Homo sapiens
MNVILPGKYVHRQLCSIHKWSIASEPEISVNGEKTKLERLEALDANSRKQEAELKEKGQEMELEEWYARQDEQLQKTKANNRAAEEAFENDIDESPPKH

SEQ ID NO: 1004281 - protein, 201 aa, Homo sapiens
WDGGLYGKAWARAARVGKGSVSGRGALAIVIVERQVGHVAAEVTEDLVALVEKVILLTVWRIKPAFSRLLAYLRASLRSVKPFTLWYSQSTTSEPIKALGMVILSHMRSRTSNPDSGEAMAFTMAAMSLWMDKWKSSRRSVSGMELVMEELVEVMVLREGFMPYAGKVPVMAAVWETQAAGSMGLDVPLLGNVKQHVSLVQ

SEQ ID NO: 1004282 - protein, 75 aa, Homo sapiens
ILLWDGGVDQEIAKYGAQVRWRGYAAHSTSGITSLRPSLSRVCQADLPVMLETLSQSPQGRVMTIPVPAHAAQST

SEQ ID NO: 1004283 - protein, 62 aa, Homo sapiens
LVADNFEQHVTARTCIPGFPSIIRMSWIRVYGSVHRHGGSSGDKTADHAGTEVAQDVVMRSS

SEQ ID NO: 1004284 - protein, 35 aa, Homo sapiens
MKLCVCSTDFRALTVVYPQTYNSARPLDYTSGNSL

SEQ ID NO: 1004285 - protein, 43 aa, Homo sapiens
TKRVEASQEVQASLVQAAFNKRIVNSQPKETQRAAPQPGPPGY

SEQ ID NO: 1004286 - protein, 73 aa, Homo sapiens
GWGRPLISSKALLAGPSPGARDKQARLASLIRELIVPPKSPPLNTTTWGARIPHMNFGRTQTLTTPSALRKAT

SEQ ID NO: 1004287 - protein, 91 aa, Homo sapiens
LNLSALDSVMAYDSRGHDYTLLRDRVTYHRHSKNQFSLTVTSVTGETRRLLLCERGLDCSYPKLTDALDILGSRGQRVTCLFKPPPKGPIG

SEQ ID NO: 1004288 - protein, 38 aa, Homo sapiens
MVVIWLLWECRYSLRLRVVRLPRNSCRFIQLRLMREGV

SEQ ID NO: 1004289 - protein, 105 aa, Homo sapiens
TVVVVGRQEVSKLQYGAMSGVKLAAERWGPRMRKGCEAAVAVLVVVLTLLLLTLFMPEPNAGFEAESVDGLAEVMGATAEVALASASEERGQLWWDAVAGVSCLA

SEQ ID NO: 1004290 - protein, 35 aa, Homo sapiens
LLVEGEEVALRDKARSWEPAEIVSDHARCDKKKRN

SEQ ID NO: 1004291 - protein, 33 aa, Homo sapiens
RLEREEVVLSVYNIYWRIINSRARGHSCVNELE

SEQ ID NO: 1004292 - protein, 38 aa, Homo sapiens
GVRVVLCVCCGGSLCLTGLPVCRRCVGKLSPQPCCESQ

SEQ ID NO: 1004293 - protein, 71 aa, Homo sapiens
MRYVAVTFLGCLDQNPSDRPKNGKRTWTLELRALWENACWQAPCVGLGGYGAPYWNRSGRIENCTVPFLDR

SEQ ID NO: 1004294 - protein, 36 aa, Homo sapiens
VQGGCSELRTFELRPDMRRNQLCKIWGRGIPGRENS

SEQ ID NO: 1004295 - protein, 68 aa, Homo sapiens
MVTFPSSPGQEKTLEGPKLLVPMHAGKRASHSLSLATDPLLSAWRLPRQGLLCSRQAKGPIVPPSQST

SEQ ID NO: 1004296 - protein, 127 aa, Homo sapiens
  misc_feature (4)..(4): Xaa can be any naturally occurring amino acid
MQIXDRTAVYTKAIYRFHADSVCEASNRRRSVYLPTREYPSEQIIVTEKTNILLFELHQQWDKKNAVKKRDHEQVELEGESSDTPRKVGRKDSPDMHGGHLRLSTPQAPPARSAPRSPTRLPAVPKH

SEQ ID NO: 1004297 - protein, 42 aa, Homo sapiens
MILLLWDGGIYNFIGEFMKAAWIRRPDRSKPCHVPGMPAMES

SEQ ID NO: 1004298 - protein, 35 aa, Homo sapiens
GAQRLDRASETGLYRRGEAQLLMSEFESAKGDSEK

SEQ ID NO: 1004299 - protein, 39 aa, Homo sapiens
VVDVSSAGAVSISLIAYVLHGCAQVNSDSPAVLELGISR

SEQ ID NO: 1004300 - protein, 89 aa, Homo sapiens
RYYPLKFMTEAEQQQLIEDHFLFETLVTPEILLLGMARDWPDARGIWHNDNQTSLAGDNEEDHLRVISMQKGGNMKEVFTRFCTDLTQI

SEQ ID NO: 1004301 - protein, 98 aa, Homo sapiens
  misc_feature (68)..(68): Xaa can be any naturally occurring amino acid
TLEIPDSALIPENLSRKSVQINPLFTQHWGSRSTVSQCSCTECVSASEELPRPSKEQDFSYLNIPFLXPEPFFSKAEPKARDLGGATPTFNNAPNQGQ

SEQ ID NO: 1004302 - protein, 105 aa, Homo sapiens
CAGGGYSQVWRSWGRAAELQGGRSRSWKGDRGEALSLEGGRGEALSLEGGRGEGLSLEGGRGEGLSLEGGRGEGLSLEGGRGEGLSLGRGQRRGSEPGRSEKERL

SEQ ID NO: 1004303 - protein, 38 aa, Homo sapiens
MRSRGGHPIQYRRMDINDRKNIDLSQFTRGGYIMPGTY

SEQ ID NO: 1004304 - protein, 37 aa, Homo sapiens
MRSLFTRALIIWHPNCPCIHPCTSICGAHRIIQALSH

SEQ ID NO: 1004305 - protein, 36 aa, Homo sapiens
MLRSVSDCPRLAQHLLQQVRSLGAGPWKQLSEILPG

SEQ ID NO: 1004306 - protein, 69 aa, Homo sapiens
LWDGGPHYSFDGKTYTFRVDCYYVCNGDHNDSYAPLASMPPCSTDQQTCLKTVVLLADKKKNVVVFKVR

SEQ ID NO: 1004307 - protein, 73 aa, Homo sapiens
  misc_feature (1)..(1): Xaa can be any naturally occurring amino acid
XRALNNLHPQHVLPCLSYYECVNPVIAVLISLSSGMPNHSASIQLCVQKYTDIDRGFRSELEVPGAAGNDQDP

SEQ ID NO: 1004308 - protein, 59 aa, Homo sapiens
GQRQGWGHVLQAHLVSAFHSTNAVSVFSLLSTIRACTPGTLTLVPLATSRCLGGQVETK

SEQ ID NO: 1004309 - protein, 49 aa, Homo sapiens
RGSPVLWDGGSHISTSDGKTYTFHGGLLLCPRQGVTTTIPNALSEGELA

SEQ ID NO: 1004310 - protein, 54 aa, Homo sapiens
RVRLALEGEKRHHINKVHQGTQCLFIHHQGRRPHTGKPPLNTQLLKDPQSAILL

SEQ ID NO: 1004311 - protein, 131 aa, Homo sapiens
TLLDGDCTPAEAPVDMIVPEYVRDLWSQRSENTLSSYRCTPACDPGYQPTPGGACQDVNECETLQGVCGAARCENVEGSFLCVCPNSPEEFEPMSGCCVPARTSAGTYPCSQPQAPASPVLPARPPPAPLP

SEQ ID NO: 1004312 - protein, 98 aa, Homo sapiens
LLEKITYEIPEVGWIVLLGGFFGGDENEMKRMMSYSQTRMLPNVYFVLLEIYSFYALVEEAYFLAEYYYEEMAAFLGLAAFQVNTILIEIYGAVPKHR

SEQ ID NO: 1004313 - protein, 49 aa, Homo sapiens
QVVSMSRESQHIPTAEGASVIKHGYEEIRMELSPDTHTQAAWAWKKYLV

SEQ ID NO: 1004314 - protein, 62 aa, Homo sapiens
TTFFLICSRNHSSLPINGLSRGCLRPRGRRRATLRCPGARACALYAEGLRFRAWAPAPLPGQ

SEQ ID NO: 1004315 - protein, 106 aa, Homo sapiens
SLLPLYTSVLLETRRLTHQFRPMKTQRYPAVHKTGLSEKSTTFYSEPQITRHNTLTCPHDKAQASVKNPPPPTADQAQHTQQHSLAVPPCQASVRNLQLPTAAIAL

SEQ ID NO: 1004316 - protein, 81 aa, Homo sapiens
PYSNLTQHPAAIPDWGYVEDKQRDEDLPQERGRIYETNSTPIHIRSQLSPMDPTSPSYNSHGLQPSPNINQSKSRIEYKAI

SEQ ID NO: 1004317 - protein, 59 aa, Homo sapiens
GQIVLSLTCEVLAARLSSSAAVLSVGSFRSSQPVLGSLDFTIFFLALAPVILPLTGDSV

SEQ ID NO: 1004318 - protein, 77 aa, Homo sapiens
RCNSRYVYDSLLTPAMSCAGFLQGDVDSCQGDRGGPLDTSKNKIRRLIGDDKLRCWLSESLQTTSVRECDLIHGLDV

SEQ ID NO: 1004319 - protein, 97 aa, Homo sapiens
NTTDRLTSDAVNALVSCHHLHNIPFDLNRYNTAHIGSVIRMMMDELEANIHVPPPELQSDIIDITGLSANLYRAMAVLLKRVKELQAEQEDRCLKEF

SEQ ID NO: 1004320 - protein, 136 aa, Homo sapiens
MALRNPGTRIGQEPGMGSSAMSTVSGPTAHGRKAVYMYLAHVPLLIPHRLRDERTLQDAHRREVVICVTSAALPAGPGTPYTSIADRTQEKKLIRCDECNFGSTTQSHLTRHKRVHTGEKAYRYPLCRYRSNCCEN

SEQ ID NO: 1004321 - protein, 150 aa, Homo sapiens
  misc_feature (122)..(122): Xaa can be any naturally occurring amino acid
  misc_feature (125)..(125): Xaa can be any naturally occurring amino acid
MPAVDCRVEHQAGREVTYRCEQLPHGVPGMVLVTYINEVTTEIRVADSTRKPVLLDKNKSLQVALTSKQQSLETAMSFDDRKACCDVRNGFLMRKVAVFFSNTPTRASPQLREAVLKLSDAXITXLFLTRQEDRQLINAFADNNTAVGHA

SEQ ID NO: 1004322 - protein, 120 aa, Homo sapiens
  misc_feature (103)..(103): Xaa can be any naturally occurring amino acid
MRNALPGGTLNSWLHAPILKGTLLSVCGGSVPLAEEQQLGHCPPRSLSFSWKWQQWAYPVQGQCWSLWDVGCYSKTRIRLIGFKELLAGNWNLLVTTTGAEYXPTIPRLINTVSVPAVLL

SEQ ID NO: 1004323 - protein, 81 aa, Homo sapiens
MHAWGMHAGGMHAGMHAGMHAGMHAQHAFMRRMQAGMHRAHAGSPCMRRMHRIKGMQWRPCMHSQGMQWGACHCSAQHCHA

SEQ ID NO: 1004324 - protein, 90 aa, Homo sapiens
MVRSPPPAVCSVYGTSALSSERSQSPSRITSYPDHLFIFAVCILSDVLWLLQLHLLQVPSSPHTFMGRFSMTFIPLSLSSDAFSASSSFC

SEQ ID NO: 1004325 - protein, 39 aa, Homo sapiens
TLEERMTFCSADLLLVSLLYLTALITVLIYLHKHLFVSC

SEQ ID NO: 1004326 - protein, 83 aa, Homo sapiens
MPDKQGRCCLKVQVTIMHRLGSPGTRARAAGGDQHYLPTTLPTSATSLASDSTFDSGQGLLTVYSRLAEASQAELVMLFFPFA

SEQ ID NO: 1004327 - protein, 36 aa, Homo sapiens
ESSRLLLSSGVMQVRGLQQPKRMRGVSFGFQECHCG

SEQ ID NO: 1004328 - protein, 93 aa, Homo sapiens
ARLLHEMDGGVTVQVQITICWRWRANDCTAERSRSEQEAREKQAAPSLLKQKDKKLKEILLQVEDERKMGEQYKEQAEKGNASVKQLFEAAGG

SEQ ID NO: 1004329 - protein, 35 aa, Homo sapiens
MHVCRCVVVCYHMESSEICSTLCILENRKEFSFLR

SEQ ID NO: 1004330 - protein, 58 aa, Homo sapiens
  misc_feature (27)..(27): Xaa can be any naturally occurring amino acid
QIFPGQSGEQWTLHAYASDFALWKAAXPRRCSGPLPVGPWDGWAGTSECSAIASMVFW

SEQ ID NO: 1004331 - protein, 32 aa, Homo sapiens
MAYQCYTYTFLVQLNAVGTPVVSTLCLGLACD

SEQ ID NO: 1004332 - protein, 39 aa, Homo sapiens
HLPDKAGESRSADGRFKHGPLWANHSGACLKRKRISRVR

SEQ ID NO: 1004333 - protein, 77 aa, Homo sapiens
TTSTQTYSDMTIRPSPPPDESDMPEGRSEPPGMCEQSLTGKPTDPNWNAKKLKIPRPRPCSSLNFSISGVLRAATSF

SEQ ID NO: 1004334 - protein, 42 aa, Homo sapiens
YDFVSGLYDETGGPLMRYSTPPCPAGAGAPFISVGYVDDTQF

SEQ ID NO: 1004335 - protein, 56 aa, Homo sapiens
  misc_feature (45)..(45): Xaa can be any naturally occurring amino acid
PLVLATFTGLLVFGGNMDAQTVQTQNWKSRWSELCYVPPSSMTFXILLPSETKLAM

SEQ ID NO: 1004336 - protein, 38 aa, Homo sapiens
  misc_feature (26)..(26): Xaa can be any naturally occurring amino acid
MANGCLVITEDEVALRRVPSISIRKXYVIACFRVVENP

SEQ ID NO: 1004337 - protein, 44 aa, Homo sapiens
ATEDRSYTKRDDDAPGCCITHFCKVYERGEYFWEVRAVHGEGLS

SEQ ID NO: 1004338 - protein, 33 aa, Homo sapiens
MCGKSRRSKVLAMMLAVATVDFSKNITKLKTSC

SEQ ID NO: 1004339 - protein, 36 aa, Homo sapiens
  misc_feature (2)..(2): Xaa can be any naturally occurring amino acid
HXLCGKRSRRSTGAAMMLAVATVDFRKNINKLKTSC

SEQ ID NO: 1004340 - protein, 60 aa, Homo sapiens
DLHSHGCGLRKQNMLWQDNGIGEEDERHSGALSLLKNHIDNGYDVASARNDPVSNSTLHD

SEQ ID NO: 1004341 - protein, 53 aa, Homo sapiens
MPGSFVPTDTAITTSQDLQWLVQPTLISYMAQSQGQTLTCQPPDVDPYDMPVT

SEQ ID NO: 1004342 - protein, 61 aa, Homo sapiens
TRRELLKKVVDFSLRPAVVVLPGNAVVSDEPELMRDIVDSPPRADVAEPDEKSAALAAPVL

SEQ ID NO: 1004343 - protein, 61 aa, Homo sapiens
VGVGVGVTVVVVLMGVEVAVCVPLAVVLDVTVACVLMGVDVAVCVPVAVVLGVTVVCALMG

SEQ ID NO: 1004344 - protein, 98 aa, Homo sapiens
  misc_feature (7)..(7): Xaa can be any naturally occurring amino acid
  misc_feature (42)..(42): Xaa can be any naturally occurring amino acid
  misc_feature (49)..(49): Xaa can be any naturally occurring amino acid
GQDLPEXRILPHLASFNPAFFLPPGWDCPPPPGEAEIDALYXQAQYGTXQHRVPGPPWTTWQGDPLTPEFIKPTMDLASPEAAPAAPTALPSFSTFMD

SEQ ID NO: 1004345 - protein, 122 aa, Homo sapiens
  misc_feature (122)..(122): Xaa can be any naturally occurring amino acid
MTRDGWIGSANETRRGHYSEEPGASGADQCGFHSGGLRLQRGLGRAECPPLNTGPPRQRLDLRKPHCLNMSKNPGLPEGKDHSSGKQNGSGPAQSLANTGQQQRKASGPAQSLANAGQQQRX

SEQ ID NO: 1004346 - protein, 94 aa, Homo sapiens
NASGRCRGPPGPKHLDDDEDLYESSIHTSERAWSLSMIFEGKLRRRKPDPRRASSPLWKDEGRWEHDKFREDEQAPKSRQELIALYGYDIRSAH

SEQ ID NO: 1004347 - protein, 108 aa, Homo sapiens
STRSPPGVSWLRAPGHLLTSSLSLRSLLQLVRPPLFLNDFYGGLLLRRFSHSFLYPTCRGLSLLYTRPVSFCPLLSAHPPGWLLSTPAASSAKRGPARVGAPLVRKLR

SEQ ID NO: 1004348 - protein, 92 aa, Homo sapiens
MSVDIITQPSGCKRVTHQSCELHAEMGLPDHNCNSFSVAPTRPPHPSLRAPKAPDATCCHGRHEFTYALMPHKGECWGRWGLPAALDTSLPF

SEQ ID NO: 1004349 - protein, 42 aa, Homo sapiens
MVAGGTVRYQRGQQKVLALAHCVSDWHSFHLLLLKRVERRLE

SEQ ID NO: 1004350 - protein, 63 aa, Homo sapiens
PTMVLSGQLSVVAWGTVVAFKCRCDGQWYSSSLVAEVRRHSQRCISRLELVGIITRGTSSIVS

SEQ ID NO: 1004351 - protein, 37 aa, Homo sapiens
MPLHRRPAREPRVMQRIAVQSADVPFADPPYQAGGHE

SEQ ID NO: 1004352 - protein, 63 aa, Homo sapiens
RGQRLERGEAGVPAEFSIWTREAGAGGLSIAVEGPSKAEITFDDHKNGSCGVSYIAPDSGPRG

SEQ ID NO: 1004353 - protein, 59 aa, Homo sapiens
SEDPRGLLLLDDIFATYPAAPGPRLAALFPGDVNRLRRMSVIEEGDCKRIMIASYVVIG

SEQ ID NO: 1004354 - protein, 83 aa, Homo sapiens
AQLLDLSLLGPALSSSTAFFSHRHLLSPSWSLSSCCVAVLSSGGRSSWRELQQHSLVFPLYVRKKVGTSQWSASSRKLFLGGI

SEQ ID NO: 1004355 - protein, 40 aa, Homo sapiens
PQLLDIFRIATPHSLGSVWTIRVWQRTTNGLYALTCVPAS

SEQ ID NO: 1004356 - protein, 62 aa, Homo sapiens
TVGTLDLGGAHKKPERLAQPPKDLEARTGAGPLARGERLRRVDESSTPGANNVQVNALVHSM

SEQ ID NO: 1004357 - protein, 56 aa, Homo sapiens
MLCTHSGYRDPISTGFPRFPVHSLSDDGVVYRNFIFLEMSIELCLTSQNRRSTRVP

SEQ ID NO: 1004358 - protein, 54 aa, Homo sapiens
SWDTAAFLCQVVLSISEPATASINPSPASNLLPPQILTSKYRFKGLWQIDLAPL

SEQ ID NO: 1004359 - protein, 80 aa, Homo sapiens
MVGLPGNAVACVEPRRLRQAKDSSLTPELVVLYTRQCCDGDLVLLMKTLNHSHRHCRRLHAINKLESQSHMTESTSSKAV

SEQ ID NO: 1004360 - protein, 66 aa, Homo sapiens
LVAVSFPGKFAAAAGTPKDTRRPSPRLVTGGHPEVLSLGFYPAEITLTWQRDGEDQTQDTDLVETR

SEQ ID NO: 1004361 - protein, 53 aa, Homo sapiens
  misc_feature (1)..(1): Xaa can be any naturally occurring amino acid
XSVVAHCGDTVGGPIEVVRLYDGTVGTVPHPLGWPCKVPDGQPRQTVPFSTAS

SEQ ID NO: 1004362 - protein, 37 aa, Homo sapiens
SRVQDLPMQATHEHDALRQANARDDVNYRHQIQELRV

SEQ ID NO: 1004363 - protein, 36 aa, Homo sapiens
MSNVLTIGSWKLDSREGDVHMTLVDFLLRFSMTPRN

SEQ ID NO: 1004364 - protein, 34 aa, Homo sapiens
LPRNLRDINTGYISSRVVPLFTHDVHFVGRKRDY

SEQ ID NO: 1004365 - protein, 69 aa, Homo sapiens
SAAPGEYLKLEGEVGSKFTSIRYTSETRCNITPISPPSLPIIPPNMGPVHVNPPLLSQLYLLTSVTTKI

SEQ ID NO: 1004366 - protein, 94 aa, Homo sapiens
YTQKRRDKLMKATTARGTDPLWSWTFRKQAVSSPSKKVSFGCPVHYNIQNNLLGLSEALTVLTFLTYTHEKMGAAMLCVSYPNLWPPHFEFRDT

SEQ ID NO: 1004367 - protein, 49 aa, Homo sapiens
GQLSPGPWDDAVSTARDHVRVCGAWAAVGSCSIPDLRPGMRGTASGMLL

SEQ ID NO: 1004368 - protein, 118 aa, Homo sapiens
METHIDEDEVRSWADLRIRKSQYSVITRKLVEVMTKYNEAQVALPRTQHRANPAAARNYWQQDTPMSELEAHVGEWPTRPSSLLASLTHSIPSKPSVKLEGRHKDMVRLKSSIKAAHD

SEQ ID NO: 1004369 - protein, 30 aa, Homo sapiens
MSSQLLWAGSQAGGSRRSGDRDLSWLNTVV

SEQ ID NO: 1004370 - protein, 38 aa, Homo sapiens
NKKLLTHIIFPKIQNNNTLDHTANTQEFTPINRRGALK

SEQ ID NO: 1004371 - protein, 57 aa, Homo sapiens
NEQQNNIPWCTTRGHVGWSQVQCVNVLLLSPAEEQVLSCGKDVRQMCWRQCHYACHM

SEQ ID NO: 1004372 - protein, 52 aa, Homo sapiens
CSALFCCTPVFVSQSAVLNVMSELRLGCQGYFKRRYCLLTVAPFLVQPETHA

SEQ ID NO: 1004373 - protein, 102 aa, Homo sapiens
KPMTGSWYVMAGLPLWQLAVDGESTGIGASQAGLPCTHDTPEPQLFSFTAHNTYLAELYGLERSIKCQIWNRCSVIVAVIVHPLLRIQEKEIELWLQGCGPP

SEQ ID NO: 1004374 - protein, 93 aa, Homo sapiens
MISRQLIYTKAQSACAETNPSAVYAEVRTEVQRSVLTAVPQVGIPGTKNGALKGRPSKQWQCKHPGQQHSSPKANRSHFSSCMHSQACMQVCS

SEQ ID NO: 1004375 - protein, 137 aa, Homo sapiens
YRTFDSPLLSNQISFTELKFPSGSCSKSEYKGHAKGAARTHLRGDLTLHRPGVQGPGSPRHLSLGVIEAVSRVAPGTGEGASPCPRQSSPTAEEELQIFICADELRPSGGIGEGEGGEGQSLTQQSAYCVPGMVLRA

SEQ ID NO: 1004376 - protein, 72 aa, Homo sapiens
LTCHNSRAWNSLGDQLPTTPGHSEESATVHSSPDAMATTVLPAGSTPSVLVGDSTPSPISSGSMETKAVVGS

SEQ ID NO: 1004377 - protein, 65 aa, Homo sapiens
KRGREVGYEKDGGEEENTETEGGTPMAPRLVIQHFERAEGRADHPRGQEFQEPALANIGDTAHLV

SEQ ID NO: 1004378 - protein, 40 aa, Homo sapiens
AQNTELVSGQEDYCSVVTWLLWDAVDSSLRPEVVEPSYAV

SEQ ID NO: 1004379 - protein, 65 aa, Homo sapiens
DDVGCAGSSLTPELVVVAGESVASGDLGLVEKVVDFSLWPEVVELAGKCVVGVEPELMGEVVDSP

SEQ ID NO: 1004380 - protein, 175 aa, Homo sapiens
LYPPLPAVREQGAGPDVSKEGDAVLMRGARLWFRRLRPSHQDPGYFRGKAVEIQEITLIGAEHLWIPAALRNHGGAPGAFFPTLVPLGLGAGSWEPWLVGVGQSSGTGKNGRPGVQLQTLQEQDIRLVRLLRTPGEFGSPMTNLGALFGSLQETSLGGKEEYVATHLEHHRDHRT

SEQ ID NO: 1004381 - protein, 121 aa, Homo sapiens
LLRPSLAGVLERERPMRLAGVLERERPRLAGVLERERTRLAGVLEETCHFSCLAIYYETCAELTIAAYDLRLAGVLDRDLPLRTDVLDRTYAWWEFWIVISAWQVFYERDLPRRAGVLERD

SEQ ID NO: 1004382 - protein, 126 aa, Homo sapiens
PRIMEMNQVDSRINTDEDYDFTLSLCNGLNMNASLVPDGSRLNLVRNCIELKFCHPELYGGEYCVDPSPKGWQIGCYHGILLITGHTGRNMHKCQSFECSTDILVDRFYMSVNKHVWFGESMDGAF

SEQ ID NO: 1004383 - protein, 40 aa, Homo sapiens
  misc_feature (15)..(15): Xaa can be any naturally occurring amino acid
LGLQAEATAPNITLXFFALTQKGDKAQETALSFKLLACTC

SEQ ID NO: 1004384 - protein, 49 aa, Homo sapiens
MFIIQCYKYADRVVCSSDTLISYAVMTVLSPIEKAISKANRVVKSSLVV

SEQ ID NO: 1004385 - protein, 134 aa, Homo sapiens
VPPEALLLLNTTELPSFLSYLPQSSGLQAPRILYLIWLVVPLLQQLPYPPGACDYLAWRRMVFRRMVFAYGFSFNMILKFFSGFFFRTLRWIFLRGARKGSLDLWAFQDSAKICINHLVHGKIVVTLEEKRLYA

SEQ ID NO: 1004386 - protein, 60 aa, Homo sapiens
MSFLLFPCSECRSVCHSSSDWACVSQLMASINTTQKSLPARLLGNLWYCWLISNFNWDKE

SEQ ID NO: 1004387 - protein, 50 aa, Homo sapiens
ISRLCDCVLIPHYGLQYCGIYHCICVCLQLERHRCCRTLVVCDRTPRGCS

SEQ ID NO: 1004388 - protein, 47 aa, Homo sapiens
TLIMAKVVELQVDVLLAVATGLLWTGVDSSLRPKVVELAEKWVVGVE

SEQ ID NO: 1004389 - protein, 46 aa, Homo sapiens
LWLRLCSRASFRRLWHVDHEVQEIETILLNTVIARLCYNFDKIRLG

SEQ ID NO: 1004390 - protein, 38 aa, Homo sapiens
MSRCTHVLLVHRRGNLEEYSRAAPPATAFMEPLKVEQP

SEQ ID NO: 1004391 - protein, 43 aa, Homo sapiens
MRRREVRRGGSRGAPVRVGGQEGPGSNYGNPGRTQEKVNKAAK

SEQ ID NO: 1004392 - protein, 71 aa, Homo sapiens
  misc_feature (2)..(2): Xaa can be any naturally occurring amino acid
RXSALRGSGFDETGLAPLHEVFPHLRVPGPCRVEPCFISVGYVDGTQFVRFDSDAGESEDGAPGAVDRAEG

SEQ ID NO: 1004393 - protein, 90 aa, Homo sapiens
AWRDILEGLCTELPVNKQLRRIQEKLFSKYGPLSELHYPIDSLTKNTKGYCIQSPSCSPEHAVTGLLGGGTGRSFPGQGCSNGCYQSTIP

SEQ ID NO: 1004394 - protein, 85 aa, Homo sapiens
NPADRGQEKPRDVSSVELLRNNHQGIKVEIDARNDSFTSLHGTWEIPVGEKTGMHLRRVRKKLLQVDGRRGKKMSRQGGKDGVGK

SEQ ID NO: 1004395 - protein, 89 aa, Homo sapiens
  misc_feature (25)..(25): Xaa can be any naturally occurring amino acid
  misc_feature (51)..(51): Xaa can be any naturally occurring amino acid
LVDGSRLTFISGLKAYRLSKIPLWXRKTVDGGNVGPASYNVEETLTTLRYXNRAINIKNKPRVNEDPKDALLREFQEEIARLKAQLEKR

SEQ ID NO: 1004396 - protein, 40 aa, Homo sapiens
HSRDPLLVCSGRLFTSAKISETAYLQYLMVQARLVHFQVT

SEQ ID NO: 1004397 - protein, 46 aa, Homo sapiens
RVLLLAPTGLDQHHHSTGAHGRTLSRLGKGDEAIWFLKCPTVRTEQ

SEQ ID NO: 1004398 - protein, 38 aa, Homo sapiens
  misc_feature (1)..(1): Xaa can be any naturally occurring amino acid
XTTRTMYFTYLEIIPYHVTKDGVYVLDKAAKVDATAEY

SEQ ID NO: 1004399 - protein, 48 aa, Homo sapiens
CVVGDVCEARCHQAQEGQLDGHMAGSELLAPYSNWNPSDMLSQNQTCV

SEQ ID NO: 1004400 - protein, 65 aa, Homo sapiens
  misc_feature (1)..(1): Xaa can be any naturally occurring amino acid
XIRNESVIAHVDHGKPEVDRYPGVVRRAYISLGPGGGDLLSLDTRKDEQERCITIQVNCHLPYFY

SEQ ID NO: 1004401 - protein, 47 aa, Homo sapiens
LLRSTLTDSPAWWYGRYRRTELRLCVKVTLGRGGCNLPPSLSTAEAG

SEQ ID NO: 1004402 - protein, 74 aa, Homo sapiens
RFPVLLCLSLVPFRVTLSLCVPDACDADHHPACTLPPTSRKTWPLRMNEGGGGAWGPPAMESSTTIIQAFGSRT

SEQ ID NO: 1004403 - protein, 63 aa, Homo sapiens
LLVLLCLSCLARGLMGERDPAHWQRQDKQRQDKQRQDKQRQDKQMLLTENGKKEILRYQRQDS

SEQ ID NO: 1004404 - protein, 108 aa, Homo sapiens
SIDGTQSYCGSTPSVCGDRRLTIVQAQWKHRFPRSTTKPGLSEKSTTFYSSPRSPDTTHLPARMTSSGVSEESTTSHSRPGSTHTTAFPGSTTMPGLSQESTASHSSP

SEQ ID NO: 1004405 - protein, 41 aa, Homo sapiens
MCSAMHGQKKEGYFRLESFLLEFSQLQKNFISRFRSIGFID

SEQ ID NO: 1004406 - protein, 107 aa, Homo sapiens
MSPTFHIWEKWNQQFDAWLGVCRKHEAPEVQGPHTAQDPHMAASLSSTPGVCRALPSHTLPLGKAAQAAVGNRNPGEGRKSGGTRQPSAWLGTFWQTVSPHCFPASN

SEQ ID NO: 1004407 - protein, 112 aa, Homo sapiens
FVIRNMSVIAHVTMDLSKFDRLPGVQGGLIASAGPAETRFTDTRKHEQERCITINVNAISLFYELSENDLNFIKQSNFCAGFLINLIDSPGHVDFSSEVTAALRVTDDALMV

SEQ ID NO: 1004408 - protein, 78 aa, Homo sapiens
MEGSYQDMHCKVLHTCGLLAVLQAGLPFLPSLAFPDTTERPGSFLWHQPRPLAQLASPPTSSWGIRASVEDNGARERS

SEQ ID NO: 1004409 - protein, 44 aa, Homo sapiens
PLLVMLCHKGPEYQDNNVFSACPASAACLCLSCLCCLSLLVLPL

SEQ ID NO: 1004410 - protein, 125 aa, Homo sapiens
FLIIFYTESIIYMRAVPRAHRSGFSESWKTAATGFPEPVFDEALTEEQASKQQFVVKIWKRVPEPLRFGEGSYEEGRSANDLVVKLGKRIPGRSECNMVMKVAGGLACQPHGGGEQALCVEDPTP

SEQ ID NO: 1004411 - protein, 103 aa, Homo sapiens
TILSSHSSQPCLFRGDCCSMLGAGEMQCYFPSVLLSICGYVTQSDSCPPHSRRGGGQVNRQLDRVSRVKISEGRKPEVCAQPAEVWVGVSDRNDVPGEEPATE

SEQ ID NO: 1004412 - protein, 60 aa, Homo sapiens
  misc_feature (21)..(21): Xaa can be any naturally occurring amino acid
IPIRRQKGLIQKFKSFIQLLXVLCLCTSACIALWRKTTPFAGMDKDSWERYSPKGSKGMG

SEQ ID NO: 1004413 - protein, 51 aa, Homo sapiens
  misc_feature (28)..(28): Xaa can be any naturally occurring amino acid
PYRRQKGGEGRVKRHRKEKMKRKEAVLXNRVQDILERQTICETKGRAVRDE

SEQ ID NO: 1004414 - protein, 80 aa, Homo sapiens
MPLYSNLGNKNKIPSQKKKKNPKTLKSLPWGDYNLQKLCHGNSGTALTSVPLIMAAYLSTPIGLDYLSQGPICMEAPLRS

SEQ ID NO: 1004415 - protein, 52 aa, Homo sapiens
DKTTEGTDSRCCTLRAVTLTVRVRSFILEVSETKNPPIPGHNRTLVSKEVII

SEQ ID NO: 1004416 - protein, 74 aa, Homo sapiens
NAIRRQKEEVRSILMTDITRTHYCKNGTKGKSPPGFNHLPSGSISNIGDYKFNMRLERGQGTKPYYIQKRVYAK

SEQ ID NO: 1004417 - protein, 41 aa, Homo sapiens
AVLRSTVVEDVVWPHQFSSSCLKEERTMLEDIWVTLYELDN

SEQ ID NO: 1004418 - protein, 38 aa, Homo sapiens
LELVQWLTPVLGNFPITFACYGALFCLSASIIYPTTYV

SEQ ID NO: 1004419 - protein, 105 aa, Homo sapiens
DTELNYGRAERDTALELATGAGIITRACRIHEHLKNRASDLMNFDDPAGLQQDHPVDKLTIQGLKDFTPDKAPCSSIIKHPNGTQENILLNHTFKRDAELRWYRG

SEQ ID NO: 1004420 - protein, 40 aa, Homo sapiens
YTELDYGEGLSREHAALEPRHLVGCAIITKSFARIHETNL

SEQ ID NO: 1004421 - protein, 39 aa, Homo sapiens
LERAELVQWSKLSWCTSPYTYAAMRPLLLSGSSFTHHYV

SEQ ID NO: 1004422 - protein, 44 aa, Homo sapiens
LQYMAPEIIDQCPRGYGKAADIWSLELHCHMRWPHGLPPPIHAA

SEQ ID NO: 1004423 - protein, 38 aa, Homo sapiens
MQTLNPCALKPGAKSKSIIVSSRHRGNRVLKFVRNVPW

SEQ ID NO: 1004424 - protein, 69 aa, Homo sapiens
CTLLSNHAQIPAGDQVLVMPIMTDETSSITLDYFQVSLRSSPAIRDSAVCPRYSPTTPTFQLESVRGTP

SEQ ID NO: 1004425 - protein, 41 aa, Homo sapiens
PSFWWALVRRLADDIGELGALERHGLSPHLSARSIDQSPVL

SEQ ID NO: 1004426 - protein, 35 aa, Homo sapiens
SSRGTLQNTPTILAGVRSRHPGLTYKLTDRYMLTL

SEQ ID NO: 1004427 - protein, 70 aa, Homo sapiens
MLRTELELPQVLTEPDYVAQKLLLKRHQSMDNSKAVLVVAMGLLSPHLTMGPHSQLIVLVSSSELLRHSL

SEQ ID NO: 1004428 - protein, 34 aa, Homo sapiens
MGDMCLREGRINATVEAPAHSWLQDLHIHSRQEE

SEQ ID NO: 1004429 - protein, 75 aa, Homo sapiens
  misc_feature (2)..(2): Xaa can be any naturally occurring amino acid
  misc_feature (41)..(41): Xaa can be any naturally occurring amino acid
RXVESRDWHYRKSLAQHIIPSSSLQERASTGILCTVHAPAXLNPILSPVFQKKSLMARSIIIATGKVACTCLFST

SEQ ID NO: 1004430 - protein, 65 aa, Homo sapiens
CNQHLGSPGVGRRTPGVVSTKEDPTVLARHSSSFSTTELLLQPLLLSSKTPMTDSHHEPLENLAG

SEQ ID NO: 1004431 - protein, 36 aa, Homo sapiens
  misc_feature (1)..(1): Xaa can be any naturally occurring amino acid
XVRGSCMDRLWGSKGCGIVLIESSAVASTRRLHIVQ

SEQ ID NO: 1004432 - protein, 57 aa, Homo sapiens
MARVTREHAALETRNLVGRAIITKSFARIHETNLKKQGLLPPEPSLTLAGLQQRFTL

SEQ ID NO: 1004433 - protein, 33 aa, Homo sapiens
VSCIGAGTAGASYQRSGTEVQVRPYTGCCSPAP

SEQ ID NO: 1004434 - protein, 79 aa, Homo sapiens
RGVVLIELVLGSWKRSIPVGLRAVVGLAHDRTSGDLADPVQLCVALHGHPLQGGQVQHRTASDVVVVVPAPVEIVVLCL

SEQ ID NO: 1004435 - protein, 75 aa, Homo sapiens
AGPAEQLELPPWRYMHKRLPKPAPTTFWYKLALMLSRILGDTILGIYIPYSNDILTDSPANFLESRLFSHSQISQ

SEQ ID NO: 1004436 - protein, 77 aa, Homo sapiens
SCPPGRSDCCEDTFLSSEAATVRELMDRALELEARCWVEDVPPQRLDEHCHRELAIDIIQISSQAHGKAEIITLDLG

SEQ ID NO: 1004437 - protein, 113 aa, Homo sapiens
PKLNFLKEKERNLSSWQCENANRFCFLTGYADSQTSHLHCQHSGPHLHQSPGCKQVHGYSQTIPLENRPPCTQNKNSAISYTYGTESAWTMEWATNMTKNTNQVAVDQLGGGP

SEQ ID NO: 1004438 - protein, 62 aa, Homo sapiens
SDLEDDTQIMFETFNTPAMYFAMQAVLSLYASGLYHMAVVIGLRVTGFTKICDHSTRGVDSS

SEQ ID NO: 1004439 - protein, 63 aa, Homo sapiens
YRRWPNGTVRGQLLRWSNRRTKKKKKTGRAKRRMQYNRRLVNDCAQLLVKNEGPQLPVAPSGG

SEQ ID NO: 1004440 - protein, 56 aa, Homo sapiens
NPAGRPLRPPWTAILPHSQDDPRRPPSGAPVYTYQFFNAHSPTQQPWYKYTTGSHR

SEQ ID NO: 1004441 - protein, 69 aa, Homo sapiens
MRSSLDVDHDLKLLLVSVTEKVLAAVILEALSDHHIYLEGTLLEDNSRHPRPCCPQKFSHEEIAIGPAV

SEQ ID NO: 1004442 - protein, 54 aa, Homo sapiens
QGVFQVDVVFTQSLCRHAASTFSVTYCQQHSSHGPHQEDLRLNDGTMPSVADTA

SEQ ID NO: 1004443 - protein, 46 aa, Homo sapiens
MAASTFSGTYWRRFRSWSPSGRISGSMMGTRPFCVGDTAIGPKRGV

SEQ ID NO: 1004444 - protein, 52 aa, Homo sapiens
GTISVHEISTSQVTVIFVFQPSRIAGITGSRNHTRANFCIFSRGGVWPLGQR

SEQ ID NO: 1004445 - protein, 45 aa, Homo sapiens
KVLCTIEATPTGCMRKLLNRHSGPPTPYAPPGIQMKVKHVRENSV

SEQ ID NO: 1004446 - protein, 74 aa, Homo sapiens
MEHPQILHVTTSSVATTGVSEELDNGADASDKAAHVAHTDVEEFATLNSRYTRIICEVHHPSRSNDNTVVLQHV

SEQ ID NO: 1004447 - protein, 30 aa, Homo sapiens
MTMMNLMVVVLSSSYLHSHSRQDRPPRHGQ

SEQ ID NO: 1004448 - protein, 65 aa, Homo sapiens
KHAKIHSQNESSQLQTPDYAKVKQPGSLERWLCPNRSLIKHRYECMTVTGNWYSINSHYHKELTA

SEQ ID NO: 1004449 - protein, 37 aa, Homo sapiens
GPHEEERDPHCWGVCHTQSPTTLNLPSSMVLTSSMVL

SEQ ID NO: 1004450 - protein, 72 aa, Homo sapiens
MFGSALQEVMGIRESATPSAAALGADTGSLSECAERSTVDQTEGHLQWSLCDIEDGDIALNAAEWTTWTGAH

SEQ ID NO: 1004451 - protein, 58 aa, Homo sapiens
MTWNVEIANYRKLLEGEESRITISSIQTYSDLNFRENSPAATGVLRVPYQAQTVLIND

SEQ ID NO: 1004452 - protein, 104 aa, Homo sapiens
CAGAFGTCSVPEGALLRIWTRRRAKDNPDHPQLQHPKAWAQGILDHDLVYGFGDLTFGIESYDLHLCQCLPSRVTSSISSGRRTELTSGQRTPVANSEGASREG

SEQ ID NO: 1004453 - protein, 152 aa, Homo sapiens
  misc_feature (57)..(57): Xaa can be any naturally occurring amino acid
CVILEDPAMVLSVAQQGSSCRRAVITFGAFLIGALSTVHSGTSTRTRVPQQAGARVXGGCPGLLGEQQEQPQHREHQEHPLLDQQHGIALAPGARPAGKTEQPAAGSTGVNSPWGASPPFDPRNCRLALGAIPFPASLSRGPCLRSAPTGFG

SEQ ID NO: 1004454 - protein, 91 aa, Homo sapiens
SCKTARNCRDLKFCHPELNEWRILGLIHVCDAIWCSDYVIVLGRSVGETAKACQLGIKEIFRKYRIAVLNVKTNIHVLSKPNVLLLSTRIC

SEQ ID NO: 1004455 - protein, 167 aa, Homo sapiens
  misc_feature (12)..(12): Xaa can be any naturally occurring amino acid
  misc_feature (27)..(27): Xaa can be any naturally occurring amino acid
  misc_feature (82)..(82): Xaa can be any naturally occurring amino acid
  misc_feature (152)..(152): Xaa can be any naturally occurring amino acid
GVSGKMDSTVSXPLAPVSRRLVMLVCXPPPPDSWSPVLQRWFDSASAHALKRRSRWWRYYRADDAQCGRDRDLDVDTTLKSXEQQIENIRSPEDSRKNPAGTCRDLKMCHSDWKSGEYWIDPNQGCKLDAIKVFCNMETGETCVYPTQPSVXQKNWYISKNPKDKRH

SEQ ID NO: 1004456 - protein, 53 aa, Homo sapiens
  misc_feature (44)..(44): Xaa can be any naturally occurring amino acid
  misc_feature (46)..(46): Xaa can be any naturally occurring amino acid
TGQHVHKPTLKVEQMIYEVCLIHHYSSDLWPTNYHFFKHLNNFXAXENTSTGY

SEQ ID NO: 1004457 - protein, 45 aa, Homo sapiens
  misc_feature (45)..(45): Xaa can be any naturally occurring amino acid
SGMAFVSHCQRVSGGADCRLEKLTKYDDIKKVVKQASGGPPQCGX

SEQ ID NO: 1004458 - protein, 34 aa, Homo sapiens
  misc_feature (2)..(2): Xaa can be any naturally occurring amino acid
VXMQIENLKEELAYLTRRTMRQEMNALGGQVSGE

SEQ ID NO: 1004459 - protein, 79 aa, Homo sapiens
VVVLYDAHEYSCCCASLLEEIDVISRGILRAIRTASLRVLTSGIFETQFPVDQVNFHMFDVGWQRDERRKVDPVLQRWG

SEQ ID NO: 1004460 - protein, 34 aa, Homo sapiens
  misc_feature (22)..(22): Xaa can be any naturally occurring amino acid
MAISCSSRVFTSSNDLVLRGSXCSIFNSVAWAQL

SEQ ID NO: 1004461 - protein, 57 aa, Homo sapiens
  misc_feature (19)..(19): Xaa can be any naturally occurring amino acid
LWQLHEERLCVSSRLFSRXAFMLSWDCSSISRFCVCAGVRDLALAALNQLAVGGHLA

SEQ ID NO: 1004462 - protein, 59 aa, Homo sapiens
DIGLVRRDSQTVLQAVHRIWITTLPSYAETLRLPAPCCAVLRVSHAEEEERVPPEDDEY

SEQ ID NO: 1004463 - protein, 97 aa, Homo sapiens
TELRVHRYAFSKQEGITPDTATCTNAPQASCQFSSSVVMCAAQSEMQAGASLATGQTVNATQASFKAHFIIFTIATAQCNRPIAKQFLTQQTHPAPT

SEQ ID NO: 1004464 - protein, 77 aa, Homo sapiens
MSATQTYKHKHTAAHTCTNTAHKQHTHMHTHKHTCTHTNTSTTHKHMQKHTYKQKHPCTHMHKHIHTITHKHTQTYA

SEQ ID NO: 1004465 - protein, 68 aa, Homo sapiens
  misc_feature (44)..(44): Xaa can be any naturally occurring amino acid
  misc_feature (59)..(59): Xaa can be any naturally occurring amino acid
  misc_feature (61)..(61): Xaa can be any naturally occurring amino acid
  misc_feature (65)..(65): Xaa can be any naturally occurring amino acid
TQEELIKADVGAAGWRVLSRSLVVITPHTLGVTRYTSTLEDEDXETAMMRPNVVWSTCXTXDSGXSLK

SEQ ID NO: 1004466 - protein, 70 aa, Homo sapiens
PVLYTCVVICIYHIRHHASSSSMIASNSSEYSICCTVNSTAHFWLPKIVCLWVGMPSLSILPLEPIAMLD

SEQ ID NO: 1004467 - protein, 34 aa, Homo sapiens
GTVSIDTERYWPRAVEAVNIKAGNSLPASQAQGS

SEQ ID NO: 1004468 - protein, 53 aa, Homo sapiens
SYQRRHSNTHSSHRQFLPSGSPEPLLLQVLDSSQMLPVSSSTSKAAQEILLFL

SEQ ID NO: 1004469 - protein, 44 aa, Homo sapiens
MEKQIQVISQKRQYRALQEISSDVHYRQVICLALAIPTCWDYRR

SEQ ID NO: 1004470 - protein, 39 aa, Homo sapiens
LYAVQGEEERRKEEEEWEEEEEEKEEKEKEKEKEKEKEK

SEQ ID NO: 1004471 - protein, 64 aa, Homo sapiens
MTRQTRQCYLFIRPRHIEFLSKAFPETLTTDCSLTSSIACMCAGPYELVGIYVVLAESVADPAL

SEQ ID NO: 1004472 - protein, 33 aa, Homo sapiens
MSSCWSGWLGQREMIPGGAYVCAPSEGTVGARN

SEQ ID NO: 1004473 - protein, 58 aa, Homo sapiens
IESYQFWSPLPAVTILMPNLVRTPDRHSALQPRTPGLKRSSSLSSRVAGTTGTRQRAG

SEQ ID NO: 1004474 - protein, 38 aa, Homo sapiens
AEEGSDQHDVPDGADGTNMHSARVSTPWSVDGSEWSEH

SEQ ID NO: 1004475 - protein, 40 aa, Homo sapiens
YLRRTRGGDERPASQVGGEINVEMDAAPGVTLSRILKEDA

SEQ ID NO: 1004476 - protein, 36 aa, Homo sapiens
YEAGADRPAVYPSYSPSRLVATGGLNCTSYGAAGNS

SEQ ID NO: 1004477 - protein, 105 aa, Homo sapiens
SSRTGYKSADVKQRWTQAIAPTAACAGRGCPPDSVQERTVTTRQVRTNVEEVPGWQGHTPPASRSTTTPAEESAYPAGPTQGRQDGSPPILPHSLRPSPASSSSS

SEQ ID NO: 1004478 - protein, 117 aa, Homo sapiens
MGRWSRTHTQCQVGQGTQPPSRQGTHYLDRRDAGWDVTCQWTCSGQAVRYMHQEDHSGNFSYEAGPSVRARRIRLFSKACDVTWKMLTPVESFHNSLAGELECPVLPQSLRLPPWSH

SEQ ID NO: 1004479 - protein, 48 aa, Homo sapiens
  misc_feature (3)..(3): Xaa can be any naturally occurring amino acid
  misc_feature (34)..(34): Xaa can be any naturally occurring amino acid
SVXAGLEIELLPAQHESILECNLAETENRYCVKXSQIQGLIGSVEEQL

SEQ ID NO: 1004480 - protein, 51 aa, Homo sapiens
AEVERRHCGETGAAAYLPPVWRPGELSLRGGLVDLLWDEIDLAILDLFHNG

SEQ ID NO: 1004481 - protein, 32 aa, Homo sapiens
MTYGLVCTVPEYGGARRKPVENWVDHDPRLNI

SEQ ID NO: 1004482 - protein, 52 aa, Homo sapiens
  misc_feature (52)..(52): Xaa can be any naturally occurring amino acid
MHYALLRRGATDSVQTDGDTVSGYIVKGQDASHLSREQVTMTPAEDSATPAX

SEQ ID NO: 1004483 - protein, 66 aa, Homo sapiens
MPCRAAKMAVWPVAPVRGSGRASQSAPIALPCHPYLAGPAPVALFSIAPSRAHTLVLELVRGSLRS

SEQ ID NO: 1004484 - protein, 135 aa, Homo sapiens
SRRSRYEEELTQLEALVGRDRASYEAGSAVAERLLMHLEEMQHTISTDEEKSAAVVNAIGLYMRHLVVLDQRVETRSLGRNFFRKTVMGNRLVGRSLPRPKKGLRRILDCGRWNRGEPQVPDFRDLKAEVDAEKP

SEQ ID NO: 1004485 - protein, 81 aa, Homo sapiens
WRRVAESQRVVLVACSREEMIAILYLFHNGTHLTGGPGSFLYCVTHLVEDAAQVHACGSVHLHIDLTTHLGSQGVQSPPRL

SEQ ID NO: 1004486 - protein, 43 aa, Homo sapiens
MLSSLCRAVIWVGRTEDSIRDNEDGMEVDTYKVAGQMRMQMLI

SEQ ID NO: 1004487 - protein, 42 aa, Homo sapiens
MVSKTRKEHLPEGQDLKSSWKKGLKGHPVSGEQQYQGYRSFE

SEQ ID NO: 1004488 - protein, 42 aa, Homo sapiens
YGSWVGAQRIRRVNFEYLKREHSLSKPYQCVVHRQFLTVESR

SEQ ID NO: 1004489 - protein, 58 aa, Homo sapiens
PDLIPGSGYYPMRYSHCTSILPSYQLFLYTADYVMIRAVTLSRTTIRQTEAAIGQEEE

SEQ ID NO: 1004490 - protein, 94 aa, Homo sapiens
TRLPVRRPVSHVGRHDNHALDDWTAGDWLPTPHVLTLCLTHLTLCTLPHRGYCVCWPEAADGCTPLAHPHAPLWDVPTDGVDSPMTCHRDCWTD

SEQ ID NO: 1004491 - protein, 74 aa, Homo sapiens
MVSQRKDSSYTEPEVALDRMEASIQEAKVMSTSHLTRMGTGHFGLWSSRENERKRIFQRCHISTQLHTAQLSQE

SEQ ID NO: 1004492 - protein, 68 aa, Homo sapiens
RIRIPVLGIRGKICLLAGTVADGCNPSTLGGEARGSRGQEIETILAEHGETPSPVKYKKLAVRGGGRL

SEQ ID NO: 1004493 - protein, 145 aa, Homo sapiens
WPQGCKNKLEGLEDALEKAKQDLAWLLKEYQELMNVKLALEVEIATYGKLLEGEECRLNGEGVGQVNISVVQSTVSSGYGGASGCRQWLQAWVEEAATPMAVGLGVGGGFSSSSGRAIGGWLSSVGGGKFHHQVHHHLLLQQEEL

SEQ ID NO: 1004494 - protein, 167 aa, Homo sapiens
LWALALIIIRGMVQICKGEEFWLEPKKALENFQEPDIGLVARAFLQGSLAYGGWNFLNYVTEELVDPYKNLPRAIFISIPRVTLVYVLANVAYVTARSPQERLASNAVAVTLGEKLLGVMAGIMPISVARSTLGGVKGSLFTSSRRFFAGAREGTFPVLWAMIHVKR

SEQ ID NO: 1004495 - protein, 134 aa, Homo sapiens
PYFYDASPGIYEAWMWVGKRQLEFTRTVAGSARLRILRGSLVFPCVSVCVKKAAAHEITFLSSSYRSSTEGAPHAPKDVGPRTLGKKALPPSSLKIFLQTVDGARVHGCQGLLCARDWIIMRRRTVLTRGRTPR

SEQ ID NO: 1004496 - protein, 65 aa, Homo sapiens
SHELLAVVAAVHHHGVREALHNGTLSLAEACGGIPPWTVRQVLGILLLQCNVILRGNALICHHRC

SEQ ID NO: 1004497 - protein, 90 aa, Homo sapiens
SVPVRMFPGDSCRYQLNWKLSMAYSSDGYPCQAHLSMSNVLSLFVCLFCEFVCLETEFGSVAQAVVQWHDLSSLQTPPPGYKRFSCLSLL

SEQ ID NO: 1004498 - protein, 65 aa, Homo sapiens
MYCMCVYNNRKSPWQGGPVLAEFGCHLVRQLEDLRVVQVLGVIHRCGSRCCSVSGVVTAYKENEV

SEQ ID NO: 1004499 - protein, 62 aa, Homo sapiens
MDGWLVSNEPWFPVNSIWVQPLPDEAVKRGLKWFYLEAAVYSGKAGLKRQYVVPSWLRGVPS

SEQ ID NO: 1004500 - protein, 105 aa, Homo sapiens
MIRIELVYRFRHVPQCKITKFFCLVFVFVFVLEMESGSVTQAGVQWRDLGLLQPISQVQTILLPQPPEYWDYRGMLPCVANFYIFICLRRRFSVVAQDGVQWHNL

SEQ ID NO: 1004501 - protein, 51 aa, Homo sapiens
MYQEPSLYRVPEASPSSPPAPGNVVPGREVPGTPSEPATTTTGFPAGSEGY

SEQ ID NO: 1004502 - protein, 104 aa, Homo sapiens
SSVPVRMSQAECSGIPAPASLPPRFKRFSCLGLLSIWDYMTCIPCSANFCIFSRDGVHHIGQAGLELLTSGDPPALPSQSGGITVMSHRSCPEPAFLLIYSGGE

SEQ ID NO: 1004503 - protein, 111 aa, Homo sapiens
  misc_feature (101)..(101): Xaa can be any naturally occurring amino acid
MFREELWIGFQVPSTPSGLGARCLHHLSKGYHHPSNLQSQKPVYHPGFLFYGPSSPPSTSTFKRIWSIFSVSTTIILGQLRHRDFNISLRTGSVVSTPGTXSQVAGITDAR

SEQ ID NO: 1004504 - protein, 108 aa, Homo sapiens
MYVALGRYRVCGTILSSTVYLILPTLTDSSLSFKSQLEMILPQKAGPPERGKVLLMCVAYYSSFVAFNRYWFILYLLSDCSGLGTGLGLSISEMRAVVPGAHGTYQSK

SEQ ID NO: 1004505 - protein, 173 aa, Homo sapiens
SEQAGITTKLTYFIQFLPSLSQVFTPSPRGLSGRSQLLYHQAQIAGGLSLLHSGITYRLTNLTGVLPGLPQVLALSPQFSFSYSEYFSRFQRESVPGTHDTPPRSPISRTQVFTPQPSGTLRSLSAILQPSPDISGSQLPTPRSYRRNSQNLRAPSPISLTQVITPQAQGLSC

SEQ ID NO: 1004506 - protein, 34 aa, Homo sapiens
GKMAEFRRERAYQKQPDHLSKQEEGPAGRNWARR

SEQ ID NO: 1004507 - protein, 147 aa, Homo sapiens
GVVRIPGADECQVALEVEIATYRKLLEELRNADSVEKELDHVNFSVCHNAVFPRGYGRWHVANGVWPRLEVLAGGLGWRSCRELASGSYYSSSSGGVGLGGGLRVGGSGFSASSVRGLGVGFGSGGGSSSSVKFVSTISSSRKSFKS

SEQ ID NO: 1004508 - protein, 106 aa, Homo sapiens
LRIACPSSPSELCFPSFLGGSPHCSGSVHPILWDAGAPAVILADRCQDIPTPKKEPCSPVRMMGSSPSAGTCRPHAGSRNDRVSGSEGIFIRDLFLGLVSMGKPGI

SEQ ID NO: 1004509 - protein, 54 aa, Homo sapiens
RPFPEGKGVEDVGIESREEGRVSGYACDPSTLGGRDRRITLGLDFETSLAYMAK

SEQ ID NO: 1004510 - protein, 39 aa, Homo sapiens
  misc_feature (19)..(19): Xaa can be any naturally occurring amino acid
VIKGEEISVVPNRGLDAQXVPRHPGCPGWKPVPVMWGGA

SEQ ID NO: 1004511 - protein, 64 aa, Homo sapiens
CLVDEHTDTDKLPDAISTVNQQVIITAQCQPNYRHAHQGKVKKSKMELGKSYSACVPETSSLAS

SEQ ID NO: 1004512 - protein, 88 aa, Homo sapiens
ACTRVASSNAATFTLSLCPGGGEKVCECSPMTGRVSLLSCMTRGMNPESQESAPLTMVHQVMVAPSPLWRWHLGPLYTGYKEPEVQGS

SEQ ID NO: 1004513 - protein, 104 aa, Homo sapiens
  misc_feature (2)..(2): Xaa can be any naturally occurring amino acid
  misc_feature (61)..(61): Xaa can be any naturally occurring amino acid
YXLLKTLHASHLTQRKNQNVSPLLTQTFLSNHFSSAYSVLATLISRALPQTCQAHHSHPLXSALVPYVWNVFSIDCYMVSSLRQIMQISAHMPAPQRPSLIILY

SEQ ID NO: 1004514 - protein, 151 aa, Homo sapiens
  misc_feature (133)..(133): Xaa can be any naturally occurring amino acid
GSQRILHPASRISLPLIPEGLEGQSTEKASLVLTWETRIRSSGGRENGDEKRTRDLTCSAQPHALTKTCAFSTLMTRKGHGKGGGIGGVGAVARRVGATAWRMRGDGVTATHGSGAGVIREGGRQTRRKRNTXQGFPGFCGTFQNSRIKKV

SEQ ID NO: 1004515 - protein, 35 aa, Homo sapiens
MSASRPDNPQFNTFLPQLGAEPLIRRTNGRAIYCY

SEQ ID NO: 1004516 - protein, 43 aa, Homo sapiens
HTLSWIVWLATWGPDGRLLRGYDQSAYEGKDYICPERGTCALW

SEQ ID NO: 1004517 - protein, 67 aa, Homo sapiens
ETGSLDLADNRTSRYKAGNRNGFISPRHFKDSRSYPVAYKHHIGPSDRTKRYIGTCILTTELFHVPS

SEQ ID NO: 1004518 - protein, 183 aa, Homo sapiens
GDGNGDAAGRGPPKEHVTHHPVSDHEATLRCWALGLLTRAEITLTGQGDGEDQTQDTELVETRPAGDGTFQKWAAGGGAFGKPVSQPTIPIGGIVAGLAVLAVLAVLELVGAVVMCRRKSSGGKGGSCSQIPRRQGVPFPESPSPDVERGVSEPREDVGLQTWGRTGACSGGITSSPEEGKDY

SEQ ID NO: 1004519 - protein, 95 aa, Homo sapiens
TSQLGLGTCYEDAWTRSSLRKQTYPGSLCFSCQGAVGDLVLFPFCMKHKPQGRGSRMRRAKARDLYLNSSTGEAGELRKHLYIVSAALDSRLAHP

SEQ ID NO: 1004520 - protein, 180 aa, Homo sapiens
DGVSEAICSGQTHTGGTPVAARVGPQVSGEAKGLVDGQIGLDHKDGGAGHLGLLEHVAPFPVQNPVDATDHLLVDTGSPQGRWAPGGVGNIKIWCLGPEGTGPKILTDITKGDRYFDPAKGKYRQVSHQPRREEAAQHLLPVDPGPHLQGVGCDHDFHERGDGTPDRENWTSNVDSEDKD

SEQ ID NO: 1004521 - protein, 55 aa, Homo sapiens
  misc_feature (21)..(21): Xaa can be any naturally occurring amino acid
ARRLGLGRRTVDDAVLRSMLXDARFQLVTHIEHLGGIGNAIAADLAGAQGTFHIF

SEQ ID NO: 1004522 - protein, 152 aa, Homo sapiens
  misc_feature (1)..(1): Xaa can be any naturally occurring amino acid
  misc_feature (148)..(148): Xaa can be any naturally occurring amino acid
XETGVSGESATLQPNTLHHRGGGGWHRRRSWSPFGPRIPWALSDNSYPSILPSHPRGGAAGWSLVSTWLGRWRPPSEQHPLSWFLGSLGIVTNPEVHNKNWRSQYPGKAFHFHLKSKRWRGVAAHSRNPSTWGVRGRRMAGGQELETXLSNI

SEQ ID NO: 1004523 - protein, 58 aa, Homo sapiens
AEHWGWLSSVGGGVPPSCTTPTPPPAGRATSTEVLRQSQYHSSQAPLWLQRPLLRLAV

SEQ ID NO: 1004524 - protein, 33 aa, Homo sapiens
ILLYLGLLRSGQERKGQKLPAVWPPSTHHRWQQ

SEQ ID NO: 1004525 - protein, 74 aa, Homo sapiens
  misc_feature (59)..(59): Xaa can be any naturally occurring amino acid
MRERLLKVVKGGAWENYLCKIRATVSVEVHSREGVIQKVWRRLRQADHLSPGAGDLPGXHSETRLQGYRLDRRR

SEQ ID NO: 1004526 - protein, 57 aa, Homo sapiens
NQVYKSISSHDNLDSSLVASKPSSWGSNYSIVTLHLHKYPYQNPTSSREGADWRSIS

SEQ ID NO: 1004527 - protein, 49 aa, Homo sapiens
FSRYPCTDGAEAGTATPAGCLLALTPGIILGLAVADSGITYTLHVHGIL

SEQ ID NO: 1004528 - protein, 48 aa, Homo sapiens
IVTDEHGLLLKLRAYGPSGFSWNLEKDCSRHAENDMTGSGNSEDLGWK

SEQ ID NO: 1004529 - protein, 74 aa, Homo sapiens
LLNPITVPVEQPYLGRVAQGGLWSRWGGPESRVYTASDSLCGRGTSLGISVPQLPSCTRRWGKIRSVFFLSSSF

SEQ ID NO: 1004530 - protein, 39 aa, Homo sapiens
DRADRLLTHFVTATRLTLRYVSWDFPWLGPRSWDNSRDP

SEQ ID NO: 1004531 - protein, 83 aa, Homo sapiens
RLPFFGDGFLDGGRFVLVLYDELKKVIKGRGGSNTHTPEGNQENHVESSSVRTINLREIPVVFFSSRILPVDGRERLSKKGGP

SEQ ID NO: 1004532 - protein, 74 aa, Homo sapiens
DSREILSAPFFVSLLSALVRRIPFLGEEKSMVSGLASGEMLAKSSGKSVAIGHLSRETTFKRSRLPTLCRVITP

SEQ ID NO: 1004533 - protein, 76 aa, Homo sapiens
MSQKERARDTYPLVDKLQYNERNFIEIASLAAWSPGDVPHSGTEDRERGDPISKHLIINSQDRMGNGQGSRSPPPR

SEQ ID NO: 1004534 - protein, 102 aa, Homo sapiens
YLDECDKMLEQLDMRRDVTEGVRMTPHEKQAMMFSAILSKEVRPVCRKLMQDPMETLADDETKLTLPWAAGQYYAETDFTPTKNRKPPVTSLPCSLSSNPGG

SEQ ID NO: 1004535 - protein, 89 aa, Homo sapiens
MDLSAIKIEFSKEQQDEFKEAFLLLDRTGDSKITLSQVGDVLRARGTNPTNAEVRKVLGNPSNEELNAKKLELEQFLAMMQAISNNKDQ

SEQ ID NO: 1004536 - protein, 118 aa, Homo sapiens
VSRGSGGLFLNSNSSKPACFFYECLFQSCLLSFGGQWSPAGRTESNRTAHVHCLPKAIPHYSTTSLLTDGKTVSGQARWLMCVIPALGEAEGGGSLESRSLRPVWATWRNFITTKEEK

SEQ ID NO: 1004537 - protein, 38 aa, Homo sapiens
CARKQVESGSEAGLVVAETLRACVDADREYARRTLAVP

SEQ ID NO: 1004538 - protein, 75 aa, Homo sapiens
ETKMAMSRMEEYIADLYSAEPGEEEPAWVQTDEAALNMWVRLVDWRSHSGLGRDPLFGEPPVSGSVHLFSLITFP

SEQ ID NO: 1004539 - protein, 60 aa, Homo sapiens
MDQAPPILQTEKAVAEPLVSHIAAACHLGVQLVALEDLVEEVDVPGRQLEGLNLAQLVRE

SEQ ID NO: 1004540 - protein, 43 aa, Homo sapiens
SYYSLRGMQARLYSTFTYINPAQRPMYTPIADTSGVPSIPCRS

SEQ ID NO: 1004541 - protein, 49 aa, Homo sapiens
LLLGRERAGPQVSVWLIRSAQSRSQQVLPCVLECSDTDQPRVEAPPWPL

SEQ ID NO: 1004542 - protein, 40 aa, Homo sapiens
GPASRLLWKEMRLSYKVSGHKCQDSGCPGAVGGPLGEEHT

SEQ ID NO: 1004543 - protein, 90 aa, Homo sapiens
PVERLAAFELLASGGQKLSEDENLALNECGLCPLPSYLLVDMAVLEDIKAAWAEASEPALCAGTSGDTLETLEEREGSGVHPFKADFVGG

SEQ ID NO: 1004544 - protein, 93 aa, Homo sapiens
WGSFRVWGNSGLLLNQGERGLQDQVGSRPKYSPGSAGIRCQGLSRGSRSTPDPRRDLAPLEFCFPWELGSGPGASIYPGVASVLSGSGGTMHS

SEQ ID NO: 1004545 - protein, 103 aa, Homo sapiens
PFMAEEMGDGQRKDDPGNDLGTIILRFAIQDISGEETSAREGLLLGCQRKTAPYKKVKVQNFHISGKDGLAFQGPVIHRAQNQKRDGRMTRLRQGRPVSPTVN

SEQ ID NO: 1004546 - protein, 84 aa, Homo sapiens
HSGKYSRTSSGSPRGQDPVSARCMTRSPPAIWTQRKGKLRASEDPDSRKGAAMVGSKKDDTGEGILPQLVQSREHSSDEMAVRS

SEQ ID NO: 1004547 - protein, 74 aa, Homo sapiens
NPQLGLASRMQEQAGQLEEALQKDKQDIARLLREYQELMNTKLALDVEICHYTASCCEGERMQTHVESYYSMQQ

SEQ ID NO: 1004548 - protein, 130 aa, Homo sapiens
VLMLFRENQVCDNLTLDAATPGTATAHPQPSATACTEARAHHTEPTTKADTPTAAGVVASTATSGKTSTEAAAKTSTEATAIATATAISRGNTACDNRDVDWSNSFSTESAFLALQQLAVSGDLHVQGQL

SEQ ID NO: 1004549 - protein, 40 aa, Homo sapiens
WALTSGPSIRPSRRGSGRGLGFEGPGGEPIREMEPKGYRS

SEQ ID NO: 1004550 - protein, 34 aa, Homo sapiens
GVLHPEGSHSTPTSTIQESTTLVYTNVLGPEQPA

SEQ ID NO: 1004551 - protein, 103 aa, Homo sapiens
MWGDLEDPFDWNGCTPLQVFEDLQVQPLLAGIQTVDHLLIREFPGTESYASQMASEKRGHVQVATLGSGEKRRSQACNPASPNSLLTQHGVTGAGSSGDGHAG

SEQ ID NO: 1004552 - protein, 59 aa, Homo sapiens
  misc_feature (49)..(49): Xaa can be any naturally occurring amino acid
RSELLDTAQQIVYRNVMLENYKNRVSVGYQLTKPDVILRVGDRETEPGXGGEMKFTNKT

SEQ ID NO: 1004553 - protein, 44 aa, Homo sapiens
RYPENSPSVPTAGVHKCSSSMWQPRGAGCGVVVGQPVDLENEVI

SEQ ID NO: 1004554 - protein, 56 aa, Homo sapiens
SVPFIRKVFIEVWVKIEDLAEQPVTLIGPGVEVQQLAVIAQALRAVQHPEVAQVLV

SEQ ID NO: 1004555 - protein, 43 aa, Homo sapiens
MLDMCLTATQDARMLTVPHSNELLLRAYWSARVPLANFPCRSQ

SEQ ID NO: 1004556 - protein, 120 aa, Homo sapiens
LGLHSGAGLKEGSSLFRELGLSSSERISFRSWVPRECRGVEMCMSEEYGPKQQGTREGQVKARAATVDYVGLKGITHVHIHVDVHVKQRGQIEVHVLVAKAEEPVANVGWYSRLLGVIRV

SEQ ID NO: 1004557 - protein, 35 aa, Homo sapiens
MQIFVKTLTGRASPSKWSRGDTIENVKAKIQDNGG

SEQ ID NO: 1004558 - protein, 103 aa, Homo sapiens
  misc_feature (47)..(47): Xaa can be any naturally occurring amino acid
MRFNFLIEDKASIWNKSGSVTHNGEQVTYFTGYGGVDMPTVIQAPGXGIIHLQKEHYIMIFIKLGKGRSTSSQLGINGFQEYCARVCIITELNHGFIAVGFII

SEQ ID NO: 1004559 - protein, 115 aa, Homo sapiens
  misc_feature (110)..(110): Xaa can be any naturally occurring amino acid
MSSDRIYTGGDWQGKSYLRKARNTTTEPQTLSNVPVAFIFACWPLSLGQMFECAGDAAEPMMTSVGPCTSNSSIRSASLRAKVTGQSHTLEVVRVGQGLPHISPMKQVGXCVCVC

SEQ ID NO: 1004560 - protein, 35 aa, Homo sapiens
VNLQRSRNHRTGDQEERQDYINRDESEAAALDDEW

SEQ ID NO: 1004561 - protein, 71 aa, Homo sapiens
SSARHGFHESSEKGGLAQMNDSVEQSLGGVRGSQSIRVCQGKAQRYGAEVRIGGLRAMPSKLMPKMSGDGP

SEQ ID NO: 1004562 - protein, 69 aa, Homo sapiens
  misc_feature (51)..(51): Xaa can be any naturally occurring amino acid
CAAHGKNPTDDIFRDLAINFSPHMVRTHGETRGPGASFIMASRYSSVGYFXNEASISCNSSLSMKPSRV

SEQ ID NO: 1004563 - protein, 83 aa, Homo sapiens
MVVLQWAGLDYSPEKDKKGLSNCLEEAISEGLRVAALWKAVTGSRFLALEALPGGGGGGRQIGRGSWLAPRQGLSLAPALGQG

SEQ ID NO: 1004564 - protein, 174 aa, Homo sapiens
WGSISGSEKSTYLKVGARNKGGPGEPAYVDEPVNMSTPATVPDPPEKVKWRDRTANSIFLTWDPPKNEGGSGIKGYIVERCPGGSDKGVAGGEPVAETKREVTGLEEGKGYAYGVKALNRRGASKPSRPTEEIGAVDTQEAPEIFLEVKLLAGLTVKAGTKMELPATVTGKTEP

SEQ ID NO: 1004565 - protein, 120 aa, Homo sapiens
VQGLRGIEPRASGHKNNSLNWIYNGQGSSRRAAVSGTFGLLRSFQMDLCMGGPGVRGPETTRGSGVYAGRETPAHPASLPRHLPGHWEDAGHDRLLGFQMTPEDYEKLGFPGARELAKMF

SEQ ID NO: 1004566 - protein, 101 aa, Homo sapiens
GDGVLTFIRGCTGCDVGAGRGAFLRGYDQDAYEGKDYFALNEDLSSGTAADTAAQITQRKWEAARVAEQDRAYLEGLCVESLCRYLEKGKETLQRADPQKR

SEQ ID NO: 1004567 - protein, 103 aa, Homo sapiens
  misc_feature (99)..(99): Xaa can be any naturally occurring amino acid
MARGLWVVCLLCVRCAAACPSRLRVYLRPPLHALAFQVGSRVLRLRGRLPVALGDLSRRVRGGPGAHILVQGDDLIAVVGELVIPGEEAPVRPQVAGKXPLEG

SEQ ID NO: 1004568 - protein, 92 aa, Homo sapiens
VWPRLECRGEIWVTATSRVGTFWTTSLMGRGLSWANDRGSRERLSGPAPAPRSEPLTLEAGGENLVDRHRESPFTQKRGAKGWHHTGYIAGA

SEQ ID NO: 1004569 - protein, 65 aa, Homo sapiens
SRGPLWRLGSHTLPDDLGCDLGPGRGASFLLVITMFAYEGKDYFCPELRICAPWTCRGHVLAHDH

SEQ ID NO: 1004570 - protein, 87 aa, Homo sapiens
GRYRGGRRQGGSGCITGGEQEQERGEGATLLNSQISLQLIYYYKDRTKLFMSDLAGDPNTSHQASPPTRGDYISIGELEDKYPNHIR

SEQ ID NO: 1004571 - protein, 38 aa, Homo sapiens
RSNYPEDYGWTGARGALLRGHDQFAYEGKDYICPELRT

SEQ ID NO: 1004572 - protein, 81 aa, Homo sapiens
GLPFWARTERKSTGGGRCTFLSSSDTVLGFTGRCRWARKSIGSAGISFRSSSDRVLVLTFFPRRSGKSSGSTSGGGIASSG

SEQ ID NO: 1004573 - protein, 43 aa, Homo sapiens
CGDGFLGWCMGESTREQGRGMVFLSLMQVPPTAVLFPYGLGVG

SEQ ID NO: 1004574 - protein, 34 aa, Homo sapiens
MDGINGRLGHSKRNDQARHGAHTLSSQHLWEAEA

SEQ ID NO: 1004575 - protein, 133 aa, Homo sapiens
GAPFRYRRRGGSRSRSRPRPNLQKGREGTKNENEIGSGIGIRGTEIETGMGTEGTGTVNDPAYLRVEEKTLNLGRRETLRGMTRMTMVIRSLRPSHYPVEELRAKKRAEEEAEAKPKFPPKAEGEAEALKRRQ

SEQ ID NO: 1004576 - protein, 57 aa, Homo sapiens
QHKETRWSEAESGVWPIRGVTRGPVMGRAISWCRSRMPPVMGAQMGISRPVKGAQRG

SEQ ID NO: 1004577 - protein, 77 aa, Homo sapiens
DLKDPLGLHSGKTGFMESREREMELRGLAVEEERRRREQVEGRLQSESAGRQQLVEKEVKMREKQFSHGTTPGPGYL

SEQ ID NO: 1004578 - protein, 49 aa, Homo sapiens
GEYGLKGVQKGRIHKLVTGNALHNSLISPAPLGLRRWFSGEGDLKTKRV

SEQ ID NO: 1004579 - protein, 41 aa, Homo sapiens
LDGSPYHLVLVIRYWPPKPWEYSLGESGFSVWPGREPKGYR

SEQ ID NO: 1004580 - protein, 112 aa, Homo sapiens
GAPFEGRGREQEVDDSANQQDHRVSGGSHGESTAGRAPQRHHHMRPGDDHGEEETQGQQDPLSNYIKFRDGVKLDMVGYGGLGMPLTKWGQEEALYQALEDGDPDLQVYPGW

SEQ ID NO: 1004581 - protein, 49 aa, Homo sapiens
VERQDEVDLSKGYTEFPGISSRGGLPSSGDIRVASWPSIISPSIPEGSP

SEQ ID NO: 1004582 - protein, 167 aa, Homo sapiens
LGLSQVFTKIWHPTSEREHQVQRGLFRGCGSRRGMRPSSSCFPAKINLGGSGGMPSCVWDLGLDILKGVTRLHFESEGLTSQGSSRKICIPPLRGSTRCRVATSWMWSSEGVRPSSSCFPAKIKLCWVRRDAFLVLDLGLDILKGVTRLHFESEGLTSQGLHEDLHP

SEQ ID NO: 1004583 - protein, 72 aa, Homo sapiens
GGPLEGARRRRVMLSFTRPSLVTFTEKGLPGNVRVGKLDVDDVVAWLCGAVVTRHVPSSRSSGLMSTREGSP

SEQ ID NO: 1004584 - protein, 34 aa, Homo sapiens
FFLSSVPQHHGSSNRPVSLPPGKGSPNEVTASSQ

SEQ ID NO: 1004585 - protein, 30 aa, Homo sapiens
MDGPMEIGSGSVTQAAVQWRYPSGLQTQTL

SEQ ID NO: 1004586 - protein, 84 aa, Homo sapiens
  misc_feature (21)..(21): Xaa can be any naturally occurring amino acid
AYTTPLGAYLSEALTLRLTPXSTDAHTVTTPHGPFSSAHSLTLPLGYGVGFPISRRRPLLTVRGNTERPIGTLHDVHHYVLTRY

SEQ ID NO: 1004587 - protein, 70 aa, Homo sapiens
  misc_feature (63)..(63): Xaa can be any naturally occurring amino acid
MAFTWGGGDDDLDGLGRGGVLDFTLGGEALEQLCLEGVLDFNSGSGDDSKQLGLCGVTDGSLXWGLVMDP

SEQ ID NO: 1004588 - protein, 47 aa, Homo sapiens
KTADAEDIVNTALALDEKAIMTYVSMLLPCLFSELQKLLKLAANLDL

SEQ ID NO: 1004589 - protein, 184 aa, Homo sapiens
  misc_feature (166)..(166): Xaa can be any naturally occurring amino acid
YIGGKRHVLGYGPGRSLCVSLSWWDSIFLFPEYFSAPQVHGVFCLQRRPGFHPRGHLRITYQGVPGTSRVPGTVSGAGDTGAGPHLTPLKLGNIMIHNPHTQTICKRGGTPWYRSPASGIISIWPDWFHQGLPTHSPQTLPIGAQIDWGVRVCVCVCVCEGVCVFXQRQGLALSPRGEYRGEII

SEQ ID NO: 1004590 - protein, 48 aa, Homo sapiens
SAGRCIRLMDASSTLASDRKVIQCSGGHCAALVERVAMAALLMRTLLS

SEQ ID NO: 1004591 - protein, 41 aa, Homo sapiens
VRMFQEWNQEFVATELDFSKEKEELIHSRLTTKGLGLRTGS

SEQ ID NO: 1004592 - protein, 46 aa, Homo sapiens
MVDVSCDLLTHRSAVDCHYITCAIYGFYSSAEHMKGSCIQALHAYL

SEQ ID NO: 1004593 - protein, 42 aa, Homo sapiens
MSRLVRMFARLACTQCSPAQGNLHLLGSSNTPASPSYTSQVT

SEQ ID NO: 1004594 - protein, 163 aa, Homo sapiens
PPRRTQHMKTQGKAQNECCKSKESFILHAALLLTGRSRLPRCVEKESERRRSGLASKIAAVRQTVLDPGEEAGAPVGTDAIQNVLMVSGPESKGDPGPGIAKISVLIPGQELDLYVIPAPPSNQRFIPDIHLGPHLGPGMFLGHIHMHCLESIIHSLQEMSLP

SEQ ID NO: 1004595 - protein, 73 aa, Homo sapiens
DPRAGTQQGFPHFCLLPECCMRKAKESPCTGERQDEEMTPGRRGFGLVAAGVLALGVSGASRDLGEPGLRACR

SEQ ID NO: 1004596 - protein, 115 aa, Homo sapiens
  misc_feature (6)..(6): Xaa can be any naturally occurring amino acid
SHPAGXSQRCLGSLGSKLPNQPPSYLLAVAWRINVHLGFHIFSWSGARLSSNGAPFPASCCCRFQIWILFSTRALAASSSPVVSCSSMARASLGPVPLAGVSIKLCRDTWPASAP

SEQ ID NO: 1004597 - protein, 77 aa, Homo sapiens
  misc_feature (13)..(13): Xaa can be any naturally occurring amino acid
  misc_feature (20)..(20): Xaa can be any naturally occurring amino acid
  misc_feature (39)..(39): Xaa can be any naturally occurring amino acid
GTQHLTTRADDSXAPPVFRXPRRDTEEIFISFLRRPPLXRFLALCRIKPHAPPLVRVPVDGTQHLVIIVYSGDYQGI

SEQ ID NO: 1004598 - protein, 45 aa, Homo sapiens
  misc_feature (2)..(2): Xaa can be any naturally occurring amino acid
  misc_feature (40)..(40): Xaa can be any naturally occurring amino acid
MXLKDAKNKREGLEDARQKGKQDLAGLLKEYQELMNVKLXLDVEI

SEQ ID NO: 1004599 - protein, 106 aa, Homo sapiens
MAKVEKLKPLEVELRRLEDLSESMVNDLAYMKKREEEMRDTNESTNTRVLYFSIFPRFGLMGLATGQVFYRRRFFKAKKMDGVRKEAYSPPTWYLSQQNIAGTCRA

SEQ ID NO: 1004600 - protein, 140 aa, Homo sapiens
SELGKMAPIQVGGASAAPHAGTGACVSLALLQKAPPQLPTSGKFYLRRVWVSTSSVFRSWVLAIPLPGQCDLRRVEAQGPAPQGGLRVRDGVVGHMCLGGVRALQRLLPVLQVVCGATPGTCPPGRLSAARPQGRLPSLL

SEQ ID NO: 1004601 - protein, 102 aa, Homo sapiens
  misc_feature (102)..(102): Xaa can be any naturally occurring amino acid
MGPGTLEEGLGSFVFGNLPPAVNGPGVHNIGPFRAGRHHHSTRNRVKGVGHQPGDGRHTRGNHPAHKKVHVLGVRQHPLGSIIDSEVGSSIDNDALDRDVEX

SEQ ID NO: 1004602 - protein, 57 aa, Homo sapiens
  misc_feature (56)..(56): Xaa can be any naturally occurring amino acid
LAWAKLCVIVNGFLVWKEAHVSTMVEKDTDGGGSGERVPKSHIWLDVINPFGDPLXM

SEQ ID NO: 1004603 - protein, 109 aa, Homo sapiens
LEQAGGMMVGGVWSVTGPHCRSGILGLALPGPPVLVLILILARRLQAFIFRFIQVGQGAALELGADSESFLVWTGFGEGSPLLHGGRVRARPGPWSGLLAPLLGGHAWT

SEQ ID NO: 1004604 - protein, 71 aa, Homo sapiens
MGLTLWELEYTLPFRPWDFRIPGGGVSGRQDLHQPFRHRGGSKALGLRIISSAFRILRLGDWDGARPPVSR

SEQ ID NO: 1004605 - protein, 47 aa, Homo sapiens
MLTIIFCINTLCCSHRWSLSPLHGDSGVGLDEGVSELLKGELGELQS

SEQ ID NO: 1004606 - protein, 40 aa, Homo sapiens
  misc_feature (7)..(8): Xaa can be any naturally occurring amino acid
  misc_feature (25)..(25): Xaa can be any naturally occurring amino acid
YAKGCGXXVMVVANFFPKHVCHLPXLLISFHMTILNGSIL

SEQ ID NO: 1004607 - protein, 48 aa, Homo sapiens
ERITCGPTLPHGDGMEPLNQKVFYDAAGTSLKDVPDLLLASRRCPMDT

SEQ ID NO: 1004608 - protein, 72 aa, Homo sapiens
LELEEEVSEWNRGLELYPGSNSRTTRGLQTFLGGQAGHDGPSTGECSQLVLLPQKLIVLAAIVTPFAPGHSE

SEQ ID NO: 1004609 - protein, 34 aa, Homo sapiens
RRRAELEKYDGEARTRTRVGGWGRLRQEMPLLGS

SEQ ID NO: 1004610 - protein, 41 aa, Homo sapiens
  misc_feature (1)..(1): Xaa can be any naturally occurring amino acid
XGFGKRLQQVLQNVYCVCGGEPQPASCLSRLLGKLPELRTL

SEQ ID NO: 1004611 - protein, 70 aa, Homo sapiens
MNMRKRRRRTEEEEEEEEEEEEEKERTARARSEEQEADARKDERGRGDFAEEAFLRRCSPTYSYNSVHIS

SEQ ID NO: 1004612 - protein, 47 aa, Homo sapiens
SVPRVSFSDPLHPGLKLSRRSSQYNNCFWMVTSRSSSVSIAPEWPGR

SEQ ID NO: 1004613 - protein, 56 aa, Homo sapiens
CCIYSSEPVYRGSEGGFSTVKKEEEDESYTPVQAASATDSQPSLARELFRQALQTS

SEQ ID NO: 1004614 - protein, 31 aa, Homo sapiens
MLPRLVSNSYAQAIHPPRPPISAGVIGKSHY

SEQ ID NO: 1004615 - protein, 65 aa, Homo sapiens
CKLLGDYLGLCRNGALQELSKRLDHRNYLLESPHRFSVADLQQHVYHCDLCTPRGFICQIGRSLL

SEQ ID NO: 1004616 - protein, 68 aa, Homo sapiens
RGPPRCMPSRCARVAAGVPVSWRSLRGERTYLSRVWRLVFGIMVLDFSLSMNELQRRLGPRGLVVLGF

SEQ ID NO: 1004617 - protein, 36 aa, Homo sapiens
LLYEDPRHEAADGQYFLYLFIYFEMESPSSRPGWSA

SEQ ID NO: 1004618 - protein, 52 aa, Homo sapiens
RHAAAAGDGMILAHHNLHLLGSSKFSCLSLQSAGIIGVSHHARPVPVFCIIL

SEQ ID NO: 1004619 - protein, 97 aa, Homo sapiens
DVSHFSGIVSIHEHTASFSLQWDVSIHELTAECLTSVDVSIHGLTAKLLTSVGCIYPRTHGRVSHFSGMYLSTNSRPSFSLQWDVSFHELTAAASCR

SEQ ID NO: 1004620 - protein, 66 aa, Homo sapiens
YESYLVVVLTLRIEYMSGGPHCLQDMAYHCGCKSYGPNEMVSYDGFGLVLKASLIVLQMYSHSWNK

SEQ ID NO: 1004621 - protein, 60 aa, Homo sapiens
MTIFCALSDSQSINGVAENRGGAGACRRESARAKKREIQRTGIASCPGGLHFAVIICTNS

SEQ ID NO: 1004622 - protein, 60 aa, Homo sapiens
  misc_feature (16)..(16): Xaa can be any naturally occurring amino acid
ERDYVYPTRHALIKPXESYKTGRCFVQELVDVVLISTYYRITQILQQHNSLWYGTRREEG

SEQ ID NO: 1004623 - protein, 77 aa, Homo sapiens
LALCREIATYRKLLEGCGVQAEWLKGVGQATISVVQYTVIQWLYVVQLVSAAGYRPEVEDSSYILLARWSLCVWQDG

SEQ ID NO: 1004624 - protein, 47 aa, Homo sapiens
LYCEKEQSNRDNKHPAEHVKTRLEQEIATYRRLLGGRGCPPRLQYKK

SEQ ID NO: 1004625 - protein, 104 aa, Homo sapiens
ETEEDVLISCRGTHLGGTNILTSRWNSTSIQGNSDGIYIINLQRHWEKLLLAARAIVAIENPADVSVISSRNTGQRAVLKLLHVTGATLIAGRFTPGTFNNQIQ

SEQ ID NO: 1004626 - protein, 56 aa, Homo sapiens
GDWRKTMDGMSGMERPEEDCLMPPVSDLTIEASLLCCALSSCFMLLLLAALANLKS

SEQ ID NO: 1004627 - protein, 114 aa, Homo sapiens
AVGRSPGPGGPPSTGSMVDVDVASDSHRPAGDMNAMGTVGHRALLPGFQLAAPGVRSRRTLAVCGTPCLQNWGLRGAQLDTGGNILQKVGSMWLYQCQAPYGMGLREVPTLAQT

SEQ ID NO: 1004628 - protein, 37 aa, Homo sapiens
LSKLGNPGGPMKDGMFTTCLRNLIWRWGISTASVVDG

SEQ ID NO: 1004629 - protein, 187 aa, Homo sapiens
RSPTVSSAEETKPVLTAARGAQAGSGKPVRSWAGSPARGAGFRSASAINKGDHRDLALGFFSGERVGFKVRYTFPENKCSIFKNPNGSTVDYGSQNNSWRIRLDSLIFGLWAKWPFNGYLNPWCTDALELGTWGECGVAVNGSSWPWLITVSGAQQAPLASFRDGSRCRPGLSVDLPHVEEPGLKWT

SEQ ID NO: 1004630 - protein, 47 aa, Homo sapiens
PREPTPTPGLSYSLTTSLLYNLAAPLTLPYYNTPSVYSTSHDYGSRV

SEQ ID NO: 1004631 - protein, 163 aa, Homo sapiens
  misc_feature (93)..(93): Xaa can be any naturally occurring amino acid
LEGSGRAQNSPSTFEGGAVVNSLHRIITNSAWDGGPKMDAGYGHSVELRNMWGETFHNAGQGGGAHPAIGRAPSLTCKENVQVSLEESLPPHXRRGRRPSSRQGKQLTTGEKCSSRVPRGPQAKHDLGNQPFRILRKQTGYTDMHGIRHSPDGTHAQTDTHTG

SEQ ID NO: 1004632 - protein, 62 aa, Homo sapiens
MDSSIRCGDGRSRRPEPLQTLDEARDGVSRVKVSDHEIRAGEWSQDRVSPQVLRGIIAGPML

SEQ ID NO: 1004633 - protein, 132 aa, Homo sapiens
  misc_feature (89)..(89): Xaa can be any naturally occurring amino acid
  misc_feature (117)..(118): Xaa can be any naturally occurring amino acid
GRGGFRHPAGWSLRLQAGQRRVGAILQLLLKSPDLARQLLHLLHVLPVAGRHACLHSRDLRLPGHQLAFSLWASRAGGFGPFLVAISWXELPQVGSVATAASSGSGGQQFFLLFQRXXQNRHRVTLRRGLGG

SEQ ID NO: 1004634 - protein, 97 aa, Homo sapiens
PEGLTLMWRNVNKEIASQDSPGRNGQEKAANLKKDLAEMQEWMTQAEEEYWERDFEYKSPERRLRRAVDRRLPTGNRRMCCSRTVTREDSQETTSSY

SEQ ID NO: 1004635 - protein, 63 aa, Homo sapiens
MEFRDNPVLSPITDAPPSHGNDRVYICGVRVFGIDASGVVSQSFCGHYSTAEGTIGVDFCHHL

SEQ ID NO: 1004636 - protein, 81 aa, Homo sapiens
LSTAGGGVMVLLVHQGSQRLRDWKRLGPSHTASEDQSSFIVGGDSKLRALSTTPHQPGCHQKCSPKGRRRGFFFGGMHIGN

SEQ ID NO: 1004637 - protein, 49 aa, Homo sapiens
LQSSRCRSGSGPRGPSTIHTSLVFLPTTLAGKQAFQQSQVSSSRARVSR

SEQ ID NO: 1004638 - protein, 47 aa, Homo sapiens
SYSWCSPLLCSLAEVPDELAAGGCSGWTLSWTQCCAIWLVLGPHFFL

SEQ ID NO: 1004639 - protein, 148 aa, Homo sapiens
LGWQAAVPHLPPRCQEPEIHVREGRHGRSLKGGAVVYAVELSSQDSSPRQGLLQGGIPKEPLVRREELAVQQCDAWAHGELCGIKNGDRSHQTTPMSVQNYYLHLQDAVPVNRARIKTPLEIQEDEAAEVEAAVNYDGATAVKARQES

SEQ ID NO: 1004640 - protein, 106 aa, Homo sapiens
RRDDDNSADSRLWGGLDHPVPPLPPWLGTGDLCVSSSALKQSQFLLYHRRTNPFLIILSDPAVESAMIHPPPYSSTLYPAVHQEPAALSTLGSRRGIQPLLTRDIS

SEQ ID NO: 1004641 - protein, 37 aa, Homo sapiens
VSGVILLMQLTSQVQADPSSSAPQVAGTAGTVPPTPS

SEQ ID NO: 1004642 - protein, 178 aa, Homo sapiens
  misc_feature (87)..(87): Xaa can be any naturally occurring amino acid
  misc_feature (158)..(158): Xaa can be any naturally occurring amino acid
QPWHSLGADSVPANTENEVEPVDARPLLPTEELTTRPGSGLTNIKREEISEVKMDAEFRHDSGYEVHHQKWGSLAEDVGPNKGAIMXLRGGGVVIATVIVITWVMLKKKQYTSIHQGGGQVDAVVTPEERHLSKMQQKGYDKSKPTSSLSRCRNRPPXKQPLKWDSKSIVSLPIGVHS

SEQ ID NO: 1004643 - protein, 36 aa, Homo sapiens
VWLAGKVWQAVFTWQSQQQQAVQQGSRQLGIFGQSM

SEQ ID NO: 1004644 - protein, 109 aa, Homo sapiens
ETKPGSGGPGGSAKAKSRFLETSGVQVMVRPQPPKYLGITGLCHHAQLIGYNLGISRRDGGPPCGARRSQTRGPQVIGGPQPPKGVSLGTGSPILYKGQSFWSSRDRPA

SEQ ID NO: 1004645 - protein, 44 aa, Homo sapiens
ARYTYMGSSYYSRGGEGQVRGGEGYQITAEGKPNNLSGTITGYR

SEQ ID NO: 1004646 - protein, 110 aa, Homo sapiens
MTLLQLSGSHITFELLTHLNLWGPCSFDHVAQAKAQCWPNAWSAGESVVCSVEAPQSRCGQCCGPCRSGKTQGCRSGGQGQSPLGWNEPILRSFRESWPNMQIDWGDFEV

SEQ ID NO: 1004647 - protein, 63 aa, Homo sapiens
VAVGRIDSAGLLALHWAGLPAQPGAAQVGGGVVDGEALLGGTGLTCGEKVDPVYGPPRELCGL

SEQ ID NO: 1004648 - protein, 48 aa, Homo sapiens
ARLLPYKDIGRCTELKFEGRGWQEKRATSMYRQNLGAHSMDTSDSDDK

SEQ ID NO: 1004649 - protein, 78 aa, Homo sapiens
NLSRTLARLSYWASCQQGTGSLFLGYGSNTFGRGCQPLQASHPQIIIFVLTGGLVFEASLQIPAEPGDGRALMWAAAF

SEQ ID NO: 1004650 - protein, 124 aa, Homo sapiens
AYLDEGHLTQSGQKDMVLYGSQIFLGSVPNRETCEYITSDIGKASELGLRISTSMMEKTCWSSGRPKSKHRLMPLPGRCGFSTLETKLVDMVYLSKQVSLFGQVVVTEWDWAEIPESATCGRSW

SEQ ID NO: 1004651 - protein, 45 aa, Homo sapiens
  misc_feature (39)..(39): Xaa can be any naturally occurring amino acid
TAHLVIPAREEKPFQHPPQHITGQHGGGVGATPSARTCXKIILPL

SEQ ID NO: 1004652 - protein, 52 aa, Homo sapiens
LTSGYSSVSSMVLLIKTSFKCKCQDNNNNNNSNNHHHPVHCASGPQRFSRWS

SEQ ID NO: 1004653 - protein, 38 aa, Homo sapiens
LSQDVVQMYLYIFKHWHSHTVEDEKSSETDSKNSGIGM

SEQ ID NO: 1004654 - protein, 104 aa, Homo sapiens
ALYRHFIQLLLSRTFHPAPPLQGHFIQLLLDRHISSSSSSTETFHPAPPLGTRFIQLLLYGHISSSSSSRDTFHPAPPRRGHFIQLLLYGDIPPSSSSTGRVPS

SEQ ID NO: 1004655 - protein, 44 aa, Homo sapiens
MYKKMSFSYRLTTSIRQSVDPGVNWNRSLIKETPFERLGRLYRG

SEQ ID NO: 1004656 - protein, 99 aa, Homo sapiens
SGASWGQGGASEATLLNMLNISPFSLGRVIQQGFDKGSIYNPEGLDITEETLHSRFREGVRKVARVCLQMGYPTVASVPHSIIKGYKRVLAWSVETDYT

SEQ ID NO: 1004657 - protein, 156 aa, Homo sapiens
IRRQRETWRAVYGECQDVLVNGCIQHKGLVFIFYFSILFPSQGVQDTQSHGISQVSENSSSGDSQRIQNCSRSSLWLSLSLSMHLVMVLRNLLNIRAVRSDSPLHTPTYFFLSKRGGADIGFTSATVPNMMVDMQSHSRVISHADCLTQISHLLRR

SEQ ID NO: 1004658 - protein, 94 aa, Homo sapiens
LSKRGKGRMPEASASGRLEPQAEQGEGARGRSTGVTHLSSGEPGLVPSSPAGADGGCLLSVPAGDKLKVISKATMELAYRCSRISVSGPKICHP

SEQ ID NO: 1004659 - protein, 63 aa, Homo sapiens
MVHKDERIESFTLRCSQPGDEARCHTGRKHEEHEHLLPSLKQDAKLPMTEQCGRHNLTDDGGT

SEQ ID NO: 1004660 - protein, 84 aa, Homo sapiens
GWGRLSQYGAETPYYIGVLSARLKSTDGVLILLVSLTLSNRQGREQNKYGLNSRDSIIKFCPPGPKDSGSPVLVSATDPGREPG

SEQ ID NO: 1004661 - protein, 80 aa, Homo sapiens
AGSLPHQSDGWSYRRGKYGHRERHQRVVHIKTWRTLHKGDHRQAKEKTASRPSPQSGTSSLHNTKKINICGGCYLVKGIW

SEQ ID NO: 1004662 - protein, 183 aa, Homo sapiens
WLHSGPNTSVVTGGIYLGSIMKGGAVAADGRIEPGDMWYMVSVPILGGGVDRGQGGVLPSVPCSFRGPFWVGGRLPDLPSGVPFSSSPAQLFIPVGVLSQVNEIKLENMSNDDAVRVRREMVHKPGYGWNGARGKGLGLTYTHPAFSRTPLFAGTITRDVAKCGDPSPGCCFTWARSKGMGDS

SEQ ID NO: 1004663 - protein, 150 aa, Homo sapiens
MEGRSGGKGDMEKAVGEKKARVCGKKKEERESIQSGTQIRIRAWLHTYRGEALKASVTSSVKGGGEGTGHLQPFSPSLAHKYGAPAVAPGSAPASSGAVIISPSYASSGEGGQAPRDLVYRPAARELLDAPEHFRVRQGGHNPLGNSSLS

SEQ ID NO: 1004664 - protein, 118 aa, Homo sapiens
  misc_feature (92)..(92): Xaa can be any naturally occurring amino acid
MVLNFSIRDAVPGAILARRTSTIISAIQMEAKGIMGTAVPPGPTLINIFTRFSRWSNHPMVRVAISALTGVPSRQVNAISRTVTWNKTIRAXIRVRYTVGSSEAWGAGTHMSGNTGSS

SEQ ID NO: 1004665 - protein, 89 aa, Homo sapiens
LEDPFGSIMCIMWKGQAGGSVAGAVHLRHDNRHIGLGCVLPAKRSMVFCVKASGSASWPTMQERGVPLSSSSSGCHAQLCWSQRKVVVP

SEQ ID NO: 1004666 - protein, 114 aa, Homo sapiens
  misc_feature (105)..(105): Xaa can be any naturally occurring amino acid
MGSIRSSFLSLSYSISSGRCRWIRAWKARPSFQLMWKSAHGRSYRGLSFSGTREGALPGPRSLPGRCPGMANLGMRVQIIPRVILAWPATISSGRMETSLTPWRXIKSSAWYTW

SEQ ID NO: 1004667 - protein, 87 aa, Homo sapiens
LVIRTLQFPFSGGHSQGKKETPGPLGKHTSPDAGLGPPSASLSKEQLEHRNSNLTGNPSTRGGQGGQVIGGQEYKTRVVKRAKAGLY

SEQ ID NO: 1004668 - protein, 33 aa, Homo sapiens
KSKLAFPSWGTLMCLKREMVLMYGAIWSSGTFF

SEQ ID NO: 1004669 - protein, 51 aa, Homo sapiens
LISLYHISRSLVSHIRDGPAIPSSSSSQTLGTVLTFFLPFTLKKPWFPKVL

SEQ ID NO: 1004670 - protein, 47 aa, Homo sapiens
MRGVAVPSSIFKTSRVTSSDLSDSDLGFGGQILLPLLQTLVVTRDPE

SEQ ID NO: 1004671 - protein, 129 aa, Homo sapiens
KDPWGSSSGTHYLHIGQGGGVAGCRERPGCTKGRGGRGYIKDGVTLLLTGGLRQGDHHSGGEGTGLQFGGEDHSILHLDRVNARVLRPQVWSRELIALPQPAQTGLGWVVEAIGDHLTILIQVNLALRI

SEQ ID NO: 1004672 - protein, 57 aa, Homo sapiens
GSPPWYTSRYEGRIHRPELMDLRSWTAGDTGGQITQRNVLECGPVGAVSSGRAYRGG

SEQ ID NO: 1004673 - protein, 58 aa, Homo sapiens
HEEAIRTHGVWSSVDFLSTSVGDDVVSTTTLSEEDLTGDPSRSRVDFLCQPASGNVHA

SEQ ID NO: 1004674 - protein, 41 aa, Homo sapiens
CGDWGLTPSRGLLGCELGPDGRLLRGYNQFAYDGATDYTRP

SEQ ID NO: 1004675 - protein, 38 aa, Homo sapiens
GGDGVWLVPRLGLELVGSSSPPTLAFESTGFIGVSPHT

SEQ ID NO: 1004676 - protein, 158 aa, Homo sapiens
  misc_feature (110)..(110): Xaa can be any naturally occurring amino acid
VQDPGWVLVLEVDMVLECGAVSEFGFWGGAGGGLGSVVELCLECGFGDPGFLVCPLGGIQEVTVKPESLDSPQAENLSPAIQRVRTEEGEQIKTLNNKLGSFIDKVRVLXQQNRVLDTKWTLLQEQGTKIVRQNLEPVFEQYINNLRRQLDSIGGERG

SEQ ID NO: 1004677 - protein, 49 aa, Homo sapiens
MDRGSGMCKAGLAGDDAPRAVFPRPGNPLIITTILSGLLSAAGGSKYRH

SEQ ID NO: 1004678 - protein, 116 aa, Homo sapiens
WSHHVGRLVSNSLTSGNPPASASQTTGDHRREPPCPAGWFGFWGQSHFYGPGLGVQRHDLGSLATSPSRVKRFSGLSLRGSWDYRHAPPRQSIFGILSRDRGLLHGGPGGSPPDFR

SEQ ID NO: 1004679 - protein, 124 aa, Homo sapiens
MWPRLVLNSGAQVLYRPGPLKVQRHELPRPAIIIIIWRQSLALSPRLECSGVIWAHGNLGIPASKGFSGLSLLSSRHYRRAPPCQANLVSEGETGFTRWARRVSNSRPQMIHQPRPPKGLRLQA

SEQ ID NO: 1004680 - protein, 101 aa, Homo sapiens
  misc_feature (91)..(91): Xaa can be any naturally occurring amino acid
MSRSRQARPSKLVGREDVNKKQKNSQLRKRSRGANKIVASVKTLGPGKLRHLIQEGDVKKKTEPKPPVPVRSLLTRAGAARLIGDRTEVLXQNPESLSGNG

SEQ ID NO: 1004681 - protein, 54 aa, Homo sapiens
  misc_feature (3)..(3): Xaa can be any naturally occurring amino acid
LSXGPWQALYLARLSPGLTPSQPGVTSVVHMVLQQLKAIMAASASVKSSQKAGS

SEQ ID NO: 1004682 - protein, 220 aa, Homo sapiens
  misc_feature (205)..(205): Xaa can be any naturally occurring amino acid
SYLEDPLRSWDSLYWMAPSGVRVPRETHLPFVFKQMEQVAQFLRAAEDYGVIKTDMSQSVDLFEGKDLAAVQRTLMAWGSLAVTKIDGHQRGDPNGLMKKAQERRREFTESQLREGKHVVGLQMGSNRGASQAGMTGYGRPRQIISKSGEGSPEPGPPPVPWLQPSRLALLTHTRVVPSARAKLGGSVTEQRVTDLGSSSLCPQXQANFLPDSFIALAPL

SEQ ID NO: 1004683 - protein, 183 aa, Homo sapiens
  misc_feature (161)..(161): Xaa can be any naturally occurring amino acid
SKRGRGYKKLLLHRPEEGDGGHYNKWKPGSALVRAGPGLVVQSGTTALLVVTHRDMNEKELEAQEAGSAQLENHEREEEEEDGDGDRRERRVGAQMRSRRCGSSSEREGSEDEHFGQQSDREEGDWDEASDKSGCGEDESSEDEARAALDKEEILGSDADXEEDADSDDEDRGPAQGGSDNDQ

SEQ ID NO: 1004684 - protein, 89 aa, Homo sapiens
CCVALEAPGATLGVLHIGTLGNLDQAGGDLSPIFPGKGRFKYLAIRERRNQAQKREVTGQGHVADKCGNQDFHSGLPTGGADTLPSWLG

SEQ ID NO: 1004685 - protein, 72 aa, Homo sapiens
AGITGVSHHVGLKTLLSFNLKDGLQVMTGTWGVGHAPLYLSSININTDFKSEEKHFTPYSLSGLQPEGFLGK

SEQ ID NO: 1004686 - protein, 93 aa, Homo sapiens
KDPRWETGVSGRSQMGSQGWTGPPPRGGGDSHGVSRGSHRAGPHGSPSQPEHGSPNSQPGLPQTPQKGASKGPPLAPWGKGLAGGRAWGHAGV

SEQ ID NO: 1004687 - protein, 124 aa, Homo sapiens
ETWSHQVGQRELELLTSKDPPPSASQRAGDYRSRKEGHRDRVQEKSGKLSRMPGKADTLEGKAPWRELRQQGQMHIPGRTSSVREEQMIPVFQDLVCTYLVNRPGSHRTQQFLRLSGRFLNPSG

SEQ ID NO: 1004688 - protein, 112 aa, Homo sapiens
RQRSRERLHMWRREGGSRVSWGVRARQRLLPVLQVSAEPLQARALQVGSPLLRLRGRLPLARGDLSRRVRGGPGAQILVQGDVILAVVGERVIPGEEAPVRPQVAAKHPRGG

SEQ ID NO: 1004689 - protein, 39 aa, Homo sapiens
ETVIVIWVRISNEVTKISGGAAVIVKGGEWEDGLQGWLT

SEQ ID NO: 1004690 - protein, 89 aa, Homo sapiens
IHQDYGATGAEGAPRGHEEFAYDGKDSHRPERGLSSWTAADTAVQITQRKWEAAGVAEQLRAYLEGLCVEWLRRYLETGKETLQRADPQ

SEQ ID NO: 1004691 - protein, 213 aa, Homo sapiens
  misc_feature (203)..(203): Xaa can be any naturally occurring amino acid
ARHRSGSGGEYERSEEGDEPQYRDLPSTATSVNITVTGFRAENDMVNVYQISEDGEQSWIRSTSQTTAPDAPPDPTVDQVDDTSMVVRGSRPQAPITGYRIVYSPSVEGSSTELNLPETANSVTLRDWQPGVQYNITIYAVEENQESTPVVIQQESTGTPGSDTGASPRDLQFVEVTDVNGPIMVDPAENGVDRYRVDVIPVXWLASTGRGCH

SEQ ID NO: 1004692 - protein, 152 aa, Homo sapiens
RGRGGLISQTTIEAKVSTGAYKALHYRSLYFSDLIYSGWWNNGMNYSLKQKNPSLTNRENYQKRNIPGVHLKDFGIRLSGGGVENWCMGGAGGLMPIISALKEAEADASHEPRSLRPAGATGQKAISTKNTKMSGVGGCTPAVPATQEAEVK

SEQ ID NO: 1004693 - protein, 196 aa, Homo sapiens
VSLCSRRIRGLVGSEPGARAAEKDQVWAPFYWRFSENRQKGGITWLLGWSTEDDGQGAHLSLCNQYTREVLQSLPLTEIIRHYQWLTEENIPENPWCFLYPRIPGDEALGCYYQEKFNLQEGRKYLKHRLMVVSNRRVDELEQPVELKPEPELESLELELGLVPEPELSLDLRALLKAGWIWGQTRVCGESLWACE

SEQ ID NO: 1004694 - protein, 133 aa, Homo sapiens
MANLTSRRLNPTRRKNLLAVTFPDIIRNYKVRAAENIPENPLKYRYPNMDKDQALGKYNSRPREAPEPRELDGPKGTGYIRTEWISVSEGYSEHRRVTCLQTSSQPGSGLGAWWKMVVFHFSMVMGIGITAEL

SEQ ID NO: 1004695 - protein, 188 aa, Homo sapiens
  misc_feature (169)..(169): Xaa can be any naturally occurring amino acid
WETGVSLIHEDGTGWRRWGPGRGCLLRGYDQDAYEGKDYFALNEDLSSGTAADTAAQITQRKWEAARVAEQLRAYREGLCVESLRRYREKGKETLQRADPQKTHVTHHPISDHEVTLRVRGPVGFYRGEITWTGKGDGEDQSQDTELVETRPAGDRTFQKWAAVVVPSXEEQRYTCHVQHEGLPKPLT

SEQ ID NO: 1004696 - protein, 133 aa, Homo sapiens
WKAMWLPEAQVDVEPAGGSLPGPWSTGVLSPISSPSSPASEHGAGQRLDRMMDWDGYSPPGSVVMKGIGGQKDGDRSASGSQGSPTVEGEDGTISHEFRLSAEKKPTISLLGSIKAKGKLSGAPQIKGLRLGS

SEQ ID NO: 1004697 - protein, 179 aa, Homo sapiens
VQSRMPNCLQFLPSSQRAIQSALASCCLAPGPSSPSSDPGIFLHSVRARGGHGLCFLLASPLSFGRLGIGRFSATDQPQRGGGIRHSPIPRKASSASAEWPMPFAQPSPDLCPAGSLSSGSACRLCAPSGSKAGNIIFFSKLIGDTPIDPFLMEMLEAPHQMTEACGPILCATRSATLL

SEQ ID NO: 1004698 - protein, 111 aa, Homo sapiens
MVTMELACGGGGGGSRLICGDGRDVGYGPKEAMVSHELGLERLMGESSGPGEAAGRKEHKVESGGVLSWFSCNGMVPRFTVTPRESTYTKIPNISGAEGQAPVVSATGEVE

SEQ ID NO: 1004699 - protein, 124 aa, Homo sapiens
GRRGSGSAQPGSLFPSQPGAGAAVSSEASGGLGLSRGRGPPSHLRPHGTGSSQAPSRRQGPPQGRRASLAQGAGGQRATPRQKPPSGSPGVRAEPGEDVHIQRGLVSIFKWRVKSARDGFENGL

SEQ ID NO: 1004700 - protein, 56 aa, Homo sapiens
SQPPTLAETTGAGHYAQLILGIYVYVDSRGVTVKGGTIQWQENKLKTPTDSTSCSY

SEQ ID NO: 1004701 - protein, 74 aa, Homo sapiens
  misc_feature (36)..(36): Xaa can be any naturally occurring amino acid
KKRGLRVSPKGEYRGTIRAQGSLKLQGFKLILGAVXPPSEGGNCGVHVPPTPSLVFKIIGIKQGVLVSVAQGGS

SEQ ID NO: 1004702 - protein, 123 aa, Homo sapiens
RNIGGSWVLNSGVSAAGRGLGDTSFGSWLLGLPVRILMMESTATESEACEFLLSLGSRVMWLQDLVHSEWDGTWHYTVALHRDGMEMSGEQSIDSPDFHWRDGKGTGGNPQREKAAELVLEDP

SEQ ID NO: 1004703 - protein, 110 aa, Homo sapiens
GLTLWVAGTIPSILDFFILGFGGDLVASPLTSSPNLAHSLASKWDVDHTRAFFQDFSPATVVIVFFSRRIPREGVSKKMKKESHGNRGIPGSINYRVLCESLSIPVAATK

SEQ ID NO: 1004704 - protein, 114 aa, Homo sapiens
RFHQYKQRGLGRNQGAEKTDSFYHLRGGGSYMENQDILRIAQDQIGTILGPLYHFRIGTQVLQLISIRVLKQVLSFRITIRTEPYRLYHSARGTAKTSGNYTVGFNYSISGWHE

SEQ ID NO: 1004705 - protein, 45 aa, Homo sapiens
MVPSRIFNLNPISLTPPKLSRVRIITSWLDSALEPRLATMVLGLV

SEQ ID NO: 1004706 - protein, 110 aa, Homo sapiens
  misc_feature (105)..(105): Xaa can be any naturally occurring amino acid
MGCLGWFNGNGLHQLGVPSGPGGSRGKNKKQKKNTIKRRLYSSVAALEEMQKVFQDILSLLGLSTRPGFSTSDGQSYFQELEEPGGDHSTTLLDGNGLSPRRPRXGTGSF

SEQ ID NO: 1004707 - protein, 71 aa, Homo sapiens
GVLSQPKARDSKSDETSEASSLKALMATVPERVAGFPKITQQALGPWQSRKQLLPLPLPKQSLRIQVWDLS

SEQ ID NO: 1004708 - protein, 150 aa, Homo sapiens
GSQGVVSISGPRDPPASASQGAGDNERKPRRPAPFTTFNLRIKWFSSSPDSQMEMWVCHPRKFRKPGPESQHFTLGAGSRPPISEPAIITLTQGLGVLSSLGSGIFRSGVADPGSTTHKLGSLGQVIKPCLAAVSGKQSEGTGHTEALNM

SEQ ID NO: 1004709 - protein, 101 aa, Homo sapiens
GGDYRAGATAPSLNHLKQYNPVRCSGVHNGGETIYHYIPETFPFTFPQEQPKYLQTLPWTTTKSSNLLWDLAFMGFQYAVGIDIEVVGQFVVWAFFQVSGN

SEQ ID NO: 1004710 - protein, 114 aa, Homo sapiens
  misc_feature (67)..(67): Xaa can be any naturally occurring amino acid
GDGVLTRFWPGLSDMLSYMQSGRRGRPKHRQGRRALNNFYAPSHVLWAHIPTRTVLHSGEIKDLLTXFSHAPSRSLLVRDAGWEAVQEPLSRFGHMQVGDGKGVRSPGQITDKG

SEQ ID NO: 1004711 - protein, 105 aa, Homo sapiens
CGEGVSVFPRGQWQRPRPLLGDHKGLLLCPCPWGAPLWMWGSHLPLLGAQQPSALAALQPAKERRSSSSSSSSSSSSSSSGSSSSDSEGSSLPVQPEVALKRGQN

SEQ ID NO: 1004712 - protein, 85 aa, Homo sapiens
PGRSRLQSAVIALLHSSLGQQRETLNNMWPSQSLFRDSEVFQGRSSSSSVALGLETAAQVHWKGSIPRHSSESSSLLQWSLVAPQ

SEQ ID NO: 1004713 - protein, 76 aa, Homo sapiens
LNLPGWLRLQGAGHYAQLILGIFVYVDSRGVTVKGGTIQWQENKLKTPTDSTLCSYLRAASPGPELSPVSLYRPSS

SEQ ID NO: 1004714 - protein, 69 aa, Homo sapiens
SWVLPQVGSSSFRPSIWHLQVSPGQGRVIQHPGAGHGRSASAVWPRGQFGAHTLVLEVIGLASLGYGQS

SEQ ID NO: 1004715 - protein, 71 aa, Homo sapiens
SPAAECSTFYPFAAHASCSSTSMLLPAALPLAFCSSSRSLLRESTSPLEVHMSALARCVPAPAVMLLQPVV

SEQ ID NO: 1004716 - protein, 178 aa, Homo sapiens
VAGGRSRGPLARLLRKPGLGRRYLVSAVSRGHEVKEGREGHYPQGVGVHKAHDAGKFCFSRGVVANIITQADEAGLELLGTQGAGVIPVKGVEGGPELIHLLRADALGIRGQDRVLYLMDGPGDGGEQLLPAHRDVLQGVVGVLVVEDERLRDERGVALQLINLGLVVDDALLIVPQV

SEQ ID NO: 1004717 - protein, 113 aa, Homo sapiens
CDLEDPCQVLTLRQKIRKIQPVISESHITSYKQNPEQSGGEDAEKKEEDSEGLFRMRIEDEDRSQVLQLFWKKEIQTARFVGRVRKFPQKRVDDDRGGPQKDFAKMMRAGDHR

SEQ ID NO: 1004718 - protein, 38 aa, Homo sapiens
QVYTVNPSSPRLSSITLAYSSNSRNIQAGISSLLSTLF

SEQ ID NO: 1004719 - protein, 70 aa, Homo sapiens
  misc_feature (1)..(1): Xaa can be any naturally occurring amino acid
XSTGEAGEEGWSVWVESVDSEAQWPGLKSQLNLGHWSVISDKLSNTAGPQRTHLSKGDKTVNTSEVGHVD

SEQ ID NO: 1004720 - protein, 72 aa, Homo sapiens
ATSRQHKNGNTCYDHYLLTYEVKKIHSIIRNKNGLRAGHGGSGLQSQHLGRRRGADQEEEESKSSRANRVKG

SEQ ID NO: 1004721 - protein, 121 aa, Homo sapiens
WPGLYLKLNLGSYLDGLFEASKCTQGGKGRACNSLKLGKFPATAAAIFQKAFGVFPQWGKVHQGSDRTFSAVGVHIGAALDSGAMSKLCSKAITSAAMRFGTCPRMKGRTGSVLASGVRSS

SEQ ID NO: 1004722 - protein, 44 aa, Homo sapiens
MPSRAVRHSKMASISQQGLVALKQCKRTRPPLSAWDCPGPWELL

SEQ ID NO: 1004723 - protein, 59 aa, Homo sapiens
IIEVCSHVHAEVWCAHRSESHHIYLRHLLKPNMVTPGHVCLKQVFSMRQIAICASGGSR

SEQ ID NO: 1004724 - protein, 33 aa, Homo sapiens
NFIAARGLHGLATRPPCTISGGPRLMTNGDHYW

SEQ ID NO: 1004725 - protein, 86 aa, Homo sapiens
VETGVSERRPKNAPIYTRARWLTLVIPAFGEAEAGGSQGQEIETIRGNTVKPRLYYKIQKISQAWWRTPVVPATQEAEAGEWREPG

SEQ ID NO: 1004726 - protein, 37 aa, Homo sapiens
SICCLFLRNHHGCCDLYTYLKTVGLQGLIAAQYSGAQ

SEQ ID NO: 1004727 - protein, 37 aa, Homo sapiens
ALYKVTPDMYTNTALLKSQVNHRESSLLHEYCSDATH

SEQ ID NO: 1004728 - protein, 100 aa, Homo sapiens
MSASMDNDLEIDELQNAAWAPWPSSWEQWENHLSGSIVVIHPDTGRDLSPEEAHRAGLMDWNMYVKLRSQECDWEEISVKGPNGASPQCYTDRKSGKEVL

SEQ ID NO: 1004729 - protein, 100 aa, Homo sapiens
MGGEGRVEELTINEKDIMEQNFREHGAGAGEGEEEVSGVRWSSGSSDAVDQVMVIMDALDERAKVLLSDKQHREQLHSISDSSVVSAGIWCIDEQLLSPP

SEQ ID NO: 1004730 - protein, 101 aa, Homo sapiens
LYFNYGRVPIQSNYGLGGSNLGNGGKKSSLQGTSRVTGVCGSGASRVSPRLSHGPLKPHSKYTSPSYHPADLIRGHQKASAVSTQGPEKLQNGTSPGSTTR

SEQ ID NO: 1004731 - protein, 45 aa, Homo sapiens
LISPIDAQRRRSVTWSITWAPQKPPRLDATDPSMPTANLDRTCMT

SEQ ID NO: 1004732 - protein, 155 aa, Homo sapiens
PCSKRVSNSGAQAIWLAWASQRAGIRGMSHKDGPYMLYSFTSQNFTSVLGKRPSIACENDINWLSIIFPNKVSASGSPFKMKYFSIVEVVSGPIKIRRVGNFHSKKKKAIGYWRTSPEFQVWPLNWFTNQRCDLEKVTMSLKLHFFTENRGVYNL

SEQ ID NO: 1004733 - protein, 38 aa, Homo sapiens
MLVRQIQEESLRTQLFTYSSVYNSISMEPLSDMSELVY

SEQ ID NO: 1004734 - protein, 42 aa, Homo sapiens
HQNGSRTMTFSFSLGTSRSLTDQVDHRRSALTKKNHSLKPQW

SEQ ID NO: 1004735 - protein, 83 aa, Homo sapiens
GPGVETRQLSELDDRVRCTPGGCAPQFEPSAATLKRKSLMQNTQDDDHLGQCSAPSSSLIIIGEWVSTGRGPYPGEVTPVDPR

SEQ ID NO: 1004736 - protein, 198 aa, Homo sapiens
  misc_feature (1)..(1): Xaa can be any naturally occurring amino acid
  misc_feature (137)..(137): Xaa can be any naturally occurring amino acid
XHSNWTWYTLGLWLFLLITGFSFTSSHLSTGLHHLPGGSSQKTGSQPYSLGNNYSLFPIKRKGVWVLILKSIYFPSPVLPHLNPKLAIISYPEGHNSIPAGLPVFTRTIIYMAATGGLEYLYQRATGGSRRSPYSWXGGGGRIARVQEFKTSRGNRVKPRLYRKYKSQLGLVVPPGVQALRRLKREDRRAGRVSASEH

SEQ ID NO: 1004737 - protein, 67 aa, Homo sapiens
MVPCASSLGERARLCLNNDNENNKIKNKTRHGWAGGSGLVTSVLGEAGVGGSLEIQECKTSRANMVR

SEQ ID NO: 1004738 - protein, 74 aa, Homo sapiens
  misc_feature (69)..(69): Xaa can be any naturally occurring amino acid
LRSTLRRTPLYPARVHSTLAGAFYPRGVPLPYAGACLRAGRTGTTLGHSYDGDWTDRWGRDAWVHFLHXLRRGY

SEQ ID NO: 1004739 - protein, 133 aa, Homo sapiens
MASCAAGYEQHWLRSQHYVYLCGDHAWAGQGAQEVLVRGGAGAQVAYTGKGNGQGRVRGLKSPTKSKHLKLHRGPCLPALESGHVDADAVNNAGAEECIIPEVSRSYHLGIVGLNMNGYFHVSGRQGAGHSVA

SEQ ID NO: 1004740 - protein, 65 aa, Homo sapiens
AAVDSRRTPLYPRGVPCWYDVGYGHFLTLTTRQAYNHLARSLHGDWPLATVYRLVGLVVCKLTCG

SEQ ID NO: 1004741 - protein, 64 aa, Homo sapiens
WARAYFLYRDARPLIPGPILRSWTWIGYSSTLGGWVPCVRTDPGRYDGTPRRYDGPRDGHGYRR

SEQ ID NO: 1004742 - protein, 42 aa, Homo sapiens
SRVPDQLVVQASAIFSSTLSHICPTSTVLPGSRSSHIRHIHG

SEQ ID NO: 1004743 - protein, 36 aa, Homo sapiens
VIKDPLGAYWVLYLGAFLGATTDVYHGPLAEGYELN

SEQ ID NO: 1004744 - protein, 73 aa, Homo sapiens
MGPEVVPLAAWCRAQESLDLCQWQPTAWPREAASGLDLELERAGRVLDSGTDRDTVPGLDMALGVHNAALGGS

SEQ ID NO: 1004745 - protein, 100 aa, Homo sapiens
LGLMQADNTRGGGIMSGRILSFPGAAGRVAVLAMVSYGPVPLYLGDPSRCTVLTKGWRAGEKSRCRPPSKPSVGAQGIIQEGARRCAESRVLFLVAIPFR

SEQ ID NO: 1004746 - protein, 68 aa, Homo sapiens
STSRVLYLGSKVRDYRREPLCLAETGYFWVPRLECSGTITGHCSPDLLGLNSPPSLTSQVAGTTGTRE

SEQ ID NO: 1004747 - protein, 46 aa, Homo sapiens
MLALGGDDGVESDVREHSFRSGGGWGPIRSLPVEIHLGHISYEGGG

SEQ ID NO: 1004748 - protein, 94 aa, Homo sapiens
GEVVHKDNWRGRTLIRELAAQVLEDRGVGCGRVDSEKDDAVAKKLGLTEVDSMYVCKGTMTVMDVPTGDVFWLTTIGDFRLDCPRRTPVDLDGR

SEQ ID NO: 1004749 - protein, 44 aa, Homo sapiens
GAPSGRDLVQEEIRCLQPHYLPIIDPFPITHGPQPEHKGDAYSS

SEQ ID NO: 1004750 - protein, 167 aa, Homo sapiens
MVTTYSRWYPLNEVRGQVRLHIFSRGGMLTWSRSSLKLPSEGPQALPLQQDMIGGQGWGDRVMAHQGTKFLQKQHRVADAMQLLPGLLVLMQDLGSLMQSIHDHLQWVHSFLLPVAPGQPSFPPLASPGPAPGPGSSAPGWPAHGGCRLEAGFSFGTSQVHPQFNDL

SEQ ID NO: 1004751 - protein, 169 aa, Homo sapiens
VETLHTLQRMFGCDWAGRAPPSAGYNQFAYSGKDYIALNEDLAPGPAADTAAQITQRKWEAALCGGAVVPYLEGLCVELLRRYLEKGKETLQRADPQKTQVTHHPVFDHEATLRCWALGFYPAEITLTWQGDGEDQTQDTELVETRPVGDKTFQKWAAVVVPSGEEQRY

SEQ ID NO: 1004752 - protein, 56 aa, Homo sapiens
GDLEDPWGSIRHATPQLMEVSFHLLLHPSGPRWQTSRDAETRSRNEACEGSPKGTE

SEQ ID NO: 1004753 - protein, 137 aa, Homo sapiens
MGRVFRRKPAVTAEDMQETQAKACEGWGTCKGGASRMSSSRGGLVGPWALWGESIQLCLPCMPLAGTTIPSHIWPVRASQIVSTPFLGGEELSSISSPPVLIEGRRKGNVAKPVPFWLRFVPSVQSGSGAQAEVIHL

SEQ ID NO: 1004754 - protein, 31 aa, Homo sapiens
MSFLLMQGEAVVPKGPEALKVPSVCVVSLGP

SEQ ID NO: 1004755 - protein, 33 aa, Homo sapiens
MGPISLWTPVDLEIQKSPPESFPVWEPKGYGAR

SEQ ID NO: 1004756 - protein, 106 aa, Homo sapiens
FWQGQRCGTLNGPATREGRRHSKRRALTHLLQDWGHGTLSPDLRALPRRVLPTTGLGDLAGSGPHTFRGRPDTTQETTTGTDTDPGTTDATADGPGTRSFAWEGPS

SEQ ID NO: 1004757 - protein, 79 aa, Homo sapiens
GTQPSFLPCPAYRVWGSQGQGCHASTHHYTVKACHFRLAAKTHYGLSIQHEPGPQSSHEPSARGGQPYPFHTHRKPGTE

SEQ ID NO: 1004758 - protein, 158 aa, Homo sapiens
TKICIPLLRGSTRVRVDSCWMWKSEGVRPSSSLFPSKDQPWRIRRDAFLVWDLGLDILKGVIGSTSERDGLTSRGLHEDLHPTSKREHQVRGGLFLGCGQRRGVRPSSSGFPEKIKLGGSGGMPSWSGILALTFSGVSLGPTSRGRVSPVRVYTKICI

SEQ ID NO: 1004759 - protein, 122 aa, Homo sapiens
  misc_feature (111)..(111): Xaa can be any naturally occurring amino acid
SIHISLSVPFSLRVLVILLRILIISVPFFFSGPIHVLLDGPGFSEVGPTALLSGLFLSLSIHLGWSNGSPGTRSGVITRSGKPIIISTSGKAIIIQVSPRAPVSSSAPGLXILSSSAFLQGP

SEQ ID NO: 1004760 - protein, 175 aa, Homo sapiens
LGAPSVSSRSESGGGPAHREGDVRAQLLFHMLKEVMVLRGREWHKDAISSREGGIDKDSEPPGIRVVFCKDSTVSPEMVVHDHLCLRGGPIEQATVPQGLVAGRILIYFIMGVGGEPHHIFVANFVCPSQSVIVQEAGCSDRWGVGIISKDDKRVYIRRVANPDELCLDIRYNYR

SEQ ID NO: 1004761 - protein, 48 aa, Homo sapiens
  misc_feature (36)..(36): Xaa can be any naturally occurring amino acid
MDIHQIHYFKVLLGLWSGRARAVKKSLHPVVYTPIXSWEGCPQRPLKG

SEQ ID NO: 1004762 - protein, 85 aa, Homo sapiens
RRSTGADESVMLALLMWRSATYRKLVEGEECRLNGEGVGQVNIYCSAVHRLQWLMAVPAVSAVALGLGGGSSYSYGSGLGVGRRA

SEQ ID NO: 1004763 - protein, 81 aa, Homo sapiens
  misc_feature (14)..(14): Xaa can be any naturally occurring amino acid
LDVASNSSSGRAIXGGSALLEGQFTIKYTTTYYSSRKSYKHKSASVSSRSRRPQALLWLQSPLLRLPFLSVDSKSSPAVPR

SEQ ID NO: 1004764 - protein, 40 aa, Homo sapiens
RRRRELTDGENGGDSKPLFYEVSRGNVLKVTQQQSCEHRP

SEQ ID NO: 1004765 - protein, 65 aa, Homo sapiens
MGLSGVTDYNKLAAFETKTSHDLEHLKPQGVGRHYMGREESKVCFSTDNSDGFGARGIFGEGESR

SEQ ID NO: 1004766 - protein, 40 aa, Homo sapiens
RYTSCLGLEYPDETTTKRKGGISTTQPLGTVAPYFTLVYA

SEQ ID NO: 1004767 - protein, 100 aa, Homo sapiens
IRGSRIISLPLFTSSSSGLNGFSLRFWLFWMVKSFQASYFFRSSHQIWAQKIGRRSRIGIFHFTFQLVFGIFMVFFNLVPLGGFSISSKDFHRLRISVLK

SEQ ID NO: 1004768 - protein, 132 aa, Homo sapiens
RRSTRPRMFDTCEEIRFRVVDESFVELSPQVHAHEMPPLQWGAAKKEAPYTLVGSISEPVLGLLSWWTSNQPWWLDSWNLTSLRERWYGLPVTAQTAADGDAKEIRVSSLTVRQGQEVPTRLPLVLHHLGPA

SEQ ID NO: 1004769 - protein, 178 aa, Homo sapiens
  misc_feature (98)..(98): Xaa can be any naturally occurring amino acid
SRGSWQALYLKMSALMYNSSNPVLKIMWPEGKRSIQRRPSDLGRRLPGEKNSMMALVDNLASKEPYDVRGIKPKDKKSPGILDDEGGRHQVEYLGLRXKVRVRRAGLAFRQTYEKFLHRYKMISEFTGPNHDLPSDKEAVKKLMEGGGPQDDVAEGKTKIFIRTPRTWFTLKELRAQM

SEQ ID NO: 1004770 - protein, 126 aa, Homo sapiens
QEGREGDMDTVGWLLVVGMSTPGEAWGGDKLWQKTQEGLILGSDQCCGTGSQAECLPGETWQEPVSEAVSGRQRARWPCLQASMIYQMQPVVGLHIGLVHAHGQVATRVEDGIPGVGKLLGQPCAS

SEQ ID NO: 1004771 - protein, 61 aa, Homo sapiens
MRLRNRELTQGGDRALLDKKIEVRHSGTEQARTEVPRVGAETRAREGVAEAHWTGERLPLN

SEQ ID NO: 1004772 - protein, 104 aa, Homo sapiens
FISFFLETESSSVTQAVVQWRDLASLQPPPPGSSDSPASASRVAGITGAYHQAWLMFGILSRDEVQHMGQAGLEPLTLCSARISLLKCWDYRCEPVRPAPARLF

SEQ ID NO: 1004773 - protein, 138 aa, Homo sapiens
RSLQALYLCERASTELTSQEAVGLKRKWEVRKEDSKCRHVPYKKACAVKGKTETVWLEKMTAGTWEAPGCRHSKVRNAEGGLREVAGTETGTILPLELREQGSNDPGGPNLWSLLTASVSLGVAVAGPGSGQGVVRIK

SEQ ID NO: 1004774 - protein, 37 aa, Homo sapiens
MVRQWCSQGCMIYQYGTALVQSRYGLQKKLEKVESRA

SEQ ID NO: 1004775 - protein, 64 aa, Homo sapiens
IPIAKAHPLPGSSRGRGTAPIGGQVRVSKQQRISTSPIRSVRSPWLMRKHQASSVATGPEVPPP

SEQ ID NO: 1004776 - protein, 69 aa, Homo sapiens
LEFVSSQLSSTLMPVLSVHRACNGKYLVSPHQAILSTEPISSKVDSSQALREICLWNQVGLFSGTPIIR

SEQ ID NO: 1004777 - protein, 61 aa, Homo sapiens
MALLFTFNFTVKFTNPGLQFLDLLLPTLQAQLLSLIQTMLQVLHRLFQVLLHPLQMGAGVL

SEQ ID NO: 1004778 - protein, 123 aa, Homo sapiens
MLKTAEGELGGGEVGVSPSSRRGRVAISCSSRVFTSSRILYSWFCCSISQRSWPKLLLHAANHLLDLGQLHASSEPLVLLPGLFSRGCFHAELGNLQLNSPRVPGMVAAGTSRRISASLPASA

SEQ ID NO: 1004779 - protein, 34 aa, Homo sapiens
  misc_feature (1)..(1): Xaa can be any naturally occurring amino acid
XVRPRYRSHLIVWCCSCPRGVCINAVFYTPLAVS

SEQ ID NO: 1004780 - protein, 86 aa, Homo sapiens
GRRGSHSKRNTNKATLRFWFLSNHQTGTAPKIGYHILRANLVEKKVLFSRARGHVNCNSPSEGQLGKICQNHRCRQGGPSMASSGN

SEQ ID NO: 1004781 - protein, 59 aa, Homo sapiens
YVAQVVWNSGAQADLPGLGLAKVLGIDRRGPPCLATRGYILVYQKLKGKSESLAFDFDH

SEQ ID NO: 1004782 - protein, 107 aa, Homo sapiens
  misc_feature (1)..(1): Xaa can be any naturally occurring amino acid
XGEGVHVRELTINNKKAVRVEEGRLYEQSTDGAFLPVPELGEGSWAHRVDSAVVEMPPDVVVGGRYPVSPFFLTSGLKLALALPRAKPSQKPTGNATGRAAPNMQSR

SEQ ID NO: 1004783 - protein, 38 aa, Homo sapiens
WGSIQVRAEYYGLGAPLLAGGTHNASKKIHTAAPVRRC

SEQ ID NO: 1004784 - protein, 117 aa, Homo sapiens
SGLRQGGNDKQGFPMKQVSGPRAVSAGYWSKGHSGYRPRRTGERKRKSVRGGMVDANLSVLNWVMVKKGEKDIPGGTDTTVPRGRGPKRASRIGKLFNLSKEDDVRQYVVRKGYGAR

SEQ ID NO: 1004785 - protein, 44 aa, Homo sapiens
SGLIQVLYWRVHEKVRSLGPSPLQGVYRATVRRGDSGGGGTEGG

SEQ ID NO: 1004786 - protein, 177 aa, Homo sapiens
  misc_feature (169)..(169): Xaa can be any naturally occurring amino acid
TTKVMITRTEVNDNPPKFRRAVYQRSVSEAAVPGEEVGRVKAKDPDMGEKGLVTYNMVEGDGMESLEITRDYETREGVIKLKKPVDLETKRAYMLVGRVHAKDLDAANSRIRYSIDGHTDLERFFTINPEDGFIKTTKARDREETAGLNISVFAAEIQNGIREAKVPVXIRVLDVND

SEQ ID NO: 1004787 - protein, 98 aa, Homo sapiens
GAHSGWVGCLEGRSGFHFCVLELMGQPVQAFVQPVPVGGTGGLNVPVTVTKGMQAQLVCDLSRVHSIRQIRLVGKDKEYSIPELVLRQHSHQLFPGLI

SEQ ID NO: 1004788 - protein, 182 aa, Homo sapiens
READAYWRPSSRRKPNWVGPGVVSYQVEEPSCREVGWLCRGVGAECPVLVGTVWGLQQYWQSQHQQQLLHVPLPGGVITCGDGPPIPRTGPANPAGAWGNWAHQRVLLYQLPYQAQGLQQLQQVLPEHCQYLGGVALTVMDTKFSPGSKTRAKSGFSTGSGGFAFFDWIYLELITITEDQIH

SEQ ID NO: 1004789 - protein, 105 aa, Homo sapiens
VCCGDLEVPLGLHSGMEGKTILPAEVEVLHMDVLIRGCLSRAPEKEPFLGRGLFHGDVRDGEPKDEGPDHSQGHLGVAVHNLFGPDGDQLDALAGNKVQRLVHMV

SEQ ID NO: 1004790 - protein, 91 aa, Homo sapiens
LGLIQDSSILHHGAGVGHREEVDGLPSHFQERSIYQDQEQRILEFREELGEGKATTAHDLSGKLGTPKKEINRVYYSRAKKGKLQKEGTEL

SEQ ID NO: 1004791 - protein, 141 aa, Homo sapiens
  misc_feature (87)..(87): Xaa can be any naturally occurring amino acid
  misc_feature (100)..(100): Xaa can be any naturally occurring amino acid
LGLIQGGVRSRTSPGSLVLSNENLGQGLHQEGFSILLLWLQNGLIRAADDREEDGCSQAVPWVPLTEENEEARENEQFQQLWRKLGXRPPASGQETFGRXPAKLSPTQLGRAAASWSQPEEEQKLQPERQPKVPGEQGPEG

SEQ ID NO: 1004792 - protein, 71 aa, Homo sapiens
RVTQEEEKERRRQEKKQRGAENLKRRLENERKAEVVQVIRNPAKLRRAKKKQLRSIEKRDTLALLQKQPAK

SEQ ID NO: 1004793 - protein, 160 aa, Homo sapiens
WDGTTSVQLLRPLACPLVSQRLHVPLGQERGGTAMSHCLQSPVQAARQAGQQSLLNSPAEAVAPLATLQSHLLALPAPDLGFPAQRPGWAASICNSGSRGGHCPPPQELVKDMTAAGKGPWKDKEPIQVHTLGSASGSPVHSWDLPSPTPLEWEPGVVVL

SEQ ID NO: 1004794 - protein, 105 aa, Homo sapiens
  misc_feature (89)..(89): Xaa can be any naturally occurring amino acid
MRSTSVRPSFWAQRLPSQSLPARSQHPGLLGLGLLTPGSAPPSQMVLVRPGHPRGVQGRGVPAPHTSGTHSGSSWHGHGSQGPHHRTQXSPALPAPVPLKGAQRV

SEQ ID NO: 1004795 - protein, 49 aa, Homo sapiens
LEDPVTSQLSFDQPERGKGAIDAKVHMPLRSPGRSAMSQKLTNGDVPCS

SEQ ID NO: 1004796 - protein, 82 aa, Homo sapiens
IRQAINYGVYRRDGLPVLSEDVEADVALEVKVGVIDHGLTLHLGGIMRVTRAHLKTEHKLPTLVEALIRTDDQLEVEEVVGI

SEQ ID NO: 1004797 - protein, 68 aa, Homo sapiens
  misc_feature (44)..(44): Xaa can be any naturally occurring amino acid
MAAVPSSLGSASEGDRWRERERERERESVVMTLNRFEIIPIIWXNLPDRILNSFSVILNVSEFSEISY

SEQ ID NO: 1004798 - protein, 169 aa, Homo sapiens
RRGSHIHPDGLYGCDLGARRGASSVGMTMFCLRGQWITSALNEDLSSWTVVDSVVQITQRKWEAARVAEQLRAYLGGPVRGCGSEDTLENGKETLQRADPQKTHVTHQPVSDPDEATLMGAGPLGFYPAEIRLTLAVDGEDQIQYIELVETRPGGDRTFQNVGRCGGWL

SEQ ID NO: 1004799 - protein, 97 aa, Homo sapiens
MYGCDLGPDGCLLRGHDQFAYEGKDYIALNEDLSSWTAADTADQITQRKWEAARVAEQLRAYREGLCVEWLRRYLENGKETLQRADPQKIYVTNQPV

SEQ ID NO: 1004800 - protein, 80 aa, Homo sapiens
MSRGENSYRHVFLGQEPKTFSSHCYWLIFSNISNWHWTEEKARDWDFSMIKHTKRPLVEAQHVSGSGGPHTIHSQSLAHT

SEQ ID NO: 1004801 - protein, 64 aa, Homo sapiens
EEELASLGKLDKRAKKRSKMVSGSQDIWEGIQDKGEQGLKEVTCSDPPWYTNDWRCKCSLPRIR

SEQ ID NO: 1004802 - protein, 75 aa, Homo sapiens
LEDPCGHGSHRFTEKQTSASSHWCVWLAMTGVLTINSPAWDFWNPNEETSPWVWLPLLPFGFSKKVFPMYVMLGL

SEQ ID NO: 1004803 - protein, 102 aa, Homo sapiens
CADGFSESQIMILREPEYQKSYIVPTQVIKMGWVRWLTLVSQHLGRTRPVDGLSSGIQDQPGQYGKTPSLQKNTKISQAGWHVPVVPATGEAEGGGSLQRAK

SEQ ID NO: 1004804 - protein, 86 aa, Homo sapiens
QLTGAATEVHDSVGVVKSLKRALETTFDLGIPQVVLPPLPSRPALEKTNGATEVFNTGIYQYQQALANMQLQPAYSISHTSSHGAR

SEQ ID NO: 1004805 - protein, 82 aa, Homo sapiens
VFVDRQVMVTTDTCDVGTRKGMQLSFPFSSGMTLPQSWSAVEAGDDVLESPGAITRQFPGVSIARSSWVAVMACNCGHESFH

SEQ ID NO: 1004806 - protein, 38 aa, Homo sapiens
MRDRRGDSDGVKRAPRFPAKLYRLSHGVLSTDQSPFTK

SEQ ID NO: 1004807 - protein, 90 aa, Homo sapiens
TPRWPMEAPCPPIVDPDPLIPCDSVWTGRDCVSTRVVKGTMHLEFSSLRRAQWSDHVLLVELHTLSKDRFVYTCNECKHHVHDTLALYCL

SEQ ID NO: 1004808 - protein, 74 aa, Homo sapiens
YNRALYPRWPMAVSASGMALCPSVDAEILPDGDHDLKRCHVCDREGAGCVYEALSDQQIYLEGTLLEAHDGHPR

SEQ ID NO: 1004809 - protein, 75 aa, Homo sapiens
DVVSKGLAMIKLQQYQGCRKIRLLEVSGHTIGALPLNQLNQNLWGQPPSNRCYKMPSECQNVGITEGHPSGVNLN

SEQ ID NO: 1004810 - protein, 42 aa, Homo sapiens
EHTLSPQPAKQMGLQAMPPSSANSGLTFGKDGFYVAHASLDL

SEQ ID NO: 1004811 - protein, 50 aa, Homo sapiens
  misc_feature (43)..(43): Xaa can be any naturally occurring amino acid
MVNPVSTKNTKISRAWWTRLQSQHFGKVRAGRSQGQEIETILXKMLRPRL

SEQ ID NO: 1004812 - protein, 59 aa, Homo sapiens
STHKSSSVTNDPRNAKHARRTQTPLSRHVKAFCSCFSPSALMTVPARTRLSVQTPPSAM

SEQ ID NO: 1004813 - protein, 116 aa, Homo sapiens
  misc_feature (7)..(7): Xaa can be any naturally occurring amino acid
  misc_feature (18)..(18): Xaa can be any naturally occurring amino acid
  misc_feature (51)..(51): Xaa can be any naturally occurring amino acid
  misc_feature (54)..(54): Xaa can be any naturally occurring amino acid
  misc_feature (73)..(73): Xaa can be any naturally occurring amino acid
  misc_feature (79)..(80): Xaa can be any naturally occurring amino acid
MFPGPLXWTYAREYVHTXHGMHTIQHLQYYIIFRRSIEYDFRKPVRFTRRXPPXFHSTHQQTLSSCFTIGNSXFPGSEXXLCPFIINICTHRHTLLYGTWLYCTSHIWCVLINRRF

SEQ ID NO: 1004814 - protein, 48 aa, Homo sapiens
MANDRGDVIRILRHFPSMTYELGALHPASLLVSPLLLFWRRDDRKSFA

SEQ ID NO: 1004815 - protein, 48 aa, Homo sapiens
TRFRALLSEETAERVRIPSHDRIRLLGELLCSTCPKELLAARAPSFLV

SEQ ID NO: 1004816 - protein, 54 aa, Homo sapiens
LAGAGVTVFHPKPPQLVISFSASSMQQQQHQSCYGVIALQLHPQHNPVAGNILL

SEQ ID NO: 1004817 - protein, 53 aa, Homo sapiens
DPLGSQQRAPRPKQSRDVTQPANQDVSRRMGKAGRERGREGVYRASNFDRSVG

SEQ ID NO: 1004818 - protein, 57 aa, Homo sapiens
SYFSGGLQVTAGLLFQGAWAIGALQGRDLYSYGPIHQCWTPSSIGTRAIAHVTMGEQ

SEQ ID NO: 1004819 - protein, 78 aa, Homo sapiens
CVTAANLPSSNPSHSLLPDADGSRRETGGLSSSMSPAFTSIRSAPKCLSAFQVVKTPLGRARWLMPVIPALWDGETGR

SEQ ID NO: 1004820 - protein, 84 aa, Homo sapiens
MVLLAVGRGLTGASEQGEQGPMEENTEEEGWQAQLHASGVAILVGTLSSSQVYPPRSPVPGSSQQPCMLSQGYCANLLSSWRWK

SEQ ID NO: 1004821 - protein, 52 aa, Homo sapiens
MYELLGLAFETVQLLFRKCSLKTVLLLAEQMISRIEYIHSKNFIHLGRQALT

SEQ ID NO: 1004822 - protein, 47 aa, Homo sapiens
  misc_feature (1)..(1): Xaa can be any naturally occurring amino acid
XASPSRAEQMARRPKRLAVQEAAQLDMLLEKLPQVHEEISGPLHFSQ

SEQ ID NO: 1004823 - protein, 98 aa, Homo sapiens
GETAAKKNPKTASPVEGHEVHIGLSMVKIPKKMKQHETKQMGPDVASFCMNAEDALESKPERKAMGGAMNIVADELVGPFSQLKGQHITMGTEPSKRS

SEQ ID NO: 1004824 - protein, 84 aa, Homo sapiens
  misc_feature (30)..(30): Xaa can be any naturally occurring amino acid
  misc_feature (41)..(41): Xaa can be any naturally occurring amino acid
  misc_feature (76)..(76): Xaa can be any naturally occurring amino acid
MCASALLWGAERGSMTSTSGSPYGTRHLVXCFTRIQRATCXRSPSSASFLGANAVWVTGLLVTLLYSTGAMCPRLXPGLSVDTC

SEQ ID NO: 1004825 - protein, 85 aa, Homo sapiens
  misc_feature (24)..(24): Xaa can be any naturally occurring amino acid
  misc_feature (79)..(79): Xaa can be any naturally occurring amino acid
MLRASVSWQMKSNINLYLCQSHLXPPVLGELCPARITAFDPEYTGTCTLNTEDNGNVNSSALPTHPLTHASSVISSSTXSDYIHA

SEQ ID NO: 1004826 - protein, 55 aa, Homo sapiens
GDRDVLDRTKKHLQERLIELLRDKDALWQKSDALEYQQQLSAEREHGTEPQRQTT

SEQ ID NO: 1004827 - protein, 68 aa, Homo sapiens
MRWYPAANGSRHLGLSINGVVSFELPVYIFILLWVLFVSSCRTVQKLFKRNWIRNWMCIRNLIILICV

SEQ ID NO: 1004828 - protein, 33 aa, Homo sapiens
VSLQYVTEKVLLLLYKALSDHHIYLECTLLKRN

SEQ ID NO: 1004829 - protein, 98 aa, Homo sapiens
CTPLATWQLCHATCTPLLQTHRGEDLLELGVLVKVRQFNACFQEPSAQFDWAVEHLAQLLFPHEGLASFLKDLLNLRQPYAEGGKNLLQCGPLFSREM

SEQ ID NO: 1004830 - protein, 34 aa, Homo sapiens
  misc_feature (30)..(30): Xaa can be any naturally occurring amino acid
PAAYAQLPEGIQSLLGGVMDGVWSESFHDXKVVM

SEQ ID NO: 1004831 - protein, 80 aa, Homo sapiens
KWQRADLACRRITESASLDMSVRALLRNDEAYDKRTLEANPCAHVQKEITALAPSTMKIKIIAPRNGKYSGVGSSGSIRG

SEQ ID NO: 1004832 - protein, 40 aa, Homo sapiens
CPGLCMGGESMSMAHMFSRNVSAMVACRHDGSRMKAVPGS

SEQ ID NO: 1004833 - protein, 74 aa, Homo sapiens
MALSLMALPPPHSGLQTGRYPSDTRGALCGAPLDGRHGNLLMRQLLSASMPCGDHCWASESVPFQARCRWTLKS

SEQ ID NO: 1004834 - protein, 77 aa, Homo sapiens
PPIQVHSHLLLQQEDAIITKVRLVALVPRVVRPFSGCGAVSSVWLYSLGLQSPLLSQVELVINAYVASISTLSLYTI

SEQ ID NO: 1004835 - protein, 59 aa, Homo sapiens
GSLFQESAAGRSRLGGGQCPGPKVPGRFVWLAAAGEKSPLVRSRSACFRCLQKVTDERE

SEQ ID NO: 1004836 - protein, 104 aa, Homo sapiens
VHGCCSRRDCVPAGRSLPPIEKIRRPEKSRAGGGVCLEAFAVDDGRAGLVVLLLGDPHLLEGGQRGQDGAADPHRVFALRRGDDLDLHGAGCQRGDLFLPLGQA

SEQ ID NO: 1004837 - protein, 41 aa, Homo sapiens
MGQLVVLCGRSGNGAIGNVVMIKLVSARVSCGDSVGLEHGC

SEQ ID NO: 1004838 - protein, 98 aa, Homo sapiens
QSKCCIDMIIESENYYTDMQELNSSISPNGPNRHLQKFLPKTTEYTSVSLPQGTYSKIDGTIKHKTMQRLFKKQKQKQNHTTGWCRAVVPCGLGQMKT

SEQ ID NO: 1004839 - protein, 62 aa, Homo sapiens
MAFSSDETCSDVHAWSGVTMSELQDGAFQLDSGAHSEACRGQRGTPSWSHTASVTKSGGSPL

SEQ ID NO: 1004840 - protein, 51 aa, Homo sapiens
MISLMRIILSHIAGVPCWASARCFQVDVVVTQSLETADMNFSVTYWQRFKS

SEQ ID NO: 1004841 - protein, 111 aa, Homo sapiens
ELNQRFTKQGSRLFLRHMILAYSKLSFSQVFKLYTVLQQDFQNGEKTTVEDADMELTSRDEGEGKVETEEFEVSVREEEVSWMGALGAKRKESCWLTQQASLLKNDDGSGA

SEQ ID NO: 1004842 - protein, 70 aa, Homo sapiens
MAELETSPPPNQERFGDPISHHVVWEGEPAYRYMAKSGDEPEDAVMATCALTGSSSLPPAAELPSSTSLF

SEQ ID NO: 1004843 - protein, 138 aa, Homo sapiens
GFESKSEMFSGHKEYWSRVQGQGGKSVPRGPVCLDILNATGSTTGGKIIVGIIMVIEVLDGSRVEHCTNTAINRMCPFHRGFHDVRYLWLLRLSRYRNPQDLQNGVSRVAEVIVRTFMESCSLWDFHLKVIAMHPGAQ

SEQ ID NO: 1004844 - protein, 39 aa, Homo sapiens
MGPQYGCHALDLATPCTATGFSVPVAIPKLWAITRHVAT

SEQ ID NO: 1004845 - protein, 145 aa, Homo sapiens
AAKLTANLHVSAARISEIKYKQDMDRCYRHAKLSFKRNDIFNEITLAYINSDCFTVNTKLSTLAASAETSYLTSLELSLSHQATAWATGQQPATAAYSPPSKLPSYCHSCLHPNPPYSLTCELLPVRHCYCSSATPALLLFYHTA

SEQ ID NO: 1004846 - protein, 81 aa, Homo sapiens
GEALYLRKVVQCTGTLPTFPPKGERLGADKSGSVVWRETKAMTNGSSIIFLAIGLGYEISSSGKGTPGAQRGTRKVEAGGY

SEQ ID NO: 1004847 - protein, 89 aa, Homo sapiens
WPGFSTFAGGGGLPSGPPGPPKKQGHRNTVSASGSLHLPRVSPKKTQFFRDTLKASSPNSFWRHDTHRLSSPGRAPPGASTPSSNSFLS

SEQ ID NO: 1004848 - protein, 68 aa, Homo sapiens
MLAHKVTLSYGGKQHLYPSYNGHISGRASNRVDFFSRTGMERGGCAGRRVQSIIIGSEHSQAIIVPYA

SEQ ID NO: 1004849 - protein, 116 aa, Homo sapiens
MASQTRAEMTSDECQPAEAPRGGHRKQPQRPTPDRGRRTGAGTGQELSPWAERRPGKKGVLGARKEEEGCPVLVKEKWGLKKLVLSQEQKTMWWDGIDSIPESVHLKGGERISKKC

SEQ ID NO: 1004850 - protein, 197 aa, Homo sapiens
LRLVIIEDPLQVLYLSDLANQQCPTRPGQQLAAPPPHSSSIRAARKGGEVSGSTHSRGPALTMRPRPTATISSPSDRGGTLKGHEGVPGHKQAPDSPHLPVTGYVITDLRLSGVHFPHVSGGGQSMSQGHRENPGRCKDKGPSIHSFIRQPFSKHADVIVIPTLAETQTRSKESLDTTSNKQGLPETNNESRSHKEE

SEQ ID NO: 1004851 - protein, 50 aa, Homo sapiens
TGLSPTHSPSPRKARVETKMVTASSQSGSGTYDARIRDANLPSQVWSSTR

SEQ ID NO: 1004852 - protein, 41 aa, Homo sapiens
LIASPKHHFVSDVNDAKILNDSRHWFEVNVADLPEEIDISS

SEQ ID NO: 1004853 - protein, 124 aa, Homo sapiens
GWVMSEGLTKEYDRWREEHAKRRAAVEGPRDKKEEKGPPSSPCLQLASTGHVPAASGEPGLSLQYFGGALLLPPFPSTAHSSSSRPWSTLSKHMRGDRMATRTEGVGCHPAGPGQAGHSLGFHA

SEQ ID NO: 1004854 - protein, 152 aa, Homo sapiens
DPGLEMSEENKADSEGGLHQDGDKKGSCERDAHSAPGYDKVNGHLMRWSPLRVPCVLGVSDVLYADPNYLQSVILGGPFDSSQRRSRYIQVGVLSWGVVDVCKNQKRQMQVPAHARDFHINLYQVLPWLKEPLQDADGGKLKGVPWREQGGY

SEQ ID NO: 1004855 - protein, 78 aa, Homo sapiens
EWSGLCITPRVIQRHHSKHSGVPVHVPTIHTVQGRKRSKPPPSQHPACPAKQQPARASGSPFKASPGIQCPHQLEQGG

SEQ ID NO: 1004856 - protein, 39 aa, Homo sapiens
AACTVAWHFLRARGGLPAGTCDDCLTTWAGPVTTCLTDR

SEQ ID NO: 1004857 - protein, 42 aa, Homo sapiens
YSSIGNASVMALKYYIGIDGWKAPSSLINSGLVISYKTEEKP

SEQ ID NO: 1004858 - protein, 43 aa, Homo sapiens
MGSRGSQSGSPLLIAGEMALSVLFCLQCARACLTGNKGDGWYG

SEQ ID NO: 1004859 - protein, 44 aa, Homo sapiens
SSGSPTTLESPLLTVASVDPFEEGRGLGSRTFVIVPSIKYPVLN

SEQ ID NO: 1004860 - protein, 45 aa, Homo sapiens
TLSRHPPKSSSNIGFQGGQKFSIQPSSPIIISTHQPTGIIFQAQH

SEQ ID NO: 1004861 - protein, 41 aa, Homo sapiens
QSQRYEILTTYVYWRNYKKFSIARAKNVLRRILRKRLEGLS

SEQ ID NO: 1004862 - protein, 49 aa, Homo sapiens
RSRGPSPGPPWREPVLRMSASRRARDHLFSLDGRRMSQLAAMCVGYRSS

SEQ ID NO: 1004863 - protein, 61 aa, Homo sapiens
DTTSSWYPRWRTAPPAALHGPAVHMPPLHLHHSGLDLPAGLAEANMVTPGHVDFRSFLMRR

SEQ ID NO: 1004864 - protein, 41 aa, Homo sapiens
NVLRGGWELSCPPIEKICPAGHMQRRVLYYHAEGPGSMYTG

SEQ ID NO: 1004865 - protein, 135 aa, Homo sapiens
LPRKPPVTLAERGELRKSIFSESRKPRVSIMEPGETGRNSYPGAETGLFSRSRSGSEEVLCDSCIGNKQRAVKSGRVCQASFGELHLKPDRGGAAFRDHQWLEAHRGMGGLGASMQGQEAEVSQGAQASGGSQGR

SEQ ID NO: 1004866 - protein, 94 aa, Homo sapiens
LDSPSGLYSGCRQQPRSGPFQHCARLLVAPGSSWLCPVALQWLGSLLGWRQHGLNFSDGLPSSALESRPSQLPRGGGVTQGFLLGGFASNPCRP

SEQ ID NO: 1004867 - protein, 70 aa, Homo sapiens
YEVRALYRLEILPDVDHDLNAAAKYVTGEGAGCCLLGSDVTTTFTWRAPCWKPNMVTQASVGVKKFSHEE

SEQ ID NO: 1004868 - protein, 59 aa, Homo sapiens
IRLAYSGGGSPVPLHPCGELFKLLKEGHLHGHSPANCTHDLYMIMRECWHAVPSQRPTF

SEQ ID NO: 1004869 - protein, 68 aa, Homo sapiens
LLSHDAIKALMATTFLLCTWHPESQCFLQAPPLGEAEDDGGIEGVSSSQCIHHAWCWESILSGAICHW

SEQ ID NO: 1004870 - protein, 120 aa, Homo sapiens
MRGGAVAADGRIEPGDMWGLHYFSLSGPLIFPSSFSIRVASTVGGEVIIYWKSGSTLASDFSPWHTTGRLIFLQDVVSSPFAGYRTLLGVLVLSGLISGRVPKTLESDRVTLLIEPHFPC

SEQ ID NO: 1004871 - protein, 109 aa, Homo sapiens
  misc_feature (98)..(98): Xaa can be any naturally occurring amino acid
RVVTPAGQWISVGTALSLLFFVFFYKNGVSLHHFGNGVAQAEVQGCHLGSRKPLPLRSKRCSGLEPLEKLEWRVPATTPGEIVVFQGREGFHHVGQVXLQLLPSGDPLT

SEQ ID NO: 1004872 - protein, 134 aa, Homo sapiens
  misc_feature (76)..(76): Xaa can be any naturally occurring amino acid
LIQGRNTTSSGAGRRASLAPGTCPPIPGRSWEHITSEYTLQNQDTFSGAVSFLTGRIVYISGAGSLSWCVASGDVXGGTRFSELWAPQDGGVFYGSMAPSRLPTWGHRGLSRYRPQGLNPGEVRLLAESEEVLT

SEQ ID NO: 1004873 - protein, 98 aa, Homo sapiens
  misc_feature (85)..(85): Xaa can be any naturally occurring amino acid
APSGLYSGCSDTLMDLVCPWAALSRRTSAWHTTCSPGMAGLVVSVAAIGAVAQCPTGPAPHLSRWVVQQCHKQGKPLKFAYTRFXTLVLKAQMLQVGG

SEQ ID NO: 1004874 - protein, 215 aa, Homo sapiens
SRVDRFRMFPLFWGKGKYPNPFSPCLYPFSAFLGKGKYPNPFSPCLYPFSAFLGEGQVPLNPFSFTLSGKSRFSGERASTPTPSLLVSTPSLLFWGKGKYPNPFSPCLYPFSAFLGKGKYPNPFSPCLYPFSAFLGEGQVPLKPFSFTLSGKSPFLGEGQVPLNPFSFTLSGKSRLSRGQATPIPYFHTPTSYLCATIPYFCAQPTFPISGGKNP

SEQ ID NO: 1004875 - protein, 66 aa, Homo sapiens
AGHWICVFLMRAGTLGCHVIELLVRKQDSLVVTVAHTPQNSPLSSATSASMPACGGACYGVPGRGR

SEQ ID NO: 1004876 - protein, 30 aa, Homo sapiens
MGQRARWPNAIEVDGRLLLTLASRQEGDPS

SEQ ID NO: 1004877 - protein, 69 aa, Homo sapiens
LGLYQGGSGFSASSGRGRGVGLGRGGGSSSSVKLVSTTSSSRKSFKKLRTCCKSRPSKGSNPAQVDGLF

SEQ ID NO: 1004878 - protein, 115 aa, Homo sapiens
GARFTVGASFSQPDSLLLSGGACKGGVNSGGSAAYQPVVSGVLPVGQPVRPGVLQLNQTVGTNIRPVNQPVRPGASQNTTFLTSGSILRQFIPTGNQVTGIPTYRRAPVSVTLPV

SEQ ID NO: 1004879 - protein, 79 aa, Homo sapiens
MVQPATSSFPCGWGLIQKHLKTRDHNRNRRLMMEQSKKSSLRGARSILNNKLISKKRERYLRGENPFTDSPEGSPRGTE

SEQ ID NO: 1004880 - protein, 77 aa, Homo sapiens
GAKKGHHLCPLLADAPMFVGGVNHEKYDNSLKIISNASCTTNCLAPRAKVIHDNLGISGSDGMAGGHESCHDTKGGT

SEQ ID NO: 1004881 - protein, 152 aa, Homo sapiens
TVVRHQGPAQRCPARWVIRGSRANNDVSISQMMRDVSIQQTNMVPPHVQAMQENSASGNHFSGQGMSYEEAPLRGAPKGNQMSWGQNPGFPVNRDVTLTSPWWVNLWRSDISAGHWGVNNKQNNSKANKAKKKNALWKKKNSRQDLNSQDTR

SEQ ID NO: 1004882 - protein, 121 aa, Homo sapiens
MRRERWERSYPTSLIKNREEPSSRLSEYKDGSLAQELPARQRGMSQSHIGQRSQSRGSTGAGVHLILLETQNGPQPRFLGAGSHTHRLCTGAHSGGLGTRGSCVALSEISVVLTQHNRVRL

SEQ ID NO: 1004883 - protein, 82 aa, Homo sapiens
DSRRTPPRVLRSRTCRDGDDAGDAGVPLLYAGGQGGYDGDDVPRKPCRTTALWVVTAGTLDGLTLLVIFGHQTTTIRSDAVL

SEQ ID NO: 1004884 - protein, 105 aa, Homo sapiens
AFPVSSAELSFNPEGDVCLTNFHQEICFLGQAQWLTLAIEASWEAEVGGSPEVQEFETSLANIGETPSPLNIQKLRRAWWRMPVTPAAWDGQAGDSLELGRRRLQ

SEQ ID NO: 1004885 - protein, 86 aa, Homo sapiens
DKREASKKAIIFSIYQENSGGLVTFSLADLRTFGYEMILSNGEAPAPNDVRQYVVRKPLNKEGKKPRTKAPKIQRLVTPGVRQQGY

SEQ ID NO: 1004886 - protein, 51 aa, Homo sapiens
  misc_feature (21)..(21): Xaa can be any naturally occurring amino acid
MRSTSTTDSPNDTTPLWDATXDAGRLKHLVDTHSGTTTVVYFRVGRTLTTV

SEQ ID NO: 1004887 - protein, 37 aa, Homo sapiens
CSQCRSPGTILKKPSELVDRTRGDGPSDNPGVLLFGY

SEQ ID NO: 1004888 - protein, 65 aa, Homo sapiens
EILDVFHSSKDPFVTQPGYNTGNGFKLPGTSGQQTKCWATNDFEEHGFKADHNRPQTGNSHKGIK

SEQ ID NO: 1004889 - protein, 72 aa, Homo sapiens
TIHSSELSDTFTRKRLLKHSSETPHVAVILSAVKLATKWDSFGISKGIPNCMGTKSVHGILLSLFCSRCFVL

SEQ ID NO: 1004890 - protein, 35 aa, Homo sapiens
EDTAVYTCEVASSSSHWVSAEIYYYYYMDVWGKGT

SEQ ID NO: 1004891 - protein, 34 aa, Homo sapiens
KHRNLNHFVLSPPPAEATMKDALQLPPYMFTWMR

SEQ ID NO: 1004892 - protein, 55 aa, Homo sapiens
CLRHCTVITTDNKVAIGQLELLTQRVPHDICSNLWDGHQFILWVFMTLCIPVTVI

SEQ ID NO: 1004893 - protein, 101 aa, Homo sapiens
LQFPRSVPVARLTITNAPARARRAVRPGRAIYTMYRLCDISPLGEAASSPCPGALTGEEGAPFGNGGLAHHRSLALKEARLMPCLNGTFPIYKEFREFFNI

SEQ ID NO: 1004894 - protein, 54 aa, Homo sapiens
WRAAPHGRTLLFERSRRRVVPSVITSLEATDGCEESITVKHNSTLSAALVPLLG

SEQ ID NO: 1004895 - protein, 174 aa, Homo sapiens
GFRMFPQRRSTSQAMAAGETLLYFLDGMAAGRGAPHFLDGMAAGTRRSSLPRRDGGREEALLIFLDGMADGQRRSSLPRRDGGREEALLTFQTVQPGRGALHIPDDGRPGRDAPQFPDGVASRAERVILSTCGRPREAANNFLMKYWKRQPFSPLLFGIVDHIHQVFQHHESNK

SEQ ID NO: 1004896 - protein, 54 aa, Homo sapiens
MSPAVADRSRRQSSDRRVGRMSLFYGIKTSVCRLQNFLTSTVRFTRGDLHDSLL

SEQ ID NO: 1004897 - protein, 56 aa, Homo sapiens
IPGGCGTEAKEESVCGLSHVISTKQQKHRLCGHGASVSSIITRCTVVVYHDHKLIV

SEQ ID NO: 1004898 - protein, 38 aa, Homo sapiens
MAPHPQSRRSSSRLLLGCHSDRVSLLPPLLIPYRASRL

SEQ ID NO: 1004899 - protein, 40 aa, Homo sapiens
SGRGIAVDTALEWQKIAEELGTSRSAFQVPAENSSRHKQK

SEQ ID NO: 1004900 - protein, 34 aa, Homo sapiens
VTLEDSGTGDCLRDWRLSDGTRRCLRDRGGRRGV

SEQ ID NO: 1004901 - protein, 52 aa, Homo sapiens
LSHACSTFGDLEHYSTGACEALCLRKLLFPAKEGVYRALPCLGELILEPACY

SEQ ID NO: 1004902 - protein, 164 aa, Homo sapiens
MDRDEVVGEPHRARGWRMIPSGCYQCCPQRGPARCPSAVGSRVATHSSWGAASPESPSAGQPRAEPDRNTQKSADSPSAGAGSPAKEAGGAASQEWESYTPGVGPGQTQGCTRWGGADAQQPCSRLLHTAVESPPGTGTVPATSGSYQSPPGKPQSHYGGRAAG

SEQ ID NO: 1004903 - protein, 62 aa, Homo sapiens
PQAFFRVPVKVATLPSVSRAGAPPAAVPIINMIFQLSLLGLDLELGLGELERGNSLSPGAQS

SEQ ID NO: 1004904 - protein, 36 aa, Homo sapiens
MLGGKDQARVIVPIQSIQPGCFRWPGSLSLYFDFLY

SEQ ID NO: 1004905 - protein, 54 aa, Homo sapiens
EDPARSGVLAAPQALEDETTTPARRYFFLLALIYGRVCPGDGEPPTLVLNKVSK

SEQ ID NO: 1004906 - protein, 95 aa, Homo sapiens
QQKPYFMYDRNSTNPNHAAVTPWRHQKRWLPYGYMVNSIICIYNIIRVVLQGSDCLGSRHIGWCHDQFKVLNFYTGIIDLFLFTLLWYSGRRTGG

SEQ ID NO: 1004907 - protein, 51 aa, Homo sapiens
GGVDNHTLIPGPCQRCPEPIKSREKKIVLKGGGWGVSYYASSSEQEQRGAG

SEQ ID NO: 1004908 - protein, 97 aa, Homo sapiens
ARGSPNRVLSPTQQLFYNLDNSLEPQRHRAGGSGSIPFHPQGDDNLTDTSGGSGSLSFPPFSSTLEGMIISKTPPRGCLLTPLSTRQGSDNLKKLRR

SEQ ID NO: 1004909 - protein, 70 aa, Homo sapiens
KWWRRSLYDGSPRRPLYTNRILASGVSISGAHHSLIENNRNQLMQARFITSGGGVSYFTLPTTPQTYLRV

SEQ ID NO: 1004910 - protein, 62 aa, Homo sapiens
TTTSSTLAQPRPKREILINQVGFTRYFFFKHNPTLLEKHKGHESGPHNFSLASRVWYPKTLR

SEQ ID NO: 1004911 - protein, 56 aa, Homo sapiens
IEVIIMVTVEIDHVGFLGVGGERTNADLSIESAQWLPPLVTPVPCPPSELSFNANQ

SEQ ID NO: 1004912 - protein, 40 aa, Homo sapiens
MRCALTAYGRGPGVAPPQGAVLVGFLAPPPGTVARRDGVP

SEQ ID NO: 1004913 - protein, 103 aa, Homo sapiens
KDPSVAPFRWASVKQVGVLLWEPREARCRGVGPDLLHVIPVGDDAVLDRVLQGQDTSLGLSLVAHVGEEFREGRGTCGRSWGSEAPGCSVCNVQGVLPQAGCR

SEQ ID NO: 1004914 - protein, 72 aa, Homo sapiens
SGSLQDVALIQVVAIGLGALPRPLIQYSTVEFSHVLGGGDMWCIGGKRILALGLMKCFFIFNITWMDRIKLG

SEQ ID NO: 1004915 - protein, 108 aa, Homo sapiens
VGPGLRSPQGPADRVVSDHVSRPKTLPLSLAPPAHSSEPRSPPSARPKAAGSAPKAGYSNMVTCLRGTYVPRNECSPKSLSAAIVAMQKLQGYASPGKADADTMKAMR

SEQ ID NO: 1004916 - protein, 162 aa, Homo sapiens
MEELLGVLSVGLAPPCRKREAISSEVRPLVSGPLQVGEDEEAAQEHSEDDEEVGTTQLLHIREAHAHNEIGGPVGASLQGQWQLDVDPGLKSSARINQGMGPGPISKKATKPKMATMLREDIQGSCSSSASAMVMSMAQPGMPARPMRCRVRGPARSTTTSD

SEQ ID NO: 1004917 - protein, 63 aa, Homo sapiens
IPDQPQGLPDEPLKTQPDGTVVIAVRVQGFFPQEPLRVTGSESGRGVTEKKFPPSQDASGDLY

SEQ ID NO: 1004918 - protein, 64 aa, Homo sapiens
MYGGRQFLEEGDQARGSLPAIWEKVVRGVKELDEALTEVRTLLHRALPGFEQILTHVQLEDAPI

SEQ ID NO: 1004919 - protein, 91 aa, Homo sapiens
LQCFLEVISAGIPFGLPFQVSTIFPAVFRANSINSCWSRQAMRALVLALGLAHSPMVSIGLPLRRVHGLHQSRVYQQASASPPREHGSPQV

SEQ ID NO: 1004920 - protein, 44 aa, Homo sapiens
LWAFPQREPVKGLRGSLSLASWGPPGGEGKYFSSNPNHPQHSRQ

SEQ ID NO: 1004921 - protein, 43 aa, Homo sapiens
VRCSTYSVTVGGSIQGNTDSNRVHFSGGETGTSSNLWNAGKGG

SEQ ID NO: 1004922 - protein, 84 aa, Homo sapiens
QGKVIVESQSQGIEDVGVPGIFSFRSSEENLQQLIVLRLLLLQVVLVQGLADHSRSLIWAGHLHRGGGWTIRKKTRERLPLKGA

SEQ ID NO: 1004923 - protein, 38 aa, Homo sapiens
GSGCVGRSRGSLGAPIQGVLGEELVTSSFCHGKNTVPG

SEQ ID NO: 1004924 - protein, 86 aa, Homo sapiens
LGTREVQKARNSKLRVSVTNLQTEQYDPLSGTFTYPTAQCAHTPRQETGGHFSGEAVQPHVQARDGVSLSFSIGVSPSKIARTSPN

SEQ ID NO: 1004925 - protein, 48 aa, Homo sapiens
SPNRHLSSRTPFFVPSKAQQAQQPGSNQQGAFPGHWAFLSFAGTQAGG

SEQ ID NO: 1004926 - protein, 101 aa, Homo sapiens
LGLHSGHGGRVSTSPQHRIKLISGAERMAKDLSHVNGKATPSPLWTQMGNRPTIGFILIRKIPKLSGQDYHEMHVGINSLKASVGTGSREAQQHKSGEGED

SEQ ID NO: 1004927 - protein, 164 aa, Homo sapiens
WALAGNSWWGWEGNHLFLLSLSKEEEARGVKLASRNVESYTRLGNPTRSEDLRDYGPSRDVPAYSQDTFNVHEENNSPFLTITSMHRVMEVSHGGHMAVATTGGLTAHRSCAEGAFLTYAYQRQPDRAISSIRSLKNILPGAAQDAHARDEHGQGFYQPPPYLE

SEQ ID NO: 1004928 - protein, 135 aa, Homo sapiens
MNTYISSGWGSEDSSAHAGIRQEVWALVYGCYTCLGRATSSVRLWDLSIPNRQQVSVSPRGMSSGGGYVSPTTSPLIRLDFNIHQSCLESGSFLWAKSCDYRSDAWTSVSGVQVPWPQMLLYLTEDNACLRRPGR

SEQ ID NO: 1004929 - protein, 52 aa, Homo sapiens
PGSLPGQVGSIYFLLQHHNLRRQRDSIGGERGRLRWWMYGSNKGSRFCLTVW

SEQ ID NO: 1004930 - protein, 74 aa, Homo sapiens
MCRNGKCSVLSQVGMSNSVSPGPASACGEETVRCVEGMWQPGGSSLSEIREAHFPSFVEQTWSTPGMGGGSDED

SEQ ID NO: 1004931 - protein, 79 aa, Homo sapiens
TGYKWVAGGLAETSLNNLGFVAIQKVSFWLRVSGRVFGVDWCKRASGLGMVIMGAHGPFTRKGQSGSQQLAGSPFLALW

SEQ ID NO: 1004932 - protein, 69 aa, Homo sapiens
DGRCLEPDVMGFSQVRVGSPEVPSPSKSLAKEEKTLRAADTQDQGAENQAREKLQGALQIRGDKTPSEG

SEQ ID NO: 1004933 - protein, 92 aa, Homo sapiens
ARLSTPNRPRPPSKISGSARKRIACREGGRITPASSRSYKPVDQTIIFLRITLHEGWSLLLGAGLTNRIKGPHYPISCSLAHCRWSGYLGSY

SEQ ID NO: 1004934 - protein, 45 aa, Homo sapiens
HSRHPILSSPSWPHIHRLSCPLSPPQCPQQHSMGIAGSSTSPSPG

SEQ ID NO: 1004935 - protein, 107 aa, Homo sapiens
AGPVPACSEGGGGVFPEGHVEMSRDWGPGGPVKRVWLRRCIFSSSWLYHKEQGGREPGKQALTFFFFSSSSSGSSRPSWVTETRLFPSNSWSGGTQYSSGGSVIYTR

SEQ ID NO: 1004936 - protein, 63 aa, Homo sapiens
RGSPACFGASGDQGHVERCGVSYLSTCAIAHLHPECQHSLHSHVYSGCESDGVSDGMCSIREG

SEQ ID NO: 1004937 - protein, 36 aa, Homo sapiens
ALRSLSTSPVHISSPPAHLQSTSPRGGHRSSQFVNP

SEQ ID NO: 1004938 - protein, 47 aa, Homo sapiens
MALYLTRRDMHLTTTGTVLTRAHQAWPVSHGSGGREMCALPSRAQLL

SEQ ID NO: 1004939 - protein, 67 aa, Homo sapiens
DTGRKSWFLLVGARIIISYYSTTYIWVQKTIPGGQAWWLTPVIPALGEVKVGGSPEVRSSRPVGPTW

SEQ ID NO: 1004940 - protein, 86 aa, Homo sapiens
SSLQGLPLYFFWLRPRECPTGSVGHCPLHLQQAYQETSMRFLRTYGWPGRLFMQQSHKTRFCLHHAAKHWAAQGVVTLRMGKPLVH

SEQ ID NO: 1004941 - protein, 107 aa, Homo sapiens
FWHKRLARDMTSSGLQPRFIFLVGGELIFLKPKLRKRFWKCLWFLGMVNWSIFSLSSSQQRAVVNFVVASYQNIQRLEHSTQISGARGRLTIGGSKRPTMDLVRVPS

SEQ ID NO: 1004942 - protein, 73 aa, Homo sapiens
YTWHAPKRGQFCIFQWVSTESNRYSLDHISARFTSQVGGSILGISHKYKKKKYGLTRLWYKGMVVLEGNYFMI

SEQ ID NO: 1004943 - protein, 66 aa, Homo sapiens
DERSCEFRRAGAGRGRGPGAAPGPHLPPGGSGPGDPVRIHGNITESYPAVPPIGSGESDDPKWGAV

SEQ ID NO: 1004944 - protein, 106 aa, Homo sapiens
GSLPCDIISGMLRTDTGLEGGGPVDGRTLPGTTPCPHRVNVGCGPAEERVLLTGLHAVADIHCENGKTSVGLEICESPTSDPRLALDLTFQHLLRTSGHPIAFQMA

SEQ ID NO: 1004945 - protein, 127 aa, Homo sapiens
LEIPLPGLYLFTSRPGPRAHKSRRKRSQEGRYGPGAASEWNEEGWTLRMTGPSQIPRGAARRLGSLLPGGACTPTPPATSAPISLHGAQGAPSLPWLRELQRQTLTPCMDVHPREGAQAVPSSSRNR

SEQ ID NO: 1004946 - protein, 32 aa, Homo sapiens
MGGRENSSSGLLTSFSVNVLLRGDNILIFLTE

SEQ ID NO: 1004947 - protein, 82 aa, Homo sapiens
GQALYACGSHLTEKEAGGTDVYVPEQGRVSKARRQWLVSHQTELDYLEVVTAPQGARGWHLSSGPTAPLCAPIEFLVSPTHS

SEQ ID NO: 1004948 - protein, 39 aa, Homo sapiens
MPHRYSNFNFICRRQGLVLVTQAGRRGGVIPAHGNLRLP

SEQ ID NO: 1004949 - protein, 184 aa, Homo sapiens
FGSIKGWELIQGIIIYRGGLLRACTIRAKGMLPDPKNTHIGVSGMIAQTVTAGAGVVSYPFDTVRRRMMMQSGRKGADIMYTGTVDGGRKIFRDEGGKAFFRGAWSNVRRGRGGAFGRVRYDELKKVIYGAAASSTHTHTPGEPRDPRRILKRADHQTFEKSSGLPPSRIRPVHGRGRLYDRGR

SEQ ID NO: 1004950 - protein, 189 aa, Homo sapiens
MTPSGRGVTDDRDKGHTAGRLAVRPYERRFKGALTGIGAVGEEFSKKTGDYPSLSARDIQVLALTYQWEAEWVGVSHLKQEPQKVKVSSSIQHPETPLHMSGSHRPYKPKPPKETEKGHSVGEPENREFSSFMCGRNPWPNIDHDRQERWMDRGEDVPSEEAEEEETGFDDRKDDSDDDGGGWIPPSNI

SEQ ID NO: 1004951 - protein, 73 aa, Homo sapiens
MRLEETHSFNAAVQQVDQPHTKGCAQVTGSTDDVASCPDNGQRHEELIYLRAYPSPYSSCTISTDSTVSGGQL

SEQ ID NO: 1004952 - protein, 108 aa, Homo sapiens
WGSIQRELLWKLLNFSSGLFWSLIFLAFITLKRSKSVIWAFLSRASIFWAHRGAAHLVWMSAFGQAGRTYFGGARCGNWRMKSVSCMHWKGRAGLLTGVQGPSTKARF

SEQ ID NO: 1004953 - protein, 199 aa, Homo sapiens
  misc_feature (19)..(19): Xaa can be any naturally occurring amino acid
FGAPFMGEGDGNGSWMAPXPEARVHLVWPFRRESCMIGNRGDWGRGEKMLRPARNFWMVPLALNQGCLFSCGVYKKVMAQMFPGGGCKHTQDLLQVKTQCQCPSLWEGGNTVKGWFGSIVGTGREKVAGSNRLGSVRRTFQACRDFLIEEADVEGEVKVQVIDSSIFSDGYRVRTVDLLQGFKVCIKRWVSRQVSCTAP

SEQ ID NO: 1004954 - protein, 106 aa, Homo sapiens
  misc_feature (39)..(39): Xaa can be any naturally occurring amino acid
  misc_feature (65)..(65): Xaa can be any naturally occurring amino acid
  misc_feature (103)..(103): Xaa can be any naturally occurring amino acid
RERREAGEGGRKKARGGLQAGAGGPRRAATHKYYGEFSXIPELRVCLVAKHSLSLRCLCLPSCPXLPHLPEGTPIGRSIQWHAGRPMGSAHPEFYIQDNLVLXSRT

SEQ ID NO: 1004955 - protein, 175 aa, Homo sapiens
GSPFGVYHGVTDTRVADSGNIREKDRCCVSVCQGYSALRAQETFMQGDQGRRFYNFLRADNMKKIILSHRQALWGDHVKKPQSRKDTDWSRLYTETSLMQMDDKVMRKFQGYNSLKEYYEEESCMRYLHRIYVPLMRVNAADDPWVHESLLTIPKSLSEKRENVRLVLPLWGLHS

SEQ ID NO: 1004956 - protein, 123 aa, Homo sapiens
LALHTGDYRPRGPVEDAADGLRLAERHGKGAPPPAFSREKIHRDIRGANLLLTLQGDVKRADLGVSGELTASVAKRRSCMGTPQGALMLMSKSSFQPPKRRDKTRGTQNFHHFLKRARNGSPK

SEQ ID NO: 1004957 - protein, 41 aa, Homo sapiens
ARSLPGSLSTFNKSKSGSGMGHLILRARHLGPTPQGWSNGD

SEQ ID NO: 1004958 - protein, 76 aa, Homo sapiens
PTCTGWRYLYPVGRTLTVMWYRSGSGTGGYSVSTGTFGDSAEADGCSGQGTSCNPRKQPGVPAIAATSHWQASSGA

SEQ ID NO: 1004959 - protein, 36 aa, Homo sapiens
DLEAPDEINKLSMLENELVMLKRDVDAAYMSKVESL

SEQ ID NO: 1004960 - protein, 62 aa, Homo sapiens
GGRGPGGHLSLLTREPGNWVPKVLHSGSLICGSVQGWSRQQDPANHQPRPPTGTQTSSPKQS

SEQ ID NO: 1004961 - protein, 102 aa, Homo sapiens
  misc_feature (96)..(96): Xaa can be any naturally occurring amino acid
GRGAAQQEVSFFMSQHDGLSSSSCPIRGNIRFSQKHEPYGEWCVPDDLRWNSYLPKLSPFHPRGVEKLPSTKSIPSAKRVGDHGYRGILSRTQQAXNPIYVY

SEQ ID NO: 1004962 - protein, 155 aa, Homo sapiens
CAPCMGSHAHSIMVSATLLLKPRESQDGPVLVLLISIPGISQCLEPRSAVHTGSSLEVRGRSEEVPGPALAASLQGQIQPDRSRKVTQTLCWASMCLRWMACFQWCLAAPDWESFHGVTVHEPNQIRFLPPGSQSPRSASPPGNGDMCQPSNQTP

SEQ ID NO: 1004963 - protein, 54 aa, Homo sapiens
MRLTISYLRVRKLLDAGDWAMDDDMKAQMNGFYWKALDGLVMVLTDDGDVIYDS

SEQ ID NO: 1004964 - protein, 45 aa, Homo sapiens
VRRGAAQCPPWSLGITFRSGGQREAEASINLKAINTCSLNGAQGV

SEQ ID NO: 1004965 - protein, 247 aa, Homo sapiens
  misc_feature (1)..(1): Xaa can be any naturally occurring amino acid
  misc_feature (12)..(12): Xaa can be any naturally occurring amino acid
  misc_feature (61)..(61): Xaa can be any naturally occurring amino acid
  misc_feature (74)..(74): Xaa can be any naturally occurring amino acid
  misc_feature (86)..(86): Xaa can be any naturally occurring amino acid
  misc_feature (104)..(104): Xaa can be any naturally occurring amino acid
XVGILSHHGPSXIPEHNITVPFLLVGKTTEPLISLNKSHLQLRALSYIWQRKPRETVQYHXTRKEQAVRVFPFXGQLPRISEGFSXQPCLYVRMEGVDPTTLSXVPKLIFVFTPEARKEMWTLILILHMWKEKVHPCDITMSRREGYTMNVEIKCKDRTGSITLLTPNQTNIINFYEVELNECVQCEFDFINTGKFTFSFQAQVCGSKNLVEVEVIEGACSAGIWSISHQRGSKCVMREWSVCRRFW

SEQ ID NO: 1004966 - protein, 193 aa, Homo sapiens
MASGLVLPEETALTGWGHSRQQQEKCEWKGVVGAGELLEEDSEGHAVGTEQVPRQTRGGPWRQREQQAGDVGRGCRGTRVTWDVAETDLCRTPGNLTEKLGGDSDCHAEEQAEGEGRQGHFRNVERGMPEGLEWDTEQADAEGEASGGPWLKTGWGDAGPQTSGEETLRGPVLGDLGRASPKMLVASSGDDSQ

SEQ ID NO: 1004967 - protein, 35 aa, Homo sapiens
  misc_feature (2)..(2): Xaa can be any naturally occurring amino acid
PXLGIMATASYDTRVYIWDPHNGDILMELGHLLPP

SEQ ID NO: 1004968 - protein, 154 aa, Homo sapiens
CGDGGLTWWGWAANPRDWAQQVRQEPGGMGNPSGDSSASSPADPGAPGSSSKWNSSNTSILGRRSLYGHGDQILPSQQHQTEDSLLFPFGWWGVLGLDLSELITVTEDQIQVLVKSLEGANEDPAVRRDAPHPVINMVQHLAALAHRQGGGSDG

SEQ ID NO: 1004969 - protein, 163 aa, Homo sapiens
MTSPACEGKDYICPENEDLRSWTAVDTAAQITQCKWEAAREAGAVESLTVEGTCVEWLRRYLGEREGDAAARGTPKDKVTHHPVSDHEATLRCWALGFSAVGRSHLTWQGDGEDQTQDTELVETRPAGDGTFQKWAAVVVPSGEEERYRCHVQQEGLPEPLSL

SEQ ID NO: 1004970 - protein, 146 aa, Homo sapiens
  misc_feature (119)..(119): Xaa can be any naturally occurring amino acid
STAANSSEHKERGDAGQRWWESSPLVRNPGSPLVQGGSQQALGLSPMHTHGFLQAIPTLQKKTSQCKIGMAGDLGTPVVTGQPLGLRVHTLPRGGAGAPILAHTRGSPSPLILTESSVXRTSWCTHGAVSPGIQGGPSELELKGLT

SEQ ID NO: 1004971 - protein, 52 aa, Homo sapiens
MVCKGSSSSPEPGPSIFHGFTVWSSPTVKKEVPQKRVHIPRTKPSGAGMVRI

SEQ ID NO: 1004972 - protein, 93 aa, Homo sapiens
VLVVRGLLVPHGSLDATVLLAQGCRGATGRDPLVLLVLLVPLAPLALLASVVLVVTLTGPGDPDGPHRTGTPYCLCRPVRLSPPCTTGGLGVR

SEQ ID NO: 1004973 - protein, 35 aa, Homo sapiens
MRWHWLQHGRSPRAATCCSSSCRSRKNFGCCLSRM

SEQ ID NO: 1004974 - protein, 72 aa, Homo sapiens
GRGGLSTSREKPGKETDPSAPSWKYKDWKKVRADGLVVVLLWATKEVTSDDRPYKMYSWDKEVQFVQQKGKR

SEQ ID NO: 1004975 - protein, 35 aa, Homo sapiens
ADGNQIQGVVRGNVLVLIRDVAGNLLKSLNGLVDQ

SEQ ID NO: 1004976 - protein, 108 aa, Homo sapiens
  misc_feature (73)..(73): Xaa can be any naturally occurring amino acid
GPRWMSPEASDNSRYTGWIEGFPTTTTTTTEKPHCGFYSPHTYYPPGLDSPSFIHVRQRGQSYCCTRLAKQLXKGSRTLEWAFHISLFGPLIFTVQIDMVQLPLLKAT

SEQ ID NO: 1004977 - protein, 146 aa, Homo sapiens
  misc_feature (99)..(99): Xaa can be any naturally occurring amino acid
RGGSSHSKAKRLPNTLFYVPVIHIVYFTFFPKYYRMEKRTFKNTRTLRKVKKANFIWNNHQIKNYLWRRDRGAQAGNPSTWGGRGEADGLSPGVRGQPXQQSETSSLQKTNREVRREDGWSPGGHEGNKLSSCHGTPNGTEGGRPR

SEQ ID NO: 1004978 - protein, 172 aa, Homo sapiens
QTRDVRGSEVTGGGGEGSQSLRVGAAGFECLGVGHVKFPTPQVTLFQKPVDIPVSVGSPGLNVDPLSPTSILGLSSSGRGRSGSHHLVAGVCESKAEFGSGWEQKKELDTIYKAQVGCGRAGGLSCACGLWAANPFLAVLSPLFCGENQEKESPEILKGPAQQCMAQQHIVT

SEQ ID NO: 1004979 - protein, 35 aa, Homo sapiens
LQVDCVCTRAVHASCVQVPSTREHRADLQISLSWS

SEQ ID NO: 1004980 - protein, 38 aa, Homo sapiens
SGRDSAQGGLASGVHAILRPQPPKELVEPDSSEFKSWA

SEQ ID NO: 1004981 - protein, 44 aa, Homo sapiens
CPRGYDRHPPQLSVSYHEQQSDPIGGLRLRSSQHKPAGGSSSRR

SEQ ID NO: 1004982 - protein, 56 aa, Homo sapiens
MNRQAGPPPLPGGLRENRFTAPFPYLCLLESPGFTMDDFASASTDLIFHSATPSQT

SEQ ID NO: 1004983 - protein, 36 aa, Homo sapiens
LVLRDQDGHWSCLVLGVIIWMVPRGVSMGEEDGLAH

SEQ ID NO: 1004984 - protein, 52 aa, Homo sapiens
YGTSAGLLVEGLKKLTSQWRKAEGQAYHSGKSRSKGEGGSRFFKQPALSTNS

SEQ ID NO: 1004985 - protein, 67 aa, Homo sapiens
RQAIEENKQLQYNGQKRNWTHEWDAHKENREARLAAKREGWREKDQHMEDSGKTNESKDPADETEAD

SEQ ID NO: 1004986 - protein, 30 aa, Homo sapiens
MGSSASATVRRSHFSRYSMMLTLSAELLAH

SEQ ID NO: 1004987 - protein, 32 aa, Homo sapiens
MIPETTVVLRQYSTRSKQWFIQAGYPKHWCSC

SEQ ID NO: 1004988 - protein, 130 aa, Homo sapiens
GLLGEHCEWWLLRVCGDPLGRYCVLRTDQERIVLFSPGTCTLLLRAVTCSRGQADSILDPQYVHGLWGSLSLAAQVEGRVGGHRPVFGLLQEVLQALQPNIAWPGTRRSDVPDHPFTGTVPCRTPRVTRS

SEQ ID NO: 1004989 - protein, 69 aa, Homo sapiens
GEDSGTGTVMMTSSDDEQEKKPEAPKQLKKKWRRMNRFTVAELKQLGARPDVVEIWKIKKLIKSWEAAR

SEQ ID NO: 1004990 - protein, 33 aa, Homo sapiens
MTKGLEGGKTGTGRAACNVSAVQAEHIQRLSTR

SEQ ID NO: 1004991 - protein, 108 aa, Homo sapiens
PSPALLCSTCFRPGGRGRPSSVSPESGRFCRGRACTCTGGKWRWHTHRVTFMLLRAAVDHTIGENLLFLQSCVSCHTCTLPVLRPRLVCRALSSGYSPVMEPSPNRDK

SEQ ID NO: 1004992 - protein, 39 aa, Homo sapiens
RLRTGLKTIAECLQIAHQCCQGSSNSYAIEKKDELSPPA

SEQ ID NO: 1004993 - protein, 31 aa, Homo sapiens
  misc_feature (1)..(1): Xaa can be any naturally occurring amino acid
XVSKVLFQTGRAWAYTTAPGALKDALPCRTA

SEQ ID NO: 1004994 - protein, 94 aa, Homo sapiens
QVPARLPARDTTLKDAQRSSCLRSSTTSRPTVDFQLRLLHQSLAHALAPALPPSSSRSGSSSTSRISSSYLALLVSLLTFLFRLQHPYYTVTRS

SEQ ID NO: 1004995 - protein, 40 aa, Homo sapiens
VLLTEELMQSRKAWAYTGPTAGGREATRPAFPSIVLVLPH

SEQ ID NO: 1004996 - protein, 140 aa, Homo sapiens
VGGWNGRRVWHTSSMGLGMVAVPVWPASIPRVPAPFPVSLLRPVSLLRPVSLLRARVSALSRVSSPSLCLCSVPRVSAPLPCQPPSSCPFALPFHGDLARVEAFDQAGHADLVLGHLLPAWGPRCHLWFSGLSFGFGDSL

SEQ ID NO: 1004997 - protein, 155 aa, Homo sapiens
AAARGREPPPLPLPPIRAPSHTLAPCGTSGFCEEDGACVGEGWLGERDTEGMPALTCPCRCVPCFRPLPPHLLHGSLGSIQRPISFLFRSSSQSGSAPFLTILCPADLCRYPPAFRIQKDSVTQLRPVLESRLLLPLPQDLAEALASGVILCQLA

SEQ ID NO: 1004998 - protein, 57 aa, Homo sapiens
VHHSVQLRPPTHMPLALRQAAFIERLADRTGPEGLEPPGAEVLLRQTTGCTSFPCRT

SEQ ID NO: 1004999 - protein, 70 aa, Homo sapiens
MGVLGQSERGGPVGPARALTLTSSHSAPERPEGNRRVTPAWSAELENMGLRFELRVHDVLFLYATHFFLR

SEQ ID NO: 1005000 - protein, 75 aa, Homo sapiens
SPSSLVQKRHHTRLFCTDMNERVGKSGNIPAGTTVTLKITHPTEFDFYLCSPAGLLGTSRPSLYHVLWDDYRFSS

SEQ ID NO: 1005001 - protein, 99 aa, Homo sapiens
TRAGNGALPGNHSNVVLQLAWSSTTLHEKDQTWLEQLPRIGNLHGLGCCTLNAVTCSSVLQLLIALPGMAGGPGDKLCSLDPVAAGPASRSSILRNPSS

SEQ ID NO: 1005002 - protein, 146 aa, Homo sapiens
TGPRAAAHGMTRRAPWRNGDGTKSNNRGALPAMPSSHDRHASCRVSPPTSMDVPSPVQRWRFCTRHEPLKDYYTLMDFAYVYPWRRNGPLPLQYRVQPACKPLTLSSAPTPSEGIHTSGASECESVRHEAPSPATLPATSSSLPIP

SEQ ID NO: 1005003 - protein, 102 aa, Homo sapiens
MRDHFRFTDRACSCSEPVNLVGTADAGLYLTCSEANRAFVAPPGQVILRSSTPQQKGRVSSVYKPLEWSRDSGGYLMAQHLLVVPKQKSVQNLRPSVKYKSH

SEQ ID NO: 1005004 - protein, 47 aa, Homo sapiens
AGTGIGTLQEQANDGTPYPSGTASLWETQPDARPTGPRAEEERLLPA

SEQ ID NO: 1005005 - protein, 67 aa, Homo sapiens
EYRREPPRPGGIYHSLIIHLWKDLGVNFQFGAMKNKTAVNMPFYISASHGTHDPVSLYPGHHWVLAR

SEQ ID NO: 1005006 - protein, 68 aa, Homo sapiens
YSGQYTSRVSNRAGAINATYRWIDPADRSQARAHRPHPVNTQVGTGKRLLPQTKALSWEQQEKYSLDP

SEQ ID NO: 1005007 - protein, 67 aa, Homo sapiens
ISPDAEAIIQEVLTENSMDSVDCCCSLKKTESFQNAQAGSNPKKVDLYHLERSQVPTALSSVGYIGI

SEQ ID NO: 1005008 - protein, 38 aa, Homo sapiens
MICTPLSPRTLTAFSSSVSQSDISLLRLLAGPDASSCP

SEQ ID NO: 1005009 - protein, 80 aa, Homo sapiens
  misc_feature (35)..(35): Xaa can be any naturally occurring amino acid
  misc_feature (69)..(69): Xaa can be any naturally occurring amino acid
WEFQREMCHSAPMQPGCGATGTGVWEERLDEGLQXVVAAPETLRRPGTDMLCELKTPVALEFSPRGKPXTTGRRNFENED

SEQ ID NO: 1005010 - protein, 69 aa, Homo sapiens
STRPLWKQKACRGGESHKPPPPGLTGPLAVPQGGYPDFTAQELQPMSPRAGDWRGGEQLREFWVLNPEG

SEQ ID NO: 1005011 - protein, 51 aa, Homo sapiens
HTENAGAFGPPRPPGPPDPTDSPSAGFDFSFLPRPPQEKAHDCVRYYRADD

SEQ ID NO: 1005012 - protein, 97 aa, Homo sapiens
QQSSNKSPPSTLQQLRRRRHQDRRRLKTDAMTRITRWQPLMVPSKRQEAEPLHQETNQASGSGKKKASSKANKRPENVYATSTPLFMHTHLYSIRMA

SEQ ID NO: 1005013 - protein, 72 aa, Homo sapiens
QSRKVWTTLHHLNAPVCVLERSLQKPPNFNSLCRGMMTTASGASCLRKLNAVSRTYSFVQPKPDDSQIGPWH

SEQ ID NO: 1005014 - protein, 35 aa, Homo sapiens
LRSARVLRSVCFLAPPPNQEAQEAVTRLRPSTSAL

SEQ ID NO: 1005015 - protein, 34 aa, Homo sapiens
LAWYTRRAMLGCIYNTTELVMMQESSPALEDTWR

SEQ ID NO: 1005016 - protein, 45 aa, Homo sapiens
HTSFTASDSQATSCVHSTTLFGGLQTQHGRGSRSSQSSHPWSISC

SEQ ID NO: 1005017 - protein, 34 aa, Homo sapiens
  misc_feature (1)..(1): Xaa can be any naturally occurring amino acid
XFSFHVPSTASVHSPRQHIISSSSNGPHLQGAIS

SEQ ID NO: 1005018 - protein, 45 aa, Homo sapiens
  misc_feature (3)..(3): Xaa can be any naturally occurring amino acid
  misc_feature (21)..(21): Xaa can be any naturally occurring amino acid
  misc_feature (27)..(27): Xaa can be any naturally occurring amino acid
SPXPVCARGRYVTDQTKPTTXDLFRRXCNLELTSTFTHSFNRRTP

SEQ ID NO: 1005019 - protein, 70 aa, Homo sapiens
MTDSPTTTRCGCYSTRRTGGHWNVDTPLQDVCNNLTRPTLPYALTTGLALDASVPTTPCRRRHVDDVDHA

SEQ ID NO: 1005020 - protein, 38 aa, Homo sapiens
  misc_feature (3)..(3): Xaa can be any naturally occurring amino acid
MGXALNTLGHTTNHSWGVDARERNTGRGATPGRGATPG

SEQ ID NO: 1005021 - protein, 50 aa, Homo sapiens
WKGSLACCPAGSAGVQSQFRESSTSGVHAILGPKPPEQGGTTGTGEVEGT

SEQ ID NO: 1005022 - protein, 48 aa, Homo sapiens
PRDNIESSTSAPVTHVHIPVVEDGKMDRQMFLATWKDIPNWNDGYVAP

SEQ ID NO: 1005023 - protein, 47 aa, Homo sapiens
  misc_feature (42)..(42): Xaa can be any naturally occurring amino acid
CVCGTLLYDGTYTGCDLRTVDVLYSTDDVTTLLTDDTVGYYXTRRRS

SEQ ID NO: 1005024 - protein, 43 aa, Homo sapiens
VSRGSLYSRVLRWWVSMDPILGGGTNTLWLMLLRTLWLLSTPC

SEQ ID NO: 1005025 - protein, 60 aa, Homo sapiens
GRSTTDSPMLGYLRVLGLSPPQTTGRTYLYYVSFYAFYGNHGRLTRLTNSTVYATYKNSD

SEQ ID NO: 1005026 - protein, 65 aa, Homo sapiens
ITVPKPSLNSLRATESTAAPEQQQRRARQYSQQWCSTPLWRRTETSPSHTRLGKAYLIVGSHVLQ

SEQ ID NO: 1005027 - protein, 38 aa, Homo sapiens
MIQYYQNDIPTEEGTIRGPLPHVPFKLPHNHGALRPTR

SEQ ID NO: 1005028 - protein, 48 aa, Homo sapiens
GLPSKTPGLSARSQLESCGCPQRPGLSRVWPHKVSEAPAHWPHRAAAS

SEQ ID NO: 1005029 - protein, 52 aa, Homo sapiens
KGRCLALRDRSMQGPQPTFPMQCSGKRKNGFVVLKGRTYEIVEMSTYEDGQT

SEQ ID NO: 1005030 - protein, 146 aa, Homo sapiens
IDISIIWVHLCQLVLMGESIYSSACRRGSVCLSDVCNPSELPSTLPGTVAHCLTLGEATAGGLPDAQEFETSLGNMDETPISTKIQTTRIWDLAACTYESQLLLTADGQRTRLKPRTADGCTDNPDGKRYARDAKDRTRRHSTPGV

SEQ ID NO: 1005031 - protein, 67 aa, Homo sapiens
AHGSPALKQPRLQAHASMSREFLVFLVEMGFHQVGQEGLTSLDLVICPCRLPKGLGYTGMSYRAQPT

SEQ ID NO: 1005032 - protein, 65 aa, Homo sapiens
MSVPLMPAHCTHCTPSRGDTSETLSQKQNKTKNQKLRDQNGRLFGLYMLGRAGYGWEESLIPFYI

SEQ ID NO: 1005033 - protein, 67 aa, Homo sapiens
LQQQHHTHHTPTRPTSSHGHHIIPSSHQQCQQQHRAVSNTGSTQSIGTNNRLHISAHSALHQHSQVH

SEQ ID NO: 1005034 - protein, 90 aa, Homo sapiens
RSKMWDTGVARAGPDKFLIREKRNGEPHGPKLFPFGNPHPESRFSPKDPLVVPAQSGRYPELWVQSCPERAPGRGTLAAKGRVRTPGTGL

SEQ ID NO: 1005035 - protein, 51 aa, Homo sapiens
RKKYLGIQLRRAMKDIYKENWKTRLKEIRDGRVQWLRPVIPALGRGWGVQV

SEQ ID NO: 1005036 - protein, 95 aa, Homo sapiens
GTRLRRTSSPPPPHRSAGSTSASSWMIQEGSSSSSMEARLPLGVAGLLAPAVQVQAHEQIKLLLVAGAIIWVDGSLSSGHRRLPPSSWLLVAGVP

SEQ ID NO: 1005037 - protein, 111 aa, Homo sapiens
LERWALNDHGLDCLPWGSCTRVTVGADDLHELLAIDTWANVAIWWLGLNGHWWVFSFCYSCISTLLVLGSRFHGHLVTGGTSSSVTAFFTARISLEFYSLPHVTHRVKLHL

SEQ ID NO: 1005038 - protein, 46 aa, Homo sapiens
AKPRVRDGPRMHKLRQQQAGLALGPCGASELQADSPAYTNHILRRP

SEQ ID NO: 1005039 - protein, 46 aa, Homo sapiens
MSRLQEVHNNSVDDRYSQLNETYVINNHEVLCHNRMKRCAFCPVLS

SEQ ID NO: 1005040 - protein, 67 aa, Homo sapiens
ARGGSGTVGTGVRAGRGRPTLADTGPSRFCPEPPPGPWYSSCSPFDVSGDSAGLLLPRRAGSLDAGT

SEQ ID NO: 1005041 - protein, 48 aa, Homo sapiens
GEDTRRQRWAQRFKLARLAAPILGGRGTSARSSSEQTVLLMNLQNSAR

SEQ ID NO: 1005042 - protein, 66 aa, Homo sapiens
IIQQVFDTGSIYNPEVLDITEDTLHSRFLEGARNVASVCLQMGYPTVASVPHSIINGIPHEHLALP

SEQ ID NO: 1005043 - protein, 55 aa, Homo sapiens
MVPSVCFLIPPPNKDAIELASRVEQSYQKVMALSHQLHVTTTSLISWNYLRKDLD

SEQ ID NO: 1005044 - protein, 65 aa, Homo sapiens
RGNNLLKHPSSITDTIYGTSMHILTQKARDSMLSSEISLQDSCHSRVRYPIGLSLSEMRHPKVQV

SEQ ID NO: 1005045 - protein, 47 aa, Homo sapiens
NLESNMRLYIYGLAMVPDLFPKRSLRKLSRLPTDYHTWKKQQPPGYN

SEQ ID NO: 1005046 - protein, 96 aa, Homo sapiens
RTSLMLVCGTEKMEGGICASVPEHREGRPLRGTTGFLRGVHSLMRGWCIATSVSPPRTLGARGCGGEELLIPVPDTVGTHSWASIDEDYSAQQDTE

SEQ ID NO: 1005047 - protein, 67 aa, Homo sapiens
MPLSNPQPIAFIFLAICSSREYMSGQKSRLEILASDVVEKYTTIFLSVRSCRVWCQDRSGVMGYDSR

SEQ ID NO: 1005048 - protein, 73 aa, Homo sapiens
CWASRGIIAIFTFVEPVSAFVRRNVAVYYVSYASSVTYLILACWQGPRRRFPWNIILLSLFTFAMGFMTSFRD

SEQ ID NO: 1005049 - protein, 51 aa, Homo sapiens
MSGICESNATTCDIYAGNYDSGFRSQLDFPLVQLLCDYASDKTNAILARRD

SEQ ID NO: 1005050 - protein, 117 aa, Homo sapiens
MWAYGHFLQRHLLCALYGYGRQFLFYNNFLFIPSFILQLSYSSLRWWATRAYPNSSVCKAGTTLDRMPSHHRAHSPPTHTQTATRHQQTSPAHLWGVGGNQSAQKALRPGGRLDGAQ

SEQ ID NO: 1005051 - protein, 105 aa, Homo sapiens
MLAEMWSKQKPFFIGAGNAEWYSYFGGQWWWSLIILNILLEYEPATLLPSIYTDGLRNFCPQRNLQRARLWQLSLSLPKTWKEPRYPSINVLLHSGGCNKIPYTA

SEQ ID NO: 1005052 - protein, 37 aa, Homo sapiens
QTRIFWIGLAEQVLGHCGSQMPHGSSGKAVTWSVAQL

SEQ ID NO: 1005053 - protein, 118 aa, Homo sapiens
HLNLCWDRNRMMASAETPQQGGSSNKVTTSSRKATRDIPNRRASPLLLKEGHKDHPNREAHPRPPRGRPQGQPNRDGISKVLPQLLLESPRDHLPKGAAHKDLHRGSLLSNLGYTDRK

SEQ ID NO: 1005054 - protein, 75 aa, Homo sapiens
DSEDLQTPQSPPPGSRDSLPRFLSSWNYRRVSPSPAKFCDLVEMGFCHVGQASLELLTSSDLPALRSQSAGIMGM

SEQ ID NO: 1005055 - protein, 80 aa, Homo sapiens
MRPRKITLSREYQSEKSMSIVGWNLPSPIGCHEAKPPGRSQISGRLLRSARSYSSGSADMPRIPKRWASLNSEVNKHPLK

SEQ ID NO: 1005056 - protein, 32 aa, Homo sapiens
MGFCHVGQASLELLTSSDLPALRSQSAGIMGM

SEQ ID NO: 1005057 - protein, 148 aa, Homo sapiens
YNSRAQDFDKLAKLVSWAQVTPPTLVSQSARITGLNHPTRPNLIITGSRLDYKQTFYSASWTTPSGLFFPSPGSKWAFEKNPGGAPPSSSIPPFSLPTPGNQLSDLRIPAVFWTQVTSQLKYRSNMNLMTNHSAPPGYAPKPTKPNRL

SEQ ID NO: 1005058 - protein, 37 aa, Homo sapiens
ERIPRSKCPLSWEGLSSSTITNNTDSNRPLGLLSRAY

SEQ ID NO: 1005059 - protein, 35 aa, Homo sapiens
SSPISHLVELNTMLALPKRKKERLGTLCPELRTSE

SEQ ID NO: 1005060 - protein, 61 aa, Homo sapiens
  misc_feature (5)..(5): Xaa can be any naturally occurring amino acid
PIITXQCLGKRARGNVFMYHAPGRTTGMAGNPNYPYEFSGKVPTVCIPPGLTLYPVLVERS

SEQ ID NO: 1005061 - protein, 36 aa, Homo sapiens
HIRCGYCQLVHADTTYRAILALLNLTGCQVVTVAVG

SEQ ID NO: 1005062 - protein, 39 aa, Homo sapiens
MTSARPLLDKLVSLCCPGPPGEAWASHTGSLRAAIPHSC

SEQ ID NO: 1005063 - protein, 42 aa, Homo sapiens
GGVEQSYGSRYAERTRDKLKESLKEVQLERDQYAEQIKRRAG

SEQ ID NO: 1005064 - protein, 101 aa, Homo sapiens
KLQEEIQLHGRSRDHFGCRRSGRGCSYSSIDIDLERRIESLTEEIRSFKKVHARGSIRAAARLQLQRTGRSQVAAWTCLKPSTSTACPSRASSWRSSHAAP

SEQ ID NO: 1005065 - protein, 68 aa, Homo sapiens
  misc_feature (3)..(3): Xaa can be any naturally occurring amino acid
  misc_feature (13)..(13): Xaa can be any naturally occurring amino acid
RSXTRNLGAHGVXPKTGLATVREKTLDKTRCTGHPLRFKPRCARARGLKEMPCTPKPPRSPHDFRNSI

SEQ ID NO: 1005066 - protein, 32 aa, Homo sapiens
MHRNPPGEPEPRLRCPEVAPGQTGATQSRAAP

SEQ ID NO: 1005067 - protein, 54 aa, Homo sapiens
MTCSTRPVGTLKRESTPASVVAQSRFAFFCFWDVPWEARAAMLGPVVACKARGP

SEQ ID NO: 1005068 - protein, 83 aa, Homo sapiens
LRFLVLNFLEHGSEPGHERTGIRPGSWPSGTTWLSISLLDLLCATSSLPHCLLDLTDQLLPYGGAPPLGLLRGIVHACSPAPA

SEQ ID NO: 1005069 - protein, 45 aa, Homo sapiens
RLRQECHTTEKRLSAGQAQGSVAFDYRKRNILQAGLTGCEKNIYS

SEQ ID NO: 1005070 - protein, 35 aa, Homo sapiens
LHIRLLGVASPGLSPGCLPLCRIRKRAWTAQCLTP

SEQ ID NO: 1005071 - protein, 51 aa, Homo sapiens
GGCGTDAEHEFHTKTTSGYAGRLSSAYVGPRIAPASATCLALQPLGSGVGL

SEQ ID NO: 1005072 - protein, 73 aa, Homo sapiens
TGGCQPMNALESYAFNMKSAVEDEGLKVLDHARPTRRRCWTSVKSVISCLDANTFAYKDDFEHERKELSPLRL

SEQ ID NO: 1005073 - protein, 109 aa, Homo sapiens
MVSLLPGSDPFPRHGGLALQPGPPRLHPFPFHPSLGPLRSDNVYRWQLGQPLRPDMSYAERLAAERQHAKWVAALAPDPLARLRMLAVTPHQHQHSPIHSHLHLPQPDA

SEQ ID NO: 1005074 - protein, 136 aa, Homo sapiens
RENTHRGIYLLETCSGESARSRHALFSSQTCLMSKYVKRSLTVPGEHRPRYCCDQVVTLEPDLERLPGGCPGNSPMNPEALFTAGGDAVTYGSKQPSRLYDERCETADAFALWHVGSLTVALQAAAGPASNPTGHP

SEQ ID NO: 1005075 - protein, 76 aa, Homo sapiens
AAAAGKAHTGTAPWPGDIQNAKWACWLTTPPRSTKALLDAFEVCSVELLLARASELQRRAMPLSVSAAAVLYYHQA

SEQ ID NO: 1005076 - protein, 68 aa, Homo sapiens
  misc_feature (45)..(45): Xaa can be any naturally occurring amino acid
  misc_feature (56)..(56): Xaa can be any naturally occurring amino acid
AHRALRQLEIRRAAGALLRRPALRKLLSERTACYSGALIEQEKAXAEQLFQDELAXAQQLREEQQRQQ

SEQ ID NO: 1005077 - protein, 38 aa, Homo sapiens
MCADWNSGLNIRKVVTVRHQAVTRKKDNRFAVAVDSEG

SEQ ID NO: 1005078 - protein, 35 aa, Homo sapiens
RFYYLLTEGRGGFRGAAVSHSCSLLPQVPGLLQWI

SEQ ID NO: 1005079 - protein, 62 aa, Homo sapiens
  misc_feature (40)..(40): Xaa can be any naturally occurring amino acid
RRPRWRLPEVAVEATTPAAGGGVGLGSGLSVGGLWLQCKXVGLRAGRWALRSRGGSMLQRSN

SEQ ID NO: 1005080 - protein, 132 aa, Homo sapiens
RGGHGNKRKQPARSSPCTGGLQLTELDSLQVEHALAVARIQGIERQDLYTSVAWSPACRVPCLITSQMHWLDESLEVKGAAMLASPSFTMCVLSSSRSRSTWLRPSLWEVGCSSDGREPRPLLGCPGRGSHA

SEQ ID NO: 1005081 - protein, 48 aa, Homo sapiens
  misc_feature (22)..(22): Xaa can be any naturally occurring amino acid
YVCSRVAATESVHQQTGREVHXRGSALLLVLIFLLQFIYMIFPLNPDL

SEQ ID NO: 1005082 - protein, 50 aa, Homo sapiens
YWFSCLSLIIPNKMRMQSVGDYENDCAGEASGGLGGEMAVTTMNPRYSGT

SEQ ID NO: 1005083 - protein, 81 aa, Homo sapiens
  misc_feature (1)..(1): Xaa can be any naturally occurring amino acid
XVLVDTRRLCTTTTEIILTRDYWSFPVHCDDYPSKRIYAIEYGYRSSSVTIQSHPMWRFLQTIHIERYGNSRSAPPTREPG

SEQ ID NO: 1005084 - protein, 38 aa, Homo sapiens
FSSTLRIRVLFSCAWVHEAFAELQTDINELTNHIDEVQ

SEQ ID NO: 1005085 - protein, 49 aa, Homo sapiens
MVIKLAKELPPPSEEIKTGEDEDEEDNDALLKENESPDVRRDKPVTREP

SEQ ID NO: 1005086 - protein, 68 aa, Homo sapiens
YRIFTSSREVLHAIAARTEAAIRERSAIAYGDSNQCSPIQGAADLMGKPSYPNLSPEHRIITILAQST

SEQ ID NO: 1005087 - protein, 47 aa, Homo sapiens
MRSDGIYCCCCEIVLLKLNEICVCVCVCVCVCVCVCVCVRALRNKLG

SEQ ID NO: 1005088 - protein, 105 aa, Homo sapiens
RILRDIVEGHTQVTRGIVDDTPRFTRNVVKGTPRFTRNVVEGHTPGSHTHASWNDTPRVHTEPSWKGHTRCSHWNACGKHTPQVHTGIVLESTENQFTPGTEARN

SEQ ID NO: 1005089 - protein, 131 aa, Homo sapiens
  misc_feature (1)..(1): Xaa can be any naturally occurring amino acid
  misc_feature (83)..(83): Xaa can be any naturally occurring amino acid
XQDGVLREESGDQAGVQWHDLGLLQPLCSRFKLFSRLSLPSSWDYRCPPPRLANFCIFSRDKVLPCWPGWFKLLTSGDLPASXSLSAGIAGVSHRALPRILTVKCCCFNLEILRTEWDEFVLIFTSVFFSF

SEQ ID NO: 1005090 - protein, 48 aa, Homo sapiens
TLRGSRCLSVQRGPHNLEADLIGGLNHNILIHGLVAGGVGEGPVGYRA

SEQ ID NO: 1005091 - protein, 115 aa, Homo sapiens
DLEDPTRVFSKPGDTFPVFPGSFRTMTLRMSTGSVTRQNTSHLGLVDRSPMTETEIMWSGQIKKKPTRRSDVHDIGRAGDMDTSNTLCQLQLAGPGGIEGISPGQQDQFFLGKNG

SEQ ID NO: 1005092 - protein, 34 aa, Homo sapiens
MTRGVSQLSQEAAVIVQCTPQSSVAVLKVRRGMW

SEQ ID NO: 1005093 - protein, 36 aa, Homo sapiens
QKWSCYRHGPSPGESSVPEKLAGKADYHVTPACSWD

SEQ ID NO: 1005094 - protein, 32 aa, Homo sapiens
MAHHLALQCSGRGHAPFSNREGTHHMTTTPTT

SEQ ID NO: 1005095 - protein, 60 aa, Homo sapiens
IRCAQYKKDGARLSPSGVCVAEDGENTPPQPSPYMENANVLARNASICQQNGIVPIVAPE

SEQ ID NO: 1005096 - protein, 80 aa, Homo sapiens
FSPEKAPFLWPEVSPMALSWMANLRMMVQIIPRVIFAVAVHNLYLPRVETMHDAICWAIQVHALCSHVLICVHSHSSPCS

SEQ ID NO: 1005097 - protein, 47 aa, Homo sapiens
PPPSRAEAEVGCVKIQLHPQPTARAEEGYGWWEVYWDVNTGFTRVFG

SEQ ID NO: 1005098 - protein, 87 aa, Homo sapiens
MVLYLEPGIIGYVDTTHGKCLRIARGVQPWVICDGPGFLMNWRKYDLVHMEHVSMSLKTMVERGHTQSKTKTRMKLALRGGSGYTSV

SEQ ID NO: 1005099 - protein, 34 aa, Homo sapiens
VLTGITPVRNFIYEGWVHCLDSFMCLSFAGTHAY

SEQ ID NO: 1005100 - protein, 141 aa, Homo sapiens
GLYLQPDSSLLGDENSVQFCYGGERDESLLGKRKASTGGVAGFEKSSQGLPSFPELIILVSPYQTPEEEEILNKKGSKKIQKKYDEGKKNGKISSLREEQFQQGKFLGEKAVGWEGGSRRDGVCRGTFPWSQFLGLASHAV

SEQ ID NO: 1005101 - protein, 149 aa, Homo sapiens
AGLYLIAIFQHQAMLTSSTRIPDVNMRHVLVWGEGQPIEYGKKKLNYRPYNHQHEYFFRMGPPLLIPMYFQYQIIMTMIVHKNGVDLGRGRSYYIGFFITYIPFNGIGGALFFLNFIRFLGEPRVGVVTQMNHIVREMDQEAYRDGYSS

SEQ ID NO: 1005102 - protein, 96 aa, Homo sapiens
GSEGRRLSQRRSLPESLYDAELSQMQTHISDSSVVLSMDTNRNRDLDSIIAEVTAQYEEIGSKKPGSRGSAFWLQQRLRVRLGLLECILQPFQFVL

SEQ ID NO: 1005103 - protein, 121 aa, Homo sapiens
GKALTSVSSSSSVDTSAFFLAGHSSSSWFSFSSRIACGSVRAYTSIAARRSFLAWRELGQPIRQGLFPLQQLLLWGLEPLGIGFYPILAILVRGSIRTRPFHKSRGIRLLGRTAQSLPFGR

SEQ ID NO: 1005104 - protein, 78 aa, Homo sapiens
HLKSGGRTCSCTEVLCAGSGEARRQMLAQIPRPERWVFIRDKSTDKPPGGGVKIKKSISKSLAGSLIKNLSGRLNDSR

SEQ ID NO: 1005105 - protein, 58 aa, Homo sapiens
RGAPTRRMTLPRLEDDENNEQRTDDIRWRGPRIPESQTKEHYRTSCGLQGYLDIKRLA

SEQ ID NO: 1005106 - protein, 84 aa, Homo sapiens
HQVNGGHVTADHMSLPDDNGAYRCGPPLHSDREYTVTSRREGYVRRAGEGTIGDFKAYARAGVRLDEEAEDDQPLGGVLLSRRH

SEQ ID NO: 1005107 - protein, 41 aa, Homo sapiens
AQFISTHYDNLKEQCLLSFANAIVDSRVSLSLLNGRDENNE

SEQ ID NO: 1005108 - protein, 41 aa, Homo sapiens
LHMVSRTKSLLTTGPTILQPYPSIFTSHRGSSGTERPLLFQ

SEQ ID NO: 1005109 - protein, 51 aa, Homo sapiens
TAPPPISSIADSTMSLKIRNCHAQHGKTSLNLGISIVGQSNDRGDERHLDW

SEQ ID NO: 1005110 - protein, 107 aa, Homo sapiens
GELVIHCKSFMMAEGHWNARAPVHGPASCTCEQADVISIQILIPDSPRLERVKVGSLLQCWGLRSRHGPGSRPHHRSGVLSPWKPSEKEDHDVGLLLMALRNLGLGH

SEQ ID NO: 1005111 - protein, 31 aa, Homo sapiens
MDLQLSCSDTGGLNCIDEQSSGSPHSLESAG

SEQ ID NO: 1005112 - protein, 44 aa, Homo sapiens
VKAPVCPSSMWPPWTLVPQYQEFGFDVGPVCFLLTPSIPTWLLP

SEQ ID NO: 1005113 - protein, 148 aa, Homo sapiens
MGCEMSPGNWPGTLACLCVVVFPTVYVLSAESAFNCDMCSLQHDVSAAAHCLAVPGLMVKIELSCHMNTVWARKIRNTCGLGPIYLVPHWHTLSRPGKMPGFCCVLYCAAFLGRAVEKVDVGQVLTRRGVSGVALGPFLLYVGWRWLF

SEQ ID NO: 1005114 - protein, 39 aa, Homo sapiens
  misc_feature (4)..(4): Xaa can be any naturally occurring amino acid
WREXSSYPFINPKACATGFFLISDVATDGKSLCNLILSH

SEQ ID NO: 1005115 - protein, 34 aa, Homo sapiens
SETPSQTKSRTKTNINVGTEKGPPFKQRAGVGTE

SEQ ID NO: 1005116 - protein, 42 aa, Homo sapiens
  misc_feature (7)..(7): Xaa can be any naturally occurring amino acid
MSACYVXAMWDAMSADVCDVYIRWGSSEYYRLSRQSRSRCSR

SEQ ID NO: 1005117 - protein, 106 aa, Homo sapiens
SSRILSAAFFFVTMPAGKRRSSLPRWDGGRAETLLTFQTAQPGRGAPYVPDDGRPGRDAPHFPDGVAAMQRLQSRHFEEAKAGGWEVEVVRAEITPLHSSLGTIEH

SEQ ID NO: 1005118 - protein, 49 aa, Homo sapiens
  misc_feature (19)..(19): Xaa can be any naturally occurring amino acid
WCSTGSEYWSRVVVAIRKXRQKDGLSLELEISLGNTAEDPFLQSKTKHH

SEQ ID NO: 1005119 - protein, 194 aa, Homo sapiens
SEPDVPEISIVITNVDLRSCIVCWLGSDRYPTGYFEYGTHSNPFPPRSNRSRYKASSWLCVGGTDQPIHSQPFGGARLSLVAEERMRSDSVRHLKVIIKRPRLSSAPKPDGSKGDIKSPTNTSLLRKLISVMLRCFAGIEECAEFEGVFVGYSNAAAECREKRHGLSRWGLPLQSLVLLAPLQKANGCAGTVAL

SEQ ID NO: 1005120 - protein, 119 aa, Homo sapiens
TRRCWGLFDGWSPLFGEPLPKDCSQNSSRILFLGQSFGMLQTFVSYTRDLTGALTLDVGYLGTLLFLTVHDVYFSLTHDTPNAVGLSTTFTFPTLTSSLPLCGLDGWTQLPWTYGDSVR

SEQ ID NO: 1005121 - protein, 57 aa, Homo sapiens
AKWTHWRATDGCRPVKRLPQSGFQICIMRVTIVPFARALRVLRVARGTWRDWMKNEG

SEQ ID NO: 1005122 - protein, 90 aa, Homo sapiens
MSNTLEQKVATFTYTVISSPNGDSSQSSMGHEDEGWTTVGIVIMVVVCCVVGTSWIGVMVINHHETAHLHDYSITNREELNLAADIPSYL

SEQ ID NO: 1005123 - protein, 60 aa, Homo sapiens
IALALVPIRPGPGSGITWRLSPCNSATAGGLPPGAPSGTLLSLMVWLPLAPGRLGAPLTS

SEQ ID NO: 1005124 - protein, 42 aa, Homo sapiens
DYELELVPIRPGHKGWDSETAMNLCELWQPASTKVLCCYFKE

SEQ ID NO: 1005125 - protein, 55 aa, Homo sapiens
YRSIWRNCAMRQIDIDACCHVVLLGCDTTLIRHTPQPSPSSSFNEGLLTVCGHMC

SEQ ID NO: 1005126 - protein, 59 aa, Homo sapiens
IELSWYPHQEDSGWCFYCPDCKARNELMFVDMAGGAVELVQPERASPPHKVVATARALE

SEQ ID NO: 1005127 - protein, 65 aa, Homo sapiens
LHIESSLYHRRCFTRCAARPDGLAGAVIGVGDRADAYSYSHAPHALPEGSVWQLASETAGRPMGG

SEQ ID NO: 1005128 - protein, 148 aa, Homo sapiens
LYWYPMRHFHLPLVPQAPQGRYIRFILGTALLCRVNIILFPYSQSANQMPERLPQSPTLPRHPGAYFILFYFILFWRQSLSWSPRRECKGVSSAHGNLGLPGSSHSPASASQEAGSTGACHQAGPIFLVFEVETGFGQVGQVGLELLT

SEQ ID NO: 1005129 - protein, 42 aa, Homo sapiens
MIRIELVPIRPGHLSWKMAVKALVTEHKAVFLTITSKNSFYF

SEQ ID NO: 1005130 - protein, 76 aa, Homo sapiens
EYLQYSPVSVDIWIGTDSNRDAPWDFQLAQGVDGAGANDPQRVGNLYFLDKFLHVGGRIHADTDKLDLRVFFLQRV

SEQ ID NO: 1005131 - protein, 76 aa, Homo sapiens
KCGERRARAAEPWMSPRDIFPTFISSQGGGRASGLGALLNLGAGEHLFQAGFMVGSEFSERHSSREGSGHGLHSEG

SEQ ID NO: 1005132 - protein, 34 aa, Homo sapiens
MVMALCGGHVFKQGGGSAGMGSSGVVLIRQCIGE

SEQ ID NO: 1005133 - protein, 91 aa, Homo sapiens
SALTLYFLPKSRTKRRTSVSPYLFNTLRGGLVSVIQQGTEVRGIQIAMCADSFRVSTSVDEGYSRPGNALYRGVSERVSPEEVGVCVCALR

SEQ ID NO: 1005134 - protein, 112 aa, Homo sapiens
WRRGSQKGEGLDITGHHIRVISKIFITGTTQKGNGYIACRDELSATGNMAADGMTTGLEFSDEQPYSRTEAGLANSKDLTCIKVSMVLAFKSCTVHLEENIPTHKTENTIGW

SEQ ID NO: 1005135 - protein, 146 aa, Homo sapiens
VSEEPAQPTPSSWTSSLQEGGKIRVWWSKLPSLWDFRLATPADGDQAQVTFSPDGDRCRRLCAYVKKASLPGNRQLYPHLPATSRVGEGRDFRSMSNYSSSPPKSFQSPVGYRAHSVCPTVLWQTEPSVFMGRFKNTKGSCQHLSL

SEQ ID NO: 1005136 - protein, 169 aa, Homo sapiens
MGNIYVEAVLSADPRRGEVGQELVHEVEALVWEQSPEALGEVVVGVLAEGHLLEWWELAVAGPDFLTRGPQILEHLVDRIDFCLPGEQRLLSQQLPEDASQGPYVHGRGVFLGTKQQLWGAEPQGHHERGVGLQRGSVLPRQTEVTHLEDAGVAQKQVGRLEVTVQDPV

SEQ ID NO: 1005137 - protein, 37 aa, Homo sapiens
MLGGLQTHRGLKSMIKEVDEDFDGKLSFREFLLIFHK

SEQ ID NO: 1005138 - protein, 40 aa, Homo sapiens
MAEPVLLGLDLTPRGAGLRMYSFEKLIIIIMIALTSSLVI

SEQ ID NO: 1005139 - protein, 38 aa, Homo sapiens
RPRSAEGADPRPAMDGVEYSDKRFTAKARNTFHGWPRE

SEQ ID NO: 1005140 - protein, 43 aa, Homo sapiens
METEISGVVVYQWNRLSVGSSHPSGDFIMWSSLSVKPSPMGEE

SEQ ID NO: 1005141 - protein, 155 aa, Homo sapiens
MAYEFTVAYLFLRVPLSLLALLSDQGPSGASGPAGPRGPPGSAVAPGKDGLNRSPIAPIGPPGPQRRTLVIAGPVGPPGPPGPPEPPGPSQRWFRIQLPAPDTIKRSAHDGGRYYLWLMMPMWFVTVTSSVDTTLKSLSQQIENIRSPEGSRKTP

SEQ ID NO: 1005142 - protein, 34 aa, Homo sapiens
MIEDRTGWSPYSWGTYRSPMIDPQSLCLLIGRCL

SEQ ID NO: 1005143 - protein, 38 aa, Homo sapiens
LEVSKHASGLDEHIAEVKGQYEEIASAVGVRRASSWYL

SEQ ID NO: 1005144 - protein, 143 aa, Homo sapiens
VYRIFNTQSHLHLVTRSHPAKLRTAPAAYLPDRACLLLTPRDTPCREALLCKGRGLWGEGNLSQPLAYLLYIQEDAGDWNPGVAHPSLCLLHPVPCRGDAQVHWVSFEKIMGPTPWVLGESMKDTLTEPLVWICPSARRGKEV

SEQ ID NO: 1005145 - protein, 32 aa, Homo sapiens
MFSCHPNRQEVLSLKGNEARWGIRSIISWFHV

SEQ ID NO: 1005146 - protein, 88 aa, Homo sapiens
DLEDLQTRIWMYSNLLSLAELTGIKWRSTILEGMGTVDTIISAPAQDDPIHVNVSIPVICKLTCFVYGVVYVPPDWEELWIFWWGDEP

SEQ ID NO: 1005147 - protein, 38 aa, Homo sapiens
HLTICAPFSPAIGLYSLGMCSRLFSRCMEIRGSFCPVG

SEQ ID NO: 1005148 - protein, 37 aa, Homo sapiens
MTIAVKVPIEMVINTNKEAHGTKYLCIMNPDQIKYET

SEQ ID NO: 1005149 - protein, 65 aa, Homo sapiens
MTSYQIFYAVRRTRRHQGTTNEVQFGASISLPGVLIQGVPKPERAGVGCSIMGKAVGVRPADGRV

SEQ ID NO: 1005150 - protein, 41 aa, Homo sapiens
PHTELCHAGLPPLKAGPGPRPRSPRVYGSVVIVPLQNKDCS

SEQ ID NO: 1005151 - protein, 75 aa, Homo sapiens
MHQCDPVESDESAPMLGSSLDQIPFKDLWPDDSYGFPLLLQKEEIPRGTSQFAGSGTPFLWTTQLRGWLDTGHSW

SEQ ID NO: 1005152 - protein, 106 aa, Homo sapiens
  misc_feature (12)..(12): Xaa can be any naturally occurring amino acid
MSSRSLQLCFLXFKQVLYVSPPSSWDYRRLPPHSANFVFLERRGFTHVGQAGLELLTSGDLPASASQSAGITGVNHCAKPSPGFHGVLTRCLHRGSPALCPAIALR

SEQ ID NO: 1005153 - protein, 53 aa, Homo sapiens
MHAWSPRYSVMLPCRDSTDIWDSKNAVDTELHNLCIFGGYSIAQNCAHASLKL

SEQ ID NO: 1005154 - protein, 43 aa, Homo sapiens
TIAWLENLSSSGRSPWHPQRLLVHSTQVPTSMSTCSTIIADFP

SEQ ID NO: 1005155 - protein, 39 aa, Homo sapiens
STFCLAYHQLMSRRKSKQALRDYKKVQIQLENLESRRST

SEQ ID NO: 1005156 - protein, 50 aa, Homo sapiens
PDTTDHSGSPLCRTPGHLDDNGRTFDALTAHPCVLTDRKRLTTATVACTV

SEQ ID NO: 1005157 - protein, 46 aa, Homo sapiens
  misc_feature (4)..(4): Xaa can be any naturally occurring amino acid
VTLXIASCSTDASLVSSAAPLQGCCEMEFQERTSGVLDPFLSSIIF

SEQ ID NO: 1005158 - protein, 67 aa, Homo sapiens
CGLMAPHLDSDGALTVHAGLLTPVTVPAPWGFTDYPGMLTWTDTRDGRADWSLLTGYPDARHFVTHC

SEQ ID NO: 1005159 - protein, 48 aa, Homo sapiens
  misc_feature (42)..(42): Xaa can be any naturally occurring amino acid
SHDHRLKNKRAKMNQCNRYTKNNNYLLIGKGKVYFLPKLEAXCVMGRV

SEQ ID NO: 1005160 - protein, 44 aa, Homo sapiens
MPACYATGRDSRSTTAVITTDQTKSVRLVLGYGRGVYIDHLLVI

SEQ ID NO: 1005161 - protein, 52 aa, Homo sapiens
  misc_feature (4)..(4): Xaa can be any naturally occurring amino acid
QVQXSGPISSCGPELMCGRDTQLLHLGHIGQHIAAYGEDSSRSAFTFIPPVT

SEQ ID NO: 1005162 - protein, 32 aa, Homo sapiens
HSPPLVVPDTPRHLVLSHRRKRGGTRDELAEL

SEQ ID NO: 1005163 - protein, 35 aa, Homo sapiens
RAAAVALDGSRLTRLRSVVVGRLVLCRVRRSTFVL

SEQ ID NO: 1005164 - protein, 95 aa, Homo sapiens
PRQRPRCLLRQDVTYRPCIGSWGPPSIGGLVPVIWVSDQVLRVTGYLAAGSGYGTAVQEHEDASVCRVVTVLPLAPVLQSLVYGQVDARIGGGME

SEQ ID NO: 1005165 - protein, 37 aa, Homo sapiens
  misc_feature (15)..(15): Xaa can be any naturally occurring amino acid
  misc_feature (26)..(26): Xaa can be any naturally occurring amino acid
MTICSPLSQPMVPAXDSLLYKGSFYXVPHVSEIMGYR

SEQ ID NO: 1005166 - protein, 53 aa, Homo sapiens
EIESRGLLLPQTLGKSQKPQTRRHSIPEPSLTAGPDTHRHRQKTLLRPPEQKV

SEQ ID NO: 1005167 - protein, 115 aa, Homo sapiens
PPFHYDDQPSSISTWVTLQLLLFKIRLVGHCDRCLLAAAVVCATQARVSGDCFALEPASGFPLQWLCYCVDCILDFMWSVDSKTIIQTSFLYICLGEERCFSVYFSRTFKKYFYG

SEQ ID NO: 1005168 - protein, 48 aa, Homo sapiens
RRPFCSASTFCSWYRTIVILIIFSCPLPVADDDADDDVDTKSRRGYRA

SEQ ID NO: 1005169 - protein, 34 aa, Homo sapiens
MGGEADILEPVVGEVARMTERGKNQSTVKHAYKF

SEQ ID NO: 1005170 - protein, 35 aa, Homo sapiens
NCWPECNGYSPGYYGQHIAANTKATNRFFECRKLL

SEQ ID NO: 1005171 - protein, 93 aa, Homo sapiens
DLEDPGYTCTGLTYQTGIKIGGGVPSEQHPPSEQYMLRLHQSKRTTILNGSNNWSKENKSPQEYQRNPILASISTIGLPPSRWDQDIPRVQPL

SEQ ID NO: 1005172 - protein, 87 aa, Homo sapiens
EVGSALTFHPQGQQGGVTEGSAISPQGIWLPSALGASCMVFHSKVSSLNVVCSVLTAATFSPPKVFHPWQAQSWQPTPIIVVGAEQQ

SEQ ID NO: 1005173 - protein, 39 aa, Homo sapiens
MTGGKVLSSVGPNLLVTKELGAAQGPSLGSALNKWFGYG

SEQ ID NO: 1005174 - protein, 63 aa, Homo sapiens
HNIASGTHVDEDWVYQFQLLVVLTPDHTPPECGQNSLICSKNDSCRVTLNNISTMHTLKCSML

SEQ ID NO: 1005175 - protein, 107 aa, Homo sapiens
SHKLQCNSRGGSCTGSGTLDGFQVGHPPLLKSKRKCGVTGCFLLFKPCTLLWRVKSRACGGRWHNSDTSSSCSQSPAVIRTQVDEAVAVLTKPTKLRQAAPESSQQC

SEQ ID NO: 1005176 - protein, 47 aa, Homo sapiens
  misc_feature (13)..(13): Xaa can be any naturally occurring amino acid
GRSRGPPLTTGTXKRYSLDFYVVIGFYLVIGSLKRLFFKKIKSILTL

SEQ ID NO: 1005177 - protein, 47 aa, Homo sapiens
PTCTGMLHDGQLLPSWFLIPGPAAQYSKGGAGHAFSVNIHGGIFIGI

SEQ ID NO: 1005178 - protein, 77 aa, Homo sapiens
MWPGASVSGSSAGGSSAGKYRVTARERALLSSCQYADSQNPPETYNAPTESSITQQQLKRQWHLNLEHFGQFLKKTR

SEQ ID NO: 1005179 - protein, 63 aa, Homo sapiens
GLGRFGLRDSRATLLYSLTGSVSFFFFPGRRPGSGFGSQSVYSLHLWGSRVLSPILTLSQRVR

SEQ ID NO: 1005180 - protein, 83 aa, Homo sapiens
NALLLCVAQCAMPAPFFLCPSHAGPSIVTSAAQAGHPLPSHAVCGWALLYSVFMAHLFTLGWVGSGCTGYRGGYIFSTANINH

SEQ ID NO: 1005181 - protein, 39 aa, Homo sapiens
SELQLAPVLASGGSGPTPLTFHEAHGLTCCNKLLTNTGP

SEQ ID NO: 1005182 - protein, 32 aa, Homo sapiens
MLYNKVLTYNMQTGGFLLGPFQYVPIRQTRPY

SEQ ID NO: 1005183 - protein, 52 aa, Homo sapiens
QRSTPETNLLLQHILRWRPDLIQTEEVTCLKKEETAMLIPNAIQICTESRRS

SEQ ID NO: 1005184 - protein, 105 aa, Homo sapiens
MDATDGLRGPNPTPGSDRYRDLAGGTGRSAKEQVLRKGTENLQRAQAEVLQSVRELSRSRRLYGQRERVWALAQEKAADVQARLNRSDHGIFHSRTSLQKLSTKL

SEQ ID NO: 1005185 - protein, 161 aa, Homo sapiens
TQCTWLEPQNVPPLAEVPVIPEMGPPWGPQGWLLPPLERGGGSMAPGMRRGWPPLHPLKSSGRALQRTLMFLRGHRPGNFPWPGLSLKEAAPEAGMRSVPRARGTGGRTYQRGRAVGSVVLSCILETHFAESHALALRVAMPLLGPIFDRGHPGGGGDLLS

SEQ ID NO: 1005186 - protein, 55 aa, Homo sapiens
NIQDYGKYQELVLKTGKFSYYPKTYVMGNKFKVHRFTYTLSSPLKSMIEAVHVGS

SEQ ID NO: 1005187 - protein, 74 aa, Homo sapiens
KRSPVTLAYEERAGQRRGDTGLAATASTTSPGGTHPGDQAIMVNDNSDYGSYNGIKLRLIIGIFNLMGGGSGNF

SEQ ID NO: 1005188 - protein, 53 aa, Homo sapiens
KGTYAIMSLNPSNNSQSRCATASYARYGNEAAHDDVISPRSSSIVTASWYRTL

SEQ ID NO: 1005189 - protein, 134 aa, Homo sapiens
MNGLTKMLGISMRLDGRGNGTDVPNVGITIMTERSAANIEKVSERYKSYSPYDMWESIRKEVKGDLENCYLKRSQCTQNTRLYRADRLYRLHEGQGDREIGSLIRIMVSRSEGDVKKLRSDFKRTYGKSLYYYI

SEQ ID NO: 1005190 - protein, 50 aa, Homo sapiens
MEGVLTEGWGEEDCQLRGILLEIILFPFGFIGCMALRKRRCPNLWSQLLL

SEQ ID NO: 1005191 - protein, 67 aa, Homo sapiens
MSSVSRVHTLLLEVGAVWGFIAFAYSVKSRDREDGGQDVTGGPVPMPPRANCLQHLGPVFLVFFHNR

SEQ ID NO: 1005192 - protein, 37 aa, Homo sapiens
RSQHARLVDVLLKTAHARNRTPLHFCKRVKEAAYSMY

SEQ ID NO: 1005193 - protein, 36 aa, Homo sapiens
MGDAPCVLTIHVFGPHSTAVASPPTSLARTLFPAQC

SEQ ID NO: 1005194 - protein, 195 aa, Homo sapiens
MGLVGSVAGLGAAGWHGPQYSRVPQRGYGLPWDVLLFPHFDHSSVYSPLCLSRSDTLSSRLPTCFTRISSQGVLVAMNPHQLHVVACFAAVYCEAALLAYVGLAQPQALGHHLAGVSRPRTRGPMLGGTGGLGQRVYKPDDVIVEAVVADETGACDFGLEGAAPNVVGAAVLDGDEVAARCHGGIGDAVALRALL

SEQ ID NO: 1005195 - protein, 191 aa, Homo sapiens
LSTFEQKRNEEGSEVERGPRCVRPGRRWRVSSSACATPCCVCCPAILIEEAVVAESRVFYLTDEEVINIRQLAEVVTGDDKKRIIDSARSVYQEAMDISKKEMPPTNPIRLGLALNFSVFHYEIANSPEEAISLAKTTFDEAMADLHTLSEDSYKDSTLIMQLLRDNLTLWTGDNAGEEGGEAPQETQKFF

SEQ ID NO: 1005196 - protein, 92 aa, Homo sapiens
GGGPVVNWPAGRRGAGLSPLIPLVLSGEEGALVLLVLLMLLFIAGLMVLVDSVVWSVCLVGDEREASLVFLAPLVNLANKVPLQQVVNVVPL

SEQ ID NO: 1005197 - protein, 34 aa, Homo sapiens
LWKMGTTCVQEWPGGTNRTSITSCDLRRTSVALI

SEQ ID NO: 1005198 - protein, 185 aa, Homo sapiens
GETIIQGFGWLSERCAQYYEGRYADFTSGVVCCKLGNTPPQSLAIMENAIVLGSYACICQYNGIVPIVVACMILPDGDHDLKRCQYVTDERCWLLSTEALIDHHFYLEGTLFKPNMVTPGHACTQKFSHEEIGMATVTALRRTVPPAVTGITFLSGGQSEEEASINLNAINKCPLLKPCGLNFSY

SEQ ID NO: 1005199 - protein, 38 aa, Homo sapiens
LRTYWIERTGIMNVLMRNVTGMRNVTGTFLIPVTYLIP

SEQ ID NO: 1005200 - protein, 56 aa, Homo sapiens
MQSTDAEVAARHGCSIPQVLITVPNSSFSALASFSPFSPNDFPLSIVAIFMSRSTH

SEQ ID NO: 1005201 - protein, 45 aa, Homo sapiens
ALSRLPHGCSIPPGKQHHFNQGSKQRQVQQHRQQAGGKSYGALQV

SEQ ID NO: 1005202 - protein, 98 aa, Homo sapiens
SVPCAGEDGGCWPESGDEWVWVWGVGAVLSVATLSSPRRKLFRPVEERRADGSLLLLQGLLRDALVFLLLQLFWFCPLVSFLGVVVVIRVLVAPLFFA

SEQ ID NO: 1005203 - protein, 56 aa, Homo sapiens
PPDSVRKTGDTRQVRPLWIDGQDGKVISSRELVIQTTRWGLMYPSPGLFPTQPSSP

SEQ ID NO: 1005204 - protein, 74 aa, Homo sapiens
RSVPPGPDFSYGLSPVASALKAWGWEEGEPEGCAVRSMSMLSPGQQPCLSRKATPSGQAGAAASESLFVSNHAY

SEQ ID NO: 1005205 - protein, 78 aa, Homo sapiens
  misc_feature (50)..(50): Xaa can be any naturally occurring amino acid
  misc_feature (56)..(56): Xaa can be any naturally occurring amino acid
  misc_feature (59)..(59): Xaa can be any naturally occurring amino acid
  misc_feature (71)..(71): Xaa can be any naturally occurring amino acid
VPTFVAGEVARRQVDIYVREERCYPEFHIQIQAWHWQFLQWMPNGPMGHXLPVAWXDIXSAAWGSAATLSXYPSSPCP

SEQ ID NO: 1005206 - protein, 159 aa, Homo sapiens
SAYWSASCDFQYNSHCGQCFAPILMTSWSLYYMFSSYTFKYRTFTPECANGTSKFMEMNGRSHFFLSLVRRNSISALICNTFMPAMRLIFHMIGILADLVLDLPLHADHLHPACVQCGLGSSSRSSEPASESLKLYLMTTFTSILLLTTFRTSGISRNG

SEQ ID NO: 1005207 - protein, 72 aa, Homo sapiens
  misc_feature (66)..(66): Xaa can be any naturally occurring amino acid
DRVWLAEPLSGGGPPEQSAPSAWGGANGLVNNLTAVIYNPPAYVGLSGVMSNVSAECSPLPHAQPXFPMPSV

SEQ ID NO: 1005208 - protein, 91 aa, Homo sapiens
GSWVLWHVGSWMKRWEGCTGVSGAEWPCPVCAQGDNGSVSSHVVLCASSVPERPCCTLLQPAPPCFSSGLPLWVDLSMSLILHVHATACAT

SEQ ID NO: 1005209 - protein, 70 aa, Homo sapiens
PERGSRRAWDVLVRLAFDHHLCLLLVVLYLVRLAVEPVGHVLQQDLLVVVLDLMNPHHEHVVACYADVYC

SEQ ID NO: 1005210 - protein, 78 aa, Homo sapiens
  misc_feature (31)..(31): Xaa can be any naturally occurring amino acid
MSSWGIRRTRTGGTRYRICWKSVDPETVPLXNSFLYKPTIKNRPEERRGGRRPEGIGELGWIPVMGSSAGWAQTDCGV

SEQ ID NO: 1005211 - protein, 53 aa, Homo sapiens
  misc_feature (40)..(40): Xaa can be any naturally occurring amino acid
YTLLWSAVLLSTSQLGYRRHISQYLCILVRRIHHVGRLVXTPDSVITCSDSRS

SEQ ID NO: 1005212 - protein, 84 aa, Homo sapiens
CTICPHNLQHGPVPWAHSRACRQVSSMSPCSCKTHVHGQPWQLAWLACSSYAYGGFPFIAQPSCRVPVYLVCRQHSSLVCCKIH

SEQ ID NO: 1005213 - protein, 173 aa, Homo sapiens
GPVSVGCSGIARRIEIDYSPRIPNSMNSRIHETETYCHVVQHRTKYNAVILAVLGIRLSVGSRIGVKPLFACHDPRGSEGRYISRKEETSEPTLFLLLTDDQDVELGSLTGHEQNEKDYGTWGGHLHQCLCDYTHVLAVTVLHAHREKYVHNHNVYNQQRELFFPLVAGMHEQ

SEQ ID NO: 1005214 - protein, 39 aa, Homo sapiens
MSWYPPFSHAQTDRTHASSRNFVTKRAQYPLANPVFDDR

SEQ ID NO: 1005215 - protein, 58 aa, Homo sapiens
MHFGPDDSINLELTLGTCVIVTDALSQEPVSDLPGKHGRVLAFVVPNLLHHLGGWHLG

SEQ ID NO: 1005216 - protein, 154 aa, Homo sapiens
  misc_feature (76)..(76): Xaa can be any naturally occurring amino acid
  misc_feature (86)..(86): Xaa can be any naturally occurring amino acid
  misc_feature (143)..(143): Xaa can be any naturally occurring amino acid
RCMVDGTTFPVATTSLGSDAAFTSALVAAAMDLAASGISLLEVQGTHLPPLGLAPGLQLALRFFALAASIGWLQLXQRAHSQTMTXWWSSGVYTHSVPFHALQTAWTELSRRNHATRILNSSCQHARFKLLGYGFSQGQHVHXSTQFQVSHCTP

SEQ ID NO: 1005217 - protein, 107 aa, Homo sapiens
STYRIHPVQSITSMHASTYQPIDSPIHPSHACHQSIHPSSYLAIIYHLFKHPSHPYIHLSIHSSIYVPIIYHLFTHPSIHLIHASIYPSIHLPTYPSSNIYSAIHPS

SEQ ID NO: 1005218 - protein, 113 aa, Homo sapiens
  misc_feature (81)..(81): Xaa can be any naturally occurring amino acid
MRDNCTYGSHRYWDHSAISASVPSVLPSSATMISQPVHNADSRLRSSGSSTRRFSHSFRHGMTQVTQASEGTLAAAVPQTXSTGNALVRTCCPWGSGPGIGYAWCSEIGMRDV

SEQ ID NO: 1005219 - protein, 41 aa, Homo sapiens
TGTLHRQADRSARLRCTVTAEASVKPARMSARSRRHLRHAG

SEQ ID NO: 1005220 - protein, 81 aa, Homo sapiens
KRGDDKPCGASLAEDSGQRSDAIQRALPGRKGPRGNALPEQRIAGSREGLTLAEHREENWHLKSRHLKLVKTSLGNLPHSM

SEQ ID NO: 1005221 - protein, 187 aa, Homo sapiens
HIPNQNKSARAGMLWVIRPRFHSDGVGQVPKTSLTKSSQVKTRTKVPIQATVGDQATLPLTWSGAGSKDKSYQVKPSQKQNKDVNTGTPWVIRPCFHSHGVGQVPKTSLDKLQMSGLQRASSFPVYSQCQSYSGAGYARLWQGVPPGAFPTRERSLDCVTQAGRSPLQGRSTGLTGLVSHLASWLGM

SEQ ID NO: 1005222 - protein, 40 aa, Homo sapiens
DQEQEALQNSAFLKLANSVTLSDLQTGVQYNITIYAVVCC

SEQ ID NO: 1005223 - protein, 73 aa, Homo sapiens
WAQSYIPELWKADDESPGGQEVKIHLNNLVKLHWPGAVAHACNPKNFERLRWVDYLRQEFETSLANMAKPCLY

SEQ ID NO: 1005224 - protein, 35 aa, Homo sapiens
EITVSMTFYLIYLRILWILGTITNTSSLYSAVVGG

SEQ ID NO: 1005225 - protein, 38 aa, Homo sapiens
MPLLQLVSGDWFDGAADCATHCSVLFWLVLLRQLLLLL

SEQ ID NO: 1005226 - protein, 48 aa, Homo sapiens
RKQYTGIRNGLKGQLIIGNSSVKLINRFLAISPFSLGLLSSSEKRTQS

SEQ ID NO: 1005227 - protein, 33 aa, Homo sapiens
  misc_feature (5)..(5): Xaa can be any naturally occurring amino acid
MTDSXSRTLTQAILPILHLVGSFPTHRLLTHKP

SEQ ID NO: 1005228 - protein, 43 aa, Homo sapiens
ARDYAYNPLITGNDSIEGLGDIYTAIPDHSLRTNFLRYSCIYV

SEQ ID NO: 1005229 - protein, 62 aa, Homo sapiens
MAIQDIPSQHPRYMLTNRGKVKTKEDVTLAHDTPDAGSHGGRLFLPQKCKQVAYCAPYRDSH

SEQ ID NO: 1005230 - protein, 43 aa, Homo sapiens
DLHPIHWASPSSIASPSISSDALPPFSSILLHPRAPRMSEGDP

SEQ ID NO: 1005231 - protein, 125 aa, Homo sapiens
PNTQSDYFIVYIVRMSMITLCFMALNTVIFLFTSWSFDPRLLRRLALWRVLVGGPLGEVVPGAFQEEVGEELADRLPVWVGLVCLLEEDGDGLPSLGEVLVGFLEEGGGLAPCLGLALWVSLEEG

SEQ ID NO: 1005232 - protein, 69 aa, Homo sapiens
MILQEPLHLQKAVEADQITHVVDEVRVHSLQEEGGRSRKMSILVYWFVTYNSFSHREFLHYLFIYLFIF

SEQ ID NO: 1005233 - protein, 76 aa, Homo sapiens
MSSGASTTMRLAEIKKRGIRVGYTPDSPDREHRRTRSLPANYHLPDGCRRPYEAVKNGGWPSWQPLWLCGYGLHDR

SEQ ID NO: 1005234 - protein, 41 aa, Homo sapiens
GTLEIPKLLTRAGCCSAQSQIAVSLGPPQVTPVDTRVTHTW

SEQ ID NO: 1005235 - protein, 97 aa, Homo sapiens
NGEQSVDGVTGLRGGTQQNATLYSQAATRDAEFSARYSTDIMQIAQQKCKAISHHGAYEANIAPILTNHLSRCWCSINLGHWSIRVSQEDFSIQGLT

SEQ ID NO: 1005236 - protein, 45 aa, Homo sapiens
GHPNKRRCTRSTTYSGKHKDTQQEDPPPPQGRHKEQPKQGGIPVL

SEQ ID NO: 1005237 - protein, 161 aa, Homo sapiens
MGSVSIREKNYEEKAHDYRQIDAEEAFDKIQQQFMLKTLNKLGIDGTYLKTIRAIYDKPTANIILNGQKLEAFPSKTGTRHGCPLSPLLFNIVLEVLAMAIRQEKEIKSIQLGEEEVKSSLFADDMIAYLENPIISAQNLLKSISNFSKVSGYKINIQKSQ

SEQ ID NO: 1005238 - protein, 87 aa, Homo sapiens
IYRSSNTQLQVRSVSSLGACCQEQAALDSQLCVMLVRSASPFMDGENSHSLLKGLCKSNVIICGKALTVAWRKTNAQWIEACYYYCR

SEQ ID NO: 1005239 - protein, 34 aa, Homo sapiens
SVAPLQALEYSKEGWEYVTGRTNVASQQCACLAP

SEQ ID NO: 1005240 - protein, 49 aa, Homo sapiens
REDPGDRSSVRANRTYNFTQDRVSDHRIAYEVRDIKGIVMVVGKGPGIS

SEQ ID NO: 1005241 - protein, 45 aa, Homo sapiens
RVHMAGTDEGLLKPLTLKRGASSQSTIPIVGIVAGRAVLAVVVIG

SEQ ID NO: 1005242 - protein, 126 aa, Homo sapiens
MRKSKLVTYPGEDVDYHLYPHGPGLNPNASTGQEALSQTTISWAPFQDTSEYIISCHPVGTDEEPLQFRVPGTSTSATLTGLTRGATYNIIVEAQKDQQRHKVREEVVPVGSSVNEGLNQPTDDSC

SEQ ID NO: 1005243 - protein, 34 aa, Homo sapiens
MTGLCVADTRHFLCGQLLLSPHCGLPGLSAMACA

SEQ ID NO: 1005244 - protein, 67 aa, Homo sapiens
KTRISPLLVWDRMMASAGPPNKRQQHKSPPPQRKHKDPNSDASPSSSRKATRDIPTVSASPYYFEKG

SEQ ID NO: 1005245 - protein, 77 aa, Homo sapiens
QGTVYNVEVSVILEESLFIGPESSVLVSICLVSELSDGNDLAFLSSSTLILHSAALGSQDPLRHYHHEGSPRQTCNQ

SEQ ID NO: 1005246 - protein, 35 aa, Homo sapiens
SQCIHQWVHASLYKFRTTREHRARPTKYRTSWSLV

SEQ ID NO: 1005247 - protein, 38 aa, Homo sapiens
HGSRESPASDGSYDWISRHARFSTSFTLYLRLTLALSR

SEQ ID NO: 1005248 - protein, 39 aa, Homo sapiens
TYPGSGYDFPINDKVSTFYGYCGHWDLGTSSLLALLPTR

SEQ ID NO: 1005249 - protein, 141 aa, Homo sapiens
LIQRILKHRNLDLDSIIAEVKAQYEEIANRRRTEFESWYQTKYEELQQKLLAGMEMNSATPKHEISEMNRMIQRLRAEDYNVKETVRPICENAIADAEQGVELALKDAGKQSWAELGGGPAEKAKQDIGPGCYVNNQELMN

SEQ ID NO: 1005250 - protein, 75 aa, Homo sapiens
DDLQDLQTPQSGFFQVICISSPRTGALFTSLQQILPGVQLRASGALEFWLVGSGYKEAVLVRQQERRGLGRVCTL

SEQ ID NO: 1005251 - protein, 35 aa, Homo sapiens
TDRSLRRAQQLDAAFLQRFSALVHLPSRSVTPASD

SEQ ID NO: 1005252 - protein, 65 aa, Homo sapiens
THLAQSVMDRRPDGGARRVGARFGQGAAVGADLVGALRVDVGVAGLDQRLGELIHIAEVVAGEIQ

SEQ ID NO: 1005253 - protein, 41 aa, Homo sapiens
MLTNVLLGDGGPDGGRLLVSHDGRVLTGPVRHDVVDDTVAL

SEQ ID NO: 1005254 - protein, 37 aa, Homo sapiens
EAATRFECPVDCCFRSGLGFLQGQQYMVQQFQVAIAL

SEQ ID NO: 1005255 - protein, 49 aa, Homo sapiens
SPLCRIVSNPQLTPITEISIIAMLSISCVCSIYHPDIYPKVGEVGGAVK

SEQ ID NO: 1005256 - protein, 167 aa, Homo sapiens
MSSVGVYRSPERTNREVCSRTLSDYEFALNLHKSKSNEAKSEHRMAIVNICLVEGYKGGLSRVKRRMQAWRGDGKTWVRWVTIASKRIKYLGIQLTRDVKDLFKENYKPLLKEIKEDSNKWKNIPCSWVGRINIVKMAILPKVIYTFNAIPIKLPMTFFTELEKKLL

SEQ ID NO: 1005257 - protein, 35 aa, Homo sapiens
TNRALYPSVAGRHRSGGGGRGRHRMWSQAAKRSAL

SEQ ID NO: 1005258 - protein, 165 aa, Homo sapiens
DDVIEYLMNESIVLSAYIYYNTCISTSSKKLRILSHCAFFKMTCAYSSKYEDSRECQLMSDRPFTMASQGLKYLGIKLTRDVQDLFKENYKPLLSEIKEDTNKWKNIPCSWVGRINIVKMAILPKVIYRFNAIPIKLPMTFFTELEKTTLKFIWNQNEPAFARAN

SEQ ID NO: 1005259 - protein, 50 aa, Homo sapiens
VPALEQHLKEVGCAQDRVAELHRLSAFRESRPGGAWMHRGFLGGHTGGIP

SEQ ID NO: 1005260 - protein, 66 aa, Homo sapiens
TWAQYICHSTKMAWVSSVIFVLAGSAALSAPSHGQRKVLAGSAQPKKSGPHETGEAFHEPSPLTRV

SEQ ID NO: 1005261 - protein, 90 aa, Homo sapiens
MGLEGPVSILNQACGHQPSLLFLAVPEPPDFNAAWIETIHRADQEVVVLQGLGPCRIHSHLRLNSPLHCEALTKPVVVSAVGVHRGAPVF

SEQ ID NO: 1005262 - protein, 79 aa, Homo sapiens
RGAGSCFDVGSACFILLIFLCSTYLQAPPLAVILGVCQHARGPTYQNGGSVLNICFKKTVLNFTCCYFYIWPFYSTVWF

SEQ ID NO: 1005263 - protein, 35 aa, Homo sapiens
VVQEIAGDCNSGMGVLLLLWRRGVINVGDITFMLT

SEQ ID NO: 1005264 - protein, 39 aa, Homo sapiens
MPGRSTILRSGSLRRAGDMPSLALVGAAPYMTGRTRCDG

SEQ ID NO: 1005265 - protein, 73 aa, Homo sapiens
  misc_feature (70)..(70): Xaa can be any naturally occurring amino acid
VEVCCADSCGQESRPMSRRHDLTRDDFDELVSSQCILAELLNAWWPALSASDALARLADPAVAEAVTPDXNEE

SEQ ID NO: 1005266 - protein, 34 aa, Homo sapiens
VITLDAWEKGEVVSHIASDNRVGGKMAGDFIAKK

SEQ ID NO: 1005267 - protein, 67 aa, Homo sapiens
DLEAPGHEATIPSHGHALKRLQAGLSLTCYSMAYLKAYKLSLQIPPFYLSYKPDKPYELVQDLAPRC

SEQ ID NO: 1005268 - protein, 43 aa, Homo sapiens
RQGSSGTADRTDTAGRPGGAAYVAPSSSHPTPLAGDPTSSRPC

SEQ ID NO: 1005269 - protein, 61 aa, Homo sapiens
EQQGLETGEKAKYRCMLGVSYPCRKRLVPIPETFVQAISDALLCFMTWGLEVGFSMYLLDI

SEQ ID NO: 1005270 - protein, 55 aa, Homo sapiens
KISVSLTPSLDQVRATVSETHHFDSVFIYIANLTTFYIFYFILLVYDGINHLAQI

SEQ ID NO: 1005271 - protein, 99 aa, Homo sapiens
MERAYVMPGPPYVMNYGQGGPQLIISAHVAKDAWLTLSLHSTELRPKRHLRVYPGYLTDEDTEAQSGTGLILNIPSVPGTVASKSLLSCTPPLRRQDKQ

SEQ ID NO: 1005272 - protein, 58 aa, Homo sapiens
FIKESAQKKNSLSEYCGELISQDEADRRGQVYDKYMFRFLFHFNNDFVVDATREGHPI

SEQ ID NO: 1005273 - protein, 70 aa, Homo sapiens
SSQGAALLAQRCRTENRRYNRPTVVLGASRYHLSEISYNGLLTLPGTHTLQVHILRPKGPMISEGPSFPH

SEQ ID NO: 1005274 - protein, 103 aa, Homo sapiens
MHTWKHDEGQRDDIECKMTPTKNPEDLSMVEDRGLRRLLLVAQVSILCSLISGFLIQESLRAMSRPSLHLEMETMGVAPGMVNPAVIQLHKGVVQSLDSCLMW

SEQ ID NO: 1005275 - protein, 34 aa, Homo sapiens
GSIFSTTWHARRFVFFVSGHSHIALPASQAGTAV

SEQ ID NO: 1005276 - protein, 52 aa, Homo sapiens
DFGSYDRVTLGLTSESSSQPALWPSRDFVTDLTDSCACRTLRGLLYDVDPAG

SEQ ID NO: 1005277 - protein, 85 aa, Homo sapiens
AIAARYPFFLSTGKHISCSSQWGAPKPCALATAIHSAPSQPARVQVRCKAAPLPHMQHHCKANQLPLGTPQEQGASSSSRTCQAM

SEQ ID NO: 1005278 - protein, 102 aa, Homo sapiens
RARYLTRESSRTSSHSNLNRRRTSRLPCEHPGQVASVVYVTTSLILNSKYLPNGKQNTRMGLRTKKHMEDDKKKEPTKTRTSRNEDMYRAREVLVATWAVHP

SEQ ID NO: 1005279 - protein, 51 aa, Homo sapiens
TRLFTFAGSVYSGLFIGLGCIWRPPETGATRHTRTVATRGPLYHDARARTY

SEQ ID NO: 1005280 - protein, 34 aa, Homo sapiens
VHLARQSRRLVTGLKVRIMGPNYNPGEYGGPLTL

SEQ ID NO: 1005281 - protein, 54 aa, Homo sapiens
SRGSHLARQSRAQSLKVSSCTLLLLGQRLNGLDLCLRVDFHGIAGFPYFELLVF

SEQ ID NO: 1005282 - protein, 112 aa, Homo sapiens
IVLSALADEKKQEFTVDIRAAEYHTCHSARGRKIRKVRDSTGARVIFPAAEDKYQDLITIIGKEDAVREAQKELEALSQNLDNVVEDSMLVDPKHHRHFVIRRGQVLREIAE

SEQ ID NO: 1005283 - protein, 42 aa, Homo sapiens
  misc_feature (25)..(25): Xaa can be any naturally occurring amino acid
YLSALVRVYNTGETDEALSNVCDVXLNLYGSPREYTGFPDPY

SEQ ID NO: 1005284 - protein, 35 aa, Homo sapiens
EDVKTTEGKARGMISYGSSYSRKSTPHGIVHCKLS

SEQ ID NO: 1005285 - protein, 48 aa, Homo sapiens
  misc_feature (26)..(26): Xaa can be any naturally occurring amino acid
LRMSPCEEQFMDEFCAASEKIIGSVXKKRKRNIEEEEEEEDEEEDYDV

SEQ ID NO: 1005286 - protein, 69 aa, Homo sapiens
PLSSMGLKCAGPLICGFSSTSDNPETARPIVLFWFLILYMKDNEDEDLYDDPEMMDYIHSVFSFRLLGM

SEQ ID NO: 1005287 - protein, 39 aa, Homo sapiens
MGYIPYLLNNTKFAGRGGTCLLSQVLGKLMQHNCLNPRG

SEQ ID NO: 1005288 - protein, 36 aa, Homo sapiens
PRQSRDKVFGRAVLVPHLEGGLWFKLGKASETASPN

SEQ ID NO: 1005289 - protein, 154 aa, Homo sapiens
LARQSQMLEMQVELLCMKDRATELRGQLSSEKMAPAELKSELAQTKLELETTLKAQHKHLKELEAFRLEVKDKTDEVHLLNDTLASEQKKSRELQWALEKEKAKLGRSEERDKEELEDLKFSLESQKQRNLQLNLLLEQQKQLLNESQQKIESQ

SEQ ID NO: 1005290 - protein, 56 aa, Homo sapiens
DSWQSQHFCTAARIVARCGVRKKDRFLGSATSMLYQRMEAQPLGSWLTLEITTTGR

SEQ ID NO: 1005291 - protein, 69 aa, Homo sapiens
MDLLHHFVARGAAIGVTMATSSPAVVQQAGFADVGLARQHHMQAFAQDHALARLGDEMTEVAGQLFQRR

SEQ ID NO: 1005292 - protein, 66 aa, Homo sapiens
RRNADRERAVKPPYPVDSHGEQRVALGLGGPPRGATVLLSNLSSKLVKIWLLTLRYAHTGDTRARN

SEQ ID NO: 1005293 - protein, 103 aa, Homo sapiens
VACKILIVCVDDAERHLRSELEISNDPDKIKLQLSKHNEIQKTLGGKQPVYDTTIRTGRALKEKTLLPEDSQKLDNFLGEVRDKWDTVCGKSVERQHKLEEAL

SEQ ID NO: 1005294 - protein, 51 aa, Homo sapiens
YGIEFARSEAFQKGERKGAKKVMIVITDGGATDSPDSEKVDPAKLKRLPRQ

SEQ ID NO: 1005295 - protein, 61 aa, Homo sapiens
DTNRARSQERGRKGQKAAGGVMKQKKPLVGRKAVSTKKEPHVETKPAEEETSLQQEIEAVL

SEQ ID NO: 1005296 - protein, 113 aa, Homo sapiens
HAHSSFFYRFCSFTSAFLSVKCPKVLSSGRNSRTINFAGSVPAAILSNRCPILWLTFAYFSFFSMHPDGFIFIVYRTKLPFMCTSANLLVQRFCSLELSLFPLAGCQVIYRLT

SEQ ID NO: 1005297 - protein, 42 aa, Homo sapiens
MRQALRGSRHMRVSSYLTYAFPPDSGYGLNSWLRARGWWRYR

SEQ ID NO: 1005298 - protein, 91 aa, Homo sapiens
TVKGERIVTGNWELSTGKAEHSTGKGEPIVLGTGSTVLEKWELTALGTLGSIALGTTGSTAPGNLGRTALRTLGRSQVLGTLDAPDARCQG

SEQ ID NO: 1005299 - protein, 107 aa, Homo sapiens
MTGGSRANADAESVSLGEACDLAISNQLRGDAEGLATEHTCNSKGLGIPDPTRTFLEVMGNVCISGAIGICYGRALGLREDKWSVWESVVSMQAGARIIRKCVLHIF

SEQ ID NO: 1005300 - protein, 52 aa, Homo sapiens
TTSTLGPGAGEDRIRWLLWRQDAELERKKELMCQEQISRWGVSSTSYFPVKT

SEQ ID NO: 1005301 - protein, 39 aa, Homo sapiens
GRGGRTGRKTTNPNQKNNTQKQHNQHTQTTQTPAAAPTQ

SEQ ID NO: 1005302 - protein, 126 aa, Homo sapiens
PAGAAGEIVDAYYALQQKVSELASSDNESLASCEEAGGVKAAQSDWFTRDNIPAALNFKPVVQAIFDGSLIGENGAPGSNSDVITVDGERAFVVRVSGHKPEVIEPYDQVKDRVVELVKRNKALKA

SEQ ID NO: 1005303 - protein, 38 aa, Homo sapiens
NGGEYMQQSGKSHRGSTQSSNRYHRSYVTARHLKIARD

SEQ ID NO: 1005304 - protein, 93 aa, Homo sapiens
  misc_feature (27)..(27): Xaa can be any naturally occurring amino acid
MTGYCLTPRRLCHRKTEHKGAPRMHTXHTSRASRKPEERETLAVQRREGRATEPLRFCLREHIRIEQEFCPGQTLDTHIMEETFGMLSNAFSH

SEQ ID NO: 1005305 - protein, 46 aa, Homo sapiens
EDRYMTKHACMRVIDVYSPLRCMPSLYKFRLHVSRRADLQISLSWS

SEQ ID NO: 1005306 - protein, 35 aa, Homo sapiens
LDIIHICEILIKAINFDRSSRLMTDLFTPLTTFVL

SEQ ID NO: 1005307 - protein, 33 aa, Homo sapiens
RVNDGSIAVLSVHGRQCTLFLDVYTEGQYRCFL

SEQ ID NO: 1005308 - protein, 123 aa, Homo sapiens
  misc_feature (29)..(29): Xaa can be any naturally occurring amino acid
MLVGQRTINYQRLTPETPTPLLLLLYHQXDGAAECQIVTTTGAVPGRATMMISTTGINTALLQWHPPQELPCEAAGLTGLAVPAGADRGAAQQHYIFRRGSDQHFTVTGLHKGTPYIFRVAAQ

SEQ ID NO: 1005309 - protein, 38 aa, Homo sapiens
  misc_feature (24)..(24): Xaa can be any naturally occurring amino acid
VVNCIIVWMQRVTDRCFLSRRLSXQKVIFNCTIQITGE

SEQ ID NO: 1005310 - protein, 39 aa, Homo sapiens
MRHQNAVSFGISQHRATGTFKILEDETHSKDIEPHLYSG

SEQ ID NO: 1005311 - protein, 125 aa, Homo sapiens
MRSLSILQGLPSFRELQKRNWELLSYDRHLPREDCRAVRLSELLRRKCWINPADSDEARKEPQAGPLENPEEVACEVKAGPVVDHSKQGRSCLRPPSSGSDLGESPPINRRGISLSPTVTKEVVS

SEQ ID NO: 1005312 - protein, 149 aa, Homo sapiens
  misc_feature (62)..(62): Xaa can be any naturally occurring amino acid
VCRGAGRLSTGRSVCRPEPGAGANHLSITLSHPFLLQEPGLQRLEELRDQQRSQCLVDLHRXFHTCISRQRVLPRMQAHMRGFQASLIFTHSFHSCWLDRLPHLPLGQILGDRSWGCQRRGLPGWLGSQIQMVEQPVIFPESKLEGLRN

SEQ ID NO: 1005313 - protein, 157 aa, Homo sapiens
MPQACAQTHNRRGVTYAHNHRPTVCTQMLTYTQTHAHRVHTNTAVTSPHTPMQHPDTHNCRHGRVQRDAHRQYMQTYIHVDADRFPHRNICNQTPQRLADMWTQTQSQCKDSTHKDILHRRAHTGLICTEDTHHADRYRHIEHATTHTNAHRHTSTT

SEQ ID NO: 1005314 - protein, 35 aa, Homo sapiens
AVNSPDCGLFSYRLCADFTPDYWWGLLYDVTLTEL

SEQ ID NO: 1005315 - protein, 62 aa, Homo sapiens
PDHVGVMHRGVKNLLLCAGVVQWCVLGSRNLHLRVQVILLPQPPEELGLQGTCHHAQPGFLI

SEQ ID NO: 1005316 - protein, 106 aa, Homo sapiens
  misc_feature (1)..(1): Xaa can be any naturally occurring amino acid
XLRIPRYLAFHDSPASQSSVRNEGAVSKRDQNKAEAIFHLFENHRHCSSSGPVDKREIKLVSSRRLPFSKKINPYQISRKSVGRTQRISIFYNLTILFQQLLGNYQ

SEQ ID NO: 1005317 - protein, 152 aa, Homo sapiens
GPRSLRATHHLWRHVLLVFGARGSRDTVWANLEWKLVLAAACWSALSSSCGSGRIGIAILVVYILLRGRLYSLLLAGRLGLGWGQLLLLRLPLPSAVWHAVHLPFVPLGRRAICAIHWPLVILLLLLIHCSLLAGEGAARRGALGGELIAIG

SEQ ID NO: 1005318 - protein, 152 aa, Homo sapiens
  misc_feature (2)..(2): Xaa can be any naturally occurring amino acid
EXKGYPTQDEGLKSKDFLPQQPAEEKRAFLRVQRFRPVVESQAFKNILVDEMDMMHARAATLIQANWRVYWLRQKLISQMMAAKAIQEAWRRFNKRHILHSSKSLIKKTRAEEGDIPYHAPQQVRFQHPEENRLLSPPIMENKETQFPSRDN

SEQ ID NO: 1005319 - protein, 107 aa, Homo sapiens
MGSVYVRCMYAPPPKGPSWAWDGGRQGDSRVPAHIAPPDVLSREHPDTQLADREMWGSGTAPCLQAGPHVAPQNPPSPGLRDHVYRLAVPLGKMDSIPHSHPSCPVT

SEQ ID NO: 1005320 - protein, 73 aa, Homo sapiens
DSYPIENEIICGESLHESCRYELQDMIHWVKPAPIEPAPSQQQQKPAEGSLQKRSRTDVTLEKGLQNMEVTDA

SEQ ID NO: 1005321 - protein, 78 aa, Homo sapiens
TSARQTLIHTGRSSIPLFSTVTAAGCCWPTPVATIQASTQLYLNYTAYYPRYPAAKRISQSHSLSQSGERSRSPFWGR

SEQ ID NO: 1005322 - protein, 44 aa, Homo sapiens
ERSGNVQLTWKTYVNKEIQHMLSIGVKQHKDSHRKNKARERKDT

SEQ ID NO: 1005323 - protein, 67 aa, Homo sapiens
CRRVLTDVGVRGLGTTVARDSAHFGSRVVWITGIETTGPKRFSILSRDEDTYVGQPGLELLISSDPP

SEQ ID NO: 1005324 - protein, 81 aa, Homo sapiens
GLASRERWKPPHICHQNLTRCQGTIFVQRKLESNDDDDDGRHSCFPQGGILDSCRHEDKIQGVTRGRSKNTKPSRPEDRGP

SEQ ID NO: 1005325 - protein, 48 aa, Homo sapiens
MRHQCPAIFIIFRTRWALGLVPGGEGCRKRGSWPQCRGILLDVDPAEH

SEQ ID NO: 1005326 - protein, 35 aa, Homo sapiens
TLEIRVGGVKVALNSSFVSSCFVSQERSVEIVWIV

SEQ ID NO: 1005327 - protein, 34 aa, Homo sapiens
MSLPVRYVFRLSAASIFVCSLPSWAPAFLTGPSS

SEQ ID NO: 1005328 - protein, 36 aa, Homo sapiens
SGTRAESKPRLLTPHAVLLLLMYHNVLLINSQCLPS

SEQ ID NO: 1005329 - protein, 45 aa, Homo sapiens
GDINLLTWPGLLWDMEEGSEGGGNARVRNHAKEVEGVKNIMTQNV

SEQ ID NO: 1005330 - protein, 65 aa, Homo sapiens
EDGETQTLRPCRDRLNRNRAIYQKTGTHITCEKPPRELCHTCSTPLPKIQTHLWLSHFQQTPILQ

SEQ ID NO: 1005331 - protein, 35 aa, Homo sapiens
SFQHLPALVQQFPSRSINAQPTPFVAGTHQSHLQA

SEQ ID NO: 1005332 - protein, 85 aa, Homo sapiens
SWNDGLHRCGLQHSTNESTLQLVLRLRGGLQLFVNEPDLVRPSLSTVEPSDTIENVHGTRSKTRTWHPSLTMQRFDLLLGKQLVV

SEQ ID NO: 1005333 - protein, 76 aa, Homo sapiens
ADGRLSRLPRTLAGWTILDTIHHKRAFGVTAFNAHGSSSSGGPSSRSSQWYFWAVTGAGRWMVLICKHRRLRTRAS

SEQ ID NO: 1005334 - protein, 61 aa, Homo sapiens
GRVSEKVAIPWYLAWWLHSLSIGQFEGPRKYLSTKRRHSSTDPLYLPRMLNVHVSQFPFTQ

SEQ ID NO: 1005335 - protein, 122 aa, Homo sapiens
  misc_feature (109)..(109): Xaa can be any naturally occurring amino acid
TRGVQAECRAQSGSRKLCLPGSRHSLASASQVVAGDRCLPLISTAKRPSSFSNPPQHRPFTGIPRCHAGGRSGLSLPTRPYLRLSLGKKPGTIPGFPRQRPLWPSAVCXVPGYLRLENGDDF

SEQ ID NO: 1005336 - protein, 95 aa, Homo sapiens
VQPWHLVSADEAYTEISQIWSRLSPFIGDQSIETLHPSVLVNFEAGRDGHHTGLLPPPIFPMQAPPCREDSDDVHGNQARTSATSYSSGYPRLRI

SEQ ID NO: 1005337 - protein, 83 aa, Homo sapiens
MAAAKVTGEVLDILTRLPRECGKTHRREHLPGESQAFENSLSLQPSQMPSLIAECCLNDPPVACNPLGSLSMSIDGEVPPLIS

SEQ ID NO: 1005338 - protein, 75 aa, Homo sapiens
ERTDSGGTYCVICAFDEDENLVENGLWIKEWNAGLGKTLGWDLLGHVTVYPGAETCILRIQDLTRTKDVFSGEQT

SEQ ID NO: 1005339 - protein, 37 aa, Homo sapiens
MIPELRRSRATWMLLNDRFRKTTLQVDTLNCRASSRA

SEQ ID NO: 1005340 - protein, 48 aa, Homo sapiens
PPDIHTLYCVPASMYLLFQESGHNEGELIWSAVSAERSTLTNDKKNDL

SEQ ID NO: 1005341 - protein, 35 aa, Homo sapiens
ESNEEPEVRAEWRNDDGEARTSDKGWVLGGGCWQE

SEQ ID NO: 1005342 - protein, 43 aa, Homo sapiens
SALSMHGYEKPLIMKAASLSSLFQRVGQVVGVKTLLTVHPTRA

SEQ ID NO: 1005343 - protein, 87 aa, Homo sapiens
IISSVPSEQLELEGVCLCGKGEEQFRPLDDSCQVCGNAGESRRVGSVAVADVHREVDGALPRVPDGSSDPEHPGTLLLMRVGDKVLG

SEQ ID NO: 1005344 - protein, 106 aa, Homo sapiens
MRLNDVTAVRGTHGGCSSVSTAQCEMRVAVVTPISTGSARSSETHLECSTLCRVTRGSSPRLVSCILRSSAASEILESSPQIFDIPAMDFLSEQILRVEAQDQRDG

SEQ ID NO: 1005345 - protein, 84 aa, Homo sapiens
RDGRRRGGRPRAQEDSSGWWETLDPKPPTEWDPAVVWCEDPCTMLPPAVTSTLGALVPSECCISHTIHSVTWVRARATWNASPQ

SEQ ID NO: 1005346 - protein, 59 aa, Homo sapiens
QPPSYPVPQLWKPLAAVSLLGQAPNLAKSSAQEGTLNACQELPEATTSTLQLRSPETGV

SEQ ID NO: 1005347 - protein, 86 aa, Homo sapiens
  misc_feature (33)..(33): Xaa can be any naturally occurring amino acid
  misc_feature (36)..(36): Xaa can be any naturally occurring amino acid
  misc_feature (75)..(75): Xaa can be any naturally occurring amino acid
WYRGCMQSSEGEAGVVCVLRQAGAQEGQHRSPXAGXPGPKGGWGSMGERRGQVLCTPMCGAPQAGGAPGPTEEAXKKQGLQFPAMP

SEQ ID NO: 1005348 - protein, 77 aa, Homo sapiens
VLVVNRMVSVTSGLGLILAAECTRSCGQCAPPESYLAACCNHPPESQRPANNPLSFSSYPLCSFPSCGVPSTECRNH

SEQ ID NO: 1005349 - protein, 133 aa, Homo sapiens
WRSTAVESVHQERSHTVDKRCGRTVNLNLWGPQECAHIIVPVAAGMAALLDATLLMTLLCPVISPIEEALSQRKTAPNFSLPSPTKETILLSSSQAIVFDLPSETVVLILQQVLLLRGIPEPQIPRHISGGTV

SEQ ID NO: 1005350 - protein, 39 aa, Homo sapiens
IPEDTVEQKAESVCTNYSLTRRAGIMNMAAGTLATARTT

SEQ ID NO: 1005351 - protein, 51 aa, Homo sapiens
KETQVGRWRPKLELHLSYLGVTLYVNCEDCLGRRVALPAALSCELSKALGS

SEQ ID NO: 1005352 - protein, 78 aa, Homo sapiens
IERLPSEQLGMNNFMKERWMKLLQLKRGNLDAPLKTQDQVQEDSYLDVVVRQGASIFQLLPSQDQPLLIRRDAFRYLG

SEQ ID NO: 1005353 - protein, 148 aa, Homo sapiens
NLFPSRRELHTVDKASVVANCELELEWGSLKECRAVIIASRSQPVWPALLDVHAVDDFVVSCTLAFRRATIPEEDCSKVLPFLPQTKENPLTSLQSKQCLRSSQRKAANSYFNRCYLLRGIPRSFSFPDTSPEAMYNPLEHHSLVNNR

SEQ ID NO: 1005354 - protein, 37 aa, Homo sapiens
KETHGEEIGLVMQCSKDQLSENFCSRAVLRIPEWDLN

SEQ ID NO: 1005355 - protein, 148 aa, Homo sapiens
HHSRVEPSEHIVELSRQRSKTRKASLPEQQRLIFLLGNSWNMDCTLSDYKIQKESSLHLVFRLRGGMQICAKTLTGKIHHPRGCSPSESIENVKAKIQDQAGIPPDQERLTIAGKQVEDGRSLSDYNIQKESTLHLALRLRGGVYVAA

SEQ ID NO: 1005356 - protein, 109 aa, Homo sapiens
RPGEAWCLSAGGKSWTGLTLWGSDYSVDHYSQVDRCHICLFGSPSLSNSIIHSKWPNNTQTLSRPVKREEGAPWQLLTLGPEVTSLACHASNCAVLSTEPHSGKWLIKL

SEQ ID NO: 1005357 - protein, 38 aa, Homo sapiens
MESLSGAVVTLGIPALWEAKTGRSRGQEMEISQAQWLT

SEQ ID NO: 1005358 - protein, 45 aa, Homo sapiens
PEDPERDTGEEMKTGDPKRPALSQHAANPDSRGTGITTRQQRTRV

SEQ ID NO: 1005359 - protein, 33 aa, Homo sapiens
QRCRHCGVRDCLFVTWITTDGTVCSELVVTGSL

SEQ ID NO: 1005360 - protein, 36 aa, Homo sapiens
DEIFLLCDKVQKEDIEVYFTGPGWEARGSFSQADVH

SEQ ID NO: 1005361 - protein, 67 aa, Homo sapiens
ERTGEPGRLGTLQWWDLLLLDPKEKREMWGPAGPRGATLSPMWNWGPPWLGSSWETLCPKVRPCETW

SEQ ID NO: 1005362 - protein, 70 aa, Homo sapiens
MSERRALSRWWSEPHWGRDGFTLPVCRHTQQASQHLAHPVGSKEAGGNCRQKGQQITHQYLSNAISAPGP

SEQ ID NO: 1005363 - protein, 66 aa, Homo sapiens
TPIEGKNMSLVNALTVTQDGRKIYVTDSSSKWPRRDYLLLVMEETDDGRCWSMICDQGSKVYWTAG

SEQ ID NO: 1005364 - protein, 56 aa, Homo sapiens
  misc_feature (53)..(53): Xaa can be any naturally occurring amino acid
TFQLPSTAIRVSHPSRLAHGHGTQQPVAAIGSHKSVVVWWSQHGTPIPPVGSXQLA

SEQ ID NO: 1005365 - protein, 86 aa, Homo sapiens
SLSWPQGYKGEKGESGALGPSGLPGSTGEKGQKGEKGDVSASTVLCLGNAMAWDWLDTDEIFCHLGPNGQNGRPCALFGPWVATLD

SEQ ID NO: 1005366 - protein, 61 aa, Homo sapiens
DLEDLRLLGRKMLIMMVGGQCDDDADGDGIKNVGGIPNGLDNCPKVPKPINKTDRDEDGVG

SEQ ID NO: 1005367 - protein, 95 aa, Homo sapiens
HQYQFLEDAVRNQPQAPVLTGEAALLDKHATLQKSTTEVRSSLRQVSDVQKRVQVACPAWHPAASIARQLQSSGACVAGPLHAQQGCTCGAQVAG

SEQ ID NO: 1005368 - protein, 78 aa, Homo sapiens
AVCSRGSLTLAGLPQRAAGRSGSRLGHPLHLRSLLAGPAAACALPPPLVPASPRPIFAGSRARIRPPGPRCFPPPMKH

SEQ ID NO: 1005369 - protein, 153 aa, Homo sapiens
IAYRLSSWEAIQMWSRIRVCPYPTFNPSSDVAALLKAIMVKGVDEATIIDILTKRNNAQGQQIKAAYLQETGKPLDETLKKALTGHLEEVVLALLKTPAQFDADELRAAMKGLGTDEDTLIEILASRTNKEIRDINRVYREELKRDLAKDITS

SEQ ID NO: 1005370 - protein, 103 aa, Homo sapiens
  misc_feature (17)..(17): Xaa can be any naturally occurring amino acid
LVIRGSRTRGVQAGGPXALRSPCMVGLERAPAPPPTFTGVCLPLCLPPQEATKRQAVRVPNTPPWCPADSPVLSGLSVACGPRGPSPSGQPISLLCVPLAPHT

SEQ ID NO: 1005371 - protein, 49 aa, Homo sapiens
LALDKGVGVWKEGRACGGRRPTDAETGYADRRRHGVIFPQGATRWLLYP

SEQ ID NO: 1005372 - protein, 36 aa, Homo sapiens
REVFALRFLDRLGFMDVWGKGTTVIVSSASTKGGTE

SEQ ID NO: 1005373 - protein, 57 aa, Homo sapiens
TDGLTRLYSLLSTRGAHCPRALRPHPPSLLAHHTDALPFSATFLPARSTTLRVTDWT

SEQ ID NO: 1005374 - protein, 63 aa, Homo sapiens
  misc_feature (47)..(47): Xaa can be any naturally occurring amino acid
VEECPLLTRGLGRAFIPFPDFKKGRTALPSIIKSGMALRCQVEDLLXFVGLQQQGGVLVAEKF

SEQ ID NO: 1005375 - protein, 36 aa, Homo sapiens
IIKAGRLRPTLRSSQLVLGIAARAVNDAGVVDRIAS

SEQ ID NO: 1005376 - protein, 173 aa, Homo sapiens
MGGWVLRSGMKDKDMINRLWGDMFFDPDNGEFMTDVRHQPRREDELPRTFCHLIVYPIFKVCDAIMNLTREELANTDRETWTIERDSEVHSGTPQGISLLMAVMRRWLTAGDALLPMITIHLPSPVDGPKFIAAGSVYEGPPEDEAAMGLRRCEPKGRSYDVYLARVVPSVHL

SEQ ID NO: 1005377 - protein, 78 aa, Homo sapiens
LLSEQAGNGCHGSWRRPAFRRGRLRWLKQEQLRLLGLAGLWGPGVVAAQALSLLCAPSRLQATLPLQEATPSNGSLCP

SEQ ID NO: 1005378 - protein, 76 aa, Homo sapiens
EDGGWARGSEVQRNLLRYRSGGETGERRAPQWPHSLAAGLNTRGLPQFQKLATLKHKDIPGILPGLRSQALLKGKS

SEQ ID NO: 1005379 - protein, 73 aa, Homo sapiens
SRYLNISDEEMAARRQAWVHPSALYTRCACQVRQARQHREPWGGNQMHLIRSLLAVAAGLLVAGAAQGQTTGL

SEQ ID NO: 1005380 - protein, 64 aa, Homo sapiens
SILKLDVDRGAIRSSGAKGQVRWVGVVGERGGGYKSGPYWRPGKVDLSLGRTRKGESKSHLVAG

SEQ ID NO: 1005381 - protein, 70 aa, Homo sapiens
RGVSGTRGGEIELLDQAAMSGVGGSWWQRIQVLAGGGVVDFSSSSSKFFSSSCGFSSSVFVSDSGSGSGS

SEQ ID NO: 1005382 - protein, 59 aa, Homo sapiens
ILTKEKLLRETKGTYTALAGEQRRVPRIWNKSTPCVVDRSTDLGLRRGMQPNFLFLQEL

SEQ ID NO: 1005383 - protein, 48 aa, Homo sapiens
MAVVRWPVATWCLYHNPQDLLTQDWAGILSGTGLAAEVHQEESLLSLP

SEQ ID NO: 1005384 - protein, 50 aa, Homo sapiens
RHEQYEPGEEKFGYSCSFTCIRKKIPYRPAFDGERPTIVGPQTAIVVGPK

SEQ ID NO: 1005385 - protein, 33 aa, Homo sapiens
MGVPCGKAAGVTKLSVTPPSRPVESSDTSHGGP

SEQ ID NO: 1005386 - protein, 218 aa, Homo sapiens
ESVEFQNLATLKPSNKAFEKKFRFDYTTERALRRTLQEDLVKDVLSNAHIQNELEREFERMREDREVLRVIFPTGDSKVVLPCNLLRMIWNAQKIFHIKKKQKTNKNKEKKQTKKNPRLPSDLHPIKVVEGVKELSKKLVIVNGDDPLSRQAQENATLLFNIHLRSTLCSRRMAEEFRLSGEAFDWLLGEIESRFQQAIAHPGEMVGVWLAVPWRTAP

SEQ ID NO: 1005387 - protein, 154 aa, Homo sapiens
MRGDLEDPSKMAVDEKQKKYFQKQCHECIEHIRKQNWFEAFEILDKLLDGDLTSDPSYFQNVTGCSNYYNFLRCTEPEDQLYYVKFLSLPEVRQAIHVGNQTFNEKKKNKNKKKKKKKQKKWNYVEKYLREDTVQSVKPWLTEIMNNYKVLIYN

SEQ ID NO: 1005388 - protein, 41 aa, Homo sapiens
WCGGDRGSRQKEGHKPREAVKSRTSGSSTDRFYEGSNFLLS

SEQ ID NO: 1005389 - protein, 86 aa, Homo sapiens
EDPAAGAPDVSPRLGLVTLTTFSSSLGSGVISFSMGLLKASVLGQHAGPLGLGPAARAPVGLGALGSVHHPDTLVATDAAALGHPC

SEQ ID NO: 1005390 - protein, 195 aa, Homo sapiens
LSRGSLEAGGLECEDPERELKKQKRAARFQHGHSRRLRLEPLVLQMSSLESSGADPDWQELQIVGTCPDITKHYLRLTCAPDPSTVRPVAVLKKSLCMVRKKKKKTQKKANKKKVPLEREAGLRVCLRADEVIRQDLTVQGIRTEFTVEVYETHARIALEKGDHEEFNQCQTQLKSLYAENLPGNVGELLTTESS

SEQ ID NO: 1005391 - protein, 48 aa, Homo sapiens
LIYEDSPHRRGPTQRNEHLVTTPLDRRTDAGLLVDSPPRTGTLHSSST

SEQ ID NO: 1005392 - protein, 208 aa, Homo sapiens
MAVGPAERAWSLLASWSVSLLPAAFPTALIAWLIAPLPSSATPSAPLHLLWSTPGDSQQIRSPRSATWGLPPLLEKITCHQTAVPFMVPKKKKKQKKRHTEKKKKKLWEALGATPQPYFSFSLSPHTLIPSCVLFTLCGHFTEKVDSAFLSRSTVFCPLTPSLTSSEPTSSCAQSVVSFLCLSSALRLPCPSCPFVPGLRGDGGGIRM

SEQ ID NO: 1005393 - protein, 100 aa, Homo sapiens
SRWRLGGAHLLSLPLSTPHEREHVSQQVQELERVLLGTGRKKNSIYLATVLNPLWEGTYRLWVWDPTDRFWAQVGANSMRTCSSVQVGMPVISEASEGVL

SEQ ID NO: 1005394 - protein, 101 aa, Homo sapiens
PAVPLGRYLLRWGCRRSRSSRGGEAAGARGGRDRTAFQWAVCGGYNSYGGYGGGGGGGYHCLRMAVAVCSSYCVESDYGNWLRLASAATAKHQSSYGPMKS

SEQ ID NO: 1005395 - protein, 91 aa, Homo sapiens
  misc_feature (8)..(8): Xaa can be any naturally occurring amino acid
MPSLGIRXEQRASVPGGCALRVLLWEFPQGSTLATLTLVCASPFWKQSCSALVNASSGHRPLCLPGHAFLCHLKSARTPKGTSLPFILLSP

SEQ ID NO: 1005396 - protein, 62 aa, Homo sapiens
MENLLRRRFPKMDTSAIIYVIKSVSSPKVPQVGSRQEPEPLPFLPLLGVGPNSARSQQASIN

SEQ ID NO: 1005397 - protein, 78 aa, Homo sapiens
MAASEKILGSSYYETGSIRPVVKGAQAHGDTPNVVEKIGDYKRQNPTMFAVEAPESSPDCGASVTMTRVPQCQLHLNR

SEQ ID NO: 1005398 - protein, 88 aa, Homo sapiens
MSPYEYHSGVNHSVYSNVLVQNSRCALLLTWPSDLGLPIPSQWLAVADKIKVALCRGCMNFHPVVRLGTEPGEVVKHGRRRAPGDTPR

SEQ ID NO: 1005399 - protein, 46 aa, Homo sapiens
TLLLWRSARCSPVSPELVPGGMHLRGGCIHVDQAPSSRSLAVRLVL

SEQ ID NO: 1005400 - protein, 41 aa, Homo sapiens
LSEQLGTGTHTRRQSLPSLVEMAFLHVGQAGLELPTSGDLP

SEQ ID NO: 1005401 - protein, 66 aa, Homo sapiens
MIADRPGALLSVEFAGHGSLLSNTGHGSCAAPGSCRTDTLQCLKTVMTGLPVGLAGRPLWGYRRST

SEQ ID NO: 1005402 - protein, 60 aa, Homo sapiens
SDSAANEEDIRLFVLANLAVRDSFQRGDQLFALCGHVNRPIADRCSTVSCYMWCHHHDGP

SEQ ID NO: 1005403 - protein, 115 aa, Homo sapiens
  misc_feature (50)..(50): Xaa can be any naturally occurring amino acid
IYSQQSVVLNMGMYYADVTGFYERYGSRMPDHSRAKVVHGTFSGQPALVXSHRTWLDVEVPIAVVPTLEGVQQTPIVTWVPVRGRELEHAGRGWSILKDGTLVEIPQELGCIVIG

SEQ ID NO: 1005404 - protein, 126 aa, Homo sapiens
MTGHPAQMGNQAPRSCDWKTSRSLTHLRRFPRRPGTITSAITVTRSGRGQTWPFQNWDNLVTGERDGNTTKAWERSLVKGKLWVHIPFRINSRPGKLSGPSWDLGHPAMILFLKVLLKLGEPRARN

SEQ ID NO: 1005405 - protein, 43 aa, Homo sapiens
  misc_feature (5)..(5): Xaa can be any naturally occurring amino acid
RGVLXLRRAEEWDSGGSKVTGEVLDILTRPAESVERLTGVSFS

SEQ ID NO: 1005406 - protein, 43 aa, Homo sapiens
MRNARRMDAPPNLPPSTGVLSPEWGQFLGPGALTLRHAPGQGG

SEQ ID NO: 1005407 - protein, 33 aa, Homo sapiens
EGLDGMEGFVLEGKKFGGAGKRSLATSTRRDCY

SEQ ID NO: 1005408 - protein, 33 aa, Homo sapiens
VWMEGLQWYHCGQSLGEEVSLVLSTRDRKTPWD

SEQ ID NO: 1005409 - protein, 42 aa, Homo sapiens
MKDMVRMSNSEVKTTWVDVEYEPGDRVKNQCQNADSYEEWEQ

SEQ ID NO: 1005410 - protein, 167 aa, Homo sapiens
QLAQCGHVLNPGILREVEMLTMGEASGTGGQESLEQIPGGKDFQEPSISGGRKFLLGDGSPEIKAEDSLQEADGICRGESVVTGSAYKTGPGGPGDPRGCEGVLQELRGRDGQETAWASGEVEYDPRSFQSSQGLIAVQRAAGGIGRIESKGKSPWDEHHLASEKLW

SEQ ID NO: 1005411 - protein, 49 aa, Homo sapiens
WGVTTPPPGPRLVSLTHVFYRFFWFGLVWLVGWFWRQNLSLGGQLEGSR

SEQ ID NO: 1005412 - protein, 77 aa, Homo sapiens
  misc_feature (50)..(50): Xaa can be any naturally occurring amino acid
  misc_feature (55)..(55): Xaa can be any naturally occurring amino acid
  misc_feature (69)..(69): Xaa can be any naturally occurring amino acid
  misc_feature (72)..(72): Xaa can be any naturally occurring amino acid
LEDPIPGSGYRAKEASPPAKDGHRASRSKERGPETPGNPIPGCLWMGDTXKCLSXWFGSFYNLKQLSPXVYXKTRKS

SEQ ID NO: 1005413 - protein, 73 aa, Homo sapiens
IERCTFQPTPASADCSALSFVLHLLPQAAGLDARQQLNLNDYGVREVPPCFSRLIVLRLSVNQITAGGVEVLS

SEQ ID NO: 1005414 - protein, 42 aa, Homo sapiens
IHRARYLWRRGLTIIITAYLIDSLISFIEVIFQTILVACSYD

SEQ ID NO: 1005415 - protein, 66 aa, Homo sapiens
SRGPLQLGPKSLLNARTKPEASRYLTSNYTTRYSNQNSMVLVPKQRYRPMEQNRALRNNGALSTTI

SEQ ID NO: 1005416 - protein, 63 aa, Homo sapiens
PANANSKHYVGTWSLDSTGVDCWRHYERGVCSAHAHEVLRSPSIAELTALLRKYLGGGSFDQC

SEQ ID NO: 1005417 - protein, 53 aa, Homo sapiens
GRSDGSPPAGPQEAGMHSECMQAPQFLPAVSSAATPRCGIPNHMHSPFGGHCS

SEQ ID NO: 1005418 - protein, 45 aa, Homo sapiens
LGKRGKGEPEEVMNEWVTAAGNGDSILRGHPLRVYVEYTSVIVRA

SEQ ID NO: 1005419 - protein, 139 aa, Homo sapiens
LGSPGLGTVGVGPGTAPVSGATLQRYCGWEEDNGLMGWLCPPCLLKSQEARTIGPGLARNAQQCLLALRTLHPATVAPACRTYAVFRTVAHVSGTKADLCTEPASVAGSLQLGNPPNVTMLRCHTGFVQGTMVGGAVAT

SEQ ID NO: 1005420 - protein, 55 aa, Homo sapiens
DKMARWYAMVAKVAPYTSTEPFTIDGEEYIPFNAVCWQYVLFVNRGQPTVGHEGP

SEQ ID NO: 1005421 - protein, 37 aa, Homo sapiens
SQKTLVPLPLYEARYCVYHADFTSLGKGSQSQVPGDI

SEQ ID NO: 1005422 - protein, 36 aa, Homo sapiens
VRTDADWRTGTHSPHCHTVTDCEDDGGGRQLMATGR

SEQ ID NO: 1005423 - protein, 116 aa, Homo sapiens
SAYTSYLPLPCQQLNKLTRAADESDRGMKVIENLGLITIIETIELQLNPTHTEAKHIAEDADCKSEEVARKLGDQFVGDLSCTDERAELAESKCSELEEELKNVTNNLKSLEAHAV

SEQ ID NO: 1005424 - protein, 74 aa, Homo sapiens
YYTSQRFYFVNAYTSQRFIPLNALYFLNALYFLNALYFLNALYFLICLLRPSSSSPLIFGRYSEQKRKKMRKYK

SEQ ID NO: 1005425 - protein, 40 aa, Homo sapiens
SEEELIGAAGTEAGRQAEIWCAGGSFRRQVGAALQSYLCF

SEQ ID NO: 1005426 - protein, 42 aa, Homo sapiens
MTSQLLLLTLILLNAYTSRRFILHAYTSCVAKYKALRSIKRR

SEQ ID NO: 1005427 - protein, 104 aa, Homo sapiens
WAGRGLGWGRGLAGEEGWAGEQGTTEGVLEEPMPCPSHLLGEAPEDLATSGVPWTTVPPAWRTPLGVRKTEDGGRRISSLWPVCAAFTFSLRSSRTVPLFPMPR

SEQ ID NO: 1005428 - protein, 33 aa, Homo sapiens
SAHHRQVAAEYSGMTDHGPSTRPQTTCLSPVTA

SEQ ID NO: 1005429 - protein, 84 aa, Homo sapiens
RESETAPESRGGFQPFVCYLGASTSHLVLVLFAFGFFTTCLQLPMQPFRLGYMVSDRGPWVTARLHGGTASLIPCGSPIFFILW

SEQ ID NO: 1005430 - protein, 80 aa, Homo sapiens
  misc_feature (8)..(8): Xaa can be any naturally occurring amino acid
LGWGQRGXFGTLVYTIKQMKMYRRLQPRMPRLCMYIHTVCFLESLLAYKLGGQASTMYAAAQVCVYLSGNDVHVGVCNLS

SEQ ID NO: 1005431 - protein, 142 aa, Homo sapiens
MAVGVTGSYSPTYRRVGFVLSDEESVKEMLRQVEGYVSERLRGCGEMVQGKGRKVGGWWEDNDPDEKHIVSYGQKREGRDWQTLESLDELGKTRLQKLGHEIRSSTYYGVDQVGHQLHDTVSQLDAHGPAYPMLPSGPKRTS

SEQ ID NO: 1005432 - protein, 40 aa, Homo sapiens
LPCTRDDKVNARIQMEISKEQELEIKYKDIMRTEIVPCEV

SEQ ID NO: 1005433 - protein, 39 aa, Homo sapiens
RTKYYDKIYYESIDAHTTSVIIISLQTDSTSRHTSTRRT

SEQ ID NO: 1005434 - protein, 96 aa, Homo sapiens
  misc_feature (14)..(14): Xaa can be any naturally occurring amino acid
RVWYTPTPSDCSTXLADPTPYYMNLLGMIFSMCELMLQLTWCAWVAVYCSLVSFADSRSSEDTKQLMRSFLLSISAVVTVLSAESSAHDAHMVLRD

SEQ ID NO: 1005435 - protein, 79 aa, Homo sapiens
GAEMRTRQKERKYKAGAHALYFLNALYFLNAIYFLNLYTSQRFILPQSLYFSTLYTSSTLYTSYNALYFLNASYFLNAL

SEQ ID NO: 1005436 - protein, 39 aa, Homo sapiens
IEDLISAIVLGAGSDLLLHLSACRYMVVRRSTVLAYRSL

SEQ ID NO: 1005437 - protein, 70 aa, Homo sapiens
YLSMETTCSHSSTGEGASPQMFHTVYPGPPYCPASLSSSSYNYHFNGGPGSLTPRTTLQLPRPIPNLAGP

SEQ ID NO: 1005438 - protein, 32 aa, Homo sapiens
MCREVPGAEGSVSLIQHKITLCQRVDMGSKCW

SEQ ID NO: 1005439 - protein, 244 aa, Homo sapiens
PGGFGTGKTAIAMGMAQALGPDTPFTAIAGSEIFSLDDEQDLRRCLQAFRLVHRLFASSEETEIIEGEVVEIQIDRPATGTGSKVGKLSLKTTEMETIYDLGTKMIERQKRRKRKKEKKKTKEKKKCPLTKGQGPVPGDVITIRQGDGLRSPSLGRSFTRARDYDAMGSQTKFVQCPDGELQKRKEVVHTVSLHEIDVINSRTQGFLALFSGDTGEIKSEVREQINAMWLSGGGGQGEISLECV

SEQ ID NO: 1005440 - protein, 67 aa, Homo sapiens
ASPIQVVSLDVGGDLGLPLVPVVEQLLLSCTCSYLMVSPVAELKSLGPFDDWHPRGPGLLGMKPHVD

SEQ ID NO: 1005441 - protein, 52 aa, Homo sapiens
ALEDPEVSSSTQSKLSRRFSRDVPYTHYPYTLTASPMINTIHQSDTFAIEEE

SEQ ID NO: 1005442 - protein, 76 aa, Homo sapiens
EVGGEAHWQAGHGDGKMLIPGTSQDRGREEDADSFLASHGFRKCLSSSKFSSIAGTLGSLSPSRIPPCRLGTDAGR

SEQ ID NO: 1005443 - protein, 72 aa, Homo sapiens
AGPLTGSVRSLHAGTAVSAVWAAAPLCVRPFTLRDVCLQFNSHYILYCTTIFPRGHNTSNNIHISGAATSYT

SEQ ID NO: 1005444 - protein, 39 aa, Homo sapiens
TGLWVYASSQAQAARRGPRDTAGPGLVVPARPSGPSLLS

SEQ ID NO: 1005445 - protein, 58 aa, Homo sapiens
  misc_feature (22)..(22): Xaa can be any naturally occurring amino acid
  misc_feature (27)..(27): Xaa can be any naturally occurring amino acid
DITPLERQQVELSPTLCQLASXTGHLXLRILNVALLWNYSHKDDAGLERSFLASILSD

SEQ ID NO: 1005446 - protein, 123 aa, Homo sapiens
AASLEVYSYGQIKDAFDRNAELQESPTGLTSLSQRLKTARTPGGGQSSRGVQAGNSHALFYHLPSPFYDRVQTLRCLHANLIQANGITSGAHTYELLVKPRASLSTPTETGHGGTVSSSSYNA

SEQ ID NO: 1005447 - protein, 70 aa, Homo sapiens
ISTQYTEDRLERRKGEYISIFIYEREKQAEKMKEKGKSYQLHPSVELLQEAASCEALFSEPFRGTLAGHA

SEQ ID NO: 1005448 - protein, 40 aa, Homo sapiens
MGTIDGKNIYNGSDGKLVCCWRGCCGSGSMVLLWLGGQLE

SEQ ID NO: 1005449 - protein, 103 aa, Homo sapiens
MFLGSHQWQSPFQQQLMQIRRIALHWNSQRSSQREWCSEASEFPPVSPWPLLVGALKTGLPGHPRLGITILPWGQSVSKVMPVSLEVGGAGQVIKTSPPPLPQ

SEQ ID NO: 1005450 - protein, 33 aa, Homo sapiens
TFATTTFSPPPRNLLCSCLGPGVPGSQIESLIF

SEQ ID NO: 1005451 - protein, 186 aa, Homo sapiens
MVFWAMENPVPHALCLESPRPSGFCTMFFEAILAALHTLLDNLTLLVPELDSRLEQQVDSSLLLYSVPFPQLRWKVWILLLNVAPGRSAQKSSVVIANQLDQFRLIQGLADVTCSGGAGRMALRAGSSYTLDLLSTVNLQVCPALYRYRCLAADCCTQSCELVAEELVSWEASLAPAVILEVHTLV

SEQ ID NO: 1005452 - protein, 41 aa, Homo sapiens
MLSGAGPRLYSHTRSHGGEQRWRSRTLALHRPLQWLMKGNK

SEQ ID NO: 1005453 - protein, 79 aa, Homo sapiens
SDGLPTTVLCLVGHADGWGTPSTWTDDLGHPALLGTVFGHPTAADTLRPNDLTDTTLRLDSDPAWVATLDVGTDDSTFS

SEQ ID NO: 1005454 - protein, 70 aa, Homo sapiens
EDQIFRFLRCSPDSAGLTETGVEAAEPRHLCVPHLLVYVKVQQPFPLRALGPAAQVPLSSWGEYMTPGPD

SEQ ID NO: 1005455 - protein, 67 aa, Homo sapiens
MDIIHVGLRAEENKAAPPTPAQDPGLSEGTAVLRHRSPGPIQTPLLLELALKTHGSNLIQVEGAEGR

SEQ ID NO: 1005456 - protein, 43 aa, Homo sapiens
GEYAERSGGVYEAQGVISYMNVVELAGSLEEWRWVGSSGCRVV

SEQ ID NO: 1005457 - protein, 39 aa, Homo sapiens
SRRSFAVEELSESELRLIGGAALALGSCTAGEGVSLGVG

SEQ ID NO: 1005458 - protein, 76 aa, Homo sapiens
MDGAEEAGVSVDLDAPGAAGAAVGADSGRGWVLGALDRLSSCPGDDELPLEHGTGTLGFSCCCVNAIPTIQTSQWE

SEQ ID NO: 1005459 - protein, 75 aa, Homo sapiens
MRLAWMLAYGSGCLVMMQRMWSEKMKVCWRMGKGLEWGLDAGLWMVMYPGHGGRPLTPVTLHVLHIFLHNYDHSP

SEQ ID NO: 1005460 - protein, 73 aa, Homo sapiens
YLYFSTLILLNAYTLSTLYTSQRFILLNLYTSQRFILLNALYFSTLYTAQRFILHTGKLTEKYKALRKYTALT

SEQ ID NO: 1005461 - protein, 56 aa, Homo sapiens
MKWRGADAVFRCPEQDVPFDGSSLDVGMDVRPSEPPWELLAIFPDLQVKSEPSPPQ

SEQ ID NO: 1005462 - protein, 45 aa, Homo sapiens
GPGNKITLFHGGERADVQPQNFGNGFWVPAACGALEARVNAQREM

SEQ ID NO: 1005463 - protein, 126 aa, Homo sapiens
PRQSGAVGLRIWDTSLFPIWRYEMPNKGILTLSAIATLDRIGTDGDCSKPEEKKTGEVATGMAYRPNWLLAGAAFESLVFLTHWVFGEVSLVSRWAVRGHPHPGPDPNPFGGAVLLSLTSGLMLPS

SEQ ID NO: 1005464 - protein, 127 aa, Homo sapiens
DPPATECASRRQRADKSLLLGAEGSSGITQGTCRSPVPDLFDAESRLDTPNQRSSRYAHTSPGNALDLGLSTTHRDPGQTPLKADEARSRLTSSRDGKARLSDSTKTRQELPRSRSDQTRRPRTRRV

SEQ ID NO: 1005465 - protein, 95 aa, Homo sapiens
  misc_feature (42)..(42): Xaa can be any naturally occurring amino acid
DLLLQRWQTESSTSLQPLSADTAGVQKTWSETSGCSFHWPGXLSPVGMTGRHTPRVYFVCRAAQATNAEIDRQPGSGNFLFPMERLPYTGPAIAE

SEQ ID NO: 1005466 - protein, 137 aa, Homo sapiens
SGVCPQRCRDHRHESSHPAKIYLLSHRKLLIISNYKELVGFISLRYVQDFGKMISVSVEACGLQQSLKLSPAGLRVGFKVSSSSDMLLWLVNKQKETARAQGWGATEGYKYSSGRQAIVPGHRRKRGEDIPLNPQFG

SEQ ID NO: 1005467 - protein, 81 aa, Homo sapiens
YEARIPGSISVVSLIAVREGSGEHHKHVVGSLQLRHMGKRFGKEELWVRGLYETRQKKILLNDWSMTLKLILNNLFRPNLS

SEQ ID NO: 1005468 - protein, 46 aa, Homo sapiens
SRDPHRGAEAGEAGDHQRGEVNPDAIEILHVKKKKARLVVSQVHPD

SEQ ID NO: 1005469 - protein, 65 aa, Homo sapiens
MGGDEDWMMAAKVRRFLFPELSEMLVYVSLVVSVRKMGIHGLGQQTKENDYEARDHDKVITLFYA

SEQ ID NO: 1005470 - protein, 58 aa, Homo sapiens
ALLEDPGLRDPNEKKIVELLSVIPVYIRNDLTEPHKPLTQRLPGISREARDFREQIWT

SEQ ID NO: 1005471 - protein, 122 aa, Homo sapiens
MVIKQVTSRRSVWEVDWGTRDVLNGGKNQENSIQMPGRYQGWPRGQVTQEELRLLQSPGPFLVGHGVGAEKIQLVLADDAEVKVASGAQVVEDARGDGFAHQILGFLLLRTRRGAIRSRGKL

SEQ ID NO: 1005472 - protein, 68 aa, Homo sapiens
VHAITGSQTPAAGTLIDHAWAGAQSAMGRASLIHSRFLLMDNKAPGGMVNRARFHITTSKVFTLSSSS

SEQ ID NO: 1005473 - protein, 54 aa, Homo sapiens
RWRHLLALPGPGVGGLARPCGGRSRACRAPSGLMRAAGSYSSIAQHQFFTSVRG

SEQ ID NO: 1005474 - protein, 66 aa, Homo sapiens
YGLRYKFSRPGGRHCGRGQVVGAEEDRSLLSLCSAWEELRPYFRDRGWPLARALLDVHQKQGGAVG

SEQ ID NO: 1005475 - protein, 105 aa, Homo sapiens
RNEVGHTAAYRQPQAHGDANGTGSKWGTRETKTKAYSKEGRGRAQKVDPAQKETEEVGQGLTNTIDRLKMQVDQLESEGESRSVQTRKRKGDKDKKDGMEGLRRH

SEQ ID NO: 1005476 - protein, 40 aa, Homo sapiens
GAGEEGSGEGRGQSSFQAPKHGGGHGSCGSKPEPSWGSKV

SEQ ID NO: 1005477 - protein, 45 aa, Homo sapiens
MAFRIFLLSQYPNRQISRSGYSGPPSGLGPRSRLALPFEAFLVAI

SEQ ID NO: 1005478 - protein, 67 aa, Homo sapiens
SETGSPGAWPADSQRSLSLGHSSGSGSSYALQEVSGLLVPLRGDMGEAMTGKGRSVTLPCTNGSFRV

SEQ ID NO: 1005479 - protein, 36 aa, Homo sapiens
KRGLFGRVLPPPGRRHGVLSFFFRRSLPASGGTGAR

SEQ ID NO: 1005480 - protein, 34 aa, Homo sapiens
VALTAPESGIGNEVTVSGLHSSSSPSRGVRQLAI

SEQ ID NO: 1005481 - protein, 192 aa, Homo sapiens
LRIPRGRTGAGEEGTSWIPGHKRRPGAAVTEEEHKRYDDIDLDIEELAKDVGAQILRHSHKKDILMHRWRYPSLSLQGIEGAFSGSGAKTVIPRRGVGKFSIRLVPNMTPEVVGEQVTSYLTKKLAELRSPNEFRGYMGQGGKPGVSDFSHPHNRAGRRAMKTVLAVEPDLTREGGRFPVTLTFQEGTGKNV

SEQ ID NO: 1005482 - protein, 176 aa, Homo sapiens
MPHAVRLDRPQSRQPPYRSVLQSTQGGRGLPLATLSQSSIWAGGNKWTDQTRIYLGGMANVTLIDLRGCKQITRKACEHFISDLSINSLYGRSDEKLIQKIIKTHPAQIQQETDLPLIPHGGEPLLDPAGARRPASHSLSALRSLEPFLYGGGREGGGHQANLAAPLPPKETGVAD

SEQ ID NO: 1005483 - protein, 104 aa, Homo sapiens
CLERGKTRTQKDAGNYHDPQVLPAPGNNHSGVGWRSHNFPLLPGAKGLITSQKLLFKPRFSHLFGSKAVPFFMAYSLTPNYPRGGLKKNKRDSPLGGPQKFRLK

SEQ ID NO: 1005484 - protein, 53 aa, Homo sapiens
  misc_feature (1)..(1): Xaa can be any naturally occurring amino acid
  misc_feature (4)..(4): Xaa can be any naturally occurring amino acid
XDDXNNLQKFQTSLAVDIPPAQGGTSGNWHLRLQLGFQLASRGNTAISVDAGK

SEQ ID NO: 1005485 - protein, 44 aa, Homo sapiens
RRNEMRVGRPELQNLLMAQSPPGLAGIISTQREKRDKVVMEVPE

SEQ ID NO: 1005486 - protein, 61 aa, Homo sapiens
GTDPVMNGVLQDESRGHGDPAFGNLSRGHCCFDSMWSAGSWAGVARGCGQTLARAQRLSPP

SEQ ID NO: 1005487 - protein, 130 aa, Homo sapiens
VGTGKLAKEIEIGKQNKMAKALVAFSTKKWIKGEKVHGSWNNELGVGVQANDSEKGPALKLNDKHAVVNLVSGVNTQALGYPGSGLGLGGHVCPGEGNHGSGWPSEEWRIGGSFVMYLFSVHLVTRCQNL

SEQ ID NO: 1005488 - protein, 32 aa, Homo sapiens
TSTGFNFILAGKGTEEAGKTVLNHWMLAPTLF

SEQ ID NO: 1005489 - protein, 72 aa, Homo sapiens
LRRQRVAAPRKNYLVSTFSATDPASTLGPFLSTWALRNWAASPWMLNASTMEMPEPCGYYSPPSTNGPGPKL

SEQ ID NO: 1005490 - protein, 41 aa, Homo sapiens
RISSCGGADVAGKDPQVTSSASSSGSGWCSRTRKVFSFSCR

SEQ ID NO: 1005491 - protein, 32 aa, Homo sapiens
  misc_feature (8)..(8): Xaa can be any naturally occurring amino acid
EEELKWTXRILGEIYILLQNRQTCNRKAILTL

SEQ ID NO: 1005492 - protein, 66 aa, Homo sapiens
AELMLGGTNTLVLHNTCTDSLLADPSMLDLALLTELCQLVTICLTMDPEPKTFQPRACPCYSLPLQ

SEQ ID NO: 1005493 - protein, 40 aa, Homo sapiens
MLIDGPNKRTAPSAREAMGTEGKGLPLVRGMEGGGSSGTP

SEQ ID NO: 1005494 - protein, 69 aa, Homo sapiens
MLYPRFQKELEVDATHPAETISFLVDELDTLHQSVPRIIQNIGTEFNLTASELNSDAGRRPGTCCFTNL

SEQ ID NO: 1005495 - protein, 74 aa, Homo sapiens
GDGTNTPAQARLRTGAVPEKYARFWASGRPGSISAVKSWRDQDQGLSATSSPCHLQSRKRKTQIQVEAISSPRA

SEQ ID NO: 1005496 - protein, 159 aa, Homo sapiens
TVPTDQEGEEIANEMMRQQGVYTQDGPLGAAKAIQAYVAVLDETYPDPVRVVSMGVPVSEWLDDPSGPAGSLTSVEFCGGTHLRNSSHAGALVIVTEEAIAKGIRRIVAVTGAEAQKALRKAESLKKCLSVMEAKVTAQIAPNKDVQREIADLGEALAL

SEQ ID NO: 1005497 - protein, 44 aa, Homo sapiens
MIIGAIYVIFPRISRGIHLKRHLFYLPIHDVRHFHVPNQQTVTS

SEQ ID NO: 1005498 - protein, 35 aa, Homo sapiens
GRLYDDSPTGTGSHDASVLTDDRGGYRRSTLRNSL

SEQ ID NO: 1005499 - protein, 40 aa, Homo sapiens
  misc_feature (36)..(36): Xaa can be any naturally occurring amino acid
RSLYDGLPPLSYRTTRRAYFSYTDDTTGGYPDARHXRTTH

SEQ ID NO: 1005500 - protein, 48 aa, Homo sapiens
SRGSLLMLLTCGLRVSTSHASPPMRPNTFFQVQCPRPWCAPNKLRNAP

SEQ ID NO: 1005501 - protein, 106 aa, Homo sapiens
LRSRTSLLYRCDPGPHRSSSSSWPVLLQRFDLEVPDDGQLPSLAGIPKVVFLIASFNVPLMVRQVGRAAQAAGGPNGCNSQPLSTLCGPRTQITTYNPAPFSAILP

SEQ ID NO: 1005502 - protein, 41 aa, Homo sapiens
MHALAMPCPCLDPLRRRSPLPCHFIADVCWPVGLGGWASHR

SEQ ID NO: 1005503 - protein, 37 aa, Homo sapiens
VCCRSPLDGSPTSSTSHPATFGRVLDVTDADGTGVTD

SEQ ID NO: 1005504 - protein, 53 aa, Homo sapiens
CCRSTLRRTPRIHHGDDYGTTSVVRATDVWGRTWGGFVLFTPSLLLFTVCYDY

SEQ ID NO: 1005505 - protein, 38 aa, Homo sapiens
  misc_feature (25)..(25): Xaa can be any naturally occurring amino acid
DVAESPLERREILLMARKSSVKLQXSHKHLKPMNLQLI

SEQ ID NO: 1005506 - protein, 66 aa, Homo sapiens
  misc_feature (39)..(39): Xaa can be any naturally occurring amino acid
  misc_feature (49)..(49): Xaa can be any naturally occurring amino acid
ESIWAFHRSSEPSPTPLLGVKALQRDGAIYPRSLHSPFXVLLLQLRLFXDSDCVWTGLGNRTIDWC

SEQ ID NO: 1005507 - protein, 49 aa, Homo sapiens
TSDTRDPLRASAPLYHHLLRPSGTHRSAASCTRRFGVPVFVPRCRGTRR

SEQ ID NO: 1005508 - protein, 47 aa, Homo sapiens
TLRQGVCLLIPGRATAYIHRFTNGGKEKRVAHFLGITESLTGNEIRR

SEQ ID NO: 1005509 - protein, 44 aa, Homo sapiens
PVIYRIPPVGSWKGRSSASLAAEPFLAGLEPSSTSPWSCSSSLF

SEQ ID NO: 1005510 - protein, 78 aa, Homo sapiens
ATEEELIGSQLWLRTACPAGGTGVLNVPVTVTKGMHGPACCDLSSVHSIRQILFVCKDKEYSIPELALRQHSHQLLPV

SEQ ID NO: 1005511 - protein, 69 aa, Homo sapiens
EEELTQVFSGFRATPYAQPGHLPSPADPSGLLTYQVLEKNTLEVSTTSCHKPVSQECQVCKNSPARIQQ

SEQ ID NO: 1005512 - protein, 72 aa, Homo sapiens
MSISPSRVVHQRGYSLEAQRGLPGESGDDLPLNLLQIATPALVSLPSSTWYWQLEDISGVRSRSHFITADMQ

SEQ ID NO: 1005513 - protein, 46 aa, Homo sapiens
LTQRVACIVVAVCEICHLLLVQFIHVHLHVDVGDDLIFVRVALLLS

SEQ ID NO: 1005514 - protein, 53 aa, Homo sapiens
KRGISTPTPYTSGKPTGGGWGGVWTSLCHWGPSGRGSESSLLASLAWGQALLS

SEQ ID NO: 1005515 - protein, 43 aa, Homo sapiens
  misc_feature (29)..(29): Xaa can be any naturally occurring amino acid
SSLDFLLIFANGSIHYQKWDMKSPIMPDXASPRSRRHGTPHRA

SEQ ID NO: 1005516 - protein, 139 aa, Homo sapiens
  misc_feature (42)..(42): Xaa can be any naturally occurring amino acid
ELALFQAARSLAASEWLSSAYQSLRFLQLARTAQEGVQGPSXAQSRSPVPPHFLASATPPVKALEPPPTAQMGLPSLLCLPRCPGLWPAQSRLRAHLHLLSPWLPPMTPMALASPHFLKKRHLPGPGPQPGTWGPKQAS

SEQ ID NO: 1005517 - protein, 162 aa, Homo sapiens
ELCISEKYCPLSSGDKIGLSVLKVSAENLPQASLLVCLNLTFCPPKHEHLGDKPRDWFPLPLQGRTSLSRASAGGYSGWAFNFNLFLGLFFLTTPSIILSTMDKFNVTKPIHALNNPIISQFFPTLLLWSFSALLPSIVYYSTLLESHWTKSGENQIMMTKV

SEQ ID NO: 1005518 - protein, 45 aa, Homo sapiens
MRMKNTQSPYCGIAPYIREYEDPRDVPPPTRAETREERMEEEHDG

SEQ ID NO: 1005519 - protein, 56 aa, Homo sapiens
VDLYDGLPTTDELTYDTCDTHLYGLDLTATTRLSTDYVTYDTYDTCDRLTNVVRRR

SEQ ID NO: 1005520 - protein, 42 aa, Homo sapiens
KVESQQASRHRQVSNFIGAVIQAAGASRPWWVTAARQFGQSM

SEQ ID NO: 1005521 - protein, 47 aa, Homo sapiens
DEYQCLQAAVPGPASMGQRPDGARRGGQVLAVTQAPCSRRVRFTVHA

SEQ ID NO: 1005522 - protein, 53 aa, Homo sapiens
TAAGRLYDGLPCGFRGTHPRTDVFTLDDHDTLVVIACTVPPRHVGPLLTSTAR

SEQ ID NO: 1005523 - protein, 181 aa, Homo sapiens
  misc_feature (78)..(78): Xaa can be any naturally occurring amino acid
PGVIQRTPSPNPGYQGDFYIQDPIYGEYRYPYLTANNYYSLIGGHQGFITYDDRPHLRVHSLQQVGKANKGHSFISHXPEYRNLKSGYAVSVGYHVPGEDQFSQVRRTLQQGPSGQAFQGHIHFPLPGSGSEGRDHSHPEYLLTPSHHQYTPHKSGIHPITYKHQVIHNIYKEGNTFIRGS

SEQ ID NO: 1005524 - protein, 48 aa, Homo sapiens
ESEDPRKPSSLGSQLPISEKLGVSQGQKGYNLEGQVLEFLTEGTRDCQ

SEQ ID NO: 1005525 - protein, 47 aa, Homo sapiens
  misc_feature (22)..(22): Xaa can be any naturally occurring amino acid
  misc_feature (37)..(37): Xaa can be any naturally occurring amino acid
  misc_feature (44)..(44): Xaa can be any naturally occurring amino acid
MWASTGLGHGIGTWPTAHEVPXASGDKAGSGDRCPPXVDPRDPXYRS

SEQ ID NO: 1005526 - protein, 33 aa, Homo sapiens
SRRLDSVGIEADDDRLNKVYKEAVRNKMTPMKT

SEQ ID NO: 1005527 - protein, 39 aa, Homo sapiens
FSAGIPQKQPFIHPSNHQFATVNSSGVPQLAHSSIHGPS

SEQ ID NO: 1005528 - protein, 68 aa, Homo sapiens
YGVDDCRVTAYNTHYAAYLKTYRRQRTYWTPGLWDLGPGLLDLTPGLCGLTPGLGYPTLDIRTSWVIR

SEQ ID NO: 1005529 - protein, 34 aa, Homo sapiens
LVEDPAEAQDHILNQGREEAQEVLAMPVSFMGKA

SEQ ID NO: 1005530 - protein, 38 aa, Homo sapiens
  misc_feature (32)..(32): Xaa can be any naturally occurring amino acid
  misc_feature (36)..(36): Xaa can be any naturally occurring amino acid
HFISAGSNQAARAAWASPHSFPNTAVVGVTQXRTFXQS

SEQ ID NO: 1005531 - protein, 39 aa, Homo sapiens
MHSLLAVDVYSPRRCMPPVYKFRRHVSTVHELQISLSGS

SEQ ID NO: 1005532 - protein, 65 aa, Homo sapiens
  misc_feature (43)..(43): Xaa can be any naturally occurring amino acid
MVRLFQTDVEEQAPLGGRYIRHLGQVGLCLRLRMKLWPALGTXTHQHPASYFRLFGATQEVGRGY

SEQ ID NO: 1005533 - protein, 70 aa, Homo sapiens
MSNIRGSRPTSVGQSNILGSVQHPGVSPTSWGQSNILGSVQHPWVSPTSLGQSNYPGSVPKSLCQSKYPW

SEQ ID NO: 1005534 - protein, 80 aa, Homo sapiens
TPKIQCSFPVPCVQNAISYGKCVPTGGKIHGMQGSGAFGYLSSLIIIMLIGSSVSSTYFTSQARSYEVLKPRTYYIISSQ

SEQ ID NO: 1005535 - protein, 35 aa, Homo sapiens
QSPCTLSLAHVGAAALWAPSSTDETLKPTVYPLVV

SEQ ID NO: 1005536 - protein, 209 aa, Homo sapiens
SPTRGVEPQPGVRPLARLRANLLATGSTAVTGGAGQGEVCVTSSLTQFLLTDNSADLSWRALRALENPNQGRSSNTKEVPSGKKQHSPQLPPVLSQPVDTMPPALQQNKTVLCPRSSVQTHHGAHPGTRCTPRAMVHFHGAHLPQGTPTVVQAHSHYAHPWCMPTTVQPSTVHTQQHGATHPMQGATNMLTQEAVQPKDTICNPVCTAH

SEQ ID NO: 1005537 - protein, 96 aa, Homo sapiens
MTEFHNPDLIYGSLLCIDHEKVCARSRVSALLNLQHGSLCSKGTGVYVEPSYVYSGIFNRPRLHMGAGCSWRHRYAYVATADMYRAREVLVATWAV

SEQ ID NO: 1005538 - protein, 111 aa, Homo sapiens
  misc_feature (108)..(108): Xaa can be any naturally occurring amino acid
MPSISILTVALLVLLASLVLRCLRWALLASGLIHRVGVTTGYVLDSGVRGVAFRVWAWDLTVRVPEFFLPNLPLSRFSLPVFLNWNWDSFLEARVFPEEAPGGQMPTXAMT

SEQ ID NO: 1005539 - protein, 160 aa, Homo sapiens
  misc_feature (80)..(80): Xaa can be any naturally occurring amino acid
VRYDGYTSRKVVEVEVQGIQLDVGHGPGLPGDHRHGCGTGCRWLSFSRASSMYFRPFSSRMALVLKWVWQPAPFQFPGRXLGSRVAITPKSSHTRCKDETGHPGRSPKRIPSKGPIWNSQWAGMTSGLVPGILDQSKIVGTAVALSLHGMLQSQKDEFPG

SEQ ID NO: 1005540 - protein, 52 aa, Homo sapiens
RISTAAGPPQVSLISRCGELRIGIFFPRQGLILSPKLQCSAVQWCDHGSRVA

SEQ ID NO: 1005541 - protein, 75 aa, Homo sapiens
PTSGVQAIPGLSLPSSWGLRARATRTGGFLVVLSRDRISPGKPGGSGSPDLVIWSIWASQRAGITDMSHRARTAT

SEQ ID NO: 1005542 - protein, 74 aa, Homo sapiens
DLEDPGDCAGEELSPVVGPLKNRFLRPGPLPVHGPLPIPSPAEGIPGVAYLTYKVVYKLLSGPLHSNSKVYFIV

SEQ ID NO: 1005543 - protein, 53 aa, Homo sapiens
RRVVIPMRAWGGMGRWRHGQCQAKSYLPEGYGEPGLTRVDMAEPETPFFDPFD

SEQ ID NO: 1005544 - protein, 105 aa, Homo sapiens
SDEFGKYNASQGTYGEKKDEILGLRALEEDHFIWASGEMWRRQQNNLDRPEGDSRLTYWYADGRQILLGGVYRSTSYRVKYYLVVLTTTKPPTDSQFDYSLGFRP

SEQ ID NO: 1005545 - protein, 38 aa, Homo sapiens
PLDRVCTGSAFIARIPARDRMNRVLQDRAETEEERSVV

SEQ ID NO: 1005546 - protein, 126 aa, Homo sapiens
SPTSVDMGLRPSLKRVPSYSLREGMPKRTGVQGASRKLNTVEVTGGCTRGSMEDPCPFPVHTLPYGLLTGILGTMLYSKLINLSVSLSSVSRSSKLIKPKGGGVGVTPHVAHKYVYLLCTHKNKTI

SEQ ID NO: 1005547 - protein, 34 aa, Homo sapiens
ATLALAFYVVLVWLQVYLVDPSGVAAWGHAARHL

SEQ ID NO: 1005548 - protein, 94 aa, Homo sapiens
RILVDGTNTLHPKVCSTDGNGEQSLHNLMQWFRESVEGCENSHFSYPNCGFVAQGRKRYYANYKGRKIWQVPPAIGGLQKHFSKFFLGPNGSWI

SEQ ID NO: 1005549 - protein, 122 aa, Homo sapiens
RTGGKDTIKERYKPIRAEGTNYRTVYDKAGQAEGQVKEGYQSHRDTIVLLCKPEPELKAAIPSANPAKTRQGREVVNVLKSLWSNLDEVKKEREGRENDWKSVNLDMTSKFWTARGSGGCDK

SEQ ID NO: 1005550 - protein, 35 aa, Homo sapiens
LFSYRTFTAVHGIAFHPVHGTLATVGSDGRFSFWD

SEQ ID NO: 1005551 - protein, 166 aa, Homo sapiens
SDEVRTTAVGLRADKVDPAGSDGCRASAPSPRVEVYETHARIALERGDHEEFTQCQTQLKSLYAENLLGNGGQSYLAYRILYYIFTKNSGRHHQGAGIPHTRTEGRSLRGPCFGIKDSRGPGATTTVFPGSTAMHLACLATSLDKLADRERRVALRGMIKPVCGAK

SEQ ID NO: 1005552 - protein, 33 aa, Homo sapiens
GANDGLPPSSPTGRPTGGTRRSTLRNSRVTTLV

SEQ ID NO: 1005553 - protein, 45 aa, Homo sapiens
MVSWRPLMDCNWCLPDLGVSSSTRQKYTEGSSFGGLEILRKPLSG

SEQ ID NO: 1005554 - protein, 48 aa, Homo sapiens
  misc_feature (32)..(32): Xaa can be any naturally occurring amino acid
DACRGTNIDLYIDGNTPSLPSQWDGIVLYSLXGLPFPPVKGNIFPWVQ

SEQ ID NO: 1005555 - protein, 45 aa, Homo sapiens
DRGREEGSCVFNLALVYDLTKSQKYHSFQEWGKVSDASQVLGGFT

SEQ ID NO: 1005556 - protein, 70 aa, Homo sapiens
QSLVAFRRHLIKRKYFPGGEVRSGISPPFVGPASSSKGLNLYMLTLLPFPQPIWVYSSFHNPNQTSPATG

SEQ ID NO: 1005557 - protein, 45 aa, Homo sapiens
TSKSLGLQGAVITLRALHPGHMSKTLSKKNKTPMIETPSLPRTEG

SEQ ID NO: 1005558 - protein, 75 aa, Homo sapiens
VEGVSRSSLRSCRRWTDSNILVLQTKPLSILMGQRDSSFPLIHSNDSALSESWLKKADEKNGSLILQAQPPRMKG

SEQ ID NO: 1005559 - protein, 30 aa, Homo sapiens
MWEPQSGFSQRSGGSESVGGIQKITFTSIM

SEQ ID NO: 1005560 - protein, 52 aa, Homo sapiens
MCLQSQLLGRLRQENHLNPGCGTDPGCWSQDVGLTQDVGLTQGVGLTQDVGR

SEQ ID NO: 1005561 - protein, 93 aa, Homo sapiens
CDRVEELTELELEQNGSMSRADFEERDESKIPEGRALTGGARQCCIGPGMLLELNRMPPRLGPAQYRWKVNKLRRGRTGPGLSPRILACMPQG

SEQ ID NO: 1005562 - protein, 85 aa, Homo sapiens
ERESGSVTQVGWQGGYLGSRKPRPPGFKRISGLSLPSSGNNRRRASRGANLGILSREGVPQGSRALDLQVIRPLGPPRMWDGGTE

SEQ ID NO: 1005563 - protein, 119 aa, Homo sapiens
KDMNRHLSKEDIYAANRHMKKGSSSLAIREMQIKTTMRYHLTPVRMVIIKKSGNNRYWRGCGETGTLLHFGGDSKLVQPWWKSLWQFFRDLELEIPFDPGCGSDPGCGSQTSWVSPTSC

SEQ ID NO: 1005564 - protein, 33 aa, Homo sapiens
TDANFSRWRSTRRPFTHTPWLGVNVTIPSGTTV

SEQ ID NO: 1005565 - protein, 69 aa, Homo sapiens
APEGHQASVFQGQFYLVSLTGGDLELVGRPKEMAVSFKPFRELTNQSSLIHPQANEGGVVGPITEYSAK

SEQ ID NO: 1005566 - protein, 39 aa, Homo sapiens
AAPGRGIPFLRVWIRRSSDDAGALFPRVRGRLQSILVLA

SEQ ID NO: 1005567 - protein, 49 aa, Homo sapiens
  misc_feature (42)..(42): Xaa can be any naturally occurring amino acid
IRCGGGAESSNVLEQLTEDGGINSNLYFLLNREKPMFPTSEXCRILLEA

SEQ ID NO: 1005568 - protein, 113 aa, Homo sapiens
MAVADSWEEACWKTGRGTASVASPPELLSSTECRLWLRSSPMGGSTRKIFKTSEFAEVFLQYGVNVQIFGLGLFQEGAEVVQPIQLVSFIVLHGLLLKMLEYGQPEHVRGYRA

SEQ ID NO: 1005569 - protein, 95 aa, Homo sapiens
LITTPVEHGVLGWLLLLGWLLVVLLLGLDWFGALHRLYLLSSADLDGVVLNTLGAVAGCWGVYCGICCCPCDGNRSRLWWQMSSTNVDRETLDTH

SEQ ID NO: 1005570 - protein, 114 aa, Homo sapiens
RSRVALFMDTCPSSPSRLGNTHKPLPGLIPFSCSVKFSFTESHFEIMHPHPGAEPSKMMFPSYHFISKAWKFCDMSEAPSQQLVPVLTWYGSSITADQNMTEGISVTHSSDCVP

SEQ ID NO: 1005571 - protein, 31 aa, Homo sapiens
MAVGSGCSDPEWLSPGSPGGGAPFSRRWRQQ

SEQ ID NO: 1005572 - protein, 69 aa, Homo sapiens
RGADDYELSASGDYYPEYKLLFEGAGSNLEDKMLEDRFFEHEVKLNKLDFLNQFHFWWSSMPSEKLNGA

SEQ ID NO: 1005573 - protein, 59 aa, Homo sapiens
VDLTARSQAGGEVGPTVTVTPHFFHPCRLTFLAGWAGPHTGHLAGSRSSQFVNPWSISV

SEQ ID NO: 1005574 - protein, 46 aa, Homo sapiens
  misc_feature (35)..(35): Xaa can be any naturally occurring amino acid
GGEGEGAAGGRQARAVIEEVDWPTRSSEGVTGTSXRDGGQASLEKL

SEQ ID NO: 1005575 - protein, 32 aa, Homo sapiens
MGRAKEKGAWFLAVAFPWTCLRQGGLGLARGV

SEQ ID NO: 1005576 - protein, 39 aa, Homo sapiens
RSRGSRKEEGLSSGRSKHKGGLSTTRCKRRDFPTTPFSP

SEQ ID NO: 1005577 - protein, 51 aa, Homo sapiens
CHSVTVKGSVLSERDYESLVMMRMRMWAERQQLIARLQQADHEEADYVAPA

SEQ ID NO: 1005578 - protein, 177 aa, Homo sapiens
RTWVGEEGHCGGGACGVRLWKRRQDTRWGSFRLGSVGLLLGLLLLLQLWLGLSLLCWGWVGLCTGSFRQLGFLIALPLFLNGGWPVPQPPLYAARKRRKLYNGLMVLGRCKPVRASGYLQDELVGVRISMASSGILIVAVVLPLLILILVTQLLLVLDEIQEWLDTAGYIWCAVSPR

SEQ ID NO: 1005579 - protein, 102 aa, Homo sapiens
IKRDVSRSVMPAVGDLTVRDSSSQLPFISFLRYFCLVPMGCDVYRSCTLDIPSFLSFLFVFFVFWFLSFWFFPPCEGRKAPFYNTRAPGGSPGHKISQHRGP

SEQ ID NO: 1005580 - protein, 95 aa, Homo sapiens
  misc_feature (25)..(25): Xaa can be any naturally occurring amino acid
  misc_feature (58)..(58): Xaa can be any naturally occurring amino acid
SLTDSPGSGTHERTLRLVGHDDFWXSCLGDGPNTHCTTTFTFRFWGTTHDTLTHTLSXQQPPFYDCQTTHSPRTVQPLLDTDHRSTRRLDTSYLT

SEQ ID NO: 1005581 - protein, 68 aa, Homo sapiens
RPCLDGSSPVLPSPSSPERSDDAAAAGREGLAEGEAAGNVGQGGAPVASGAVPQGNTSLVNAKKNQNK

SEQ ID NO: 1005582 - protein, 153 aa, Homo sapiens
MRWPGEQIKSIRQDLTGQASAPSSRGEVYETQARIALERGDHEEFNQCQTQLKSLVRRELAGQWGAEFMAYGILYYIFTKKSGDITREWAYLTGEWKEYPWVAHAWALRTGGARGNYHRFVRLYGHAPCMSGYLGDKFADRERKVRLRGMIKM

SEQ ID NO: 1005583 - protein, 139 aa, Homo sapiens
RKEVGHCVLWWLPALRHFPFGPRSDWRDLPNIEVRLSDGTRARKLRYTHHDRKKGRSSSGALGGVCSCVEAGKACDPAARQFNTLIAVCLPQTGNRHKQGAGLYGRLEWDGFYSTTVTNPEPMGKQGRVLHPEQHRVVS

SEQ ID NO: 1005584 - protein, 73 aa, Homo sapiens
LDGSLPLLLTRQDAFPHVSATFSFPCTFDPPFTWLVLSLGVHCLCTPPSLPSAAGVPRSPSSSWSSLFPVCPC

SEQ ID NO: 1005585 - protein, 90 aa, Homo sapiens
SEGGRTQQPTDTKVIRVYPAEGDRNSADAPREKKKPCNQEAAPELRPGLSGDFQASLGREPRLGFCPFLPISSGSSFFLGVAPQFLVSSQ

SEQ ID NO: 1005586 - protein, 84 aa, Homo sapiens
SERGRTISRLLVHYMEGLKVADYAASDRCVALPRGAAVQAWMSSRAALYTSRSGLVLRMARGVTAENGCLGRGHVKLYPGLLYR

SEQ ID NO: 1005587 - protein, 165 aa, Homo sapiens
RNEVGPWAEEEMSAGAEQGGVWGGSVLPPVHGELLRNWILDCLPPESGWGLVVLLGRVQTLPPMLYWTCHGEGVPMPCPPTPVWTCQRGQARSGVGSLPGTLAQRHGRHSPLDPRRAGNSLSFAVGFGSIQSPQVAVCESSYSKFQEREQMVWEYLICRCWCSEI

SEQ ID NO: 1005588 - protein, 81 aa, Homo sapiens
GEKIGVSDLRMNKVTLHGSSIIGDGRAFFMSFTSICNRSGIFFSSSNSDNKGLISRVGGSFRVSRMLLSAGTGVLTSCGGY

SEQ ID NO: 1005589 - protein, 103 aa, Homo sapiens
QLGGSCHLCRWLFLHITTGASKRTGVGNPPGILAKFHSDFSMLNGSLWLGRAVLLLRSPLFFSLALIEAGDFPHVWFVCHFLKTTPCSLAPSPSILALPLALP

SEQ ID NO: 1005590 - protein, 104 aa, Homo sapiens
MVGADGVVGGVHSKWGVREMGVGTNRTGDSRFMSAPYPFHSSGVPSASLPGEPVLMYRVQPLMEQSSVCPNPKVPGYVSSDWTISCSVGLGPASGLPTSLSLVR

SEQ ID NO: 1005591 - protein, 81 aa, Homo sapiens
MTARKWILGPPYSWLKVPLLSAILKLIFSWITAKKKRTRSTMSVSILEGMSYQFPGQHAKQLEFLTRGANQVIKVVHVLGP

SEQ ID NO: 1005592 - protein, 33 aa, Homo sapiens
EGLWAVEVEGKEISSLVPNYLVSYSRLRKYKHY

SEQ ID NO: 1005593 - protein, 116 aa, Homo sapiens
YISRGSLSTWSMGSVSDRNKFPVSEENTNWMSPAMREAPTSLSQLLDNSGAPHVTIKPPGLTDLEVTPPVVSGEDLKKASVIPTLQDLSSSKEPSNSLNLPHSNAAVFIPCASRIE

SEQ ID NO: 1005594 - protein, 87 aa, Homo sapiens
SDTMEDGKNGRERVLFKSQSRQHSSSISKRFLLLGQQSAGISIQQHNQPHQAQAGSTVPASVMCAAVSAQQQQPLVLTPQRQLQPSK

SEQ ID NO: 1005595 - protein, 35 aa, Homo sapiens
  misc_feature (18)..(18): Xaa can be any naturally occurring amino acid
VVRGSHPALGRVFETSSXGKVVGVPGFDHVKGWWE

SEQ ID NO: 1005596 - protein, 78 aa, Homo sapiens
CSSMRCPMGRKKGAKLTPEKEEIDINTKRSKKLQKKYDERKKTAKISSLLEDAVPAGQASCLHSLHGRDSVAEQMAMC

SEQ ID NO: 1005597 - protein, 43 aa, Homo sapiens
HATPERNTCTYCLSTPALTPVYTVYTPPHLEEPMVKVNMLMFA

SEQ ID NO: 1005598 - protein, 33 aa, Homo sapiens
VTLAEVTDLYGQEKYTLASQNSLEVHIKYMSHL

SEQ ID NO: 1005599 - protein, 83 aa, Homo sapiens
  misc_feature (9)..(9): Xaa can be any naturally occurring amino acid
  misc_feature (72)..(72): Xaa can be any naturally occurring amino acid
GDSTRIPQXHTCAIFLNVLYNVLLRVPVTYYVPSPFFLGLTWVNTDTDDTCYCFLPKHTYYTLTTFGPRPTXTTYSGLPNLNV

SEQ ID NO: 1005600 - protein, 39 aa, Homo sapiens
MTRVGSRCCLGPGGVGGACLGPTHSLEPSKEQQIMDTAE

SEQ ID NO: 1005601 - protein, 50 aa, Homo sapiens
ILSGSERASCCLMHGSSPELGVPLQRQVHDAGEAWDLATLDFDPLGRCPI

SEQ ID NO: 1005602 - protein, 31 aa, Homo sapiens
MESEAGMRGGGVHAGPSVTPSRSRVLYCMPE

SEQ ID NO: 1005603 - protein, 114 aa, Homo sapiens
  misc_feature (86)..(86): Xaa can be any naturally occurring amino acid
MWRRPRRRLRSMAGLFLAAGRGRCKTLLCSQSMKVLKLGRAVGGSWWAASVAGQCPCVGLIELSGSVGVACQCGHWGPLTLVLVSXYLGYGYMGISWPGSLLPRALDLAPLSLS

SEQ ID NO: 1005604 - protein, 42 aa, Homo sapiens
VWVDIYPRQILEGSTVLVDLDSLGMSSGQPGQDPGLPRAEAL

SEQ ID NO: 1005605 - protein, 46 aa, Homo sapiens
GDIAHNGHQEVHTICSIGAVGLRALPLLSGYISGPHLLAEFLLNLD

SEQ ID NO: 1005606 - protein, 125 aa, Homo sapiens
  misc_feature (56)..(56): Xaa can be any naturally occurring amino acid
AIRIKVRSASGTRWALTGTGLYALLALVEGCTWRQQWRAAVVVACARRGGPLRVLXEALDEAFFEAPRRRGLFPSFLGVLRMLKAIDWRRSACLVEAGAAFFWASVVLCLRPSCRSRGAMGRGKQ

SEQ ID NO: 1005607 - protein, 51 aa, Homo sapiens
MVNVEKLLEFIVKKLLREDGGKTAMGTEERKPAGGIEIFVVVVGRQVNVSP

SEQ ID NO: 1005608 - protein, 60 aa, Homo sapiens
MRWHNGTRSATSRMTFWSKLRGRQPLGSRRKKLKGGSFHVHHVGGGTFVQEEIRVSNHTI

SEQ ID NO: 1005609 - protein, 119 aa, Homo sapiens
HLEDPVREQVRMASMESPSECFPARTTTGSMTPGERVGVDSINEQAGEQDMRVLRGGFLDRHKLDGFCQSPGPGHHQDGQHSRFSLRQPRFSRCAGRRRPGPPGEPVSSPGVDKGEKAF

SEQ ID NO: 1005610 - protein, 35 aa, Homo sapiens
  misc_feature (21)..(21): Xaa can be any naturally occurring amino acid
  misc_feature (27)..(27): Xaa can be any naturally occurring amino acid
DKTQVRSSLKRKKTRKFPVFXGRCHSXKQVGPRGP

SEQ ID NO: 1005611 - protein, 45 aa, Homo sapiens
KGRPQLYVSTTLVFSEISAVIAACLVGPSGTSRSLSFHRDCAAVV

SEQ ID NO: 1005612 - protein, 41 aa, Homo sapiens
SIRLWIWVPDNLKKRKERQRYYNPGNPHNVYMPTSQPPHLP

SEQ ID NO: 1005613 - protein, 51 aa, Homo sapiens
MRQVGSLWLCLADHELLDCVAFGTYSPLRVSCGGGFWACPFTLTSRVTCVS

SEQ ID NO: 1005614 - protein, 130 aa, Homo sapiens
  misc_feature (57)..(57): Xaa can be any naturally occurring amino acid
  misc_feature (61)..(61): Xaa can be any naturally occurring amino acid
  misc_feature (74)..(74): Xaa can be any naturally occurring amino acid
  misc_feature (96)..(96): Xaa can be any naturally occurring amino acid
TLRIALVTQVRAPSISCKIPDSQGEEMPEGQETLTGGPGDRCASQAFLRTLWPGSTXDWVXNKPCEICKFCALXVCLVSVKAKVVQEGARCGSLLXERLGERGGPNGPPRRGWKTEGKARAPHGPRVRRG

SEQ ID NO: 1005615 - protein, 33 aa, Homo sapiens
QQSADLAGKQLEDGRTLSDYNILNDASTGARMF

SEQ ID NO: 1005616 - protein, 45 aa, Homo sapiens
MYTSALPYSYTLRKVGQPPAAQLWGVLAQDGRGSMLGLSQHLPAR

SEQ ID NO: 1005617 - protein, 68 aa, Homo sapiens
  misc_feature (47)..(47): Xaa can be any naturally occurring amino acid
DLIYNVGSAADEIHPSVLSAVTGLKGGGGNGSPTSPPLWVPEEGAGXGYTAHHLEVMERNPSPAWRPW

SEQ ID NO: 1005618 - protein, 63 aa, Homo sapiens
MHASHFISIIILVKQWKSGEVEMMKESGHISSFWILLIRACISHAEGYHGGHLPTNWGVRYLP

SEQ ID NO: 1005619 - protein, 74 aa, Homo sapiens
  misc_feature (1)..(1): Xaa can be any naturally occurring amino acid
XTELCRSTWVGVIISSGEETMSTRALAQWQQKEQAIETVTSPRTGDYHQAQSPSVHGHGVGKVVPISTPSNPYS

SEQ ID NO: 1005620 - protein, 136 aa, Homo sapiens
IPGSGYAVTAANVRELTVTVHLEKCRNGRQRPRKDAHLIMPQSTEMAPHSCHSPRGRPWAGHQDTQVSPADRTPALGSRHRFAQKHWNHDSQAAKVRGEDGKGNTQANTSLKSTKREESPAPTAQAPVTVTEGASP

SEQ ID NO: 1005621 - protein, 38 aa, Homo sapiens
  misc_feature (32)..(32): Xaa can be any naturally occurring amino acid
EDAASAVSQQRHSIADLLLQDRVSIRTRLRSXSSAPPA

SEQ ID NO: 1005622 - protein, 42 aa, Homo sapiens
MQNLSRTMRSNETEDIFKSIPAKKSQRPDGFTAEYFFKEMES

SEQ ID NO: 1005623 - protein, 142 aa, Homo sapiens
  misc_feature (45)..(45): Xaa can be any naturally occurring amino acid
LVGLMTRTWTVPAHHQRGHRKVSVCHASVPPPASRLTQLAPPSRXKPPTEGAGSPAKASQASKLRASKEEKEDWLSHALSRKKPKAWPEEQHAGTSEALHLAGTAGHPPFAANLSPAHKGLSTQLLEGVWNNCTKRPWSGLG

SEQ ID NO: 1005624 - protein, 44 aa, Homo sapiens
KEQVFVREKESIWTMDSIARTAGRKENGPLKETWLKANDGESGM

SEQ ID NO: 1005625 - protein, 35 aa, Homo sapiens
MAHLVGCAGKAKLRLVPSWPEQEGLPPRPTHALTR

SEQ ID NO: 1005626 - protein, 37 aa, Homo sapiens
CGGAEDENSLHLGGGSCNAAKITSLHSSLSDRARPSQ

SEQ ID NO: 1005627 - protein, 37 aa, Homo sapiens
LGVRVFTSAVLASLYKFRRHSEHLCDLQISVKLELVE

SEQ ID NO: 1005628 - protein, 122 aa, Homo sapiens
TENRAGKIDFPRHLDFHVKDLIKKLLVVDRTRRLGNMKNGANDVTASSVFRSVDWEAVPQRKLKPPIVPKIAGDGDTSNFETYPENDWDTAAPVPQKDFTNLQEFLRTGAHIWKERRVKEEL

SEQ ID NO: 1005629 - protein, 43 aa, Homo sapiens
DANSNEVAHRCYDHLKNSPGLEEMLPHGLLAYLLARVSSLAGG

SEQ ID NO: 1005630 - protein, 56 aa, Homo sapiens
FYKQNPDPGLIVAEAEARRNSGQHLEGRKGELQSWLSLPVQEAILCDLLERPGVPS

SEQ ID NO: 1005631 - protein, 36 aa, Homo sapiens
WQEDYGRWKDSPYGIGPRRWGDNVRVVYKSGGRRAP

SEQ ID NO: 1005632 - protein, 55 aa, Homo sapiens
EQKTGSAQPATEDGSGSSHGSGHGRGRSNHGVGLKRFWHRLLSSMEKGWRENKHQ

SEQ ID NO: 1005633 - protein, 63 aa, Homo sapiens
EDPRCKSSERCTEDRSQSKCCEDFGQQRKNGESNEGLIYPDYSWKGYISKDEECVGTVSWQGV

SEQ ID NO: 1005634 - protein, 55 aa, Homo sapiens
QAEAQKKKVEAEVQVKPLVLLHRWRPQVHTACNAKGCGDRRYRDHEGCERWRSHR

SEQ ID NO: 1005635 - protein, 33 aa, Homo sapiens
GSLWQYNEAEECLVDDKEADVDRRWVSEVIGDQ

SEQ ID NO: 1005636 - protein, 57 aa, Homo sapiens
KCSGAIMGLLEASASQAQVILPPQPPSSWGLQLACHHTRLMVSSPSTDGGLAMVAQG

SEQ ID NO: 1005637 - protein, 70 aa, Homo sapiens
EVDHADNPRQPSPRLRKILMHYTGIDIHSRLLMDRNTACINYVKYSPVLRKGYVGTIDSSLYKQTGEEDN

SEQ ID NO: 1005638 - protein, 35 aa, Homo sapiens
MISEMEFMAYALVLVRCTPVAIGEIRCNEASYDGK

SEQ ID NO: 1005639 - protein, 81 aa, Homo sapiens
YFFVSKLDNAVITIIGQADLEYLTSSDPAIYGSQNAGITGDEPPCLAHQLRVEYRSLEIGDRISDKSAMADLEIPSSSDPP

SEQ ID NO: 1005640 - protein, 72 aa, Homo sapiens
RGSSSSTAFLLALPSSVSLAAQYRTLFVAIAPSNNFLSSNIFLPLASRQPDPAVPGPYPHWVPQLAIQSIHG

SEQ ID NO: 1005641 - protein, 37 aa, Homo sapiens
KAQYNRGELGKDEAKVDVRIDSGLSSVPQQAIPTSSL

SEQ ID NO: 1005642 - protein, 62 aa, Homo sapiens
YCGSHAYLTLCISRGQAAVPAEQLASMIFSKTPSWVTLTVCGCYHKHVHLFLQGTLHEWSCV

SEQ ID NO: 1005643 - protein, 84 aa, Homo sapiens
MPPPGSVRCWLSTKQNEHLVEDYEKLASDLLEWIRRTIPLLEARVPKKTIQEMQQKLEDFRDYRRVQKRPQVQEKCQLEINFNT

SEQ ID NO: 1005644 - protein, 54 aa, Homo sapiens
MPSKPLLEHLPMTVGDLKGAPLGANGLSEGSVVLCGLALGGPDLIGADFPLTLK

SEQ ID NO: 1005645 - protein, 119 aa, Homo sapiens
MHIPKSDTQNRRGSTGFVGGSYIYDPGLAVLGLSWSKLELLQSTLLADQLLKLMSTCRIPSRIMELLVSWHRSLKSDTSSTEIEEAMKRVREAQSLMSAAIEPDKIRRKKKAFKIKITF

SEQ ID NO: 1005646 - protein, 45 aa, Homo sapiens
  misc_feature (36)..(37): Xaa can be any naturally occurring amino acid
AVPGFMKGARLLLMLENIDRRKNEIVPIDSNLDAEXXFRTHTRNS

SEQ ID NO: 1005647 - protein, 40 aa, Homo sapiens
WIWRSEALEGKDLGPALAIGHSQTLYKNWGHRVEEKRVIR

SEQ ID NO: 1005648 - protein, 45 aa, Homo sapiens
MIIMELRNLYRLVYTILYLLLSYGDLTMKSHICSPSLESSRCDLW

SEQ ID NO: 1005649 - protein, 40 aa, Homo sapiens
GLIPFKQYAGTYVLFVTVASYLRPDGPVTLNCNALTGSSL

SEQ ID NO: 1005650 - protein, 42 aa, Homo sapiens
IPCERLAVGDDGRLDERTLEARVRKPAEAERYKLERLAEAEK

SEQ ID NO: 1005651 - protein, 57 aa, Homo sapiens
AGGRSMAGWPCHHGPVATAISGLVSICTCQASSISTAASNHSKHILPSTSSFNTIPS

SEQ ID NO: 1005652 - protein, 89 aa, Homo sapiens
STTDPLERWRLGTNDRTLEEPTRAYLRLQRDDHVQPTPRKTAAMLVAHLPKVAEILKSQFQPLVKNDCVTGQPAVVELDNHDKLLLASN

SEQ ID NO: 1005653 - protein, 40 aa, Homo sapiens
SCILVSPMPQVLTEAFREKDTAVQGNIRLSFEDFVTMISS

SEQ ID NO: 1005654 - protein, 44 aa, Homo sapiens
HVCQTTDYHRYFDGTLLFRAYSLLNTNSVVSLHTDSPGDSSYDV

SEQ ID NO: 1005655 - protein, 38 aa, Homo sapiens
MTDQVSTHINKRSGYDHRLSLVFSTRDSDRLSTVRIHH

SEQ ID NO: 1005656 - protein, 38 aa, Homo sapiens
QQLMGLSHKTVPYFRCQFQVLGAWAPTLLSNLATNQWG

SEQ ID NO: 1005657 - protein, 40 aa, Homo sapiens
LVITELIVLDQNICDVGFKERKQPVFFFTFFVLLSLLCSL

SEQ ID NO: 1005658 - protein, 38 aa, Homo sapiens
  misc_feature (2)..(2): Xaa can be any naturally occurring amino acid
YXGYRWKNNEDKQDMSQTLEPETKKQFLTHVLVASSGD

SEQ ID NO: 1005659 - protein, 58 aa, Homo sapiens
  misc_feature (45)..(45): Xaa can be any naturally occurring amino acid
DGVGRGAAQVEGLAQVAWSSALMECPHPCMELCERFAMHCVHCSXSHVDILVMFWCSM

SEQ ID NO: 1005660 - protein, 85 aa, Homo sapiens
MSVMGMPPIFFNIMRRYWTIFYFYLFIYFEMESRSFTQAKCSGTILAHCNLRLPGSSDSPASASRVAGLQVCTTMPNKILVFLVF

SEQ ID NO: 1005661 - protein, 143 aa, Homo sapiens
MIRIELVPPYSLMGGPSLLCAGFCRVETSSFPDGVAAWVEGLSLLRWGWLPGGGSPQFSDGAGGAETLLTSQMWSWPGLRCSSYPRWGWVAEVLPISQTLGSLGRDAPHFLDGMAGLGRDPPHFPGLGQAMARGAPHLVGLVA

SEQ ID NO: 1005662 - protein, 73 aa, Homo sapiens
ARTYLYPPTDQATRTKGRTQRYVQGINQIPRGTVNLQYKVKISNKFYNPVLISDTSFKDNLFSKAYSSFVRLA

SEQ ID NO: 1005663 - protein, 94 aa, Homo sapiens
MQQMLRNLLSPSRSICCVTDGWVPDSSYSVLASPHLLEVWTVESRMDDQRSKPSTSAHGHAMILIFMVLGCESRVISFCIQSGMPGYMVVPPDS

SEQ ID NO: 1005664 - protein, 32 aa, Homo sapiens
  misc_feature (32)..(32): Xaa can be any naturally occurring amino acid
MPLKISSGCFGNRRRTLLRSVGFISTIIWAAX

SEQ ID NO: 1005665 - protein, 36 aa, Homo sapiens
ESSSVPFTRGWHVLLPWLMRIFRAISADTGSHQAET

SEQ ID NO: 1005666 - protein, 89 aa, Homo sapiens
MAHAFVETGPERIPQETDPARVIDDVQLVFLQNGKKDLAAVRSKDFAQKAVGEECPQTELALLEQRQRQQHEQHHLQTADQLVNAAFYL

SEQ ID NO: 1005667 - protein, 57 aa, Homo sapiens
  misc_feature (5)..(5): Xaa can be any naturally occurring amino acid
QCALXCRKASATLGAAGRILAERGVDGITGNPEIMARRVEESIGLATALNPLIGYYA

SEQ ID NO: 1005668 - protein, 53 aa, Homo sapiens
GRADKYIYNRYGLDALSLCVWGEARISVSRSARSRGRSAVSFPSAITITRSAS

SEQ ID NO: 1005669 - protein, 41 aa, Homo sapiens
MRSRSDPARVICQIESKSGYFRVRVMRFPAKKPREKRCADE

SEQ ID NO: 1005670 - protein, 66 aa, Homo sapiens
RDRYESSRYRYKAHIWMISLCLESRPVVHAMEILCEDFLTFRRVEIVQISFGNLAGAALVDNLIND

SEQ ID NO: 1005671 - protein, 61 aa, Homo sapiens
  misc_feature (16)..(16): Xaa can be any naturally occurring amino acid
  misc_feature (29)..(29): Xaa can be any naturally occurring amino acid
TYTNRAVYPPIVRSTXFYSIASAVKHHQXLNPDPHASGYPSIAIVVVYPKTTIIPPCRASR

SEQ ID NO: 1005672 - protein, 79 aa, Homo sapiens
VHDRIELGTFRVWNDFSHLWQSPARAGVHDEQLRPKTLPSGPASPKRKLEAAEEPPGEELGSSGVGNSATRARLLSSSP

SEQ ID NO: 1005673 - protein, 50 aa, Homo sapiens
MIESSLLPKMSDIRAGKDRYTDPGRIATRWPRTRRRQWLADRVSLSPSPC

SEQ ID NO: 1005674 - protein, 116 aa, Homo sapiens
  misc_feature (62)..(62): Xaa can be any naturally occurring amino acid
RQYRIELVPELLMVLSDHGCHLDYGWVYLSQPTDSNVESPVARPSTDTPRNNTWHPSIQSSXHSVLTITVVDSLQSTVSVIPVPWEAKVGRWFKPWSLRTAWATCRDSISPKKYKN

SEQ ID NO: 1005675 - protein, 77 aa, Homo sapiens
RLGAINQLMGLNLISLDLSPTSDNSLLFHPLETLSSPGFSMHLNSPSIYRASLFQSPVLAPLHLPDIRTLECPNAQF

SEQ ID NO: 1005676 - protein, 82 aa, Homo sapiens
LYSRLLPGLGTRRTWQLARLSLGGVRRCVLVGDLSWLWFVRLWGYQRAGPPSWAALLTAEHTVCLAQIHKAGVQALVPRNRG

SEQ ID NO: 1005677 - protein, 84 aa, Homo sapiens
ELQVVTTVSIYSCLSYQKNTDFAQRAIMDYPQISKVLEDRDDPMTQYSVHKLSYLRRLALSFRKLLDYGQAKVIIVTQGTQEPG

SEQ ID NO: 1005678 - protein, 130 aa, Homo sapiens
SPALGIFKIKFFLIAAKRHMKKCSSSLAIREMQIKTTMRYHLTPVRMAIIKMSGNNRCWRGCGEIGTLLHCCWDCKLVQPLWKTVWQFLKVLKTEMPFDPAIPQLSVYPKEYKLFCYKDTYHTFTAALFT

SEQ ID NO: 1005679 - protein, 75 aa, Homo sapiens
FAGRISRLPPGQLGHSAIPACFSSHNLCPPHCAQASFHWGGVHSSRSSPVQQQHNIVMLQLRVPQLAHSVLHGPQ

SEQ ID NO: 1005680 - protein, 38 aa, Homo sapiens
QAESDHDDDDHLIKQTQRQTTHKRRRTPTPLTTPTGGP

SEQ ID NO: 1005681 - protein, 67 aa, Homo sapiens
LASVSHGGILILTSNHLSCQRNYKKQAIWSDIVLNGIVEDITISSWLDHVADTFRKLRCEPGGQIRG

SEQ ID NO: 1005682 - protein, 44 aa, Homo sapiens
PAQYPKHSEVLGGPHKGSSNLQIIPFNLKSSMDTTESSKRSSLP

SEQ ID NO: 1005683 - protein, 47 aa, Homo sapiens
ITLCTQCPDEGGTKNATEKPRKQAKEMDEEDRAFKQKQKEEQKKLEE

SEQ ID NO: 1005684 - protein, 43 aa, Homo sapiens
  misc_feature (29)..(29): Xaa can be any naturally occurring amino acid
GTSVKVEEWVSLLKSEETPGAQCSPGCPXRGPSDACFTTFSDT

SEQ ID NO: 1005685 - protein, 61 aa, Homo sapiens
GRTRGDGSTRQDEGNAREHQKPEDMSDNDRPQSLGTEFNPADTFIRGLSHLHELTAERIKY

SEQ ID NO: 1005686 - protein, 41 aa, Homo sapiens
LRGSPRKIRTSVCLMEEFNSDQNSSLLSEEQSRNNATLVST

SEQ ID NO: 1005687 - protein, 38 aa, Homo sapiens
GSREVVRRALSRPNVVCCGLFFESEPVSASISAILAKV

SEQ ID NO: 1005688 - protein, 72 aa, Homo sapiens
MCGNECDLYRWFTGVALGPFSELVGVSCRNAHLCLGVSCQEGEADILRFCLVLPWLKPHNHSSAPQWAQALV

SEQ ID NO: 1005689 - protein, 40 aa, Homo sapiens
MLVSILCLVDWGLQVWACSRVDQRDLEVRDRRSCIHGKIE

SEQ ID NO: 1005690 - protein, 92 aa, Homo sapiens
GSIKYISAVDNRKTQQFSTSPKNFNIANTGHCELTHRNTRKCTVLKLHNQNSNLGTAPNLPPQWWRLTQKLPCGPFFGRHQAREHRHPDTDR

SEQ ID NO: 1005691 - protein, 53 aa, Homo sapiens
ACGGTPRRGWHVPAWYALNPASAVRCPTHGKVVHPWAGVVGGRLAPVCDKCPK

SEQ ID NO: 1005692 - protein, 73 aa, Homo sapiens
GLHSDVVLREPVLLTYATTHHRDLQTRGHRYSLMHRHTHKDILHRRAHTVTYAWKTHTMHTDSDNIDMHTHTH

SEQ ID NO: 1005693 - protein, 56 aa, Homo sapiens
MTEAGITVTVPTTGQALQFLQPFDNGTGTALEWTCRLLIKGQRGVVPFDHISSCRP

SEQ ID NO: 1005694 - protein, 34 aa, Homo sapiens
LIRIDARSPELITGGRLESQLLGRLRQENGMNLG

SEQ ID NO: 1005695 - protein, 41 aa, Homo sapiens
GARYPELIMVKILSLLKIQKLAGLGRAQVLDGELLNRYLYL

SEQ ID NO: 1005696 - protein, 41 aa, Homo sapiens
MLEDLVVQNLDAFQAGVNERGDGYKLPLVLDLVGRYPCLDW

SEQ ID NO: 1005697 - protein, 50 aa, Homo sapiens
LIRSSSVPEKKRIIRNLKDEIETRRENKHFNSSYLNSDEQNRRCYLPCPS

SEQ ID NO: 1005698 - protein, 56 aa, Homo sapiens
LIQLRRSVPETGSRCSAGDHVCYWRRVTASTYFLPPGVTFDQRWGTPSTTSYPARH

SEQ ID NO: 1005699 - protein, 74 aa, Homo sapiens
  misc_feature (61)..(61): Xaa can be any naturally occurring amino acid
SWYPTAPVRGHGLISWNGPAPCRGRVGAHGQRGGARLPLQDLAGAVLRRQGDRMLRGEHQXVRQDRVEHQEKHH

SEQ ID NO: 1005700 - protein, 57 aa, Homo sapiens
MMGSKGSDQIAERLVRDRYQRDPSDACEHYSLEVPVVEGIPESYPADFHAGSDASGE

SEQ ID NO: 1005701 - protein, 80 aa, Homo sapiens
MGHPERCKLGLEDVECSQGKRVGWSDCKEKVSGGGARDVGKSSLGLVAGQQGPGRGVGAESLGEAREEVIRWPSRASFLV

SEQ ID NO: 1005702 - protein, 70 aa, Homo sapiens
LSALLRPARGGEMGFTVQHLLDRLQQLCQRAAFVDETVGAGGMRHARIDLGLLRGIDQDRLLRVAAADFF

SEQ ID NO: 1005703 - protein, 58 aa, Homo sapiens
LELGPEHQAKEIVATRFPSCQPHFVGNYIQSFRPKPRPAGLEDSAEVSAETGLGKLQR

SEQ ID NO: 1005704 - protein, 120 aa, Homo sapiens
DGTNTIGDLLELGSLGWRISLGCLGTAGRAGWGPDLEHRSGQCLIRKVALGPGTPLVVPDALGHLCGLQSFIPIAVGTTPLVDVVAQVQDEAVAIVEALPGHRYLGGTDHTPPFDLEESL

SEQ ID NO: 1005705 - protein, 75 aa, Homo sapiens
TLICDDTGLTRDVTMDASKSENSLKTLSTKGDLCLIKLRRQVNLQLLSNHQQQLQADRFKAKQMLVRPVLSQITL

SEQ ID NO: 1005706 - protein, 82 aa, Homo sapiens
RRYQQHGGGTPEFLKAGKEPVLQIWRVEKFDLVPVPNKLYGDFFTGEGKVNPEDSAAEERTICSMTSDYLAGPRGAAKDEKR

SEQ ID NO: 1005707 - protein, 83 aa, Homo sapiens
SQEYALYNICVKELMMLLEKMIRKKDWECVICYGLCYGDQFDFLACMHIYQLDCIDDWLMRSFTEPSCMEPVDAALLSSYETN

SEQ ID NO: 1005708 - protein, 35 aa, Homo sapiens
LLFGGFAGLTSTVICRWRVLGWKAGILTGCREPSE

SEQ ID NO: 1005709 - protein, 35 aa, Homo sapiens
PATLGDLWGIYAHVLLSNSLRLAQGTTSDSIPQIT

SEQ ID NO: 1005710 - protein, 109 aa, Homo sapiens
MAGIRTSSEDLPSVMRIINFLLLGLDFIEELLQGEVDGSPRAGATTPVAHPLDGVEDVRLAAVLVEPKLQPLFVGVLHGPDARVRVGNLKLFGEVGTNWRTVRKLPVPT

SEQ ID NO: 1005711 - protein, 53 aa, Homo sapiens
  misc_feature (8)..(8): Xaa can be any naturally occurring amino acid
DGTNTDNXLSTNQKALLELRGSTRLGELDDGLLREFKVGTVLLCIPLDSCYAV

SEQ ID NO: 1005712 - protein, 46 aa, Homo sapiens
AVCTLDELDNGNPPKLSHTHAFVWLLSSVDSLMGYEDLNSEIKTFS

SEQ ID NO: 1005713 - protein, 70 aa, Homo sapiens
  misc_feature (59)..(59): Xaa can be any naturally occurring amino acid
RVIRGSPSRTNKNECLMVIGLDFHTVNYSSIFDLSSEIIFILAEITYFNIFFKLKSGGXYQNFPVRLKMS

SEQ ID NO: 1005714 - protein, 33 aa, Homo sapiens
MDRNPEHSSISGKFGLDQFCGWDGSEAGIPKPR

SEQ ID NO: 1005715 - protein, 89 aa, Homo sapiens
MSCCLSVVKRGHTGTRCCALHFQRLRYSLYPEYEKGNGEILLTLTGKELCPPCWVKLVTMIIEAVYEENECLIDEVYYNLEVIGRNAGT

SEQ ID NO: 1005716 - protein, 106 aa, Homo sapiens
RIVELVIQALVHGTNRDYYSITINYREEMNWEQKMLLNLHKKSGMEGLTLQDYSEHGKHNESVVKEMWESAKNYNKAVEEEDKMTPEQLAIKNVGKQDPKRHWEEH

SEQ ID NO: 1005717 - protein, 81 aa, Homo sapiens
  misc_feature (2)..(2): Xaa can be any naturally occurring amino acid
PXELVNPHHSSDNSSSDHSSKENQASNDAHDGDGGRGRRLPSQGEGLGQTLMLHMAGVSLLLSRRHHHSRPLREGSIPGRP

SEQ ID NO: 1005718 - protein, 40 aa, Homo sapiens
SRGPGVITQYHLVHARIVMKQLVHLLPSDAQDAPRLVHPG

SEQ ID NO: 1005719 - protein, 51 aa, Homo sapiens
SQSGVRMLGHDEDKTRISIRGVPEGNGVPFLTEEELSAVLQQCWRADVSGM

SEQ ID NO: 1005720 - protein, 68 aa, Homo sapiens
RHPSGEEIVTALLARITSYRSTAVTPLEAFLSAQQQFRCKSGAGVLALVWLAGWQGHRHRHTGAISVL

SEQ ID NO: 1005721 - protein, 68 aa, Homo sapiens
ETDRTRKTLNTSWEITLDEIVSIARLMRLTDSFNQQNSLRTIKRSLLGDCPAQLGCNCLTGPPLPHDY

SEQ ID NO: 1005722 - protein, 50 aa, Homo sapiens
ATQIPQETASGGNWKVTKGIRKPVGSRRTRFNKSSGLGVVDKLGTWTGHK

SEQ ID NO: 1005723 - protein, 61 aa, Homo sapiens
TGNLVAPDTEAHGHMLEAPQNQPVQLDERTQASSWGQVRSHHPKVLHIQQDGRTGPPVAGF

SEQ ID NO: 1005724 - protein, 60 aa, Homo sapiens
MDLPWSSGVSIWVARPPSGPGTAGVRMAIAGLTIARASMAVSLEETMKNLQDDLLVYGEL

SEQ ID NO: 1005725 - protein, 57 aa, Homo sapiens
ESMFPSGGGGTNRRVGVMGADPLRRTWCRPGEMSECLVLLVSVSIWHLPSLLLSLVP

SEQ ID NO: 1005726 - protein, 34 aa, Homo sapiens
MTVRNTGAGTNSGFFNRRILLCLFRFHSVETFLG

SEQ ID NO: 1005727 - protein, 34 aa, Homo sapiens
VSQKQPTSSFPHHRTSASESKVVAPIPAITSAPQ

SEQ ID NO: 1005728 - protein, 35 aa, Homo sapiens
FLLCSYFSGFLLLCVFYKYVSSLLISLSSLPQCKA

SEQ ID NO: 1005729 - protein, 36 aa, Homo sapiens
MAFAICYAVNRRTSSHCSVSCEVQGTYSLEFYVVAY

SEQ ID NO: 1005730 - protein, 48 aa, Homo sapiens
GGSGSEACTLAGIPAGPGRSPVESTGPDSWVSVWTWVHIISQQLVDTC

SEQ ID NO: 1005731 - protein, 134 aa, Homo sapiens
TASDGWLDYASSFDRLIPLLPRRLQYTLVQWISEVSGHLVPLQPQVSHITSRLFVSEISEIVAVLKWNRFSILGHSFGGFVSGMFSCTFPEMVDKLILLDTPPFLLESDEMENLLTYKRRAIEHVLQVEASQEP

SEQ ID NO: 1005732 - protein, 74 aa, Homo sapiens
SLLRRLLPPLTHHNADSLRITIVLMAATHNAKSINETIIRRRIVDPTLRCIELDPYPERIDEAEPCFETASRRV

SEQ ID NO: 1005733 - protein, 39 aa, Homo sapiens
KTTHWPVVIYKQKPAEWITAGPSTVRGNNKLVWVILELE

SEQ ID NO: 1005734 - protein, 62 aa, Homo sapiens
RASFEMQEKLWSGGSFNTRGNSNDREAALLPVSPTNQREALRTNSCVIPLIEVIILALSLAY

SEQ ID NO: 1005735 - protein, 63 aa, Homo sapiens
QTRDGIDIWSVSAGAHVSRELVQGGMHRSGEYTSTRIHVYDIWRSARCSYIEGTCIGEVCMAV

SEQ ID NO: 1005736 - protein, 71 aa, Homo sapiens
MLHGSFLAAVGNLTRGSLPATEWVSSRFLSFWRPAAGELATGAAAWTRLAALHLGCRPTLRRHLAGHPRAR

SEQ ID NO: 1005737 - protein, 39 aa, Homo sapiens
RTFQYRDRYMNGTAQNGNAVNLHMEMPKLHAMWKTRREC

SEQ ID NO: 1005738 - protein, 50 aa, Homo sapiens
EVYGSCGPAELNSSCSADILKERMRSLDKRKSNRNFWNSGPIFPGRRARS

SEQ ID NO: 1005739 - protein, 57 aa, Homo sapiens
CRHDYLDWASLGATSKYGVCPLSESRFSVSFQHPVNDSLVCVVMDVQDSTHVTLYNS

SEQ ID NO: 1005740 - protein, 63 aa, Homo sapiens
GADRIELGTIRAMISRRNFPTTNHNLIGNLLSENLAKGKTPFLICLIRVAPDFMSMVTNGHRL

SEQ ID NO: 1005741 - protein, 45 aa, Homo sapiens
  misc_feature (20)..(20): Xaa can be any naturally occurring amino acid
  misc_feature (25)..(25): Xaa can be any naturally occurring amino acid
MITDVLIRWYTQRRGNNVVXRPRCXLDDRPGYGDGGIPLDVDPAR

SEQ ID NO: 1005742 - protein, 51 aa, Homo sapiens
IEEPKGTHPVRVRYVGITDISYPKIITDAQENAARRREQIQQEEAQREISK

SEQ ID NO: 1005743 - protein, 40 aa, Homo sapiens
MVDVPMSTWLLPENIADVLPSEARKIEELRRRLLDRFRSY

SEQ ID NO: 1005744 - protein, 105 aa, Homo sapiens
ENTPELAIAHEQAQDLAAPVHAFDQRRIAIGGGRVAQAELLSDDGRERRAMPGETGSRSSLAGPGSSRGEPDLFRSQRRIGQNPPIPFLGRPMAGASLFALLDDI

SEQ ID NO: 1005745 - protein, 76 aa, Homo sapiens
IYDGSSCAAVGHLIVVTASYRVGVFGFLNSASGEVSGYTSAGCWTSVAALDLGCSPTIRGICAGTLRALCPLASQH

SEQ ID NO: 1005746 - protein, 62 aa, Homo sapiens
SNRAGTGRTLQMSLLPQDAQTREGSWNAVLRISELQRLYHAKHDVVSPQDVLQYMVRDAENP

SEQ ID NO: 1005747 - protein, 67 aa, Homo sapiens
LRRLNGSAAGLVLVMTMAWAAKHLDPRVFLVALPTEADFQLVRDVVLCSLLIFLPEGVDTSLKISSS

SEQ ID NO: 1005748 - protein, 77 aa, Homo sapiens
MIELVPVSGDNREGAGFTAPTSALHGDDLIENRASFIEADGDATVEARRLNNLREGLVIERNAEKSDYKWHRYNYYW

SEQ ID NO: 1005749 - protein, 43 aa, Homo sapiens
VTRYFDQHPDILPCHVLTVQAKGIAWVVAELTLRNEQWNPLAA

SEQ ID NO: 1005750 - protein, 86 aa, Homo sapiens
PVLDYQGRLEMGMDSSSKLLSGITGVGRLYLKIRWEKWQGDQGPECVLELIQALESVSEDRAIKALVLTGAGKGFCAGGDISGMQR

SEQ ID NO: 1005751 - protein, 43 aa, Homo sapiens
MTGRLNGNVDRAESIPSLTIKINHLRLIGDVEDHRQNLHTITL

SEQ ID NO: 1005752 - protein, 67 aa, Homo sapiens
QSYRIELVPGLVHGSQFCSARDPQCCRVRVGELEQDWLPVNKSWCLNERHYGGLQGLDKAEHAAKHG

SEQ ID NO: 1005753 - protein, 49 aa, Homo sapiens
RADRIELVPRHFMTGRTTRVASYRNNNFFGLVDGSELRSAIPGKNQNDD

SEQ ID NO: 1005754 - protein, 51 aa, Homo sapiens
VPQGNGEFTPYAGTVVDLNDNFSAYASYTRIFIPRSERDSSNALLPPQTGK

SEQ ID NO: 1005755 - protein, 56 aa, Homo sapiens
MPKLYDFCSRISNKRGKARLGRVGTTLGVVSIFYLGSFSYQSSTLLPRMYTHQQDT

SEQ ID NO: 1005756 - protein, 49 aa, Homo sapiens
LRKKREGRMVLGVSTPALASTGVASVHQTRGVDAHPTRRPRPVFPKPAH

SEQ ID NO: 1005757 - protein, 43 aa, Homo sapiens
VSEQVKDIYMAAGRQNRAKQKGKHLIKPSDLLRLTYYHKNSMW

SEQ ID NO: 1005758 - protein, 33 aa, Homo sapiens
QRKNQEFLEGTHLWGKSWKPFTFLVLLELEKLP

SEQ ID NO: 1005759 - protein, 154 aa, Homo sapiens
  misc_feature (1)..(1): Xaa can be any naturally occurring amino acid
  misc_feature (127)..(127): Xaa can be any naturally occurring amino acid
XCRHNYELSGPMSLQRRVQPRVNGSFFKKGPLHHHNLLVCHVTDFYPGSIQVRWFLNGQEETAGVVSTNLIRNGDWTFQILVMLEMTPQQGDVYTCQVEHTSLDSPVTVEWKAQSDSARSKTLTGAXGFVLGLIICGVGIFMHRRSKKVQRGSA

SEQ ID NO: 1005760 - protein, 64 aa, Homo sapiens
  misc_feature (11)..(11): Xaa can be any naturally occurring amino acid
MVELKLSSLCXVELKADFVDEDYHFGERLDSHVASEDKKRISGSKLQKEDLTIQLPNDGVGCCD

SEQ ID NO: 1005761 - protein, 45 aa, Homo sapiens
EECAQPNTVDLSFFAAPATVGSWGTVVPTISSLIRLQRDAATWQV

SEQ ID NO: 1005762 - protein, 70 aa, Homo sapiens
DPPATEHLKKGDYCSWSRLFSNRSASRCNRHSWYIIIDIQDSYEDFRSVSKTWPIPGFNTQLIKTRVLIV

SEQ ID NO: 1005763 - protein, 74 aa, Homo sapiens
FFTFVAQDDVGGELTSWRERIARFNALVRRIKGLFQRRLFAKLRGDQRTQDLQEFIAARQLHFEQQAWRFVDSG

SEQ ID NO: 1005764 - protein, 50 aa, Homo sapiens
CSFGRLETHGNERDHTSYPGKDTKITQLPELRKFMCRKAKQEDRKSERRM

SEQ ID NO: 1005765 - protein, 54 aa, Homo sapiens
MLNVRASDYQSILNLRSARNSSRSTGCERKPGIRILRNINMCRMHLAAVGSWGH

SEQ ID NO: 1005766 - protein, 47 aa, Homo sapiens
PELIMVGYPPVDIGIDMLNGVTGLELKGAGLPVRVFTKICMLRAHDR

SEQ ID NO: 1005767 - protein, 59 aa, Homo sapiens
  misc_feature (55)..(55): Xaa can be any naturally occurring amino acid
SACTKSKTETHELADRLSSSLNSNQTRIIPSKESEAIHSSPALVVRIACEASVQXGAVI

SEQ ID NO: 1005768 - protein, 49 aa, Homo sapiens
MSSTLSRNWASDCAITFQVRPLRLPLVDIRRTEVGLQRAEQRIERHPLR

SEQ ID NO: 1005769 - protein, 154 aa, Homo sapiens
MMVMGCWRLWGLTESIRWCPSYPSKAVSTLVVLQTEAKPRLSRGWSPYRRPVDVQFCLGLSTQGTDPRNFPICFCGNKNAKKAPALELYHQRVKRGSQNAAPDAPQVLFFLSLFFETGFLLLLPRLEGNGVQSRLTAASSASRVQEILLSQALQ

SEQ ID NO: 1005770 - protein, 57 aa, Homo sapiens
HGSERIMVLSCIMVLSCIMVHSCNPSYQEAEAGGSLEPRRQRLQLAEIMPLHSSLGD

SEQ ID NO: 1005771 - protein, 50 aa, Homo sapiens
LCCDVTGQDLNCSFCCLDPSGRPGSTGTGPTRTRYWGYGATRRTLHYYTD

SEQ ID NO: 1005772 - protein, 76 aa, Homo sapiens
KIVPLHSSMGDEARLSHKKKKQSYLKFLWGNQISLDSDFLGYGLKLTITFWLMEWLIGFSGIARCWEFHEGTQDLP

SEQ ID NO: 1005773 - protein, 33 aa, Homo sapiens
LEPHAAIRIIIQELDDLKEVVGLPGRPVFPCSS

SEQ ID NO: 1005774 - protein, 118 aa, Homo sapiens
  misc_feature (47)..(47): Xaa can be any naturally occurring amino acid
RYVGPTVRDTNTATMRSVEQSTHQQPEEEKEGVESGYYREMNEDNAXAHTRPYAQSVANILQSMVESGRMHSVGKRSKIKDETPQPVARSRCQMACAPFRGGPPRNNKLSRRSIIPNG

SEQ ID NO: 1005775 - protein, 76 aa, Homo sapiens
RETVGPCIEENWVTRTTRFKASQHAQQQCKVIITDKQWDTHITPLCTHNAGTHTHPHAHTQNSTGTHTHTHSAHTN

SEQ ID NO: 1005776 - protein, 41 aa, Homo sapiens
GSSLVVGFRVPIAHVSVVDLTCRLEKPASYDDLGKVVMQVS

SEQ ID NO: 1005777 - protein, 73 aa, Homo sapiens
MCLLGVHSGLLLHPTSAWMPCRTVDHYCHQLHELSWCTYKRSVETQPVRGREPGCLQEAPFHSLIHASRHGGR

SEQ ID NO: 1005778 - protein, 78 aa, Homo sapiens
MRTLLHHGRGPTLGSFNFQGVPGWSSSSTENRSCVSVSYCGEPCLVNLVELWWWDGADAGELQRITSDSGLTAQAQAG

SEQ ID NO: 1005779 - protein, 57 aa, Homo sapiens
VTTNGCELRLRIRMMDANDEASVEGYPRLFSAALSSVEAPLSSRCSAILVSSSVRDG

SEQ ID NO: 1005780 - protein, 41 aa, Homo sapiens
VPAALSDVGRTHGCHLSSHVRLKSPSHCLGLALEHSELVTA

SEQ ID NO: 1005781 - protein, 99 aa, Homo sapiens
SLTLEIPVERERQLSDTPVLWEHRYCWVCLPQRNGVPNTRSRGTITAVSHWNWRTRLLGLSVTKQDLGPVPIVESSRGGLQHPAQPTELQISCSFSLST

SEQ ID NO: 1005782 - protein, 111 aa, Homo sapiens
SAADVVVTLEDPTAHSLPGCRSQLPRIFTSIGEDYDELLCCRPSQLRILMSVRGSLLMLGELITHEELVSRKVSDDLTERAATFGLILDYLSFTPLTFEKEFTEAVEANQV

SEQ ID NO: 1005783 - protein, 57 aa, Homo sapiens
GSPAGVFLYICRQMTSVSGCTVISACVAGILSMLVYVVCIQHASCGFSVSVHHERGC

SEQ ID NO: 1005784 - protein, 35 aa, Homo sapiens
ALSDVGRTHWSHLQDSQLRLKLHSHCSGPGPLEHS

SEQ ID NO: 1005785 - protein, 56 aa, Homo sapiens
GECRENGITLRTMRDLGKKKEAPVGQAEGQVVVCILGLPGEESVLEELVYDAGRAA

SEQ ID NO: 1005786 - protein, 39 aa, Homo sapiens
CTAGAHQQLSEPIRFVMDECVITGGIDADTRVQSWYVVQ

SEQ ID NO: 1005787 - protein, 82 aa, Homo sapiens
QSPVSGPTAHTSLLSRLPFYSYPDLSSTAYLPMLDMCCYPHLSASAITTGLNASAGALSSFMNPDQISSSLAHAPDIPFSLH

SEQ ID NO: 1005788 - protein, 84 aa, Homo sapiens
GVRENGSLSFLPTHPWSSTWTTTMLARAALRRYPDLKLLQVVYLHSNNITKVGVNDFCPMGFGVKRAYYNGISLFNNPVPYCEV

SEQ ID NO: 1005789 - protein, 43 aa, Homo sapiens
RSLLIVSDMCQWGGPASSANLKDLEVTRPCGRGPDDPCRPALQ

SEQ ID NO: 1005790 - protein, 40 aa, Homo sapiens
RGSGREWRVRLPHKRPRAAPCCLLRAPRIHLFNLHYIRGP

SEQ ID NO: 1005791 - protein, 121 aa, Homo sapiens
IHGSARAGLGSVYIYLSTLRGSYTQPPPCNPWRARWVGLGWTTSAHPSRWVDGMWHAQLLPSVASSGKPVRTHCAAAGQDRHQHRPQDLGDQARCAGPCTLHGHLLCASGAVICLHNQSAG

SEQ ID NO: 1005792 - protein, 104 aa, Homo sapiens
MDEECRGRYGLTDGKAEPWRTVVTMFSLQSVGQDDVLAMLVGCSRHSGCNDKLQLHLHTRGGRAKCRVQNSWPGHQGLVYDVASRAGPAGAQCGLTGYPTRRSG

SEQ ID NO: 1005793 - protein, 84 aa, Homo sapiens
YDLRLPGPSDSSASASQVAGTTGTRHHTQLIFVFLVDMESHHIGQAGLELLTSSDPLPGSPHSAGSTGVSPSCPAPAPHILRKL

SEQ ID NO: 1005794 - protein, 39 aa, Homo sapiens
ASPFPSTDNSCCQTRAKYTGVLTELKLPCEMDFSGKDVS

SEQ ID NO: 1005795 - protein, 44 aa, Homo sapiens
PESPFIRRHERRLQRYLPLQARSQANRFRCTALGGSCLLDCVNI

SEQ ID NO: 1005796 - protein, 96 aa, Homo sapiens
LSSWLLSPLLAQTNHRQSHWGHDRRSAVVRSAGGSRLVHEDIDGTPYFLFPLEVLWGAHQEVLPPIIVQVCQANGAAKIGAHLRALQHLPPPQVSD

SEQ ID NO: 1005797 - protein, 143 aa, Homo sapiens
MVAFWTHIGMQEGQPQGQQLEAGPDGRHMPVHAPLGPQLMFRDMERCSRLETDLHLVRAAVLGDLKTLHQEVDPDVVRGHFSRDKGLRRLAYEADREVCFLYLSRTQAKLLLHCHVPDPAISRMNYRYRRTVSSSECQGPETD

SEQ ID NO: 1005798 - protein, 64 aa, Homo sapiens
RAVLGCAHVPAGVPVPLPSAFAHHSDGCRASGPSGVTLSATVGGRARASSLFPKSFLELRIILD

SEQ ID NO: 1005799 - protein, 67 aa, Homo sapiens
TRTHTGTGLPPQLGSFSAISGQLQSYRAACAVLSVVEVTQGYLSTAGGDPNMQLPVYTQDILHMGDT

SEQ ID NO: 1005800 - protein, 109 aa, Homo sapiens
RLCHCIPSLGTRGSVSKRIMAKMPSKGTSYTLWGGMYILQPLENSMEIFQLKTTIRSSNPTSRYLPKGNYILKITCTVYRSTIHNKCVYRSTIRNSKVMETTLGGIRER

SEQ ID NO: 1005801 - protein, 105 aa, Homo sapiens
SSYRVRRRNRHRMQLQQGGSCRKLREVEGRGSWHCRLVGEEQEAGEDAVRALDAHHVVVDIDSQTSSSPPATSAAHRPSRPDVVLDVWTPEGDHFDAAAEQQHAQ

SEQ ID NO: 1005802 - protein, 58 aa, Homo sapiens
AVHCGAFHFIWCTLGSPSTPRFSTRHGAAYRFWASEGLQSPSVRAAEAPCRRTDVVHN

SEQ ID NO: 1005803 - protein, 99 aa, Homo sapiens
SAALPVGVRNDNNEPVFLEKALLVSGPARARPEVEKEVGVFKKEGKTGLNTVTKVERVTRRSQKDKKFCPKNGNLSTLAVIKLAMEVPWCPERYVISEQ

SEQ ID NO: 1005804 - protein, 31 aa, Homo sapiens
MRINVFLIGPRTLHRLVQTFSKIVLTILGTS

SEQ ID NO: 1005805 - protein, 110 aa, Homo sapiens
MADSGGSTRGVFMQPPAVGPEVGDHNCSMPNLGWQRPEEFWLASMWRAWEMQIGGLFFKGPVGVWPALPSVLLLGRPARLSHILELSESDDVLFSQPGMHLPHQQLFLPS

SEQ ID NO: 1005806 - protein, 62 aa, Homo sapiens
TRGVFMQKMCCLGCIWKEDYWVAGWALKGGVTPLPHTHTHTDTPLPPVNVHTHTHTDIPSAN

SEQ ID NO: 1005807 - protein, 131 aa, Homo sapiens
MGRRPSLAMKKSPLYFSLMTPCFRDIFARPDPPERGPHQSGSPWLLCPWVDLTRRASGTAPCGPEALPVYWLSKSGELMPVMAVHSALAVMQFLCQLPNLSLLGPVRHHQLMFQDLISHVLKLIVHQSGPL

SEQ ID NO: 1005808 - protein, 82 aa, Homo sapiens
LSSFIILQSCVNQLQHGVLFQFLPAGGHFSHVRGLIFYPIHYPTVQLWHQHIQASYPLAQQGQRSHTTIVARPSHVHIQQQQ

SEQ ID NO: 1005809 - protein, 48 aa, Homo sapiens
SSSVPAALSDDMSPPGDLSPAQVTVFPGLVRRRLHTHDDDGCRGLLYD

SEQ ID NO: 1005810 - protein, 45 aa, Homo sapiens
HYKRYDVVIAVWAEQKVWCHFTWVAVLRQFRVDLAVVKARAIAAH

SEQ ID NO: 1005811 - protein, 42 aa, Homo sapiens
LVRTLIGAQLPITIIFIAFCCQGLSGIQKCPVWEEVLEDGKG

SEQ ID NO: 1005812 - protein, 44 aa, Homo sapiens
SLLDGPGPHLTPLRGTWHGLQCRFPFTLRATLATTPCDAPVDGR

SEQ ID NO: 1005813 - protein, 97 aa, Homo sapiens
LADSEYPGSREKEQKVVLCGAGSDLMTASAALTWDWAHYPAWSHPAQKTGPPVPVTHCSYVPASSGVGYLRAVGEDTPAVAYALIALEWQIVAVLSY

SEQ ID NO: 1005814 - protein, 72 aa, Homo sapiens
WREKGMDCCNGDSCVGAFAVHAIPYVHMTKFYAAGLVSWGPHCGTYGLYTGYRNYVDWILKTMQDNCTPRED

SEQ ID NO: 1005815 - protein, 80 aa, Homo sapiens
LTLSIPGVREKALQDSAESTGRSDDVHVAFAPTGCSDSSSPLDELQPPLRELCTSLSHQVSSLQCPFPSSLSPLWIFLSP

SEQ ID NO: 1005816 - protein, 128 aa, Homo sapiens
MRETCCSALGHLAVPPPGLLHSKHTYLNVRVCRELTFYLLPEHLQVKGLQSVHSQALEAVIPTYQPCASDLRSLVGQKHSCRGPKDEGLLPSGAALEVTVESCWPPGPGQCPPISSVGLVAPLAANEP

SEQ ID NO: 1005817 - protein, 68 aa, Homo sapiens
MGGLPYSSEPASPRINMENKTTWFSVDIDSELVAELPAETELWLVLVAVGAGLLMVGLIILLLWKCGF

SEQ ID NO: 1005818 - protein, 50 aa, Homo sapiens
RSDGVVLVRESGEALIGIAGRIEEITTLMSEIRASTQEQAVGLAEVNTAV

SEQ ID NO: 1005819 - protein, 48 aa, Homo sapiens
RRLATFFATLESPALGAPLAVAIAIHNVPEGVAIALPVYMATGRKDYA

SEQ ID NO: 1005820 - protein, 69 aa, Homo sapiens
WHQERERAVDRYSALSATSEEEKLKGEVDGNGYDKPGIEVTLRETSLVLRQCLTARLESPEIHAILNPV

SEQ ID NO: 1005821 - protein, 109 aa, Homo sapiens
AEQRLFCFLTPTADFFPFLSYHRLLAVQPAPSHLIRLVVPLLHHLPLSIRSLGFLAGRRMVFRRMVFAYGFSFNMILKFFSGFFFGLCDGSSCVVLEGLFGSLGFSRFC

SEQ ID NO: 1005822 - protein, 88 aa, Homo sapiens
EAEAAVSYDCAPVLQPGPQGHTLSQKKKMAFQKPLGQVFKGWGPLGAYRENLKAGGNLRYENRFLGCPRPEWGPGLNFKTWAKVVPGG

SEQ ID NO: 1005823 - protein, 122 aa, Homo sapiens
  misc_feature (118)..(118): Xaa can be any naturally occurring amino acid
LWSCLTHGQGRAQLPNPQFSLHQLPPDAPTVFFVLCLVFFCETQSCSVAQAGGQCLDLDSLQLMPPGFKRFSCLSLQAAGITNVNHHAWLILVFSVETGLCHVGQIGPEHLDSGDPTXSGSQ

SEQ ID NO: 1005824 - protein, 158 aa, Homo sapiens
VNRGVCEAARSWQAAITVKAMSSPNLPRYLGSEDVHDKETPQDSLVAPVQPPSQTFPPPSLPSKSVAMQQKPTVNVRPMDGRDRAPSELPELKPVPEQYRQQTFEKTELKVPAIAKFTKVKMPSQSVEETYSNECPLCRRDSEGNDPFMIASFDSDSI

SEQ ID NO: 1005825 - protein, 141 aa, Homo sapiens
SISRALQRSISPGVSRRQWLGYDVREIASVFKPHVGTAHECTTSCDVIITPTWGLQLGRTYSTCHTSTDAPVAWFYGTNGGQSVRTLNDLRPPKSVYSSVQSHLVATRFDWYTGRDSLTLVCNVTDCVRDWTGTDGPTDAW

SEQ ID NO: 1005826 - protein, 74 aa, Homo sapiens
YTAAFSDDLRVDVAAIAGLGGPLLRPSAGNECFPPAAGLCESLLCSCAFFIKQLGSPRYVHIILGHCQACPKAN

SEQ ID NO: 1005827 - protein, 35 aa, Homo sapiens
ESSADLLTGRMVAVVGAPYTLLLLEEKQTLYSQTH

SEQ ID NO: 1005828 - protein, 38 aa, Homo sapiens
FNVKTINASLFIDSLRFRENHTTFVYGTFVARYIKREA

SEQ ID NO: 1005829 - protein, 58 aa, Homo sapiens
IRVKGAALQEVHLYTFSTVQPIPDEDSPWITASTDRIPATNMDSSHTSTRFRLTANSN

SEQ ID NO: 1005830 - protein, 66 aa, Homo sapiens
VAHSDFHRHWVKKNMPQSPALVNTGCFDLRRCITSVRSEDLLHKDCEFLILEKDNTPASKEMELLI

SEQ ID NO: 1005831 - protein, 76 aa, Homo sapiens
NQSVPPLAYGTQSCRTIRRQREAGSTQASSSAEQGKAGGHAWSQLYTEALAKSCWLILCSQVLSSRTLYRFLVFKE

SEQ ID NO: 1005832 - protein, 91 aa, Homo sapiens
KSATKENMDKSNEELRNLIKPIRNFLTQDSAALDSIEAVANEVLKMEMPSTPHARYTTPGQTDYYRDTELKRLSQVEVILHALVLADIARA

SEQ ID NO: 1005833 - protein, 38 aa, Homo sapiens
MTSVSRPQSLGTRCIIAILSILLAVLLTVTSCCVLIYT

SEQ ID NO: 1005834 - protein, 86 aa, Homo sapiens
GDGGTHCAIYEGYALPHAILRLDLAGRDMNNYLMKILTERGYCFTTTDEREIVVTFTEKLCNVALDFEQEMATDASSVLPGEELRA

SEQ ID NO: 1005835 - protein, 64 aa, Homo sapiens
PPNCIHDARLRGVSQSSTQRHLAKSAPSFLYLGTALRHAIQPLSGSLAICPCQWYHALVYLDAH

SEQ ID NO: 1005836 - protein, 98 aa, Homo sapiens
RVKKSVDSIIEASRDCDRVRVNGWVPYSSESASALINMENKTMWFSVDIDSDLLEDLPADNYAVARAGARGYRADGAGADLPPAVEVRASSSEPAVAP

SEQ ID NO: 1005837 - protein, 135 aa, Homo sapiens
MKILTERVNGFTIMAERAIVRNIKEKLWNVALEFEPEMFTVVTSSSLEKSYELPKGEVITIGNERFRSSKALFQAFLLGVESCGIQEITFKSIMECDGGTSARNLYANPVLSAGPTIDPGIAYRMQNGITAIAPA

SEQ ID NO: 1005838 - protein, 53 aa, Homo sapiens
EKYCSRDALEASAARLWHSRRHLFKSNTICISLVLSRFGRGTFELCCITGNSL

SEQ ID NO: 1005839 - protein, 42 aa, Homo sapiens
VGVVFLMSARVGVFFWWICGLMASGVKLQTFTVSFHLLRQRV

SEQ ID NO: 1005840 - protein, 93 aa, Homo sapiens
MSKDIIDKVKTQPQNGRKCWQTMYLIRGQNPEYIQEFKQIYKKKANNPIKKWAKDMNRHFTKEDIYAANRHMKKCSPSLAIREMQIKTTVRYH

SEQ ID NO: 1005841 - protein, 70 aa, Homo sapiens
WARADESRVSLTGARDDGLFSWGSQLVPYAIHVESSEFVYNQLYEGANVIGLQMVTMLREALQAGIAMVT

SEQ ID NO: 1005842 - protein, 45 aa, Homo sapiens
AVPPLPMDRDTEKVGQRALTNTSAHTSAGTGTTGAARHNTTQTEQ

SEQ ID NO: 1005843 - protein, 157 aa, Homo sapiens
MAVVMVYCTPPHPLRRHGAQSLCLVPQPREDGMFLYDLSILWRGRVSTPECIEAMVRGKCWQARYSERSQELMRRVKRFQMRHLHRVKTSSRGGREGMSAYPISILKLRRRISYGDPSSSQWPPGKGIVYMLGGGGGKAFVPCSQGCDRVFSGPRTR

SEQ ID NO: 1005844 - protein, 79 aa, Homo sapiens
MEVKRHNGYSVSDKEILVEAELGKLPNNCAAQTCKLFALIQTLKYLQNQEGAIYINTKLIWTEQGLINSKQKLKSQTYK

SEQ ID NO: 1005845 - protein, 34 aa, Homo sapiens
SNTHGRVLLFSLIFWKAEVPLCVAQAESTVAQVI

SEQ ID NO: 1005846 - protein, 62 aa, Homo sapiens
PAGANGSAVPEHHSTGVSVPTHNLNVITEGTSDKAKLSDSLAKELVCDLSQSIEIIRGQGHS

SEQ ID NO: 1005847 - protein, 97 aa, Homo sapiens
VYLQLSLTGDYETYAMGADLLLDWPSSVGLLIRLSRRFRCGGNKKRRQINEDEPVTAASAVPPTALGPAAKPSMALHLAPPPFFPGLKNLVPVTASA

SEQ ID NO: 1005848 - protein, 57 aa, Homo sapiens
AIPVRLSLLRHGNHDDLTLSTVRDTGHFCWPQHLSWCPRVVATAARNACTTSWNSFG

SEQ ID NO: 1005849 - protein, 66 aa, Homo sapiens
RLNLQPLSAVIIIWRFFYDGRAGPPRDTVGMWGHGEGTADSSPFSSGMTLLTALEAHVEAGMMFWR

SEQ ID NO: 1005850 - protein, 129 aa, Homo sapiens
YEVEVNTLLMTAETQAIDTKGSKESTATNLEFPSRARPGVLRGVVTFKGAKERIVEQISKGHRPAGGQPKGPPALSAMKGGQRRRIPPREKSEPEHCGEKPGQGCVARTIHSGSVSPVAEPKDLDPQKV

SEQ ID NO: 1005851 - protein, 34 aa, Homo sapiens
MSFYPSGGFVVSLTSGVKPQTLAVSVTAVKGGRS

SEQ ID NO: 1005852 - protein, 120 aa, Homo sapiens
AGLHLAFCLLASYRARGAGSLEEADFHSRRMISPSSSSPVTTGTSISHRSISAGRSSSSSESMSTENHVLLFSSVDGGDAGTEEEGSPAIYPDSVEVSVILMKVLCHTRAFTVTLVTDVG

SEQ ID NO: 1005853 - protein, 63 aa, Homo sapiens
TGVCILLVTGTHTVGGACPWQVQSRSECSRGQAPEQWLWSFQHELACLQVGSMSPANIREEAA

SEQ ID NO: 1005854 - protein, 36 aa, Homo sapiens
MVPVSKGRCTVQVLRRESHRNLQKCALGHDIQVLKG

SEQ ID NO: 1005855 - protein, 33 aa, Homo sapiens
RLTAALSDLQRISSTGREVRVVEEAHFHSRRMI

SEQ ID NO: 1005856 - protein, 125 aa, Homo sapiens
  misc_feature (1)..(1): Xaa can be any naturally occurring amino acid
XAALSDAWRFISLLPLSFIQGASGGSLKKPDFHSRRMISPSSSRPEATGSSTSHRSISAGSSSSSSESMSTENHVVLFSMLMVGMLVRRNRVAQPFTRTRSKVSVILDEGAVPHSCLHSHVGDKG

SEQ ID NO: 1005857 - protein, 74 aa, Homo sapiens
MHMSISAGSSSSSSESMSTENHVVLFSMLMVGMLVRRKKGSPAIYPDSAKVSVILDEGAVPHSCLHSHVGAKGG

SEQ ID NO: 1005858 - protein, 37 aa, Homo sapiens
LQLSLLLAVLMLHLQTAMFRLIFHSHCLVPCAFDHSE

SEQ ID NO: 1005859 - protein, 35 aa, Homo sapiens
SGAYLQLSLMWWYSEPVEQQPALLITYWQRFKSWS

SEQ ID NO: 1005860 - protein, 41 aa, Homo sapiens
ARYLQLSLMGCFVTGAEQTTGTCSPDIPSFYDHEELQILGI

SEQ ID NO: 1005861 - protein, 102 aa, Homo sapiens
VTCSSSLMPRCRCSDVLEFLPSGGFVVSLASGVKLQTFTVSITPLKAARLELLIPPMGFMVSVASGLRLQSFTKSVTAHKLSVYPKNEQQQVISKVKKTKVP

SEQ ID NO: 1005862 - protein, 45 aa, Homo sapiens
SRGRAFDQVSPSRFAAALRDASAALIFPPALQAFAAFVRHRLIHQ

SEQ ID NO: 1005863 - protein, 140 aa, Homo sapiens
SSWVPVDRAKRSRTISPAKRMIAMVMEKAGSQNQRPYLTHPFHRADYMHPNKYRALRGHREQCDNADQPWQRIARQHQLLLLAAWMVKLVRNNRRPCKNQQSCCHKGRNQRMNSRADMRDEKATSCCPDQSAKAPECMTG

SEQ ID NO: 1005864 - protein, 54 aa, Homo sapiens
SAVVAHDIQDVVYLTLATDWSDSERGVPVMRKWSRGVENERGDKANEVIVHVPW

SEQ ID NO: 1005865 - protein, 67 aa, Homo sapiens
MIELGSCGEPGSLRGMIELGRNEEAVSPMGLIELGHVGEPGILEDKRTETCGETGSLRDTRTGRVRA

SEQ ID NO: 1005866 - protein, 71 aa, Homo sapiens
PVMQLSLMPRVPICKGSVESTFIEDTETIDRVRVNGWHTLFLRISIPTINMENKTTCFSVDIDSELVEELP

SEQ ID NO: 1005867 - protein, 48 aa, Homo sapiens
TRTPTEPSVHQQATISREGKVRVSRELPGHTGYLSCCRFLDDNQIITS

SEQ ID NO: 1005868 - protein, 113 aa, Homo sapiens
ADSRGSTAAYDPETYFPEHSRRSKQQVQRGKRRGTSWQKQQDPWVAGAEVWRGSVAFVECSEHSSRKAAEPGQKSLNFSLTTALLRPLFHNFGAWKLSLGSSARSLFTCQPLP

SEQ ID NO: 1005869 - protein, 61 aa, Homo sapiens
MKSHCYPGNCIGSLQHDHRKRRFNLLAQGIFAVSASRVSCMLLISPTDNLGFVPITKVRTV

SEQ ID NO: 1005870 - protein, 48 aa, Homo sapiens
QVDFILRVRVSSGRISKRDVHMISSAYEKDIGSSMVAHTCNHCYSVIG

SEQ ID NO: 1005871 - protein, 185 aa, Homo sapiens
MHALSDAFLDVPVAASPVCWLHDCAMPDSINSVPGASLIIFSLSGSPSQEPDSQAGRPGPRSTNLQQVQGMGDTVEFVQITGAVRDKFHWDVPLGESAGDRTWRVCWGTSRSQRSRSCGYLVCKRSSRPGPSLQPDLMGHHVPAACSQRTSHPSDLWGLLAELGPAHLGVRGLLSSKSCSVAEIV

SEQ ID NO: 1005872 - protein, 37 aa, Homo sapiens
VACMCVVVMSCPQTSDSTLLQKIGAILDNSTLQSEFK

SEQ ID NO: 1005873 - protein, 76 aa, Homo sapiens
RYLQLSSDATLIPAQPFISTQMDIRDFQIVQAKRGGIMPVIPALWWAKAGGSPDLQEFETSLANMVKPRLYQKYKN

SEQ ID NO: 1005874 - protein, 138 aa, Homo sapiens
RIELVYLLALSDATVVTNVTVKAGVWTSTFIEYYRDFERVRVNGWGTLFLRTSIPTIKMENKSSGSHVDIDYGAAWRSCRPNIELWMVLVAVGAGLLLLGLIILLLWKCGFFKRARIRALYEAKRQKAEMQSQASERG

SEQ ID NO: 1005875 - protein, 31 aa, Homo sapiens
MPVFPDTWGAEATGSLETRRFEATVSKVCAT

SEQ ID NO: 1005876 - protein, 81 aa, Homo sapiens
  misc_feature (44)..(44): Xaa can be any naturally occurring amino acid
SDLHALSDDPIMNRMVHVLIVDDDVVLGCHVVGYVVVHDEAQQXVEQSQVDLLIHFLKAGFQHDMALAFIRLPHVRQFMDA

SEQ ID NO: 1005877 - protein, 35 aa, Homo sapiens
GKLRTILIENFPQANLRHQINTGGVLVSRDKETLH

SEQ ID NO: 1005878 - protein, 39 aa, Homo sapiens
SGGALIMVQQGVSLYTALGTVRTGAHRVDGHLYQGGMHR

SEQ ID NO: 1005879 - protein, 208 aa, Homo sapiens
  misc_feature (184)..(184): Xaa can be any naturally occurring amino acid
EVYVGKDIQCEMFSSEGMYNWVFEIRAVPKKALREPLWTIPVTVLKSAGYRSCAVHEGETIIADEYEMPVPAGWISSSHSLLARHQSVSGSNIFLKFKPDHIRVQAHVDVHPGKLHFVFTMGGFLSTATTEVLRKGVCTGGLGLWVASVRQPNIHASHEDSGKALGPKISISPRTTNSFHLPDXPSIPIIRVGPGHGIAPFNGFLQHR

SEQ ID NO: 1005880 - protein, 72 aa, Homo sapiens
DDMKIELGTEFRGKDLGAVHGTDLVYSWVGDPGTGSRVTGVLQLCAIPGSGEGEAQLTEQSSLPPELLFPSR

SEQ ID NO: 1005881 - protein, 50 aa, Homo sapiens
MVTLEVSPMQQPPEHHPCHRTLGLSFTHHTALSIHPARKDQVGPSMYLTA

SEQ ID NO: 1005882 - protein, 80 aa, Homo sapiens
LFQSNTRVCTAMCDMHLVNDRYMQCGQHLGSGDTGSGQHLGRKYRNVDMHLVKMRYSEVDMQSRKWRYSNVDSIYEDEIQ

SEQ ID NO: 1005883 - protein, 58 aa, Homo sapiens
VISPGRIIYRLKYHPTGDGTCYEVMVHATGDGYSYHVMYSYQVMYSYQVMYSYEVMYS

SEQ ID NO: 1005884 - protein, 33 aa, Homo sapiens
MATFPGRFLPVSQQPNRPRSCLTHGPLYMQLYL

SEQ ID NO: 1005885 - protein, 78 aa, Homo sapiens
VGRIRVSRIDHILPSPLTKISATPVDSPAIVLTGSTSILSAYQFAYGIRSSCVIMRSVQAYKCDAVHRCRPACYRAGV

SEQ ID NO: 1005886 - protein, 37 aa, Homo sapiens
MSIVSVFASSEMSSVQKGVNDGFLRITACNGLNCGHS

SEQ ID NO: 1005887 - protein, 71 aa, Homo sapiens
LVILQDYTNSAPLEGYEAPAKLFEFKAVVRSVLCEQFLWIKLVEVNGLSIGGDIYIPVWGSTSYCGVSQIM

SEQ ID NO: 1005888 - protein, 43 aa, Homo sapiens
CKTVIAIDVGSQDEMDLSTYGNSLSWVMDAVEAGCIPGLTRYT

SEQ ID NO: 1005889 - protein, 49 aa, Homo sapiens
SNEIARICTGGKHGEQYQVVENYFNQLLEHGNIMSDVQVEQVNLLDVLA

SEQ ID NO: 1005890 - protein, 69 aa, Homo sapiens
MRIPGRLMIQGRSCSAEYIPYEAGTTSSTSPIVCINVPGSPFKGPVHYVTDASKVNVLWARAVAQGLFV

SEQ ID NO: 1005891 - protein, 47 aa, Homo sapiens
YVVSGCLMMSHGCLMDVLMDVLMDVLMDVLMDVLMDVLMDVLMDAMR

SEQ ID NO: 1005892 - protein, 116 aa, Homo sapiens
KILPFGLVVTAELAVAWVKVLSPHSFFIMSSTFLSLSQGPKWPSPLAANLDTYISAKLIQGEGPPCEGQTQSPRYREPGSLMMLPMGRLSHSLQVEMLPYTFSMMLLEKLVDAPRA

SEQ ID NO: 1005893 - protein, 138 aa, Homo sapiens
TRTLVPAVAGLRVCAISVIPTTPCAGVQCTISCSSHRHPGCSAVPPSRIHPTVSRAGVQWRHLGSSHPVTLAGVQWPNLGSLRPQNSRLKPISHLRLPSSCNHRAHATIACSTLTSSAAAGSWNGAPGMISNRFGPCH

SEQ ID NO: 1005894 - protein, 74 aa, Homo sapiens
TAVAHVSIIFYSYGPTYLRLPATVPVLSRSMNFTLLVQCSPELKTAEIEPKADGRLEAGADVGLICSAGGHLEP

SEQ ID NO: 1005895 - protein, 95 aa, Homo sapiens
  misc_feature (52)..(52): Xaa can be any naturally occurring amino acid
  misc_feature (63)..(63): Xaa can be any naturally occurring amino acid
LSRILSGGDDDWDILSSKKWTSKVTPVLRCRIEGQVSGPSQEDHRLKEAACXHISLAEGDLRXIESLSQMLSMGFSDEGGWLTRLLQTKNYDIGA

SEQ ID NO: 1005896 - protein, 56 aa, Homo sapiens
SHSYLWDYVLCSNVDGAGSIILNELTQKQKTKYHMFSRYNVEAKHCSTHWIQQNGN

SEQ ID NO: 1005897 - protein, 74 aa, Homo sapiens
ADSMRIPFDCGLRGRMWLSTNSAADASTPVPGAARRPCSKGSCSTLACYHRATMCAQQAPRASQFYRSGGGAVC

SEQ ID NO: 1005898 - protein, 69 aa, Homo sapiens
MVVVVSSEAADDGAAVQQGRRLQWPGVQCCWAQMGGTELTTVLAISPRAATHCDLSCWGSHSLDFCTCR

SEQ ID NO: 1005899 - protein, 66 aa, Homo sapiens
MEHFRCWIRGRDLSLEDVPGAERDYGCDVEDYDAENDVQLSKTLELRVANLDPLELSEGKVLSVTS

SEQ ID NO: 1005900 - protein, 106 aa, Homo sapiens
SNSRGLPCFLEQVCRMQPAVFSGAGLPNAACRVFWSRSAECSLPCFLEQVCRMQPAVFSGAGLPNAACRVFWSRSAECSLPCFLEQVCRMQPAVFSGAGLPNAACR

SEQ ID NO: 1005901 - protein, 52 aa, Homo sapiens
  misc_feature (45)..(45): Xaa can be any naturally occurring amino acid
MHDTPRARVPPDRSAALPHRRRVLNAWTTTTGANTRLTRQTCDDXSPGDSST

SEQ ID NO: 1005902 - protein, 68 aa, Homo sapiens
LCQKTQIRQHRVFFIWEKNERVNRAPLWELQGALLQLLQGDTYSVGWTCGHEMRPTEVFCSRGIQNAL

SEQ ID NO: 1005903 - protein, 81 aa, Homo sapiens
ALLTESSEKLGLRICDRGSLTSRNFFLCGKQLNHHCGVTHCCCTKTDSNTEGSMTWLGPYSPDLPPVAAGDLTAFHRHNRG

SEQ ID NO: 1005904 - protein, 60 aa, Homo sapiens
RDLMIVLLSLANSRIFYTHIVVPVYSYDAAGLYQAVVLKQKRIMILKVVLHKTVKNSDTE

SEQ ID NO: 1005905 - protein, 56 aa, Homo sapiens
  misc_feature (3)..(3): Xaa can be any naturally occurring amino acid
MVXAQMEQQDAMAGVESYEAMCRTGGQSHYDSSVGVRRTIGLAACVRTVCKGPSEL

SEQ ID NO: 1005906 - protein, 75 aa, Homo sapiens
HEYSWTLGCQRWKRRACRWHIPLPSGSWHLILVDGGDAARGPKAGGPLQEQELPLALKLCVQLLTGVIVEVSDSW

SEQ ID NO: 1005907 - protein, 76 aa, Homo sapiens
NYTILRGQHGAHVSTELVQGGMHRSGEYTCDQAACLRSWVVNTVAHVLTELVSGGVHRRGDIPVELVACLACSGSC

SEQ ID NO: 1005908 - protein, 66 aa, Homo sapiens
NRYTVARGVNLRFNFTRWSRAANDIIWGTGASQFTWFNSALAGRSVQVIDERTYSSICESISAIML

SEQ ID NO: 1005909 - protein, 107 aa, Homo sapiens
RACEQRNLGDIIEILEYSSKKRLQQLKSELQEWEETKKCKMSYLEQQQQQQMNAKHGASTRQDVNFLSTYMDHAVSIKSVQISNLMRPLQRVQARLDGILMVHVRGP

SEQ ID NO: 1005910 - protein, 30 aa, Homo sapiens
MVVIADMQATHGAPFSRRWRKKGTPYCVSR

SEQ ID NO: 1005911 - protein, 112 aa, Homo sapiens
SSTESSGTYGCAVTGVDGPAPVTSGGRIERQQGRQVLDGFGHQREFEVGEEEAALADHDVLVVQVARARQHQCGDGPAQVAEDPSGLCGVDHVILGRAVRQELHVAIVHVLM

SEQ ID NO: 1005912 - protein, 56 aa, Homo sapiens
MKALCVANARVHPEILPVPGLTLRLYRGLLFFSISSGATRAHGQRRGLTEDLTWAS

SEQ ID NO: 1005913 - protein, 108 aa, Homo sapiens
SGSSWITSCRNEQCRELHSVPSVIMLVGDGYRGKTSPHTPNEKFEGATVLKALKSGYEGRVPLKSARLFYDISEKARRIVESYFMLNSTLYFSYNTHCLPNSPVWSAG

SEQ ID NO: 1005914 - protein, 55 aa, Homo sapiens
YRIQYDVADVHREDVASLRNYSRKIEEVDSPKSSMRTGIHEDPGSMMTPESMRTP

SEQ ID NO: 1005915 - protein, 70 aa, Homo sapiens
VIEDMEAAARIGHPHRMLTWTWSPQPDPQAAGPKLEPSFSEYASVQVPQAVNWDRGWHLAGYRSLEFRYT

SEQ ID NO: 1005916 - protein, 35 aa, Homo sapiens
WCVMQQSVRALRRQTGTNKPFFCDKGKGGNHYWGE

SEQ ID NO: 1005917 - protein, 122 aa, Homo sapiens
IARSRGSTRGEFMHASTHGECGKFQRLSYQVKPSQNQNKDVNTGTPWVIRPCFHSHGVGQVPKTSLDKLQMSGLQVPFPSRCSASVNPSREPAMRCSGKASTGAISYPGALFGLRHSGLAES

SEQ ID NO: 1005918 - protein, 67 aa, Homo sapiens
MPEAQRVGGAGAHQYIVGRIWSDTFSDTLYAKKAEQLRPAVGQSTEDKSSSKDMSSPTDRHPDGYCS

SEQ ID NO: 1005919 - protein, 47 aa, Homo sapiens
MVQQAMFVRIGFPISLYGILLTMGLVFLGNRFYVTSTDTRCVGLNLQ

SEQ ID NO: 1005920 - protein, 72 aa, Homo sapiens
MLSLSSIIFDSNGTYVCAGSLPTVAVLSRDQKFTLLVQGSPEVQTAVNIEPKADGSWREGDEVRLICSDRGL

SEQ ID NO: 1005921 - protein, 112 aa, Homo sapiens
  misc_feature (51)..(51): Xaa can be any naturally occurring amino acid
MPSHELYRVPGDDVLLAWGPLVERSGSCMMMRGLTVECQIQPRDDPSGEVXLDDAPCKRTQPTMPSDAQRPPKSMTVPVQPKSGSCTHLQKRTCPVHAWASRMEEDPGLCRL

SEQ ID NO: 1005922 - protein, 44 aa, Homo sapiens
YELELCTSLVLACQLPALAREIDSSQPVSIDSLKQSLDMQMQRQ

SEQ ID NO: 1005923 - protein, 58 aa, Homo sapiens
ERDKAEEWLRKTEEEMGFDHSRGCMRWDHPDCPVSVWLPHLPCSVIGSALSSPSNDLC

SEQ ID NO: 1005924 - protein, 41 aa, Homo sapiens
  misc_feature (27)..(27): Xaa can be any naturally occurring amino acid
FCTHTSLSHTVANSSSYDSKELELPHXSVLQGATGLPRRCW

SEQ ID NO: 1005925 - protein, 117 aa, Homo sapiens
RRQGVPLSLFAGVLSGKLANPIVSAQNFLKLRSNFRKVSGYKINVQKSQAFLYTNNRQTVSQIMSELPFTIASKRIKYLGIQLIRDVKDLFKENYKPLLNEIKEDTNKKKNIPCGYR

SEQ ID NO: 1005926 - protein, 128 aa, Homo sapiens
HRKGCFLGKKDRRKSLCPCLQMSRGYEIENPIISAQNLLKLKSNYSKVSGYKISVQKSQAFLYTNNRQTENQIMSELPFTIASKRIKFLGIQLTRDVKDLFKNYKPLLNEIREDTNGKIFLPMDRKNN

SEQ ID NO: 1005927 - protein, 67 aa, Homo sapiens
QIESSSVPLVLDCSIALLPGDYGYVDERAKVSDGWDEDREEVEFNYAFEGGGDDGGGDLVLLKLLKL

SEQ ID NO: 1005928 - protein, 57 aa, Homo sapiens
MGGSIFTATGHEMPSLTEGQGVQSEDTTAVGLERQRGGAKPLVKPRIHCRLQDSLVM

SEQ ID NO: 1005929 - protein, 78 aa, Homo sapiens
ESREREMELRVEALEEERRRCEQVERRVQSETARRQQLVEKEVKMREKQFSQARPLTRYLPIWKEDFDLKTHIESSGH

SEQ ID NO: 1005930 - protein, 71 aa, Homo sapiens
ITRNNADAISTEPNNLEARYSFRYNGVIHRNIVGFERGSLWQGCRGGHYAYIGSTDVCQLICGDQHQQDVS

SEQ ID NO: 1005931 - protein, 69 aa, Homo sapiens
WDTCTPVAFLITVSLRQVHAMCGHAQRQAARQQSVHFCCDLTVVSTEAHNLIDLGTWGSDLGSNLGQGL

SEQ ID NO: 1005932 - protein, 39 aa, Homo sapiens
DYITGALQIYTDIIYICITCAPSNQWNHLEECLNSQKFC

SEQ ID NO: 1005933 - protein, 184 aa, Homo sapiens
LNLEESPDVSCSIEHKRPPPKSPCSVERYSSEVESKDAVRHLVHVRMPLLVVRWKSLALFMREKKVGLVRCSEDALMPKASAMVSWTFCRTSRYNRKSSSEKMFCILSPKYLYRFTKCFPTDRAPECKSRMDAPPSDPPRESPFSATLRIRSASSLVMTTSVTPLPHFRGVQPSNLLVTVVVLR

SEQ ID NO: 1005934 - protein, 135 aa, Homo sapiens
LRVTGVGGSWCWEAIPQALLPGVYRSHGNKTSSSLSISSSMSKSLQALYTGGLESSGFICPMGLRIGVPETNDRGGTAMVAPLVSAAKFGIKAFSLFLKHDSAVGSMLPSGTRSLWKSPMVAGTGLVAEAWETDC

SEQ ID NO: 1005935 - protein, 48 aa, Homo sapiens
PFAVYSRDNFTTSCYARSSTSLGFLDARVSLHDTHIHSRHTTHERHCT

SEQ ID NO: 1005936 - protein, 55 aa, Homo sapiens
EAPAPLSSLSPSSVTWEANVPCGQSRYPAVICPVWLQSSSMTCLRSSTRSTFSFS

SEQ ID NO: 1005937 - protein, 159 aa, Homo sapiens
WTRATVGSVGGAIHSDLRMGTPMDPVKLDLERPKGAKQGGTYWAHFPMSLWVSPGPGGTTLPVPGRCTSEATPSPPQAHHGGFRFRMLKIQRWPRIGVRGMYPKWLLPCLGFCSKGTCLLVILDGGIFKHSPGMCVAVAEFSLKPPGGILLSHIDGYRA

SEQ ID NO: 1005938 - protein, 39 aa, Homo sapiens
RDSKRMKHETVGPGPRRRLLAKWDCPTKRPPVLRAVSTF

SEQ ID NO: 1005939 - protein, 49 aa, Homo sapiens
MYPFDVDSEDKMASMDFSGDEEQQGEWSILDSVEGVVDMYLSRGNCDPM

SEQ ID NO: 1005940 - protein, 40 aa, Homo sapiens
KCSCSRVRSAIPCEVDAVSKASAALRKEWGQSYSRAKLCS

SEQ ID NO: 1005941 - protein, 56 aa, Homo sapiens
  misc_feature (33)..(33): Xaa can be any naturally occurring amino acid
  misc_feature (36)..(36): Xaa can be any naturally occurring amino acid
  misc_feature (45)..(45): Xaa can be any naturally occurring amino acid
MWAQRGCEDHCTVGRFVATGSRLGPEGSPGAQXAYXQRLLLHPPXSPFCEEWMANP

SEQ ID NO: 1005942 - protein, 62 aa, Homo sapiens
MWLTYRRTEEFEDDRLLWRAMRLLLRRHLQSPYSVPDQPGDTMIWLPLADPRLGTTASHLLK

SEQ ID NO: 1005943 - protein, 32 aa, Homo sapiens
RLWTQREHVENGSFKAAQFIHQCVWRGRASDS

SEQ ID NO: 1005944 - protein, 38 aa, Homo sapiens
SNDNINDTCPSVCGVPLSTLRRMIHLNEHLQWSTRSSE

SEQ ID NO: 1005945 - protein, 53 aa, Homo sapiens
RCVIRVMYITNQNAVQHLWSCLAGPCTPYEVMLVLGHRATPMRSGWRRPYMIL

SEQ ID NO: 1005946 - protein, 141 aa, Homo sapiens
PRCTCDPFDCGTSDASADVQAAPSTDTYWQRFMSLVPIRLDLRLHAGHYAILLAEYWNNGPAHVAFSMMARAEGVCSPIFSTQRHLAKSAPSFLYWAQRSDRPSNPWVDSSPLVPARETTPLSTSDPNIEGVTRRLRTSVL

SEQ ID NO: 1005947 - protein, 71 aa, Homo sapiens
VGSSEDETRRGKEREVGRGKDDKTLKERGQWTLMTGKREGALDEYDGGRFCEPTAMRAWKTPPTHVLHLRP

SEQ ID NO: 1005948 - protein, 139 aa, Homo sapiens
MWGFVSGHGHCFMSHFIIRSNFVYDDGNQPLAMDTSCPPKKPAILLLVDEQSDDISLCKAGVRSCRSPAVCGKDESSLVCYLSSCSVPLQPKLIAVNWDLRKYLLNYLPFVNSGQAWLGHYSISIKGLVYALPEGAGGI

SEQ ID NO: 1005949 - protein, 30 aa, Homo sapiens
MPQGTLTKTEKDERTLDVTTQRGTDRLGTH

SEQ ID NO: 1005950 - protein, 70 aa, Homo sapiens
RSRYSMMYPFAVDSRGNALLPNVPSSWLGNKKDLRQDDAQQETAGKMKQEPVRSEEVRDMANRISAFGYP

SEQ ID NO: 1005951 - protein, 189 aa, Homo sapiens
GLVSPRSLWAVLKVGTPPPHCPVPGKGDPVLTAGPAYFLVETGTNLVKIKGCPSEPYFGSLSALVSQHSISPISLPCCLRIPSKDPLEETPEAPVPTNMSTAADLLRQGAACSVLYLTSVETESLTGPQAVARASSAALSCSPRPTPAVVHFKMSAQVITLTDNQRKLFFRRHYPVNSITFSRNEPQDR

SEQ ID NO: 1005952 - protein, 75 aa, Homo sapiens
CELLYDVSLRLWTQMLVTVTRLPDCMAPQLPRMTLEVGEVSFCLRNGRTELLEKVYGWGASLCPCPTDFKIAKDH

SEQ ID NO: 1005953 - protein, 45 aa, Homo sapiens
DSLHRQVISPAFGTPKAAGNNQDGSGTADPQNKLLSRDVPITTLQ

SEQ ID NO: 1005954 - protein, 85 aa, Homo sapiens
GGGAVDDPGHLCVTSGTVTLYSCSSGPGQAGRSSAWGLQVQLSLERYDRDHLVRMKWPSCATKWNRGHWILALVCPQGKHLQPYI

SEQ ID NO: 1005955 - protein, 40 aa, Homo sapiens
RIPFDVSQSTGSQRKPGSPRGVPCASPHPLLQEVWHHQML

SEQ ID NO: 1005956 - protein, 84 aa, Homo sapiens
GAETALAGSYQDGLRRRDSRRVHQQEETPGGRNLRQIAGEAARDPSLQACADGVRVSLPKSGALVDVEDRSPCVPVGCCLTGGS

SEQ ID NO: 1005957 - protein, 72 aa, Homo sapiens
  misc_feature (18)..(18): Xaa can be any naturally occurring amino acid
GSGQTRLFSGCSSDHEVXPSLQRSPATTPKLTPEKTAFTQQSEPEKGTEHGASGCEQNISTVNPVFLFPGRV

SEQ ID NO: 1005958 - protein, 148 aa, Homo sapiens
MPFVCARVILAHSSALRASYFLARGVDAGSSCLSGPDLGAYNSVQCVLLGVHQTGVTGLSHHDLDGSLVVLGHWLGFDDWLQFSFFESSDKLAEGVRVKLLWLHGELLPTLVQDGGIDILPTPAEPQVLHLPSIVLFVRNGKGVLREV

SEQ ID NO: 1005959 - protein, 102 aa, Homo sapiens
GSLRCGLEGAQLKPAFLYFYLLFFSWDERRTELSILPYLCFYSGTTVGGVCVCTLVWVFNRIGKKKKNSPPFSSISLPLSVLSTGPPSFFGPVCVLFGSEPT

SEQ ID NO: 1005960 - protein, 39 aa, Homo sapiens
YIYELELVPPLRACGLAGVTHHLFQHRHSASPPSSEKRW

SEQ ID NO: 1005961 - protein, 52 aa, Homo sapiens
YVKTNDKPYTSTIVTNSDLFIARSALIICIATHVELLGFRPHSFTPQSAIFE

SEQ ID NO: 1005962 - protein, 54 aa, Homo sapiens
VCNCQACKLRYWRGGITTLRAGRSCSRQAEARQNCLSLGGGRFTCSQDHTHCTP

SEQ ID NO: 1005963 - protein, 37 aa, Homo sapiens
CHDTIELGTKSGGTTIRNDAMIQVRYDGNLDQRGRKR

SEQ ID NO: 1005964 - protein, 99 aa, Homo sapiens
MRAVEMPMDPKLNKRRGFVYINLEQKKNPVKKVLAEKVPYCHVEAQCEINGGPVPKRSLSRSSSIGSWGPVETCNRREPEAAEGGGWSVEVRRHEFGIT

SEQ ID NO: 1005965 - protein, 40 aa, Homo sapiens
LFLALLQHRDVVAMVGDLIAQRRQGDHQRLLEPATEYAPA

SEQ ID NO: 1005966 - protein, 102 aa, Homo sapiens
TVYESSRYRHLYAVGLSLRAEPAGMLCPAVAGYLLIVCSMRSPLCPFFYSLGHKNTDTNSFSVCITKVYLVLLHHPETMRWFISTCLGERVGCPPLPLPCRP

SEQ ID NO: 1005967 - protein, 58 aa, Homo sapiens
MSTKYQLARSPKAHNNKKDHNRLLRSKMNEDLFASFRAPTILGLPAAVLIILFPPLWI

SEQ ID NO: 1005968 - protein, 198 aa, Homo sapiens
  misc_feature (187)..(187): Xaa can be any naturally occurring amino acid
RLIDCCGPEALPRYPLPLLLLVSAALPWMILLRCYSQFPRGITTTAVRGICSEPHGQFLLFFVFIFRQTVFHVPVSSLCHSIILSVEMTKPAAGTDTGVFLLPGIRHTFGSLRARIIFTAMVDRWAPSLFAETHRCPVVAGSHKTQSGCAVYLHHTFIHRHLFIAELPGAVQSRAEFLEYIQYPNSXDFLNVSHGRVN

SEQ ID NO: 1005969 - protein, 99 aa, Homo sapiens
LKVLCSGAVVLCPVVSCESSERFLVFLVLLVWNSRRSVDSARLVQHVPWVSFLSLLFLLFFLFSIVLIVIFIFLVSLLPVPPVYDPYAAFSVSFHCRLI

SEQ ID NO: 1005970 - protein, 151 aa, Homo sapiens
MLGLDRSKLLRYSGQVINQSLLQEKPKDVVHAIVLGLRCGTAVEAGGGGAGLHDSTDDTHHCLKPGMFLCTLSHSQCPSKGCFYFIHWATWGICATPCSSQACEEQAGQGRGVLVFCILGMWEQVVQNKSYHTAVLFDPVRLRTGVSVVCI

SEQ ID NO: 1005971 - protein, 40 aa, Homo sapiens
RYQSCPVKPRTWLDEDEEEDDEDEDDDDDEDDEDDDDEDD

SEQ ID NO: 1005972 - protein, 82 aa, Homo sapiens
GVDACVLLYDGSLRLWTQRVREAGSEPSSEEDRRRHMHHKWVMGRNAMTSTVNFENTFCHRGKRESPASPRAGVLLHEMLTG

SEQ ID NO: 1005973 - protein, 95 aa, Homo sapiens
LPMPCHRSLALYPSQCRVKDVKCVEGHFWHDNQIGGETNDRAGPDVSYRQGVCCAVRGLCCPAGFRCAAGGTKCLRREAPRWDAPLRDPALRQLL

SEQ ID NO: 1005974 - protein, 39 aa, Homo sapiens
RVRYSYGEVQLRVRYSYGGGTATGEVQLRVRYSCNVKAR

SEQ ID NO: 1005975 - protein, 73 aa, Homo sapiens
MVEKQSRIKPKDCHSFVSELCTLWEENFTHFFSTSGLPEYDKSQVAVSDMTGCVPSYTYKTHAVLNVSRNHAH

SEQ ID NO: 1005976 - protein, 43 aa, Homo sapiens
MLRVKNPGPDSGYRGRKRKGKKWRAEKWRTYRRRHWKKTKLGA

SEQ ID NO: 1005977 - protein, 50 aa, Homo sapiens
MAQAGEGLLALAKPLCQASLLNCRCFLGQFDPHGNPRMLDIHNLHNYPAG

SEQ ID NO: 1005978 - protein, 71 aa, Homo sapiens
FDCGDSECPRPDGDQAGPTRGCAPVPMRFVIPSDSVEKGGDEASGGYTGSPSRAWLPPRYIFSTTGRFALY

SEQ ID NO: 1005979 - protein, 39 aa, Homo sapiens
QSVPIAAMIACTARRRRFRTQLRDDIPAARADLVDKLKG

SEQ ID NO: 1005980 - protein, 74 aa, Homo sapiens
SVVRCTGGVYATSGLLSDTGMEGVEGVRGPGEVGVLVDLFTDNRGFVGLNSLALGFNVDNFTCSDNRALIFVFS

SEQ ID NO: 1005981 - protein, 42 aa, Homo sapiens
YGAWCRSLRRGTSGLTDSSIEPHAVQVECLGPQPTAWYMGAC

SEQ ID NO: 1005982 - protein, 59 aa, Homo sapiens
RSTVAIRTVIGVCGKATGSVTGAGDESVVAWAGGGGGGGDEGGESTVVDSAITAGNGAA

SEQ ID NO: 1005983 - protein, 52 aa, Homo sapiens
DTCEYCMLGSWRQTSARFASIPYTCASASFPTHSHSLGRGEVYRAQPSTILS

SEQ ID NO: 1005984 - protein, 85 aa, Homo sapiens
MVSTSLKRDFNDLRVLPAETHEKRDFVSAGAWPEVSAAYGAPVVGVLFSLEEGASFLKASSCPLEGSTFASHDHPTFTPEHFVLS

SEQ ID NO: 1005985 - protein, 76 aa, Homo sapiens
MYENKLEEQDLASTVHSRLMKGNKREEQGLGRELWRPEEPMVEEEALIEFQRSYGELFGGSSCKKNHQSRAAIRPG

SEQ ID NO: 1005986 - protein, 53 aa, Homo sapiens
MSIPSMWYSEYTMEGAAQIGAWKGPCEVTRVEGPIRPQQPLPLWDIESRLTER

SEQ ID NO: 1005987 - protein, 50 aa, Homo sapiens
MIYEIFMILMILMILMILMILMILMILMILMILMNPHDPHDTSGFLMILM

SEQ ID NO: 1005988 - protein, 83 aa, Homo sapiens
  misc_feature (22)..(22): Xaa can be any naturally occurring amino acid
LVHGFLMDSSWILHGVLMDSSXTSSLEFLTGFLTGFLTGFSHGFLSGFLSGFLPGFLPGFLHGFLHGFRPGFLHGFLTEFLHG

SEQ ID NO: 1005989 - protein, 56 aa, Homo sapiens
SDIDSWYWRISRVDRLHVNVILEGRMIAHVVERNLYSVGMHLAGEYTSNWLHVCVI

SEQ ID NO: 1005990 - protein, 41 aa, Homo sapiens
MRNVESKWSIVRDFEDRLKVLGRQRELQGVCECYEAQGIGW

SEQ ID NO: 1005991 - protein, 36 aa, Homo sapiens
HLTAVGPPYAGLVDWERRTTDHFVDGREETKLGWAL

SEQ ID NO: 1005992 - protein, 37 aa, Homo sapiens
MGRCLRHKEYVLHEQCQNEGILKSEIAVGAFHFSNGS

SEQ ID NO: 1005993 - protein, 156 aa, Homo sapiens
RSPIRFCRADVTGKNDQRRSAQYGIKQRCGTWVMALAHNSRPAGWTSRPRIFDKRAFCSSTPISRSNRVRASMSGRCDVDQTTRQGLALSALVAPDTEAVECLATRRVAAVRHQASADTRLGCPGTLKWKRLFKGLPLRSRQREPGRGIRQVVVEA

SEQ ID NO: 1005994 - protein, 53 aa, Homo sapiens
MPWENGADLIFSTLMAQGLIWQRAHVFQPSSFQLTAALKFGYIGMVLSYDINW

SEQ ID NO: 1005995 - protein, 149 aa, Homo sapiens
  misc_feature (149)..(149): Xaa can be any naturally occurring amino acid
PVPTYAGTYAWLTTSYSRHVQCSSFHMSINRSVLHHRRLIHRFPLCRGTLEQTYAPIHFTIIYIAVNLTFFPNTFSGYTECAEVIRSNRCVYHMRHLIICGLIHFSNSSIINNFHDLRSLRVEARSPISRRNLHKPVVSIWMSPTGYGX

SEQ ID NO: 1005996 - protein, 43 aa, Homo sapiens
ESVPPLHAWDQTLDLARDDAMTPGGLTSGSVRISPTKIYPLYK

SEQ ID NO: 1005997 - protein, 51 aa, Homo sapiens
GIEVDRNDWIYSESELRSRRTFKSLNKTNPLDERLHRLGMSMIQQSSVVKP

SEQ ID NO: 1005998 - protein, 109 aa, Homo sapiens
ILEKVRWSTTLRTGGDLLNSLLLSQMYLSPHSFFIMSSTFSALLGRPKLNLPLGGELVHIHLGKLLQGEVPTCVGQTQKPTCYLRTGSITAVCPLGPRSQPSAGRLGGI

SEQ ID NO: 1005999 - protein, 70 aa, Homo sapiens
MCREVGLHGHTLASRCVGWHTKAQRNDLRLAVGRRHCIMTADEQFLQVPQHPQRRHCDDNGGHRRARYAS

SEQ ID NO: 1006000 - protein, 74 aa, Homo sapiens
MTSTSKRQQLYVASAVGVTHLSLHRMTGVMGLPVLTAALPGTLTVPGHGRPCSRYTESSKRRTCLEERRAGKTP

SEQ ID NO: 1006001 - protein, 40 aa, Homo sapiens
VRALMDAFNFNNMGDAAVPAAPVALHPTSTPSCTSAALGQ

SEQ ID NO: 1006002 - protein, 33 aa, Homo sapiens
PGPHGWSTSLKRDFTIFEYFRRDTEKRDFVSAG

SEQ ID NO: 1006003 - protein, 70 aa, Homo sapiens
  misc_feature (8)..(8): Xaa can be any naturally occurring amino acid
YSDWTPRXLMDYLPWFVHINFNKGVAPLKDTVEGMCSSAMGSHGKRQRRFYKRRPHTWSEVFNETDTRRP

SEQ ID NO: 1006004 - protein, 71 aa, Homo sapiens
KLELGQCHAAAGSRSVANQWDPRWLGHHAQDLSPHLAPDLARACWAHTSLLVPSQAGTGTSLQWVTRPVPA

SEQ ID NO: 1006005 - protein, 77 aa, Homo sapiens
  misc_feature (26)..(26): Xaa can be any naturally occurring amino acid
DKSSRYPVDKSNLIMHHRHFVSMVKXMPPKTGLIFYFNRFIFVRVTGEALVNASVFLFRCVLSGSIYIRAGRTRRQA

SEQ ID NO: 1006006 - protein, 72 aa, Homo sapiens
SFVHGTRLSERCPNSVISVSVCYVPVIDIETPSSSPANYSRGVMHLVAMRAFFCLESCTTESRAYKKLNDDR

SEQ ID NO: 1006007 - protein, 67 aa, Homo sapiens
SALYPSMMIDRMYGMVRHCDQKPAWRTCQFIECAVVRSVGATEQGQELGPVPTPQNVGNEQLLQVPV

SEQ ID NO: 1006008 - protein, 86 aa, Homo sapiens
DKLGYWQDFVAWEERSHVWTLPAFITLSETCILRELKEYNAFLPRSRPQDWHDRSTAALDLFPVLIGAWTSSHQFCFDSTVILSSE

SEQ ID NO: 1006009 - protein, 116 aa, Homo sapiens
VTGEELKKIETDLDYSGLNSDHVGPLIVEQTEPFNTRAAPLGTVLTPTIDGRKPLLDVTTGLYDTTDCAVTPYGYTCFRLVNVTWTQLDSTSTFAFDLVTVLRVYLLGRVGFLLPR

SEQ ID NO: 1006010 - protein, 67 aa, Homo sapiens
MAGGRGISKNIGDVRETRKARTFGNFTAAGNFRKVGHVRNFGKAGNAGHFSCNGTFEPFQDVEWGRP

SEQ ID NO: 1006011 - protein, 42 aa, Homo sapiens
RIELVPHLMRGPRFLSLPTDPDLSLGSSLPTEFGVSLAFLVV

SEQ ID NO: 1006012 - protein, 147 aa, Homo sapiens
DRVVYPSCAVAPDHGQQRQDGHPVLHDAAGALWVTEEVTEGRLIPCPPRMAGTSCRKKSVSPTTLSNHHRPLCYHFTVPAWCKCVHTALCTARHCACGCLWVFTHMPTGMPDCVCVHGVSRPLSPLCVFLALSPTLCACPSVRAASD

SEQ ID NO: 1006013 - protein, 48 aa, Homo sapiens
GTYDSGSVGIAIVGKGRQVVQRESGGTLRSSWLGADGIPIMRWHHRTT

SEQ ID NO: 1006014 - protein, 33 aa, Homo sapiens
MVCVSCVTCVAMHSMWPLPSDHAHAWETGMTGS

SEQ ID NO: 1006015 - protein, 35 aa, Homo sapiens
  misc_feature (13)..(13): Xaa can be any naturally occurring amino acid
RSRWQVHIQFLIXTILSSFPNYWLVPHTSVDVESE

SEQ ID NO: 1006016 - protein, 44 aa, Homo sapiens
ARYPPHTPDSFLRLACVGWDHKGLVAWLPAGVSEAATFLMLRGS

SEQ ID NO: 1006017 - protein, 34 aa, Homo sapiens
MHARVLEDALKSTRLQLNDIGRSARSSPCRRNLL

SEQ ID NO: 1006018 - protein, 42 aa, Homo sapiens
QRRRTGQHEHPNDLPPSMIDPLHGTMLDYSSMLDKKPFISTQ

SEQ ID NO: 1006019 - protein, 35 aa, Homo sapiens
  misc_feature (19)..(19): Xaa can be any naturally occurring amino acid
LAFELRPLAALTELTIKQXGLTHPGFSSSHGASTG

SEQ ID NO: 1006020 - protein, 67 aa, Homo sapiens
YDEMTLLSEYVSCSYVLHSLQQTLPMLSASLSTHTGKGFDVIESLLLLLLTAVLITMGLLHGKSIIE

SEQ ID NO: 1006021 - protein, 39 aa, Homo sapiens
PLSVISNSHIIFYAYTTHQTLSRFSSIAHITRDVNYGVN

SEQ ID NO: 1006022 - protein, 39 aa, Homo sapiens
CQYLMLGIFELLLVRWVNAKIKGCWPVGIWEKRESTLDW

SEQ ID NO: 1006023 - protein, 41 aa, Homo sapiens
VDQRTRLASRYSDASNTDVFRSVQHYVVWMCVVVWMWGTEL

SEQ ID NO: 1006024 - protein, 167 aa, Homo sapiens
  misc_feature (19)..(19): Xaa can be any naturally occurring amino acid
  misc_feature (26)..(26): Xaa can be any naturally occurring amino acid
  misc_feature (28)..(28): Xaa can be any naturally occurring amino acid
  misc_feature (34)..(34): Xaa can be any naturally occurring amino acid
  misc_feature (37)..(37): Xaa can be any naturally occurring amino acid
  misc_feature (45)..(45): Xaa can be any naturally occurring amino acid
  misc_feature (47)..(47): Xaa can be any naturally occurring amino acid
  misc_feature (70)..(70): Xaa can be any naturally occurring amino acid
  misc_feature (103)..(103): Xaa can be any naturally occurring amino acid
  misc_feature (149)..(149): Xaa can be any naturally occurring amino acid
MYAWVNHDTATSTSTSHTXAEHETSXSXIIRCAXWTXGGNHVRRXAXALDASLSATPLNPAAATLALASXPGPLSMLQCCASQFASRANALKHMAGIPEKSLXKSLYFSFPFFFLARESRSVAQAGGQWHHLGSRQAPPPGFTPFSGLXLLSSWARWLMPVIPALWE

SEQ ID NO: 1006025 - protein, 72 aa, Homo sapiens
MGAREASAYYTVGLYLLTHYMLTLKPFNKRVKIDLEIKLLNRTPPFFKLYFSRYGGGDRPHGVSITGHLGSG

SEQ ID NO: 1006026 - protein, 78 aa, Homo sapiens
MRCDLEDPIQALSSLSIIFFSQMSPCYLSCNITCVTASTSIRTCSPIFPMPTGPTSLSIPKPSQTQYAANSACCSCHS

SEQ ID NO: 1006027 - protein, 88 aa, Homo sapiens
YTINWVQGILLGGPTGHGGRKDTLPGQAEPRKPANTQAVQTPNKYGNKNYIPGCEDVDDMLGKRKQNLKVQAQKPVRTPYNSYLISKT

SEQ ID NO: 1006028 - protein, 34 aa, Homo sapiens
ERESRSVTQAKGQGHDLGSLETPPPGSKGFSGLS

SEQ ID NO: 1006029 - protein, 72 aa, Homo sapiens
DSRRTPRLADAHYHGHGLPTVGWGRTTGVTPFHSTLWFYDTPSLDFHGNDTLTRCTSWDTGTLLARVPDARH

SEQ ID NO: 1006030 - protein, 88 aa, Homo sapiens
SPFVSRVALGSLDRHETEPPPLLRVCPRAHCMVGSDLWFGHQPSLRAAFGLSPAQASGVQKPGQRLGHSLFLSSQTRSSYKSPGRKPR

SEQ ID NO: 1006031 - protein, 64 aa, Homo sapiens
  misc_feature (44)..(44): Xaa can be any naturally occurring amino acid
  misc_feature (46)..(46): Xaa can be any naturally occurring amino acid
SRSRYWNPYFSWASREVSVETTQLGRPSTKAAIDNTQTRGLGSXSXEDLFNQAPSWNFTPQDTV

SEQ ID NO: 1006032 - protein, 33 aa, Homo sapiens
GRTSRGENPKGSLRQPKEVRVLDLGSEVYVWQG

SEQ ID NO: 1006033 - protein, 55 aa, Homo sapiens
QKRGFLELNLRPPPKRRCRGRISPDKGQQPLEDISLGLRVLRAAEPRTELEGYRA

SEQ ID NO: 1006034 - protein, 55 aa, Homo sapiens
GLLVETDYTFPLAEKVKAFLADPSALVAAAPVAAATTAAPVAAAAPAKVEAKEES

SEQ ID NO: 1006035 - protein, 102 aa, Homo sapiens
RQPGHITRLVCIRNLRISLACWSPPVVPATWETEVGGFLSLGGRGCSELHLHHCTPAWVTEQTLSQKKKKERKKRKFWNGLLISGIGQSGDARVSASEVGVG

SEQ ID NO: 1006036 - protein, 78 aa, Homo sapiens
RTDEAYGNRHSRYGSGFQAHKASPKLPSRVLQNSLSTIIIFHIAWLLVKELTLQPKKCSKGPRLREFTALTRFPTTLK

SEQ ID NO: 1006037 - protein, 161 aa, Homo sapiens
  misc_feature (122)..(122): Xaa can be any naturally occurring amino acid
MMVVTGDEDEDSPCAHEALWDEDTLFGQGLEVFYPEWGNMGCKVVPDGNNYRQKITSGMEPIVKFPGAGDGATYIRVMVDPDAPSRAGPRQRFGRHGVVTDIKGADLKKGKIQGQELSAYQXPSPAGHSGFHRYQFFVYLQGRTSHLSPSQENKSRFWKWQ

SEQ ID NO: 1006038 - protein, 37 aa, Homo sapiens
MTPASAPTRHRSLVSPKAGGWQPRMVSQQAEEGLTLP

SEQ ID NO: 1006039 - protein, 65 aa, Homo sapiens
TDEIWLSVETDYTFPLAEKVKAFLADPSALVLLPLVAAATTAALAAAAAPAKVEAKEESEESSVR

SEQ ID NO: 1006040 - protein, 114 aa, Homo sapiens
RDGRVLTGNTNQVMSVVTKVVFFRAVEPQKPSQVQGPTSNGRPRDPVFQNPPPTLLIHIKKILVHQNRPTPQILPHRGPSSHRGPTQMRGGLEEKNQPPNIWRKGGSIREGNWR

SEQ ID NO: 1006041 - protein, 37 aa, Homo sapiens
MNSKSATPSWNYTLWRVGDYVLPSLGRENDEWQNIYC

SEQ ID NO: 1006042 - protein, 57 aa, Homo sapiens
RREHVLDAFDASFKDDLEGVPVVIPFQRKKPYECSECGRIFKHKTDHIRHQRVHTGE

SEQ ID NO: 1006043 - protein, 100 aa, Homo sapiens
MGFHQVGQADLKLLTSSEPPALALSAYFHHHYGGLNVGPLQNSCGNLILKVTVFFGLVWFLETESCCVTQAGVRWHDHGSLQSQPPQARVILLSHPPEYL

SEQ ID NO: 1006044 - protein, 57 aa, Homo sapiens
RSQAMVVLHEEEKLQRLSLTGGRCEDENGCPTLQESSPGVAAAHSSLLQAQPCKMGH

SEQ ID NO: 1006045 - protein, 33 aa, Homo sapiens
MASRMSGAWRGDRITSEFAALQVTYGKLQRVDA

SEQ ID NO: 1006046 - protein, 91 aa, Homo sapiens
DWLSLLFLPVICNAALAARSLLGAESEGHEMVYERDHILHQAVAPTLMRSCVRRPRTAHILFLATSFPQAGPSCDNGTTLRMQCLAATPPR

SEQ ID NO: 1006047 - protein, 45 aa, Homo sapiens
MTHLWVVGAKLVNGTELDQLLVDAERTVPALSRHKSTSPVYERNR

SEQ ID NO: 1006048 - protein, 52 aa, Homo sapiens
IELRYRIRQLLQWHDSLSHKNGYLNLAGLSLVSLNPLPHLNDGLCSKIDCSD

SEQ ID NO: 1006049 - protein, 76 aa, Homo sapiens
NSTVVHNVPGILRWCCVYRALGGDGEDGPNRRRLGSLAPVLVPLAFAFSSSCPLAVAPGRTTGGAASDGLGQVDAP

SEQ ID NO: 1006050 - protein, 113 aa, Homo sapiens
MGQPGSKDLGSPMEGSQRPVSLAVGLTMVLISHREKKSHPDVGLLKCVLLKAKWRTEECHPLQPVMYPPQESKPQSQAYTWKSTAFALLQGSTDISSLHVIRWVFLLNASELY

SEQ ID NO: 1006051 - protein, 37 aa, Homo sapiens
MEGKWAHGVSESSSEQSLTKVQYVGALGKVSPWLDMS

SEQ ID NO: 1006052 - protein, 165 aa, Homo sapiens
DCCVLGTGPPSGSPLSTTLSPSLEADPKDGEGCPMCRLLPSRGKEDSQTSRDEGRAVYRQGWARRPGLLRRDNGGCGGHCAVPSSVSRGLDSPLDGIGPLTGASQLVALISLLLGEAVASGSETDTIGHIVLDESYPSKCILDKSSHLATSTILILSMGRQWTVA

SEQ ID NO: 1006053 - protein, 100 aa, Homo sapiens
SRPQTGGDPMVWRDHQALRGAMEETCGSVLMELMQESERVDLNDSVLINWNIAASTCLGERQDTIGEVGKPRARRRELHVGSGGAPASDVCPRCRRDTSH

SEQ ID NO: 1006054 - protein, 53 aa, Homo sapiens
IGPKELFLTYSCAHYEVDLDRHASVRPPGVSTRTCNRGILEYDVIGSNYGSTC

SEQ ID NO: 1006055 - protein, 38 aa, Homo sapiens
HCPHDWLPVNAAGAPAALCSSERLCGPVALHLYWLKLP

SEQ ID NO: 1006056 - protein, 34 aa, Homo sapiens
  misc_feature (2)..(2): Xaa can be any naturally occurring amino acid
MXLEKRVTTVMIVVMAEDAMIEAATGAAAATKWE

SEQ ID NO: 1006057 - protein, 38 aa, Homo sapiens
GSHWLLVSASQDGKLIIWDSYTTNKPQDPRGQRQGQSG

SEQ ID NO: 1006058 - protein, 34 aa, Homo sapiens
FRVCKFNSGLRFGHEKRDIVHHSSTNDNLTHKST

SEQ ID NO: 1006059 - protein, 46 aa, Homo sapiens
  misc_feature (27)..(27): Xaa can be any naturally occurring amino acid
HSRGSTTSRQASGRTRKKTMRKELTDXRNRGRNKCRYCARGWRGPR

SEQ ID NO: 1006060 - protein, 89 aa, Homo sapiens
MRCCGGKLQSIQRGLLGCLKYLYTGELDENERELMHIGHIAELLEVFDLRMMVANISQQLAFMNQEITKAFHVRRNNRVKGVLGQKGTF

SEQ ID NO: 1006061 - protein, 60 aa, Homo sapiens
MFRRRDYYSKTTKTLEHYNYYSAHELGVLSTALRLLIRAELGQPGKPIYGKRTTFTTVIR

SEQ ID NO: 1006062 - protein, 81 aa, Homo sapiens
ITSQCDSCRHVSGPGNTSYEHWWLGFIAFDYSVKSTDRKMVGDVTGAPGLLPPTAKVGEQSGALHIGASSIEHFCSVNHSP

SEQ ID NO: 1006063 - protein, 33 aa, Homo sapiens
MAYDGEEKSGEVIASGLEKWDERESAKQLLIRK

SEQ ID NO: 1006064 - protein, 114 aa, Homo sapiens
AYLKRQGEDVHTDVTEVFVNACGRADAAGGIQAVATDSWARLTNNYREKKKYTEPRGLCKSQEFSGISTSIPRVNTKAAQGSLGSPLFTSQKLILRPGPPFKPLAGQRRISLQF

SEQ ID NO: 1006065 - protein, 39 aa, Homo sapiens
KPDLLMFAALAVQDEVIPFQHAGFNGLDFWGIHMCSIST

SEQ ID NO: 1006066 - protein, 107 aa, Homo sapiens
MPCNCTSIQVTRGVHRVLGTGTWAPDTDDGYDGDDRPLDTTRDRLTGTSRWGPHLTDYWYTKPGTLYVGTTWANVQTRRRFDASDYPRTEDTGLNYTDRNPRNGGGL

SEQ ID NO: 1006067 - protein, 116 aa, Homo sapiens
VRFVRRLATVAPFFNDLHGGTDGTTTANRPHDPGSSTRGHADQKKGRTCKQTTLRRTGHMCPKAHAHHRRTEQAQRGRTEHSEKGSSAQQQRAAAAAQREHVRERQKSAHRHALRA

SEQ ID NO: 1006068 - protein, 104 aa, Homo sapiens
MTPTQLLRKLITPLCIVKYSTAGVIHMILSRISQPTTLLTILGQRILQRGGLSCATVRRLAASLASTHWYRQQLPDTIVTIQTMSRDRHMSPGELHCPLLNEPL

SEQ ID NO: 1006069 - protein, 101 aa, Homo sapiens
VDSRRIPSRTCYPCTGMGMGERSLCYIKISHLRVPDYLGLHDTSASNANSDSLLLTTSYHYRPIWHQPQTLLLPTYPHSTPTSGSRQLQTVLLRTSPCCIH

SEQ ID NO: 1006070 - protein, 55 aa, Homo sapiens
DNGYGHCLLDKPEAPLHLPGDFPWHRTMMLTCQCQRDLRVPDLTAICPHAVRRPV

SEQ ID NO: 1006071 - protein, 115 aa, Homo sapiens
PLVEGCRSCAPRADSWYAGTWCWVQELAAAVDVVEDFLLELRHLLAQQARRGRQLRVLTLEGLHFLFQAEMRSSLRLRHLEAAMRLRSRLRSALMRSCVSMSMGDNGGLSPKLGT

SEQ ID NO: 1006072 - protein, 73 aa, Homo sapiens
SQTGLVPTPSSGASQRLSADRCQAGLVGSLWDIGVSPSPGSRVVTGPVTGDAVQVGAVRDECAVPYTLLDSDV

SEQ ID NO: 1006073 - protein, 39 aa, Homo sapiens
TNNTVNDLCTTFTYHSQIQILVCKPTRNTDGYYQPAFLM

SEQ ID NO: 1006074 - protein, 41 aa, Homo sapiens
IQTLGDADTCWRWLSASSAADGSRCAKERHRRSLACPVAVW

SEQ ID NO: 1006075 - protein, 47 aa, Homo sapiens
SQTRPSLHASPLGCSPDGQLLTPQSSSIVAGVTQLLCPFSQAPPLDC

SEQ ID NO: 1006076 - protein, 84 aa, Homo sapiens
PATCIHFGSLHSLIVTTETHRDTAGIRQVMGERAQRLVPGELTSILTGYVVRLILRHEKNLERSPLLTWTEDGTTTLVPTDGWR

SEQ ID NO: 1006077 - protein, 45 aa, Homo sapiens
MVVAVPMMLSTNEGAHSLFDHRTVWLEYTDKIFRERPRAVTVKRS

SEQ ID NO: 1006078 - protein, 32 aa, Homo sapiens
MTAPAHVSTELGPAASLAVGIMTVPIAGPETQ

SEQ ID NO: 1006079 - protein, 31 aa, Homo sapiens
LTDWPVKLRLQRAMIAPTCTPDLGKTEQDSV

SEQ ID NO: 1006080 - protein, 50 aa, Homo sapiens
DSRDPHKRRRALLSGPGYFTVTAWLAQWASLQVDGGELLKVQLASHARGE

SEQ ID NO: 1006081 - protein, 125 aa, Homo sapiens
LKRQGQGGGSGTPEEYPLSFSDMLQGRTVCGSVKSCRGHRTHISLHGKPTPWLPQGSWGMSHCPWTPLAGTASPWHQSLGQLRKQAEMWTCKPRAFLVGLEGGPSSSGRKLLAPLTCQGFPKKEP

SEQ ID NO: 1006082 - protein, 83 aa, Homo sapiens
MLKAAGKRATIPFPDFCRGWPCCLSPLCHCLVLWALYQFDEKYGGQPRGSRDVSCSRQLCLLTCVPGNRRTGCWPILEGPINL

SEQ ID NO: 1006083 - protein, 98 aa, Homo sapiens
GDQRIRVIPLWGLSSSLTHNILIVLVIIGFFFFQLRALLPPLVILITGSSLPSAESVSVRPTDIRVILLRISRIHIVTFFSQLGKHNKTLTPRKLVKF

SEQ ID NO: 1006084 - protein, 63 aa, Homo sapiens
  misc_feature (46)..(46): Xaa can be any naturally occurring amino acid
LVSSPFVGEGTNVAANNFYLGSDGRTVCQLHGSQLYARTTSASPSXGSVTPTDDLRGPTHDEP

SEQ ID NO: 1006085 - protein, 110 aa, Homo sapiens
LCRSYVDPCIWYVNRAAVNIFVHVSLWSVMINIMHNPKLYLLNNNLPSPSAHKLCLLGSSNYSCLRLLISWNYRRRPPCLANFCIFIQRLGFTMLAGVVLNSVPQVIHPS

SEQ ID NO: 1006086 - protein, 82 aa, Homo sapiens
  misc_feature (52)..(52): Xaa can be any naturally occurring amino acid
  misc_feature (63)..(63): Xaa can be any naturally occurring amino acid
MILMSSPFVWHPDALCDGVCQFQLTDLHGHPPSTPSYQLGMYSGVDPFPAHXMLLCGLQLNMXGDLSTHKHIWSQVSPFHNA

SEQ ID NO: 1006087 - protein, 51 aa, Homo sapiens
ASQVTRGSPYRLAVQVTMSWPSVQASVPVAAAGKRTHSARPGRTPVDKPRI

SEQ ID NO: 1006088 - protein, 36 aa, Homo sapiens
DVIPLGEEGDVKETRRTYVRFNLLMATGTKKNQQVL

SEQ ID NO: 1006089 - protein, 39 aa, Homo sapiens
SLRMRHLAAAILLPFPSDSPILFFLLEITVTTLAPPDQC

SEQ ID NO: 1006090 - protein, 42 aa, Homo sapiens
RLYRILCHPPSYSWKQKWVSASSAIDPDPHTFGDPYLPLVTA

SEQ ID NO: 1006091 - protein, 40 aa, Homo sapiens
LLAVIHAVAADLMVLDRLWKPHVSAVVRASNLPMSVSLWV

SEQ ID NO: 1006092 - protein, 33 aa, Homo sapiens
MLLFQQGVNQTYSPKVTTLGTATDAPTFTEYSG

SEQ ID NO: 1006093 - protein, 41 aa, Homo sapiens
GSRWINVVSPELAVAGLGIDEEVRPPMNSPLSGVTSDGKQV

SEQ ID NO: 1006094 - protein, 55 aa, Homo sapiens
MYNKVPGKMQVAKQSVLAATVVISSCPFQQSDTCLIIPHGREVRLGAHPGTLLTS

SEQ ID NO: 1006095 - protein, 76 aa, Homo sapiens
ICRALTHKPHRRLVHVNELPPGGAEPLPQSQPADSSRSFTRTSSISSGHFLPVDAMTACRESVELAPRIYGSPLPG

SEQ ID NO: 1006096 - protein, 51 aa, Homo sapiens
IGGCKRGEGDQDTSTGFSMAESEVSDIESRIAALRAAGDQTVKPYGKAPEE

SEQ ID NO: 1006097 - protein, 45 aa, Homo sapiens
GSTPLGARLRYSGVIMGLYRLTSQAQAVYLHLPPSSWTTGVNHHD

SEQ ID NO: 1006098 - protein, 86 aa, Homo sapiens
TTASIFTLSQLITGKEDAANKYALRELHHCAWRSLTLCKDRIRKLADQCTGLQGFWVFHSYRRGEPGSGVHLTCSMDTPLKLIHGT

SEQ ID NO: 1006099 - protein, 32 aa, Homo sapiens
EHRITHAAVPGPVQSSSALSECCSRQSPPQGD

SEQ ID NO: 1006100 - protein, 47 aa, Homo sapiens
SSVLQVYLFTLTLLCFPKGLLGSDSSVECADVCRAFSKLLLTLLTGA

SEQ ID NO: 1006101 - protein, 42 aa, Homo sapiens
MSGVGWCQVAAALMKNEVGCLGCNENMEALQGWVEDVEIQLT

SEQ ID NO: 1006102 - protein, 31 aa, Homo sapiens
MAWGMAEFKVWCGVCNVAQSGRVRGMDWGVE

SEQ ID NO: 1006103 - protein, 63 aa, Homo sapiens
MVIPIRQLRNWGRARMAHPCNQSQHLGKVEAGGITLRSGVRDQPDPTMDKPFRLLHIQNQPGM

SEQ ID NO: 1006104 - protein, 120 aa, Homo sapiens
ELTSHWVAGRLVPGGERHTGNGGSLKLHPKTLGSVSYLLPHVVWSGCITSPSGDAKTASQPFPSGGILRSLAILLYGKQLVKNGLIAWSFWRDFKTPNPSHKSFQQRSPLQKEPFGNQGG

SEQ ID NO: 1006105 - protein, 147 aa, Homo sapiens
  misc_feature (51)..(51): Xaa can be any naturally occurring amino acid
GRQLRTPERFAETLKVEGPQPTQLEHQRCLLAEALTLAWPCEDTGQKPRTXEVSSVMLEQRAPRKRLVADWRGGPLLCQDGFYRAISMAGPALERHGPVLAVERLPDVPRQHRHVCAGQKQQTFLSLTGLHQVAFQGRVAGACHKGV

SEQ ID NO: 1006106 - protein, 149 aa, Homo sapiens
MYQCGKGQCGDYCLVGTDLHNDQKWEKQAGHVGHEGWGLRVVNAERLSPGHRLKSPWSCMLGPKTYHKFMGFKSFAELPQPPLLVELTVEEGQRLKVIYCSSAGFHAVDIDSGNSYNIYIPVHIQSQITPHAIIFLPKNDGMEMLAVSR

SEQ ID NO: 1006107 - protein, 37 aa, Homo sapiens
QELTDSRQVFVLYDDPIEDCPNSFTLISMSSPVGLVG

SEQ ID NO: 1006108 - protein, 83 aa, Homo sapiens
ESSSTGWHGAYQDEHLIQTVKNRVKVAQTRIEGIGCCCGLSEGGSICRPCWHPYPRMMSQHLSLRDLSFVPCPHWLRLISASL

SEQ ID NO: 1006109 - protein, 35 aa, Homo sapiens
MGDTIHMQAVVGASAVPHTVVPGVTCCPLSALFGL

SEQ ID NO: 1006110 - protein, 98 aa, Homo sapiens
MGSILSVEGVCLGLIQICSLFSRVREEEEDDRNVMPGKVIRLSDIQKFLVEGCGVCGKGVKSLVNLRAISYRERNMNSDYAFSLHNIPQWGDFKGPLG

SEQ ID NO: 1006111 - protein, 52 aa, Homo sapiens
YLRMYSHWLQRQGGASTQADSVNITSFQCHHENRVLHTVTRAVTTCDCSPHR

SEQ ID NO: 1006112 - protein, 33 aa, Homo sapiens
TGVTKLGLRTLKKTGATTTTAATRYRQKTEGGA

SEQ ID NO: 1006113 - protein, 121 aa, Homo sapiens
MGDIEKIGCPTLGYSSSLTKLHPGTEYVVSIVALHGREESPLLIGQQSTVSDVPRDLEVVAANPTSLTDQLGMLLLSPVRYYRITYGERGGNSPVQEFTVAWEPSLQLPSAAFNLEWIIPV

SEQ ID NO: 1006114 - protein, 101 aa, Homo sapiens
MPKLRCVFNDISTILEKALVESSECRECPFTAGKIHWLPRKENGLKPLLWLSQLIFPKVIKLHITEVDVILHGKLAIPGVPRLSLNDGREKPASYRCRGAT

SEQ ID NO: 1006115 - protein, 87 aa, Homo sapiens
MQVNVFLTSRIKGSWVQGGDGPEEGGRSHSLREGGKELKKKLQVDGFDCLSQGGGLVLGGHCQVKPDFTFTGEKGPGPGGFNLGVLL

SEQ ID NO: 1006116 - protein, 81 aa, Homo sapiens
MRAAGRGQGQCAQQVHTRPVITNKHAVGTSGYTAASSKDKNTPEASRDGKGLSKDSLAQVFRGRATEQLDKKHNRLRAPDR

SEQ ID NO: 1006117 - protein, 82 aa, Homo sapiens
  misc_feature (48)..(48): Xaa can be any naturally occurring amino acid
QCKRQAVYCWKAGATVASPGPGRSLQCIHAEIVVTYLRKDVMQTPYSXYTRYRAGWPGGHWGPPPSSPHPVLEACKKAKQAQ

SEQ ID NO: 1006118 - protein, 37 aa, Homo sapiens
RLSDRDGKRDRETDGETERHDGGDRGETAERECWRHE

SEQ ID NO: 1006119 - protein, 69 aa, Homo sapiens
SYSVRQRMCTQMHLRFVNACGEQMQRGGFPGSAHCIVARLPPLPEKKIVHRAQRLVESPELAGLSPISR

SEQ ID NO: 1006120 - protein, 91 aa, Homo sapiens
GQDQTGLRVGHLAHCCSQLLLMETVFDFRSVAFITHQNVLRSGLRPNSERCSLGRPGIWGSCVCAWRPFLLGASGGSRFLKSECRIKVELY

SEQ ID NO: 1006121 - protein, 46 aa, Homo sapiens
PSKLFSVKIVALGGLLGLEVQVRSHRGRGRGQSCGDLERAGRRRPY

SEQ ID NO: 1006122 - protein, 45 aa, Homo sapiens
MVDLEFERKGTPEPIILIYSAVLQLVVVKLQDDMKWGDTGLAQKL

SEQ ID NO: 1006123 - protein, 99 aa, Homo sapiens
  misc_feature (48)..(48): Xaa can be any naturally occurring amino acid
MKVRVSHSENVRHKKVVVTDATETRYISGNKMRRSLVQVDAQQWPDSXREHQADVRSYTITGLQTGTDYKIYLVHLEVTMLGAPLLVIDASTPIDAPSN

SEQ ID NO: 1006124 - protein, 141 aa, Homo sapiens
TGVGVVTEEELNEEIFHDLRNSHGLSLYDSSVASELETPEDFTLTDDITRNWAAFTSRAAMLQKSVLRGEEAALQTAGHCLSTRPKNEFAAKATEDQMRLLRLQRRLEDELWGQFLDLSLHDTVTSLILGGHKKRAEQLGT

SEQ ID NO: 1006125 - protein, 57 aa, Homo sapiens
TGRWLVLFELRSGAGLSASCLSLHCSSSLCLRQLHASAETDAWGSTSCHGRGLRASR

SEQ ID NO: 1006126 - protein, 34 aa, Homo sapiens
SVRVNNHSGVLKIQEKYSGWGRGCRNVFPGCGVP

SEQ ID NO: 1006127 - protein, 41 aa, Homo sapiens
CDLEDPHLSLSTSCGAGVVVVANIQTRTLKDVGEGEDVGEG

SEQ ID NO: 1006128 - protein, 36 aa, Homo sapiens
HLSSRHLSFSHTAAAKNVGERVDVGEGEDVGKGRMS

SEQ ID NO: 1006129 - protein, 40 aa, Homo sapiens
MSERERMLEGGDVGEGDGCRRGRGCRRGRGMSETGADVGR

SEQ ID NO: 1006130 - protein, 38 aa, Homo sapiens
MSGRRDDGLSDDGTGLSGRRGRRTVERRDDGLSRRGTT

SEQ ID NO: 1006131 - protein, 54 aa, Homo sapiens
DLKLYHGGGLPSLHDAKLIDSCYTNPADRAYSCVPAYSEPMETPVALNYSFYQV

SEQ ID NO: 1006132 - protein, 39 aa, Homo sapiens
MYSFSSKGADLSELTLRWSVFLYTWCRNDMYRPGFGKGD

SEQ ID NO: 1006133 - protein, 126 aa, Homo sapiens
  misc_feature (39)..(39): Xaa can be any naturally occurring amino acid
ISAPLGCDHSHLTGLAGRGPGSQWGRGSHHSQHGEGIRXNMKSWVRSFSSDSGWQVPNSQRSVSEAPCRNKSLICRNASRTPWVHMGLWPSKSAVTSRKNWLESPRPATDKNGRAGPPGPPEPSGE

SEQ ID NO: 1006134 - protein, 52 aa, Homo sapiens
  misc_feature (6)..(6): Xaa can be any naturally occurring amino acid
  misc_feature (23)..(23): Xaa can be any naturally occurring amino acid
LEDLCXHLVAEVLWSTGMSTVPXQMISFLTNQQHFWKLFLSQGYWGAGNIFL

SEQ ID NO: 1006135 - protein, 33 aa, Homo sapiens
LTEKKEVVEERENGRDAPVTGMLMRKTGEQECD

SEQ ID NO: 1006136 - protein, 54 aa, Homo sapiens
  misc_feature (1)..(1): Xaa can be any naturally occurring amino acid
XGVGRGYYRCKSPFCRKLFGTGALTIWYYLGVRRNITACLSDFLRSEWRRWSIV

SEQ ID NO: 1006137 - protein, 68 aa, Homo sapiens
CTRSWRALDDVVILAVGGTSTSDGTLNTKGATKGSSFSSKFSGSFFSLCLEGSSSSVWSEGRNSRYRK

SEQ ID NO: 1006138 - protein, 127 aa, Homo sapiens
YIFGVVVGRGVAEVSGPGPESYVLSGVWRGFGFGPGLERCNAGHVLGEEVFQELFNTESMFCATAFITSTCCSGEAWNHIFRRLCPEGPMALRVRCMGLAGGPAPIPGGPRDCSQTPLQSAALPISP

SEQ ID NO: 1006139 - protein, 36 aa, Homo sapiens
TDLRWLWVGSVSILTGQAEENCGTDSQQSVAWAEGR

SEQ ID NO: 1006140 - protein, 81 aa, Homo sapiens
RYPDQVTATTKSGANLAHSQPVPVAGGRDQRRRQVLTRVNRLKPEESPSPSPGICVSPVTRYKVEQALHGLWPQQVVPVCW

SEQ ID NO: 1006141 - protein, 120 aa, Homo sapiens
LLNNMAHIWIFGPDNVSSTRDIKSFETSLSILLLVQCPGPRLKQILMDQGIAYNCIAPRQTSTGDAHKWSEAHNLFLLGCRLPACSHYKCLDISRVPAERSKSRNHTRTKCVDVTSESTR

SEQ ID NO: 1006142 - protein, 44 aa, Homo sapiens
RRVHCEHAVEHGLTLVLEDIGERRFLKRTRDGLRLPSVRSKGSR

SEQ ID NO: 1006143 - protein, 92 aa, Homo sapiens
ITALEKGEDSRGSQARETGEWILDRGGDGVRQRLLRFPGICWTWSHVLSCHSDNDDEWLRSGTVEKDENYASLLGTMMDGVSQRMNARQLKN

SEQ ID NO: 1006144 - protein, 88 aa, Homo sapiens
SIVSHLVADGETIGLGTTAMPAVMQMAERHSGQRKGQPPGWTKHNSDERKMGFQKETQKRRSKTTSLPTTLLQTSVIWQHTDTSLNKA

SEQ ID NO: 1006145 - protein, 117 aa, Homo sapiens
SITSSGKGDGRKRVQLPSLPPEAIQQTLSDECVTKLTMYSRHEMNEVLDLELKGDIETCLTAIVTCATQQTSFLAEKLHQAMKGVGTRHKALIRIMVSRSEIDMNDIKAFYQKMYGI

SEQ ID NO: 1006146 - protein, 61 aa, Homo sapiens
MQSALELRMEPPPADSKPAEGRRHPGLLSLPSWASLAYSCLPGPLHSCLGGPYEGSPAPAP

SEQ ID NO: 1006147 - protein, 45 aa, Homo sapiens
PNQDNRTVSQMLSKRWYTLGPNETQKYHDLAFQVKVAHLQQGPKE

SEQ ID NO: 1006148 - protein, 58 aa, Homo sapiens
LAPLVSWMMVPGGERLVLGKGDVGMVMQAKDLRHIMEWEALDVGEVAGGGREVERDRG

SEQ ID NO: 1006149 - protein, 81 aa, Homo sapiens
  misc_feature (50)..(50): Xaa can be any naturally occurring amino acid
SRDPKILQISCRSTQQQRLETYGKGAVSRELQMLLVKEGVQNAKTDVVVXLRSLDLVLSRGPLSKSLLEKAGPELQEELDT

SEQ ID NO: 1006150 - protein, 143 aa, Homo sapiens
HQVKESGWAISIEIWLETDFLITEPFNQYSKPGMMLEGVEKKQRYVLVSTQDINMATLRMTWEAKVQLKEIWINSGFPDDGALTQVFTSTGPDNNWDVVISLRALGVYPKVCYHKETRKILTSEGRNALIHKSSVTCPLSSQD

SEQ ID NO: 1006151 - protein, 112 aa, Homo sapiens
RVPETEASTVLCVCLNLALSDTISFFLSNVVNFSIGRMSRASSKFIAGICLGVSQIKKMLAADVGVVIHIDCHKNGCGYNEDQDEDSNDEASVEGSPFLLSCTVICRSSIIF

SEQ ID NO: 1006152 - protein, 60 aa, Homo sapiens
SVRTGADGEQGDPSPADTIKANQGHIPAAPGETGSVICWCDQSVAPPRPAGLSVSGRQSY

SEQ ID NO: 1006153 - protein, 37 aa, Homo sapiens
  misc_feature (2)..(2): Xaa can be any naturally occurring amino acid
  misc_feature (28)..(28): Xaa can be any naturally occurring amino acid
PXLQECVHRDLGARTKKMKGRKVKKSLXVAHSVGEHY

SEQ ID NO: 1006154 - protein, 126 aa, Homo sapiens
SSHWVAVTASQKRSFRCQLPQIWLQDCTINLVLTFRALSLSGRANHIPGPTLVPLFSVLWNHRPPPWLLEPPSFFLALETGWKRHLPSIWALGTTLLASWFWQPGLLSSWLLEPGLLLPCRLWQMA

SEQ ID NO: 1006155 - protein, 106 aa, Homo sapiens
MCVVGRVKSGGLSRCIEGRRQCMEISEAAILKTCVGGSCHRGGGDRNELSSTTVMFEGGRNIVGGIKGHGVDNVVGWNSGFLVWEPNKVAPRLEAVTDDHIRMHKV

SEQ ID NO: 1006156 - protein, 50 aa, Homo sapiens
MSRRGYKIRKAFLLISRGRSLPENSWNMVRTLSRHHIQKESTLHLGKGCC

SEQ ID NO: 1006157 - protein, 120 aa, Homo sapiens
  misc_feature (55)..(55): Xaa can be any naturally occurring amino acid
DPEVVGVEKRSSVICDGRCQINFTVGWTSLANGEPFSTEFLKELSSTGVNEYLMXLWSVGRVVPGLLTPDKAVPLDFGFWGPGFPLDWQVFALNFALNFNPSNPYCAGIQGIVDAYPQTP

SEQ ID NO: 1006158 - protein, 62 aa, Homo sapiens
CLRIRVVVGRICCRFSLSMRRMSLKSRADLPSGEELVQQLKAGTVLERVLVLELSCEGDDED

SEQ ID NO: 1006159 - protein, 35 aa, Homo sapiens
VAVGRHLCQAQLFRADSDIFYIKSSFLVISIVSMA

SEQ ID NO: 1006160 - protein, 73 aa, Homo sapiens
CPVWEPSHSAWLISCPLSGKRGVALLATSADQQQLYLCYLNLLEARALCPRDANPCLAEMLPTTSVTGSPFIT

SEQ ID NO: 1006161 - protein, 35 aa, Homo sapiens
TQALLHSIRSSVEDMGVHFMVEQEPSSSSKSCCLN

SEQ ID NO: 1006162 - protein, 38 aa, Homo sapiens
TIFEAGHCDLRAVNSAADPGVAYCEVSPPCSWHYPDCQ

SEQ ID NO: 1006163 - protein, 45 aa, Homo sapiens
  misc_feature (43)..(43): Xaa can be any naturally occurring amino acid
VVVGRAICDLHHHALFSIHLTRLFLKRWLSRSESVEEETYQRXPR

SEQ ID NO: 1006164 - protein, 133 aa, Homo sapiens
DLWSRTLGWDIHCCTWTLRNWVLPGSALSTFLHVDGVELGIAGSALRPFCTWTLRNWVLPCRKWTPRNWVVVCRAQHSVPYPHVDAVELGIAGLSTQHLSGVTRMLRTTLRPHGLRLVTLETKTQEPQAFLVW

SEQ ID NO: 1006165 - protein, 76 aa, Homo sapiens
TWCSWMMLPGGDRLVLGKGDVGIVMQAKISGIIMEWEALDVGEVAVPVVGRRDLVVDARGAVACAQGRARQGSRSP

SEQ ID NO: 1006166 - protein, 45 aa, Homo sapiens
  misc_feature (21)..(21): Xaa can be any naturally occurring amino acid
  misc_feature (32)..(32): Xaa can be any naturally occurring amino acid
  misc_feature (45)..(45): Xaa can be any naturally occurring amino acid
MAGLTHGAVRAASWSCPSPQXCHLSLHPEASXPRACTDTSSSNHX

SEQ ID NO: 1006167 - protein, 66 aa, Homo sapiens
AWLLSSRIHSYYFFSLENIICVRGSRDTQKRKTSHPNLPSEQCGFGSIFHRLSGLRPGGPFLQATA

SEQ ID NO: 1006168 - protein, 93 aa, Homo sapiens
MGSFCVGKNRMGGALWGVSYQAAVEGSWCSGSTSNTRRRFSFIFRAHSISAHQISSGSGASTFGGFSSNDSFRYVPPLPIPFPAKGPNAGGWD

SEQ ID NO: 1006169 - protein, 35 aa, Homo sapiens
WGVGSIGANEVLLYLQGSLAEPELAYGTLLTWFQF

SEQ ID NO: 1006170 - protein, 90 aa, Homo sapiens
LLHLVAPQEYEPSACACRMETTHSFGIPSISVSTQQPTKKLCPVVAPKAKYNPYNQPGGEGDLLPPPPPPLDDSIVPSIYLWKLFSSISS

SEQ ID NO: 1006171 - protein, 91 aa, Homo sapiens
  misc_feature (24)..(24): Xaa can be any naturally occurring amino acid
  misc_feature (90)..(90): Xaa can be any naturally occurring amino acid
MRLRLGSSDGMLRTGFAVLVFVAXFDENDPRPLRALTPDYSMRDVYRKFDLREDVIDFTGHALALYGTDEKGKLGGGSPLAGPCPILTTXN

SEQ ID NO: 1006172 - protein, 49 aa, Homo sapiens
LADPVVVVGRTGPWCGTGRGHLLQMMFLEEAGGTSLSLYLGHFESVALG

SEQ ID NO: 1006173 - protein, 34 aa, Homo sapiens
RSVLQAEHESPHKDTVCMRLCQEIALHSGREPAP

SEQ ID NO: 1006174 - protein, 33 aa, Homo sapiens
LGRSGDYSSSTTALRFSGGHPQVGGEDPCALLS

SEQ ID NO: 1006175 - protein, 41 aa, Homo sapiens
EDEFTEPKRERENGQTPCEEETQAPPSAAGLCLRFASSLSL

SEQ ID NO: 1006176 - protein, 45 aa, Homo sapiens
VPVTLNGRCLRSPPAGKNFGIWLRYDSRSWTTTCTWEYLGPGHRG

SEQ ID NO: 1006177 - protein, 140 aa, Homo sapiens
MCWFRTCKAVLAAGSQLLKLFREEEVVETNLTAGAATRASAKGHPRALVPLAALEAMSPRTLEPIHVRPDTRHCMHGVCSFHLRTSGNGPPPEAAAKTSTEASAIATATAISRGNTACDNRDVDWSNSFSTESAFLALQQ

SEQ ID NO: 1006178 - protein, 114 aa, Homo sapiens
MLWALYPCPDSHVGLWSPAAGGGAWCEVIGSWGRFLMNGLAPSHSAGLVIGFSRDLVVSRCVAPPHLSLFLLLWPRGRVKCYSPFAFRHGWKLPEASPEAEQRLLCFLYSLQSH

SEQ ID NO: 1006179 - protein, 74 aa, Homo sapiens
ENRDYIGEFASFSSDSSSDNLFYAFYLRNIKLLHVLNSIYQSDDRTRAAGTRTLEFQGYNAIFKGLVDYIPSIL

SEQ ID NO: 1006180 - protein, 58 aa, Homo sapiens
MSRYRIQTVVQGTDSLIYKNGFLNLDRPFLGFSEPLAAPSMMDLLQTETVVMAHSLFE

SEQ ID NO: 1006181 - protein, 83 aa, Homo sapiens
YLQLGTSRGNTLLMGVQSLHLSIECWLLSFCNVLSRYFYYAVFNYKVEQNAVPSHIKFSIYPPIPGEESSLRWAGKTSEEIPM

SEQ ID NO: 1006182 - protein, 105 aa, Homo sapiens
VRGARLLVLDADALGCSRSLRICSTSSVHVVRQVTMGDALPLVLIGVLCRAAVQNGPCEVVRGILLVLSGLGDDLGIEVLMHTVVPGDSTGNGSYKYFLKNSFLA

SEQ ID NO: 1006183 - protein, 99 aa, Homo sapiens
VHLVLDADALGLLRVTQDLLHQLCPVVRQVTLGDALHVVLIGVLVSCGGTEGPGEVVDGILLVLDGLGYDLVIEVLMHTVLQVDSTGSGSYKNFLKNSF

SEQ ID NO: 1006184 - protein, 79 aa, Homo sapiens
MKLSDSTLKETLLNGVGYLHEGLSPMERRLVEQLFSSGAIQVVVASRSLCWGMNVAAHLVIIMDTQYYNGKIHAYVDYP

SEQ ID NO: 1006185 - protein, 75 aa, Homo sapiens
CGWLLTWRSDLQQVLSSVKLFLGGGGGGDKFDAGAATPRQCQRPPPALRPLLALKPEPPTLSPPLYADTPTDARS

SEQ ID NO: 1006186 - protein, 136 aa, Homo sapiens
VDENSRVVSDSYSSESFAEMNRSSKEWETVVGGAMFFIGFTGLVIMWEKHYVYGPLPKAFDKEWVDKQSMRMLAMKCETPSRAEISKWDYEEERVEDVRDAGLCLHLRLVLSASCKSMPIYWKPVMRNSCTIANDC

SEQ ID NO: 1006187 - protein, 39 aa, Homo sapiens
MSFRMFRYIYSRDIDSQSPVFGTTLEHSPISSCDTVTPR

SEQ ID NO: 1006188 - protein, 67 aa, Homo sapiens
HLQASEVPEIGTSLHGHSLIPRRRMDTIEDHHRFAMAFLLFSSPQVVALIPIIPIEEANNFHFKGPP

SEQ ID NO: 1006189 - protein, 39 aa, Homo sapiens
MPATPGGSREAWRVPHLGFCDSPLCGAHLQMSLLTTHST

SEQ ID NO: 1006190 - protein, 43 aa, Homo sapiens
QDSRWCGRGEWDRLRKTVSVAVKCLKPDVLSQPEAMDDFILGG

SEQ ID NO: 1006191 - protein, 36 aa, Homo sapiens
MTHQVSLCGRRNSEQRAFATERHPQVNNWHPIRLGF

SEQ ID NO: 1006192 - protein, 59 aa, Homo sapiens
DAYVGLERRLEVAGLCLPHGGSAGQLFLLAASLGQLLPPSRQALLAQLPPAFVDPEVSA

SEQ ID NO: 1006193 - protein, 38 aa, Homo sapiens
  misc_feature (37)..(37): Xaa can be any naturally occurring amino acid
MVQVVSCGGWMKSVFRKRKPARDKAGGAPGTAPYPKXP

SEQ ID NO: 1006194 - protein, 72 aa, Homo sapiens
GHLEDPAASSEGRDSPASQFHGICCRRSRRCMVQVVIVLAVLHEERVQDEETWTDDNAWGAAGIVPYPKCTL

SEQ ID NO: 1006195 - protein, 53 aa, Homo sapiens
VGVGSRRKSRLEIDISTGRITEAIGLSSTEINGFETIVSITHRQKYIVYRQFC

SEQ ID NO: 1006196 - protein, 111 aa, Homo sapiens
YGFDGHRPVGHSVDYVWGNTGYFYNYETTSRDRHVLGLNTSLTHDDSYAGTDTTDTTRRPDDTTGRFFGTTRTHGLSTTLTLDDTLGDDLEQTDDGVGPREPGLDLKDTQD

SEQ ID NO: 1006197 - protein, 107 aa, Homo sapiens
MSLSPRDPEAGSICASQHHRVASPGHAAAYLGVALQCGAGYYKSLGICRIYTQCKKAQNLSLEQQFIEATHSSRPRLSPRQATTSQSNGKSSPSVSRNMSGITVRAA

SEQ ID NO: 1006198 - protein, 39 aa, Homo sapiens
FHQQGAAGDMRYPAQPSSQPAADHTSPTVPHKLTFFQRR

SEQ ID NO: 1006199 - protein, 34 aa, Homo sapiens
MANSDILVLLTTAGQRGTNTKLELRHHTDYSTGR

SEQ ID NO: 1006200 - protein, 83 aa, Homo sapiens
MVRDLEAEKHGDLYASVPCSLSHPCTTGALGSGGATGANRADRTGGTSRTSLTTITTLASRANGPRGTTKHQEHQGVQRARAS

SEQ ID NO: 1006201 - protein, 33 aa, Homo sapiens
MADVYSPRAVLCLLYKFRRQVSTVLTSKYRSAG

SEQ ID NO: 1006202 - protein, 56 aa, Homo sapiens
GDLEIQSGKGLSGCSCTVIYSSSVEISPLQKCSLTMVGGSSGDRAVARVASFCIWL

SEQ ID NO: 1006203 - protein, 36 aa, Homo sapiens
QVPIAGLPLLTVRPLRSCHAHIMKPHIFMPAAKVPT

SEQ ID NO: 1006204 - protein, 40 aa, Homo sapiens
  misc_feature (6)..(6): Xaa can be any naturally occurring amino acid
  misc_feature (17)..(17): Xaa can be any naturally occurring amino acid
LERGAXGEEVLDSSFLXSGEDWIVERDLTVFSVEPERRQL

SEQ ID NO: 1006205 - protein, 30 aa, Homo sapiens
MWALALPALSKSGPRARNSVIWAHSVFPGV

SEQ ID NO: 1006206 - protein, 43 aa, Homo sapiens
  misc_feature (15)..(15): Xaa can be any naturally occurring amino acid
FCWKGVGQSSRKVLXERSLAERGVTRRTREIPGRRNSMSKGMG

SEQ ID NO: 1006207 - protein, 73 aa, Homo sapiens
MHEAVYLQGSSLGILYRVRVKLHTEVRAADVTVGCTGYTTQKQGFWHIWRFLPDTIGLLNMQVALGQGKVIFL

SEQ ID NO: 1006208 - protein, 110 aa, Homo sapiens
SWPGGAHHVDEYTGDPVPGSEICQSPVGRVEMVGTNWMGPSGRFRQLNEELEKGMGIQVGFLQSASGRRVGSWLNSAGSGRQGSGGAVAHVVPLGDCQSPQVSWAPRVPS

SEQ ID NO: 1006209 - protein, 55 aa, Homo sapiens
MTETEAYLSSGDREAWSACHRIPDQPKVFPLSLCSTQTDWNVVIGCLVQGVVAPG

SEQ ID NO: 1006210 - protein, 79 aa, Homo sapiens
STPGVPYGSLHFIHNLAKLAGPGTLLCFAQSISFSGLPSSRRTSPASTGLPAPSLSSSSFSPSSSPASPGDLPTVTLLP

SEQ ID NO: 1006211 - protein, 154 aa, Homo sapiens
MRATFYIDQEMKEVFQEKQMSTNEGIVTLIKEVDYEEMTNLDFSVIVANKAAFHKSFRSKYKPTPIPIKVQVQNVKEGIHFKSSVISIYVSESMDRSSKGQIIGNFQAFDEDTGLPAHARYVQLEDRDNWISVDSVTSAIKLAKLPASDSRYVQ

SEQ ID NO: 1006212 - protein, 66 aa, Homo sapiens
  misc_feature (4)..(4): Xaa can be any naturally occurring amino acid
MGRXIQERAEDKGSRGLERRALALLSASEPPLYPTQLCAQIPGPKEDRGFLPPSVLVQVMSHWCGR

SEQ ID NO: 1006213 - protein, 124 aa, Homo sapiens
MQRLQVLMGRMESVFNHGQLRNTIYAGLQDFGQVTLREALRQAVRKKKNVLIRVLQGIRKNIFDWEGGREAPNDPWLKRGEGPQKVDFDIQGCPGVLGGAIPGHQLVHTGAAGGHRKLEFGNQG

SEQ ID NO: 1006214 - protein, 94 aa, Homo sapiens
LEDPCAHLHHTAQLPIVYTTQPSCSTVYTTQPSCSTVYTTQPSCSTVYTTQPSCSTVYTTAAQLLHMSTPHSPAAPHVYTTQPKLLHVSTPHMP

SEQ ID NO: 1006215 - protein, 45 aa, Homo sapiens
SVSEACPEQKVVNKLIQYMISLVQSNRILGAEEKDPTVMLNDRWP

SEQ ID NO: 1006216 - protein, 36 aa, Homo sapiens
MPQTLTALLDSWAVSIFQAAVGAASLIHFPIKSSFC

SEQ ID NO: 1006217 - protein, 42 aa, Homo sapiens
MATHFWTSVSRPGSPQSLPLTHVPPAADVGQGVGGSMHPELG

SEQ ID NO: 1006218 - protein, 41 aa, Homo sapiens
PPSQCSRTLAPRHDGCATSPLPTPRLRTGTGPPSLSPVTVL

SEQ ID NO: 1006219 - protein, 43 aa, Homo sapiens
RLRPPDKPDATATLHDTTLHTRRTTHVLRVRTTSVRRDTTSTT

SEQ ID NO: 1006220 - protein, 32 aa, Homo sapiens
LRIAQEHERYTLNDSTELVCEDTRDSPSRPSD

SEQ ID NO: 1006221 - protein, 41 aa, Homo sapiens
TPFGTHRTCHVSLWTRGHAHSVSRLRLGGGLLLRRLTLHGT

SEQ ID NO: 1006222 - protein, 76 aa, Homo sapiens
TPSKRYLEGSMVLTCRRNLYREACTCSGEYTSTSIHVCVIGSHRGSPVSTEHVWGVMHGSGEYTSMMEACMHARVL

SEQ ID NO: 1006223 - protein, 74 aa, Homo sapiens
YNRARYRSSLSLGLQAAATRPANFVFLVETGFHPVGQGGLNLLTSGDPPASALPKCWDYRREPVCLANHEFQRP

SEQ ID NO: 1006224 - protein, 41 aa, Homo sapiens
QSSSVPKLAVAGITGMSHHARLIFLFFETESPSLRLECTRS

SEQ ID NO: 1006225 - protein, 104 aa, Homo sapiens
MAELLLLIVPILIARAFLMRSERKIVQAIVPLRKGPNVVGPYGLLYNPVADAITIFTKEPLKRVTSTIDLYIIAPILALTNSSFYYERPSTRPNRLFNLKLGLL

SEQ ID NO: 1006226 - protein, 61 aa, Homo sapiens
MRGIVVCSESSIVTGWFMSANTEAQGSGRGLEAAKWLIVAVLLVVTIVGLYYYRDLSLPLG

SEQ ID NO: 1006227 - protein, 64 aa, Homo sapiens
NGDVVDYVGGVDGGVGDTVFGRSLRYSCGVLDGMVWNCWTCARCAQRYITLGSKKSLKTSDLRH

SEQ ID NO: 1006228 - protein, 43 aa, Homo sapiens
VGAWGAASTFGSRSTNITNGARGSSGSGRASGTSIAFSNRITR

SEQ ID NO: 1006229 - protein, 43 aa, Homo sapiens
MKSASGQLAAGRCGESFWITVSDDSFFNIKNQKAIHHFNKGHW

SEQ ID NO: 1006230 - protein, 55 aa, Homo sapiens
  misc_feature (41)..(41): Xaa can be any naturally occurring amino acid
ENALSEWLTFHHTRASRSHMPECQVDTGACRTLAACGCAPXVTSSHVPTDDMASS

SEQ ID NO: 1006231 - protein, 124 aa, Homo sapiens
SSLTDYRFLTFVIYLTDDERRRSGKAQNHQVGLRGYILRARPIPGQSERNAARAVSSKHATIKTLYFIPCLEDLIFLLVLQMRKSCHCTTTILTKKAVCEVNSTISLLLIGPLLAVAVYHIVDP

SEQ ID NO: 1006232 - protein, 35 aa, Homo sapiens
MIQSSWYLVSEIPSILGVETSLCRQQSSAGVQKCS

SEQ ID NO: 1006233 - protein, 39 aa, Homo sapiens
MSLLADVAFTTVALTTSLLVVDTTLGGLLYDVDPARHCN

SEQ ID NO: 1006234 - protein, 72 aa, Homo sapiens
  misc_feature (1)..(1): Xaa can be any naturally occurring amino acid
XDLGVHEVSRLAEWNLVRLKELHRISTSSCDSSSPASAHSNCSCSQSPPVRSQGKLSLVRVAPGLRFSEPCS

SEQ ID NO: 1006235 - protein, 33 aa, Homo sapiens
NRARYRHYRPVKWHHRSGGTPDNVVKVPQCTHL

SEQ ID NO: 1006236 - protein, 48 aa, Homo sapiens
PAHCAGSFSVGFSQAGGSWLHAPSLAPSISMASHIHSQHAVPPTPGVP

SEQ ID NO: 1006237 - protein, 216 aa, Homo sapiens
RSVPYVSIVRDKTTKMRISRAISLMNIEVTVLNYKYWQSESSSKSKSLSTTIKSGSSLGCKAGSTYANQEEVIASHNQNHDKNHMIISIDAEKALEKIQQPFMLKTLNKVCIEGRYLKIMRAIYDKPTANIILNGQKREAFLWKTGTRQGCRLSPLLFNIVLEVLARSIRQETDLTGIHLGPEDVKMSLFADDMIVYLETPLSQPKSPEVISNSAS

SEQ ID NO: 1006238 - protein, 114 aa, Homo sapiens
MRSPHTARRSAGTTVISVTNTGLYASRSLLLLQHWITSSTGCFSEWAQTFSIFCLAASSENSRDYVVGAAFGGEVDPWKRRVLNQQAENRLAQSIVQPADKVAGLCTNDSPPPT

SEQ ID NO: 1006239 - protein, 73 aa, Homo sapiens
TSSLGLDHCGTCVSSSTGHTAPLTRLAGTVERYAPDCGDSYKHNGGSGVPCPQGSPIFYLYGVGSESPIQTFR

SEQ ID NO: 1006240 - protein, 67 aa, Homo sapiens
ILFAVPFPCKLLTGREAPWLSLEEPADFAPEPGRKACDLACAKTMKKKAEGTVSTDGRLPRSSSRQY

SEQ ID NO: 1006241 - protein, 48 aa, Homo sapiens
MHTLFLELLEQYVVGKKPKADACCRSETVVERMLSNVDVPSACTRYLQ

SEQ ID NO: 1006242 - protein, 89 aa, Homo sapiens
CAPPGALDGEGPAHSACQNHKPCSAMSPVIMSAAAPPPIPAANSRLGRGDCCPIPEAVCCSDHLSLLPPVATRSLASEGNCQALAARSW

SEQ ID NO: 1006243 - protein, 58 aa, Homo sapiens
  misc_feature (23)..(23): Xaa can be any naturally occurring amino acid
MEFHHVGQAGLKLLTSGDLPASXSQNVGIIGVSHCACPWILSKSLNLSHIRASSSPAC

SEQ ID NO: 1006244 - protein, 60 aa, Homo sapiens
GGLSTFSAPQAGGPGPHSGASVKWLGMSRFSDVPHRSGSWSQPQRHPGGTGAALVESRLA

SEQ ID NO: 1006245 - protein, 136 aa, Homo sapiens
FAVLFPVFNSQLSSEHLKLPFYQHELLERGPYKSAHGWARWPVPVIPALWEAEAGGSPEVGVRDQPWQHGETPSLLKIPKISQAWWCMPCNPMLVRRLRQENCLSPGEGGCGEPTIAPLRSSLGNKSELLSQKQNK

SEQ ID NO: 1006246 - protein, 61 aa, Homo sapiens
LIWKCYKTWYTVYQSVVSYTVKVAGLRNPLQRVQISGIVHKEITGGNRIQLQNNMSIFDLV

SEQ ID NO: 1006247 - protein, 64 aa, Homo sapiens
VSKDPLWDGGTDFVFLWAQVSPEDQENKGIDSNLHVPKTGTPKLRYRRPATGGPRVRSSGCTEA

SEQ ID NO: 1006248 - protein, 47 aa, Homo sapiens
DILQQRGYAPVCNCTRSRCMQFAELKDKIDRRSGKKLEDGLNSCKSG

SEQ ID NO: 1006249 - protein, 58 aa, Homo sapiens
AYLWDGGGTLDVSGKAESACRQGTGVGALPAPPLHQACSALLLPGVRGKVLGAGCSVV

SEQ ID NO: 1006250 - protein, 57 aa, Homo sapiens
MRLNGDAVGKCGATPFNDKAQTILCNGDDEGWDLTCQLDMLMGGHVVRICLQPSEFL

SEQ ID NO: 1006251 - protein, 75 aa, Homo sapiens
MNLSSDLAAALGATAIPQSCAEVEEYLQAMLAAADLQMNARKRWLRILLKAPAPSALVRPLGGVVMQAGIDLVAR

SEQ ID NO: 1006252 - protein, 44 aa, Homo sapiens
LSYVSTRRCSCVGRYPRYHFTTRGLYDRVLVVQHLYTRMTPTRL

SEQ ID NO: 1006253 - protein, 37 aa, Homo sapiens
TRIFCDRYNPGARKGSEKVKEHHEQSLQMGLTQQLRS

SEQ ID NO: 1006254 - protein, 62 aa, Homo sapiens
TVQAVSYRPRAAGLANPRTSSWDGKTRDAWSPDTYSSPLLLSLTRKLPLRHDSPTGHLQPQT

SEQ ID NO: 1006255 - protein, 39 aa, Homo sapiens
MVSAVALVVALWLGGGSWLLAGGFVWPCAFRVLPYLQGI

SEQ ID NO: 1006256 - protein, 44 aa, Homo sapiens
  misc_feature (3)..(3): Xaa can be any naturally occurring amino acid
GTXYTASGMADSGASGSTSVLQLSFPGHTKIYRKRMYACMSWTL

SEQ ID NO: 1006257 - protein, 58 aa, Homo sapiens
LPNWVNGEVGPLACDCTTCLPDLYVQLDLAEVTQDWSSFRRFEILSEAALDPCYSLLS

SEQ ID NO: 1006258 - protein, 119 aa, Homo sapiens
ALGRRIEQWSAESTEVYARAGQLSGLLVLLRYFFSSLLIQFLIILGLVLFMVYCNVHVSTESNLQATERRAEGLYSQLLGLTASQSNLTKELNFTTRAKDAIMQIWLNARRPTSAVPKH

SEQ ID NO: 1006259 - protein, 106 aa, Homo sapiens
CWLQSSSLPFLITTIPMLHPTVTADGLETALGQSDSRALTAGDARCHFTGASSGEAVQDTERDSVVYACQCLRVCGMDMETSLTVLPSQTANAPLNRKHPPVTLRA

SEQ ID NO: 1006260 - protein, 151 aa, Homo sapiens
  misc_feature (33)..(33): Xaa can be any naturally occurring amino acid
LLDGESRRQALQEGATIVRKLCRQDASLGLGLXSPHHLVGAAVVEGVSGQDLPVVKHTLGERLAARVGPQVSGEAKGLVDGQIGLDTNMGVRPPGTPRTRGPASCSKPRRCHRPPALDTGSPQGRMGSMRRDWEVSTLAERQRRAVGMNLA

SEQ ID NO: 1006261 - protein, 48 aa, Homo sapiens
MSALCTAVTFLRTFSCASLKAYSAMRRDLALGLIFRLSNIPAKSHAQG

SEQ ID NO: 1006262 - protein, 44 aa, Homo sapiens
MAKSEHHSPIKLLGSSAVISATHLSSINAPIPRQQCAIETSKTR

SEQ ID NO: 1006263 - protein, 37 aa, Homo sapiens
  misc_feature (15)..(15): Xaa can be any naturally occurring amino acid
TRAGTLSLLKTTDKXLFEELLFSAYHIKDIGRLINDR

SEQ ID NO: 1006264 - protein, 114 aa, Homo sapiens
MSVLQEDACYNCGTRWPHCNGLHCVPETSETQCCYNCGKPGPLARDCDHAADAALLLLVETLRTPFKKTCTKVTVLYGVVNLVLEPLNVQHSPVTVHLLPLWRVTWHLARDMPI

SEQ ID NO: 1006265 - protein, 123 aa, Homo sapiens
MSILTGCQMLPGLCVLLQAVRCAPVVWGAAPRCQMLTCRCGCCSRLSVARLGLWVLLQAVQCSPGCLGTVPGCQMVAWGCRCCSRLSRAHLGLQGADPGCQRLTWAWGCCSRLSDAHLGVRVL

SEQ ID NO: 1006266 - protein, 67 aa, Homo sapiens
EVFNVQKMRNVLHQTSLLLVREGPRAQGWHSFRINPFQVKGESLKECLGPQYMERDEGYRKLPEIPV

SEQ ID NO: 1006267 - protein, 93 aa, Homo sapiens
  misc_feature (43)..(43): Xaa can be any naturally occurring amino acid
  misc_feature (46)..(46): Xaa can be any naturally occurring amino acid
ACDLEDPFCGAFPRGLRNNSSCGVEQLRSPKQVLASDLRAMQXPCXLQMGAAVFEHGVILQSGRTGPRRRRIACALGKILKLGGGTRAAATVP

SEQ ID NO: 1006268 - protein, 46 aa, Homo sapiens
PLCGAFPIIFIISISDTGPDSSLYVASSFSIFTATVTGLVALVLVK

SEQ ID NO: 1006269 - protein, 56 aa, Homo sapiens
RILFAVPFTLQEVVAAQQRGGPLGRLGCARQVSSRKHASRELVKEPAMRSETDMPD

SEQ ID NO: 1006270 - protein, 111 aa, Homo sapiens
DLDDAYAVPFHHFQPFQAGGPVATLGASAEVAGHDAVSLTSPNRSGSWSQPQRHPGGYRCRAVEAGSRVEPVLIVREQALCAWPCLTGIHPIRGTFSLPGTFWTERLPRRS

SEQ ID NO: 1006271 - protein, 101 aa, Homo sapiens
MRQDGDRATGQDGRAGTGRGGQEERGSSRDPVAELPSDGEAEGTADLEATPEARPEEELTGEESEAAQTSCGLLGVQWGGLTHSVTKGQGPELMGGPRPQL

SEQ ID NO: 1006272 - protein, 37 aa, Homo sapiens
SFAVLSTQLSTSTPGHSNTAGSNATASSPGSLLLVKL

SEQ ID NO: 1006273 - protein, 77 aa, Homo sapiens
SSRILFAVPFPTAVHIQVTAWSGGYSEHQHILQSPQRRGETARCRLLVGLGGHQLLHSQVRGLGAKVNLVELGKSRD

SEQ ID NO: 1006274 - protein, 81 aa, Homo sapiens
  misc_feature (52)..(52): Xaa can be any naturally occurring amino acid
LEILCGAFTPGPVISRRREKEGGDRRALSKAAGATVCGHALPHTRGIPAARXPIHTGGRRGCLNHGVTRFRPGLFCETYSQ

SEQ ID NO: 1006275 - protein, 39 aa, Homo sapiens
MSKWSSSTTLNPSLAGSEDRGEDPTPLNTMRGAGDLHEG

SEQ ID NO: 1006276 - protein, 37 aa, Homo sapiens
MTLTFSESSSGFSKSMVIPSPRRRSEDSEKVREKVQV

SEQ ID NO: 1006277 - protein, 77 aa, Homo sapiens
MLGRLTSSDRPPRSPKVLGYTGVSHNARPLGKFFEMLFLILTTPRDRCAVSCTVCWDWKPSLFGSKPCGVSTQPLHT

SEQ ID NO: 1006278 - protein, 54 aa, Homo sapiens
ALETRHTDLLAYLTFLAYLTFWRLKQQGGAGKGAVQPLRDSWELDCCSSPECPG

SEQ ID NO: 1006279 - protein, 37 aa, Homo sapiens
PLPTESVARRTTSHRRHPAPSRPRKSPSTAVTDSAYS

SEQ ID NO: 1006280 - protein, 36 aa, Homo sapiens
IPGLLAYLDLLAYLTFCIPDLLAYLTFWYARRSRYA

SEQ ID NO: 1006281 - protein, 37 aa, Homo sapiens
TGQISRAALYLDQDQSVLSRRINALERECNARLFNRT

SEQ ID NO: 1006282 - protein, 34 aa, Homo sapiens
YLDLLITSPTNTYAHFQKLVHQMFPKPRINPSAT

SEQ ID NO: 1006283 - protein, 38 aa, Homo sapiens
PCSIHDQVIGLLAAYGGIVCQRREMAVVGAFAAQAVAT

SEQ ID NO: 1006284 - protein, 54 aa, Homo sapiens
MPAVCVKRLANTLLGCMMKRYLIIAVAAGRYSSVTAITMRSTARQSEGAPAYPP

SEQ ID NO: 1006285 - protein, 48 aa, Homo sapiens
TLEDPAALAVYMGINMGSFIAPLISGWLIKSHGWHWGFGIGGIGMLVA

SEQ ID NO: 1006286 - protein, 44 aa, Homo sapiens
YHELEKKQRRLTVALAGHSGAERGTLQAEESARRKLVLVYRVLV

SEQ ID NO: 1006287 - protein, 120 aa, Homo sapiens
VCTGGKRWNVLVQHEQVTVWQAVRALLLAVLVYRAQGNVACIVNVEAMMELNHDHNERDAPALALLPARMDTPGARVMLLAIGLQESRFVHRRQIGGPARGFWQFEKGTRASRGGVWGTE

SEQ ID NO: 1006288 - protein, 108 aa, Homo sapiens
MAAGTCNPSYQEAESGELLDPRGRRLQWAKITPLHSSLGKKRDPVSKITELKIFKAMRDGSRLYIPALGEVKAGRSPEVRSSRPAWPRDDETPSLLKIEKISWPWSKW

SEQ ID NO: 1006289 - protein, 41 aa, Homo sapiens
MASGERCRLRCPSRYQPNDCSLERKPPYSLQRFDSIDTTLP

SEQ ID NO: 1006290 - protein, 62 aa, Homo sapiens
MKDINVKPESMKLLEENIGDMLQDTGLGKDFLGKISKAKATKANIDKWDYITLITCSAIALR

SEQ ID NO: 1006291 - protein, 35 aa, Homo sapiens
  misc_feature (14)..(14): Xaa can be any naturally occurring amino acid
IRIEARTLLTSKGXESITSMPKTVAAPTKAPKNWA

SEQ ID NO: 1006292 - protein, 58 aa, Homo sapiens
DTEEDDFLVDQVDTVKVLLMNAFRHVNIQHCQKLSSWVLLLKYLGNATAHQFFHACMT

SEQ ID NO: 1006293 - protein, 125 aa, Homo sapiens
CLSLIDLAFNLRYGRFICCDDPFSPEDFYHKGAVLRLWMTFILQMAYPPSSSSDPSIFHIQENVMATGIKRLDRHFTFYSQVTQWKIQSQQRLVRKMSTDKRDHKEEAGDQEVCGDQIQGPATEE

SEQ ID NO: 1006294 - protein, 77 aa, Homo sapiens
RIPLGPKFSSRLDEAPLPSAPGGCCKWTMAASSICSSKFKDSSASYGFGPGLSAALAFWLQPQWRLQAPRSSYYSNN

SEQ ID NO: 1006295 - protein, 79 aa, Homo sapiens
VSTSALAKIRHLAQQLQSEQVFGQVYESPLSPSKTVCFFRAIVVLLNWRIKQDHPWHGCEWLTPCKSYALLGRLEDVWD

SEQ ID NO: 1006296 - protein, 105 aa, Homo sapiens
MDTSWALVPQLVLGNERPKGKRDDPLNIATVPKLWSSLYALNSFLLELTYTLLVSSLSTVIKFFSASLKECGTCYMWDSSYYTTDEAYRKVRGNSVSSDIAHRVS

SEQ ID NO: 1006297 - protein, 34 aa, Homo sapiens
LTSALSGLGTFNMQQTQNFRATDWVLILGSAPGE

SEQ ID NO: 1006298 - protein, 36 aa, Homo sapiens
HKGGGKLGFDYMRPLLGHSKQVFHLPMCSEKCKHSS

SEQ ID NO: 1006299 - protein, 54 aa, Homo sapiens
GKRGNEKLLGQLSKDIPGPKNAIPLRERKQDCKGIIFSLNEESGLSVLILCPGI

SEQ ID NO: 1006300 - protein, 70 aa, Homo sapiens
PETHVAESVSQQILRQNFGSNACDVPVTKTKKKKAEGTCTPTKTSRSSSRNTSEARLPGGHGEEAYQALK

SEQ ID NO: 1006301 - protein, 89 aa, Homo sapiens
CRSAMAVRKRVWGGLRKLTITAEGEGEAGTSGHVGAGETERVKWEGCTLLNNQIPQALTQYHENSKGEVGPHEPITSHQVPPTTLGITI

SEQ ID NO: 1006302 - protein, 36 aa, Homo sapiens
TGGRVIAPRRRACAAAKAQKNLKSESEEDRTLRVIK

SEQ ID NO: 1006303 - protein, 72 aa, Homo sapiens
MDGCRWLTRVIPVLWEARWADRARTLAEKQDGSREQQLEAWVQILRLWGAVVGAQNITARIDEPLVLKCKGA

SEQ ID NO: 1006304 - protein, 95 aa, Homo sapiens
MAVTSVSVMPLVLLVQRSSWPVCYSWQQTGWQVVGLGQKVSALVIAVLLSTGGLCGSQALDPKSFVSGAFPGLCLEGSTSFQPPRALQPADATCP

SEQ ID NO: 1006305 - protein, 83 aa, Homo sapiens
LSSEKGVVRVLGCPHKVLPDRSAVGLEVGIGREAQLGRRAVQDSVCPLLGLESAVGGSILRPTGLCFVDSLLLPGEQRHSGAT

SEQ ID NO: 1006306 - protein, 35 aa, Homo sapiens
  misc_feature (5)..(5): Xaa can be any naturally occurring amino acid
LLTSXDPPAYIGYRPTVPHAAEMDPELLAKANPST

SEQ ID NO: 1006307 - protein, 37 aa, Homo sapiens
ADRRTLWEAVRTEATHQRGHGHKSHPTPSTWHRSGQD

SEQ ID NO: 1006308 - protein, 75 aa, Homo sapiens
RGRLLLSEPCGEARPPQEHYRVSSASCRALPCELRPPVRALPCELRLLSEHYRVSSAFPDRSITGVSSAFPIQSI

SEQ ID NO: 1006309 - protein, 53 aa, Homo sapiens
ASESSATCETGETCVYPTQPSVSQKNGYISREPQGQRGMSRFGDEHDRVDSTF

SEQ ID NO: 1006310 - protein, 66 aa, Homo sapiens
MRIPRLYLLSAVHRIVRTGRSGNTGIDIYFINKACDESVLMDPQSAVVETPEQKVDAGTEAPNFGN

SEQ ID NO: 1006311 - protein, 102 aa, Homo sapiens
DSTGSDLPLGCMAASMGQVLTLVLDGALWGGTQPCCSGLRRLQRVHEPTGAQQLLQEMKTLLLEYLSTLMPLSRSTKCGSHSRIYLTFGIDQDLTPGLCPNL

SEQ ID NO: 1006312 - protein, 50 aa, Homo sapiens
MTLEAGHWRGLHELHPPLVLSFLTRYTRCQSFSTLDTELLDLLQVALLLL

SEQ ID NO: 1006313 - protein, 199 aa, Homo sapiens
KLLKRGGGGREAVHDPWTQQVRCPSVSMWCWAQVCEQASEQGREGAGITHRGGGHHCTSSFASSEAAQKGILSMRLFKKCRPSSWGPFCSSGSWANMKITVLCCRLDVAALPGSSTHSRPSAHNAPRAQKARVSLRSSFLAMCSWDADSAISRQPSSSSWFPEEVHFLQVRAFPEQGYEGLRIVELELTLLQLSVSFCL

SEQ ID NO: 1006314 - protein, 86 aa, Homo sapiens
VGSGWDDAVSLTYPIDLGHGAKPSATRRYRCRAVETARVLNQFSYVGSKLFVYGQLDGIHPFFGLSAFPEYLRKGARALTKYLLVH

SEQ ID NO: 1006315 - protein, 40 aa, Homo sapiens
VIRRYFMKLTSSQSTRHCNWWVTNRTVLDLRCIRIALYAD

SEQ ID NO: 1006316 - protein, 58 aa, Homo sapiens
SGILQVLSLDPNQLFMLQPRSQEVSSPTRLPQPCSMRHLVSHYLDIASVHRRFHSSRL

SEQ ID NO: 1006317 - protein, 56 aa, Homo sapiens
VLHVEELALERESVLAGGLTEDLHWRGQLLHQWRLLQHEAEDDNGFRWRRGSRTLD

SEQ ID NO: 1006318 - protein, 54 aa, Homo sapiens
MNRNAYDGKDNIALNEDLSSLDRGGQPRVQITQRKEEAARVADQLRAYLEGPVQ

SEQ ID NO: 1006319 - protein, 41 aa, Homo sapiens
DPLVHAVDISDTYTYYYSSTTECTHRPVTQVTQDSLYQELC

SEQ ID NO: 1006320 - protein, 130 aa, Homo sapiens
MSQLTHLQEKQLWLNIISWPENMKQHLHFAIDVLSHRSSRTSRNTFGDVGLLTLDVQLHTEGSCLIMTTEILRSMLYSGSDVIRDLEWVIFEEVHYINDVERGVVWEEVLIMLPDHVSIILLSAAVPKHR

SEQ ID NO: 1006321 - protein, 117 aa, Homo sapiens
ACRIRYLVLRPLTAYILMGMSDHPEQTSYTYVLPESFGTPLPDTIDQMLRVTGMKHRKIPSHTRTVKDGQQKGPHSLKAQTSFIASSKGAHCSGTDSLARNGQLVHDSESYRDKGLR

SEQ ID NO: 1006322 - protein, 46 aa, Homo sapiens
LEVSLSSKGLIGSHVRPSSDRTGSCFILASSPLVSPPHMHAPRVTS

SEQ ID NO: 1006323 - protein, 74 aa, Homo sapiens
LAGAYLHLVAALVVNASLLAEGSTTSGAMYSAEPQGVSSSGVEIGEQSPVEFGCRCPVSERHRSSLGETLVEGA

SEQ ID NO: 1006324 - protein, 98 aa, Homo sapiens
LEEFGGRTLDPRVCLGSRPPATIRQDKPNSGDVQVTEDACAATDTEAMTTKGPAEKVPDQEDRAEQAEQTVNVLAQILKRLKPERKMINDKMYFSLKE

SEQ ID NO: 1006325 - protein, 70 aa, Homo sapiens
SCTGRFVSSIWVDASLCSEALGALLNRHHVPGENPTIQTAFRFVKQENQSSGHIKAKVGTAGPFFKAPKV

SEQ ID NO: 1006326 - protein, 39 aa, Homo sapiens
WCSSGSYTRSLITANEYIQIDLETGRITDFIKFDTGNLC

SEQ ID NO: 1006327 - protein, 34 aa, Homo sapiens
DSILTRTLKPDRKLLTAGLRAFQQEGIANITCLK

SEQ ID NO: 1006328 - protein, 103 aa, Homo sapiens
ATAGWDEVGDAFEKEETFTLSTIKTLEEAVGYIVKFLALHPAERSDKLPDYKNTHSLLLAGVFRGGHDFQNPSRLLLLDTVTMQVTARSLEELPVDIILASVG

SEQ ID NO: 1006329 - protein, 92 aa, Homo sapiens
  misc_feature (5)..(5): Xaa can be any naturally occurring amino acid
MERSXGISDFVFCVRDTNFGSLAYASHSLTEYQRLLSTNAARDSYCLSAVFGFRKLLGTVRLAGVKVREEMSGSSVYQELRCRDGRLPFTWS

SEQ ID NO: 1006330 - protein, 40 aa, Homo sapiens
MAQNFITICYSLISSSEAPSFKNGAPKTEKSSSPRISYSP

SEQ ID NO: 1006331 - protein, 44 aa, Homo sapiens
EELYSIPNRQIPNRTLLTRQETFDAGLQAFQQEGIANITGLQRS

SEQ ID NO: 1006332 - protein, 36 aa, Homo sapiens
PVSRGSFGCFPTPVEGIEFYTFINRARFEELCSDLF

SEQ ID NO: 1006333 - protein, 35 aa, Homo sapiens
EHQRLISVVCGMYRVSDGIVNPVATQGWRDTNTFS

SEQ ID NO: 1006334 - protein, 54 aa, Homo sapiens
LSSPLLMSSGGGGGDGDDGGCDGDGGGGGVLVMVVDSGDGGSGDGDDGDGSNCA

SEQ ID NO: 1006335 - protein, 53 aa, Homo sapiens
GPVRGASPGIRYDQVAGLYLQQLQNLLEALLAGGGNLATGFQKYTHSLSSPIM

SEQ ID NO: 1006336 - protein, 56 aa, Homo sapiens
  misc_feature (32)..(32): Xaa can be any naturally occurring amino acid
CIPGVQKQQLLGERGEEHSPLQRDSLMPSYEXSERFRQAWTGSSQRSSRHLEEDYA

SEQ ID NO: 1006337 - protein, 37 aa, Homo sapiens
IDFKDGTVAPLKTVFLHDPDEKVPFHIINESTEQRYL

SEQ ID NO: 1006338 - protein, 35 aa, Homo sapiens
AALAPDQHVIQVIRVWRSAAGGRTIVGSRSAPSRY

SEQ ID NO: 1006339 - protein, 74 aa, Homo sapiens
APGVIHRHIHVPITVLIAHVDGDPSSLAGMALEKLSIFVKTVTEGGAAHRDWQDASVNDLLVEVGWNTSGGSDP

SEQ ID NO: 1006340 - protein, 45 aa, Homo sapiens
DSDPGMHCILWMSRLVFTTEVDASLTKFRRDVSTVLTSKYRSAGA

SEQ ID NO: 1006341 - protein, 40 aa, Homo sapiens
MRSFWVLSESPSQPVAPVGWAGLPGPAFNAADVLIFLFMV

SEQ ID NO: 1006342 - protein, 56 aa, Homo sapiens
GIQPVRRAQRSFEDGAVDQLAGVVNANAVSTRRDRAFALGQNAELQARLGAVHAFA

SEQ ID NO: 1006343 - protein, 42 aa, Homo sapiens
RPAIGDGYRRWISVLADACDMDRYGGRDRYDDRGSRDYDSRL

SEQ ID NO: 1006344 - protein, 45 aa, Homo sapiens
  misc_feature (6)..(6): Xaa can be any naturally occurring amino acid
SPRRSXPVGRHYNAVLASAELVALKMFCRAELYWLHAVSPLGGSS

SEQ ID NO: 1006345 - protein, 62 aa, Homo sapiens
EADCDLMLKQREADVAAASRSLRGEWLEVALRLGPGLSWLSWHMSRCSSRSTMSISRSASSC

SEQ ID NO: 1006346 - protein, 151 aa, Homo sapiens
MCEGAAGLSLDGLTCCGTCSRPEFSKSLQLEYRCCDFQKLRLGIYDIDNKTPELRDDDFLGGAECTLGQIVSSQVLTLPLIAEAWKTCLGGGTITVSAQDLQDNRVVTMEVEAETYDKKDFLGKSDPFLEFFRQGDGTWHLVYTSEVIKNT

SEQ ID NO: 1006347 - protein, 33 aa, Homo sapiens
VPSTPWLLIPRRREKEGGDLASALQGQLVPLSA

SEQ ID NO: 1006348 - protein, 119 aa, Homo sapiens
LQNLVSNAVWDAARQTVLGKANGLVNQFNNTDKFLRDMDSGVNQQISDTAQQINSYSQQIAKLNDEITRLRGSAGREPNALVDQRDQRVTELNQLVGVQVTQQDGDAYTVSFANGLTLV

SEQ ID NO: 1006349 - protein, 85 aa, Homo sapiens
SLGRRHGPIISPDITKVLQYLNEIKDSVVAGFQWATKEGALCEENMRGVRFERHDVTLKADAIHRGRGPDYSPQHGAASYASVLT

SEQ ID NO: 1006350 - protein, 57 aa, Homo sapiens
GRCLIVLQNVGGGEAGHTEMSAAACMRGLGLDCALCPAQDSDDFEALCNVLRRPKAQ

SEQ ID NO: 1006351 - protein, 58 aa, Homo sapiens
DRSTGSLPGIPPLLAGISHAHLRRTLWGAFFSELLSRTPDGLVSRGTTEPATGLNGWQ

SEQ ID NO: 1006352 - protein, 75 aa, Homo sapiens
CIHSSVARISQASVCLLYPDKTPQAAEQVLVYPKRTPKLGPACAYQVSAKWLLEQNRGRSKWRRFRLISDFVEKV

SEQ ID NO: 1006353 - protein, 42 aa, Homo sapiens
GTAGSSSSLLCGHAIISQLFVGLTERRHCEGPILYVTARAVW

SEQ ID NO: 1006354 - protein, 138 aa, Homo sapiens
YSKIQMRSVSNTLYGGSHCFSVARITWVKKLMWELTKHSRSSKASGKAVFPDGNAAVGAAEVDVQLSEMAAMRIWSKARVKKAAKVLQKGTVLLLGGTAHRDAHHVLLSNVALDEAVRVLLFEDLREGGIFGVPTRTS

SEQ ID NO: 1006355 - protein, 58 aa, Homo sapiens
KLIEASHLITATSACLSSIMCEHVIAVLYSLSPDANHSASIQLCVQKLRILIEDSDQN

SEQ ID NO: 1006356 - protein, 70 aa, Homo sapiens
  misc_feature (25)..(25): Xaa can be any naturally occurring amino acid
RERHLGCDFFSALSATLFFISAVMXHVLSRAVFTHSWPVSRWVDSRKRDSRAEGSTMHCSRAGMKMMLSS

SEQ ID NO: 1006357 - protein, 85 aa, Homo sapiens
MPRAHGLAISGPVVVTGSHPVLRSLFTSDLFLRRSVLQATDDNGYLLAEMISLLGYHPVKDVVKACSGWVNNRSKANRTLASGVE

SEQ ID NO: 1006358 - protein, 64 aa, Homo sapiens
ALEDLLCFGSAQMSIMHPLPKSYYSGDFAGGELPNLYISPSAKYTPPEVRMRRSPNEVPWSRQQ

SEQ ID NO: 1006359 - protein, 66 aa, Homo sapiens
MQTKRGGAVHITYGGWSHRLDRLLNSRSTIQGLHKASQSPRETSPNARQPENTGVHLPPSREEMTR

SEQ ID NO: 1006360 - protein, 40 aa, Homo sapiens
ERWKCDGDNDVLDNSDEAQPSAIEHCPRTIKWKTTVISTY

SEQ ID NO: 1006361 - protein, 66 aa, Homo sapiens
SWMVGSWFWYECHDITVNPIHILCSRFVDAYQHSFIAVIQEDEERTLWAMKILDRAHMSRVDWLVP

SEQ ID NO: 1006362 - protein, 37 aa, Homo sapiens
IPSEQLAARVCIKCLACTTARDEDRHQGGHCVVGEGQ

SEQ ID NO: 1006363 - protein, 34 aa, Homo sapiens
MIELGTAELCSTSQMERGHRLPGQCFFPQEPLSV

SEQ ID NO: 1006364 - protein, 62 aa, Homo sapiens
YDLSFTVRVTACDPLCSCALVPLPRWPSGKSGDRGETGPAGPAGTVVPVGCPWPRRTPMAPV

SEQ ID NO: 1006365 - protein, 35 aa, Homo sapiens
SSHHFGEDAFLPEIFSTISDWTFQESLDLSESYQS

SEQ ID NO: 1006366 - protein, 47 aa, Homo sapiens
VRGETAAGPPCAPGAPGAPDPLALLARVVIVVRLVLLVPPVLSALLA

SEQ ID NO: 1006367 - protein, 51 aa, Homo sapiens
TAGAGSSGTSYIVVQLMLIQLPGSTEESSIPKVACPGLPTPYCPPTSSQGG

SEQ ID NO: 1006368 - protein, 39 aa, Homo sapiens
YDRARYRTGDVVEEAGLCQGVICPSRGTLCWCCVTLVRE

SEQ ID NO: 1006369 - protein, 42 aa, Homo sapiens
FDSDSPARNYMAANVHSSLYGNKVLLVLAQAASAVAMTLVLT

SEQ ID NO: 1006370 - protein, 36 aa, Homo sapiens
ERVCGCRMRLEVLEQEEAEAREKVTHTHKVVRAARS

SEQ ID NO: 1006371 - protein, 55 aa, Homo sapiens
YRIELGTERVMRLDGSLSDLSLTGEEPFPGGCPGGSGSALSAQSTECPVRGYSGR

SEQ ID NO: 1006372 - protein, 118 aa, Homo sapiens
MSECRCSSLKMASVRARNLDYDTLPVLIHVQRANQAADALPGAPTSRASGPSKQAVPMCDEMVASLRGTRRMTALARGLVGVFTRTCRKPVSVPVLPVAPGIPLSPETYAIFIHNRII

SEQ ID NO: 1006373 - protein, 100 aa, Homo sapiens
QPVRTGDAVGYTGCDWTTVTTRDPSDPADVWCLGYEWLSGGCKTGHSAWVINTGLTIIIVGLTLVEVLGYMSLLRFRQVIKLSLTPRDSFPWGVSPEDYS

SEQ ID NO: 1006374 - protein, 41 aa, Homo sapiens
PVKPQGLYELDGLCRRIGTGRHVRDSLMELSVGLDAPTLDE

SEQ ID NO: 1006375 - protein, 61 aa, Homo sapiens
  misc_feature (53)..(54): Xaa can be any naturally occurring amino acid
MRSRSSSGTRNLTAEVQIIGTSIYINENFHGGFLGRIWVCDSGGSKIDDRKRXXCTGAVAV

SEQ ID NO: 1006376 - protein, 34 aa, Homo sapiens
SVSSEHQAGMTTPSGWVLRGQGKTLGLVGDAEET

SEQ ID NO: 1006377 - protein, 76 aa, Homo sapiens
AAILFLANASCPNVIYHWLHGLSGYELQNCLDECRGLRCAPCTNSVFWLNPCANTPLSACHLTPASTCLYADTPAI

SEQ ID NO: 1006378 - protein, 47 aa, Homo sapiens
EQCACWLKLSERAGIDPRTLFHAPDRTPNTSHDCTLRDTFSAISCFL

SEQ ID NO: 1006379 - protein, 140 aa, Homo sapiens
AGRERTDRAIRLEQRLGDLLPALQPALADVTVGQALDMTGGLPDVRETLGLLGISLHAVSEAQPVMQFVEGLERLNYEAGSEIAYSNTGYRLLEAALRSKGYDFDQLVQQHIARPLQLQMRAPESWFDVVPGLVPGYWRA

SEQ ID NO: 1006380 - protein, 34 aa, Homo sapiens
FETDCGKYRRRTAESAEVERWARRHLVGRGVVLL

SEQ ID NO: 1006381 - protein, 78 aa, Homo sapiens
  misc_feature (39)..(39): Xaa can be any naturally occurring amino acid
CGPKDNNMDKMSLAEVPNQRDVSGNVHAGEHVGKHPMSXIMCLIGLEFISKMYYAPTWIHMNSAELACPQWSSVLVGR

SEQ ID NO: 1006382 - protein, 36 aa, Homo sapiens
MVALTVAGAGLRRIVDDDLAACRKFRSARKQCAKTK

SEQ ID NO: 1006383 - protein, 63 aa, Homo sapiens
GALSAIARGSDSVKRLCVWKPTTRASGSSLPPGSKNMIPGGPNRRKRLSSARSSALLAVTLAC

SEQ ID NO: 1006384 - protein, 66 aa, Homo sapiens
ADSVTNSDQRSPRQLQVQDYRRHIMLAYFITVSYEDSVLQMYSLQLSDVHVIGGRCEEFAYLSPDI

SEQ ID NO: 1006385 - protein, 52 aa, Homo sapiens
  misc_feature (48)..(48): Xaa can be any naturally occurring amino acid
RSLQALAQHTDCSLIDVVSMLTCELLEVLAWPLSTDGQVLASWQPESXKYFQ

SEQ ID NO: 1006386 - protein, 92 aa, Homo sapiens
LRVMVSSSSGISSVALLQQYSQCLWLRYVYCAPLLTEQERAYARSTDIGELCIAFWEICFLDQMEPDYSVGLDAAPKHARTRTHVCTLAMPL

SEQ ID NO: 1006387 - protein, 45 aa, Homo sapiens
MVSTKSMQQRYNSLQPRGKRAAVPVQGGDTSEAASALQKSEQKVD

SEQ ID NO: 1006388 - protein, 109 aa, Homo sapiens
HVCTIWLCANPSSGRLPSIVCSLRRTARAEWGLPPCSLRWPYLLPGLAEAILSGVWGCRSCLSCHPCLAPSLCCSGAQSDLSRSSAPTRCRGPPCRAMHSGAIASAAIA

SEQ ID NO: 1006389 - protein, 38 aa, Homo sapiens
AEIRDVELLLSFFKPSMVSSKERLNNAIWKSLFQLPLG

SEQ ID NO: 1006390 - protein, 45 aa, Homo sapiens
DYQDVSQSYHRRMKATHCSPCKKVLSSSSGGPITSTGQAHDLLVK

SEQ ID NO: 1006391 - protein, 74 aa, Homo sapiens
ALLSGSRVMAAESWLYRTHAGEASGDLTSRQKAKEEAVHVSGHGLSGETGEEVKGGGGLHAFLYKTQDPNQGRS

SEQ ID NO: 1006392 - protein, 195 aa, Homo sapiens
SRGPLCAQNRRTKKDWNSRQRTDSNVSLNFLTPLRNFIEGDYKTIAKEQELFANKRLDLDAGKTRLKKGKAGETRNSSEQELRITHSEFDRQAEITRLLLEGISRTHGHQLRCLNDFVERQMTYYAQCYQYIVDLQETNWEVFHPNYLSNNNQTSVTPVTSVLPNAIGSSAMGSTSGLVINSPYKLSDLKECSGS

SEQ ID NO: 1006393 - protein, 70 aa, Homo sapiens
MKLAPIWDLYSGGRLARQLHGGTGFWRTEGEQVVDVNLEGARDFSTDMFDFNFGRTKKLKGSLGATGEIK

SEQ ID NO: 1006394 - protein, 75 aa, Homo sapiens
  misc_feature (26)..(26): Xaa can be any naturally occurring amino acid
  misc_feature (74)..(74): Xaa can be any naturally occurring amino acid
VGGVRAGLTSAYFFVSSGLHLTVYHXWNSGFKLFLGDLSFITVWRADSDALAALWAASSAALMALRMSLVGGGXH

SEQ ID NO: 1006395 - protein, 46 aa, Homo sapiens
TQADRLSTPAMNASTMLRHAGTVLSVRIMTWCITCYNTKKHDHKME

SEQ ID NO: 1006396 - protein, 52 aa, Homo sapiens
CSFVYSQLIRLSPGGGRPDSCGCLAAGCRLLQAGNLVGGLGQAPFGGKQGNS

SEQ ID NO: 1006397 - protein, 46 aa, Homo sapiens
RISCPRTEQENYGGFEAHQEAILLHCPQLDGTQQCAAGAGPVTSSV

SEQ ID NO: 1006398 - protein, 74 aa, Homo sapiens
VDFCSSRASPLSCVSSSGKLPGSYPVPILIEGVGTFVSVLIWRKFLGVVKDTGLLGRGLGYLETILRYTAVHPC

SEQ ID NO: 1006399 - protein, 68 aa, Homo sapiens
MHSRLLIIGVYVAGKLTTGTSRTIASMRKFKALISIARRSVMMIIAIGSIYRARVIITSGRRSMAIRI

SEQ ID NO: 1006400 - protein, 83 aa, Homo sapiens
MTSALNLDTSSLPGGLHFSGPKVEGGVKGGQIGTPGLPGLEVVVWGPSRVNLGKGGILGNKGKQFPLKQWKGFPQEFLTLSSL

SEQ ID NO: 1006401 - protein, 89 aa, Homo sapiens
ERRRGGSTPLDTEAGTWSRLSASRPAQGLPAEPTEIQTDGNVVIACLVQGLLPPGATQCDLERKRTGRDRQKLTTQPVMPPGTCTPRAA

SEQ ID NO: 1006402 - protein, 38 aa, Homo sapiens
MTETVAFDLWGQVIPGHRLHSIPDQPQGTSRMSTLQAP

SEQ ID NO: 1006403 - protein, 116 aa, Homo sapiens
  misc_feature (17)..(17): Xaa can be any naturally occurring amino acid
SRHDGRYYYMDVWGNGXTVSVYSASLTAPVFPLSLDSTPKMERGRRMPGTGLLTPGATQCDLERKLDRNVTDRNFPPSQECSVDLYTTSSQLTLPGTQCPDGKSVKCHVKDYRNSR

SEQ ID NO: 1006404 - protein, 45 aa, Homo sapiens
MQDYCCVGGDPSRTRRDQVGPVRPSRPCLGLCSGSRYESNRIMHT

SEQ ID NO: 1006405 - protein, 62 aa, Homo sapiens
GYKVVPRQAGRGMAVQLVAVGVVAGFSVLAGRLQSLAWSRDVALELVTVGVVAVVLTCGVAQ

SEQ ID NO: 1006406 - protein, 34 aa, Homo sapiens
MGTEGKGLTLIRGSGRWRQFWNAQLKQNSTLLPA

SEQ ID NO: 1006407 - protein, 63 aa, Homo sapiens
TQASRFTFLSQGHTGSSPVKITFKPVNPQLGSSFDDVALMEGEPTWMIKALANVGNRGCCRGK

SEQ ID NO: 1006408 - protein, 96 aa, Homo sapiens
SCGEDVEVSGAGAAEARQQDCAPVTQDTDEELRRAGMANSLSYADKDVPKGNSSPCGARRCSMGNKEWVVQADLPLNAGIRQSQQTLYHSNPILPA

SEQ ID NO: 1006409 - protein, 41 aa, Homo sapiens
  misc_feature (17)..(17): Xaa can be any naturally occurring amino acid
  misc_feature (41)..(41): Xaa can be any naturally occurring amino acid
QERELEQWIAEREVVAXSHELGQDYEHVTMLQERFREFARX

SEQ ID NO: 1006410 - protein, 33 aa, Homo sapiens
VDENWRGGDCGADGAAASLPPEVLRPRVAVVLE

SEQ ID NO: 1006411 - protein, 79 aa, Homo sapiens
SFSGSRELCQWIFRLTLLVAACKDTLDYYCRKQTKDDEGLTEGRSNRLERQKSGRSFWQVSNRLGTHTNKLQLIAVKSS

SEQ ID NO: 1006412 - protein, 101 aa, Homo sapiens
  misc_feature (2)..(2): Xaa can be any naturally occurring amino acid
AXERMNQFIFFWGGSLTLSPRLEYRGAISGHGNLWLPGSSDSRASTSQVAGTTGVRQDAGKWCFGNAVSFCGPGWSAVMQSGFTETSCLWGSRDFSVPQTP

SEQ ID NO: 1006413 - protein, 50 aa, Homo sapiens
HLAQEHEHVVQESLQALEAPWGSAVWAEEEVDMQQRASEGPLGNKFPGPK

SEQ ID NO: 1006414 - protein, 44 aa, Homo sapiens
RNLRYSEHTLYSRYLHEAIPPMIWMIHLSLPRCSEPKIMADGWL

SEQ ID NO: 1006415 - protein, 50 aa, Homo sapiens
ESDSVIYSLYTSGYHSPNGLRALLVTAVHFAIIQLLITIHSHVIHRGWVA

SEQ ID NO: 1006416 - protein, 76 aa, Homo sapiens
  misc_feature (56)..(56): Xaa can be any naturally occurring amino acid
  misc_feature (59)..(59): Xaa can be any naturally occurring amino acid
MRERVCTYHISEGHCLRELSLWVDHYCIFKAFAMIIDTLEEDISRSMTNSTAASRXPVXLRLVALLVSVALSLEKV

SEQ ID NO: 1006417 - protein, 76 aa, Homo sapiens
MSELRAWPGYFRNHAQSPKRNRREKKRPAAPGGDQAIPLPQSGGGLLPRSHHSDAALEKQAHTDLGPAVSYLPPTS

SEQ ID NO: 1006418 - protein, 44 aa, Homo sapiens
MDGRQIIKPREEPQLAEEKVLESSTRSMTLAERPCDRIPLMSLK

SEQ ID NO: 1006419 - protein, 56 aa, Homo sapiens
MYGAVPVLCLESSCDHKQPRHLNTTRVGTTARTTTGHVLHGETGAHVTHTGHDSHG

SEQ ID NO: 1006420 - protein, 65 aa, Homo sapiens
  misc_feature (27)..(27): Xaa can be any naturally occurring amino acid
  misc_feature (39)..(39): Xaa can be any naturally occurring amino acid
  misc_feature (64)..(64): Xaa can be any naturally occurring amino acid
LEDPGMRNVTGMRNVTGDEERHSRDCXRPFQPEKHRHTXKGNSVTPIPSSSLGTTWTRLSQNNXT

SEQ ID NO: 1006421 - protein, 34 aa, Homo sapiens
WTAGRGDPAGFTSREDTPCTAKPRFQYHPLTARE

SEQ ID NO: 1006422 - protein, 177 aa, Homo sapiens
RAGDSSRILQERELESAETVVQIGRLLPCSCVGVRVAESSAGGLGGTGRREEINFAILDLFHNGTHLTGGHRFFLVLSQVGILSLQQAAVVGNLLLQPASSHPSRILYTWFWWSILAAKLGQLVLHAANHALDLGKVDAVAVLCLRQVGLPGNASMLSWDLGLYLARLHCAPEVRGS

SEQ ID NO: 1006423 - protein, 136 aa, Homo sapiens
MFTLSLCTVDPPTATKEIQYLNAKGALTYTDIAGDPVLYGNLPPREISMKDVFRSGDTAKKFEDVLRVKVGIRYSAFEMYLLLITFLKASPSFRNRLLGDIAKNAYLFGTMIIDQCFHVRSDVAVEIVQVKFNVTA

SEQ ID NO: 1006424 - protein, 52 aa, Homo sapiens
MVRRKTQKKVQREQEKRHPLMRAATSSSSSSESDDDIGRRGRSSSERCPPGS

SEQ ID NO: 1006425 - protein, 55 aa, Homo sapiens
DLEDPPISCTILQAHKNTVAVGCESLSLRPFGSKKPYEQISRKLVTHKPLGLSIK

SEQ ID NO: 1006426 - protein, 75 aa, Homo sapiens
MSCDADARRQFASAHMQALDGAYHELSQNCLCTGRHVRIPAHTVAALTRVVHSQPLASPPGAPASSPTKTRYCTQ

SEQ ID NO: 1006427 - protein, 47 aa, Homo sapiens
RNDKERRCHERQGEASSSDEEQLIPAVAHQSPEMTSGVRRRSSLRTL

SEQ ID NO: 1006428 - protein, 52 aa, Homo sapiens
EEGVGDQVGGRESPLRLRKILSRGVKTSPGNRAVASVTGKGDLGQLGRQCSP

SEQ ID NO: 1006429 - protein, 121 aa, Homo sapiens
LQEIELQSQLSMKHPGGQPGGEENRYCVQLSQIQELIGKCGGAAGQLRCEMEQQNQEYKILRDVKTRLEQEIATYGRLLEGRGCPNLTQLTRKGTGDHPVRCLTICGKRSEDGKGQSSSPG

SEQ ID NO: 1006430 - protein, 51 aa, Homo sapiens
WVTLEDLIGGQLYPYLGAEAVIRGQEIETSWYMVKPSLLKKYKNWQVLWQA

SEQ ID NO: 1006431 - protein, 46 aa, Homo sapiens
QGQPEPNQQPEAATPSLRPKATVKFTESNTAGKRTRCEELGIANTH

SEQ ID NO: 1006432 - protein, 57 aa, Homo sapiens
VILLGLNDQHGMNEDVKVKVSKVWILRSLDSRGGSPQMDDINSVPDMTVLRNTYSWG

SEQ ID NO: 1006433 - protein, 50 aa, Homo sapiens
GERTDTRRLLECAQSQLHIKCTWDEVWWSFESTTIQGTHLEALVSFVSFD

SEQ ID NO: 1006434 - protein, 35 aa, Homo sapiens
AELGKVINDGLFYYEQALLAEKFEPEYSQIKPEVE

SEQ ID NO: 1006435 - protein, 55 aa, Homo sapiens
MVKTHPYYKYKNKPGMVHTTVIPVLCEAEAGGSRAQEIQTILANTVKPRLYYKYK

SEQ ID NO: 1006436 - protein, 135 aa, Homo sapiens
VCGLGGLAGGHSDSFFRRFFSSRGNFSVAPLTHGLHVELHKLVLQAELAVAGGAGEAAHTPGLVEGRHHIAFNHMAAVVADVPEELVVVSLAVGQALLLIVPVPQEWLLTLGTDKVLHVPLVPKRVDHSALDGAA

SEQ ID NO: 1006437 - protein, 68 aa, Homo sapiens
MGYPDTDLIPTEGVKASSKLQIHQLCLTPLKQKPHITDGHMPLAETLSHSLAPQESCCTVMPRVWDPD

SEQ ID NO: 1006438 - protein, 71 aa, Homo sapiens
LNLFGDETGEAETVGQMGGCPYLWVAAVVAESSAGGLLDLLRGGDDLAILDLFRNGTHLTGGHPVLILYLS

SEQ ID NO: 1006439 - protein, 61 aa, Homo sapiens
IAERTARAVWYGVWVKVILIIMRALQTGRHLGYPGYELEGMLREEESVPEHWGTACYGGAK

SEQ ID NO: 1006440 - protein, 37 aa, Homo sapiens
VSAALDVNYLMILPSRRFGIVSWNAQMSNGDRIALLA

SEQ ID NO: 1006441 - protein, 38 aa, Homo sapiens
  misc_feature (18)..(18): Xaa can be any naturally occurring amino acid
RIPAGERTEGRTGRRGSXAGVLEGQAMNLQGGEGAAKF

SEQ ID NO: 1006442 - protein, 106 aa, Homo sapiens
MGYRVDGQRWGEGCSRFFKFSASGREVKQQDGAKNGSRKGGAQEAGRRSLSYGPSVGLSVAEGRMEKLRLLGLRYQEYVTRHPAATAQLETAVRGFSYLLAGRFGD

SEQ ID NO: 1006443 - protein, 82 aa, Homo sapiens
REEQLPASLEMSREPGIKILLDLKTRLEQEIGNYRRLLEGEDGHLTQYKKEAVTHRQVRTIVEEVQDVEVISSREQGHQNHR

SEQ ID NO: 1006444 - protein, 44 aa, Homo sapiens
MTFSGPGDPSASLLSPNDVSPAALGSRRDLCLPHMTQSCPHSIA

SEQ ID NO: 1006445 - protein, 68 aa, Homo sapiens
MVYVGLNDTSISDSCRAESARSSMVDRKKSLELRTVKNNPRVLQYYPATLLLQQIVVANGKRRYKIVA

SEQ ID NO: 1006446 - protein, 127 aa, Homo sapiens
MSGHQASAWKVWPKGSLAAALLLLLMDEFGDGAGDAAYQGPVLIEADAPIMIGIQVLDELIRAFRFPVVRQHVVQLFLEHLAEAALADLVLDQGVLRHIFVEVSTRTMMASPAPCSSLFPGGTEPKL

SEQ ID NO: 1006447 - protein, 36 aa, Homo sapiens
MQACEIELQSQLTMKAFPCGATWRETDEPATAVQLV

SEQ ID NO: 1006448 - protein, 31 aa, Homo sapiens
  misc_feature (13)..(13): Xaa can be any naturally occurring amino acid
  misc_feature (16)..(16): Xaa can be any naturally occurring amino acid
MVTSVSGNLDFPXDAXWDGTVVKESSGSPFL

SEQ ID NO: 1006449 - protein, 31 aa, Homo sapiens
MYSWFCCSISQRKLGPAGPPRLTIRPWIWDR

SEQ ID NO: 1006450 - protein, 83 aa, Homo sapiens
IQLDQRATNRIYQSELMHVQTQNCLVEDLPLEPSVTTADRRHLIVWHVLYGKLSEPMRNRWSWGSRLFCMVYFPSILLFTALL

SEQ ID NO: 1006451 - protein, 35 aa, Homo sapiens
  misc_feature (1)..(1): Xaa can be any naturally occurring amino acid
XGYQYSLINTHSHDTAAWHCSHGTLELPTVSSSET

SEQ ID NO: 1006452 - protein, 125 aa, Homo sapiens
RENCSRICLDSDQHGTKRVKVKVSNVLILRSRTAGEAPHQMDDIKVFQNEVKGNYSGPQEENISCDNLILEINSLKYAYNISLKEVMRVLSHVVLEFPLQQMDSPLDSSRYCALLATSAKRPGAL

SEQ ID NO: 1006453 - protein, 47 aa, Homo sapiens
QELCVPQNRKDTEAGSPAWTEELNLGGRWTHGAAPDEHGPEVTDLWC

SEQ ID NO: 1006454 - protein, 63 aa, Homo sapiens
SGERTDISCSALAVVPVQELNVRFRDGYHAIPGEVVLVRIGVAPAPVRGRTCGPVGTGRYRTL

SEQ ID NO: 1006455 - protein, 35 aa, Homo sapiens
QNQHMLYRLGSMWRVRPPVTIAHCPQQTPHSESSA

SEQ ID NO: 1006456 - protein, 42 aa, Homo sapiens
VCPRTQPGAAEESALISETPVTFYTQRLSKFFIDQSKKMLRS

SEQ ID NO: 1006457 - protein, 45 aa, Homo sapiens
MVSSLPVSGVLGARRASCITEHEALPKHYTQDSGGTQVYPKSRNS

SEQ ID NO: 1006458 - protein, 60 aa, Homo sapiens
IAGFLGAFPAEYEARVLEYCKRREQQESSELLAAFLKKSGKLKVPDMCGYRQAWPSTNEL

SEQ ID NO: 1006459 - protein, 78 aa, Homo sapiens
AGAVVWLRTVQAVKTSLAKMVKPGLYVKLQKLASAMVGTCLYSPAHSGTAEAQEHMACNPAQVGQLASCSPSIVPTAT

SEQ ID NO: 1006460 - protein, 40 aa, Homo sapiens
KILSGERTGAWKLLDSRPIQPGDAGIVELLYTPGHWLTVL

SEQ ID NO: 1006461 - protein, 50 aa, Homo sapiens
YLLFKESGVSTSCASAWENLDSLWAPKIYQRVSLILASSIQSQVPSTCGS

SEQ ID NO: 1006462 - protein, 40 aa, Homo sapiens
PDCNSCRASQYYFTLAQTPPLSKSRSSTHGQQHHQLHDHH

SEQ ID NO: 1006463 - protein, 48 aa, Homo sapiens
SSTSLPPTQATAMPRPPHGTSQQQQLIHICPSKHTVTSHFVPAFHNSH

SEQ ID NO: 1006464 - protein, 70 aa, Homo sapiens
YSRGSFRRENWSLSLLPPSVKLHLDNNKLDSALRLPDLKLLQVVYLHSNNITKRGCQRTSVPLGFGGEAG

SEQ ID NO: 1006465 - protein, 84 aa, Homo sapiens
GGTLVNEVHLGRIRSSVSPVAQRRADGKTLSSVVDQAPYSAVRKKCIIWSDTGASPSPPSKLKFPSWAILARLEFFLRARGEPL

SEQ ID NO: 1006466 - protein, 44 aa, Homo sapiens
VRITDWRGMHDGRTLCSEEGVYWVGACASVQILVPKMAGEGTSE

SEQ ID NO: 1006467 - protein, 32 aa, Homo sapiens
MAHQEIISCTWLGGSYTHWSLADLLAQQILTI

SEQ ID NO: 1006468 - protein, 75 aa, Homo sapiens
MAHRRLYPAPGSEGPTPMEFADCWHSSLRSNCKVAETLGEGRVHIAHGLLTVNKRSTGTSELELEPNHMLNGRCA

SEQ ID NO: 1006469 - protein, 39 aa, Homo sapiens
NGCAVGEQMRQKQQRLLKNMDAHKVHAGPAADPLQPHHP

SEQ ID NO: 1006470 - protein, 39 aa, Homo sapiens
FVVHAGVGERELLTPEQGCKVWEAQELVYSFSGTTLRIK

SEQ ID NO: 1006471 - protein, 148 aa, Homo sapiens
RAVYQEWCTFVHIGGSKAPAIAHPQQLVPKCVVWLLSHRQCCTIELLPAKDVVPDSSVAGGSGSISQNEDPQELAGVGAIPAGTGPCACPPTPMHQHCSGRGLWPAGASVRGWVRCTVVVAAHGAAPRPQGPISTCTTAYRYPDHPVL

SEQ ID NO: 1006472 - protein, 69 aa, Homo sapiens
  misc_feature (22)..(22): Xaa can be any naturally occurring amino acid
  misc_feature (24)..(24): Xaa can be any naturally occurring amino acid
MSGVPSRSDTVAVGYRGCSLTXQXTPTSWAFVAPQEDSFFSHVAREPLGETWRRASGRGWTGLVEALGG

SEQ ID NO: 1006473 - protein, 44 aa, Homo sapiens
MVSDSSVDIAEQLEMRTLSDYTSEESPCTCVAPRSGLLSLLSGS

SEQ ID NO: 1006474 - protein, 160 aa, Homo sapiens
MSQELLSRLVIRDDIFWRITSSITSIVPSSMGLNQCFSVRDVAVSSSLQWLGAKVEHLSPYALPQRSVDPPRESSLMIHEGSSSSSMRRGFRLGFAGLLAPAVQVHAHEQIKLLLVPGDHLVDGLVVGHLVFLLILLLVLQDVLQEGAPIMAGGFWSNMR

SEQ ID NO: 1006475 - protein, 51 aa, Homo sapiens
SARIPISFFFFFFFCLGLVTRRHARLPNNGVRFGRLTELVFSFSGTTLRIK

SEQ ID NO: 1006476 - protein, 50 aa, Homo sapiens
MSCPACHVHRTWRLGLRQLVGTSTPAGDLASSPARTLRHRSRLRRQPHHP

SEQ ID NO: 1006477 - protein, 66 aa, Homo sapiens
VKNSLFLHMNNLGPEDTAVYYCGEKGGVVELPAVLWTPGAGETLVSVSSPSPTMPQESSLLSHLQH

SEQ ID NO: 1006478 - protein, 31 aa, Homo sapiens
EKLSIRGGDPSKVARRACRLGLARRLPRSGW

SEQ ID NO: 1006479 - protein, 75 aa, Homo sapiens
MDSLVTGVRLESICGGRTVAQVSDGTSTGGVHRSGEYTSTSSMFAIFGGEHGAHVLTELVQGGMHRHVVNYTSTL

SEQ ID NO: 1006480 - protein, 75 aa, Homo sapiens
  misc_feature (58)..(58): Xaa can be any naturally occurring amino acid
CVISGQHAGQVDEKLVSLKYFIKSQTGIVGKGEQEPRFSPLPAKTCSGCRYEFAIIEXSKTRTQTGCSQKVEGPT

SEQ ID NO: 1006481 - protein, 94 aa, Homo sapiens
VNSTRVLEDSSEIEPGVQSKASIWEVSYGAHVSTELVQGGMHRGGEYTSTRLHVCVIGRSARSSCDRRNWYREVCIGSGEYTSSWRHACMIGYW

SEQ ID NO: 1006482 - protein, 90 aa, Homo sapiens
IDSDAGGSSKSSTCSIATIVGGERCRTSVKENLYREACTAVVNTRRPGSMYAIFGRQHGAHVSKELVQEGMHGSGEYTSSWRHACMLGSW

SEQ ID NO: 1006483 - protein, 32 aa, Homo sapiens
MRLMSAQLRSARDCGAVPCSPALHDDMSPLLS

SEQ ID NO: 1006484 - protein, 34 aa, Homo sapiens
EELDHGTEAWGVYSTRRAWAGQAWVTAVGRQDHT

SEQ ID NO: 1006485 - protein, 122 aa, Homo sapiens
VRYEMSSRGVIAESTEKAKKSEEDKTTNNLITKWAKDMKKQFSKRTNSQRALEKKCSTSLIIREMQIKTTYSRKKKKAVIKKSRPARWLTPVIPALWEAEAGGSRGQKIKTILANMVKPRLY

SEQ ID NO: 1006486 - protein, 60 aa, Homo sapiens
DREERERTLIALGLVLSWQHSLQLWAGDTLTSTATVLTTSHVPLQQLTTALPATSPLPIP

SEQ ID NO: 1006487 - protein, 40 aa, Homo sapiens
ERELRQRSVNLPWATEQQIEGPRPGYQKLGLLRSSIHTTR

SEQ ID NO: 1006488 - protein, 114 aa, Homo sapiens
PRGPFPLTRDLISVLGVIGDALAANNVRAKQQREILSGYTGAFRCLDENAGDVALVKDVTSLCRTLMEITMRHGLRIRKQADFALLCLDSKRKPVTEARSCHLAMAPNHAVVSR

SEQ ID NO: 1006489 - protein, 125 aa, Homo sapiens
YHLGRLYVSAHKHSLLHLSEHSGEGLVLADIHERTCVTQGLTAGAHSRLPTVLRTLLPQICGDRALQQLGQPDLHLQRESQAQQTSRWTRELSPNLVTKLTNAHRAKHLNSWGDRQSSSFPQKPR

SEQ ID NO: 1006490 - protein, 34 aa, Homo sapiens
KGYLPESLHHLLVSMESGTGDFGYLVLLSHVGER

SEQ ID NO: 1006491 - protein, 87 aa, Homo sapiens
  misc_feature (33)..(33): Xaa can be any naturally occurring amino acid
  misc_feature (41)..(41): Xaa can be any naturally occurring amino acid
ALHTVMHTDLSPLSKQDRTHNLMVPSQIVNQLXTTELQEHXIISAVLMPLFPAGFKDKSTVMQRYCDRNTFHTYRYGIVKTDLCVYP

SEQ ID NO: 1006492 - protein, 81 aa, Homo sapiens
GALDGSLYEYSMRSLFRCHVHECRMPSFLLSASSVRRSELIVGTGIARKNEVCSSRELTVSLGGEDICPRNHRTIRSCNQV

SEQ ID NO: 1006493 - protein, 43 aa, Homo sapiens
RLGSLFWLSSFLSGPPPLCPGYPFMYQCSLYYGNARIPTANEY

SEQ ID NO: 1006494 - protein, 77 aa, Homo sapiens
MSQKSSNSSLVRTEIYTERKPDIDPLGTRVDVKQCLIIPHYEKSPRPQDNRIGRNTVSMCVGLTAATHRLAVNTPRA

SEQ ID NO: 1006495 - protein, 39 aa, Homo sapiens
RECYQLTPPSTTMGPDVGQEHVVWKSDPDDGGYSVDKDA

SEQ ID NO: 1006496 - protein, 84 aa, Homo sapiens
CCTARLAASLRVSVLGVDRHSPCILDLFPCTVFFFLVYRCDPVSPIIKSRHPAGVVCCCCCQLPLSSSLKQYTCILLKFWRQRF

SEQ ID NO: 1006497 - protein, 88 aa, Homo sapiens
SSVVEAEDHVRLPWIKQSTGYTCAASGRHGTPKDPSTPGSHFLLTFAQVLDGSEGPGAKVQPIIYPRGHPGKPTGGVLEHQIFLPTRG

SEQ ID NO: 1006498 - protein, 55 aa, Homo sapiens
RYRSWVLDVICSSSMCGRAAAAAGARRSVSSVKLFRRNSRTRCARCGGVKSHVMV

SEQ ID NO: 1006499 - protein, 102 aa, Homo sapiens
SKAAAGSNSLAVLPRKQAGTHLPESNPDTVVSAFIPLQKGAHVHVYPRILSQEHGEDPGFKIRESHGKAITFTPSVKGATRRDIHACDPSKEIKAWEYHTKD

SEQ ID NO: 1006500 - protein, 110 aa, Homo sapiens
GSPRCSRAVGTWEVRAFPGTAGVLSAMCSHVDMDLVSHGSLSQGCLSLPQLQVVGLICHLQCCDLRKIADQPPDIKIRIEKFRISLDLLTVCLVEGSSGDDKYIFIIMHH

SEQ ID NO: 1006501 - protein, 40 aa, Homo sapiens
RIFVRILVTKTATASSPKPIKPESKGVQKYRASTVMPQNM

SEQ ID NO: 1006502 - protein, 44 aa, Homo sapiens
SCLARRPVMMPLRNSYTAGFPVYHLPIRPIYKLADAALDLKVRE

SEQ ID NO: 1006503 - protein, 57 aa, Homo sapiens
MGLNLVLIHLPLVPHSQRSHSRGDTSSSESGTAVKMEKGSQNSALSTALRSDAVTQR

SEQ ID NO: 1006504 - protein, 46 aa, Homo sapiens
GFWTSMGFLDSSSNPRLGPRSSIHASPGTPVISHASPGTPVIIHAS

SEQ ID NO: 1006505 - protein, 62 aa, Homo sapiens
CYDGWSAVERSCVNARSASRVHATTPAAGSRVIGTTDARPTPNLLAIQQEYLKNILIAVVGS

SEQ ID NO: 1006506 - protein, 75 aa, Homo sapiens
  misc_feature (53)..(53): Xaa can be any naturally occurring amino acid
GPFVPRTTTSLKQSYPKYGSGLAISLPTFVHHVRGCAPWDLCGYGYGPVRDLXPLPPVRTQGFKIGIYFRLFISI

SEQ ID NO: 1006507 - protein, 40 aa, Homo sapiens
CTYTMLLICPKTFMPYKNFRISYSVEVGSWSDSSLSDLRS

SEQ ID NO: 1006508 - protein, 46 aa, Homo sapiens
SIRQEKENPRLPCEEGISHVYVHTGTYMCTCTRDAHGCTNTHTFMC

SEQ ID NO: 1006509 - protein, 75 aa, Homo sapiens
AYWAYVEVERLVLPSSVYSSVQYHMVAIDLMVTGGIVDLVCHVKDASGWEGDEDNISDAQEIENVCTILTDIILV

SEQ ID NO: 1006510 - protein, 132 aa, Homo sapiens
RAVKLHAGRLRVERAHGTWWLPALLDVCGDVDYLWKYCHINFTTVLDVIEDLGIILVRHNSDGRPLVPQANRPGHPVQVGVRVLRHVVLKDDVDSLDVHPPDKQIGGHQDPPLEILELMIACQALLLGHAPV

SEQ ID NO: 1006511 - protein, 36 aa, Homo sapiens
GVQLSVNCLHTPPPGRASRAKNCMQSLTSKCSNPAH

SEQ ID NO: 1006512 - protein, 96 aa, Homo sapiens
APGKLKGVFLSRRTIGDLSSLGDRGVAISNRGGFGVFCELVIFKVLRTSLKALNLPLDETAPLRLEATPKNGEGGCSGLAGPVPEKISPPKASGRV

SEQ ID NO: 1006513 - protein, 42 aa, Homo sapiens
GHLGFWHEVGRGELACVPTVVIEEVLPGGWYLTLWGGCRKPM

SEQ ID NO: 1006514 - protein, 71 aa, Homo sapiens
MPGLEENVAFPLPKGLSRKVAQTDRWNRRGPAAGAAKNKNRGDFMQLYSYFRSSAAYRVRIALNLKGLPYE

SEQ ID NO: 1006515 - protein, 36 aa, Homo sapiens
SSSRQYQVQRVMPAYHALYDEAEEMVDHYAVRSPRP

SEQ ID NO: 1006516 - protein, 152 aa, Homo sapiens
MHVWQRGYIIIESARRRSDYVLWRRFCPGVPHLLWCILFPVVLSIGHLQDASGTDGKVAVNLAKLKLFGHYYVMVICYVYFTRIIAILLQVAVPFQWQSLYQLLVERSPVASSCSGLQVHATGTTRTAVRQEPRRCQMEQYEDLGREALKSQ

SEQ ID NO: 1006517 - protein, 101 aa, Homo sapiens
TFQDGVSVPRCISGYGRSQLLLCTGGSGPIESVVKGLSFNAIGDYLLSSSDDQYWAFSDIQTGRVLTKVTDETSGCSLTCAQFHPDGLIFGTGTMDSQIKI

SEQ ID NO: 1006518 - protein, 33 aa, Homo sapiens
SLSSLRILNLIGKMPVDTAARRDAESVPQNCST

SEQ ID NO: 1006519 - protein, 84 aa, Homo sapiens
LVLPPRHLLSSLWEGGGLLAKKISEFFHQRRSLFMQDIHSVEATVPVICAESLFLTESFQTAHGNGKSDGPFDKRRKRADFRHC

SEQ ID NO: 1006520 - protein, 68 aa, Homo sapiens
RDSRWMGIAGTLECYDKGDGSCDVRYWPQEAGEYAVHGAVHPGEDFRLSPFMADIRNAPPGLPPRQGE

SEQ ID NO: 1006521 - protein, 37 aa, Homo sapiens
MSLDFEQCDRYQLQAAGYMMGLMKGRANPHTCLVEDV

SEQ ID NO: 1006522 - protein, 79 aa, Homo sapiens
MVNAVSDFLTPQNLDAEPGAGILTLNLATTRRRKGMFSWGWDFAPRIPSIGLTGPVELTRRSPIEVSHHVDTMAIGDGD

SEQ ID NO: 1006523 - protein, 108 aa, Homo sapiens
ETTSGTSSNSSHSTFNSGVAPNPTNATTNAAGGALQPTANLFAVSLSLLHLYSSETHATKRLLNFPIFYTQSKRQLEVQCGKEKQVFIESTNHTPCIDTQNVANPKFD

SEQ ID NO: 1006524 - protein, 132 aa, Homo sapiens
VALGEATTVGFPFLGHSGKGQTTGTEKQLGGQGLTDRGEAGCIGATLETWRMKESPQEGLERWPGDSAHRFGTVEELYTHRLNWRVCKLKKKIIQSEKDQAVTVQLGYWHVTDVDFTETFLQESQALKSSLL

SEQ ID NO: 1006525 - protein, 41 aa, Homo sapiens
DRAGTDSILTSTLTRDNTLFSDRLVGGHSDLGEQSLRHYSE

SEQ ID NO: 1006526 - protein, 35 aa, Homo sapiens
ELVPKMTDALCRTVIPAVRRVGLSVSLRHTSRLKS

SEQ ID NO: 1006527 - protein, 41 aa, Homo sapiens
MSWYRSPMGCTGDLLLNYKPQVGARILRTVISWNYQVSLDH

SEQ ID NO: 1006528 - protein, 46 aa, Homo sapiens
MLTRLTWMRNCSGTGCWSLLQGGGAPGIGLLHHGGLVGAGRCGMRE

SEQ ID NO: 1006529 - protein, 131 aa, Homo sapiens
AGRQMGISEATLLNMLNISPFSLGLVIQQVSTMEHLQTLRCLISQRKLCILASGEGVRNVASVCLQMAYPTVASVPHSIINGYKRVRAWSVETDYTFPLAEKVKAFWADPSALVAAAPVAAATTAAPASWL

SEQ ID NO: 1006530 - protein, 117 aa, Homo sapiens
AGEGGLSQDGATALQPGTERDSISKTKRNKTKQRPGNAANPLQEEHNFPPDHYGLPAVGDLLACMQLKVDKEKGYIELLYRCEGMDKSGAAFLLIITHHELRDCEWPNAWGVWGLTN

SEQ ID NO: 1006531 - protein, 74 aa, Homo sapiens
DLEDLVRSWSKEGLSEYMVEFLEEEGGEAGDYFSWEMDEEGNLDGITPFWMDNYRAPVGKGLPYLQFFDLATGG

SEQ ID NO: 1006532 - protein, 46 aa, Homo sapiens
MPCVVKQTGSLVEGILGRGEMGECWWAWEWEAGRLLLPPPPPLLPL

SEQ ID NO: 1006533 - protein, 44 aa, Homo sapiens
ALFRRGAPAFPICSIYLAGRQGKNLHVGARKNVGWKKCGWDDSE

SEQ ID NO: 1006534 - protein, 46 aa, Homo sapiens
DDPGEQVAGFRGWEGAVGFRGLTLRPQRSCLPVLVCLPLSVYGLGC

SEQ ID NO: 1006535 - protein, 40 aa, Homo sapiens
VQGRDGADFAKGGGVLKDGGTHPLSPAIMENAKVLARYAS

SEQ ID NO: 1006536 - protein, 119 aa, Homo sapiens
LERMSCLPTTNDYFPHFDLSHGSAQVKGHGMKVADALTKCLVHVNDMPKALSALRDLHAHKLRVDRVNFKLLSHCLLVTLACHLPAEFTPAVHASLDKSLGTVSTVLTSKYRLSWSLGK

SEQ ID NO: 1006537 - protein, 38 aa, Homo sapiens
VSERAPQAPKPAIIQDCERLERGLLCSPSSGSPGLRPQ

SEQ ID NO: 1006538 - protein, 35 aa, Homo sapiens
SPPHLPPCLLILLILILGLIILLVLCLLLLFCQLA

SEQ ID NO: 1006539 - protein, 70 aa, Homo sapiens
TDYTAVACAYTTFYSNLTENARGVKLLAALLEDEGGSGRPLLQAAKTLAAAESELLRSAQPASAEPRQNL

SEQ ID NO: 1006540 - protein, 68 aa, Homo sapiens
DSRTGRLSDGPDRTVGPVLLVVAGFLSRYGRYHRRLRSDLVPLPLAWPLTYVWVRLLLTLFASGAPSS

SEQ ID NO: 1006541 - protein, 107 aa, Homo sapiens
  misc_feature (102)..(102): Xaa can be any naturally occurring amino acid
MVLDSFSGHSVFRISIFLRELRCGSLDGRRGQHRMASQKGHTAQDGRVLQGLEHVERSPVDLHESQHSSMSQVKYNRARSKSEVGDMWTNPDPQSERAEATXKRSGP

SEQ ID NO: 1006542 - protein, 147 aa, Homo sapiens
RAGTDSILTRCRWTLSGCVVRQGTPIFQLFSGKDEGSAEHGGVRFVILDLGVDILDGVRGLHLEGDGLTSEGLHEDLHPTSETEHQVQGRLFLDVVVRQGAPIFQLFSGKDGALLETSSGVCCLGSGRRRNNDGDVGLDLKGDGLAK

SEQ ID NO: 1006543 - protein, 60 aa, Homo sapiens
MSFLDPPRMHMRRHTHTNTHTHTSEALTEQRGPQLYDTRRVRKLQLFYAVPGLNKTVLDF

SEQ ID NO: 1006544 - protein, 38 aa, Homo sapiens
SILTVVLQKVLKFSYSGTVLVAGFTPLGYGLTKINDNL

SEQ ID NO: 1006545 - protein, 40 aa, Homo sapiens
RTHKVSSVSPALHAEPMMPQPIGLGQLALPDCASCHWSQS

SEQ ID NO: 1006546 - protein, 49 aa, Homo sapiens
GTSLIGSLSSYFALGLWTYSGQISTTNHPLPCACRSAPLGERIWKEESG

SEQ ID NO: 1006547 - protein, 52 aa, Homo sapiens
AYFLLAIPSGCCLVVAPLLFHASNPCFSPLYFLLLHIFIYQEESVSVVGLGM

SEQ ID NO: 1006548 - protein, 40 aa, Homo sapiens
  misc_feature (5)..(5): Xaa can be any naturally occurring amino acid
MGAAXQPIRCTNCARCVPKGEAIKKFVIRRHSGGRSSQWT

SEQ ID NO: 1006549 - protein, 52 aa, Homo sapiens
VGCGVYAALETAEPGNQAVSLRLMTQLCSLEMPVDRGVATTSACCARLVHSV

SEQ ID NO: 1006550 - protein, 41 aa, Homo sapiens
SSWYRQILTSILTRDNHSVSDRLDGGASSDLGEQSLRHYSE

SEQ ID NO: 1006551 - protein, 74 aa, Homo sapiens
HVGIDCFPVVIFAIFYKGFFSPLRLYEHGHRASKVRSRTEKRSEGWFGHPMIIKKWLTPNKYDPDSPSFRSPES

SEQ ID NO: 1006552 - protein, 41 aa, Homo sapiens
SYIYRSKSTLTPINSLWKGYEVKSLISLRRQALDIFVALPN

SEQ ID NO: 1006553 - protein, 73 aa, Homo sapiens
PLSLSVSCSQMTKKRRNMVVPNKCAAATCRLFAVGDCARCVPQDEAIKKFVIRNIVEAAAVRDISEASVFDAY

SEQ ID NO: 1006554 - protein, 107 aa, Homo sapiens
ASCQYNEIKLCEMAADSSLGGGPVSMISTSDLWLITPDLLSLAVRFKKDSQRLVVLNDFTFGNVTSDFIIGGENTDDDFGARANKHLAFGSLFGIVDTLESICHDIH

SEQ ID NO: 1006555 - protein, 136 aa, Homo sapiens
LLRTLHTYTPPLHIPFIHIQDTHTPLTRAPYIHMLCTCTLYTYTHTHFSYTNTQNPLYTYVHTHFTYTYHTHTLHTYTHTHFKPSTHICEVPHTDTHNPHPTSHIHPHFNTIPSNINPHTFPPLTNTYILSHTHTH

SEQ ID NO: 1006556 - protein, 51 aa, Homo sapiens
  misc_feature (1)..(1): Xaa can be any naturally occurring amino acid
XSCVHLSEVFPTVRLLSTARGNEGDISGVIRTAGPVLFISLMRADSYPHFD

SEQ ID NO: 1006557 - protein, 31 aa, Homo sapiens
MSGTGGPLPVSPEAHRRVAFPSLAWATQVPP

SEQ ID NO: 1006558 - protein, 44 aa, Homo sapiens
MLWRRREPEHGVALLLDPGRQTVGKREAVLILRRQPAHKGRVGG

SEQ ID NO: 1006559 - protein, 38 aa, Homo sapiens
DGDRCEESSEHGHPPPQAISDSHHHPAISGDYPGKHVS

SEQ ID NO: 1006560 - protein, 52 aa, Homo sapiens
KTRPETMRPGLRIRDRKMESNDTEGMVGRGLEEPETGPCSSTCLGRGGTGRT

SEQ ID NO: 1006561 - protein, 100 aa, Homo sapiens
HLRTQSLRGLSHSDSRPSCAVPVSEAGTGGCGWPCEPSLPYCWENESSGKPESPHWLHEGPHFSRVSWVWRLCTTVPPINCPRCQPSNSQLNITLWGLGS

SEQ ID NO: 1006562 - protein, 70 aa, Homo sapiens
NLNGAGGGSELLLMWSLLPGAFLDCTSHETASWAWVWAHEHPPSLVCRGPLECTHFTWPQQAPEQGALGH

SEQ ID NO: 1006563 - protein, 40 aa, Homo sapiens
EKLVVWILGAELEKKSILRVAGKSIPAPEMAERGPGPEAA

SEQ ID NO: 1006564 - protein, 71 aa, Homo sapiens
GDVKHVYERLRTSHLHSCGLPRTHSTHSSKEIMSVPGGHTIQGIVEYQEEGTTLPFLRTVPVHREMRHIHQ

SEQ ID NO: 1006565 - protein, 44 aa, Homo sapiens
TLARYPWEDISFFTLRLKARQMFTYRHYKKSVSNLLCERECSTL

SEQ ID NO: 1006566 - protein, 129 aa, Homo sapiens
GEGPVHLPPAQLNGGPGSWTEGAKKDRMLPKEGAEELLEGISEGKAGLEGFGQELRQLGVALSNGGTGSESPLEPPLPLEEEEAYESFTCPPEPPGPFLSSPLRSLNQLPSQPFTGPFMAVLFAKLENM

SEQ ID NO: 1006567 - protein, 46 aa, Homo sapiens
VCVYVVNTLRHPFSKGTVSLCTPLAPHCVLSPGSLEAVNCEDVGLV

SEQ ID NO: 1006568 - protein, 120 aa, Homo sapiens
WGLYRGAKGSLPPQCSDQHQPASAPRMMQAAASAAPPLVAATPYSSYIPYNPQQFPGQPAMMQPMAHYPSQPVFAPMLQSNPRMLTSGSHPQAIVSSSTPQYPSAEQPTPQALYATVHQS

SEQ ID NO: 1006569 - protein, 84 aa, Homo sapiens
EYLEDPMETRLDGDQLRMRLRLLGLVCPDRILSQALPCGQALSATAKLRGRVLSRGIGEALAAFCIYLLFFFFSGFVGGGGSTV

SEQ ID NO: 1006570 - protein, 105 aa, Homo sapiens
VVRRHGNGLAACGAFKKSSKPNRKSGGISAPLGTSPRPYWAGMFWLKTHSHSSQTLEPGLGEVLEPAPGEAEVGRTLGGQPGQVFWHLAHSRCSKHVCWNRTCHP

SEQ ID NO: 1006571 - protein, 47 aa, Homo sapiens
PPGPGGKNNPLEKGFLPPGGPGGKPCLLGQGDFLSMVPGGVPPPLVK

SEQ ID NO: 1006572 - protein, 139 aa, Homo sapiens
  misc_feature (119)..(119): Xaa can be any naturally occurring amino acid
ERSSLTLATGFNQRGIYVIQAREVGQKISPDTVLHLILPESPGSHEESREHSLEEVKELLNKLMLMSGKKDRNNTEVERFSEVFCSVQRLSQAFIDLHSAGNMLFRTWIAMAYCSPKQXVSLQMDFWLYLVTELKDGGD

SEQ ID NO: 1006573 - protein, 59 aa, Homo sapiens
MVMDGPVLALGLASSTCRDAVRAAHIAAPSAPHPPPVGVGSVVWKCPLWLMRLSVDGQW

SEQ ID NO: 1006574 - protein, 97 aa, Homo sapiens
MIIRATRAPPLRWSTHCTTRPKVPSPKVLTISSEMKESRVGEREGEKVGNELSWKKKGDSNLVVEMKEGEQIQMVTGEENPCVISTTFNPWAVKEGR

SEQ ID NO: 1006575 - protein, 61 aa, Homo sapiens
MELRTGAAYSAPGMAGLVLPDFRYGLQWGLNVWASWLAHQMDESNSYASAELMGQTHDQSL

SEQ ID NO: 1006576 - protein, 74 aa, Homo sapiens
MTFAPSITARTTWSPGVVHSVMEFTLFYIYSNGPVASLNLLPPDLHLVTIYRHLHGPERRIGGDESAPYRLPCA

SEQ ID NO: 1006577 - protein, 49 aa, Homo sapiens
MAHTLYVMYSSQRVLADERADHTTVLKHEQYPAIDEDKYHQRPHELQPV

SEQ ID NO: 1006578 - protein, 42 aa, Homo sapiens
SHPRVSFMSGVLTGVRGVLDRPGLTVGIEGLLGLEGAFYVLD

SEQ ID NO: 1006579 - protein, 106 aa, Homo sapiens
MSLRLVYELLRSSDRTVSASQSAGIAGVSHRTRPLRECLKLLSCKSTYTQAPPTHEQLRGQFTQTESKDNFKVVSGYYPSMAQLEGGHRGEGSETPKFNLLHLTDG

SEQ ID NO: 1006580 - protein, 138 aa, Homo sapiens
ARHPNITHEVVRTFATGQDGGQSVNKIPLPVSKAGSAHLTKQIGLRSEVGVHRPLGESGIRGNASQTGADIAVPFKVVGGYGKYSASHLIAVRSFYCGRHHKLSSFEESRTRSVAVPPVSDTNGILSLGSSPNRSARV

SEQ ID NO: 1006581 - protein, 50 aa, Homo sapiens
YPGWGGRQKECWCMYPILSHQPGHPQLEYGNGATGQMQGGWSLTQPPEMQ

SEQ ID NO: 1006582 - protein, 95 aa, Homo sapiens
LADLMSKLEAAQVFSRTADQRLAQASVLGHHHPGPDTFQEHPRQQLATSSFLLFWLTGMVSVAFLLLPLPDDLGSHGDAHTLPCLLPSSLTCQLA

SEQ ID NO: 1006583 - protein, 52 aa, Homo sapiens
RSRSGMWGRHNLSPDVHRDPHPSETSCLTCGLVPVNTLFMNTCCLGFIAFCV

SEQ ID NO: 1006584 - protein, 92 aa, Homo sapiens
TEEYGDASSCEGSRGRQPSMVVNTSRQQPAPNSEDEGHQVQRCMEEFPGQFWAPPMIGAGGTPVTHFQEYHHASNHKHWVPVAHVDAASYAQ

SEQ ID NO: 1006585 - protein, 42 aa, Homo sapiens
HHSLLVAVMAWTVVMSPSRYQSCIDTLARCAKQLVVQEALLM

SEQ ID NO: 1006586 - protein, 63 aa, Homo sapiens
GAHYYMSWADRLTLSWVLLHTCATVRLQAHGPGPSNCLWCDQPEHVLELFLWGVQRATALAEA

SEQ ID NO: 1006587 - protein, 77 aa, Homo sapiens
AEKLEWGPPGSGALLKDWAGRSTAGHSSSNQLEPPSLGAVPPWVPPLVPMAPHLFPKQQTPPYTDARGSCQAADTQA

SEQ ID NO: 1006588 - protein, 132 aa, Homo sapiens
ESLDLWIGSETVDVPEFMEGWTDASAQGEQVNWATCSQQLPIVASSIVSLYFLELTELFTPGKVGFQCYERNLSMHYVETKEELIPLLMLLSLDFAGPAASVVTCTGELCQTVGTTAVEPTHDNSVNILQGA

SEQ ID NO: 1006589 - protein, 37 aa, Homo sapiens
LEACKSNGCSGLALSKEPQIVGVNASNHGVTTGDGVV

SEQ ID NO: 1006590 - protein, 35 aa, Homo sapiens
SLLRRPRRYTLARAVRAELLPTARRVAFGYRVLQL

SEQ ID NO: 1006591 - protein, 128 aa, Homo sapiens
GPKVGASCQDEVEEYLEVQWEVALVGVTRSGDQEADLDGGPGGSGQWVGLDGGPVRKTVGDKGPLESMAFQSGLSEWKELRGEWTKERRPDEDGPVRPVMVEPGEWSKQVGGPGIGRCLYLEKEEQTA

SEQ ID NO: 1006592 - protein, 122 aa, Homo sapiens
MVLLARVRSPVWCLNHCVSALVLVSDMHRVALCMLVSELHRVKLSASLVSDMHRVKQLRVLVSDMHRVKLYCVLVSDMHRVKLCCVLVSDMHRVKQLCVLVSDMHRVKLCCVLVSDVHRVTL

SEQ ID NO: 1006593 - protein, 103 aa, Homo sapiens
MRVHTAFRVFCVCAGLAVCAGCDLCVVGVICACAGCDLCLLGVNLCVLGVICVCAGCALCVLTVSCVCAGCDLCVLTVICACAGCDLWVCWVCSVCDLCMCCV

SEQ ID NO: 1006594 - protein, 54 aa, Homo sapiens
RTYCVSPSREFTYWRRRRTGCLLTQEKTLHNQPVSALEAPGIHEPHPQRSLLKE

SEQ ID NO: 1006595 - protein, 42 aa, Homo sapiens
CGSVVHRKPQLLPYVVLWYAPVPECLWWTRSIHVLITCLKHM

SEQ ID NO: 1006596 - protein, 71 aa, Homo sapiens
CWGLALNMSLPNSMFSNFFERELEVSYRGSIYTTEIGNNGNSGLLSPRLRGQAPAPLRSLYSPGPSCQAPA

SEQ ID NO: 1006597 - protein, 61 aa, Homo sapiens
LPSSHCFSGDDYNLWRVFDVQIMPEDLDMGFTELDIYSKFRPSRAMRCLRVRLCRSIGCRY

SEQ ID NO: 1006598 - protein, 126 aa, Homo sapiens
LLAQVGTMLETKRKKTTRRRRDREEERHEETEKRETVGWESTSNLILQTTLLRSSLYAQPRSLLSSDFPLSYDASPWPILFFPGPASSPFYPSVLVRSLSPFTSSAFVDHVLCVKRNPGADPSPIL

SEQ ID NO: 1006599 - protein, 38 aa, Homo sapiens
KETVQTTEDQILKRDMPPAFIKLLLEEILKNVLQTSPL

SEQ ID NO: 1006600 - protein, 77 aa, Homo sapiens
ALLQHSTSSWQRVIRDNLERARADSIQLIRKREKLNRETIKVQKIAMRDAGIDSLFLNPSFRKKPWETSSQGGKDTR

SEQ ID NO: 1006601 - protein, 38 aa, Homo sapiens
MTELSVVRACTRWKAEIRVMGRKPSASIFLRRKKSRSK

SEQ ID NO: 1006602 - protein, 33 aa, Homo sapiens
MAEAPSLVKRHGHAHRYPSYLGALMQENRLNLG

SEQ ID NO: 1006603 - protein, 40 aa, Homo sapiens
ISFHISLQVAETYRHTPPHQANKYGVETAICQLARASLDL

SEQ ID NO: 1006604 - protein, 57 aa, Homo sapiens
QYEIPSPSSRSEIPPKSRGAMLGAEYVVAVHCASITTMEKARGIIGPGGEPKQGLSY

SEQ ID NO: 1006605 - protein, 106 aa, Homo sapiens
  misc_feature (19)..(19): Xaa can be any naturally occurring amino acid
  misc_feature (60)..(60): Xaa can be any naturally occurring amino acid
CTDNVGSKQMQQIRMSFAXRLWCCWAEHHDALASEALETTSSGNCASYRGNVGFVFTKEXLTEIRGHVAGNKVPAAARAGSIGPLLSHLCQARTLVSGPRETSFFQ

SEQ ID NO: 1006606 - protein, 73 aa, Homo sapiens
GSTFSFGSTSTFNLSFRSSLNLSSTCSNLNSSFSLNLSLDEDRDRSELVKSFRDDWPLKGSNILENVSSGLNN

SEQ ID NO: 1006607 - protein, 132 aa, Homo sapiens
EEEEQERQFRKQFPLHEKDSADRVAQPTLEENKGTSDGQEEEAGTNPALLSQNSMQAVMLIHQQLCLNFARSLWYQQTLPPHEAKHYLSLFLSCYQTGASLVTHFYPLMGVELNDRLLAANFCLSLSQTLFL

SEQ ID NO: 1006608 - protein, 98 aa, Homo sapiens
SYKADVRDDGLLGAISLEKPSDEVQPVRAGMGFVGPRADLYLMGLCGPRSFHLVTSDPQLSPLAFPCGHFPGWTLSCSLQYPNCRSSAGNKYVMDQKK

SEQ ID NO: 1006609 - protein, 40 aa, Homo sapiens
SYVVDVGMPQPTGEAEAEEEDCLGLEFEDTVSYDHARAFQ

SEQ ID NO: 1006610 - protein, 88 aa, Homo sapiens
MRTSWDRGRDRHCWSFCYETTGPRVASCEVLPNEAILIDFTIEALKQVHEDESGEAQLSFLTGGPVAAASSLERDTERLRELLLYGRK

SEQ ID NO: 1006611 - protein, 36 aa, Homo sapiens
HSLDCHLSPAIGPSQSSLALCWVICSRFHCSCCADW

SEQ ID NO: 1006612 - protein, 49 aa, Homo sapiens
MPVLLLKLLLLKLLLLLQLLLLLLLKLLLLWQLLLLLKLLERAHGLSAQ

SEQ ID NO: 1006613 - protein, 49 aa, Homo sapiens
MTQSAHSAVSARPRQQAAPPRATLVFLRAARAAVPRFVHTCVVGSLETT

SEQ ID NO: 1006614 - protein, 71 aa, Homo sapiens
SSHVWRNWEGYQPANTAIQLTLGFDLSGRCSCSALRLNSCSQERGGGAAAATGTAHGRGMALLGRTQVCTS

SEQ ID NO: 1006615 - protein, 67 aa, Homo sapiens
MMLRHYHHQHRLIDKCKLPKLTQFHGVVSWNQQILRDGLRDSSMGMGKALTQRTIKHPSLIQTKKTK

SEQ ID NO: 1006616 - protein, 58 aa, Homo sapiens
CVSSGSYEASSLGGLRQQVSRRLQCSVGWHSFRDEHPLQQLLVPLRVARPVLLAHLLY

SEQ ID NO: 1006617 - protein, 57 aa, Homo sapiens
MVQTFDIPTWLSYNTCSNKHRLYRTPGNRIVYLYTKNGWESTKICMWCCALSFRGIP

SEQ ID NO: 1006618 - protein, 86 aa, Homo sapiens
NEAEQQPSLQPEGEVFVGAVPLLCLPCGGLLAGGRLASAGPPAGPGSQSLAAGQSHVGNKGNTWAHLGRGCQVRFKPGYESFEFGS

SEQ ID NO: 1006619 - protein, 43 aa, Homo sapiens
MVTDLSCAHDQEVVCEVCCTSQTRGGFEGSIEFFLDAKERGCH

SEQ ID NO: 1006620 - protein, 32 aa, Homo sapiens
MNDGGWKERGQEDEAAFLLQGKALAVGDGLVM

SEQ ID NO: 1006621 - protein, 98 aa, Homo sapiens
ESWDLSSDAVWAPKVNVMAESVGAYVMAAHLYNSWDLCHMSELHCDKLHVYPENFRLLGNVLFCVLAHHFGKEFTPPVQAAYQKVVAGVANALGHKYH

SEQ ID NO: 1006622 - protein, 105 aa, Homo sapiens
SKWSPSSNQRYEGWHSSRKMETSHGDEKNRPGNLWIIKLSKENSLITQFTSLVAVEKRDENGSPFPGYTTKSLERVLAKGKMVDCPGPYMELGRGGTPREAGQGT

SEQ ID NO: 1006623 - protein, 46 aa, Homo sapiens
EQVCISWFYPPSSRRLWDEYEELKGLGRSRLPGHGSLWSDSCQLAQ

SEQ ID NO: 1006624 - protein, 126 aa, Homo sapiens
VSLPQAVCGADRRTAVLLGFLLRSQGYQVLAQEAPCWDAPLRDPALRQLLCGTELTTLQPSEPHSAGALCSGLPEHLSLTKFSLDPILSSPSPWKVGPQSTAFPVRRGFVATIPITSCQLAPPGTE

SEQ ID NO: 1006625 - protein, 41 aa, Homo sapiens
LAAECSTTYRRQPCAPAALLLEHQPDKIKALFRKGQGRWPS

SEQ ID NO: 1006626 - protein, 43 aa, Homo sapiens
  misc_feature (1)..(1): Xaa can be any naturally occurring amino acid
XSKAGQLPASVTGFRLAIEAQQRKVLASFKSLAHAVIGYFHQC

SEQ ID NO: 1006627 - protein, 66 aa, Homo sapiens
PDLALHWIWKNRERILQFWAIPGPSRNTVFQETLKNLPVPCLIVISIRVLQDSDIFHNCNVCQLAQ

SEQ ID NO: 1006628 - protein, 33 aa, Homo sapiens
YRISAEQLGRRGKLEQLSPEEEEKRRIRKGKEE

SEQ ID NO: 1006629 - protein, 55 aa, Homo sapiens
MMYCLADNDANNNEAWANGFEAGRDSSSMFLAKSWTGDGRRSLDGARVLGWTTGC

SEQ ID NO: 1006630 - protein, 94 aa, Homo sapiens
NLDNFTDCYQLPAHRGIVDEKIFCCHGGLSPERAVYEEQIRRIMRTTDVTDQGLLCDTAVVLTLTTDVAGLGRDSPWSLLIPIGAEVVDKFLHK

SEQ ID NO: 1006631 - protein, 60 aa, Homo sapiens
AGGVPLLRQFLRSEKRNIAHKLGIEHIRKPPKGMLTFSQKMWSAVSAYMPLSATTCAEYN

SEQ ID NO: 1006632 - protein, 41 aa, Homo sapiens
SSARYLRLGQRRKMRRTQRSRAPKDSDEMLLALRADLDGVG

SEQ ID NO: 1006633 - protein, 67 aa, Homo sapiens
ALKASAGRHLLRCQGRSMVQVSLAGSSVGAVSSLASGAGSALSQPVFLCSWPSHVSASMLQLVQSVQ

SEQ ID NO: 1006634 - protein, 104 aa, Homo sapiens
MVHEVPTGRKLKCRFSTRIQIKITFLGRMKLDVWNVLQASVLDYWFPLLRWARPSFTCTCSRTGCHFCPHADDPGAGSTVNIGESPLYQIPRLLPSLVVYLRSG

SEQ ID NO: 1006635 - protein, 44 aa, Homo sapiens
MHLSLSDVCAGPVVRHRALSCTGHECWHLCGQRHHSLSNSTVPM

SEQ ID NO: 1006636 - protein, 90 aa, Homo sapiens
GFCACGYRNSLLPSWACDVALACRGQAQALPREYPEYAVVLLGQIPLPATPSAPGLSLVLMSGCDLVRKGVLDSPPCGSCTPCLRTPPDT

SEQ ID NO: 1006637 - protein, 57 aa, Homo sapiens
TEQLAGKGSYTPPQPHTGTPGAVRLQHPDPRGQWTVIEMTGSFTEGHRATHAEPPSL

SEQ ID NO: 1006638 - protein, 38 aa, Homo sapiens
TVLAIYLEDPFQWLKQFKAGTPPMAGRVRKGWATPGIW

SEQ ID NO: 1006639 - protein, 73 aa, Homo sapiens
ARSLFLDLHAAAVALIQPDSPLFGPEHLRVAAVSLSGFTVRAVGGKKGGVSGGKVGGQCHQGSRIRAHAAAAA

SEQ ID NO: 1006640 - protein, 97 aa, Homo sapiens
MAQQRSQWLAQVQSTDEAAKPGFTASVLPPHSTWPHDSPSRKSTASSHATASKLTTRDARIGFWKVHDPQRMRLLHPLCGYTKGGSHTELKFLKNTK

SEQ ID NO: 1006641 - protein, 35 aa, Homo sapiens
MGVTSISGKAVVLSVYDKGPFSLGSGGRHSFRTGS

SEQ ID NO: 1006642 - protein, 95 aa, Homo sapiens
MGTGGASGELLRYSDRGRWLCSTTVIAPGQAGSCTPSLPVSRHWGSSAHSLTLLLKGRGVHLQVVQAESCARRSAQSSLAGTGSPCLRIFTVRLE

SEQ ID NO: 1006643 - protein, 69 aa, Homo sapiens
YYRSYESGGEKWSGEELEVTGPLKLCACRSVSADRALGMSSTCARGEVSASATSLACVPLTLGMSLWLK

SEQ ID NO: 1006644 - protein, 33 aa, Homo sapiens
  misc_feature (32)..(32): Xaa can be any naturally occurring amino acid
ELENPRGSDCVTAGIPRTRSPGALITAVRVHXR

SEQ ID NO: 1006645 - protein, 39 aa, Homo sapiens
GPVEDVLSFPTTKNYVPHFDLSHGSAQVTGHGKKVADAT

SEQ ID NO: 1006646 - protein, 41 aa, Homo sapiens
TAQVLVSAVLGQAGSRILGHPSGLLNKGQSWILKKCRSRGR

SEQ ID NO: 1006647 - protein, 67 aa, Homo sapiens
QHEGVGAQLRIQKGIKELNLPSSVISASQIQTTPKFKLVICPDEGFYKSGKFVYSFKVGQGLPCNDP

SEQ ID NO: 1006648 - protein, 81 aa, Homo sapiens
MLATESSSSFSIETLPPPHHSSEHSSSDHMLQREPVPAMMPTMVMVGWEDGSHLRVRGLGKPSCCTWQVYLCSCPEGTNTT

SEQ ID NO: 1006649 - protein, 40 aa, Homo sapiens
MYPTHFDDGEAGDHDGRSLRLTPGPRLVNALSLPTNKTKT

SEQ ID NO: 1006650 - protein, 126 aa, Homo sapiens
  misc_feature (21)..(21): Xaa can be any naturally occurring amino acid
TRKPAAERERKKGGRDAYRSXGKATGKGGRVRCEPTITVTPQACAESPPPQALCQGQHLHGMRPSQQLCNLVPTRTFLAQLRKQQHREDELKIGQHAGRSGSRLESQHFVKMRQAEHKVKRARPSR

SEQ ID NO: 1006651 - protein, 100 aa, Homo sapiens
PQLRARRSRCAIEDALVKGLIEEELFSSALYDQEKFTTGIGMQCGYVFCEQLSYVWGARDVKRLGYGFLDDRRWMLITLLGFGPVLHAVGTPLALGNAPR

SEQ ID NO: 1006652 - protein, 48 aa, Homo sapiens
WDSSVGSDEEEVSEAVGSTPVASSGTQGHTVTTAGPVTGEQPSTQSSS

SEQ ID NO: 1006653 - protein, 74 aa, Homo sapiens
GRIACQEAEVAVNRDGAIALQAGQQKQNSFSKKKETGPGVTQLVTKNLELVCMTDPGPSKWTAVTFAQAPSHLS

SEQ ID NO: 1006654 - protein, 144 aa, Homo sapiens
GVPARLAALSRVPDCSTNACARIVLQIFRTLLEACDRLRACARVRPAQCPRYFLWPAIPLVPSLSRALSAVALGYNHQGCYPVITTAKTGPKFFLILAPPLGKFLVLLMQIPLFHLMGVVQELRQRSRGLRGSRVPLRGASAEA

SEQ ID NO: 1006655 - protein, 37 aa, Homo sapiens
LVFILVRIERASVLDVLADFAIFFTIYRSEAPVAGPV

SEQ ID NO: 1006656 - protein, 33 aa, Homo sapiens
KSGRLSPEHLIGKYSPVISFLQFSTFCKERTII

SEQ ID NO: 1006657 - protein, 40 aa, Homo sapiens
KVIVNCRIGDSASGWGTVWFYWPCARYLCAYSFGTCALVL

SEQ ID NO: 1006658 - protein, 37 aa, Homo sapiens
IECAPGSEPTSGTNSTKGLLGPHKLACAYSGWYRRPL

SEQ ID NO: 1006659 - protein, 35 aa, Homo sapiens
MVRSYAEGSTIDMGEANCLLLYLSVCSYYCCDLLV

SEQ ID NO: 1006660 - protein, 114 aa, Homo sapiens
QLHTFCGLAGGSTPDSVCLRYHQWSAAEEQRLLPVPFSGIFVPEGHPPDSSRCSPVRGVCRPLLGEECPILLLGCPSVGCTLCLSSPSAMSWVPQLEMQKSPAFCIGFTGCCRL

SEQ ID NO: 1006661 - protein, 69 aa, Homo sapiens
SCAVAHTCIPALREAKVERYRYEPRSSRSCLGNMAKARLYSKIFEITVVSVALCLDLVVQADCPSYPGG

SEQ ID NO: 1006662 - protein, 45 aa, Homo sapiens
CAGWLLVVPDIRLGALTPLCVPLPSLLLAMAPKMLSPFSNEGATE

SEQ ID NO: 1006663 - protein, 36 aa, Homo sapiens
QSTLLRTLTTCKSRFINKAVGSSLGGPQESHFIAMT

SEQ ID NO: 1006664 - protein, 46 aa, Homo sapiens
ITTEDMTIPDSNSICKEWKSSENDMRSNRIIQAELKIYPKHVTALK

SEQ ID NO: 1006665 - protein, 52 aa, Homo sapiens
YSYQVVNGKGTARIAISGVFFVYLDLPSQKVCSFSMGCTPTVVYGVFFSGAE

SEQ ID NO: 1006666 - protein, 42 aa, Homo sapiens
AWFGDCWLCHLDPTGCDPCRLVGLSAMLTETVLSVFVPFLFF

SEQ ID NO: 1006667 - protein, 48 aa, Homo sapiens
LFSVQSLPFTHCKTTTVVTFLHLTCSFGIHGVCTLMSLKFIHVVAYFR

SEQ ID NO: 1006668 - protein, 32 aa, Homo sapiens
MEVSAEYDRLVGELKLDRLLLELKHSNIGPFP

SEQ ID NO: 1006669 - protein, 40 aa, Homo sapiens
QPALEWCVAVYAICFILAAIAILLNPGAVSAGKRIHSLHH

SEQ ID NO: 1006670 - protein, 42 aa, Homo sapiens
LWEEGYWPSASYDADIVNLIKEEENVYRQVVICGKIIYIHEI

SEQ ID NO: 1006671 - protein, 47 aa, Homo sapiens
AAEVTVRELVESMLAPGTLLNGGGSFNFVTQDDGVLPPGLRKDAAFT

SEQ ID NO: 1006672 - protein, 136 aa, Homo sapiens
TYKSTHPSYSLTIQSMTIQLTNNPSDKIYPSNQTPNPYILSFHPFIYPSIYLTTPISLNVCPPKSSIQTSIHPTTHLTNQPIQLIYLTIHPYHPSIPSILPYHPSIHQSIHPSIHPYIPQTNKLKTKVMNQINKEH

SEQ ID NO: 1006673 - protein, 37 aa, Homo sapiens
EAEQRTEEKVWPEMGLTSVTQTGSAVSGADHAYCSLK

SEQ ID NO: 1006674 - protein, 84 aa, Homo sapiens
FPSQVAAANWSRRHVCALHMIVVRNCSSFLTHDGIRQTYCTEPNNLKARNSFRYNGLIHRKTVGVEPAADVQGVVVFINREIRP

SEQ ID NO: 1006675 - protein, 137 aa, Homo sapiens
CTDSAGDLEDPCQLRLSGTMKPNMAVWKQIILPFIQDLYDLHVKSGADHTPHLLQPACEVHNNFPSSVVIYDIKFAICNHVFLITCEKADDDFGARSNMHLAFASLCGIVDTLESICQDMHAHHCGGAERWRKEESG

SEQ ID NO: 1006676 - protein, 118 aa, Homo sapiens
GSIDKPTYATKWTIRHGIISTARDLIGKFMEHVVHLNIFELNLRTIIIYIGVTISFLLYSVTRQQLPLNTPEQQSVSCRQIMFESFNVPGLYIAVQAVLAYGGHLGHLDKWVHVRKRG

SEQ ID NO: 1006677 - protein, 48 aa, Homo sapiens
HSPLSGVESGDYVQKLHLERGRKTKEDTGHSASDPHVWLERRELYYSV

SEQ ID NO: 1006678 - protein, 148 aa, Homo sapiens
ALPVCTWILNCRRPTGPLDSQLVQTRGGWTGDQCGLAPTQRMPQVGGQDRTPPDLGGTVMSYPNPKGALHATHGVRVIWQPLPVSPMSSLDHLRGGEGTQEAEVVLLSGSPHPVSTPVSGGFGYPGALTANPTRSRPFPAHETPTRTC

SEQ ID NO: 1006679 - protein, 76 aa, Homo sapiens
MPSAVTHASYPRHLGRPEVAVALFQRFKTGLGNIGDPILHKKGETIRKHEICEYPRSLDSFLPAEHVRQCRTEESG

SEQ ID NO: 1006680 - protein, 68 aa, Homo sapiens
KMDDDMSVTWNCINEPRISGKRILARQRGGQTAKGYEHDIAKKLDFILVGNEMLLKNFKQLCAHQFCI

SEQ ID NO: 1006681 - protein, 30 aa, Homo sapiens
MDEMRYHRAATHMHVRTRHVLSTYREQSLR

SEQ ID NO: 1006682 - protein, 39 aa, Homo sapiens
MSRVEVVTAERGEWAHSPLSVCALMTGVPEARYSVNHES

SEQ ID NO: 1006683 - protein, 59 aa, Homo sapiens
LGLDFEECMVLPVRGLHEDLHPTSVVREYQVEDGLLTLSVFVIQEMSPSSSYGARGAPL

SEQ ID NO: 1006684 - protein, 59 aa, Homo sapiens
RNHHAFFSPSEPNQGVELVPINVIQLLHSLYNLELLCGFNIHNEHKCVVIIYTYFMAET

SEQ ID NO: 1006685 - protein, 130 aa, Homo sapiens
SSAHAWFGVVLQVCGWASDSPMSFLFKLEILGLEALDSFGVRVDSGRLSRTLVRSLPLGGPASSVIPCSSSFNSSSTSSLVHLLAAFSSFTFPVFRRDFEVSRFYVGLVGLISRIICEWYLVFTDEDFFF

SEQ ID NO: 1006686 - protein, 41 aa, Homo sapiens
LLVVAVAEKREKLAERRGGTWQEATCCYLSIDYADAVYWRN

SEQ ID NO: 1006687 - protein, 138 aa, Homo sapiens
SGSIAGTHVWTGECGGTRKLGDTKNHTEPQTGCHSSGFGELLGLGFLKGCSSSLLVTHNVESGAGHFSLICVTPLSVPPFGGSRVLVLRPGRMRYADSWRVSKKERSFIGQQNSSEETHGGELFLQAGHPDEYPALSR

SEQ ID NO: 1006688 - protein, 49 aa, Homo sapiens
AQVTSSLSCDQLINISLVFLILPNEHLSAPKLCLLLCELWASQLCLPGK

SEQ ID NO: 1006689 - protein, 36 aa, Homo sapiens
PTTSVIYSILGMHTVDLGLCTRRFFLCYLFSSSGRG

SEQ ID NO: 1006690 - protein, 44 aa, Homo sapiens
MYHNLLHINGTSVDDDFHTPITSKAFLHLAEPSYGPAVSADATH

SEQ ID NO: 1006691 - protein, 77 aa, Homo sapiens
QGSQPRPTVGSHAAKPPRQVLPLLRGAQSHRGGQGLRSVGARHETGGQLRLQPWHGIHYGEASWAPESGGDLDNFYV

SEQ ID NO: 1006692 - protein, 43 aa, Homo sapiens
PVLCIGVQPAQQLQWNLTQITQQIAGMNFYGAHGMMNYGQSMS

SEQ ID NO: 1006693 - protein, 55 aa, Homo sapiens
LRGSPSLHLLQLIGVKKKHFSILVDHLCDMEMVNKVGQTAFDVADEDLLGYLEEL

SEQ ID NO: 1006694 - protein, 37 aa, Homo sapiens
EIVPLHSSLGNKNETLSQKKRKKVRLLQELPWVLRIR

SEQ ID NO: 1006695 - protein, 62 aa, Homo sapiens
MTTSSYYLPASHVVDQGSFFILSLRQDRGSTCLSWQCMCCNSWLYCTPYPTGSQVDPSCFRS

SEQ ID NO: 1006696 - protein, 39 aa, Homo sapiens
APCPVIHVAVHVVTFGHCPAQVHGDWAPLAFFLWLSVQV

SEQ ID NO: 1006697 - protein, 51 aa, Homo sapiens
MPLLLLHPSAPMLVYGSCGLADSFSTGSYLGVHGSYVQPGHTRLVADVACG

SEQ ID NO: 1006698 - protein, 59 aa, Homo sapiens
ELGQINVIQLLHSLFNLVLVGFNIHNEHKMCEKSSLFFMADSVVSGNWAGYSVVSGNWA

SEQ ID NO: 1006699 - protein, 48 aa, Homo sapiens
SIIPTRCCCLIVVPLQVQGLSAISRPLPSLLLDIAAPKMLSPFSNARS

SEQ ID NO: 1006700 - protein, 42 aa, Homo sapiens
GPCAAHGGVENQVGSSGFHFQALALRRTHWDLSLMAARVDHT

SEQ ID NO: 1006701 - protein, 35 aa, Homo sapiens
TCCIRLYYNILENTQARNLGVILDTFSSSLILCIQ

SEQ ID NO: 1006702 - protein, 59 aa, Homo sapiens
LCVLVSELHCVKRSAYWCLSMHCVNALRLVSDMHREALCMLMSDTHHDADLCIRVSDMH

SEQ ID NO: 1006703 - protein, 69 aa, Homo sapiens
LKNKNKKNPTIYDTLTANLILNGEKWKALPVRTRTRQGCLFSPLLFNIVLEVLARTFRQGKERKGIQTG

SEQ ID NO: 1006704 - protein, 70 aa, Homo sapiens
  misc_feature (42)..(42): Xaa can be any naturally occurring amino acid
MGRRERKAAFKGDSGGPLLCTLWPTASSPMESRRGYSRSLHXGSQVSCPVIRTTMRSFKLLDQIGNPPRS

SEQ ID NO: 1006705 - protein, 88 aa, Homo sapiens
VPPRGRGSLRSIYHATGPLEERQIAYVCRDGLMGLHHLHSQGRIHRDFEGAYLLLTLQGDVPLADFGVSGELTASVANRRSFIGTPPA

SEQ ID NO: 1006706 - protein, 40 aa, Homo sapiens
MVTLTVDNVHLEHGVVYWVCEHGRRLVPCAVEDRGAPRVL

SEQ ID NO: 1006707 - protein, 34 aa, Homo sapiens
MVALLLTLILCTLLQLKGSHVHLPIPLAPSGMEA

SEQ ID NO: 1006708 - protein, 69 aa, Homo sapiens
ADVYHVPYGKLKSVIVASVDDIQCVEEFECQCHCGKPQLLRETMNTSPGTPAPSAEETINTIPGNPPRT

SEQ ID NO: 1006709 - protein, 96 aa, Homo sapiens
ADCTIKTDPVTVRSRGIGFVLFKDAASVDKGVELKEHKLVGKLIDPKRAKVLKGKEPPKKFFVGGLSPDTFEEQIKEYFGAFGEIENIELPMDTKT

SEQ ID NO: 1006710 - protein, 38 aa, Homo sapiens
LSPSLLFFSVQVLIHISLCLDEVAMPRGLTLWKHFAMD

SEQ ID NO: 1006711 - protein, 74 aa, Homo sapiens
TLDCVTERDSISKPQNERDNKQKTHGRLLLLDSECSPPRSAEEEEADICQPIHRQAHFRLRPPLSSGAKNPAPW

SEQ ID NO: 1006712 - protein, 114 aa, Homo sapiens
PAVAVISATGLFLCGFCCSLEAGHSGQPMHLERVWELGSVERPCRMQAPVSTSSPIQPDAEPVSYMTDPVRVQGPPLLPEGLGPLRVAKLEKITTLGGFLGRDMDSQGPTSFQG

SEQ ID NO: 1006713 - protein, 101 aa, Homo sapiens
MGASQAHTGGENLFSRACWGRCQPVSSRGLSSSPSRPRDFLTLPGITVQAGRLFSGSNYFATGSLKTARIGGYCQRLEENPGSKGIVGESRAHPVFEALVS

SEQ ID NO: 1006714 - protein, 43 aa, Homo sapiens
CVSVGSVPIGGRIAFAWYRAGHPCALVSFMFQACVMASAGRMQ

SEQ ID NO: 1006715 - protein, 136 aa, Homo sapiens
EEEAQMNGRGTRWEGGPGQVSALLLYKRTEFSEQKDCSLQAGIPPNLQAGLLCAQAPAWCPPSALSSATLSFPGVSTVVLGAYDLRRRERQSRQTFSISSMSENGYDPQQNLNDLMLLQVERMVPPVIPAPREADV

SEQ ID NO: 1006716 - protein, 75 aa, Homo sapiens
SVGSRPACPGSRELRVDLVDFEGYTYFAKYKSFNGGYEAEKYKLVLGAFVGGCLDSKTAPDIGVYPRKQDKASDS

SEQ ID NO: 1006717 - protein, 43 aa, Homo sapiens
SGDPRSGCFLALGRKLGPSIQAQGKHGLLLQNTQRAYAGERRS

SEQ ID NO: 1006718 - protein, 42 aa, Homo sapiens
LWGTWSVQPKRNRTDQKQFGKASNRSGMEGEVTIQGSGAVWH

SEQ ID NO: 1006719 - protein, 82 aa, Homo sapiens
  misc_feature (66)..(66): Xaa can be any naturally occurring amino acid
QNTGDLCLWPPGDDTMAHMYSMTLRWKVRRRKTSDLWPITRPAKARRCQHGLQWSLSFVYTVLTEXGTQLTRAVREEYRARN

SEQ ID NO: 1006720 - protein, 113 aa, Homo sapiens
MSIPSEQLLDSQGYCPGLGHCLQHISLVILDSLQKCVFSFDSHCQEKASEYIAAILELSALVTKGHQQILLYIDILYYLNPNGQRFRKDGRLVHEFTDAVIQERRRTLPKQGV

SEQ ID NO: 1006721 - protein, 59 aa, Homo sapiens
MQSIPLVAMIPRAIDRATCAKHSGGCMLQTTTQKAQPHMPGRRPPRYFKRQNARRTKVR

SEQ ID NO: 1006722 - protein, 58 aa, Homo sapiens
MPCPNWAMSVRCSSTSASSGSWNEIQPKALTCRGDSWIGHSALPRSWNRYVSSCLEVF

SEQ ID NO: 1006723 - protein, 135 aa, Homo sapiens
RIHGMHMSPANLVFLVETGFLHIGQAGLELPTSGDPSTSTSQSAVITGVSQCARPQPDKFLQSEPRGNSIQSRHWTSRHPRAPYGCLTDIHPHPKGPPAFWNDLALSSSWVNRFLQCTLEYTSTCVSHFFSILAT

SEQ ID NO: 1006724 - protein, 126 aa, Homo sapiens
MAVATIWYLRLTELSSPWDGVPEGGVGCICDVLATWPFQSLGFGESQLTWVDIAHQHSTAAVQKHGQTASLGGSRIHSSALFGTSQLGPPAAPTGVLLLTVISVFFLGWSSLDGGAGHHVCWFCNL

SEQ ID NO: 1006725 - protein, 38 aa, Homo sapiens
AASAAVHGGKGLQSQVHCVMMGGGSVLQAGGGVGTGQQ

SEQ ID NO: 1006726 - protein, 38 aa, Homo sapiens
LAFCHLGRLGSVSEAKVLFACEALKLTTKLQIPRQCAL

SEQ ID NO: 1006727 - protein, 97 aa, Homo sapiens
MSFPRVGVVDPKLGATVGLGKNRHRVEQGGGGHSLPVGTGRTAVLPLCLGVIVPEREELLLQLVPALQAGPQPVRVDHVQVSALLCLAHLLCARSRG

SEQ ID NO: 1006728 - protein, 50 aa, Homo sapiens
ALLSHADLSIPPALSSFSTHAYLMLEPHLLAVFECLWYGFGRAVWVPPTL

SEQ ID NO: 1006729 - protein, 50 aa, Homo sapiens
MKVAGRCKQWPLQHNPSCLHLGTRPAEGSRETPVVGEAWTVQGPPWDAIR

SEQ ID NO: 1006730 - protein, 88 aa, Homo sapiens
SGITGMNQHFTFFQSMFYFLLKPYMTPHCLHKFPTWPLGPSDWPHLPTQSQITLAPAIQIRAHSAGHAAPTAWKTLPNFYLADAYSTL

SEQ ID NO: 1006731 - protein, 57 aa, Homo sapiens
HYHAEASQSQVQLVSFDVLKLRSELEEWRACIAGVPVPAVLHYFIDCGRAAVGRCLE

SEQ ID NO: 1006732 - protein, 86 aa, Homo sapiens
LEDPPVLHADIPEVVVSLVIVTKAWVLSIQASGKNMGCYCRIPACIAGERRYGTCIYQEKTLGILLLSLQKKKNELKIGVEQKVQE

SEQ ID NO: 1006733 - protein, 73 aa, Homo sapiens
SRVQLAIVQSHAITGHCNAMTEELRATPQAQAQVQGRALSRMLYVGIECWPSFHAACRAKDAASEWYSSSNFS

SEQ ID NO: 1006734 - protein, 48 aa, Homo sapiens
VALEDSPSTRLWKETVFTTSPYQEFTDHLVKNHTSSLRCSGLRTRYRD

SEQ ID NO: 1006735 - protein, 41 aa, Homo sapiens
IPNSPVKKWNKENSEGFFYSLTPEQSTQDFCDQIVWEFSPP

SEQ ID NO: 1006736 - protein, 70 aa, Homo sapiens
IREYPQNFYTAAPSLSVCAAPSTLSHPQQIALLDQSKTLAESALQSYTLPRRLVVTQSKQLTPKEALEGG

SEQ ID NO: 1006737 - protein, 81 aa, Homo sapiens
SEGEGLREAGTRKQRITETESAYQELQAQRSDVYCDLNTQRPYYKLALIMTVSNMITWIQPFLKPNLDLIPSPTAIHTHRV

SEQ ID NO: 1006738 - protein, 61 aa, Homo sapiens
YVCRNPTSRVVMIQSSSHASAHMVSEQRMDATLILRSTQESSEEERNIKIQNCKSNKGLGN

SEQ ID NO: 1006739 - protein, 51 aa, Homo sapiens
MAETAHYNPQGVSSFFVPMELVCSFIHISSIISPDSATIGPKQLRAGLQFA

SEQ ID NO: 1006740 - protein, 71 aa, Homo sapiens
SVCVEPPTVCDGLLSLLLHGHLHLGLLYAIVGHWPPMAAIRWHHGQSDPFPNGSYYLISSWSGRQRQVIYQ

SEQ ID NO: 1006741 - protein, 67 aa, Homo sapiens
ADSGLDRWDSPASPSGPIFQKGLKDGTILCTLMNNAYSRVLRCRKINQLHAVHWHQARKPVQASSKA

SEQ ID NO: 1006742 - protein, 50 aa, Homo sapiens
CETPRRLACGIFIASGTRRYNQTQSGSQRQKGDVRSVLASTGSALGRAGH

SEQ ID NO: 1006743 - protein, 38 aa, Homo sapiens
MDARRRESEKSLDHETVYKEEDWQSPTSKSLNLISPYR

SEQ ID NO: 1006744 - protein, 62 aa, Homo sapiens
MVTLRGSRKIELRSQQPGVAPTACDYTKAWEDVLQEASASGHRMVCPGAPPGSLVHDLRVPA

SEQ ID NO: 1006745 - protein, 37 aa, Homo sapiens
PPQYSVVQFTWIESSKLHVLRISLIIRLILTKLHRYD

SEQ ID NO: 1006746 - protein, 109 aa, Homo sapiens
LIVRITCGLLKAHSPSPICRVRWLLKAEEHALEPAFLKLLKSRPLEAKTKPAPFQTKYSQRERSQHAPSFAHFWYLSTLTAGSQRCWFWKSSGLILLLKPAFRGGLDNG

SEQ ID NO: 1006747 - protein, 83 aa, Homo sapiens
GSSEEGGEEGEEAPECGRQVTPGFQSELRAWAMENQYIRHLGQTAESEVALVDTESHQSTILRALNSPFQRGTHIFLKDWTGI

SEQ ID NO: 1006748 - protein, 66 aa, Homo sapiens
MYPQIERGDKLICLSPSGHASCQVHMWTGAMLLCVSKVGGELARLTVLEGHEFYSEVLTEYHGGSQ

SEQ ID NO: 1006749 - protein, 54 aa, Homo sapiens
ADDPSMPCELPHMSVYYTNGLGWSTTMKQWQCVHLEVGSMVAPSMCSSFLDVHV

SEQ ID NO: 1006750 - protein, 65 aa, Homo sapiens
VRSSRGDCYKDGIVYPIWLSIDHYLSRLRLVSEIRLPGASTGLGLFCKRLRRPWSLEVWNSYASV

SEQ ID NO: 1006751 - protein, 35 aa, Homo sapiens
DFALQRLGHAAIQMSMLLGVPYCSISFLANFRFLS

SEQ ID NO: 1006752 - protein, 61 aa, Homo sapiens
SELPFLIQSLALLTLLAAPPDTLTWSPEQADSSLVLILPPWLHLLFFLAINVGVPSGSVLS

SEQ ID NO: 1006753 - protein, 47 aa, Homo sapiens
SLRSDWRHDRMKILVHILINSQRDLSRRWRKRRGEGRYYSFYLIDKE

SEQ ID NO: 1006754 - protein, 45 aa, Homo sapiens
QEFLAVGCAPPGVARPVFGVPSPLHDVTAMTGEVRSPHLSFAMIA

SEQ ID NO: 1006755 - protein, 63 aa, Homo sapiens
VFPVLEFPLVLAGGLLFEAVSVLRVGSCPASVVLFHVRFSQQAELSRSRVHAIGEKVSLVQCQ

SEQ ID NO: 1006756 - protein, 35 aa, Homo sapiens
AAGAWDHLVRVHLGIIPLFLGSHMDSDQISAKPQL

SEQ ID NO: 1006757 - protein, 31 aa, Homo sapiens
MVVMAYSSCTPDLRRILTDYGFEGHPFRKDF

SEQ ID NO: 1006758 - protein, 56 aa, Homo sapiens
SPPETVDSPDRLCLIPGLVLCFSGGECSPPGSTAGTLYVGLILRVHDGQSLLSMAS

SEQ ID NO: 1006759 - protein, 35 aa, Homo sapiens
PLHNYLMFLSTWDRGTVPQPSILKPRPCEQASLSF

SEQ ID NO: 1006760 - protein, 85 aa, Homo sapiens
WPELPGSGDVPEVSLELVATHLFDGVICCRLPRCRLSLSPHCGSVLNKERRVGRQALSGLTSPPHFTGRGLFAPVRIHLSMQTRE

SEQ ID NO: 1006761 - protein, 55 aa, Homo sapiens
MSEKLASSALAAHLPHVFFVFPCYLYYSFSSLEVDSSIPDFLHLAPIIVIRNRLI

SEQ ID NO: 1006762 - protein, 122 aa, Homo sapiens
SSPDLVGIRYGDRREEWCRWGSQSRLRDSGTDDQEEEPLERDFDRFIGATANFSRFTHLGSGDHPLPGCHSAMGLNLAKPCGKKYTQSSPRTENQSKKFKAEIPIKQITSSKKPIPSTPIKE

SEQ ID NO: 1006763 - protein, 43 aa, Homo sapiens
LTAYTMLIFQVDITLPCQLTKNDAVLCAGPMQLLHARALLSDS

SEQ ID NO: 1006764 - protein, 33 aa, Homo sapiens
EYPPQLGHDGSWSSSTSWYFSISSSSTAKPLAA

SEQ ID NO: 1006765 - protein, 118 aa, Homo sapiens
INFFEMESSSVAQPEVQSMCFMRVACEETTKQALCEQHGCLFHLGAGGLSPKRESAKGGGLSLVLTGFGIGGEEPCIAGRGGSHKVHSQGWGELQRTFLRVGEITTYLLKGGGDYQVH

SEQ ID NO: 1006766 - protein, 85 aa, Homo sapiens
KSVGPPQQELFSERDFMQILQALTFSQKSNARASISAEYNVSKQTQILMTCHKKSQCTSIMCFPSFRSSVPYVDHMGPDALMAEF

SEQ ID NO: 1006767 - protein, 39 aa, Homo sapiens
PLLGLVNRVSCVLLYSSDYLHSCFSTCQPQPPDAGVPSS

SEQ ID NO: 1006768 - protein, 58 aa, Homo sapiens
TPDSCVEDDKDALGANSVVCAAGATRLDEILIRGTSGLFPKANPCKLETTKTYREILT

SEQ ID NO: 1006769 - protein, 71 aa, Homo sapiens
RTPRVLAERAHCRWSGLSRYLVRRTGVFSYLPVSMPSYFCQSPMKTLPAARRGLLPEQGPRAQSARLSKAS

SEQ ID NO: 1006770 - protein, 136 aa, Homo sapiens
ILEDSPPVDPCHGPAECPACHLINLHMLHKGQIATMVIIEWLVILWQGSMDRVVANIFELNLQDQRFLTGVTISFLLESVTRQNLHSIHQNTESISQNLCVNHLTYHDSTLQFRQRWPWRPLGHLDQWVNYVNGDS

SEQ ID NO: 1006771 - protein, 90 aa, Homo sapiens
SLSSVTQFTLHANMLSCRKRLIAVLVDSWKIGLEFFKFLVMLPLLIFFLASPCVFRASQTIHLLGRFAVRDLIQPVALGVLTAVHYKAAG

SEQ ID NO: 1006772 - protein, 72 aa, Homo sapiens
QTVQSYPSYATTGCLASFFKEVVRRWYSEKPSISMTCGFFLDLFAIPVHTKEGRWEKLGICALMVGPTPLIH

SEQ ID NO: 1006773 - protein, 121 aa, Homo sapiens
TCYEGKMPKEKRLVRENKAENCREREKTTKSIWKHYRFSLTSSVMPQWNVTWCQMRQKNKAFCYFCNSVQKLPICAQCGKTKCMMKSSDCVIKHAGVYSTGLAMVACFCDDHTRSKVFKRE

SEQ ID NO: 1006774 - protein, 32 aa, Homo sapiens
MPQETGGGTWVESTPAGSVYYRVKHREMYGML

SEQ ID NO: 1006775 - protein, 92 aa, Homo sapiens
LSLSRIPKLLTVQEDFRAIRDVREIKVIDRKDSRMAIPEAIPQQPSGLLLGYFYGHFLIIRQNKGWIIREFSRKRVSKVSELRLPTLFRPYR

SEQ ID NO: 1006776 - protein, 45 aa, Homo sapiens
VICIAALGRLPVNLPGGPGVPLFPVPHYHYEHQCLPTPAAWFAHH

SEQ ID NO: 1006777 - protein, 39 aa, Homo sapiens
GTEAVYLAQTGVVHGPWDKKGCQLGDLFMGAEVGQELAQ

SEQ ID NO: 1006778 - protein, 36 aa, Homo sapiens
RGSPNSCTLIYSLGSQSARIAGMSHLGLAKTPSLFY

SEQ ID NO: 1006779 - protein, 37 aa, Homo sapiens
GVSPPRSHYAYTNTDTSGPLQKRSQGSSSHKGKRRVM

SEQ ID NO: 1006780 - protein, 38 aa, Homo sapiens
MLLVSQRIQFLVPTTAAPPGLLLYDAYRVCQLNEHAEC

SEQ ID NO: 1006781 - protein, 60 aa, Homo sapiens
RSIMLMARLTWASHEKMQEGDEGPVPPPKPGLGEWHPTKDHSWPMITCGHGPWSTCHGWP

SEQ ID NO: 1006782 - protein, 54 aa, Homo sapiens
LPVALKANYEPLSLFCKLRLQKHVKLTPPMMAYPSMTFSWTAECKSTRVQHYVK

SEQ ID NO: 1006783 - protein, 127 aa, Homo sapiens
RVSPPCLCFPDENFKLKHIRAWLVLSMADALLRHQRLPVSSSRTVKTAWLYCQHVVFGKVLEGMEVVRKVEEHPDRQSGINPLRMLLFADCCKIEVEKPYRYTDIMQVPLQKQSQGSSSHIGKRRGD

SEQ ID NO: 1006784 - protein, 81 aa, Homo sapiens
MHLCKFIHEMRQLSPTCSGTGNDDRREEHRSALEEGHCAHGDAVVSPPPHIMPTRTETHAGAFAEAMSGFFKSQREALSKC

SEQ ID NO: 1006785 - protein, 101 aa, Homo sapiens
MLFWATGFGEPIGKRENNSGITLSCACPIISYIFHTLCSEMVLKYTCINVHLGSLVCYGRQGMSSYSRLIMLLRSGPHPRASLLILIPVFPLLYHVTSSSL

SEQ ID NO: 1006786 - protein, 47 aa, Homo sapiens
EISVSLPQNVDDYMNCGFVAQRCRTTLALNHTVLITVFISCAFSVSS

SEQ ID NO: 1006787 - protein, 66 aa, Homo sapiens
NLDSVSRLLWKPGAWQAAHLWGVDVGVLVRVWKLRVQAPHSGAPRLGGAPHDSGVGAAASPGGGRG

SEQ ID NO: 1006788 - protein, 51 aa, Homo sapiens
ARVTISHTRWQSSASEREGPRALLQLSCTLDWSFLLSQVRCFRVHWWRLER

SEQ ID NO: 1006789 - protein, 73 aa, Homo sapiens
RGSPPLPSALHGCSIAFFPPASHSLSLILGARVAATLRGFCVTGSWKCHRVSELRASSISIPGGITTWHLCAT

SEQ ID NO: 1006790 - protein, 45 aa, Homo sapiens
MQAISCLHWRAGAGRDNELGIVGRGDWPGSAAVRMLTVCSGPPVP

SEQ ID NO: 1006791 - protein, 51 aa, Homo sapiens
LCAPTVLPSLGAHRGSCATSSTAAATAAATTVHGSQANGPQPGDDAGGGQR

SEQ ID NO: 1006792 - protein, 36 aa, Homo sapiens
EVQSEEEKREDKEDEEDEEDDDVSHVDEEDCLGAAE

SEQ ID NO: 1006793 - protein, 52 aa, Homo sapiens
YDAEASQSMCAAGRTSPCMSKPLAGAECDVSQHVAHGQPVNGKGTDTVEVHE

SEQ ID NO: 1006794 - protein, 98 aa, Homo sapiens
PPSSGIRRRDALYIQCKNVLKIRRRELMNHHKYRKLVKNDAVPAEDGPGGTPEMHARSRIEKDLRRIWLKAGLKEAPEGWQTPQDLPAGANESGAALS

SEQ ID NO: 1006795 - protein, 39 aa, Homo sapiens
GHVGWVLVLQGGGTAIRGAIILVSSPSSRAREATGGGRG

SEQ ID NO: 1006796 - protein, 57 aa, Homo sapiens
MATLQCVLERPYQSGSVPPTRGTMLLRRRPGQGGTNTLMSTNVSKSHRRNFHKEEKP

SEQ ID NO: 1006797 - protein, 38 aa, Homo sapiens
ASALTCLPSQRDLSAFTWCEGAIWWRCLSSLVLGAGRG

SEQ ID NO: 1006798 - protein, 43 aa, Homo sapiens
SHASTETEKNSGVRGGVTMHVAGTAVHREQEDPLVTQLPKVWV

SEQ ID NO: 1006799 - protein, 45 aa, Homo sapiens
  misc_feature (33)..(33): Xaa can be any naturally occurring amino acid
GHGVVASSQHMARTVYCTDVGAGLLSMCQRNIXLNSQLAATGGGI

SEQ ID NO: 1006800 - protein, 33 aa, Homo sapiens
MNYLANVMSLYEVELNLGLGCVLYLNYCSRNLM

SEQ ID NO: 1006801 - protein, 50 aa, Homo sapiens
RSQEPSLYHCVDSMMAKGWSWSPRTLTTYPSQSGQFKEEESPITQVGIKY

SEQ ID NO: 1006802 - protein, 120 aa, Homo sapiens
SVPTQSPASLRVVFPSRLPPSHRLGRLPRQAPVRGSVEFPLEALSFNGSLRQTRAKPPELLSAPATLRRQAAEHVDAIKGLGRAQQERLCQGVGAGSVGRPLLTGVDRHAQRTQAGLPLK

SEQ ID NO: 1006803 - protein, 85 aa, Homo sapiens
CASGLTATSAAFALLPLLLLGLQCSPRACMSRLAAWNVSILGLQVQGLVLLALVEFPEVFFLSLVNNCENTGNWFSGKRSGILRR

SEQ ID NO: 1006804 - protein, 30 aa, Homo sapiens
MEDLRHHVQASWRFFSAYLPAAESGGGIHL

SEQ ID NO: 1006805 - protein, 35 aa, Homo sapiens
FFWSSLRYPRYCARLYLSAFPVDNPGDPERVVTGT

SEQ ID NO: 1006806 - protein, 31 aa, Homo sapiens
MTGFYHCWPGRDELHTVSSRPLLGGCRRLPS

SEQ ID NO: 1006807 - protein, 41 aa, Homo sapiens
EDPRVATSLANICSNKEPVQEGMCYCEFQLLLLPDDLCLLP

SEQ ID NO: 1006808 - protein, 48 aa, Homo sapiens
VTPPTGPVVFPHARTYATGTWHDTTLPYVPHHCLRRTTDDATTTRDHV

SEQ ID NO: 1006809 - protein, 159 aa, Homo sapiens
MGSVTVSARTGGGERSKMIDKNLRRTERRRRGRCKLLLLGAGESGKSTIVKQMKIIHEDGYSEEGCRQYRAVVYSNTIQSIMAIVKAMGNLQIDFADPSRADDARQLFALSCTAEEQGVLPDDLSGVIRRLWADHGVQACFGRSREYQLNDSAAYYLND

SEQ ID NO: 1006810 - protein, 46 aa, Homo sapiens
SGLAVVRQNQHQARAYSAAQFPPSSILSPALRMVLHHDECRTCGLG

SEQ ID NO: 1006811 - protein, 121 aa, Homo sapiens
MWLYYEEEEFETRLKEKKQEICLMSSGFLGDAVGTNGHKSLPHGLIGMQRYGPTPSYSKLKIPGLNSPIPESCSFGYHAGGWGKPPVDETGKPLYGDVFGTNAAEFQTKTEEEEIDRTPWG

SEQ ID NO: 1006812 - protein, 40 aa, Homo sapiens
SELVDDLVLIANSCASRFPAILLPQTPEELELQARFTTQA

SEQ ID NO: 1006813 - protein, 81 aa, Homo sapiens
SPPFPLRVPSRSFGALQDGSEAYLVGLFEDTNLCAIQCQTCNKLCHIDIRASTAAYVEQRGYETSYYDRENIFAVPVAAKF

SEQ ID NO: 1006814 - protein, 114 aa, Homo sapiens
  misc_feature (47)..(47): Xaa can be any naturally occurring amino acid
MNVESIEVIVRRPKRCCARSDWQEDTFPAGGCANNSSLCPASRCLPXMLQSNPSMLTSGSHPQAIVSSSTPQYPSAEQPTPQSPFMVSPAPGPFCSGLCAKPPSGVLSTGSPFF

SEQ ID NO: 1006815 - protein, 49 aa, Homo sapiens
NFSSRSSYSAQDISLGTGGAHLKKIREESNTKIDLPAENSNSETIIITG

SEQ ID NO: 1006816 - protein, 59 aa, Homo sapiens
MPQVPNNQFRFGGLREISQAAAVVIEGIGPGQDACQEPGGPHLQQEPALGILAYVKPSC

SEQ ID NO: 1006817 - protein, 43 aa, Homo sapiens
ELGTLAGVVLIVLDELRQAKVCDLARQLVPNQDVGCPQVGGSS

SEQ ID NO: 1006818 - protein, 51 aa, Homo sapiens
MARVIDVAKPAKTLECRSKATMCGTLRLSKESHLAQSYSSAMALHRRALRD

SEQ ID NO: 1006819 - protein, 82 aa, Homo sapiens
MAMLKKKLRGQALALRRGPSAFRLCTQRGLGSWNKDPKRSPILFGPKGFCQTSRMKGHALPSKGWSHGCTKERVAKGSGVTG

SEQ ID NO: 1006820 - protein, 129 aa, Homo sapiens
RADRNLIICAAILKRHYDQREDYPSPLKTNTKLKFKMFFGGEGSYDLHFGNHLLPDTEAVCYSELPRKESRTILSLTSIHLFLRESEAMSPYILQLKKTALILAVQHITIQAITAEAPRPATGAGVLSA

SEQ ID NO: 1006821 - protein, 49 aa, Homo sapiens
ADSIAGWRLALRALDVLLGVYPSLAIVGATDDIYICFPSNLSCCQHKVF

SEQ ID NO: 1006822 - protein, 99 aa, Homo sapiens
SLTLRWMDEEPVAREIAIAILDSSLPLMSSFWSDKTLTVYCYYLFPMYKVALASNTSLFLLQISYQINVLDKSFLLTVFIFGLGQTQLAEGGPPPRESS

SEQ ID NO: 1006823 - protein, 89 aa, Homo sapiens
MRTSLSTTVWLGEHAREARHQRLQFFITTVKTAWLDSKHSVFGTVLEGMEGVRKVESTKTDSRDKGLKDVIIADCRQIEVEKPFAIPPP

SEQ ID NO: 1006824 - protein, 37 aa, Homo sapiens
GSGITCILTDEMLPQDSLTHAHSLLKKQADHHDPHPS

SEQ ID NO: 1006825 - protein, 48 aa, Homo sapiens
MWFVQFQNSVVCSEGAVTRCLECLTPAITQALPLVPTLSAYATGPHFP

SEQ ID NO: 1006826 - protein, 60 aa, Homo sapiens
MRILCMGSVRERDGQGGGERSKMIDKKLREDGEKAARDVKLLLLGAGEVRERAPIVQADE

SEQ ID NO: 1006827 - protein, 135 aa, Homo sapiens
LEDPPASGAWLKELINSEHAIDHFIQKLPSELQGSLLSDKANKRLAYLTYQDIRAVCDFKEQTVIAVQAPPSDEDCEVPDRDLGPTCRYISGSPDGPSKSTSAQSRCRSRYVLPRSLSPLPSSSARALSLTCSAA

SEQ ID NO: 1006828 - protein, 52 aa, Homo sapiens
EEELSTDSRVLFSMISIYVDEGHKKMDLNSYSPITNACKFLIMKSRSDMSYT

SEQ ID NO: 1006829 - protein, 37 aa, Homo sapiens
FVVLSSPRGLGWVLCHYGTTYYLHYYAPPSPFCSSGR

SEQ ID NO: 1006830 - protein, 45 aa, Homo sapiens
AESQCQKRHPGLSVTEENTSATVAEKRPMTSSSWGSWCITSGCRI

SEQ ID NO: 1006831 - protein, 34 aa, Homo sapiens
SAHLRLLIGGELYTLLADRLHGTSAVYITTLSGS

SEQ ID NO: 1006832 - protein, 88 aa, Homo sapiens
  misc_feature (70)..(70): Xaa can be any naturally occurring amino acid
GLVGTWWLRQRGLSARHRLCLDLRALVLWSSESVKFSSSEGLQCTLMVGLVLLGPWTPSVCSHWNSLHAXAWTSPGKGRRQCGLAPGS

SEQ ID NO: 1006833 - protein, 36 aa, Homo sapiens
MVFRQPLQSRCSSIPAIRRTPESHSSTSVMPCISLR

SEQ ID NO: 1006834 - protein, 34 aa, Homo sapiens
MCASVESAFPPPPVPRLEDIISPCAVWREVASSP

SEQ ID NO: 1006835 - protein, 39 aa, Homo sapiens
SIPPDVWGLASQQHLPAGIYHLWRASSSVKHPPAALQRR

SEQ ID NO: 1006836 - protein, 32 aa, Homo sapiens
MVYKPGCVEEVSERPRYNHAVYRQRETTNMMD

SEQ ID NO: 1006837 - protein, 39 aa, Homo sapiens
DTREFQMESKCRLTTKYFGTFLPEVDKKFPNMKIQIHVS

SEQ ID NO: 1006838 - protein, 33 aa, Homo sapiens
LELSPSLHSSPCAEATWGNKIGYAPHLSLDRGA

SEQ ID NO: 1006839 - protein, 33 aa, Homo sapiens
VHCRPPHQHCICQCGGVSTSMTELHQRVPHERC

SEQ ID NO: 1006840 - protein, 33 aa, Homo sapiens
LKKESEAVASGSIRPISYRTDYGVRPVLRLETA

SEQ ID NO: 1006841 - protein, 138 aa, Homo sapiens
GGRPRWICEGRLKCNVVISAALLPSASQGSLRFSCFVLLSYSRLLCSVALPAKEECSRDSSFKDGGLSHTEQHFLYIPEARDANRTRGIDWHSGSIPGLLGISWIAAPAARAVLGFTARFYGKLSHGRDSLFRPGSFR

SEQ ID NO: 1006842 - protein, 78 aa, Homo sapiens
MLPSAGLEPLESCKPTSDSLNAGELEDESLRLAFMSLVNKYPLLENKPMKQQQQKPFTLGNCGVVAQEAPRNGGPHSS

SEQ ID NO: 1006843 - protein, 45 aa, Homo sapiens
MGFFGGDVTCFEPVPFYMLLLHGSIQGLGYTLSPHLPALPQRGGT

SEQ ID NO: 1006844 - protein, 129 aa, Homo sapiens
LSAGSDHPSPGCRGCSRAAIVPLHSILGNRWTPRLTNEQYKTTNKLTRNRDSMWPAMPNHYLSDTVLPSPACTASLSFLALACISLGMATVLYLSRQSFHGWKPSSACASLFPDESCPLVASILIPLLA

SEQ ID NO: 1006845 - protein, 70 aa, Homo sapiens
PVDHSDKDSTRISSSSEAHRAPPLCYPAAHSASAPSGGCPTSLDHLGSPCQDVTSSELLPKHLSFNYSPK

SEQ ID NO: 1006846 - protein, 68 aa, Homo sapiens
RLLQHVVSPKARFQAKRFSTYPRACQCVRASPARKPSPETPPETGSGPGAEASLEEHKKVNMWQTSYH

SEQ ID NO: 1006847 - protein, 79 aa, Homo sapiens
MHLTTVSRKEGITQEGTPGCRIRAGKSALQLNTRNRARGPRIKGNGHETSVLKRPELEIVLDEAPRVARRPPGFPFDSN

SEQ ID NO: 1006848 - protein, 45 aa, Homo sapiens
MSRGHACIYLRQSLLYEHYAAVPQMQNHGADRLSSTGPNYVSPVN

SEQ ID NO: 1006849 - protein, 86 aa, Homo sapiens
NLQVRVVIRYYFEILRSIYLSISSTVVQCRYIQNRSHCTQQQWHPPFHGSARCELLKCLCDAAQQETVGQLSVRLRYCLSRGVPIP

SEQ ID NO: 1006850 - protein, 37 aa, Homo sapiens
NNSMYDLKASPGGLPCGALQTAQQLTQEATVAVAGPH

SEQ ID NO: 1006851 - protein, 81 aa, Homo sapiens
WCPQHFLFSYTTEDAPPAMWTKVIPVLEGCIIQARRGLPGAVEEGGSLEGPLPGCACILPPRMTQSTGDVIRGKLVVGEPR

SEQ ID NO: 1006852 - protein, 68 aa, Homo sapiens
MALYEVTTRTVRVPRRAWQAPCLVSKNHDPEEGFPAGWGPATLLGPRGTPPPPRPAPASTEESWLGAR

SEQ ID NO: 1006853 - protein, 38 aa, Homo sapiens
IIAVQMSVPGQLSTWMTTGPYSGPFCGRARAAYGFHAK

SEQ ID NO: 1006854 - protein, 39 aa, Homo sapiens
RLEDPGGMGSVNCLSRGNTLLPLGIKGWVMESQAVVALG

SEQ ID NO: 1006855 - protein, 55 aa, Homo sapiens
AGDRSDVVTGKCLCVAVLRRSTSRRSYMDGLLSTTKPFLRHAEHVIGKVAEAPAS

SEQ ID NO: 1006856 - protein, 38 aa, Homo sapiens
MLSSKGPPAQSLSALGSYWTPAASGDTALLRASGESRI

SEQ ID NO: 1006857 - protein, 112 aa, Homo sapiens
VLDRAADGAVLREVRFYGVSSFQMESVKIILVLDTLSLDFCFAVGSFIGKVQFLLVLQLQTDKVLVPLSSAGSQLSGNRYQNEMVLIRYDKGIMKGTHRAKGAGEHLLEGAA

SEQ ID NO: 1006858 - protein, 55 aa, Homo sapiens
GNDLSLYSGGPPLQQAPVQRITGDVCQDVHFKNFGELNESRLLSDQLHLCPGLLE

SEQ ID NO: 1006859 - protein, 121 aa, Homo sapiens
PNQSDCAQPEGYACSDHPQLMNSWGAWTAHCHSTNSSFETKTAWHLPPASVCATPCPAMESLIGLLPPMETFLARKSHILLPQSPSAQGTSTFPLEQGTLHKSINAVLKVPARLSGMKTRS

SEQ ID NO: 1006860 - protein, 105 aa, Homo sapiens
VCRTVAEYAVAVDLAGRLRGAPADLPLRTGSLQYLLRHLRRIVEVEQDNKMTPVETWASCTGLRCFGHGPPRPPMSSPPWWIIPIRPDVIETLIVQITDWSSRRS

SEQ ID NO: 1006861 - protein, 34 aa, Homo sapiens
CNQYMVKSCGRDGFHIRDAAPPLSTIIRINTDVV

SEQ ID NO: 1006862 - protein, 67 aa, Homo sapiens
ASNSVLRFSRASQCILMHLQPSRNPDIYYLRSVQPRRAVIPEPGVAPRLARLTPPILAKKTKRPQPP

SEQ ID NO: 1006863 - protein, 128 aa, Homo sapiens
KIFFIWQENETAAAQEGQVDLILLLVVSSPSPPGLLGFVLFTRAGRTTPIGRAQREVDVLLGIQADKKDGMFTNMLAEPEYCAGGSDTRDVSEMDLAKPSLNDLGLQAFISKEILYLQGQDVIQLHLA

SEQ ID NO: 1006864 - protein, 56 aa, Homo sapiens
LPGLLDTYRVWRSGLPNLPSNRLGPRVELGLPETVGVRLDSGDQLLAGLMEILQRS

SEQ ID NO: 1006865 - protein, 39 aa, Homo sapiens
VTVASGHSSTANGRELVARRNGLVASGNLRQPDDELRQR

SEQ ID NO: 1006866 - protein, 155 aa, Homo sapiens
NSPALGRSQECRQQILSGWLRKELEMQNLFPCVKAHLLSLEGSESEKDDLAYEELQGLKVGSEAPLVDKTQVEASSPRLNPAVTCAGKGTPLTPPACACSSLQVEVERLQGSGVKVLAEQQKLQQENLQIFTQLQKLNKTLEGGQHVGMHSKGTQ

SEQ ID NO: 1006867 - protein, 113 aa, Homo sapiens
  misc_feature (83)..(83): Xaa can be any naturally occurring amino acid
KRETLRALFQKRVTGPAPWSLEMEPLSPLRMWLAQKMSQSDSGVDLRWGFSECHQGPMQPAQVPTDERTQRGQQEGPPIEAWXAPTPLECCYLGEGPPWLLNLLRRPPLCPPT

SEQ ID NO: 1006868 - protein, 61 aa, Homo sapiens
AGTEAKIWHEAEISYQARSYLLRHGQTRILIPGPDPTSSDTDGHRSSYLYPASLPQTLEDS

SEQ ID NO: 1006869 - protein, 78 aa, Homo sapiens
MGGKRLGVSFGPLRGRTGSFGGCFSVLQGAARGAAPGAGGTERGPCASSAGGGSPEILLAFDHSPSGAWVQKGKGIGG

SEQ ID NO: 1006870 - protein, 42 aa, Homo sapiens
RPRGLIQHTLPAPQVTAKSGLDELVSDLLQEAHTDLERVRAI

SEQ ID NO: 1006871 - protein, 37 aa, Homo sapiens
HRGQQNKNSQATCAPPYIEQAGYITAPDTWAHKVYTC

SEQ ID NO: 1006872 - protein, 44 aa, Homo sapiens
YPQPVREISGKRTRSSIDLMPPPRLTRVGEHTGVSSMLANSVES

SEQ ID NO: 1006873 - protein, 33 aa, Homo sapiens
NLIVEDPRDYTGTVTALTVPFPKIKQTSQIPQH

SEQ ID NO: 1006874 - protein, 58 aa, Homo sapiens
LSSAYALTHTYTCTTLLMHSTLCAHTLLAHTRTHSCTHSAFAPHNLHTFIAHSCTFST

SEQ ID NO: 1006875 - protein, 108 aa, Homo sapiens
RVGAQLAATHRPACFRRAHRAPIAVLLSNCLHPMVLFQRGPDPREGAGLNSSPGSVILYLGPSMTSGLIPSLLASQCLFFLILSPRLECNGVILAHCNPHLLGSSDTL

SEQ ID NO: 1006876 - protein, 69 aa, Homo sapiens
YSVHTTHPPASAHCGGAPADPSQLSLAGSCMGCGDGRGVSAGLCPAPDPQAPQDSCISPPRAHPVPCQE

SEQ ID NO: 1006877 - protein, 41 aa, Homo sapiens
IEPCDASRYITFSVTGLPTPRLLSGPKRHHLLVQQVLADLP

SEQ ID NO: 1006878 - protein, 37 aa, Homo sapiens
PHVTGEQHTRLGPLRKGMSSHTSGPQCKGSSAAHPLG

SEQ ID NO: 1006879 - protein, 40 aa, Homo sapiens
CLHGVGVSRSTKFGSQACAFCPLASCFTSLSLMVSSIWDD

SEQ ID NO: 1006880 - protein, 57 aa, Homo sapiens
TVTRLSAGASVGSGPSERGPLDGSHGYRLGSPRSWNSEADRIVRLLILQWPPGTELQ

SEQ ID NO: 1006881 - protein, 124 aa, Homo sapiens
SPPVCSLPSALWISSFSRRPDMSITPAGHTFFISFWSHLLKQVVISFRVLDVSTEVANFVAACICQVVLSPPQEELFRGEFHQILQALTFSQKSNQSYISAEFNVSKQPNLDDLPQKSQDQIRL

SEQ ID NO: 1006882 - protein, 51 aa, Homo sapiens
PKLQQLYSISSNDVIGCHEILAVPSIFYLLCPDSLHPIGRGLSYLHDAEVG

SEQ ID NO: 1006883 - protein, 38 aa, Homo sapiens
  misc_feature (13)..(13): Xaa can be any naturally occurring amino acid
LGLDKPDHFMIPXPGTGGAANLYLIFGNLFLMYNLPIR

SEQ ID NO: 1006884 - protein, 120 aa, Homo sapiens
MSLGHAGCPKVLPVTECCTSWHYVPTARLSCCCDCRMDGLTQADKDALDGLLQQVGAAPSVLSLPRGLRQIVLCGGDGPEAWRTGIRDWQVKSRFLGVSHSVQKPALSSQGPPGFRTKLR

SEQ ID NO: 1006885 - protein, 43 aa, Homo sapiens
DSLSQNVCTEAESLCRPTAVCQQTVKEGLGSMLSPPLNPGQSG

SEQ ID NO: 1006886 - protein, 31 aa, Homo sapiens
MARNTCSTLCDRLHGVNPMTHFPVGRLTAVG

SEQ ID NO: 1006887 - protein, 36 aa, Homo sapiens
CCSSCTIPGKGVVRAPWGPGSLIPELISGLFPIVTG

SEQ ID NO: 1006888 - protein, 39 aa, Homo sapiens
MEDQSTDTLIELQLMMKRVQQCAVLMPVIPALWEAEAGG

SEQ ID NO: 1006889 - protein, 102 aa, Homo sapiens
NATPTPRFKRFSCLSLLCSWDYRHTPPCPANFFSIFSRVGVSLYVAQAGLKLLNSSDPPASDSQSAGIKGASHHTQSCNCFIHNPCCQVKTSEIFIPTQFCS

SEQ ID NO: 1006890 - protein, 54 aa, Homo sapiens
PRLFLKVCETCTYQKEPTLDIRSRLVSVGDSHVHPVAKYWAICTSCYIHTSMVL

SEQ ID NO: 1006891 - protein, 75 aa, Homo sapiens
GVRMLYSDHCVAVISSLFPSCSAMLRHACSPFAFHHDCKFPEASQSSFLLSLRNCGSIKPLFFINYPVSSNSLQQ

SEQ ID NO: 1006892 - protein, 62 aa, Homo sapiens
MEVSTVLYVVDGTCTGRHSTAVVEYTYDQAPYKRYKEVSTVLTYTKELSTRGGIAPAVVEYH

SEQ ID NO: 1006893 - protein, 62 aa, Homo sapiens
MEVSTVLTCRRNLYREACTCIGEYTSTKAPSITIFGGQHGAHSIDGTMSREVCNRSGEYTSS

SEQ ID NO: 1006894 - protein, 31 aa, Homo sapiens
MEVSTVLNVDDGTCTGRHSTALVEYTYDLGS

SEQ ID NO: 1006895 - protein, 54 aa, Homo sapiens
GSDKRYMEVSTMLTYTTELVQGGMHRNDKYTYYQDAIYTYIRRYSTVLTYRRNL

SEQ ID NO: 1006896 - protein, 59 aa, Homo sapiens
SPGPACCSLQCPSVPAGGYWRRATLPSENFLSSVPTETGPSLQFRAALSWRRLPPRLCL

SEQ ID NO: 1006897 - protein, 102 aa, Homo sapiens
MTRIPWSATPLWINFYHAECSTTSWPWSLFAVIFPSEIAGQCPGCSECRHFEAQRIIHAIWFLNQAVANFLSCLALPLLFTSIAQHHHWPLGAAACSILHGT

SEQ ID NO: 1006898 - protein, 41 aa, Homo sapiens
YGGEDRWHYPQALTFSIMQGLSVWRQLPHNKLLNIVILGKR

SEQ ID NO: 1006899 - protein, 52 aa, Homo sapiens
YAGCPRYYNFNLLLIIFQVEVTIESRAEHCKDYIVDYHNPCQHVAWYQTDHC

SEQ ID NO: 1006900 - protein, 43 aa, Homo sapiens
RLCSIAQVFIKLLLLQHSVLEICFLMACERDRAAHVLSGDPAL

SEQ ID NO: 1006901 - protein, 77 aa, Homo sapiens
GRVLVLIDATYAAFRLTHQMRCADSLTWIPRCIAWVLPHLDRLVMRTFWTQVTPARVSWTRELRAGSLQHPGNPPPH

SEQ ID NO: 1006902 - protein, 37 aa, Homo sapiens
MTRVLEDLYSKQGSATIYGGQHGAHVVRRELVQERHS

SEQ ID NO: 1006903 - protein, 59 aa, Homo sapiens
MIISRTFERQLTPFHLSSTPADDNIKTPGFHPQRMISRNLPERQLHIPLPTVRSNPQKD

SEQ ID NO: 1006904 - protein, 52 aa, Homo sapiens
KLLWVLQNKQPVVDPISTPGWELVRVPPGAVEVAISANRLSIYRTGGARDDR

SEQ ID NO: 1006905 - protein, 61 aa, Homo sapiens
LDMLLNGIKSDGLPIAGEDFSPTVNGALQTEGSPCLQDSDVYNVVDVWLGCSYIYDAAWKP

SEQ ID NO: 1006906 - protein, 59 aa, Homo sapiens
HINATWPRSSSVRTSVELARNQVEEENGEPWPRCPFCTISLCSPHFKPDWLPLSGTCML

SEQ ID NO: 1006907 - protein, 35 aa, Homo sapiens
IYDFENIKANPQTPHTVTQRRGLEITTEMLVLPRM

SEQ ID NO: 1006908 - protein, 78 aa, Homo sapiens
ISQLQGKRLRGQRMPALSFAHPSFHHTGTLDPGLASTENWQESPGLAITGTHIESLLKLHIVAEHSDSLPIIQDFGTP

SEQ ID NO: 1006909 - protein, 34 aa, Homo sapiens
PRTLSSRQAHFPGTLDFHISCTAFKNPPLNEYKE

SEQ ID NO: 1006910 - protein, 45 aa, Homo sapiens
TEDTLKRTPGISPYSMTLCGPTSTQTRNFIIIPTSKSSERAVIRV

SEQ ID NO: 1006911 - protein, 80 aa, Homo sapiens
HMFANGCPSVLVYPLAPPPVQCAFSFHHILDPRGLSLGSVLSWNVDFISYRQVKNICFKMRPQIQSNYISSRYGYMIGYP

SEQ ID NO: 1006912 - protein, 84 aa, Homo sapiens
DPPGNVVVVLILVPLKDRLLDPLLLRCKLLHSDLHKMALGMYMKDLPPGIVARVLEMERLQYIHQNETVSQQIGEVPVQSGTTV

SEQ ID NO: 1006913 - protein, 40 aa, Homo sapiens
DCRCCSSEATSGRLEGGVFAAGKGREDGWGSLFGIDDVHE

SEQ ID NO: 1006914 - protein, 41 aa, Homo sapiens
CNGDIEGEQHLSGDFQPSLCFRCGVMGVCFNVFEIVNVGFM

SEQ ID NO: 1006915 - protein, 36 aa, Homo sapiens
THNFDPLHVVLKATSIVLMPGGVNKGERVRGCCSWK

SEQ ID NO: 1006916 - protein, 66 aa, Homo sapiens
MCVNGDVVHNTIQAPPQGGVSCGELGLLQPTEESKDQKQFGKCQIRQVDGVENGKSSAVVGSGLAT

SEQ ID NO: 1006917 - protein, 64 aa, Homo sapiens
SERLGRGTNYAIKVSEMKVRPAYTGQDSLHMSPAEVEEATTHNALTSWKVTPTFPMTRLHFSMS

SEQ ID NO: 1006918 - protein, 31 aa, Homo sapiens
MGRGTLYGLNEYLWKVLTPEPGASPELSLLG

SEQ ID NO: 1006919 - protein, 148 aa, Homo sapiens
RVSPPGALDPLESAHIRGFITPGISSRPIWRLRRTTCAREAKLLKREGSPSAPTALTGPDLGLQHGWPWVPLKLKPAHEGLVRHRCNDAGRLTPDIPREELRHTPHLPLAPLPLNEGSITQGPPLNYIPARSSLAPKSTTYPPSSAAP

SEQ ID NO: 1006920 - protein, 151 aa, Homo sapiens
RIPLLDLRENCCYEDCALLCGTVIWAARRHLIGSTLSCFIAPPPGWSAYPEIIRAHDMDFTDIIKFFNERAELHDAQEILRIARDLVHYVQMLIENKGAGASDAAVVLQPGLRQGEVHGSHRPDLPSLHPSPPLFLTKRLLALILQLLRVP

SEQ ID NO: 1006921 - protein, 67 aa, Homo sapiens
VFAYCRILVLEGCVVRLPHYVKMSDQASWLSLIKYVLYRVTILFFFVARQPDLLLRHLDPPCQDQPR

SEQ ID NO: 1006922 - protein, 113 aa, Homo sapiens
GFARSLVSCFSVPPDTQTCCEATADTLQVPERGSTLGDMNALANGKSCLQPMMQRHIHPTARITHGHPDPQSQRGPHSLQPPRPIPAQSLLPPTFLESDERASMHSSLHLKLP

SEQ ID NO: 1006923 - protein, 85 aa, Homo sapiens
STNEVDREDRQMTMGPPSAPPLPRLHSPLVRRSCFTVLTSNLLEIPPTTVKLTIESTPSNVAKCKEVLLLAHDLPHNRIGYSWYI

SEQ ID NO: 1006924 - protein, 36 aa, Homo sapiens
ALQIHSMGSGLRRAVTEHGFKIRAELGAVAHACNPN

SEQ ID NO: 1006925 - protein, 30 aa, Homo sapiens
MLYWVILGRVGDLDLGLVPDLGLVPDLGLV

SEQ ID NO: 1006926 - protein, 101 aa, Homo sapiens
SMNLSQLGDTRTISNQKTKQFAEECLIYPGRAAYLSSNCTTSINNEYTSSLEMGNAGAPVFVPQSFWALASAFTSTLTRGEVTLTTAAKRAQETARAFLFS

SEQ ID NO: 1006927 - protein, 124 aa, Homo sapiens
RIGGFRECLSCSSRVLRIPVESHRRAGLAPNLSMFQSEHVVIMRSPGDGTDSGKAAADTSSQARRQNARNGRNSGMWQIRKGKPLDNTYLMGVDHILLANPFVLLSLGASLHPLSGEIAQVELH

SEQ ID NO: 1006928 - protein, 64 aa, Homo sapiens
RFASLEDRHEKDSESGGGKELSQACEVQSAQKGSQDAQVHSGSGCILPVCPRAAVNAFPLAVSL

SEQ ID NO: 1006929 - protein, 54 aa, Homo sapiens
HWVRPETPCRRIQVSAQNTGGGGWRPRVGGPSLGGTPDCHAREELKPLVSPKNT

SEQ ID NO: 1006930 - protein, 124 aa, Homo sapiens
IYRISRHGFGERTTDVARGLHNSLQLCRCSNFFFSRDEVLPLLPRLQCNGTILDHYNLCLPGSSDSPASASQVAWITGMHHQAQLIFVFSVETRFLHVGQAGLKLLTSGDAPALASQSSGITYR

SEQ ID NO: 1006931 - protein, 37 aa, Homo sapiens
  misc_feature (11)..(11): Xaa can be any naturally occurring amino acid
EIVPLHSSLGXKNETLSQKKRKKVRLLQELQWLLQMR

SEQ ID NO: 1006932 - protein, 33 aa, Homo sapiens
RHLADLARGRSKLKMAAKNWAFMRKTGSLCFVE

SEQ ID NO: 1006933 - protein, 35 aa, Homo sapiens
IPKKRPILSAMRNLFHGQHAIGPGTQLVQIGIPAD

SEQ ID NO: 1006934 - protein, 49 aa, Homo sapiens
  misc_feature (31)..(31): Xaa can be any naturally occurring amino acid
RILRGSRGGRRTCSGVDGRHFNGSSSSESGXRNSVSKGKVADLISVRYR

SEQ ID NO: 1006935 - protein, 76 aa, Homo sapiens
QSVIANRVVDMAVQCRVICVPQQLPPPYDLAVLVDDDRRAHDESGCSLAGGDLQVRGVPQTRLVMLRELKSSISLL

SEQ ID NO: 1006936 - protein, 34 aa, Homo sapiens
SRVIPKSELQHDLLQRVKEQNFYSAGTRDPSGVA

SEQ ID NO: 1006937 - protein, 68 aa, Homo sapiens
MDRHGKPSVVSEFFTRLGPAFIRSWLDQSTPYTAVRCVVTLSLRVVYMIRVYLLQGWYIVTYALADPE

SEQ ID NO: 1006938 - protein, 75 aa, Homo sapiens
  misc_feature (3)..(3): Xaa can be any naturally occurring amino acid
DPXEQREEERGGLRRTSEGDRETPSWGKATPAEEEKTGKVKYSRLAKVLLSNKRRGFLTNLSSLLRPGYRRSEFR

SEQ ID NO: 1006939 - protein, 56 aa, Homo sapiens
PPRGEREKVCMTASMTNWGPARFWRNTLGSEDVHVSNGDTLVLAVWPHSPSLIVIA

SEQ ID NO: 1006940 - protein, 82 aa, Homo sapiens
SFCDPVLACCQVLNWIQDIDTSECAARAGPMCPLRYVGDILGAVIAHSGLVSAPGWSELNESGAPAEVGVLYGFIHTTAEAL

SEQ ID NO: 1006941 - protein, 34 aa, Homo sapiens
MSYPRHLLQTGKDSFSEFARTPGLRIWLESKMSH

SEQ ID NO: 1006942 - protein, 47 aa, Homo sapiens
KWQDHWYEVDCCGLSGADLKLHSGRASGKALRPAPASAQSPPGLQQP

SEQ ID NO: 1006943 - protein, 34 aa, Homo sapiens
  misc_feature (15)..(15): Xaa can be any naturally occurring amino acid
MWRPMCRPFNLPLPXALARVPRCLDSKTLVGGLL

SEQ ID NO: 1006944 - protein, 69 aa, Homo sapiens
KLEDRIHTPAEREKIGEQEGRGKQITKEDVSRLSGQGRGAHSGEGLVLWHLVFSGDWAQEHIRRLALRA

SEQ ID NO: 1006945 - protein, 98 aa, Homo sapiens
  misc_feature (70)..(70): Xaa can be any naturally occurring amino acid
MSNSVQDLVDVGTHRKRAALHSVPSLNSDQPRWLRDRTFPPPGLITEGVWLSIFLLAITNPRCPPSLVSXARMFKEPLAILVLQIFRQEHCCPSTAAP

SEQ ID NO: 1006946 - protein, 30 aa, Homo sapiens
MLYARLTWASHEKMHEGTRALATTISQASG

SEQ ID NO: 1006947 - protein, 84 aa, Homo sapiens
LRGPFESQSDGKILAEADRLSTKHWLIGTDKCVERINEIVNRAQRKAGVDPLVPIRNYGPISENGGDQEDTKEDPDRGAIRGPI

SEQ ID NO: 1006948 - protein, 41 aa, Homo sapiens
MRVLEHVRERVRTVKCNRHVRYMWCRACEHVMCVRACVGGV

SEQ ID NO: 1006949 - protein, 115 aa, Homo sapiens
PQSGGLACFTPPAPPPFLSGDEDPKASTLRVRDLLAPIAFHGKVARAYSNLRWLENNRPLLIRFFTTSCSSIVPFNAKSWDLPSCLVTPSEPDSLTSRSDSPMHACPLELGTTPW

SEQ ID NO: 1006950 - protein, 38 aa, Homo sapiens
IESARTPRTLHTCPLSHALTLGAHTATCSTRRNIISCT

SEQ ID NO: 1006951 - protein, 34 aa, Homo sapiens
SEDHLRSSVTDTSLRYMVKPRLYYNILKFTLGVV

SEQ ID NO: 1006952 - protein, 86 aa, Homo sapiens
LGLGCAALVTKAGALQCSPSDAYTKKELIDVCPRESLIKVSHVLSCAPALANRGTHVLQSQTATRWCLDIICCTSDTTNHASPTDW

SEQ ID NO: 1006953 - protein, 70 aa, Homo sapiens
RQSGAGCGSTTLRFLVDRERAVTSVLGAYVFPVISQDHEGRLDLDSIAWDDIHVVPGALKLFLREPPQLR

SEQ ID NO: 1006954 - protein, 80 aa, Homo sapiens
VGSTQLAGQAYMERSGNASSAASQRLSLPLWNSLSYFSSRLAATTTAVVAADYLHVSLDLLERKLRSLWRRPFNVTDVLT

SEQ ID NO: 1006955 - protein, 76 aa, Homo sapiens
PPAVQHFPFIHALVGIRPLVMSSPESGSQWTSTSDLIVNLPQNAASGAVHLMRNLEPCQGLYTSSLMRRATPHVRR

SEQ ID NO: 1006956 - protein, 99 aa, Homo sapiens
MRVCVPLQQKLCHPHLPVLGRHVQSDKSFLGHAGLGCFLFQKGQDCLHIALTGCNVQGGVPGVRGQVGVGVLFQQELHHVCVADASCTVKWGLVILGLC

SEQ ID NO: 1006957 - protein, 68 aa, Homo sapiens
GLVGLVGPAKRVDARHRLCLIPAAGIVSSRGACSISSSEGLQCTRMVRLSSWVQTPMSVPLASYQRDA

SEQ ID NO: 1006958 - protein, 131 aa, Homo sapiens
SPEVAGVGSQPWCPLAWHRPRCLLPTEAAGAATAMLSSISRGMSSSLVSTFGMDESAVYSTASRYLVPVVIKVGLSLRTYYGSDGRRLYRLLWGPCAPGSPLLSLAHASVRPSLNSGASAVSLTSSQILTV

SEQ ID NO: 1006959 - protein, 56 aa, Homo sapiens
YLEYPPASGGQEKLALLPIPPLAHSLTRLADVVIWVLRLGAEDPQTQVVLFNALHD

SEQ ID NO: 1006960 - protein, 124 aa, Homo sapiens
MNSHTFPKPLLVRVAMPFLVRLPLAAVLLFGDHAEGRLCVRKTPGAMAWEVRPAWAPRPGARGCVLVVRQVCCYSTLAGALAELPSCEAWLLALLFEAGVLQAGVVQAGVVQAGVFEVDVVPAE

SEQ ID NO: 1006961 - protein, 58 aa, Homo sapiens
RSLGLATIRGCSVRGAFPPPPPPTRGNHFPLRLLEEADLPVPPPLSSVRTEARACRSP

SEQ ID NO: 1006962 - protein, 146 aa, Homo sapiens
AGSYSRGIPPQLGAWQCGARHVKTASDCGAVEALPCRTVWNKPTVKSLPCDICKDVVPAAGDMLKDNATEEDILVHLEKTCDSVSETEHVCVMQGDSGLLPPCHPGTIIKGEMSRPGVVCAALNLCWSLQKHLAELNHHKQLESGK

SEQ ID NO: 1006963 - protein, 154 aa, Homo sapiens
RARGLVPGACPEGRGCERDVGHYGVPPPQSLSSSGILFGLQLLLVIQLCYVLLERLAEVESRAHLPRTAHFSFNDVQDDKEGKNPLSPCIKQTFSVSRRPVTGPSPRLNKDLLLKLALSFSISPAAVTTSLHISPGNGFPLLAEVRTVWKAVQP

SEQ ID NO: 1006964 - protein, 126 aa, Homo sapiens
SPQHLEDVVVRQRCAPSSSCFAGSINLCWSRTNAFLVLHLCFDVLDCVPRLDLQGDGLASQCLHDDLHPSSQMEHQVHGGLFLDVVVRPGAPIFQLFSSSDQPLLFRRDAFLILDLCLNFLYGLPG

SEQ ID NO: 1006965 - protein, 134 aa, Homo sapiens
RAVWGWLKELMNTEQALVHLIQSCSLSFKHLTEATANKRLAYVTYQDIRAVGYFKEQTVIAVNGPSADELEMPDRTEDHLLIYLTSTLGAHSIVYLCPEDVRSSRTVLPRSLSPLPPASGPALTLPRLSCGGTE

SEQ ID NO: 1006966 - protein, 77 aa, Homo sapiens
MRAALSMLAGNSSACVRCKEGSEALRSILASDRCSSSIVAWIWGKRGRSSRCNLRLSDSRRRMPLVQLLAILLTSGD

SEQ ID NO: 1006967 - protein, 66 aa, Homo sapiens
LAGSFCCGWWLGDRRLYACTWDTRVIDGDATSCHAAVGWLQAVNIPMGRVSSTMTGSCTFDEYFRH

SEQ ID NO: 1006968 - protein, 72 aa, Homo sapiens
MSKPPCLALTHIKVSQTQSLPFKIQCEQQEMEEVGGRKKAEYINHHPDPRHTGSHEKVIGKTLVAFKGGEVP

SEQ ID NO: 1006969 - protein, 90 aa, Homo sapiens
LLIDSRVYPPGDGARMILAHCDLHLLSSNNYPASSFGVPWITGACHRARLIFVFLVETAFHHVGQAVLKLLASTDPLSIGASKAAVDYRT

SEQ ID NO: 1006970 - protein, 188 aa, Homo sapiens
NDRIELCTDSILTRTECRAGMLWVIRPRFHSDGVGQVPKTSLTKSSQVKTRTKVPIQATVGDQATLPLTWSGASSKDKSYQVKPSQNQNKDVNTGTPWVIRPCFHSHGVGQVPKTSLDKLQMSGLPSAISFPGVTASVNPSREPAMRCSGKAFNWGPFSYPGAPLWICVTQAGRSPLQGRSNGGPQGL

SEQ ID NO: 1006971 - protein, 41 aa, Homo sapiens
LDASGRSRVSPCLPIQRHSSTHYTGAPTSMRPPKPQLRWVR

SEQ ID NO: 1006972 - protein, 151 aa, Homo sapiens
DDMIESSSVRSIARARGQGCGFGSVTVGLSRYLYCDCTSSPHLSTTALNPKSCQRLCPQKALSLQIPSRPFFPIGEGLLLGNISSELASWSAPLPAASKHSIYHMILMASVHVLVSPCSLMLTKDKGYRFICASLVPLAQSWDVVLYLSVL

SEQ ID NO: 1006973 - protein, 46 aa, Homo sapiens
MIPSVEDGPVIFILTKLPVVSVGRARMGTTTLDTQCQGLASSGRPW

SEQ ID NO: 1006974 - protein, 86 aa, Homo sapiens
PRQRGAQLSRAVKGKGQTRSVLRTPKVGGHFITSLVDQTTVNQLLMPISRTSVLSDLGETSDIEGGGPTDALEIPKIHAKFPILQK

SEQ ID NO: 1006975 - protein, 38 aa, Homo sapiens
  misc_feature (26)..(26): Xaa can be any naturally occurring amino acid
MNRLCLGSWQGEPLGQLQIWGLFQDXPCGYLPLVQWPL

SEQ ID NO: 1006976 - protein, 59 aa, Homo sapiens
MTISNLSCHWNCEDDEVLDREDLQDMSLIDLSTKNPKAFFTNHTLVLHVARSAMDKVRV

SEQ ID NO: 1006977 - protein, 52 aa, Homo sapiens
MESVRKFCITAYLITTVKFIAKQILILSGRLLWGLRFFQKEPFSDAAVYGLK

SEQ ID NO: 1006978 - protein, 62 aa, Homo sapiens
MIESSWYRQHPNQRCNSEDLRLLWEVVVLETASLQRLFCGGLDPGPRDSSLVIRKHHKELAG

SEQ ID NO: 1006979 - protein, 75 aa, Homo sapiens
PAARGLPDVHRKLPRPLTHPSRLCQPWLVAQPSPVCLAKIAAGNNTSIYTQVCSNRYAKAVRPEETVMVYSILPC

SEQ ID NO: 1006980 - protein, 39 aa, Homo sapiens
MAAYTRRWPGPSAYSSGYEEAEQVHGAPAGQLCSGLNGV

SEQ ID NO: 1006981 - protein, 43 aa, Homo sapiens
MWLTILTRESQRRRRTLESTKPSEDSLSRTERVHSVQQRFLPG

SEQ ID NO: 1006982 - protein, 60 aa, Homo sapiens
MTCRRAGMVEMVAYPLWRAIHSGPIEVRVDGVLEKRPRAEVDELELDAIEVDKDVSVLDV

SEQ ID NO: 1006983 - protein, 144 aa, Homo sapiens
EHAKQTGVQGLRRSGGKASSSGFAPVHPAPWNSYPTIKQPVAATMTAARAADYLHVALDRAWRAKLAVSFRDRLPMSRALLMPVLLRVLSRSSGSAYQDVSFTCPEQAKYRANHRDLQPPDAAPRWGPPPRAFLRWLPAAYEDC

SEQ ID NO: 1006984 - protein, 54 aa, Homo sapiens
CRHSLLKQAIHGPSKRYSKPHPTTRPASSSSSQISPIRSTPLTPLDQRNPSAYR

SEQ ID NO: 1006985 - protein, 36 aa, Homo sapiens
MSDMQLQQSAAAADLSATLPPQPPHPFSQQQQQEQQ

SEQ ID NO: 1006986 - protein, 51 aa, Homo sapiens
  misc_feature (2)..(2): Xaa can be any naturally occurring amino acid
PXTGATYTHTRNKAGDNGLQHHGTGKTRTIDITATHGHSPHTEQRHPTPTA

SEQ ID NO: 1006987 - protein, 110 aa, Homo sapiens
MERLNEAPVWVCGVTQDLAKSKREGSKRLYPFTPSYAGLQGWEARPLTVPHSRSEFSVLSTPHAANVACSSLSGVAFPGGLCLENRNCRTLYTHYLQYCLCLPKLLSPSP

SEQ ID NO: 1006988 - protein, 94 aa, Homo sapiens
RSRAWRLCGCLRCTRHTGSEAPCQSGLQDELLATWVGCAREKGLHAFGGRRIPLERACCAQAYSKARASCPTMPWPPSVTEPGQGTVGRSPCQA

SEQ ID NO: 1006989 - protein, 110 aa, Homo sapiens
VTDIGAWVSAQRGSQAIGRPSSRAVPTLAPGALTPPPTPAPGGPSLALILHCNPPAQALYLPLCPGHRDTRIGARAHARLKELLKASPASAVRVHDCLSPHPGPDPACLS

SEQ ID NO: 1006990 - protein, 123 aa, Homo sapiens
TKDGLDAWTMNHFKKTTYCDFCHIMLIGVRIHACAALTVNTLSTNAVCPEHIPGCVKTESKAKRSGEFHRKCELSTLCDGWELRDHILLSTSIFSHHPGLCSCPGEGCSFSRFWFPIYAAFRR

SEQ ID NO: 1006991 - protein, 39 aa, Homo sapiens
MAVKKSLEICPEHPIMATLRHSAEADQSDESVEGSGHLA

SEQ ID NO: 1006992 - protein, 50 aa, Homo sapiens
MNQLTAIDKGLAKRRLYNLLIEPQQGADNCDVSQCHSLAHQKSPRHQVSI

SEQ ID NO: 1006993 - protein, 102 aa, Homo sapiens
RRLGLGTPSHHQRSQCWRRMNRSLVPCESHNSSETCGLPPLVQTYVLPGDPRAVSIPAPIPVWHQRSGPLWAAPCAAPRARAQGTISAVTPLCPSWRASPPA

SEQ ID NO: 1006994 - protein, 141 aa, Homo sapiens
RSLGLGSVGCGHWSQAAWGVAALIAHDPATLQAIVLHTAIVCARTRPAASLRSAKNAAGPSGDPEEPSSGLPRWLKQGPRLCNRCVRCLPGQRDLNNALMACLDYATHATPDLTVPPPSTGTFHEAHSRLIYPAAVLNQAA

SEQ ID NO: 1006995 - protein, 107 aa, Homo sapiens
AVWGLAETVFDTINAETDRSGGSSSKAKNKQLGHEEDYALGKDCIMHGYISKMGNPFLTQWPRRYFYRVPPPPSSRGARAEAPTDACLTTGGRLQIRWTAHRDSRER

SEQ ID NO: 1006996 - protein, 140 aa, Homo sapiens
RSCGLALALNVPVFVVVTKIDMCPANILQLNPVSCYSACYKSPVLPVRSPVLVHSKVWLCLSQTSNLQPLITDVPEYSRISNCYRSRTSDLLHRCSSNLLSPRTSYREEEPAEFQIDDTYSVPGVGTVVSGTTLRGLIKL

SEQ ID NO: 1006997 - protein, 69 aa, Homo sapiens
RGIPPQSGAWFPQAYPGWLPVTTTDPEAVGEPCNMLPFLLPLGGTTPGPGQRLPSCGGTRARTSVIAKS

SEQ ID NO: 1006998 - protein, 109 aa, Homo sapiens
MKVAIGSTGDQKVQISYYGPKTPPVIALLYLTEVVISLCADITRTGKVKPTRAVKDQRTWTWGPCGQGAILLVNCDRDNLESSAMDCEDDEVLDSEDPCRTLSLITLST

SEQ ID NO: 1006999 - protein, 122 aa, Homo sapiens
SRDLHSGRYWQSVLVCTALLQSGSRTLLVLLGVAPVGSDFALARVVLFTGQAAVLEDSYERVPDEANVDDIPTADTIKQFLQETSTKSQKLMRHRVSMLTAADMDQQQLQSFWSLMGEMEPD

SEQ ID NO: 1007000 - protein, 104 aa, Homo sapiens
MYMNSTSYPQRPAYSGRETIYSIASLLIHNVTQNDTGFYTLQVIKSILCLKKLPDQSPVCPELSEPSVSSVKVPPLCCDSGSALAFTCEPEVQNIDLAFRGSIR

SEQ ID NO: 1007001 - protein, 33 aa, Homo sapiens
LQLGLAELQSILDSLKPTPEHPSVPSDITSSEK

SEQ ID NO: 1007002 - protein, 99 aa, Homo sapiens
MASMMGSTVHLVIKMADPSSGPVHADQQCRGNYQYLGVNSQENSRAISTNCNPLGLRSLGGLGGLRSLGLSSTKFSELQRQMQEQFMGSPEIMIQIMAN

SEQ ID NO: 1007003 - protein, 83 aa, Homo sapiens
RIPSGTTEDRIEILAEIVNKFIGVRQNIPQLIYEDYCQSYYQSYTKILHIILETRKCRTLILKTQDITPDTELLDTGGLLHSP

SEQ ID NO: 1007004 - protein, 120 aa, Homo sapiens
RQSRDDLNDTATERGDPMFNMDMTCDWLPKPNIFASCNEIVHSYLPVILDIIVGQMSRPGEVCSALLLCESLQKLLAELNHQKLLVSYLIPELDLIQVVAPFMALIPLLLYPLDGPRLAP

SEQ ID NO: 1007005 - protein, 96 aa, Homo sapiens
MGQSIGTSVPQLMSSTWLISVALSDSVLVTIPGTLLLVSTTTWTQYTGTSYLHWKKQRAPDEGYSIFHSNLHLASNPYEGTFCPQSQRVTYIMNPL

SEQ ID NO: 1007006 - protein, 57 aa, Homo sapiens
MCFAPLSWILWTSFLSSIFCGPVFDNLYIFLTLFSRFYSFFQLLQACGQALLCSVLF

SEQ ID NO: 1007007 - protein, 39 aa, Homo sapiens
MAVLQVQPTQAVTVGTPGGEGELALVTPCPLDLGPEYYD

SEQ ID NO: 1007008 - protein, 70 aa, Homo sapiens
SRRLVVLHTGWWDTAGASLTFKRSHLRAVKEMPDVRQAGHTWSYARWAPGTTTLSKLTQAGRRFPKASTA

SEQ ID NO: 1007009 - protein, 39 aa, Homo sapiens
STGLTARTLSALVRTAASQEDWTLDWAQGSQHTGWLTQQ

SEQ ID NO: 1007010 - protein, 44 aa, Homo sapiens
STWAQRFFESLGDLSTPDAVMGNQGERLMARTVLRCLYVIGLAH

SEQ ID NO: 1007011 - protein, 35 aa, Homo sapiens
TRSNVRLGAKVTTMSGEENTSTTHSDNRNSNQYHQ

SEQ ID NO: 1007012 - protein, 62 aa, Homo sapiens
GVGGSFSWTKSWRTGDDLPREVPPPSPRASYGTKFNARPCEETTKQACVSNKAVYFTWAHIE

SEQ ID NO: 1007013 - protein, 40 aa, Homo sapiens
YQTPDTQSASQVRIRHQDSRELHTVRIRHQHAECFTRCVS

SEQ ID NO: 1007014 - protein, 70 aa, Homo sapiens
QFSPDVPSATVPVLVCSFPEESYLSLCNMHPPGPNRDDVQCVSEGEAAPPEGVQFSVSLVAYAPVASTPS

SEQ ID NO: 1007015 - protein, 46 aa, Homo sapiens
LRQDLESCRTLRKVPYAYMYRDLTTRPPHPAGRRRVKLELWDTSGP

SEQ ID NO: 1007016 - protein, 60 aa, Homo sapiens
GRLSKIISAPMDHSDISLQMGTNKCASQVGMTAPGTRIAAGQEGHLPGHFWTHVGSWTRA

SEQ ID NO: 1007017 - protein, 42 aa, Homo sapiens
AQINDIMEVSTVSSRIDVNLYRECMHRSGEYTSTRLHVCDNW

SEQ ID NO: 1007018 - protein, 103 aa, Homo sapiens
MKRRSTGWGVSTRKEAWLWVAPLETLPVCNHRTKLESAVQCLCVTRDYVHIHENKSFTIVYNVFTPWAFPSDVYKGTLAGRGGSRLYFLHSGRPRKADHLKSG

SEQ ID NO: 1007019 - protein, 57 aa, Homo sapiens
SLRAFLYEHFNIRYWSWNYPRLLAASTVRCEWSGVEGFNSGLIPITGPRKEVLYMLF

SEQ ID NO: 1007020 - protein, 72 aa, Homo sapiens
SSVYRKLGTVRRQLTIPAKMDYAGNVAEAEGSWCPEQPGDGLKLPASDSAEASNSRTDCSWTPLNTQMSKPG

SEQ ID NO: 1007021 - protein, 37 aa, Homo sapiens
IPLHLGLGRSVPSSANSDVTQWSAQTERSALWAPLSV

SEQ ID NO: 1007022 - protein, 35 aa, Homo sapiens
DASIQDTKMPFKNLSRINRKYVGHNLLVTIDPSSM

SEQ ID NO: 1007023 - protein, 125 aa, Homo sapiens
MRGVIGRRSCSGMLWAAADTLLVSSVTPVTKDARAAGSGREVEVVADSSSRCINMSELLLVRSQLISGEAHDLVGDRASQSHPGSRCAWPRASSRREEKKPSSYSAGCQRTKARLEAPSVRLRLL

SEQ ID NO: 1007024 - protein, 84 aa, Homo sapiens
MAGALQCIPCDAYTMKELKMCARDESLQKVSHCPGLRSRSVDPVAPRPFITVIQRSCLGIICCPLTPPIMLRQLLVTAQLAEWY

SEQ ID NO: 1007025 - protein, 82 aa, Homo sapiens
SPAVWGLDVLALLHLFQHFPCIHASVGYSALDDELSEQDPIDHTSDLMVNLPQRAASGAVHFMGNLEPWQGLYSSSLMRRAK

SEQ ID NO: 1007026 - protein, 79 aa, Homo sapiens
  misc_feature (16)..(16): Xaa can be any naturally occurring amino acid
PANLLGYWRISRVVQXPLNDIWRSARCSRIDVNLYSAGMHRIGEYNVTRLHLYDIRRVSTDLTYRRNLSREACTAVVNT

SEQ ID NO: 1007027 - protein, 39 aa, Homo sapiens
RQKKESEAVEWLAEGPACTGKYLEKDPVLSREDLAMKYT

SEQ ID NO: 1007028 - protein, 114 aa, Homo sapiens
QHHCEDWCNYLCLGKIMVRLAITQCQFDVSVEPRRQETRIQTMFLAWVKMGKSYSRTSQAETGPVRLFGLRAECCDKGDTPGAVKAGPSPPAERSSSLATVTALNKLFHLEGVD

SEQ ID NO: 1007029 - protein, 77 aa, Homo sapiens
RLILTIFGGQHGTHVSTELVQGGMHRSDKYTSTRLQVNDIGRSARFSQYQKELVQGGMHRSGKYTSSRKHACMNKIL

SEQ ID NO: 1007030 - protein, 40 aa, Homo sapiens
PSSTWGIPSQSSCIIKQNVQPSGPGATDSVRTTGEQQLHA

SEQ ID NO: 1007031 - protein, 50 aa, Homo sapiens
  misc_feature (2)..(2): Xaa can be any naturally occurring amino acid
MXPRVPVPADASQVVAKGLGLSKAYVGQKSSFTVDCSKAGNNMLLEGAAR

SEQ ID NO: 1007032 - protein, 70 aa, Homo sapiens
APANDIEEVSTVLTYRRNLYSGGMHRIGEYTSTRLHVNDHWEVSTVLTVMKELVQGGMHRSGEYHVELQA

SEQ ID NO: 1007033 - protein, 30 aa, Homo sapiens
MRQPANWQSCRFIVTRLPAFYDISVCHQLR

SEQ ID NO: 1007034 - protein, 136 aa, Homo sapiens
PQSGAWLIRKQAVSLKLAVRLLCISHGEELGTLEMERKKRRRKRKRESEITSDWVTWCILEEENRMSVRSLPFVTVMFPAHEAAQLNAVCSLWNSAGLSLRRVGFEFSLCTSVCGAYPCTPRVTAALITACLPLLR

SEQ ID NO: 1007035 - protein, 121 aa, Homo sapiens
VYVCYFKVTRKYNLRNTGYLVMSELGVLGCHLYQLLIHFITSYRSNVSVGVAHSEVNPNSLVMNSRGMWLTYVLGVGLSSYCLTQHSLLQFSCCLDFHIYYTLSGDVRLFACSVRNIFRNS

SEQ ID NO: 1007036 - protein, 97 aa, Homo sapiens
MHHRTPQAMRRLKVFPTRGSSSNAHPVIRVAVEAGSTPSELPLILDGLAQVHGSYPFLPPMVAGSGERVILGTGELYLYCVMPDLRKMYSEIDFLVG

SEQ ID NO: 1007037 - protein, 33 aa, Homo sapiens
GAVLPSPPMATITRASRDLVNAWRAATPWELSY

SEQ ID NO: 1007038 - protein, 71 aa, Homo sapiens
MATLADPGPRRERSGSGPNPPRAPTYRAHGGTNFDCGAPQTGRLPSSNGPQPPAVHPPPIAKHRDSSRNHG

SEQ ID NO: 1007039 - protein, 54 aa, Homo sapiens
  misc_feature (1)..(1): Xaa can be any naturally occurring amino acid
XIMHRRSAHASSCLTTGLWQAAMFHLHLNLSVQVMEEYSSASLDCTHVSTTGYG

SEQ ID NO: 1007040 - protein, 68 aa, Homo sapiens
ELHQLKRTLFINGISKYAESRKDPRSILRKPIPNLHSFSYSPPGVTIVARLNVPRMQQRNQGASGETL

SEQ ID NO: 1007041 - protein, 61 aa, Homo sapiens
MRLCLKVEEEGAGEAEGEGEGEGETETETTRAQGEEEDPEERHYHTEEGREQEGEEKTENR

SEQ ID NO: 1007042 - protein, 78 aa, Homo sapiens
HIRHQHARAIHTVHIRHQDAQCYNTGYNQTPGRRELTHGAYQTPRRRELHTVPVRHQDAERYHTGALSDTKTQTRFTR

SEQ ID NO: 1007043 - protein, 105 aa, Homo sapiens
GPPARAQRPPRPPIVSERTSPTGGCRKDSTAPPYVGLRPCSASPSSEMDTLEEFLEESNRSFPTHDTPSCRDDLLRDYFRKASDPPAIGGQPGPPAKKEGAKMPT

SEQ ID NO: 1007044 - protein, 164 aa, Homo sapiens
CGDQAETGGWSGTRGAAQWWKWPFPPLSCGHKECCRSPCADTALPPPKLSTTPLRAPLSVPTEGGQWFHSHRCPNGHTPEQSRAGLEGITPATRARVSPSGYSPSSSPENGHSGHQPGLRRTFLRHSGNQTQHRHCGTGPTQEGANRSVTVMPSKLFRGAPGSP

SEQ ID NO: 1007045 - protein, 48 aa, Homo sapiens
LEDRDAHLLFSGEELRAARRSRATVAQLLLDVAHAFPCSAMGLPWVPE

SEQ ID NO: 1007046 - protein, 60 aa, Homo sapiens
DASTRLSVRGNVRVDIRGTEHVSIPVTDRASLRVTSRESLRETVRESMCVSVRASVCPSE

SEQ ID NO: 1007047 - protein, 50 aa, Homo sapiens
  misc_feature (49)..(49): Xaa can be any naturally occurring amino acid
HVIDQDEEGEEITATAVTPMDHKVAEAAEEGREGEREFRKKFKVRPLSXS

SEQ ID NO: 1007048 - protein, 50 aa, Homo sapiens
MADTMLDGWGRPKQRLEEACTGVGVIRMRTECLKGGRRPTGAMCPATAVA

SEQ ID NO: 1007049 - protein, 39 aa, Homo sapiens
DDRYRPGMDERVYVFYPPWNDKGGGAQVPDAQPLRRAVL

SEQ ID NO: 1007050 - protein, 33 aa, Homo sapiens
MDRSSSSSIAFVSQASLGTRYKWDFNIFGVGVI

SEQ ID NO: 1007051 - protein, 69 aa, Homo sapiens
MLCKELNPYWHCCPRVEQTVKAKQLTPWILEATRMWPSCRWQRASCASSRPDRPMHDFGISYVMVRIKG

SEQ ID NO: 1007052 - protein, 31 aa, Homo sapiens
MAKQEKKKKKTGRAKRRMLYNRRFVNVVPTF

SEQ ID NO: 1007053 - protein, 45 aa, Homo sapiens
LVFDILLAGGRQIVGFCCQHHQVVDDALQVGDLSQHGQLSIHHRL

SEQ ID NO: 1007054 - protein, 105 aa, Homo sapiens
MQFSSGGLVASSRVLEGTSPLSKSFSTALWRVPRFQPDCKVTVVANTANSRKSTLVQPVRAAPRADFPFLPIVGLPHSGFVSLRSASSPMCMRIKAYLLKTQSSY

SEQ ID NO: 1007055 - protein, 45 aa, Homo sapiens
MTEACMVLMVADVYSPAAVHGFPVQVPVDTLSTVLTSKYREAGSL

SEQ ID NO: 1007056 - protein, 71 aa, Homo sapiens
YRIFAAWSVQTGVSPWRECSVLTGERLLEGWHWARDRGGQWPLWAAVVSGHPGLRSHTLVYVWIRLSISPD

SEQ ID NO: 1007057 - protein, 108 aa, Homo sapiens
IILLAGKNRYDYKIWQITVSCPRNVMLNNYTKQCILCYTKHYTKFHNCFKENKIPRNPTYKGCEGPLRGELQTTAQGNKIGYKQMEEHSMLMCRKNQYREDGHTAQGN

SEQ ID NO: 1007058 - protein, 74 aa, Homo sapiens
SEVTDSPVEPRGASLQRTPASLSDAIQRALPGRKWPRWNALPEQRIAGSREGLNWLNTGKEMALEVQTSEACQD

SEQ ID NO: 1007059 - protein, 37 aa, Homo sapiens
GSVVPASMEAEVGGYLSPEGRVCSVAKIAPLYFSLFV

SEQ ID NO: 1007060 - protein, 111 aa, Homo sapiens
MGLYIAIVALLWRHGPEKEVAALELLERIEQKYVAISDLYEPIDDGCESHVFCSCSYDATTHFETTCNELQDIYQRMGSTAFDFENMKRKQNDVFGEAEQLIVGPYRTLAG

SEQ ID NO: 1007061 - protein, 96 aa, Homo sapiens
ATERHWPDSTSQDVVSLGMDWKSSALLAYPRPGQCTEPNLRMNLVNRFRSFMRKLRRMSSESFPMVSILRTEHQAFREASLPCCAPFNAVQPRDAA

SEQ ID NO: 1007062 - protein, 101 aa, Homo sapiens
DVFEEPMSGMREAGIPESPDDSYSSYGSHCTDSLMRSSPVFNQRCQTRMRKIYKAKREMFCPDLLGRTEKVYVLESVSLKSDLTPVLKHTWFVLIPEELDV

SEQ ID NO: 1007063 - protein, 41 aa, Homo sapiens
LSDAQPLWGVCLQQEADELLGILRDFDHSGLWKPYWLRLIL

SEQ ID NO: 1007064 - protein, 144 aa, Homo sapiens
MPEEQGLLRVLHRTVQRVLTTIPQPLQDKLRPRWRKQCLPEVLDVKKGHRGLGKAVWQVDVGLCQLGGVLLVWPNSQLPVEQAERKTVLVGAGTLRTLLQEEPDSKGQYRLTRLRWEASNPRALKYAWCICLKWGFPCWEEASV

SEQ ID NO: 1007065 - protein, 103 aa, Homo sapiens
EDSVKAANWGQAWWLMPVIPALWKAEESRSPELRSLRPAWATWRNPISTKKKKKFTLWRGGGLIAPVPKEAEAENLFNPKRQRSQRVEIPLFHSTRANREKLC

SEQ ID NO: 1007066 - protein, 74 aa, Homo sapiens
AGRVWGQWGRHTGYIRKPHREEVTRRQLYKSDDLINHTEELEGGEELQTISKVTEPCFWYEKVQLPSKTDAKAL

SEQ ID NO: 1007067 - protein, 56 aa, Homo sapiens
AARIELGPGAAFCFDQTLGTAPYHRANFMHPMKPRYTKFHPMIKTLRAPPTELGAK

SEQ ID NO: 1007068 - protein, 56 aa, Homo sapiens
PYVLGVVPGRSGCAIPRSRGCCGLLLHSPSRPAVVAALQAHSVLFALAARGLLSVS

SEQ ID NO: 1007069 - protein, 51 aa, Homo sapiens
PLSPVTGNRMETGLSKIITYRENVLSTTIGQWPSDLEFQLPEIQGQQPAPP

SEQ ID NO: 1007070 - protein, 34 aa, Homo sapiens
QGSSATFSIRASVWLLGMFPTGLPFITQQGNTSS

SEQ ID NO: 1007071 - protein, 45 aa, Homo sapiens
QRSTTLDYGYHFKVNIGLYYAERGCIALPIAAPPYCGTAGMLRRR

SEQ ID NO: 1007072 - protein, 46 aa, Homo sapiens
  misc_feature (40)..(40): Xaa can be any naturally occurring amino acid
AQLTDIRQVRTVLYVSDAELVQGGMHRNDEYTYDQAPSLXLFGRSA

SEQ ID NO: 1007073 - protein, 33 aa, Homo sapiens
MEAARYSRSRLNLYSGGIAPHSKYTYDLATIYN

SEQ ID NO: 1007074 - protein, 69 aa, Homo sapiens
MKGLKCCGFNNYTDFEDSPYFTENSAFPPFCGNDNVTNTANESCTKQKAHEQKVEGCFNQLLYDIRTHA

SEQ ID NO: 1007075 - protein, 56 aa, Homo sapiens
PDWTTGLTAQRLSLTGEETAKKTDISAEVDAVPAGSPVPECRSTISCEPWQERGTG

SEQ ID NO: 1007076 - protein, 70 aa, Homo sapiens
SDAHPGFKLDLEWTHECVIFIIHTIFSIYPGQRRIWSPIGGGPSENHRAVESARKCQVHTCSLWLVFILQ

SEQ ID NO: 1007077 - protein, 42 aa, Homo sapiens
  misc_feature (35)..(35): Xaa can be any naturally occurring amino acid
AHGLMSMLAASIADTCASEIIAGRVTGHCSTDDIXRSVRRSL

SEQ ID NO: 1007078 - protein, 45 aa, Homo sapiens
  misc_feature (22)..(22): Xaa can be any naturally occurring amino acid
MGLEEESRFYRLQHCGQQVGRXHPTAAVVTEKPVDTGEGSTFRMS

SEQ ID NO: 1007079 - protein, 61 aa, Homo sapiens
MCASRSFCSFSYLRPVALLLSCQVSESHTAPSMLLLARSVTIVVEGPACSQGTSLPFSLLN

SEQ ID NO: 1007080 - protein, 57 aa, Homo sapiens
LFPGDPLRMCNADACAFDNASFPLGTDRLGRDVLAELFHASRASLVVGLAAAAASIL

SEQ ID NO: 1007081 - protein, 102 aa, Homo sapiens
STASPDDGLICMSEQARLPVSTFVLDHLQSKRSIEIPRKEPGTGQEAAAPPLTPPLSFPPSFPLGWAQVELTVVPLHPLAPPRLQDWRPTGPQTFHHHHYAQ

SEQ ID NO: 1007082 - protein, 54 aa, Homo sapiens
LPRAYSLGSPCTDSLTDTTLRALATPRFKLCACYATTFYDGTRVSYTVTTALPY

SEQ ID NO: 1007083 - protein, 64 aa, Homo sapiens
MILITIGRVVRLGPDSESNSGAPGCGVDSRQETGGMNWAHGSLPMCKFLTLCAITYYIVHVFNL

SEQ ID NO: 1007084 - protein, 50 aa, Homo sapiens
LVELRDRCPPSAHVRVKSVIIRAFQRNSSTSSETPPMCSSCTVSAGVIAR

SEQ ID NO: 1007085 - protein, 152 aa, Homo sapiens
MQDPRKTSLSTLPTYSMERGEEGDDLRVLISAPGVGKWAHVSLSMLRPWSLGGASLGLGPFPATVPLWQLRLGLKPPILLPSHSCGSVVQLSHLKGFCKLDPIWVWVRPCEPHDNPTLHRAPLLGQTAHLQRHTILASPTSESAEPWASLPI

SEQ ID NO: 1007086 - protein, 76 aa, Homo sapiens
GRGAAAGCLDLMVDLGLRLENIWVTDIEGVVYEGRTVLMDPDKARFTQKTDKRKLAEVIEGADVFLGLSCGGVLKP

SEQ ID NO: 1007087 - protein, 75 aa, Homo sapiens
MRVIRLPHRHTLFPKGGQGSHRGAVSVKMYDYLVGKDKGMRLQREWAATASAKLGLGGWLQKPGLRKIRHHWLGI

SEQ ID NO: 1007088 - protein, 56 aa, Homo sapiens
MRYSFFFFWKQGLIRWPGWGCGGSICGQGNLGLRGPHRFSGLSLWSSWDNRGDPQK

SEQ ID NO: 1007089 - protein, 31 aa, Homo sapiens
MPRRKAPTPGIATVMLVEATPGPSSHLATAR

SEQ ID NO: 1007090 - protein, 56 aa, Homo sapiens
RVSVQIEVYPVAVQWGWADEDISSRAVSVEYVEVMALLDSAEERPGGQILEIMSRN

SEQ ID NO: 1007091 - protein, 43 aa, Homo sapiens
SNELVPNRRWLGRLGEARSACHHHVALGRQHRVDVVGHVADLC

SEQ ID NO: 1007092 - protein, 52 aa, Homo sapiens
RWPHIDSPYTTHNGPHACGRCQRVRNSQIAPERYLSSCYVVSQTRLTEEQKG

SEQ ID NO: 1007093 - protein, 72 aa, Homo sapiens
GSSLNDILEVSTVAHVVDENLYSAGMHRSGKYTSTRIHLNDYLVVSTDLKYRRNLYEGGMHRSGEYTSSCMT

SEQ ID NO: 1007094 - protein, 33 aa, Homo sapiens
  misc_feature (19)..(19): Xaa can be any naturally occurring amino acid
MAHETDHALKAKPSSLSLXPQAKVSVNLLFFCH

SEQ ID NO: 1007095 - protein, 86 aa, Homo sapiens
ITSESRRRMLQLYQSRPEALEGALPGEVHSARSRAEPGGCCGLIVRVETKPTTCDINVWKILEICSMTGPVSGSFIQWVLYSEYSQ

SEQ ID NO: 1007096 - protein, 35 aa, Homo sapiens
DSTGSYVSSWQGRGYGERRSQLPIEDQPQVKVSFG

SEQ ID NO: 1007097 - protein, 109 aa, Homo sapiens
PQEVLLGHHLCSLKVQSLFRKLVVNAARLATHPSGQWAPLGPKARAEILSKSLGLDWGNPISGWWLYPTVTSLVPRMQHKVPLAFPSAFLEQKESFTIATTAVNVLGHP

SEQ ID NO: 1007098 - protein, 92 aa, Homo sapiens
QPLTEASNVTYLPLRCVKQILPLSYVDIAIPCNNKGAHSVGKLWWTAGSGTFCACMSPFPVNTPGAVLPDLYFYRDPEDIENEEQAAADTCK

SEQ ID NO: 1007099 - protein, 77 aa, Homo sapiens
MDIFVLVWTGLDLVRLVLGTCPTPREWKRGLITHGVPVWALWFWFGLGLTRYDYVFGTCPSPSEWKRGLITHSNACM

SEQ ID NO: 1007100 - protein, 60 aa, Homo sapiens
MAGRGEGQQAEREETENATDEYITVLRTVWSHSHEYVGASSVLTKDTILISSSSTFLKRQ

SEQ ID NO: 1007101 - protein, 34 aa, Homo sapiens
APAYRYLEVSTVLHVSDVNLYQGGMPPNGKYTST

SEQ ID NO: 1007102 - protein, 59 aa, Homo sapiens
GSSLTDIMEVSTVLTYDVNLYMGGMHRSGEYTYDQDPSLRIFGGQHVFSLYLTEACPRE

SEQ ID NO: 1007103 - protein, 38 aa, Homo sapiens
NRLQLNDILEVSTVLTCRRTLVQGGMHRNGRIHVDQAP

SEQ ID NO: 1007104 - protein, 49 aa, Homo sapiens
EDTLEVDSSSLTIFGGQHWCSRSRRNYVQGGIAPHGKYTSTRLHVYVSL

SEQ ID NO: 1007105 - protein, 48 aa, Homo sapiens
TCMGCTLRAVSIFTLVATTLSSQVRAMPADTSSTNTSSLGDHHRTASA

SEQ ID NO: 1007106 - protein, 62 aa, Homo sapiens
MGSCEHWKYRMLLMTIAMMMPQIGAAIQKDDAGSGRALRVRSGKAKEMRKKPSFLHSKYPAN

SEQ ID NO: 1007107 - protein, 69 aa, Homo sapiens
TIYGGQHGAHVSTELVPGRPCTEVVEYTYDQAPAINDIMEVQHGAHVVDGTMYQGGMHRSSAYTYELEA

SEQ ID NO: 1007108 - protein, 108 aa, Homo sapiens
GSSLRYLEVSTDAHVSTELVQGSACTEVVNTRLTRLHIKIFGGQHGSHVLTELVQEGMHRSGKYTSSWRHASVALVLKGSSKSRPGSSLTIFGGQHGAHVVDGTKYRE

SEQ ID NO: 1007109 - protein, 83 aa, Homo sapiens
RLQLRYKEVSTVLTCRRELVQGGMHRSGRIHVDQAPAKRYIGGQHGTHVVTELCPGRHSTAVVNTTYELQACIAIARVTGGSY

SEQ ID NO: 1007110 - protein, 78 aa, Homo sapiens
RSDLTIYGGQHGAHVSTELVQGGMHRIGKYTSTSSMFNVYLVVSTVLKYRRNLSQGGHSTAVVNTRRAAGHACMLVVL

SEQ ID NO: 1007111 - protein, 79 aa, Homo sapiens
ATDYRYLEVSTVLTCRRNLYSGGMHRSGKYTYDQDPSYRIFGGQHGAHVSTETMSKGGISTAVVNTTSSWRHCMHDRVL

SEQ ID NO: 1007112 - protein, 63 aa, Homo sapiens
GGHARCSRVDGTMYREGMHRHGAYTYNQAPVYNDITESQKGAHVSTELVQGGMQRSGEYTSSC

SEQ ID NO: 1007113 - protein, 87 aa, Homo sapiens
QAPFNDIMEVSTVLTCRRNLYREACTELVNTRTTRLHVNDIWWSDTELTVIARNYVQGGMHRSGEYTSSWRTCIAVASGTERYHYRV

SEQ ID NO: 1007114 - protein, 77 aa, Homo sapiens
HSPAVTYSPGVTHSPGVMPGPAVTHSPRDTYGHTITQGHMVYYSPEVTHSPEVTHSPGVTHSARVTYGHMITHGPVV

SEQ ID NO: 1007115 - protein, 87 aa, Homo sapiens
AGCMHADYGQEAPAVVLEALIDGQRAHLVGHVAQFPAQGLLAAVHHADVHDGSVRVDLVADGDVAPGASRAGAEERDAAVLSLEAGV

SEQ ID NO: 1007116 - protein, 91 aa, Homo sapiens
DYRGPHTAREDRGILSDSRHQVTARRQDPGSLAGGLGRRFPREENSLCWAQIHQLEDLLVTILSREPGAASGGPAPPLHEGGVTVYGCLAP

SEQ ID NO: 1007117 - protein, 55 aa, Homo sapiens
EDAQFLSYDNKYHKEQEEADFDNEDQQAQEFPDFDHKYHNSQEDPDFNYKYHQAQ

SEQ ID NO: 1007118 - protein, 137 aa, Homo sapiens
  misc_feature (123)..(123): Xaa can be any naturally occurring amino acid
IHIHCLDSIIHSLQEMSLPFPQDSALILCDESQDPDLAALMAGSQAPETFILGGLLLGIFLYSRYFCFTKSSVMSFLRSPRNGCLTPGRSPILRSASQRTASLARLPFMKMTPRITKRRLSLXVSLVFPRRRAEESR

SEQ ID NO: 1007119 - protein, 204 aa, Homo sapiens
  misc_feature (153)..(153): Xaa can be any naturally occurring amino acid
  misc_feature (180)..(180): Xaa can be any naturally occurring amino acid
  misc_feature (189)..(189): Xaa can be any naturally occurring amino acid
  misc_feature (197)..(197): Xaa can be any naturally occurring amino acid
ASKSSEIHTLLHELQQLISRIRDNRSTHRSHHFIHRDLLPTIFRINFNSFYTHPSFPLDPLHYIRKPDLKKIRGRPPKMRHAVSEMPFMHRLRSPLSKTGFYPSYGMPYSPSPLTAAPIGLAYYGMYPPTLYPPRPSPSFTTPLPPPFYMHAXHLLLNPAKYHKKKHKLLRQEAFLTTSXTPLLSMSTXPSVPPEMXYGWMVEH

SEQ ID NO: 1007120 - protein, 86 aa, Homo sapiens
VYRGCPTDCTDCLPLQIHTNDEVQGLTLTAHTTCSEATHPFARTCFCPSSNLTAFPLWDSSDPPASSPPSPWKKNTGQRNPPPPRG

SEQ ID NO: 1007121 - protein, 92 aa, Homo sapiens
QVILMVQIFHCLVCSIKQARSHEWARDMSRHFSKEDIYAINRHVRECSSSLAIREMQIKTTMRYHLTPVRMCDRLKKIMEDNEVLCLGDCCQ

SEQ ID NO: 1007122 - protein, 45 aa, Homo sapiens
MARVGVMARRRQWMTAASGFCTKSPFAGVSRKGGTMEMVQLWVNL

SEQ ID NO: 1007123 - protein, 40 aa, Homo sapiens
MAVISVSVTSYLRTTNPRCPYNNWRSEQGGLMPDGDGMSS

SEQ ID NO: 1007124 - protein, 128 aa, Homo sapiens
RTVPTDSFIHTLTHPSIHSLFDSFIHPSIHSPIYLRIYSFTHSVIRPSSFIYPSISIHLLIHPLIHSFIHPLIHPLIHLFIHPSLSTHPFIHSHSLIHPLIHSFIHLGIHPSTHLSIHASVCSLIHPT

SEQ ID NO: 1007125 - protein, 70 aa, Homo sapiens
RSILPGSEVTDKPCGAPWSVPAEDSGQLSDAIQRALPGRKWPRWNALPEQRIAGSREGLTLAEHREGNGT

SEQ ID NO: 1007126 - protein, 63 aa, Homo sapiens
DSILTSRGAVQCLVPAEKCLQDSPLKHSEPMGVDRGAAFAPPWTPIGLIRGPDWTEAGAMDVE

SEQ ID NO: 1007127 - protein, 138 aa, Homo sapiens
MPADSQREHDTTAPTGIKLAGIMPAIHQSQLKLAAQGRWTSQQDPDHPTQLILDETKLLLRTTALLWSLWRLTSLCTAEAGGDDKPSSSHTPDADYAYAQLKLEGTGPALVTHQKLTSLRTDEAGGLIKQVNEARNLK

SEQ ID NO: 1007128 - protein, 68 aa, Homo sapiens
ISMEMSWTKQAELDKKKVEGAIVLVLSSCASQGSMLQLIAPFGPTPLPSWLSSSCFFSSSAVAAAAEA

SEQ ID NO: 1007129 - protein, 111 aa, Homo sapiens
TRLAHDYYAKEGTRMLRADMNSEMYDKYRQMTHDAAIGSRTHHNLTGKKVMAVSHCETGLPSSHSTCNMIMSYFLNTSLDGTDVWTLIATGVMMLREFSQENIQALKFFEQ

SEQ ID NO: 1007130 - protein, 116 aa, Homo sapiens
HEPAAALLHHRDLVKGPPELAPALNMQSHTAEEGDLRVLDYEEAAAAAEALVTSSPRPPGQRWVWMNFESPSHSPGLRSLASNLFNWTLSYRADSDVFVPYGYLYPRSHPGDPPSG

SEQ ID NO: 1007131 - protein, 76 aa, Homo sapiens
SESSGDPSHPCVHVDRAAWPSVRPRRPCIHVSVRPRHLLRHVICASASSVRPRRAEDRASESSVDEPSVCLRSPSM

SEQ ID NO: 1007132 - protein, 128 aa, Homo sapiens
KWILDTDTFNEGLNEDDYEGNDDRNPVSRREKTIAKTLTDEVNSPDSDRGDKKGGNHKKRKRSHCPSPTPEAKKKKAKKGPSTPYTKSKRGHREEEQEDLTKDMDQPSPVPNVKEVTLPKTVNTKKDS

SEQ ID NO: 1007133 - protein, 122 aa, Homo sapiens
KTLEDPPVWGACMLCACVSSDYECPCSGLERVSLATWKPPLADSTLSWGPPASCPYLDGDLAELVLQSLPRSWTLAKNRESVWLRTPGGGVQVEKVISSQTVSFWLFGCPCLGFQPGRQRQL

SEQ ID NO: 1007134 - protein, 47 aa, Homo sapiens
MCESSHAASLSTPLFTLAQFCSPTDTNDPRTRQPLPPHYSSSSRMAV

SEQ ID NO: 1007135 - protein, 57 aa, Homo sapiens
RPVAQDVALVQGAVPQPRGSGAPSACILVGSTQFFHCSQLVHRGNPVEPQQQLQREC

SEQ ID NO: 1007136 - protein, 97 aa, Homo sapiens
  misc_feature (2)..(2): Xaa can be any naturally occurring amino acid
GXDSRESRTNGTTWQPGQSLILHWESARRLWVPFFDRAEAVKAKADEWPKTAPKKDENSSGPHATEDRDGESDNSDRVPVPSSQNYFSQAIEAAFMK

SEQ ID NO: 1007137 - protein, 56 aa, Homo sapiens
TQTASQQRTCGEGGLTATEDDAVVVEGSDAVGFYENNEASICYLGETVETEAKLRC

SEQ ID NO: 1007138 - protein, 142 aa, Homo sapiens
  misc_feature (133)..(133): Xaa can be any naturally occurring amino acid
EFSSRVEPHTARAHANMPAFDSSAVRLRADTGGETEARALGDGEPRRGTGQAQPTVQPPEAVLSGLSVPGHRMQLGQSHGIPRPPAESDVTQGGSWALASVQSPSVSLGKASRAASLGPPRLSLPRGLATRWXPWIALVWAL

SEQ ID NO: 1007139 - protein, 30 aa, Homo sapiens
MSKALTDYSDFPTLHCKMAREGWIGQGALE

SEQ ID NO: 1007140 - protein, 115 aa, Homo sapiens
HSPVRNIFLDEVEAPLDTCDWGSEPTWLPLQPRFPPSADDLPSRGLLALSLKYVPAGSEGAGLPPSGELHFWLKEARDLLPLLAVSVDTYVQCFELPDDSRPSLQRTRAVRRSLS

SEQ ID NO: 1007141 - protein, 81 aa, Homo sapiens
YLTKTLTERDCSDTSTTERKRGRDIVTKLSSEAVDLEHKKCTTVSSCCMNMSYQLSDGNFISIGKERLRCREAICQPYLLA

SEQ ID NO: 1007142 - protein, 90 aa, Homo sapiens
MSKKNHDKENCVKQLAKIEESTPVHDSAVKDDSAPDLMAPHSDQHEHSDTVHVPVSYTDSAPSPDSCSVATSDSFKTHDSFRTANSTKMR

SEQ ID NO: 1007143 - protein, 69 aa, Homo sapiens
DEDSRSQEEPVFGYEDSSSQEERGINNDDSSSHEEPGFDDDYSRSQEVTGISYVVSNPQEEPYLADDAQ

SEQ ID NO: 1007144 - protein, 45 aa, Homo sapiens
SPAIGCDSTAGRTVLSDEFVSSVSGHILAYLIKPNHSPVERYWGP

SEQ ID NO: 1007145 - protein, 40 aa, Homo sapiens
MAELRENMAQGLARARLGVPVWCSSPYGTAVTCGRQPWRR

SEQ ID NO: 1007146 - protein, 38 aa, Homo sapiens
PWRMIWLVSFGSRSLCGRTIEFMAEHLVQEILDSCSPV

SEQ ID NO: 1007147 - protein, 55 aa, Homo sapiens
DGLCLCVFCFCLCTHSRLSDCKTGMCHVLSVCILHCVLSRTHGTDGIGGRAYPVV

SEQ ID NO: 1007148 - protein, 59 aa, Homo sapiens
STLRTIEDVAYMLCFSATGLFDPSKPGGCQSTEEVISSKEKSKYKFPPAALPQEFRCLL

SEQ ID NO: 1007149 - protein, 38 aa, Homo sapiens
RNMPAHIMVKCRLFLQFNIIKLCTNHRSMVLTSYHGAD

SEQ ID NO: 1007150 - protein, 62 aa, Homo sapiens
LAPMEDATRLVAGGRDQTWFHQCLTVYCQLWILYYNVMIFINATTVPVVVKVSNYSMSPSSM

SEQ ID NO: 1007151 - protein, 70 aa, Homo sapiens
KFMGYPTRTKMNQAPESRNLTCATWPSQSRGVRVHYTLPGGLQGLTKAKPLGKQGLQAQIQPETLKGQIR

SEQ ID NO: 1007152 - protein, 56 aa, Homo sapiens
FRATSKTNGRVLNSRSFCPLGEQRAGISVTCLSKLFLCLAEKIPDGILLGHSHFVP

SEQ ID NO: 1007153 - protein, 33 aa, Homo sapiens
LEIPQFKGYPKYIMTPSSSLELERGRNERHATF

SEQ ID NO: 1007154 - protein, 76 aa, Homo sapiens
  misc_feature (23)..(23): Xaa can be any naturally occurring amino acid
PKTKPPQRKIPEQTKNKHGKGGXEEQPTNQKSPDPDRDTAKTYQRYKEELEPCNRKRSQTAEKEGSPPNSIKEASI

SEQ ID NO: 1007155 - protein, 89 aa, Homo sapiens
PPKPSSHFLLTFPQVLCGRAVAVAKLQPIIYPRGHPRKLNGRVLGQQSLLPTRPARELAFRRLVLSKLFLCLAEKIPDGMLLAIHTSRH

SEQ ID NO: 1007156 - protein, 36 aa, Homo sapiens
GYPMALDGVWAAPKNSRGSGFLCADEMGITSWVPLN

SEQ ID NO: 1007157 - protein, 34 aa, Homo sapiens
DSSRISQVKGYPVLAQDLDIIDVQKLFEKIIYIL

SEQ ID NO: 1007158 - protein, 54 aa, Homo sapiens
LTSLSEMNPVPQLEMQKSPVFCVLMLGAVDWSCSYSAILEPPDCILLVVQFVGY

SEQ ID NO: 1007159 - protein, 121 aa, Homo sapiens
RIPDLCLPLPSSVSLAAQFHPLCRHRSSTGFLSSKFSSTAYIPSLSDDSQPLGSLIPLFQALIQLDLQSLVLLPKLLTQGLQNAGALLILVHLVCQAHELQGHAAQVGEELAVVQLLGTHT

SEQ ID NO: 1007160 - protein, 42 aa, Homo sapiens
RPCLHQQRLIFAGKQLEDGRTLSDYNECQKESTLHLALRLRG

SEQ ID NO: 1007161 - protein, 194 aa, Homo sapiens
EDTRPMPAQLPIKYSPSTVFHFYYLNYLIGKNRILYSKNPTSSFQPAPSNGHLSGELTKHRKTGGKRKPYHKKRKMSRGAQLPTPTLAPATSTQSMFEEVTRNTVPKAACREFLLGLSVVFAKQEIIDVVYNAFNNELVHNKTLVKNCFMLIDSTPYFIDSTPYGQWYESHYALPLGNKKRDKLTPEEEEILNK

SEQ ID NO: 1007162 - protein, 36 aa, Homo sapiens
TLTLLQPKELEDALIVGVDCCDEDEHHLAFEAIGCC

SEQ ID NO: 1007163 - protein, 129 aa, Homo sapiens
IPDYAAPVNERDTLLRLFCHGAWAGGCRVEDIRTTLFDLLLGTQVVGVTTLLLAAVDSTRVKASIALAADHLVAVVFLGKLAERRLNNATSQAQHQVQGGLFLDVVVSESAAILQLFAGKYQTLAVQAY

SEQ ID NO: 1007164 - protein, 172 aa, Homo sapiens
DTRAMPAPALDDFSGLGVYTAPLDGIDAGGSQPEPGQTPCRLAGNLKASLVLLNPKGLPLGPLLKVYPECKQTAGQGSPCEEQEEPRAPVAPTPPTLIKSDIVNEISNLSQGDASASFPGSEPLLGSPDPERGGSLSMELGVSTGVSPARDEGSLRLCTDSLPETDDSLLCD

SEQ ID NO: 1007165 - protein, 57 aa, Homo sapiens
QLTKKEIDVISIPSECLFWIHEPNSKVIIPKCPKNQAFCFGFAFDETASNEVVYRFT

SEQ ID NO: 1007166 - protein, 62 aa, Homo sapiens
GSTPLTHTVSLFPTGRYGQLCKQASGVAPCSDDNYVLLVTFSLPCALVPGLRVDDYITSRSA

SEQ ID NO: 1007167 - protein, 160 aa, Homo sapiens
  misc_feature (152)..(152): Xaa can be any naturally occurring amino acid
TRPCLHQHGHSRPFENMFKKEPALTAGAKISKEKKPSPEPEGEVGPPKINGEAQPWLSASTEGLKIPMTPTSSFVSPPPPTASPHSNRTTPPEAAQNGQSPMAALILVADNAGGSHASKDANQVHSTTRRNSNSPPSPSSMNQRRLGPREVXGQGAGNTG

SEQ ID NO: 1007168 - protein, 52 aa, Homo sapiens
RQPVRGSMEPHSKEWLLIQGITGETWGECTWETAPQHILFPTWKNLLLVQAY

SEQ ID NO: 1007169 - protein, 67 aa, Homo sapiens
DILNLLPVTCHKAYRDLSYCSHASSAPQLWEISPKNISFIAIRTSLNVGSLSATRPTRWIMMLLIES

SEQ ID NO: 1007170 - protein, 69 aa, Homo sapiens
GSPACMHQGHDVNVFLRFPELRFASEASGSVCQNCSCRVQAVQIVGDLWRLRRDLPVSPQSFESDVRKF

SEQ ID NO: 1007171 - protein, 39 aa, Homo sapiens
MGHKISMLGISHVELKEFKGTSNIKINTCFPPPPRTVDK

SEQ ID NO: 1007172 - protein, 59 aa, Homo sapiens
TTGDSSQFEASTCTMFVKVEPRCKGLHSAPTESSPTLVMTGYKVMLGGQPSHCAFEGFV

SEQ ID NO: 1007173 - protein, 39 aa, Homo sapiens
TRPACASHIRNTGMRVSVFQENFLESEAVALLPRLEPNG

SEQ ID NO: 1007174 - protein, 102 aa, Homo sapiens
MSTVYEACPNAPTGSCTEVHDPSFGLRPRRHLVSFRAWACVCFFQLPLQIGRSTRSILPGPATHVPTGHATDCVTCSSGADDVALDPSSDIYPMTTTEWGAV

SEQ ID NO: 1007175 - protein, 63 aa, Homo sapiens
LQDMLTVEDFDVPDAFQRSQSTESVEVWSASDDLTSAMITHCQVVSLPVDLSRYSMLGILKVM

SEQ ID NO: 1007176 - protein, 104 aa, Homo sapiens
RLRRLRKLLGAWVVRQAAGKGTMSLSPCMAERLVAEVTQCGYPFPPGQISLKLRCHLLARADTARPKPCRHCSSIAPRVKRIGHCVLALVLRPHQAESLALLLR

SEQ ID NO: 1007177 - protein, 115 aa, Homo sapiens
RLTPMPRLECTSTSGAQVILPPQSPKQLGLQASTTTHGLFFVFFCGDSFALLPSLVLNSWAQAVLPPHPSKVLGLQAKPPCLSIIFERGSCSVAQAGMQWCDLDSLQSHPPSSAS

SEQ ID NO: 1007178 - protein, 60 aa, Homo sapiens
SGLRLMKTAVVTKKQNLADCPSVRIQLVILCVFSMTGDTGWSYKIPIPASGSPIFPLVHG

SEQ ID NO: 1007179 - protein, 57 aa, Homo sapiens
LQLLMNYKVNYIQVSKGPLLKSNLHPALEFSGSLGMKADTGALVQWASAHCRCQGRK

SEQ ID NO: 1007180 - protein, 88 aa, Homo sapiens
RSTASEYWDIGAAHAQLNFCIFSRDGVSPCWPGYSQTLDLRRFTHLGSQIVGITGMSHRPRPDPLPLNTSLRPNNKGFPLRNHRAVLR

SEQ ID NO: 1007181 - protein, 53 aa, Homo sapiens
ARSAGTKDAGTITGLNGCCCIITEPTGRPSPRAWTRMGCAGGDADRAHTLTVG

SEQ ID NO: 1007182 - protein, 44 aa, Homo sapiens
  misc_feature (2)..(2): Xaa can be any naturally occurring amino acid
MXRVGVGGAVSLLLGMNLAGSRDHLQLHHECDVDIAMTVRQHWC

SEQ ID NO: 1007183 - protein, 44 aa, Homo sapiens
QGTAVRSIMKCDVDIRKDLYANTVLVGRHTIVIGHWRTGLQKGR

SEQ ID NO: 1007184 - protein, 180 aa, Homo sapiens
GSSGTAVRYKVNISNKFYNSSADIRYNASRTTSYRKAYSSYVRLDEVCAFCQGNISILKLTHSSKCYAYVEIRIEAFAVDDGGARLVVLLLANPHLLEGGHVRPGWSHRSKPSTCALGGAMILIFMVLGARTEISFCILSAMPGYMVVPTDSTVLAVQVFADVTSHFMMELTLFSWMPQD

SEQ ID NO: 1007185 - protein, 44 aa, Homo sapiens
RSNRAGTRSHMHRIVIKANHCLKRQLQKMFVVFYNSALKEYLAN

SEQ ID NO: 1007186 - protein, 85 aa, Homo sapiens
SGQRLDDRRIRRGVSLGPRLQLPGWLCPEWQVLVTGQLFQAKQENLPILKRASGRRLPLTSRTLTQCTTTLVLVDSGDRTMTTKR

SEQ ID NO: 1007187 - protein, 55 aa, Homo sapiens
VFLPTTRFFPTTVSKSRSHETFFEHQYHPPMGIGLILLQGKSRAKSRKDEESLRE

SEQ ID NO: 1007188 - protein, 92 aa, Homo sapiens
MRLDFRRSGSGKQVSGLLRYRYSCEAPGMVSGVLSACVVNGWRPVVPPGSVLQALKPSPYEAELTDLTAPPEGASLMTVGGITARRDVQVWN

SEQ ID NO: 1007189 - protein, 42 aa, Homo sapiens
RSRSFPYGDDGGLTDDRRVGSTYTGATGPTLAPVTRLTPDFF

SEQ ID NO: 1007190 - protein, 139 aa, Homo sapiens
  misc_feature (132)..(132): Xaa can be any naturally occurring amino acid
MAYTTASVRRTRFRRVLVATAGGAAAALVFGAFFDYWPLRATSRFAGAGLLGRGGWLAFRVFVLEAGFRCDARTYGSWCWRFRSVRLDCGSTYGSYSLVPFRLVLYGLSGRPDLLHSTAHVFSLLRLLSRRXDGLNAWT

SEQ ID NO: 1007191 - protein, 36 aa, Homo sapiens
QEERTAGRENCRVRAVETSKCEEACYNQWWSLVYDK

SEQ ID NO: 1007192 - protein, 35 aa, Homo sapiens
SGFVLEGLVLSGGHFVFGGSKVDAVPKEKGPAYTG

SEQ ID NO: 1007193 - protein, 56 aa, Homo sapiens
MGNPGKQPGTSKLTSLISLSRGCGGEEQVSGSQGRQWPEEVSLPGISSFEWVCNQA

SEQ ID NO: 1007194 - protein, 185 aa, Homo sapiens
MAGKHMKGCSTLLVHGATGNENHNEILIKSTRKAKIKKTGHIVIGKKVELLSSSTLVAVNVKGPHLFKNHVERPGADGSLPVTPRHFGTATVEADSETQRDWRPTPVPTTGEHPGLYLQHTTKTLRYGCGLHTRLITRRLPHGTLTAGRHSVDSRDGGGYARDAWRLSTHVSLIAVANQTRELHL

SEQ ID NO: 1007195 - protein, 34 aa, Homo sapiens
RCLESGSGGASYSHSRFMEGSSTIRTFRFDAAVT

SEQ ID NO: 1007196 - protein, 44 aa, Homo sapiens
SGSALSLVLKDATEVAVIAQGQPSEYPQKGERKTKYTNHIKPKG

SEQ ID NO: 1007197 - protein, 43 aa, Homo sapiens
MVYCRHETSDLRVSISSVHTWHFGVGLDSGCSLQQEGDISDMK

SEQ ID NO: 1007198 - protein, 102 aa, Homo sapiens
DPKYHPVNGHNCEVGKTLSKHEMAGGFIQPKTVKVVLETLMVVVHVVLVGMTTFDHGRNITYVAVTEMVAIVVVDMVRSEYGCNGFGHDGLNFGSCVNPALI

SEQ ID NO: 1007199 - protein, 144 aa, Homo sapiens
GDLEDPCRKRELKNIAREIREAYRSINSSIDQAEERIPQIEDHLAEIRCEDKIREKRMKRNEQSLQEIWDYVKRPNLQLISVTESDGENGTKLENTLQRDVNSQENFLNLVQENLPNLVRQANIPIQEIHRPPLRYSMRRSTPR

SEQ ID NO: 1007200 - protein, 37 aa, Homo sapiens
MSKPPRTQRLQLNQPPVNPSPSQEEKPFSCADRQNYW

SEQ ID NO: 1007201 - protein, 156 aa, Homo sapiens
SGVRRAVREQVPGTVVNLACVEVRVALEEMGTEVTEDVVTACYALMEEGIQECTRCEQSLLKEPQKVQLVSVMKEAIGAVIHYLLQVGSEKQKEPFVLASVRILGAWLAEETSSLRKEVCQLLPFLVRYAKTLYEEAEEANDLSQQVANLAISPTS

SEQ ID NO: 1007202 - protein, 74 aa, Homo sapiens
AHDSTNSPSIFTHLLNISEALQQCCDLSQVWYQRILPGEAMGRRIQFPIESVHALHSTGPYPGKQRTYHYGVCP

SEQ ID NO: 1007203 - protein, 71 aa, Homo sapiens
EYWEVTHGCARVDGTCTGTACTYSGEYTSTRLHLNDLGRSARFSCVEGTCPGRHAAHVVTYTSTLVALHAC

SEQ ID NO: 1007204 - protein, 77 aa, Homo sapiens
AQCARDVEHRVKGDNLKALRLNDCPVGFQGPVTPFFKPIPPFGKGNAYPKPVTLTAIWKLTTWSAFPGSGVEGAESQ

SEQ ID NO: 1007205 - protein, 35 aa, Homo sapiens
  misc_feature (21)..(21): Xaa can be any naturally occurring amino acid
GYHPPSIVSGQVEKVELGLRXPRGKMCGIGGACLA

SEQ ID NO: 1007206 - protein, 63 aa, Homo sapiens
MGWGLQEKEQPVDFWEVFEMCAKHIAWSILPGACWLPMEEGRKSEQGTEGPPCKASFLTHPQV

SEQ ID NO: 1007207 - protein, 55 aa, Homo sapiens
MRGPESKEQQMGSIRGCWTVVRTQAVTSVFVSPETEGEGGITVSSRNSPAFNAHV

SEQ ID NO: 1007208 - protein, 75 aa, Homo sapiens
EDLIIPFVGHRHIALSAQYGGLQVSGQPCHGRCKGVQTRWQRVTRDGGPGLPHLPVQGGDTCGGLRGCGSPSGGT

SEQ ID NO: 1007209 - protein, 35 aa, Homo sapiens
SGAHIMIGNQAEGAGDADVTITGSPVSSAWPKKLI

SEQ ID NO: 1007210 - protein, 192 aa, Homo sapiens
RILKASRVGEGISAGQPGRLGVSSAGRCEGRETRGLRQSRQGCTQPRRVTFGTIRGGNRSDLQGMAEYRGWRTRSPLVLNLHSRPWQALGGLLSPIVESLAQLWVVSGACPPCASSGWSAERVRVEGQLGPFLLEADEALVLRVQVLGLVLHKCPELRGGRPGPEQAEQAAERDCSCGMGGPSPAAPGCHSG

SEQ ID NO: 1007211 - protein, 76 aa, Homo sapiens
LAQRRDDVGLRSGAFDSSVCSVGHMVRAFDQLFNMCSNCCNCTRVLDVVIPVAHSYRIIRLNWSCRCKREFGLLKD

SEQ ID NO: 1007212 - protein, 111 aa, Homo sapiens
MLNTAQRKMLNQRSMNKHDKAGHVILNKKCISWKEWSTIFFFTERACFCCARWIADGVIMVHCSLTLPDSSHPPTSDYFVAGTTSMSHNARLIFLFFVDRVSLCCPGRLVL

SEQ ID NO: 1007213 - protein, 123 aa, Homo sapiens
ILTRRRPGRTLRIMLLYKEELDGHGTWSWPGGVTGLLLGELQMTARPPRGRGVAAIPQKGTATRPPPQCTAGADGQLHLPLCPLVHVLLAGRWLTGTQGFASDPQPSGGFPRARGTLRPSGVH

SEQ ID NO: 1007214 - protein, 100 aa, Homo sapiens
  misc_feature (90)..(90): Xaa can be any naturally occurring amino acid
DDPYRRVGYLDRSMRAHQLRGGAGQVSSTRITLWWSTRAGPGSDTLPLNHPELGQGLNNWGTEVPPVPARAWMCRFRTKGLLVLQPLYSXMPWGHCGLRP

SEQ ID NO: 1007215 - protein, 90 aa, Homo sapiens
CQSDGTCQDAAIGGYKDQPSIWSAGPGKTLVNITPPQVGVLLAKDRPSSYVNGLTLGGQKSSVIRDSLLQDGELSMDLCTKSTDGAGTFN

SEQ ID NO: 1007216 - protein, 83 aa, Homo sapiens
LQAPGYWLESSRVGEHPGSRGLSATKPTGAPLPCSRGEVGGLSPRQRCLLGPQTVAEPTPCQLLKTDYDQYALLYKPGQQGPL

SEQ ID NO: 1007217 - protein, 46 aa, Homo sapiens
RGERASVFNTDTLCCHQSWAREDSSTDHPELGQGLNNGDRSPPSCL

SEQ ID NO: 1007218 - protein, 44 aa, Homo sapiens
ILSSGSLRLELGGGRVRDRGELRGQARRRRVSSVLRVDLAAEHM

SEQ ID NO: 1007219 - protein, 51 aa, Homo sapiens
MFLMMTSVERVSNHDTARSCVSVAHVKCVSISLVSLRLFRSSNLLWMYLAV

SEQ ID NO: 1007220 - protein, 110 aa, Homo sapiens
MRATPDIAARKKRNFILDQTRCVCCCPVGENMCLFAGFQRKAVVFCPIDDRLKSKNTDDEQIVEGKDLPEHAVLIMKGYFYPPYEVAECFDVISYVELHTEEAQRLLEQY

SEQ ID NO: 1007221 - protein, 34 aa, Homo sapiens
MVWTILPAIILVLIVLSSLRIRSITDEVLELSLP

SEQ ID NO: 1007222 - protein, 51 aa, Homo sapiens
MSPAVVRVWPWPSYTTVVRGLTDAPPSSPGGLLSRRPAGLPAWAWASFTPV

SEQ ID NO: 1007223 - protein, 56 aa, Homo sapiens
VRDGYTTGYYTRTLFLLVVFTTRNTFYFGHVTFYDFTDCNDTGPVWGLLYDVDPCT

SEQ ID NO: 1007224 - protein, 34 aa, Homo sapiens
MSINGKRVANNTQQVLEYQTCIKNFGGGDLGAEP

SEQ ID NO: 1007225 - protein, 162 aa, Homo sapiens
  misc_feature (53)..(53): Xaa can be any naturally occurring amino acid
MTRRSRYVSDCGQLKNIEGAAGDDIALQSCRQSVAKAPATVDGHVAGGQQLRXVTVIKGSQQEALGSLLVLPGGQLCQACGTLELVEDGLGLAVTLSSLGISGVDSALLNVAEHMRPILQVDADLDDIEAHVDDVLGAGAVVPGPGIALEGVADVPTVLVVV

SEQ ID NO: 1007226 - protein, 41 aa, Homo sapiens
LALVNVGHSTVGALPDIVVAVPPLPPLGGSSRRRADGLNAW

SEQ ID NO: 1007227 - protein, 99 aa, Homo sapiens
  misc_feature (69)..(69): Xaa can be any naturally occurring amino acid
VAICRRYRRTSGLVCRKVLGPLWSAPPSTCNKTVLSTPSGSSSCVKPPAARESWRRCISGASSLCLSSXALHSSRTFKVLFTDHPHEHVEFIQAQPVNS

SEQ ID NO: 1007228 - protein, 44 aa, Homo sapiens
MGQSVLRALAERRSEGTGADGLRLPSWRSKMGVALVVRVPRLNF

SEQ ID NO: 1007229 - protein, 40 aa, Homo sapiens
  misc_feature (39)..(39): Xaa can be any naturally occurring amino acid
LTDHDSGARLDYYALYHFAPVRYSFYDGTPVCYTVTAEXP

SEQ ID NO: 1007230 - protein, 36 aa, Homo sapiens
PAVTTCTGAVHNMHRLNFTYKLLNMICGDRVGGGGR

SEQ ID NO: 1007231 - protein, 89 aa, Homo sapiens
MQVASYKTLDCAGDYESANPGILAQPGVQVRDVLHGLIQYPEVFSLQGQYQLTEMCLDLHASATVYEELQVQPLLAGYTDRRSPSYPRV

SEQ ID NO: 1007232 - protein, 101 aa, Homo sapiens
LLADLRNMYTPKQTFFKIMTDSLQDHLNSKENYLQVNSVPDQSFSLAIIYYPSSNLIPKPKSNKILLKSATLMASHTQAFHLLCTLERPKFCYTRGTANRC

SEQ ID NO: 1007233 - protein, 52 aa, Homo sapiens
  misc_feature (18)..(18): Xaa can be any naturally occurring amino acid
ITGTAVARTLSVSTVRNXEADLMFAFLYNALGIPIAAGVLYPLTGWLLSPLI

SEQ ID NO: 1007234 - protein, 37 aa, Homo sapiens
MERGNRWRRRESLETAADHDRILRQIESTDTACIGPT

SEQ ID NO: 1007235 - protein, 35 aa, Homo sapiens
LFGESGRRMHRRMAVKVSVGTPGKAWDTAANEPRL

SEQ ID NO: 1007236 - protein, 75 aa, Homo sapiens
MFVLCTFPMIAKVIPYFVKRGESPFLSYDKVYPLAILTKNDILRHMAHMANQDPVSIIFNLISHIMTENIRMRKL

SEQ ID NO: 1007237 - protein, 60 aa, Homo sapiens
IIFPDDCEFKRVLSDPSGRVYVLEVQGRLQAAFLSGCRNPKTDQDDGALPGTVNELSDTT

SEQ ID NO: 1007238 - protein, 44 aa, Homo sapiens
DPHDTATPINTICRQQDIQNAIIVVLCRKLSDSLCSFLRFHTIT

SEQ ID NO: 1007239 - protein, 42 aa, Homo sapiens
MARRAKPGYKEVQARDGHHVTASLRQDLRTVGPGMRRQVVTP

SEQ ID NO: 1007240 - protein, 31 aa, Homo sapiens
MECKTVGHEPLAAIYYTSAQLATRVAARNLD

SEQ ID NO: 1007241 - protein, 53 aa, Homo sapiens
  misc_feature (38)..(38): Xaa can be any naturally occurring amino acid
IEDAKAGTVQTNGVVVWYGSSWLVMTVSTDDHVPPIGXSAEMAEKAGLGWSLM

SEQ ID NO: 1007242 - protein, 86 aa, Homo sapiens
MNLMVSRQGVLTLRIAIQIVHTTLETEQPKPAPETPSLRFHHPFHKPETLAPGRHLAMMLTSSTRTRPLPPLSHSQGSLTDLTIPT

SEQ ID NO: 1007243 - protein, 39 aa, Homo sapiens
TLYDRVCSLRVSTVARRVSGVYALALLAVYGRVTRGLLY

SEQ ID NO: 1007244 - protein, 84 aa, Homo sapiens
MVGATRSYAYRVAIHTVNPFCISVWTIVTLGATGTVTGALPQTVRCHSPSDRPTAANWPQAPSISEPRVSRTVTGIFHALKLSR

SEQ ID NO: 1007245 - protein, 68 aa, Homo sapiens
  misc_feature (17)..(17): Xaa can be any naturally occurring amino acid
IRTPNDNIYGYVNRASXHKEGKWLFPKTMEDFTEEANRGRVLKSELSKEAHGSKARDDMHVASGWAYG

SEQ ID NO: 1007246 - protein, 35 aa, Homo sapiens
PTHSGGVLRIIIREGGRGVSTHSGGVLRLPPRRVE

SEQ ID NO: 1007247 - protein, 66 aa, Homo sapiens
  misc_feature (30)..(30): Xaa can be any naturally occurring amino acid
  misc_feature (60)..(60): Xaa can be any naturally occurring amino acid
PYRTPPVGRGVTGLATGTTVWVAYDGLVTXTCYVSLPDDDRTDDRNRRRAFFDCATTVFXLTGGTP

SEQ ID NO: 1007248 - protein, 35 aa, Homo sapiens
AVSIYVGFRNLTALTERRDRPVGLRTCAVRRRHFL

SEQ ID NO: 1007249 - protein, 149 aa, Homo sapiens
VGIKQWIRPVDPDLSEMWYKHLAVVISFNGERSIEGKFLGCICHHCIINLMFNVFLENLKPGILTCSNTITEGSFRSPENLFGYQIGILKRLSQEMFLYPILWNSHFWWQRQGNRQTLRMIQKWDSQFKTMASSSSICAENIKPLEVPQ

SEQ ID NO: 1007250 - protein, 51 aa, Homo sapiens
LAASIYTISNTRKHLPGAASSQHIASKAIQQAAGPWKQLNGTHPPTSTWGT

SEQ ID NO: 1007251 - protein, 79 aa, Homo sapiens
RSRLRARAGTVVRILGKVSHVEGLDDSYDLFPSAMVKPKLLGQELSEADGDGADSARFEELLLQASKDAPAKPDNQTKN

SEQ ID NO: 1007252 - protein, 45 aa, Homo sapiens
MYHSYGSRGAGTCRRSRSSVLNGAQAGVQWRESAIAGISDTLWWI

SEQ ID NO: 1007253 - protein, 40 aa, Homo sapiens
DIEHNFISFLVTEKSSRNRHAQGYGIRHPTLSSTCGGNCV

SEQ ID NO: 1007254 - protein, 56 aa, Homo sapiens
HSIFWTNSDLTVVENKGELLEDIKRDFGSFDQFKEKLTVHLLVSKAQVGVGLGVRG

SEQ ID NO: 1007255 - protein, 78 aa, Homo sapiens
MLLAVQRHLTAVQVENGDSVLHLAIIHLTFSTGEGSTRSHQSGWISDDLITMENDLYQRPLALVEVIIKQERCGGGLA

SEQ ID NO: 1007256 - protein, 77 aa, Homo sapiens
VPRGLSPYAKPTEYTFFSSSHGTYSKIAHIIGYKTILKKSKRTKIIPDTSLDHSTIKIEVKTMKIAQKHAIILGVRG

SEQ ID NO: 1007257 - protein, 92 aa, Homo sapiens
NRAGTVILHRIKISVGRLGAEPNLRAVHAKTSPVKANYYTPIDPTNLTKRNKLPYGITAAILILRVHTQHSRVYRPQIVGSETSRMVQPAIK

SEQ ID NO: 1007258 - protein, 103 aa, Homo sapiens
RVSAWLVHWARGAREWHDVACPEVAIEWQVVQPSERGVVSPVFLAAEPAVQARFRACTKLGQDVLHAQVLVNRRKPEAVCFIPVSAVLGGLSSGCSSALAIDS

SEQ ID NO: 1007259 - protein, 69 aa, Homo sapiens
CIRLGSGGSLESDQAPVFNEYFGGPYWLLTCRRELVQGGMHRSGEYTSPGCMYAFLGRDHGSPILKELC

SEQ ID NO: 1007260 - protein, 112 aa, Homo sapiens
  misc_feature (19)..(19): Xaa can be any naturally occurring amino acid
FDTTIQSTHQFSTHIRSAXTSHSTSQQGSQHSNITTTTASKCTTGAHHSFNHITSNITTQSHSSSITSFMATTFFIATITHSAHTSSAQHTWHHTLLFNTTITRPSHHSTCT

SEQ ID NO: 1007261 - protein, 33 aa, Homo sapiens
PPTSASQSAGITGVSHKARPIFFLFGGNGLVWR

SEQ ID NO: 1007262 - protein, 31 aa, Homo sapiens
MINDKGDITTNPTEIRTTIREYYKHLYANGR

SEQ ID NO: 1007263 - protein, 136 aa, Homo sapiens
RGSCVIPFVKGSDGDMSSAVSYDLRANLSCVGDGCQGESSRMRLAEFRRIFELCSYSLPFTCITRKCSCCRLVLLIARDRSGLLCCDPIEKSQEAYLLVFEHYVNHRKHNIPDFWPKLLIKEEKCRVRILYGRGDD

SEQ ID NO: 1007264 - protein, 103 aa, Homo sapiens
MLENYSNLLSHWIWRQAIEIRVYLTEKNIPEIRASQRNSDRRSKFLVAELDYFQCTLERTKGYQGRYGHQIILNYGQKELVIKKDPFLEKIQRPPKGEFLLIE

SEQ ID NO: 1007265 - protein, 65 aa, Homo sapiens
TISLAPADGGAAMHSSASSYFRRLRRRLRSHPVPLDPTRYDAPLHALTTRSRADLSCCSLHMAPS

SEQ ID NO: 1007266 - protein, 62 aa, Homo sapiens
LDTVTRAHQLRGGAGPAVLQHWTRSADHPELGQWRTRSTRPPRSWARGLNKLGQQCPPVPSQ

SEQ ID NO: 1007267 - protein, 38 aa, Homo sapiens
IPRSAWRLGSSPILTVPIRFRLACIICMGTSLVVLKIH

SEQ ID NO: 1007268 - protein, 83 aa, Homo sapiens
VLYSDLIRRVGYFTRITRASYSFEEERAQLSFNTDSSADHPELGQWRTRSTDHPELSQGLNNGDRSPLSACQGPCSGWFVTKG

SEQ ID NO: 1007269 - protein, 68 aa, Homo sapiens
  misc_feature (45)..(45): Xaa can be any naturally occurring amino acid
  misc_feature (58)..(58): Xaa can be any naturally occurring amino acid
TTSSFHLALKMPCNFHHNPLFDILSRGTCHVLWGLLCRVPLVLSXKLVGLATHPQISXVLMVHSAAHV

SEQ ID NO: 1007270 - protein, 98 aa, Homo sapiens
AELRVSMETIYQWFKQAHQDHKASPTTLMGNCAHRRTSILHIVIKRGWKEGTKITFPNEGDAKADNIPADIDYVLKDKPHATVTAENGHQCDLQMPDQ

SEQ ID NO: 1007271 - protein, 39 aa, Homo sapiens
MTDIVLSALVPPESGEVVLSYSLLGSVQRCNGQLPVTLE

SEQ ID NO: 1007272 - protein, 45 aa, Homo sapiens
MSGLSSYSGLSGYSGMWATSGVSWLVGTVGSSVAVWASRGCRASR

SEQ ID NO: 1007273 - protein, 62 aa, Homo sapiens
QEMAELALQAVLRSAVGGLMRSSQVNGAKVVGLCLCHIKELLGHSESLSIRVLRQRTCWLVG

SEQ ID NO: 1007274 - protein, 53 aa, Homo sapiens
MLNIVHCLSDQNKYKEAAHLLNDALAIREKTLGKDHPAVVATLNNLAVLSGYS

SEQ ID NO: 1007275 - protein, 91 aa, Homo sapiens
  misc_feature (31)..(31): Xaa can be any naturally occurring amino acid
  misc_feature (79)..(79): Xaa can be any naturally occurring amino acid
MIAKGESGRRRQVRKGRANRYKSVGPLPRRXRRWARLPIKTTEQKKAPRTLRTPFQYNQDPQMEGAVRSWEDRVGSDGXSEVPGRQRSEGF

SEQ ID NO: 1007276 - protein, 69 aa, Homo sapiens
MGNDTDDLADTSSMLLKAFSSWFLASSIWHFLPYLGKGLPSLKLLAILYKKTASWHSFNLDGCSKAKEQ

SEQ ID NO: 1007277 - protein, 37 aa, Homo sapiens
RNYKSELLRIWGADASSVCAPDLRCYSGVPTKGAIFP

SEQ ID NO: 1007278 - protein, 154 aa, Homo sapiens
KGEPGIHVRNFLKIEVSSRIQPGQLLLPAPEAQSSTRTMAAPRTAQTRGGRRRDAAATDQKDSMGKGARPGQARKARRGLAYTLLNNPTLQGLPARTGPVGCQWCPSPEGRERSNHLPICAEACSCLPSSSLPALLPASHQPCSQQVLRITVVG

SEQ ID NO: 1007279 - protein, 129 aa, Homo sapiens
  misc_feature (77)..(77): Xaa can be any naturally occurring amino acid
MLTHRYVKTGGEQSGSEGSAQSHSARFLKQSAVGGWVPKFVLGSRLGSTTRVSGETTTTSTRCVQPGSKALGRIPHXTLYSRTQTPRSEYKGEIHRLLQGQGFTEDTIVFLPQTDKCMREQEDSPGLKL

SEQ ID NO: 1007280 - protein, 95 aa, Homo sapiens
  misc_feature (72)..(72): Xaa can be any naturally occurring amino acid
  misc_feature (79)..(79): Xaa can be any naturally occurring amino acid
MSSRTLRRVGYWLRASGCGSIRAARGECPKPQVHPSLKQSEVWGAESRTGCLLGFPDWGSTYSVSVVETDYXQYALLYXQGRQGPWGGLPHGHPL

SEQ ID NO: 1007281 - protein, 59 aa, Homo sapiens
QDTRRDIQKRGGQLGWRDPASGLGSPIGPAMPLIRDVGAGKNNGNPSGESPLGPWQEGR

SEQ ID NO: 1007282 - protein, 54 aa, Homo sapiens
  misc_feature (43)..(43): Xaa can be any naturally occurring amino acid
VLYRSYKGESGYEEEELWPQHCGTRWLEEEALCSGLHRSLEPXGQVAEQEEAAA

SEQ ID NO: 1007283 - protein, 32 aa, Homo sapiens
LEDLKGSRVEKGSSAGQAGRLGGEQCRRGEGR

SEQ ID NO: 1007284 - protein, 83 aa, Homo sapiens
  misc_feature (8)..(8): Xaa can be any naturally occurring amino acid
MAHLQLLXNQRNSSSGREGASPLMNVICKCTALPISGARTSPKYQHSLRLAGCAHRVGTRSSPEEKGAGPPSRESVCEHHQLP

SEQ ID NO: 1007285 - protein, 50 aa, Homo sapiens
GYKNKHVKQNKYQHSSSQTEQECHAGMLWVIRHVSTQMEWGKFQKTSLYE

SEQ ID NO: 1007286 - protein, 95 aa, Homo sapiens
PTSPTGDRQVGLCGLHLVPSHQNARPLGDAGGAAFPSLVSDTLPRLSLLAPSLLARSHSFLRGNSGLVVSVGIFGAVGLFGDSRASRGLSGYVGE

SEQ ID NO: 1007287 - protein, 67 aa, Homo sapiens
RRPFYAWTTRASIPVPKQRNATATGKQSSSSRAQARQAAAKAQGSSSKGKGSSRQGKQQQRQGKQSK

SEQ ID NO: 1007288 - protein, 61 aa, Homo sapiens
TNRAGTVPCLGQFLPFQMGVFTQCLYPHCIQDVTNWLFILQAHRQKELDVSDETWDLDFGF

SEQ ID NO: 1007289 - protein, 58 aa, Homo sapiens
MTAQALRDNSTMGYMAAKKHLAINPDHSIIETFRQQAQAATNDQSVQGSGPPLPFTET

SEQ ID NO: 1007290 - protein, 45 aa, Homo sapiens
EYSSRIVFLAHDRVMSSNIITGVKKLTNKATLWYVPLSLKNVDHG

SEQ ID NO: 1007291 - protein, 48 aa, Homo sapiens
RNTINKAKTTPKDRCHIMTDTSMTGLHLRYTILAEAQSYEILCDCPPP

SEQ ID NO: 1007292 - protein, 33 aa, Homo sapiens
MRGGNRSDRRIGRVQGLEDQKAPCFLNLQLPGP

SEQ ID NO: 1007293 - protein, 44 aa, Homo sapiens
IVGLQPGTVTQDGAEMMASGIGSERSDTALVSCGQPVGSEGSGQ

SEQ ID NO: 1007294 - protein, 67 aa, Homo sapiens
TLAEVGRKLADHILRVHLHLSISIFISSVSAARDKNSAISASSRSHGVPCCTRLLSLVTLMSSLCDN

SEQ ID NO: 1007295 - protein, 208 aa, Homo sapiens
  misc_feature (177)..(177): Xaa can be any naturally occurring amino acid
PVSERKGCRLQIPAFHTPVFKAANWEKLLTSSSARDTDPGAVLCRGSWLLQDLFLWTKWPLGKLYGNALYRPPEVLYCRRKKKKPRNILSIDCNVCSCFAGNLVCSTRLCLSEHSSDDDRRTFTGLPCNCADQFVPVCAQNGRTYPSACIARCVGLQDHQFEFGPCISKNPCNPKLXPKSQRCVAKPQVWLTTFDKFGCRPYECVSRK

SEQ ID NO: 1007296 - protein, 103 aa, Homo sapiens
RAGTFTGGGRRYCAGSTASQLHVTFPLKFPLDFIFGRTGTCPSAPRNKRAGGSQKALTTSPLTRDRKCLIKFFVIHIAFPSLSNLGSYNNEGSIKMNSTSLLP

SEQ ID NO: 1007297 - protein, 73 aa, Homo sapiens
EHTMVDDFQVLEVVKLSQMSIQVSHSHITFESQTLPITLWYKHFTHTLTHTRIHTHDTHTDNMHITLKCSPYE

SEQ ID NO: 1007298 - protein, 69 aa, Homo sapiens
DPYCVYVSDCCMRKLRPGDPYQLIAKASVEDFSKLGVAFLEDRLQMANGLIAQKIVCEVTLEHVSYVWV

SEQ ID NO: 1007299 - protein, 69 aa, Homo sapiens
  misc_feature (23)..(23): Xaa can be any naturally occurring amino acid
DQGSCTVVYVCVMCVPDSAIGSXLPALSGVASEPHVHDIRESLSFCVCLASLEVMSSSEFLFEAQELTE

SEQ ID NO: 1007300 - protein, 78 aa, Homo sapiens
MTVVMMVLMVLMMVMMVMMMVLMVLMMVMMVMMMVMMLVLLLLTDDDAGCELVMAWMMTGGDAWYLLMTGDDVCWSMM

SEQ ID NO: 1007301 - protein, 66 aa, Homo sapiens
VVLLCNRGDTSNGDSGAGGDGDVVTVVTVTVVTVVVVTVTVVTVTVTVTVMTVMVMVTLVTFACCH

SEQ ID NO: 1007302 - protein, 72 aa, Homo sapiens
  misc_feature (70)..(71): Xaa can be any naturally occurring amino acid
MRKLINVIHDIHKRKVKNHMIISIDAEKAFDKVQHPFMINDPLPKVGIRGNTSLTHDHYYTSRTNPHIKXXI

SEQ ID NO: 1007303 - protein, 94 aa, Homo sapiens
MLQDRNTTLGILTEAMRRRGREKLTVKKGSKWTFSRRNNMKEEESQLQNIAFQMIPASSSLTWVFITCFQLQVSLVLPSILTFQPQGDVHAPLS

SEQ ID NO: 1007304 - protein, 50 aa, Homo sapiens
MILVEVVVVVMEMMVRMVVEVVSGDGGDGGCGCDVSDGGDIGEKGDGGAS

SEQ ID NO: 1007305 - protein, 65 aa, Homo sapiens
MTRGLGSMIGMYTNSPGRLALWSRAAVSTSNPWRLVLAGESRGFDQLSQSSRALVRRVREVDQFS

SEQ ID NO: 1007306 - protein, 32 aa, Homo sapiens
MAMAEVSKVFWRWCGLLVDRAGAQWFPSGCIL

SEQ ID NO: 1007307 - protein, 74 aa, Homo sapiens
DGGCNDGGDDGGDGDDDGGGGDGDDGGVIGRTSVDNTIIVGSNFICFVCSNCHFISMSSAHGNIVSEEESASRM

SEQ ID NO: 1007308 - protein, 57 aa, Homo sapiens
MFLVVFAQYGSKSATTSCSSMPAAIHSPFVDRSRSHRRCMAEFVAFFKICAAALIAP

SEQ ID NO: 1007309 - protein, 50 aa, Homo sapiens
LCRKMSCTGKQQSGLDGERTDQGWQEEESSLQLWTRGPHRQNRGEGRGVG

SEQ ID NO: 1007310 - protein, 43 aa, Homo sapiens
MPSSRRSQKEHETKTQESISDCTEEGVRVETCALALAKETDLK

SEQ ID NO: 1007311 - protein, 126 aa, Homo sapiens
ISRRLVMVYTDAMNIGEHVSFPIMDFSGYMTRSGIARSYDSSVLTFLRTLQYMFSISGYTINFCYFNAITVCSYFVTRSSRKLTEGPEIRRGFHGKRGRCGFGARDHLFPGVDLSLHRSRSGRRVI

SEQ ID NO: 1007312 - protein, 96 aa, Homo sapiens
MHYEKDQRCRPLRLLQPIAMPKIFTKEPYDTHILNLHVHYCSNPSLIPSTNNMSSTNKYLPSNQHKSRSTIHASHVKPSSLLYPMIRMSIQLKIRT

SEQ ID NO: 1007313 - protein, 76 aa, Homo sapiens
IDLFMAFVEGVKNSGGRSVQRTLKELGLDGSGFHLTTHDTENPSFLTYKIWKQTRLSDEWGEGNTQLRSLLQRDAQ

SEQ ID NO: 1007314 - protein, 68 aa, Homo sapiens
MTRKLIKVIHDIHKRKVKNHMIISIDAEKAFGQSPTSIHDQDPRQSGYRGNTPEHDHSNLGQTHIKDN

SEQ ID NO: 1007315 - protein, 51 aa, Homo sapiens
IATPEEPVVGIQASRYHITLGTSHSNQSSLCKYTHHRDTFPEGEKVDLLSM

SEQ ID NO: 1007316 - protein, 36 aa, Homo sapiens
MDTGGFYRTLSGTRLRIMYDCFDVWTTYYITRLVTT

SEQ ID NO: 1007317 - protein, 33 aa, Homo sapiens
  misc_feature (1)..(1): Xaa can be any naturally occurring amino acid
XPLRVSSRFRVPIPLRLPLLLRIFIRWFQFPPR

SEQ ID NO: 1007318 - protein, 37 aa, Homo sapiens
  misc_feature (6)..(6): Xaa can be any naturally occurring amino acid
MICGAXNSEGVDKLLGGEQTLDTAFIFDLWFLFSVDR

SEQ ID NO: 1007319 - protein, 56 aa, Homo sapiens
MANTAPIDKDIRWQCAAYILCIMYYNVSGGTFNSTHARETSYGDIGRFYTPELIIF

SEQ ID NO: 1007320 - protein, 66 aa, Homo sapiens
MTRKTTCTPMFIAALFTIAQTWQQPKCPLTEEWLQKWYIYTMEYYSAIKKNEIPAFFAMWMNPSAN

SEQ ID NO: 1007321 - protein, 86 aa, Homo sapiens
TISDGDRTAVASIKAKMDISVGQQSTTFIGCPLSSKQVFPVTSSSPHILVQGGGMRKEKKTKGKEDVEDGQVGILCHTASPSSLRR

SEQ ID NO: 1007322 - protein, 43 aa, Homo sapiens
  misc_feature (28)..(28): Xaa can be any naturally occurring amino acid
MSRYSDSLESVVERMYIYSYEYNYKVNXLSCWFECVPGELGGI

SEQ ID NO: 1007323 - protein, 41 aa, Homo sapiens
  misc_feature (2)..(2): Xaa can be any naturally occurring amino acid
IXRRIVAVKSSIMSESHPSLTHTSHKVPERSPSADIYMDGL

SEQ ID NO: 1007324 - protein, 47 aa, Homo sapiens
MPFRKYCYSRSITQKSTVMIMLSSPDSPQKQSPVRLKTRHHVFTTVR

SEQ ID NO: 1007325 - protein, 33 aa, Homo sapiens
VTTGLHHSQSNARSEPCLAIYTNSLRQHQILNP

SEQ ID NO: 1007326 - protein, 35 aa, Homo sapiens
MDISRITVAYISDVLSSLRLWIMAPEHMNSIALKK

SEQ ID NO: 1007327 - protein, 33 aa, Homo sapiens
VVFLQLPTHPHTLFGGPSFPVPSATFSGVPELE

SEQ ID NO: 1007328 - protein, 71 aa, Homo sapiens
CTVIRKLSSVIHDIHKRKSKHHMIISIDAEKAFDKVQHPFMIKTLANSGYRREHSLNIDHCNLVTNPSIKR

SEQ ID NO: 1007329 - protein, 56 aa, Homo sapiens
RSTQTLLVPMASTDLGEKQNALLFLSKHALGLSLVSPGELHFLRKEGCKGKLALVP

SEQ ID NO: 1007330 - protein, 70 aa, Homo sapiens
  misc_feature (63)..(63): Xaa can be any naturally occurring amino acid
RILDNSDDDTSNAPVHREQEAAQNLLVPMASNGLGEKPESAAFLSKDALGLSLVSRGEFHSRXLKLPEPS

SEQ ID NO: 1007331 - protein, 34 aa, Homo sapiens
CAFYRMSSSMAISTEPINHSCTGLLSTGLRDEKP

SEQ ID NO: 1007332 - protein, 42 aa, Homo sapiens
HTAPFKNVVQCLFLGTLLLQLNNGCRFGNLGYSIAKRSAPVP

SEQ ID NO: 1007333 - protein, 43 aa, Homo sapiens
VATVDGDDIGEVVVVLMEMMVRMVVEVVSGDGGDGGCWYVIVS

SEQ ID NO: 1007334 - protein, 49 aa, Homo sapiens
PYVLDSTRNLLPPPRNSQRSHRFLTSHNSSRYSDVLFREAFSHHPKITS

SEQ ID NO: 1007335 - protein, 59 aa, Homo sapiens
DVSFSVILVPKPITPAHSVQKQHTNSLIQLPLKYLAILLQSVRVIKNKSGETITAQRSR

SEQ ID NO: 1007336 - protein, 60 aa, Homo sapiens
FCLVSCNNRSDHIQVGVRSRLSSTLKASSFSSTLQSTIQTPRQGLRGPSRTLSDLPPLHN

SEQ ID NO: 1007337 - protein, 43 aa, Homo sapiens
MTGTPIVFIFDPLAWEPPYAEGVARLKDKKTHTHTPQIRGTRA

SEQ ID NO: 1007338 - protein, 41 aa, Homo sapiens
MEVPRLGIEVGAVATGLHYSHSNVKSKPKSSTYTMVTELEL

SEQ ID NO: 1007339 - protein, 33 aa, Homo sapiens
MTGTAYALPFLYTARRSDFSNEDKLLLTVIGYK

SEQ ID NO: 1007340 - protein, 48 aa, Homo sapiens
FVLHREDVAAYITKEDGGVLQTQTTLYLTTGASDGISCTVRRRGSSFA

SEQ ID NO: 1007341 - protein, 77 aa, Homo sapiens
ATATRQYQGVDQSYSHLKAGAGAIAQLTFGALGDLDLSFLVTTGQSHQACTMEISLLCSSQHGSWLKNEKPLGNATA

SEQ ID NO: 1007342 - protein, 46 aa, Homo sapiens
TVRLRAGGGLQHQHEELSLRKQVVLAEEDLALRIYLRCKSRMRRVN

SEQ ID NO: 1007343 - protein, 78 aa, Homo sapiens
  misc_feature (1)..(1): Xaa can be any naturally occurring amino acid
XVAVTVGESGHYHSSSDQGRGSLGQLVHSESVRTQYSVGRGRLVDLMSARTRYQSGGDSSGTPTAPSDLGSRNRAGKV

SEQ ID NO: 1007344 - protein, 75 aa, Homo sapiens
LDHAYEISDGTATEVSDQAMSVIYTTAHGTSDLNPLTRPGIESASSWIPVGFVTLATKKTLQNFLIIENCVGYIF

SEQ ID NO: 1007345 - protein, 75 aa, Homo sapiens
LPRHSNKRHKLHRSIGNLGPGTLPTLEPYMSEKSMHTPGFRDSAWNMPRRPSADLRVFRASEIHTDPEEPHGSSR

SEQ ID NO: 1007346 - protein, 49 aa, Homo sapiens
VIPLFALLYETLPIRCISIPALPALAVHSLHQLAWELPSTARTPGRHSL

SEQ ID NO: 1007347 - protein, 80 aa, Homo sapiens
DDAYTVVYRYSNSISQVNNGTLAFNQNLRGCVLLSSITNHSFLLPNVLLLSMAQCSKGVLSSRCAMPVECYNTLVTYKKE

SEQ ID NO: 1007348 - protein, 32 aa, Homo sapiens
MRTLSWFIFDALYLLKKGAQGVPVMVDAVDKP

SEQ ID NO: 1007349 - protein, 47 aa, Homo sapiens
  misc_feature (8)..(8): Xaa can be any naturally occurring amino acid
  misc_feature (45)..(45): Xaa can be any naturally occurring amino acid
YRHCSIGXNCGQDSVPGPGTSMSLWVQPLKKEEEEEEEEEEKYPXLS

SEQ ID NO: 1007350 - protein, 31 aa, Homo sapiens
MQFLPQEAKSLVLQPQMSVSPYCVTVTPQLR

SEQ ID NO: 1007351 - protein, 55 aa, Homo sapiens
MTPLKSPAAGGTGAGAMPQSRQKSLVLNRAGSPGVTGRDPRSSTQESETGLAGWD

SEQ ID NO: 1007352 - protein, 33 aa, Homo sapiens
MVTIIKPSGLEVEKATIFWISFGVIAHRAVFKV

SEQ ID NO: 1007353 - protein, 74 aa, Homo sapiens
ADARLGVVSELQPSAYAEHSHEGSEYASMTYTTAHSNAGILNPLRKARDRTHNLMVPSPICEPLSHNGNSSKYS

SEQ ID NO: 1007354 - protein, 94 aa, Homo sapiens
NSDAINLSSRQTDSPSANSTQEDGIAQNLLTSPLPKAIEPEKMAPPTLTPSDWIPKGQAKYKFAREGPLKHFLLSLRKAREQTVPRCVRKRSLN

SEQ ID NO: 1007355 - protein, 52 aa, Homo sapiens
CLVVRAALPKSKLSDCKHRFNFHIPRWEESEIRGQHASFWFKPPSRLQVAAS

SEQ ID NO: 1007356 - protein, 43 aa, Homo sapiens
AEYVFFFPADVARAGSRFTKQETNTRQSAKRIPALDEGLSSPL

SEQ ID NO: 1007357 - protein, 69 aa, Homo sapiens
  misc_feature (60)..(60): Xaa can be any naturally occurring amino acid
  misc_feature (66)..(66): Xaa can be any naturally occurring amino acid
GYIADAKKTHGREAFKPPGITSTLGTSHSKPVITLQGNLTTETRLQERGKARPSFHDREXCLLRSXTSP

SEQ ID NO: 1007358 - protein, 56 aa, Homo sapiens
RVLTGDHNGNSDKAVFLTSYSSLGPEHKPLICRGHSSGGGGRVYLSQKIKLQTMQT

SEQ ID NO: 1007359 - protein, 35 aa, Homo sapiens
RGTYDTLLRDTGLLPLSLYTDANATTPHRTTTLTT

SEQ ID NO: 1007360 - protein, 41 aa, Homo sapiens
MRRRITTVHGYTIIFNPLSEARIKPTTSWFLVGFTSATPRQ

SEQ ID NO: 1007361 - protein, 45 aa, Homo sapiens
MTPWTSERKPRIQPTHYSNIIYDKGDTDYTMEQGQLVQSVVLGKP

SEQ ID NO: 1007362 - protein, 46 aa, Homo sapiens
KLTLRMASKGQGTFSFWVMMGVYSSLPLDPLDVIDRLSREAFLGGR

SEQ ID NO: 1007363 - protein, 56 aa, Homo sapiens
  misc_feature (48)..(48): Xaa can be any naturally occurring amino acid
QQRDLDWTSIRKNSSTYDTNENPGAVNIDSASRILKSWFQDALTIRQXKCNRRNKN

SEQ ID NO: 1007364 - protein, 53 aa, Homo sapiens
WLRFSPWSRNFHEPWVLPLKKEEEEEEEEEEKYPLHSLVAGRVVDGEQRSNRM

SEQ ID NO: 1007365 - protein, 36 aa, Homo sapiens
HESSGIVGREYVIIDVSEEVEQEEKWEGAYLRNHHS

SEQ ID NO: 1007366 - protein, 54 aa, Homo sapiens
  misc_feature (31)..(31): Xaa can be any naturally occurring amino acid
GIRPRGEERSHAAEGNSGLKKLSSLRAEDRXWIGVTPTLRACALKPGCSYGNTT

SEQ ID NO: 1007367 - protein, 65 aa, Homo sapiens
VVVLYGDDDGDVMGIGGRKQVYLGMGLSGNRTTGLDICQQRGGGSLDKCGSRKEGRERCERSLRG

SEQ ID NO: 1007368 - protein, 69 aa, Homo sapiens
PLSMAVYTDSLCPVFPVTVHHRIVNVAALCCAGRIFLYIHSPCNSLILLTPNSKSIRTPPPDNRKSVIV

SEQ ID NO: 1007369 - protein, 99 aa, Homo sapiens
KPREWEIIFANKVTENGLIVQNLETPSAAPYQKNNPFKKWAEDLNRQFSKEDMQMCRETHEKMFSVIMVREMQIKTTLFYHRYTSQDGHHIKGVPTRGT

SEQ ID NO: 1007370 - protein, 141 aa, Homo sapiens
MWLFGVSGHGVSPSHEVSWNKKGKKVNFSDALRRLEFDVECMGQCQRIHAAEDTAGMKIVYDVCGPRTRIGRDHYSDANAILSSAEDLAASPGFPEHQLMGPLVDRWSDADHGQPPMLCAAMRQPLTLTITCVQRTSLPVD

SEQ ID NO: 1007371 - protein, 125 aa, Homo sapiens
ITLTGHTQIQCTLTHAEWLALTHKMHACTHQGTLVTQCTHTLAHLWHQRCALAAENSTLSTLESTPKGVWGRLATSEIKSLTHTASTLTWAHTHTQTHLHTPGHALTRMHTHVLSHMHTHTHIPG

SEQ ID NO: 1007372 - protein, 60 aa, Homo sapiens
CALWTNAQTQGGLVRIAALLVLTYAYVPKGKEGLGCSGSVGTSAWLVVLRSLETNSKRVL

SEQ ID NO: 1007373 - protein, 72 aa, Homo sapiens
MAKEGRQTQLIKYCKHSASCKTSSQIQIKGVSYSYPRCCNRQTASTSGQTPRRYTAHVKAKMRVSDQWMTFR

SEQ ID NO: 1007374 - protein, 66 aa, Homo sapiens
MWYTSSLFACHPSILRSFTFHFFFSHLPTLVWSSRCVHGLTDLVLLQLVVSVSAAARIQFLATVTP

SEQ ID NO: 1007375 - protein, 149 aa, Homo sapiens
SRLWVEVVHKRMPSKPHQHLEQLQTSPMESHVVLTGAKSQLRDLPEVHKPCFPKKKSNQCDLPSVACAATALCRLGNGALAGVSLALGVHSYDTPSLRLSYRGTTRTQWPDIPKPSCQQLFHSSPWAQVKVESLNLPFTLPFRPVLKQY

SEQ ID NO: 1007376 - protein, 49 aa, Homo sapiens
  misc_feature (43)..(43): Xaa can be any naturally occurring amino acid
ENPVDITLPSEECTTMYMTGGLQLRGRGTSFMNGSSQKDFSEXNYVRPG

SEQ ID NO: 1007377 - protein, 66 aa, Homo sapiens
MLSPRLLPHAHSRPSALTINQRCTVCQTGLRMKNPAIEPAMRAINALTLTLIMICVKPSTKDCDSP

SEQ ID NO: 1007378 - protein, 47 aa, Homo sapiens
MGGSEPIAGVEYTSSDYMIILRGCNSFTYLKAIVTPSRDVSVMNTDF

SEQ ID NO: 1007379 - protein, 69 aa, Homo sapiens
VLGTKTFAECMKHKDKKSVAAIWMQLESLTLSEVSQKEKDKYHMIITYVWNLKCGAHKPVYGTETDSHH

SEQ ID NO: 1007380 - protein, 70 aa, Homo sapiens
TVVFRGDFITHLQQLDRSTRQKINKETQALNDALNQMDLIDIYSTFHPKATEYTLFPSAHGTFSKIDHIL

SEQ ID NO: 1007381 - protein, 71 aa, Homo sapiens
CPLGADLDTSTRWQLDILLLSHGGLADRGQQAGKGCTAAQAPLLPSYSPLSSTTGFSRGLTHRLYKQRFSS

SEQ ID NO: 1007382 - protein, 51 aa, Homo sapiens
EIGWSKKNSYYPLPPICSSDPMADRKTVGWNVRKVMQTSAPCGEPCVQPPI

SEQ ID NO: 1007383 - protein, 37 aa, Homo sapiens
MEVQARGQSRAAAAAYTTATAHQIRAEHASVTYTTGY

SEQ ID NO: 1007384 - protein, 65 aa, Homo sapiens
SVTCAVVELWSDSVPCPGTSMSRGAALKKEEEEEEEEEEKYPDSLCGRGVVEGNKSNRMIRPMCT

SEQ ID NO: 1007385 - protein, 60 aa, Homo sapiens
MRMRLRNLADATGRYDNDDGDRQYLHNLQEMAKDHEDTRHFYLSPKMNILVILDLPNPKQ

SEQ ID NO: 1007386 - protein, 35 aa, Homo sapiens
VIIDMTVGKAMMKTGMNGRMVKQTMQHSETGINWV

SEQ ID NO: 1007387 - protein, 70 aa, Homo sapiens
SECNRTASIAVSDCNRRASDSGFRMCNRRASSYRLPDCNTAAEYYRPPDFNRRRSITGGRRLHGPRSITG

SEQ ID NO: 1007388 - protein, 74 aa, Homo sapiens
  misc_feature (27)..(27): Xaa can be any naturally occurring amino acid
VVYRSTYVLCWGVGSSSRGVCRDEKDXPRLRNRKEMRTGYVLNVEGSEEEKLQIVTQPNHTTCRSNAVLLEGGI

SEQ ID NO: 1007389 - protein, 42 aa, Homo sapiens
LHSYHGYSNRVQKARSQICIHRTHTYYVCYFGKYPMQHPLGY

SEQ ID NO: 1007390 - protein, 36 aa, Homo sapiens
NLQPSLSALSSNMQDIREVLARCAGEEEEERLNGGE

SEQ ID NO: 1007391 - protein, 58 aa, Homo sapiens
MANWLIQSSRIDAMNQAVERAWSCFCAFRARIRHFAEVCLAGSAIPDAEILRFPVTVI

SEQ ID NO: 1007392 - protein, 52 aa, Homo sapiens
LAGHSGTAAAQTKHTIPDIVNVLLEELVHHRYELPGFRTLEMAAIGARERVN

SEQ ID NO: 1007393 - protein, 76 aa, Homo sapiens
PSSIICKSDCVEILKKCGDQNKFPEEHTAESICEFLSPADDLESCIPLDTYLRPSALGNIIEEVTHPCNPNPCPAN

SEQ ID NO: 1007394 - protein, 41 aa, Homo sapiens
LGSHAAIGDAVEQLCVEGGHSLAADSAASRETGDVAAVGAA

SEQ ID NO: 1007395 - protein, 102 aa, Homo sapiens
MKTGAFWDSMGAQATYSNTKENGINGELTSADRETVEEVSARIVQVLTAEAVTVLNGEQETEAQHRELDCSSAFSELTKELICLLLQPHQLPQKRLSQCRKI

SEQ ID NO: 1007396 - protein, 36 aa, Homo sapiens
KDKIRRERQSLRTKGYMPCEQKDNDPVNQKIKTCEQ

SEQ ID NO: 1007397 - protein, 58 aa, Homo sapiens
MGQGFYSNRFSVETYKWWVYITQAQSSLGLTVMSVAGETLCSMQGVWVFQVSMSRYIV

SEQ ID NO: 1007398 - protein, 52 aa, Homo sapiens
ILWCTVTTTSKIIDTHAHIRHFPQKQSSTHKPHTYGQTPQLQIPVNMHRHIP

SEQ ID NO: 1007399 - protein, 67 aa, Homo sapiens
DPEVIIHFIRAHFHDLIILIIHISKSSPPNTLTRDLGLPKLESFGGDTTHLTSTNLLLLLLLLRITT

SEQ ID NO: 1007400 - protein, 72 aa, Homo sapiens
DLPDLMLRYGTQMCISVFDYTTDHGNTRSLTTERGRDQTCNLLVPSRIHFRCAMSGTPKKMVVVSLFFSLGP

SEQ ID NO: 1007401 - protein, 62 aa, Homo sapiens
MSDSNPCLADDAWVAESSFMERKYDVKSLFWQPKVGEGEPNRMDRHGRWDPCVGKVQCIHFE

SEQ ID NO: 1007402 - protein, 58 aa, Homo sapiens
QGRDRTHILMNTSQVNSDKPNRNSQNYVSLCRFSILMASSIPPVASIPIATQLEGSLS

SEQ ID NO: 1007403 - protein, 86 aa, Homo sapiens
GALRGYVYTSLQMQIFNPLCQARDQHLSPGPAETPLILLQAVETPPHIFTKHFQLRAYTAIEQRLNTNRGYRSSQFANSWLTSLLL

SEQ ID NO: 1007404 - protein, 82 aa, Homo sapiens
ARSSRAYNVVLPVTRTYTHTRIEASRPGTGSEPQLVTYITAVVQAGSFNPLCWAKGLNLHLCTGPQPPALGFFIYCATVGAP

SEQ ID NO: 1007405 - protein, 41 aa, Homo sapiens
KPSQVSPSHCFTEESADCMLRADMLTVNLIGMASDCMSSFG

SEQ ID NO: 1007406 - protein, 61 aa, Homo sapiens
MIYQLQLDTLLLLNEKCIVWHENGGQEAGVRDGGCPGAESHGEPMVVVRWRTYEGLVDMPA

SEQ ID NO: 1007407 - protein, 34 aa, Homo sapiens
LTTLESQTHISTFRKRNSTISMQTSNKKGSGQIP

SEQ ID NO: 1007408 - protein, 48 aa, Homo sapiens
IVYMGPTATGARTQRQQPSAMLSSIATRHVWNSEEEYSILAETTALVY

SEQ ID NO: 1007409 - protein, 36 aa, Homo sapiens
EVSVGTTSAGSLHLSGGTWCLTCQGPGVCLLRLVLQ

SEQ ID NO: 1007410 - protein, 35 aa, Homo sapiens
ECSGGDTHLVALDNSGAGPSLSPGAPPWVRSASPR

SEQ ID NO: 1007411 - protein, 48 aa, Homo sapiens
SGRICGPEHRVLRYKERLTENPKFTGETALGDLEATIITGTSTEQVDA

SEQ ID NO: 1007412 - protein, 40 aa, Homo sapiens
MAVYAYMTRPGPVLVIFTYHLISRPRYYKTGTTIMPTESL

SEQ ID NO: 1007413 - protein, 61 aa, Homo sapiens
AGKTCMSPHLAGLVLRKLQYGQQSTWTGTYVAVDEVSGRMGPTITSSFGCSTGPPPLLFLF

SEQ ID NO: 1007414 - protein, 41 aa, Homo sapiens
EEQEPPRKQILTEENMATHSPQHSLHKDHPHSSPPKTSPHS

SEQ ID NO: 1007415 - protein, 57 aa, Homo sapiens
RRILENPGLKVATAFFEPISAPGQRCNLGIRDTSAEARLWVRLVLTIPVTTGGSCGR

SEQ ID NO: 1007416 - protein, 48 aa, Homo sapiens
IYVMIVAGHRAALVPTAAAPSPPARPLALHVSHHCLVAPPLPHAPPLP

SEQ ID NO: 1007417 - protein, 65 aa, Homo sapiens
IELVPRDCPRRLLASGIRDSSLPFLPAPTIALMGAPAPAPSMGSLAQRTICKHLFRIQWLPLPKK

SEQ ID NO: 1007418 - protein, 82 aa, Homo sapiens
LDATEARYIDPVIIRVDMEDIRNQRCLRNLGIKALNLRRSLDFRVPYMTVHAPLSSVAARSAIGGARPTSARSSPSTHRYEQ

SEQ ID NO: 1007419 - protein, 55 aa, Homo sapiens
MLGALGRPLLAGGSEDGLGWGSQSTCVSEEQKPSGAGFLPMLLGQPYLIPPHCLV

SEQ ID NO: 1007420 - protein, 87 aa, Homo sapiens
QQHYAYITHSHKPPIVTQQTSICGPLQANPTLDSRPQYKLSNFSNGNRIIDFMAGTTEIPSFGELIPPVNNSHALFHNDSDLLSIQG

SEQ ID NO: 1007421 - protein, 87 aa, Homo sapiens
YSLQKENPADTELTCCVLRPHDLNGRVMWERALVGAVGHTAEYFQYGSPELEAHTLWVQPRVAGQLSQRVRKLMESVSHGRCEGVPP

SEQ ID NO: 1007422 - protein, 64 aa, Homo sapiens
PGIWAGIRGLLDTTNEAALRIGTHTLCWLQNARDNNHWTDLVLLNTGFLCGCDLGFLTVHTGAQ

SEQ ID NO: 1007423 - protein, 43 aa, Homo sapiens
GLNKEAGYIMGVIDHPESRKRERTAGKLVGDVQCRQVEHKQDD

SEQ ID NO: 1007424 - protein, 70 aa, Homo sapiens
LLSILGPLSGRWVCSIQKSLYTLWLFLLICELAYHPSLVIPALLWAHENRLTPRYVYLHHVVCVYTAFFL

SEQ ID NO: 1007425 - protein, 118 aa, Homo sapiens
MWQALTGRWECPVPLCFSELSRYPWRLPIIRGAQACVHPNTHHEYPSSGVGPKSRIPPIPHETVQVTPCPSPVLTVTSFIAHSPGLRPCTCGHRLIHSESALPGDMGSWSILVVARYM

SEQ ID NO: 1007426 - protein, 126 aa, Homo sapiens
VVLVNHCQSLPSHTECSPDIVQVIILNLKELFNLQHDLLGTDVLILGLPFFDMCICAVPSGSVVRAESLSVSVSNEICCPLFACLCHDPSLPSARRDSVQGLIGLSLIRILLPPAPSGSAHMAGPG

SEQ ID NO: 1007427 - protein, 82 aa, Homo sapiens
SNRARRDVYPNSIDVVPGSVNSCHRYSAISEYATVILLGNHVYSLVYRHLEIRRNFIDSNTKYPMSCLPRNITNKYNGCKQY

SEQ ID NO: 1007428 - protein, 84 aa, Homo sapiens
PVASRRVILSTPLHNEVGVYRKTRHVNIRTRHGLYPQSHNRLLVYPRAVRAPGCITITIIIETNFEMIKLIDIAARDCTGHGLL

SEQ ID NO: 1007429 - protein, 32 aa, Homo sapiens
MSKLLATEYTSWPMSTSGLGRRDFLIAKIYSS

SEQ ID NO: 1007430 - protein, 139 aa, Homo sapiens
MATPPEKLLLATSLNVNGPFSEKEYLRRFLSARRNPLASLRGYTRDFRFSIARLPGVPGVLAVALPIAAQGLGLLKGFVGAGSIGPSKVQEPCRGKAIPSLLGTEIVQPNDAGLLRPEAQVGWQQPWGWCPKMPDGTAI

SEQ ID NO: 1007431 - protein, 77 aa, Homo sapiens
HHRHSSLLRQNGVQEEPDAKDDKLLGAPRLAVEHCALNRKDWNDSPNSNYFYFQLISLIGYFKTSKIFIFNFCKTVV

SEQ ID NO: 1007432 - protein, 42 aa, Homo sapiens
MAPSQLSATSASQARVILLPEPPDQPGLQACTTTSSQLLYYE

SEQ ID NO: 1007433 - protein, 34 aa, Homo sapiens
EKRRPAISLSSWWLSLEEHPPLLLFLIAFAAFSG

SEQ ID NO: 1007434 - protein, 112 aa, Homo sapiens
SRDPPKHTAHYFHLTKLKLYTHETTTPYSFLLPVPGNHHLLSASVSVTTPVVKSENNLSCDWLISLSVVSSRFIHVVACPSFLKLNNRPLYAYTTLCLSICLWKDTWVAFTF

SEQ ID NO: 1007435 - protein, 106 aa, Homo sapiens
LLSLHPVPLHVRCIRPCAWRLCCELHQAEWASLDISQRKLYREVMLDTYRNLTSIGKKWKDQNIAYEHQNPRRNFRSLIEGNVTALQEDSHCGETFTQVPDDRLNF

SEQ ID NO: 1007436 - protein, 88 aa, Homo sapiens
MFCGRLNMHMKCTELGSGIQIHQGPNNCIDHTEGILKYMTTKSTLTQQITNVEKPHNHVNIQNWCTTEAARRVKTHPQFVIPYRCKVG

SEQ ID NO: 1007437 - protein, 109 aa, Homo sapiens
TGWADITTVPMQAGNSSFCHPLIIIVFLTDYMTGLRHNQLMNCPPHAPPLPIESCWYRYLRNAGCLLPLQLIQGLRDKLAISPEVQNLQIQVASTDGLYLAFSNSSEGS

SEQ ID NO: 1007438 - protein, 127 aa, Homo sapiens
QGLLNRSESSLSAFLVFSSIVLQAVGAQLVWELRSLLACARLRGNGFKTIIPKKQAKAMGPTPSSLQGYSQQSSLPYGVPSPSVTSQSRDTSGYGQSSYATNGQSQNTGYGLQSSPQGYGATCRASR

SEQ ID NO: 1007439 - protein, 79 aa, Homo sapiens
PLRVYVSRSSLPGGSPLLASPALGAPLCALNAVGLVGACRARRGLSGSSGPVGHVGDCRARRDLSGYVGTLAAYVGPGL

SEQ ID NO: 1007440 - protein, 110 aa, Homo sapiens
MIMVIRDMKETTLNSFGKDNGMPSQLLILTNLLVTCWVLLSELSEVNLNGSGNLRRITGGASPGKIVRIVVRGSNKVVELRKLRAPYMMPYVLCVVDEEEGLIEEVCSEM

SEQ ID NO: 1007441 - protein, 86 aa, Homo sapiens
MVYQGTVETVVHGAQLIDEHRALRNVRRASQTSPQDGIATLVRTQYTYIGSDFGYNFALILRPTVFQYMLAHIVPHIDVYICLCLV

SEQ ID NO: 1007442 - protein, 62 aa, Homo sapiens
KAVVAKSFLPIPLILPTKNLEMVADVIEDVPIYVSIEEGGSRCVVWFHGVVKMNVEAGALVA

SEQ ID NO: 1007443 - protein, 72 aa, Homo sapiens
LVRGMCGGYSSARDIFVLKGEYGRMIYPAIYQATQANSYFLIFPHPNIFNYDRDLLARAALQYDISIVWLRP

SEQ ID NO: 1007444 - protein, 30 aa, Homo sapiens
MCGVHGGGGGPLGRSQSILLRLPFRITRSR

SEQ ID NO: 1007445 - protein, 64 aa, Homo sapiens
MQDDTTCEYPDSCMVLFHEATRRLVVPRGVRAPGCITISIIIETKLEMSQSYRYSTTDGSGHGL

SEQ ID NO: 1007446 - protein, 77 aa, Homo sapiens
SRRVPEYPTSKMRGVSGNTTCEYPTLHGLYHKARTGYGYPSGVRAPAGITISIIIETKFEMIKLIDIARQTAQGMDY

SEQ ID NO: 1007447 - protein, 45 aa, Homo sapiens
MVAVIKEKGVEDVENTRDLFPNEVYRPMPPSSTQIHTLPYAVSKG

SEQ ID NO: 1007448 - protein, 77 aa, Homo sapiens
EICRIQPYHNVYQVEYDDSYRQERRILGGYLETYMNGALKELIYFYEGSPQILSLNYLVVMLRHVEQADGLSYVTSE

SEQ ID NO: 1007449 - protein, 112 aa, Homo sapiens
YSRSGICTVDPAGVEQSDGVGEENAQLMGAVACLSSLNPRIYVLSPEDNTQFKTGSTRPPPYLLLEACSQELCGPSPCLCMRSPLFSPAYSGLSPLSLSQTQGKREWRQGRA

SEQ ID NO: 1007450 - protein, 38 aa, Homo sapiens
WGLATLAQRSALASCSDCASAGSRPIKATQLVRGHGAA

SEQ ID NO: 1007451 - protein, 69 aa, Homo sapiens
  misc_feature (31)..(31): Xaa can be any naturally occurring amino acid
  misc_feature (34)..(34): Xaa can be any naturally occurring amino acid
  misc_feature (49)..(49): Xaa can be any naturally occurring amino acid
  misc_feature (59)..(59): Xaa can be any naturally occurring amino acid
VYLVRNDLKTIIVGIFCPMDHWDMVSYRRKXGRXKNKYKNTVTEDVATXRTLQSWCCYXNTLLINLSMV

SEQ ID NO: 1007452 - protein, 48 aa, Homo sapiens
DRRCAQWRAVSAHSLRLSHNSLRAPYTLAPEMLVVQRPEFPQSVGLVG

SEQ ID NO: 1007453 - protein, 89 aa, Homo sapiens
  misc_feature (18)..(18): Xaa can be any naturally occurring amino acid
HMRSLSRVWVTLSECWYXGAVKEIALEHKFNFLSKVIFTFLQKGYTHQQFGQESTPNKGDRVIYNLTRSPYCCIWFPLARTGPRFLYLS

SEQ ID NO: 1007454 - protein, 48 aa, Homo sapiens
VWIDGSFSDRCPGNNTQHPHPWRALPAIKRIARATTHFPTVKAPSSQI

SEQ ID NO: 1007455 - protein, 84 aa, Homo sapiens
  misc_feature (26)..(26): Xaa can be any naturally occurring amino acid
  misc_feature (31)..(31): Xaa can be any naturally occurring amino acid
  misc_feature (72)..(72): Xaa can be any naturally occurring amino acid
IPPVGNSRVFFHFQQMLNIFSQPSTXNIPGXLNIMPFTHAQTVQQQRPVLQPLSTHSFTPALCPTTMPWPHXPFPDTKVSKPQG

SEQ ID NO: 1007456 - protein, 45 aa, Homo sapiens
  misc_feature (29)..(29): Xaa can be any naturally occurring amino acid
LDNLDDWSLRTPTNTTRSYCLLLLLHWNXGLLIDVDPCRHCTRLA

SEQ ID NO: 1007457 - protein, 60 aa, Homo sapiens
DATQISPKHKGGLGGAKVYNFHPTMEIFKSFQVVYRIGTKITNSVDQILQVYGGIDKHGV

SEQ ID NO: 1007458 - protein, 88 aa, Homo sapiens
FWALAVLEYAHRDREIGGQKTVSFNLMEHKSFGKKKAGNGGMQPGIIDPYMRHFPKGVEKDRILVHRLSDKAWRDGALHMQGHRKGYR

SEQ ID NO: 1007459 - protein, 35 aa, Homo sapiens
QIQQARVQGQSGGPGPAGACIFQHQSSRGSTAARN

SEQ ID NO: 1007460 - protein, 38 aa, Homo sapiens
MGTRFVRIERLAVDARNPKTADVLRRVDQRVDPDLVAV

SEQ ID NO: 1007461 - protein, 70 aa, Homo sapiens
EVCNDVWFYENSFDFPDTLKAVQTPQTSSDYTRDHRFSFCSLSVLDDGTFASSSAQRLAAAHWRRILAPR

SEQ ID NO: 1007462 - protein, 101 aa, Homo sapiens
IDATIIAWRVGFHWQLGLLMGGSWIDTAVSSREQLGVTLILGGSYLIFTSTGKGVINVGLQLRIPRFHIIILGQVQTIGDRKLKSSGQDTKAGSLILSALP

SEQ ID NO: 1007463 - protein, 181 aa, Homo sapiens
VIDATAGVSRGIGYSLVMHTSAGAEGSGQARASPGSGREEFRSAPFIECQGRGTGNYYANAYSFGLATIERSEMSKKPTPSTWRAGELRTHVSRCQVGMRRTKGSRTQLRSQQGGYFFFFWLTATNPRNISGVPHWSNMKTVKCLIGIGVINTPGFMDLYWRKEKKTAKAFNRGIDKHRVP

SEQ ID NO: 1007464 - protein, 77 aa, Homo sapiens
MPLINMYSYSGPGFMSGLSESKQTHVHLRKVDAATLQIIITYAYTGNWARTASTVEQLYAHSWLPTRKNDVVYNRVD

SEQ ID NO: 1007465 - protein, 38 aa, Homo sapiens
MLDSRTIRQLLTGQFPFWGPRAGDSPLCSVQFFIMYRG

SEQ ID NO: 1007466 - protein, 134 aa, Homo sapiens
DATYYWIRLPLLGIYPEEKKSLYKKDTGKGRSIAAQLAMAKIWNGPHAHQSRSKENTVYVYQGILLSHKKISQRILDKATKTIGGGTHTLSKKGGGDNLQATCRRRKRDLPLSPYAKINSSNIQEPGGNGRLLF

SEQ ID NO: 1007467 - protein, 142 aa, Homo sapiens
  misc_feature (7)..(7): Xaa can be any naturally occurring amino acid
GVIDATXFLDNIKGRQGCLSTIEIGGVYLSYFENVHGFINKPQEEQFLKISTNSVVTGGWQLNVCNSNPGCVGGNGEDIYSSYHGSGPWGWSGKHGEVNIDEGFANPCIHGNGSDRVAAYHGGCEPGYTGVNGEVGSINRVP

SEQ ID NO: 1007468 - protein, 87 aa, Homo sapiens
IDATSHVQENTLLPLFLSSEDDQNVSLGCMAGSQFSHVLTEGFIAVSQQLSMDIFNRIISRHEAKLKHPGTAVLVSSNGFCNSWWDR

SEQ ID NO: 1007469 - protein, 47 aa, Homo sapiens
ATGLRKNPKFMETVAEKALQEYRKKHREEGDVDVALAPTVAWINTGY

SEQ ID NO: 1007470 - protein, 50 aa, Homo sapiens
DPGVIDATVGKSNIHISLLPVLLAVFLQRFLRHGLHKFRVLPGDRGIDKQ

SEQ ID NO: 1007471 - protein, 141 aa, Homo sapiens
  misc_feature (64)..(64): Xaa can be any naturally occurring amino acid
TDSPVLSTATSDGVRITGLLTSTTTGDFSVAGRRCDTRRLDDVTTDRVTGQRRYDDGVDLTARXLCKPTYYNDLLGFYLLDMTTRTATHDTVLTPDDRDQHLGPCYVDTTHTVTRQTTPLFTDRLLSRQLPDHDGDYVTLQ

SEQ ID NO: 1007472 - protein, 151 aa, Homo sapiens
GAGDLEDPGVIEATCGISKMDHITGSKTLLSKCKRSKIINSLSDHSTIKLELKTKTFTQNHTTTWKLNNRLLNDSGVNNKIKAEIKKLLESNENKETRYHNLGDTAKVVLRQKFIALNEHIRKLERFQVNHLTSQFKKLERLGGIDKHRVP

SEQ ID NO: 1007473 - protein, 84 aa, Homo sapiens
TGRICGQLFFDMSNGKQCCDDIMKIETTAPRKTTQALRKQGSLEHEMAIEPLDNIAAVTDILTQREGARLETPPPWLAMFTEQT

SEQ ID NO: 1007474 - protein, 38 aa, Homo sapiens
QLVPGPKLDSSYTNLFERYFGFSPRPSICRASRGRVGL

SEQ ID NO: 1007475 - protein, 61 aa, Homo sapiens
ISCNSFGFILLETLKVGLQTGRAGAEFTVLLLQCCSRVCRFSISMLFSLRYPTPLIDKVEP

SEQ ID NO: 1007476 - protein, 110 aa, Homo sapiens
MAFVKVSCGVTSQSGFPLIMQKGSPHFRTQGRQEDKQLDGIHVVCNHHQLSFLVLHHGVDGVNSCSKDRWSLRWDVPFASSLFSARGNSLCFFSCLVSGLYLWAKDKVEP

SEQ ID NO: 1007477 - protein, 50 aa, Homo sapiens
MCTCSGCAHQQRHLELDAHVGMSLRITAVIGGAIFKAARACHREVIGNVG

SEQ ID NO: 1007478 - protein, 101 aa, Homo sapiens
  misc_feature (70)..(70): Xaa can be any naturally occurring amino acid
QRALLGNERETRLLRVPMWKEEDIRNSIMFCTNEKFFCLEMLVNRVTLIPNACAHMERTCVHFNGLTGYXGCAGMCCGLTNVFGRQICYGQMSSPLLHVVK

SEQ ID NO: 1007479 - protein, 37 aa, Homo sapiens
RYVVLTGDVTSSGVSLESLPRTQWCSRAQCVSLLVSL

SEQ ID NO: 1007480 - protein, 32 aa, Homo sapiens
MTIRINSSHKPYLTHTSIYKLLLQLWKTQVVL

SEQ ID NO: 1007481 - protein, 41 aa, Homo sapiens
NWNYLFTTHDTTTTLLGQLHALLTTRLRHYRTWSLTGHVPI

SEQ ID NO: 1007482 - protein, 34 aa, Homo sapiens
YYRRLLQNLTHYFTTLTTLARDRTRVDLLTLIHY

SEQ ID NO: 1007483 - protein, 37 aa, Homo sapiens
SYHRNPGALYTLIILPRFTALFRYRSLVIDVAFYSWS

SEQ ID NO: 1007484 - protein, 68 aa, Homo sapiens
RNHSAGQAGLAVHYACINLVTPYEYKQAAEREALIIAMPIFLPRHQQHMVQLLPDSSYYSVLLQKQIL

SEQ ID NO: 1007485 - protein, 45 aa, Homo sapiens
VSGYALRLAGELTSGRDMVATALVALACGWFCVSPVPSPGYPGRP

SEQ ID NO: 1007486 - protein, 52 aa, Homo sapiens
YDRARYHLCQVCCVLPGSRVPADRDGGREKQNVKRIRHGAGISGNKTIIVEN

SEQ ID NO: 1007487 - protein, 38 aa, Homo sapiens
QRPHHRNRKHSIHKRLELYLVISSANLPDKRPNSTRNN

SEQ ID NO: 1007488 - protein, 166 aa, Homo sapiens
YSVTCPMQAGMLCGDIANCSWRGTGRAGLLGRTTPRHPAWFHLPPESPGEPLGRHLLLNALSCTHTSGLTRVPVAITEQGRGRRPWFCLCHGRGLKWRRSPCRWSTLVLSLVLTDATVRRLRPLEVTRADALAHPVSFFLTSRLTSTRPTDRRAVWCESNVMSAGN

SEQ ID NO: 1007489 - protein, 43 aa, Homo sapiens
MSLLIVVIYTGDTHLERGCLLVYSYYDATYDRQDQTYRPGRAE

SEQ ID NO: 1007490 - protein, 73 aa, Homo sapiens
SSATVSPRLFLLRWPSDTDLVCRLVSRAGGVPFTTLVSLYWYNSYCKAFEISCDLLIFPVFGAFAPSNLQVGE

SEQ ID NO: 1007491 - protein, 71 aa, Homo sapiens
ACSIQSSYSQQTAPQQLEQFQCILADNNFPVHQLLPFLVSLNNCLLSRHSSTRRAIILHKLTLPKLLSLLI

SEQ ID NO: 1007492 - protein, 50 aa, Homo sapiens
VLLVSNPVYPITVFGTCIWILSSASSLVYSSENVKSVIVFSCRTPLRLDS

SEQ ID NO: 1007493 - protein, 105 aa, Homo sapiens
MRLRQDQGTAPQTTVALARRLFCLIGFYDCGISLLLPRPELDTSWAPSESHPRLASVCSMGFIALGAYNALVPAGLCSLALAPCISLKMGGEVLPQLGQSPCPDP

SEQ ID NO: 1007494 - protein, 47 aa, Homo sapiens
RALGIGLWQGFYIDIVVMKLSGPKIEETPPGVSGGGYDFGYNGDFYR

SEQ ID NO: 1007495 - protein, 49 aa, Homo sapiens
MRFPSERTVCVHRPSRRRRSPSAFTTLLVEGVEISTPSPQRMGSLSPFQ

SEQ ID NO: 1007496 - protein, 42 aa, Homo sapiens
RLWRMSRVEALIAGTTLLVTLAAAAALYMGLLAGVLMSLSHL

SEQ ID NO: 1007497 - protein, 64 aa, Homo sapiens
AVQARSSSPGGAAMARPFAPSSVTFLSHYLISMKPNSERQGNSEVNLDRGAITKKVTTLMTKQL

SEQ ID NO: 1007498 - protein, 37 aa, Homo sapiens
HRWPPEYRSWGVHSYNLSYSGGGYTRITGPGEVEVAV

SEQ ID NO: 1007499 - protein, 48 aa, Homo sapiens
PQLRGAGMFGSHTSQHSTRFSGAGIGHVVVMHRVCARMCVPSAGTAGD

SEQ ID NO: 1007500 - protein, 105 aa, Homo sapiens
SARAYLFTFGLSRLILHPLMHWCGADQNITHLDCRMDLGGILAFCTRLACSPPHPPGSQGPGFQEAGMLAGRVGGPPSSLPRWDLQSWLSETGCLDQHLGFWISI

SEQ ID NO: 1007501 - protein, 95 aa, Homo sapiens
LVKGVDGKNLAGGNMFHFAEVQVEEAIILSAYNSEECWAGQSGQLNGSDFQVSVNAHKVLNFEHRYPHCNTCLSFSLSLSFSFFTILLEKPFWDA

SEQ ID NO: 1007502 - protein, 87 aa, Homo sapiens
VRVCEILIFIIHHWVPPRWPLGTYSKENLPCAQSTEEAILVWESFNNQVFNTLLEHKTCYMIRCSNKGIITHDRESLNGITNEERHC

SEQ ID NO: 1007503 - protein, 41 aa, Homo sapiens
MAEMVKTCVVLKIQKLAVHGDVTPVIPATREAEAREWLEPG

SEQ ID NO: 1007504 - protein, 59 aa, Homo sapiens
KGDGGWTGQQPLVWFERIAALVLQHALHHQLFEQQLSVHKKSTITTYFAPDYNGSYDST

SEQ ID NO: 1007505 - protein, 37 aa, Homo sapiens
MQLWAFPPSRKTGKYPVALPAAVDALRSALTSLRTSR

SEQ ID NO: 1007506 - protein, 94 aa, Homo sapiens
WMISAHRNLYLSGLSASPASASRVDGIPGMHQHTGLILVFGVQMGFQLAGQASLRPLTSSNPSSLTSQTVGIIGVSHRAQQWVTFRVPVGAQHW

SEQ ID NO: 1007507 - protein, 46 aa, Homo sapiens
AVTSLCGARVRTHRPWWPVDARNPPLVDVLRRVDPRVAPALVAVRL

SEQ ID NO: 1007508 - protein, 61 aa, Homo sapiens
DSGMIDCLGVRRAVVKNRYKNTVTADVASGRACRAVSLQNTLLQPSIGALPVALNHDFHVV

SEQ ID NO: 1007509 - protein, 126 aa, Homo sapiens
LNLGIGRSEYPDVTGAQPGVETRIASGTLTAKESVLPQLGLGFKLNANNELFASYAENIAAFVGGGSGGPLQVSPESFAASAGLEPEKSKSLEARFRTFGEQYQASIAAYNVKFDNRLLSLNPCSS

SEQ ID NO: 1007510 - protein, 50 aa, Homo sapiens
VPASWCGVTGVRAVAAFPMFSDISEQLKSFIFSNFVPAAGNVIQNYREQF

SEQ ID NO: 1007511 - protein, 159 aa, Homo sapiens
DRARYRQRLPYDAMTVVFPLVRKHGFENAEFRRHLLGQEVLLQLSPERAYGHAYAPDVDNPENPDDKAVNPASMEMRLAICCFKWAWPDTNQMGNKNRNKGFRFKRMKALSHRRSVATSVPSRSTAKGTSWLFSRSSIFSHYPQTRPGNSRQPSPLGNE

SEQ ID NO: 1007512 - protein, 155 aa, Homo sapiens
ELPPSATSADHRYDGARDTGGGRTAGTHPGGPGRLHPAKKGPQHTRSRRWVQAPHVTLQLPHDAQACHLPCTGRCCGKQSGVFTQWPWDSAPPYEGPLHSRVRWCRPWEQLAEHALQLDHSFHVPYTARAWHRAMLQKSVRFSGPSQGLPANWGG

SEQ ID NO: 1007513 - protein, 133 aa, Homo sapiens
ACEFSTASITCWFYMWVIYHRPVARKSRRGGGHRGSVPEGSEGQHTMPCCWRDMELALDVASRDVVQNLHSPIKVSTVLTPPHCRSLSVYLMGSQASVSSSIQWVYHQPHACGETIAHASAPLASGSNSVSHY

SEQ ID NO: 1007514 - protein, 51 aa, Homo sapiens
PTLLRVPKLTAVGADTGLVPTPLLSGGLGDVWYDPTTHSSGDRHVTRYLPT

SEQ ID NO: 1007515 - protein, 31 aa, Homo sapiens
MVVRAVVRLLGRLRRENGVTPGRLELSSEPE

SEQ ID NO: 1007516 - protein, 110 aa, Homo sapiens
MPFLSCHNILKRMSHFLNCHNTQAKGNWSPTTPTCMPNAIPIAFFFICTNVPYSLHGASLLGLTYLYPQLGARHAPSMLPITSSLSTYTTNPLRAENQAPTWTQRAHRWH

SEQ ID NO: 1007517 - protein, 39 aa, Homo sapiens
HLVTCAAVYALTPSMYKGKGTEDVVQFRAGKTNNDIKEI

SEQ ID NO: 1007518 - protein, 173 aa, Homo sapiens
GEERREDTARDDTRRRKSVSRLTRQNPNISPPRTNRQTRHWARKGSERAQWQAGYARTLGSTAPGAAQRVCAEAAAEVCMPYTQGQTRGWENADFTRLLGVPNPQKKSGSEGDVCTFGCRPGSPQTGKPEGRHPWPEPCPAGCQSTEALSWATKQQCQSQTDSLPPLSLLPRI

SEQ ID NO: 1007519 - protein, 40 aa, Homo sapiens
MRECYQSIFTSYFSECFWRSTHARRKFELDANGKNIFRFI

SEQ ID NO: 1007520 - protein, 53 aa, Homo sapiens
WSLATCYPSFQEALRSEVRAHGLESLREHGLRCAGSLRGGQSLPHKRCGRPVK

SEQ ID NO: 1007521 - protein, 39 aa, Homo sapiens
MTFLERYGLLWNDADDLLGHGGLLYDVDPDGLNAWTVAD

SEQ ID NO: 1007522 - protein, 68 aa, Homo sapiens
NSRASDLESPKRRESASIISMHSSTGQHQGQVQSGKSISRSPNLCPRQNKRKGPSKSLLQNYLANTSA

SEQ ID NO: 1007523 - protein, 58 aa, Homo sapiens
MITISISIINTDIFIITIITIINTIITITIIIIIISSSIVIIITIITIVMIITIIIII

SEQ ID NO: 1007524 - protein, 33 aa, Homo sapiens
MVLCIFILVTTLERIRPQNGHMTSEGAFLANVG

SEQ ID NO: 1007525 - protein, 101 aa, Homo sapiens
VGGTELDTLLNEQVEIALTDDRGDFAPRLFWDNGVTLNSIGRAKAAMGEGLHKAYTGERIRKEAVPMAGGKIEARWDTSDCLQYGQTRQGKTGSLRETDGS

SEQ ID NO: 1007526 - protein, 36 aa, Homo sapiens
TDDSSLLSFFRNHHCNTTLRQRYDADGGLLYDVDPD

SEQ ID NO: 1007527 - protein, 43 aa, Homo sapiens
MYPVLTTLYGRVHLGYRSVPRAMAVNEAPLGCEDGPKLAGECN

SEQ ID NO: 1007528 - protein, 45 aa, Homo sapiens
YVRCVGESCAVTLDRARIEAETLRVHGGFCPRHTVKVLHHDPELA

SEQ ID NO: 1007529 - protein, 33 aa, Homo sapiens
PARAPTPIVDLRQETASLCLSYLVEWAIGNSIC

SEQ ID NO: 1007530 - protein, 88 aa, Homo sapiens
NRIREDSLESPASMYTSLWRSATDAHVSTELVQGGMHRSGEYTSTRLHVYKIGSSARISYISRNLSRKLCTAVVNPRRRWRHACMLGS

SEQ ID NO: 1007531 - protein, 74 aa, Homo sapiens
VRLEVLAGSSIDRAGSIYNDIMECQHGTHVSTELVQGRHAPTVIEYTIDHGSSLNEYLEVSHECSDDRQETCPG

SEQ ID NO: 1007532 - protein, 61 aa, Homo sapiens
MTCELRLPSEHYRVRSASRREHYCAELRLPSWLYLCELRFPSRLFLFCSASRHCLTVSARW

SEQ ID NO: 1007533 - protein, 65 aa, Homo sapiens
MTEYNYITYTIKYIRAGHNSTKIPNAGRGAAAALMYVLCMNVCAAPSCVRRVFAVCCVDDVIRMR

SEQ ID NO: 1007534 - protein, 61 aa, Homo sapiens
MKYRAVHALAQLWGQFATRSQQPGMVAHSCNPSTLGGRERWMARAQEFQTHLDNIAKPCLY

SEQ ID NO: 1007535 - protein, 66 aa, Homo sapiens
PRYRIQNMRLPNLLGHETIKEVLEQAGAWIPRGHECSATRYTKKVPVLALRPRSASSDLGLRPIQP

SEQ ID NO: 1007536 - protein, 61 aa, Homo sapiens
TRTPVAAAQRGEVTTVTNNYYLTLYEGQRVIPPALLLLSRAFFASHCSDGCCYSSPTDEGK

SEQ ID NO: 1007537 - protein, 121 aa, Homo sapiens
MGADVISGMVLSCLGAWSGFRVRSGSVAGLDMRGDDSDEGQEAEYVDGPSRLHRGGTVQPVPDADAYQQGGLQQEGGEPEPRRPFQPDLQHGGQDDGGVAEDHPHGESEEERVDDGVIPTS

SEQ ID NO: 1007538 - protein, 39 aa, Homo sapiens
DSIQDYESVTMTASSTAKTSKRSRLDKYLSFTADLKSIW

SEQ ID NO: 1007539 - protein, 126 aa, Homo sapiens
MGSESKSFTTQLSEPVKERTRSEVWEATVFTRILYWSSPCVRFVSRDDQENRSYSCSSKEEVESIFHWKDLINSYNFLVKLTLTCRDSSNTRAQITMRRVVGGTVHIQNLPKDVRLTFIRMRPVKL

SEQ ID NO: 1007540 - protein, 67 aa, Homo sapiens
MNAIRAGTRFEFCYSESSTMPTTLTESHHLPTHPLEDFAFLTRLRRHGIPVGLFYRDVYWKFPLYGE

SEQ ID NO: 1007541 - protein, 56 aa, Homo sapiens
HGSPLTLPGLWFVCWLRGLSAERSGRGSEITWLGRRSIKRAEKAPVKGMGWVLLYD

SEQ ID NO: 1007542 - protein, 102 aa, Homo sapiens
SERVSLCAVERKNKESQWVVQILPLTDRPLQVRGIYMVKGACPGRTMAWDPVQCLASPLKSYYLPQCGGGGPLSKSVLSQLIIIKRPVILWVTILQGITRSR

SEQ ID NO: 1007543 - protein, 65 aa, Homo sapiens
GSTFAKVTDSDSSKKGQYLPKTRLDTLCKPHYQRLVKHLQMRAGSTYTGPFVGKCVCLSLLEEAH

SEQ ID NO: 1007544 - protein, 37 aa, Homo sapiens
QVQQSSQQQHGTRGTHHFIACGQQPSLSVLNSSIAAH

SEQ ID NO: 1007545 - protein, 73 aa, Homo sapiens
LRVDSYTILGGQHGAHVSTELVQEACTAVVNTRRPGSMFALLGGEHGAHVSKELVKKGMPGRGESTSSMEACI

SEQ ID NO: 1007546 - protein, 48 aa, Homo sapiens
MADSPVVTSHSYMQEPGKGSRAQVILIIAHVAYVLITILRVGNSKLRK

SEQ ID NO: 1007547 - protein, 87 aa, Homo sapiens
  misc_feature (53)..(53): Xaa can be any naturally occurring amino acid
  misc_feature (64)..(64): Xaa can be any naturally occurring amino acid
  misc_feature (68)..(68): Xaa can be any naturally occurring amino acid
  misc_feature (83)..(83): Xaa can be any naturally occurring amino acid
TLADVYPLNQEPQGKGKDSKEHVSPRLQKEESVNGCGVTTCTTSGFCVAACFXGDFHGSWVASXVHHXGTFKRPTMCTSAKQXVSGS

SEQ ID NO: 1007548 - protein, 52 aa, Homo sapiens
IELGTSRTCILGTSSCSKSDDMCMICFTEGASRKHQPIQRDGSHIFHLTVLS

SEQ ID NO: 1007549 - protein, 80 aa, Homo sapiens
  misc_feature (72)..(72): Xaa can be any naturally occurring amino acid
  misc_feature (76)..(76): Xaa can be any naturally occurring amino acid
ACCCWSSLRFPREPPGLQLHAAVQALAPACRDMFATRSQQPGMVAHTLSSQALWGGRAKVDGYEPSEFHDPXWDYXSQKP

SEQ ID NO: 1007550 - protein, 37 aa, Homo sapiens
MKSHSVAQAVVQSTISAHGSLRLLQFSGLSLRSSGGY

SEQ ID NO: 1007551 - protein, 51 aa, Homo sapiens
RIVGTSSGCVVGGQEVGGESVCSPESIESSVGMFWTCSVSPKAELVRLHAV

SEQ ID NO: 1007552 - protein, 108 aa, Homo sapiens
QDSVGWRAEPEIGEGEEPGDVTVKKSWQLREREACMTEAQVDEAVIMFDIERELLRAKLNREENRTITLKEEMESVKKIVKELEASHQHSSPDEQFKKPVTRVQRHSK

SEQ ID NO: 1007553 - protein, 78 aa, Homo sapiens
RKILWAPGICTAGGELAVARPGGAVNTQPSPTCPLSVQQHEGLYMAPSGLISCVRGHTLQSRTHAPSLAPFWGSSQKR

SEQ ID NO: 1007554 - protein, 59 aa, Homo sapiens
ARSPWREVNAKSAPRKCLWLVVFSGSELVPGTPSLSGVPHLYVRHMPEDHWGALKEAGG

SEQ ID NO: 1007555 - protein, 36 aa, Homo sapiens
EVPRAGSCGLTVGSPTPLRSCKLTEAEAHEMVILSQ

SEQ ID NO: 1007556 - protein, 39 aa, Homo sapiens
VHHVVLSSSVLLHAPCTSLSEIREILIESDACHGHAMLG

SEQ ID NO: 1007557 - protein, 65 aa, Homo sapiens
IELLRSGASVSQRCMMGVSAPADCSCCGKQGHRSIWNPVSHVPASCFMPGLWQPCEARDGEATYL

SEQ ID NO: 1007558 - protein, 84 aa, Homo sapiens
TPTSATAGNGLWPRGLLRKVRVTCCAFVPKLTSPGPPQCSSTPSHGSSTPSVGRLACGYLEVTALPCADSPHPCHAVALSGYSG

SEQ ID NO: 1007559 - protein, 84 aa, Homo sapiens
QAPRRSSRCMPGPPSPCRGRGQLRLLAFHPQQQCFFHSTLQVAIVGCTSPQAQAFRLHLLGWSGLRSGQAHVGEGHPLDVDPCT

SEQ ID NO: 1007560 - protein, 69 aa, Homo sapiens
AQDTYHYLPFRLTHRRPHWLTTKNSIERSLKALSSYEPLNFHAMFQAFLEMIHEASGYGGSMRVNLPAR

SEQ ID NO: 1007561 - protein, 35 aa, Homo sapiens
YRIELVPARSTRLKGHHRSGGNPDNVVTVPQCTHL

SEQ ID NO: 1007562 - protein, 144 aa, Homo sapiens
WDPNGNCLILVYILTDGMHELSIKFALILPTDLCKKNSKKNVSMSPPRVCTLIKTSVKRIIPHALMDCLGGLLGIIGEICLISCLSSEMNCDGGHSYVRNYLQKPTFALSELYPALINLWEAGKDKSTSLFVQATDIGLPTNMS

SEQ ID NO: 1007563 - protein, 34 aa, Homo sapiens
NELLQDRIFTREPQHTYHYLPFNLPHRRPHLFFP

SEQ ID NO: 1007564 - protein, 185 aa, Homo sapiens
CLLEVLWGDILPWEKGRMHNHKLENGQIALDYLRHRQVKLVNMRNDDIVDGDPKVTLGLIWTIILLFQISDIQVSGQSEDMTDRDKLLLRSQPMAEVYQGLPGDNFTHTWRDGRLFNAIITRDKPLIMDMNEVYRQINLENLDQAFSVADRDLRVTPVLDPEDGDVPQPDEKFMITYVWSLNDAM

SEQ ID NO: 1007565 - protein, 59 aa, Homo sapiens
MKSPRSRFLQAIKASQSNVSSRNALAVATPPRETAVINLYTINDKFNQNYTKPQGLVKF

SEQ ID NO: 1007566 - protein, 41 aa, Homo sapiens
PPHYCLLDRSDCGISLLTAGCLLNEIHIPRSLPGVDGTFHF

SEQ ID NO: 1007567 - protein, 33 aa, Homo sapiens
AAGTVYQSHHSLVADYNSSHCQSPDSNPRLSSE

SEQ ID NO: 1007568 - protein, 71 aa, Homo sapiens
TPSVGELTTTIYTSLPSSIPHQLHLNHTPPSRPHQLHLDITTSIYNLTEQHLNLINLNYTSPATPEPHSSI

SEQ ID NO: 1007569 - protein, 34 aa, Homo sapiens
MRTEEIAALVIDNGSGMCKAGFAGARLSLSPPLP

SEQ ID NO: 1007570 - protein, 33 aa, Homo sapiens
MRGEGSDVLQWLTAVKKQQVPESSAGWVRPRYD

SEQ ID NO: 1007571 - protein, 51 aa, Homo sapiens
MLTERKILGYIQLRKGPNVVSPYETTYNHFADAIKIYNKKPHKTEKSNNTL

SEQ ID NO: 1007572 - protein, 54 aa, Homo sapiens
MGGADLLGQSRYDGQDAGTSPRARAWITWGVAYLGSEAKLWVVGMVFPGELESR

SEQ ID NO: 1007573 - protein, 54 aa, Homo sapiens
MRCMEVVTLLKITLVPCGEEPMPSPHNGAGGGLVADPGPESPQSTFCSSSLSPL

SEQ ID NO: 1007574 - protein, 62 aa, Homo sapiens
THCVPSFTLCVSPHCLLMSPHHLLMSPPSSLVSPHRLLMSPHHLLMSPHSSLVSPHRLLMSP

SEQ ID NO: 1007575 - protein, 76 aa, Homo sapiens
KTAKGDAHEACPSFSYLVCYTCTTDRDSPVLASMPETLPNPTMPGSSALDAKERKCQDSSIWEQAKSRPLAFQSAA

SEQ ID NO: 1007576 - protein, 63 aa, Homo sapiens
LIRGTSVIFALRISYRPSVLQFHAAPLARWPFLWACAGSAAEVSWAIGLASGGPRLAVLCVLE

SEQ ID NO: 1007577 - protein, 65 aa, Homo sapiens
GPPITSLCDRVRAHLHKGLGEQIGMKTEVLVLNEMACSPPHRHVPTLSYNNKALAHQSNYTTTVH

SEQ ID NO: 1007578 - protein, 76 aa, Homo sapiens
PTEVPRVCCGVLPVMVGIRRFLDMCLSESRTSMLGRSRQSEPRVEGMCRIRACSNALMCLEIWSLRMGLYCASRAV

SEQ ID NO: 1007579 - protein, 58 aa, Homo sapiens
LVVAARSVVSSSQDVILEPSVNTRTHMVASRIKTHLRGEKERVMEDEALRVAGPLELG

SEQ ID NO: 1007580 - protein, 35 aa, Homo sapiens
YTSGRYMRWDFTKVGGPGTGTASRGSQDVVPAGLK

SEQ ID NO: 1007581 - protein, 72 aa, Homo sapiens
YKMSYYRFGQVYTEAKRPPGFDRVRNADIGNKDFELDVPEEAYTTEHWLGRIYTVKDLDNEACEGHICDVQL

SEQ ID NO: 1007582 - protein, 46 aa, Homo sapiens
MDKEDTGTGEDTNSNHSPDSSIHSLGIFTRSLNSNGFVNPQGFGWP

SEQ ID NO: 1007583 - protein, 108 aa, Homo sapiens
MCQEVSGGFDPGAELIFHRRMNVLSAGAYRGTCAYFIVNTSQSLFIVNTSHSVEPPSGITLRINAGFLLAAYLGRWAPILLKLWRALKPANHPLPAPKLSGYAPSPCS

SEQ ID NO: 1007584 - protein, 41 aa, Homo sapiens
TVYEVDPPTPLNAWDMICQRMLHAQNTSLYSSVTLYDLRRT

SEQ ID NO: 1007585 - protein, 53 aa, Homo sapiens
MRGWAIRYFVMLMFEISIIFSPALVLGPASAILAACHEVLFALCLVHEVHLDF

SEQ ID NO: 1007586 - protein, 116 aa, Homo sapiens
VRRCRPKHLRSVRDTYTLAMGQGGQEPDSISLTISATTWERVDSDMYIECIIRTQNRLKKMFQKSRQTIGHYHYTQWCCPSPLQTEHEKGKGTGPQCIREDRVSRLLYPNITRGKG

SEQ ID NO: 1007587 - protein, 40 aa, Homo sapiens
SVGPFSEVRLGRWGAVLYPQTSVDVCHSLLIFGAQLRDAV

SEQ ID NO: 1007588 - protein, 31 aa, Homo sapiens
MPAPSMHEAVHRDGQGLGPMGAYREPGISEL

SEQ ID NO: 1007589 - protein, 115 aa, Homo sapiens
YRHQTLDSSDDRTSLLAHVAPPAGEEAFENEMRHFSSLPLASFCASSSFSRAAPSAHLTEPSCSCFTPCSFLTSQLPHQPAVWSTETCPEWGLLINVCFTELSLEIPAATGEDHQ

SEQ ID NO: 1007590 - protein, 124 aa, Homo sapiens
TFLSLVQEAAGAADTAGEEKHGSEVCPPGIDLSPHTPAQGEYGRSQRNSKRLMMGIYGGRGDPLCLGRPACRPRPIPVALWSVILRGGPSVENTSTTSMAPGLALLTTGVSRQLVLRLVMTLST

SEQ ID NO: 1007591 - protein, 90 aa, Homo sapiens
FRDCFCFSLCLMCVYTLTECIRLADVIIILNWGFNREYYSIVNVQESHVAWFYAFTGGCYVARLNALVPPYSVYTIGSLTFGAPIDLMVR

SEQ ID NO: 1007592 - protein, 83 aa, Homo sapiens
AGGMRSDICVTKSMFLDKSDKEQWNLLAYKQTKAKGTESHEEGTSHNPHDKVRHKSTNKLNQNIQIQVSQASIDSRSLRVKLD

SEQ ID NO: 1007593 - protein, 107 aa, Homo sapiens
ETGGSRPAPFSTVTRCDRKAVIKKADRSEEMQQDSGECATQAREKYNIEKDMAAHIKKELDKKYNPTGHGIGGRNFGSDVTHETKHFIYFYRGQVAILRFKSGKGCG

SEQ ID NO: 1007594 - protein, 60 aa, Homo sapiens
DRTLYDGIDFYTSINPCPFDEWNADRFRGTRDPVEKALRAAKLDKSQIHDMVRVGGSPRL

SEQ ID NO: 1007595 - protein, 33 aa, Homo sapiens
MQSQANQTNALGISRGWDLSDAERYWTLRTTRT

SEQ ID NO: 1007596 - protein, 106 aa, Homo sapiens
DKRRTRSGLNGPGEALGKPQQPCERVGAGNINAEGPKLATGKTRSPTIIITEQAGVWSGQLPCTRIQPGSGKNYSGDLGARVARHELYKYINKYYDQIITARVRDA

SEQ ID NO: 1007597 - protein, 72 aa, Homo sapiens
MGRGVVQCRWYGAGSLSTLGEEHMIQCLADRGGAVSVTLGPLHPTPAQLVYDVNCYLPREWWELTGDSCVAK

SEQ ID NO: 1007598 - protein, 146 aa, Homo sapiens
TQKKNGGGSSLLSLTSGESVHSYVTAIFILMLRVCIGGDLEGWTIPLGPFKVEGRVWCTGLDPTVFYLGLLGCGSVVTVQGFLGLWFRSFYEGGNGFCNDVKTKVFGKPTIWHTAEPTALRSSRLNFSDDRLMDHSPRPMACGKMT

SEQ ID NO: 1007599 - protein, 125 aa, Homo sapiens
ESMLISGDYMAWAMCLGLGLIVLKFYLGGNDGGFWVIQWAMATEEYPRDLEGHVLLFGDAITIMGGGYDVGDYLLVRLRLDIVRTRRYVLRLVPHSGHLLWTTYEPARDFPGSNYGLYDVLTTDT

SEQ ID NO: 1007600 - protein, 60 aa, Homo sapiens
MGVGATEGPTLSTSLGELHTPFYNGENQGKRNASRVRLDELKPPGSPAEALNSGGLVLLS

SEQ ID NO: 1007601 - protein, 68 aa, Homo sapiens
LAGEVEAIRGDRPSKYGAPNLSMYLDPLCRPLFPWGLNKKVPLEAGAGVGVGASISCGFFSDDVIIRD

SEQ ID NO: 1007602 - protein, 114 aa, Homo sapiens
DLEDPDSILNQEVKILGGGGGWLMIPRLDQEVKILRRRLADPRIRPGGEDTGGEGWLMIPGLDQEVKILEEEAGCSQADQEVKTTGGGRWLLIPGIRPGGERYWLGTAVGYRVS

SEQ ID NO: 1007603 - protein, 54 aa, Homo sapiens
SGRFQRLGCSDSLFVGFVEVVDALAKAEDETYYRAVAHSLSNFFILVFIYVLVS

SEQ ID NO: 1007604 - protein, 74 aa, Homo sapiens
MQSGLLSSRSSVRWGQSHSRGFPRALQLLDQFWLALHLVMVFLPVPRAQAIPRVNKWLFRGPGTWSCCGASNRF

SEQ ID NO: 1007605 - protein, 176 aa, Homo sapiens
MTRAAWATAGWLCRHLPSLCALGQLDEHGPFLHCTSACRTWVHVGWFGIRRLHVITDGSYGQSVVLLGNYSVATACWRQVSWRVELAQAPRGKWLTAAVDWPDGEPGRPGADGAEQDWVQDDFHHVGFAAVQWGQLKAEGVEYVGAGYVRVRILLSKGARGNIHRMRLLMSPVLSC

SEQ ID NO: 1007606 - protein, 79 aa, Homo sapiens
EDSLGFHSYGSLPGADESGEGLKTELRHHHTSGLWGISQVPISGTRAMVVKPDSDLKGGLGVPYSPSAEGSTGLLSSIP

SEQ ID NO: 1007607 - protein, 43 aa, Homo sapiens
MCTGSVGEGMEEGAVSEAREAMAALEKDYAEVVIDSYEAVGEG

SEQ ID NO: 1007608 - protein, 56 aa, Homo sapiens
  misc_feature (55)..(55): Xaa can be any naturally occurring amino acid
RGPEYWRAARSASTTVAWAPEPTVSGDAIAATTAAPRAAAGHSGLWAGLPRPPLXA

SEQ ID NO: 1007609 - protein, 95 aa, Homo sapiens
YPSGLPGFVLQSRIGYGRSDVIGESLDRIQKSWNSSCPCYLQIHASYLIHIQKKTWFRPPEMRSEGYRNDRRPCMDMLSKVDSELDGWNGPRPCL

SEQ ID NO: 1007610 - protein, 58 aa, Homo sapiens
SVHWSVDLICFAVSCLDVTLLRLVDRGARTGFFVLVILLAFTLGLWSMMQPSTGLCSG

SEQ ID NO: 1007611 - protein, 62 aa, Homo sapiens
SVGPSVVRPAGSGAQMLRPAVYGRALVKAPLNSRYHQPFEDFRISQERLAETTFDMSMSLVP

SEQ ID NO: 1007612 - protein, 124 aa, Homo sapiens
PGSRRNIHIGNLDPEIDEKLLYDTFQTPYRVILQNPRIMRETDTGNSKGYAFINFASFDATDAAIADMNGQYLCNRPITVSYAFTQDSKGERHGSAAERLLAAQKPLSQADRPHQLFADSPPPP

SEQ ID NO: 1007613 - protein, 49 aa, Homo sapiens
SWVHAPSVTQRHELESGQTRDLTVNSLEGRSVLRSAPHDQHQWDGRTLG

SEQ ID NO: 1007614 - protein, 55 aa, Homo sapiens
LSPLMTPRDSQKNFVDPVTNKKVSYVAAEGTVQNRNNNWSALAFSTEEKHVLPRN

SEQ ID NO: 1007615 - protein, 42 aa, Homo sapiens
TCSSSSMAAAEDINLGNKAIAGEESQSKRQGKLQVTTDIVEL

SEQ ID NO: 1007616 - protein, 35 aa, Homo sapiens
LVCVMQEQFCFPMSSRVDVRVQDQSGERLGCSLGG

SEQ ID NO: 1007617 - protein, 69 aa, Homo sapiens
SEPLVSSTPGDLGRHGFVENDDSLVRRTYIFVETRRIFCDRHELGLERRWTLLGHDDTFLVVTDGTLLF

SEQ ID NO: 1007618 - protein, 36 aa, Homo sapiens
FQVKYGERVRLKFINESMMAHPMHLHGMFVQLENGQ

SEQ ID NO: 1007619 - protein, 110 aa, Homo sapiens
  misc_feature (17)..(17): Xaa can be any naturally occurring amino acid
  misc_feature (59)..(59): Xaa can be any naturally occurring amino acid
SCYSEKAVWIPRSPLLXKSRLRATWVINVAQIGLLSTALWLGQAERMAWRRRYTRSRSXRSAVRPCAASASQELPAALPSPAAMVLWPVHSTCPRQKPQLCSRSSTSHGT

SEQ ID NO: 1007620 - protein, 117 aa, Homo sapiens
  misc_feature (106)..(106): Xaa can be any naturally occurring amino acid
SLSFSCLCCFGGLLGLAVHELGPGGLGVQDVEASSLVAVVVVRAGSGREGPCCCGNLGHGSGSCGVFSTHAQLVDSGGVDAVDPPLVEVDEENHIVPQAVDPVHNXHLDDQGEQVVD

SEQ ID NO: 1007621 - protein, 102 aa, Homo sapiens
SRCVRYHVVGCRRLRSEYCWSGGRHGRLRHPLRFSEREELIYLNDFARVVISDHEAVNGILDFIDRVLLPPEALHWEPDDAPIPRRNVTAAAPGFGYQDLQR

SEQ ID NO: 1007622 - protein, 74 aa, Homo sapiens
MKSTFCCERWTETGTKDLGSLTVLSAAASSLLLVFVCLLGPYQQTRKGAGCRGHGKSEGGGLSVERRLCSLPPD

SEQ ID NO: 1007623 - protein, 53 aa, Homo sapiens
IEPLDARWDVLITRHLSDVRECTVHNVSRKVISWMCGTGLMQRYRPHTPSRRS

SEQ ID NO: 1007624 - protein, 73 aa, Homo sapiens
WMLSDVQASRNPSRRVQWFLPSIPALWEATGAYHLRSERSETSVVDTVKPHLYYQYKNYPSEWCAHVCNPNYS

SEQ ID NO: 1007625 - protein, 38 aa, Homo sapiens
MYARVRVRPGCVYAWGACTGGACEPGCVYTGVRAPRAV

SEQ ID NO: 1007626 - protein, 51 aa, Homo sapiens
MVLACGSRAGRGWAELGAWRLGPGYLVDVQSSLLGGCSSSWGALDSDAPVV

SEQ ID NO: 1007627 - protein, 122 aa, Homo sapiens
FHALPAVFTCTMGLVYCGLPPELPLSSVLAPTVRYEVDTVLRYRCRDGLVQRNLSLIRCQENGRWEDPQISCVPRRAVRALDPEEDPERRQGRLLGRWKGLLIPPSSPMPGPYGGKAFEDTT

SEQ ID NO: 1007628 - protein, 33 aa, Homo sapiens
CRDPQNISLPAYPARALAFHLEGRVQVQFDVDN

SEQ ID NO: 1007629 - protein, 34 aa, Homo sapiens
RGLLESNASLEYSTVLLECAHMTHSGRSPETSNM

SEQ ID NO: 1007630 - protein, 75 aa, Homo sapiens
RKDSVGFDYLEALPSFSSSPACESDTSPSLGELRHHIAWAHYPLAVPATLDTVLLQTDLLSQAHHLRLEIYSFES

SEQ ID NO: 1007631 - protein, 87 aa, Homo sapiens
KDSVGKPSVTPIAFITMKELYHWRETLCVHGMVARAFSLSQFLARTYIRLMLGEEPVSMEATVGEAFSIRQLSFMKHVENYILHSKP

SEQ ID NO: 1007632 - protein, 69 aa, Homo sapiens
EVPAKDSVGYEEAHAMNITQRGNVALTSEYMPPKRRRLIDPGYWLSSFLLSVVLQVFQNYSKLSAMAHA

SEQ ID NO: 1007633 - protein, 57 aa, Homo sapiens
AHCCRLERKSYLWPLIKGHSEVEEQCDQTGAPRTLLRKTVTQLIWAPWSRKYRVAVV

SEQ ID NO: 1007634 - protein, 52 aa, Homo sapiens
PPTVYRMPHLDPVLPLVPGRFVLVHHSLRDQPLRAEVPRLVHFFVVFPELRL

SEQ ID NO: 1007635 - protein, 77 aa, Homo sapiens
KDSVAPWVNGQKRNWKSPSLCKVGFYGMLDMSRITFTLDLIRDNSKTLLNQSLVPEFYVCTMFVAHAFLIPGILSDF

SEQ ID NO: 1007636 - protein, 77 aa, Homo sapiens
ERELETATCGELSPWRQHTEDVICGGASTELGAASWVPICVLLRDSGPVTLPLWACPAQMGKIIIEVTEDCDYMHLP

SEQ ID NO: 1007637 - protein, 54 aa, Homo sapiens
QRHHGGSVTPRRGSAWEPNSRPAIILRHCDASLARAGKRLRTRSADLGKTAWKV

SEQ ID NO: 1007638 - protein, 61 aa, Homo sapiens
MRTIEAHRDLSARLVSYYVERSTCQGYAAVELEEAHSEGATLAGTRHKECLRRDRLAEEDQ

SEQ ID NO: 1007639 - protein, 112 aa, Homo sapiens
RQASLSVRSLICKGAAQSFPSSNLFASYNVLPLKDPSVRRQCLWNVQCILAAHASLRFACLLLLFNVSLEGSGFFSCVSVFFSFDLSNFSISAISGLSDMVAEEKRSEAHEY

SEQ ID NO: 1007640 - protein, 56 aa, Homo sapiens
MIQSSLVPPDYARQSALVMRGTMLTFSCNGLHETHIQLAAAHALKGEMKYRQQCTR

SEQ ID NO: 1007641 - protein, 63 aa, Homo sapiens
DLWAVCVSCICMNIPERGQFRFHVWSGQRGILGPGFHWVFLTSRGVPKIELRDLRDARMLLKL

SEQ ID NO: 1007642 - protein, 73 aa, Homo sapiens
ALYPPYSPDSPRLARQHLSKPRAGGAGAGKPPKRKAFYRKLQNFLYNVLERPRGWAFIYQAYVFLLVFSCRAS

SEQ ID NO: 1007643 - protein, 60 aa, Homo sapiens
SLWARLHYGNLKRRGRRLAWAEHCFLLLLYGLAPPNSVPYPYLSSLKLSTYPQTSSPHLV

SEQ ID NO: 1007644 - protein, 59 aa, Homo sapiens
PTVQGLTLELAGSPGPRVIGCAVSCMALRHPARHLCRLWEVIKSERSIIWLNFCLSASR

SEQ ID NO: 1007645 - protein, 42 aa, Homo sapiens
MIDRACTPKPKDCSLPRLIEREWVQIPTSPDSEEDGGSDGYE

SEQ ID NO: 1007646 - protein, 71 aa, Homo sapiens
QGSVGQKWNTIPLRTSLCRESVLWTMMTAIMKSLNGYEATTVVSYGAGSIHEHGVICLHITRFFFNRRITY

SEQ ID NO: 1007647 - protein, 74 aa, Homo sapiens
MLGFVGRVALSGSGACGRLTLQCRCPSSALTAGRPTAVHPVRDYAGANISFAKMQAPATGSAFVACHLAHVVDV

SEQ ID NO: 1007648 - protein, 108 aa, Homo sapiens
RQIESSRTPRLARQVFFIRFSGHLKNPFNLETHVLLEFGVNFSVWFMDDASPTYSFSLWSTNYSNIEHTGFFFGIFLFFVFICFLGETPGGIFGVGAPKRKKGGPFQR

SEQ ID NO: 1007649 - protein, 156 aa, Homo sapiens
MEKLILGLFMLLRITMPGAYGKQMQGAGTQERVLIEILCTRTNQEIREIVRCYQSEFGRDLEKDIRSDTSGHFERLLVSMGQGNRDENQSINHQMAQEDAQRLYQAGEGRLGTDESCFNMILATRSFPQLRATMEAYSRMANRDLLRRVSREFPDM

SEQ ID NO: 1007650 - protein, 66 aa, Homo sapiens
  misc_feature (7)..(7): Xaa can be any naturally occurring amino acid
  misc_feature (57)..(57): Xaa can be any naturally occurring amino acid
MPEESNXEDIDTFPKAGFNIKTWSTEDSSWTSGMWVAEVPAVLLAELILRSTDGLIXGSWTCAGPD

SEQ ID NO: 1007651 - protein, 48 aa, Homo sapiens
PANMQSCRASSSNHAFQAAGISIAPGPAHWVTGSSHIRHIHGPFSWFP

SEQ ID NO: 1007652 - protein, 51 aa, Homo sapiens
VYQPGQQMELLIDVSYALIYHNPYLIVHIEKQSQIATHPTPRSSPMLVRDA

SEQ ID NO: 1007653 - protein, 71 aa, Homo sapiens
PELNSGRGVELTDKGGASLPWRILDTEAKRPCLGGQMKYLNAPNCCHRSLPSGSSMLHCPPTGLLATLLWS

SEQ ID NO: 1007654 - protein, 71 aa, Homo sapiens
LESSSNLRLLRSRLMEYTSAWDGFGSRIKNALAQFLAEGTPEIPLSPYRSDVVETIRLLIQAIARDVRRNR

SEQ ID NO: 1007655 - protein, 63 aa, Homo sapiens
RLARHGQGRHWSPYGSVGPRGNQQCTFHSAHPLCDHGAGQLLVPEVRYSQVMQTHHGHCRASR

SEQ ID NO: 1007656 - protein, 37 aa, Homo sapiens
IADRSWAQSFSYLGHLTLSPLVVSPKRVFVLSLFCLI

SEQ ID NO: 1007657 - protein, 133 aa, Homo sapiens
RLARQGVTPHLLLGGVAAGRRRSSLPRWGGSRVEGLLTSQMGRLPGGGSPHFSDGAAGQRRSSPPRRGRGRAEVLLTSQTGRRGRGAPQISDDGQPGRDAPHFLDGMAAGQRPSSLSRLCSQAEGLLTVGLVG

SEQ ID NO: 1007658 - protein, 38 aa, Homo sapiens
  misc_feature (34)..(34): Xaa can be any naturally occurring amino acid
MAQAILVFRWSTKAPATDSFVKVTFSYLLGKLPXRQPC

SEQ ID NO: 1007659 - protein, 60 aa, Homo sapiens
RIALVPPTSPTGGWRAGADPHASSRTGRLPGGGAPHFSAGVAAGRSRSSLPRQGGCRARR

SEQ ID NO: 1007660 - protein, 42 aa, Homo sapiens
RTLIEVVWAGGRRGRTGSIVTQETASFWVKHCCSEDASITFD

SEQ ID NO: 1007661 - protein, 66 aa, Homo sapiens
VPLARHLLSLFIVRAHLCRMHVLLSQALTQCCHMCLADLLSELHLVAELLLRLSSETVILLQRLLQ

SEQ ID NO: 1007662 - protein, 68 aa, Homo sapiens
LKALGKRVEVAGVGGVLTCSWSSIDHERSPTRKPHKAHIMGDPWDLAKRVPESPEKTKNGKGYHGNRN

SEQ ID NO: 1007663 - protein, 129 aa, Homo sapiens
ENDRELTLMLDGRQDHFIRAYSLIDQLFQDRFFNQEPHDTYQYLPFILTKQKAHYFFSKYRIIRSLMPFSPYEPLNCHAIVAAFLEMIHEAHQGLDMHYHSADFQQTPTEFMREGDHYRTVLREMRHKS

SEQ ID NO: 1007664 - protein, 112 aa, Homo sapiens
VLYRIYSYSGGSPLGVAQISGLGGCEERSSLFFFSSSFFLDGVFLWPTLKCNGVVLAHCNFCLPGSSDPPASASQGAGITGACHHARLIFGILSRDRVSPCWPGWSQTPDLR

SEQ ID NO: 1007665 - protein, 40 aa, Homo sapiens
MLSLYLGINMGVFITPGTLILRERRMSFACYLVVGLLSSW

SEQ ID NO: 1007666 - protein, 45 aa, Homo sapiens
EVAARSEPRSMPLTLQTWCDTAEILIFINHKKQNLQVTRYSNIGI

SEQ ID NO: 1007667 - protein, 99 aa, Homo sapiens
LVVYVGVDVGGKNESFDAGRAIAGERFCACDLWAVTHVAPFILIRWSQEGPIFLLFLPLRIGLEVTDRCPNDHLDFPQKVFLPLSFPFESILSFNLFFP

SEQ ID NO: 1007668 - protein, 76 aa, Homo sapiens
MSERYGVDVKSHGKAGRSLGGLQQGPVRGHAAGFSLIWVLQYKFKCKVSESGYACFALCVILGQQNIHIFHIAVGM

SEQ ID NO: 1007669 - protein, 113 aa, Homo sapiens
LAGYSQESRPARAHSETCLYKNTKNQSDVVVHALQSQLLRRLTWEDRLSSGDGGYSELRLCHCTPSWVTEREPVLQKDKKNANRLLRGMPCAHLTPGHTEELLPVCDSDLAFA

SEQ ID NO: 1007670 - protein, 156 aa, Homo sapiens
MHDAGICVEIVSRDGVWRCGQDGLHLLTSSSTGLGLPKRCDYRREPPRLAENPLYLISSTHCPAQLWTLYTTCPPGFTERKTFLLRIPATTHNCMTKCSKVLPKSANKIVSLLGIYSPFRAVRLDFYKNHFRTAISYFTSFSAPVIFRSDTDNTFA

SEQ ID NO: 1007671 - protein, 93 aa, Homo sapiens
HHLGQAHQLGTGGFRHAPVRSGSGMQAQASAEPPLHAGGYRASAEPPLHAGNQSQASVESPLHAGNQSQASAESPLHPGDPEHQRSPTALAIP

SEQ ID NO: 1007672 - protein, 47 aa, Homo sapiens
VQGPYLLQGQRGPAKRGQTESQMNGREPGMGSERLKLRSGSLTLPGL

SEQ ID NO: 1007673 - protein, 54 aa, Homo sapiens
DLKLIHYHLDLPKVLGLQVWATMPGDVDKSSLSIFTQPFTNVHTRGARPNSGSA

SEQ ID NO: 1007674 - protein, 47 aa, Homo sapiens
GSVNDGSVNDGSVNDGQMLNDGQMLNSTAVLNHGPVLNDGLVFNDGQ

SEQ ID NO: 1007675 - protein, 45 aa, Homo sapiens
MYCGTGRSQALGFGKTLELGLGKLGPDSPEGFCSGTHSLWAGSAL

SEQ ID NO: 1007676 - protein, 57 aa, Homo sapiens
SGRFDWHASQQMFLYDSHCKPDIMCMTLSVLYPGGPMDTSTGLDGTLILPCTPREVQ

SEQ ID NO: 1007677 - protein, 59 aa, Homo sapiens
MRRALIREQLTVELRKYSNCKDNDKYLNIIALRLHTGDKGRLKFMRQAPKYEQFAMAHS

SEQ ID NO: 1007678 - protein, 57 aa, Homo sapiens
QDWECVIRVDHTLRACVNQFTELESVSVGGGPPPRSDSSISSSAEIRISDSDSSWDA

SEQ ID NO: 1007679 - protein, 66 aa, Homo sapiens
TRETAIPAASFIIRTALYSDALYNQETHNDQIPVLYQPDSSSTPSSTTCSVTLLDRRGILVDVDLA

SEQ ID NO: 1007680 - protein, 61 aa, Homo sapiens
HDHVKEPLGYVCHYIIIVPLENSRTGQCMFYNLLGLMICLALLRASTVLEITGGYRSSNFS

SEQ ID NO: 1007681 - protein, 137 aa, Homo sapiens
  misc_feature (33)..(33): Xaa can be any naturally occurring amino acid
MLSVSKLLQVARLPQKLAIIHCRGHQTPDNPIXARNALADRVAKQMALQPVQGQFLSLSSFSPLYSPEEKEDCQAQNLQKQGPRYVKEVRFAVLTLKQSLSSKASTTLSMSGTNLSCNVSCLSSFVLVGYNEDTRSR

SEQ ID NO: 1007682 - protein, 76 aa, Homo sapiens
CNGANLIYCNLPVPGYKRYSCLILSEVACTYLRDTVIIPGHTVSYLNKDGVFTVVAQADLELLSSGQSTCLGLRKC

SEQ ID NO: 1007683 - protein, 173 aa, Homo sapiens
RSLIAILSYEPLKLHAMYQPFLEMIHEAQHAMDIHFHSPDFQHPTTEFIREGDDDRTVCREIRHNSTGCLRMKYQCDKCRELLYVDCSTNKPSQAKLRRELAESLQVAEEVEQEIQRDGKVLPVEDSSNTPPMMEQLNEQFNWVSPACKPQRKAKTRTSEGTNGGTTLLTRTS

SEQ ID NO: 1007684 - protein, 67 aa, Homo sapiens
MIRIEPVPPDYPDSFLYSRFFLDSGKELGIQKASRSLPVKKQKSMGWVYYDDRHVIGGSLCAVGLVG

SEQ ID NO: 1007685 - protein, 38 aa, Homo sapiens
PSRQEGAELSNTWMRLLPQSATMMFPLESDSYSCRASR

SEQ ID NO: 1007686 - protein, 60 aa, Homo sapiens
DFLKGMLQAEKLTPPQRKHWPTSSRALCRVPTTSHEELRCPATQDVCILQSLGAVHHAMM

SEQ ID NO: 1007687 - protein, 39 aa, Homo sapiens
CHLDGSPRCLRQVHVPSTAPLCLGLTHLLTDSAPMLLGP

SEQ ID NO: 1007688 - protein, 79 aa, Homo sapiens
  misc_feature (4)..(4): Xaa can be any naturally occurring amino acid
SPTXSDDRGGDGDGRRLTWLYCYLLRGSFLCPLGYPDDPTPTDTDTSARPRLVTRTLFTRTTLGTRRLDTSYTPWVLRV

SEQ ID NO: 1007689 - protein, 122 aa, Homo sapiens
NTNTLPELLPELEQLIILSSGSRSGHIHHHDSSGNRTPCCHTEIDTDRKCVDCAGPQMDDIWPVGGTDNLVTVWPSAPGEGGWVPLQTFTQHQRAVKAVAWCPLAVQCPGHRRSTSDRHIRI

SEQ ID NO: 1007690 - protein, 71 aa, Homo sapiens
SLLTFCIGFLSFGPVARVSRHEPGLVHLFSWEPGGPVPVSVHHDAPYAFLPLLYVEAMTQDLPSAPKTPSP

SEQ ID NO: 1007691 - protein, 37 aa, Homo sapiens
LSVNDGSIAVSGVSQDGEIADPDCNRTASRTLFPDCN

SEQ ID NO: 1007692 - protein, 70 aa, Homo sapiens
MDWMIADRTKIGQVMYACKCIEYQWSRILYNIISAPYDIIVLHTRRAFILSDSSLLFLHHMSNVAQQVSN

SEQ ID NO: 1007693 - protein, 35 aa, Homo sapiens
MRIRRRDFLIGKISHRPRFTHRPSIGPDLLIGQDL

SEQ ID NO: 1007694 - protein, 73 aa, Homo sapiens
LPRVYVWSCRPNMGSLESDLEVCAVWKLAVLYDTLETGEMAVAKVMQKDSEKNMSLKKLTGQYVDRLGVYSLQ

SEQ ID NO: 1007695 - protein, 91 aa, Homo sapiens
MSKLSGDQVRWGQGGRQPAVLGAFPELQDPRGVPSVPWLRSWAHWCPAVGAKIYSSAKIYSSSKINSSTKIYSSAKIQSSTKIDSSGKIES

SEQ ID NO: 1007696 - protein, 65 aa, Homo sapiens
DRYESSSLPDDVILALMSEIWRVSKSMGDDVNVGLVSKCRSLAAGSVIGQDLLIVNIYSSGQDLL

SEQ ID NO: 1007697 - protein, 34 aa, Homo sapiens
DQIWYSAVVLAVAGAAQVFTFGLVIAHERTQTEV

SEQ ID NO: 1007698 - protein, 38 aa, Homo sapiens
MPPILESWQASVSGTLCPCRCLPGDDRRSRGRSGGDPL

SEQ ID NO: 1007699 - protein, 41 aa, Homo sapiens
  misc_feature (39)..(39): Xaa can be any naturally occurring amino acid
  misc_feature (41)..(41): Xaa can be any naturally occurring amino acid
YDRPTYLVLWLCDSHVTLRTHTRRWYALDWGLLYDVDPXRX

SEQ ID NO: 1007700 - protein, 64 aa, Homo sapiens
MSTGNREPGVAPVDYGLTQDEAVPRYPGQSVPLHRRKRPAGGRKARTSHIAFVLPPTWLSGESG

SEQ ID NO: 1007701 - protein, 78 aa, Homo sapiens
DSTLGTLIGKLLDRTVSLVVQGFIEHLLSSGSFLGYQQQRRDQNATLEVRTGHDDVFICRLLGCIGEVSQRGNNQMGI

SEQ ID NO: 1007702 - protein, 97 aa, Homo sapiens
RLAGTKVVDCLRFYDRAGTVYTLPDGRLGLLGFNSYFYQHDSFSMRRPSKRVGRIGLCPIELSYTVYHATSGLVGDYGRFLAVRSPGCLRFLSGYSG

SEQ ID NO: 1007703 - protein, 40 aa, Homo sapiens
RLYSTAFGGLGDLVVTFSAPDAYLRFYDFCYNTVTGDSST

SEQ ID NO: 1007704 - protein, 99 aa, Homo sapiens
MIQSSSCTQCIDSGTGGSLESDQAPCKRVFGAPYEELTVSTELVQEGMHRSGEYTVDLAPCLRYWVVSTDLMYEGYLSREVVHGSGEYTSSWRHELNDR

SEQ ID NO: 1007705 - protein, 42 aa, Homo sapiens
EKEILLGISVTFPLEIQIAPLWARRALSQTLGEGVFVRLHCG

SEQ ID NO: 1007706 - protein, 66 aa, Homo sapiens
YLVFTMHGQALLKPVPQCAMWGLCPGEREQGVEVRVAGGRVTVPGPQKRKQLLRGVGHCGPAVGPN

SEQ ID NO: 1007707 - protein, 100 aa, Homo sapiens
KELHNGKGKQMRNWLRPGDQTPFRSPREKRRKSARGLSHKWPGSQAKESKISGLRDVGTTGEKDTCAFAEQCFLLGFLPTQNQNGAWLGLCTQLETVDKC

SEQ ID NO: 1007708 - protein, 53 aa, Homo sapiens
MFSKYNYLQVELAHGDFPYLSQLFAEAESRWIKGCSELGSSHCIPTWVTQYWA

SEQ ID NO: 1007709 - protein, 60 aa, Homo sapiens
ESDVPLRYRKSYVQDYILTQRNFLLLINSLGSKDVLYRVLRGHSCMLSCAQEPFMPTYTP

SEQ ID NO: 1007710 - protein, 34 aa, Homo sapiens
LTTPFSVDPVCRCVFPIHRGVRVCARVRFNKVST

SEQ ID NO: 1007711 - protein, 68 aa, Homo sapiens
MPAKRRKLRSDIQHDCRKTPYTVPSAYPMPSGAIAEILSSLLYGPISSGERFPPLPSQDIRNKSRIYL

SEQ ID NO: 1007712 - protein, 40 aa, Homo sapiens
LEDLPLYTHPENFPQRKAYDYDGHEKNYGIVDYLDRAVRA

SEQ ID NO: 1007713 - protein, 126 aa, Homo sapiens
AVSTTPPMAQTRRTRPGALYSRPQSCDHLLGAQTPRHSNFGRGKFSEFKAHTAPVRSVDFSADGQFLATASEDKSIKVWSIVYASAFLYSLYRHTHWVRCAKDLSLLSHISKGGELFASGGADTQV

SEQ ID NO: 1007714 - protein, 37 aa, Homo sapiens
CSGTSDQAASSWGSHEPPRWVQLILLQQLSELKKHKH

SEQ ID NO: 1007715 - protein, 33 aa, Homo sapiens
VENRDRRNVTNFSESYKWRQPLLPTIRGLMRVI

SEQ ID NO: 1007716 - protein, 32 aa, Homo sapiens
MRNVTDIFSTENVSSMKAGFAYTHCGIPSGRI

SEQ ID NO: 1007717 - protein, 69 aa, Homo sapiens
ASFAVPSPLPCGHIPTCRGFTELHAESLSASELTKCLKGKADKPTWVSLASAVGAVSLGHKLERKIEKG

SEQ ID NO: 1007718 - protein, 155 aa, Homo sapiens
  misc_feature (58)..(58): Xaa can be any naturally occurring amino acid
  misc_feature (61)..(61): Xaa can be any naturally occurring amino acid
  misc_feature (70)..(71): Xaa can be any naturally occurring amino acid
  misc_feature (74)..(74): Xaa can be any naturally occurring amino acid
  misc_feature (84)..(84): Xaa can be any naturally occurring amino acid
VSRILWGLSPIILWQYACISVKATEQFCSRDHNVVEQQQMVKCDLSHVNTWLLLLYRXDVXPKDVNAAIXXIKXKRTIQFVDWXPTGFKVGINYQPPTVVPGGDLAKVQRAVCMLSNTTAIAEAWARLEHKFDLMYAKRGFVHWDVGEGMEEGEF

SEQ ID NO: 1007719 - protein, 60 aa, Homo sapiens
MTPGQQAAVGSLKMEAGRARWITPVIPALWEDQAGGSRGQEIESILGNTVKPRLYYKIRK

SEQ ID NO: 1007720 - protein, 30 aa, Homo sapiens
MKPDKEKGFRNVVLRFFCCLGRSSDSGAIG

SEQ ID NO: 1007721 - protein, 50 aa, Homo sapiens
MRNVTFIEDSGRCSLRAMSRACCLDTTTEPGLWPREGIVLRVFTKFGHFI

SEQ ID NO: 1007722 - protein, 158 aa, Homo sapiens
RSRFSDRSWRSNALPNGRHSQFCLGAAKEKYVFRDVVQITCLHGFEVVEGRVDAKSFYSTCQKQWKVEYFQIEMSPVDCGIPESIENGKVEDPESTELGSVIRYTCQEPYYYMENGGGGEYHCAGNGELGEEGAGAEACRNVYQSVESPENALKKNRG

SEQ ID NO: 1007723 - protein, 46 aa, Homo sapiens
MVIIGGGKISKKQKSMTSKLKAKRKINEDSVLYSSKECKSEKAPGY

SEQ ID NO: 1007724 - protein, 53 aa, Homo sapiens
FCGAFSKCWPSCSFTLIPLASVFFRKIQSNIISEDLCCILMGRMVHVQSFVCH

SEQ ID NO: 1007725 - protein, 149 aa, Homo sapiens
LRAFPEIKKSYSDNTEVQWIMRDYYEQLYAKKLNYLEEMDIFLHTYNLPRLNHEEIENLSKPIMSEEIESLIQSISPKKSPGTDGFTAEFYQTFKEELNQFSYKLSPEQNTNKQKNDRERILSNPLPGPGITPNTKRHTSHITSKRTTY

SEQ ID NO: 1007726 - protein, 56 aa, Homo sapiens
MRNDWDEERHRDEERHWYEERHWDEERHYSIYFVCFVLFSFPVLKDPQSLLLLLLT

SEQ ID NO: 1007727 - protein, 41 aa, Homo sapiens
SRAAYHWDEDVTGMWNVTGMRNVTGMRNVTGMRNVTGQAAP

SEQ ID NO: 1007728 - protein, 44 aa, Homo sapiens
MSKSLRFDTTLCWIRSPDSRPYVGFLLLAAVVDAAINVGYKHLF

SEQ ID NO: 1007729 - protein, 48 aa, Homo sapiens
MNSSYKNLHWKKGTIDQKITCCTMSFSRDLCKREKYDNNDVIFRGDSL

SEQ ID NO: 1007730 - protein, 35 aa, Homo sapiens
SRILWVLLIEQQRQLIHFVEFIASEFQFTSKHMRM

SEQ ID NO: 1007731 - protein, 34 aa, Homo sapiens
VSPLRACLLYSSSTREHVLTSKYRELEPGRLYQD

SEQ ID NO: 1007732 - protein, 84 aa, Homo sapiens
MQLSYTTQDETTHIRDKPYIGNACGKAFRVSSSLINRQLLHNTEKPYRCNESGKAFHRGSLLHFYQIVHTRGTPYHCDACGRIL

SEQ ID NO: 1007733 - protein, 68 aa, Homo sapiens
FPCVSHPNNVLPSSTTDAAEAGGPEHLHFYLSRTQMRSLGVELMLGGTDFQSIKRVLWSYPELSPVKA

SEQ ID NO: 1007734 - protein, 76 aa, Homo sapiens
GLTCLLQRPDSSALEAHICMKALSNFSHQTAGRNFANQTYRGLLIPSNFTERHSPRPVTMRFLHPSRRGRTLAKRI

SEQ ID NO: 1007735 - protein, 33 aa, Homo sapiens
PPGIPTPLSITDDLLLPADEVNMPHQWVEGNMP

SEQ ID NO: 1007736 - protein, 74 aa, Homo sapiens
MGAFRMCWLFELIFLNLHLLLIVHGRFLSPSFLCKEQSHQDGRSLTPLHPPLIYLFFQMESRSVIQAGVQCHDL

SEQ ID NO: 1007737 - protein, 37 aa, Homo sapiens
MTTRARYRLCLCSRLLLETGEWGWVLFFPQWLSTIFM

SEQ ID NO: 1007738 - protein, 46 aa, Homo sapiens
LASRSVRSLSSSSFLPSTAALLRVSVYCAAPSGTPLDVALTACPLG

SEQ ID NO: 1007739 - protein, 83 aa, Homo sapiens
  misc_feature (51)..(51): Xaa can be any naturally occurring amino acid
  misc_feature (59)..(59): Xaa can be any naturally occurring amino acid
PVLWDGGTGRYMGIGKRKGTATCPTCQTKVTWMTENEDFAPAAHADTCESXEDSTRHTXITALYPELVNGELCSTNTADFLME

SEQ ID NO: 1007740 - protein, 59 aa, Homo sapiens
  misc_feature (22)..(22): Xaa can be any naturally occurring amino acid
  misc_feature (26)..(26): Xaa can be any naturally occurring amino acid
  misc_feature (54)..(54): Xaa can be any naturally occurring amino acid
  misc_feature (58)..(58): Xaa can be any naturally occurring amino acid
RIPCEILAHLLCPLSEEALSGXALGXVHRHLSILVTDADKGHILEGDHPELEPXCGVXE

SEQ ID NO: 1007741 - protein, 47 aa, Homo sapiens
  misc_feature (19)..(19): Xaa can be any naturally occurring amino acid
  misc_feature (22)..(22): Xaa can be any naturally occurring amino acid
  misc_feature (30)..(30): Xaa can be any naturally occurring amino acid
  misc_feature (33)..(33): Xaa can be any naturally occurring amino acid
MPEKVTWMRRMRILRPAAXADXRESNEDRXATXYHNACTLNGDRGHV

SEQ ID NO: 1007742 - protein, 134 aa, Homo sapiens
MIRGERLIEWSHLSTLDLDHGFVELILIKKAGDGSKKIKGWWDSIHVVEVAEKSRGSTAHYKLTSTVMLWLQTDKSGSGTMNLGGSLTRQMEKDETVSDCSPHIANIGRLVEDMENKIRSTLNEIYFGKTKDIV

SEQ ID NO: 1007743 - protein, 60 aa, Homo sapiens
DPEGERTEEHDVTDRSGGAGTGTVTQSTWVRGAQQALACPLDRASEQAAALPTPVSHEVS

SEQ ID NO: 1007744 - protein, 37 aa, Homo sapiens
YWIDVLIDVLIAVLIERPGETSWMDVLDKTSWIDAYG

SEQ ID NO: 1007745 - protein, 54 aa, Homo sapiens
HQVQNDRSGVNITGIQISYLYTDFQGCFQSSRISDTKKNGGDLMMRNNAKFIIM

SEQ ID NO: 1007746 - protein, 40 aa, Homo sapiens
IVAVGYKTEQAPYSQTDARCGYGSYVYICVEAHTRAHAHK

SEQ ID NO: 1007747 - protein, 47 aa, Homo sapiens
MEWNQPEYNGMEWTWNWNSNWNWTYELELELELNPDVKLDLDEDLEL

SEQ ID NO: 1007748 - protein, 120 aa, Homo sapiens
DLEDPLEDDRRASGADSDCAFQSMVTGLSSVRVLLLAGVDFSLVWGHFQDQQDLYKSVSFTDQVVGARSLVCLLLSIQEPSDLNACWVEIRHVADKQVVVLQGALLGGGNIHPRVDSALQ

SEQ ID NO: 1007749 - protein, 48 aa, Homo sapiens
MLEDAEGQIFDLLAAQRITGSRCILPVMLSPRGPPVQSVVPEMEESGA

SEQ ID NO: 1007750 - protein, 90 aa, Homo sapiens
MKKNDGRECDRDNNTWYSSTKSCRAGCYCDVFYPCSISGKQVFFFFQLRSSTECVPITRIVYSIIDPSFCVGVPHHNYLWLLLQSLLSSS

SEQ ID NO: 1007751 - protein, 75 aa, Homo sapiens
EKRRRDENQYGQNRRESSKRLREPLDGDGHEKRRPYAKDMKASVEPAPPVSRDTFSYMGTSSLGFQILIQQSGKW

SEQ ID NO: 1007752 - protein, 58 aa, Homo sapiens
PPSSRSVLSLSLRSLTTTVLFFTTQPFWGLDFPHGHDWTTLDLPHLYGLYTLSPSDPT

SEQ ID NO: 1007753 - protein, 117 aa, Homo sapiens
MLERQEELIYEKASHHKDIGRVRTEFEWEDGRKAGTSMYLQNPNWLFVIRIRGITGVSPKVRKVLQLLRLRQIFNGTFVKLNKASINMLRIVEPYIAWGYPHLKSVNELIYKRGYGQ

SEQ ID NO: 1007754 - protein, 95 aa, Homo sapiens
RRGRSYRFLSNSLQKHKLPWSTVGSSSFAVVSLCPSHLFFSASLSTTVSQSHSEPTCHLLGCARVLDPQVVIVLTHKKPQCTTDTHNKKKEDTIK

SEQ ID NO: 1007755 - protein, 45 aa, Homo sapiens
RLSACIKHNHSSLIYANHLAYQRCISKFNSLPISSWDVGKRKQKT

SEQ ID NO: 1007756 - protein, 36 aa, Homo sapiens
LVVSEVPPEDWTSLCFGHGDLDYREVQSSGVPSSIF

SEQ ID NO: 1007757 - protein, 33 aa, Homo sapiens
AQRMTARDVSCRELSPQRAASAVGGTENGESGA

SEQ ID NO: 1007758 - protein, 47 aa, Homo sapiens
PWQPRLANASHHRRAAGVALGDDIIEGKLQGGDRLPAHRTLAWQLEI

SEQ ID NO: 1007759 - protein, 37 aa, Homo sapiens
CSCCCWSPLTIPPACPALDVLYSRVAQEYFYIPQCKA

SEQ ID NO: 1007760 - protein, 34 aa, Homo sapiens
EYLEIREDDVMSQLAVLSRGGSFRDEVGSLLCVF

SEQ ID NO: 1007761 - protein, 109 aa, Homo sapiens
  misc_feature (77)..(77): Xaa can be any naturally occurring amino acid
RRRRRVHSLIDEGLYGGVRMGAGCTVTRDMGCGPGGKGWKLADACFWLLSHGRVVARTLAVAVPSETATVPFLLTSXLSSVSWLVSLHLLGRYCQRLLAERADSLLSSS

SEQ ID NO: 1007762 - protein, 67 aa, Homo sapiens
ADQVSWFPGSTCSSQPSFRRGLGKDGGCRLSLAGSPKDSAGSLALCSSTAHPVSGGSPVLISTQTTP

SEQ ID NO: 1007763 - protein, 53 aa, Homo sapiens
MHKLYEMHSFDSPKDTVSFFVTLQILDAGKGSAGTVFTAPWPCYSTFGFQKYA

SEQ ID NO: 1007764 - protein, 45 aa, Homo sapiens
SADVTTLTSVTWAACCQCVSLTSGLACTEQPYYHRSPFVHRSPFV

SEQ ID NO: 1007765 - protein, 61 aa, Homo sapiens
EDPAEQLQGEELLARRCAMLEQGTESEAGQRLFFSAEWESQEEDNLGEERRESDEEEIASS

SEQ ID NO: 1007766 - protein, 51 aa, Homo sapiens
MARTGRAGVPSLSVAQLAALIGSTAQVPLQLGVSHAVGSPSSGMAPVVRGA

SEQ ID NO: 1007767 - protein, 45 aa, Homo sapiens
  misc_feature (32)..(32): Xaa can be any naturally occurring amino acid
LEILRRETGEGCIFQTRRGGIYQKVTLLARHXRQHERFHRGEKLD

SEQ ID NO: 1007768 - protein, 56 aa, Homo sapiens
MGAPSPGVCVCVEEARPLDHLLELVYRTSTKAPPMPRRTLDHAPFEEGLAPPSSSE

SEQ ID NO: 1007769 - protein, 118 aa, Homo sapiens
  misc_feature (80)..(80): Xaa can be any naturally occurring amino acid
RGEVCVRNLRKRKEFGEVKISAEKEVCQKMVRKARRKLSIKKERNITRNIGRCTELEFGWARMARKAGNFYVPAEPKLAXVIRIRGINGVSPKVRKVLQLLRLRQIFNGTFVKLNKAS

SEQ ID NO: 1007770 - protein, 37 aa, Homo sapiens
TGDAVDAKVTAPQEALEECYVTEIDQDKYAVRFIPRE

SEQ ID NO: 1007771 - protein, 68 aa, Homo sapiens
RALSAAGRSTTDSPTRVTAVGDLTRTFDTLTADTDVTVLACGTPGCPGLTGDRSCLTWCRPDPTVTVR

SEQ ID NO: 1007772 - protein, 41 aa, Homo sapiens
STGSSAGRRLLSLVCDAHPHGGLILVHFLAVFFVLFSQYHN

SEQ ID NO: 1007773 - protein, 55 aa, Homo sapiens
MTGGLRFFCDQVLAMMMQSEKNLCSMTSFGIRWVPHQSFVLVSVLKPASNAEDLT

SEQ ID NO: 1007774 - protein, 41 aa, Homo sapiens
TGDEYKGKLRCPCELHCCQSGTSCTSSNALWEVEVVHQLTP

SEQ ID NO: 1007775 - protein, 78 aa, Homo sapiens
GSSYNEYLEGSTVLTVSTELVQAGMHRSGEYTSTWLHVCDIEEVSTVLMYRRNLSRGGMHRSGEYTVELEACMRARVL

SEQ ID NO: 1007776 - protein, 87 aa, Homo sapiens
PLMIELSWYRVNLTVVLAGIYSSDRAPLNEYMEVSTGAHVSTELVQGGMHRTWRIHVDQAPSLRHWVVHHGAHVFTELVQGRHARQR

SEQ ID NO: 1007777 - protein, 150 aa, Homo sapiens
  misc_feature (143)..(143): Xaa can be any naturally occurring amino acid
MDRLVIQTKKKKREENRIEAINDEKGDITTDPTEIQTTIREYYKHLYANKLENLEEMDKFLDTYSLPRLNQEEVESLNRPITGSEIGAIIKSLLTKNSPGPDGFTAKFYQRYKEELVPFLLKLFQSIEKEGIFPNSFYDGSIXLIPKPGR

SEQ ID NO: 1007778 - protein, 59 aa, Homo sapiens
MYIFTIVIIITLSINLCIIFTKNLSINLSIIISITLSIILTIILTKTLSIIISIIRTKT

SEQ ID NO: 1007779 - protein, 109 aa, Homo sapiens
MVGPEPDPPLETLSPEAARPGTTGNLVQSADDGVTSLIQILPLVLKLVLLGQGVGVQPRDDLLKLVQNLLLVRPLLILPLEPVISKALFMEKAEDSSAYLDDTLSRCTS

SEQ ID NO: 1007780 - protein, 36 aa, Homo sapiens
MSDTMATHQPSALPHGNHQCCKVRAPPAPGELGSSE

SEQ ID NO: 1007781 - protein, 33 aa, Homo sapiens
TPLDDWYHDSYALPSFPPPPVPVLTTVPWIRRH

SEQ ID NO: 1007782 - protein, 78 aa, Homo sapiens
LGGASARLWERLGGECTCCGGCLVVEVTARAVEASWVESVSALCCGGVLGGVGDCTCCGGPSWVESSARAVGGVLGGL

SEQ ID NO: 1007783 - protein, 61 aa, Homo sapiens
IDAVTGLSGSWPPTHSQPWMPCADGGVKMGLPMAPGESASGSSALPGVLPMMRAELRNSTQ

SEQ ID NO: 1007784 - protein, 60 aa, Homo sapiens
SPRESRESRATVRRIGDACLIQVIKNRKKASEPVGEGKVVGGGYNVQQYFTFWPSLARPI

SEQ ID NO: 1007785 - protein, 154 aa, Homo sapiens
RILGEGVSVGVVILCDEVSVKVVVMMVVTEVSGEGGGDDGGEKIVVKVMVMVVMTVSGEGHGDGDTTTWGYWWYWCLLYQYWWYSYWWWYYPYVVRVLVLVQYYYVGLASGAGGGAGACCAGAGCDDSELVRVMVMVMVMMMSGDDYGDGGGDG

SEQ ID NO: 1007786 - protein, 44 aa, Homo sapiens
LSRIPNRVLRLLHRKPFVRQNAAADLRPTRKFSTVNVTNETLPP

SEQ ID NO: 1007787 - protein, 127 aa, Homo sapiens
YVEEEEGVSAGEEEEEEEEDEEDLRRSAWLWNGPCGADEDFLLEHIRILKVLWCFLIHCAVQYPPCSPSALLFTDFGIAVFEIPHQESRGQQSQHILSSLRIVFWLPALADLTEFGFLIAGACVLVA

SEQ ID NO: 1007788 - protein, 97 aa, Homo sapiens
GLPTRHAVEFGMPEGETLVNYYSCSYWKGLVPREDCVYLLVNHLCFYSFLLGQDVSLDGAVGGHNASGAEGHPALPREHLCVHTLRTRSSSSPMFLQ

SEQ ID NO: 1007789 - protein, 159 aa, Homo sapiens
TRVMRLTPDFAFSPRDPKGGDLHMTQFFRGNLAGLTLRSGKLADKKVIDCLYTCKEGLDLQVLEDSGRGVQIQAHPSQLVLTLEGEDLGDLEKAMQHISYLNSRQFPTPGIRRLKNHQHNQAFNDGTCISVPPEMCAQPQFVHPEHRSFVDLSGHNLAN

SEQ ID NO: 1007790 - protein, 147 aa, Homo sapiens
LEDPERLSVLLQASANGNLQLELAQVLARRGQAARGPSAQRLLDSPALKACLDTAVENMPSLKMKVVEVGASWACKASAPDMLGTSLTSVAGDSTDTGRALGGWVGPASSLCGSVHVSCAVHKASVEGPAVGSKRRSLGRTPGTRAV

SEQ ID NO: 1007791 - protein, 30 aa, Homo sapiens
  misc_feature (14)..(14): Xaa can be any naturally occurring amino acid
  misc_feature (28)..(28): Xaa can be any naturally occurring amino acid
MRLVDPGLYDNRLXYDSGSRTHPGVPDXST

SEQ ID NO: 1007792 - protein, 179 aa, Homo sapiens
GVLEDPKGDALRRCNPSYSGRLRQEELLEPWEMEVQQSKMVPLHSSLGDKSKKSVLKTNKKTTCNPNVMSTQGPYKRHPYNNYWSSNGNHRVRLGDGVEAGSIGGGLATLQDIIRSLQVSQVRAAVILVRTNFDAFPDKGVAIQLKETHPSWNIPELMRILVSRERAGVGQGWDVTREA

SEQ ID NO: 1007793 - protein, 134 aa, Homo sapiens
  misc_feature (71)..(71): Xaa can be any naturally occurring amino acid
KDCDDSGDGDDGGHGSLARIPKSRALTVLMLEFILQQSMPWSEEVHAQPAFTPRCVNVRVLCFGNTKWETXSDSTGGIKRSGPSPRSLLKSKTLREASGSGSVREDTGMCEYVKPLSQVFFLPLLAPEGNRITR

SEQ ID NO: 1007794 - protein, 45 aa, Homo sapiens
SSLNNSVVKTLYSLIPGEPRNFITTLIEIKPPAITQYQTPLLSSS

SEQ ID NO: 1007795 - protein, 73 aa, Homo sapiens
ILEDPERVSVEEEETNRLPVWQDAEAAGDVYTCKSLPGMALQPDAELFTWSYLLNPHCPREHRVRPPEQPVHV

SEQ ID NO: 1007796 - protein, 78 aa, Homo sapiens
MLTFVAEEVGPGTYCCDKCDHSHSTLGSFTTKTRFEVPQLRAESTVSSSDSDTSEEIVASVPGNRLQNVPLALIFCDS

SEQ ID NO: 1007797 - protein, 49 aa, Homo sapiens
SSIKFFSVEQEGWCQQAVIERKKLDLTIVDTPLGELKLYSSDMFYSNHL

SEQ ID NO: 1007798 - protein, 125 aa, Homo sapiens
FDGRSRTTRTVYGRVLMGPTSEAEVGRGSDSGRWDRVCVVRWGSPGPPKTRTHSSPYVWRSAPNAMLDLRLAPEPVLNANTVCLTLTCAWACRQIEVCVRSPLNVVGSAIQCIQIAIHDNGNDQF

SEQ ID NO: 1007799 - protein, 155 aa, Homo sapiens
FVPSPIKGLMGLAYEAEKWFLHYFLDPDSRLGTLSDSFCNRMEDRFGYPVLNGLTMDQQRTVKESCRRRVPSILVHACDGLCDHEPVTAVMRVGGREAKTKSANDGDVWQRVGRASMNALVPDLANGSQIIYEISFGHANACVYQSQGTFLTVRE

SEQ ID NO: 1007800 - protein, 36 aa, Homo sapiens
VTLQDRHTGSADPPQARYRMKYLARVTVGPLRARVV

SEQ ID NO: 1007801 - protein, 49 aa, Homo sapiens
MLQQSKILQVIRKKHVKKCLELFVWAGRSQRSLTEKFYEAFSTTLKLGI

SEQ ID NO: 1007802 - protein, 43 aa, Homo sapiens
TIGLVKTTEGQSRRFGQKRKLTDIYFVWETQYLYFLFIHEPVL

SEQ ID NO: 1007803 - protein, 52 aa, Homo sapiens
RVMRLERYTRRYPQIKPRPMHLFCLLEIDIMEGWVCITLLMYVVRCCNRITR

SEQ ID NO: 1007804 - protein, 44 aa, Homo sapiens
MVQLCVIWWSARCSRDRRNLYRKACTAVVNTRRAGGMPACLGSC

SEQ ID NO: 1007805 - protein, 33 aa, Homo sapiens
YRKGLSWLWLVLVSVFHAPAALSVYLGHAAWQR

SEQ ID NO: 1007806 - protein, 47 aa, Homo sapiens
ENQYPESMLSKRRRYDRGVKAPQGALCSLGTHVLWEKRSRRKSDRRK

SEQ ID NO: 1007807 - protein, 34 aa, Homo sapiens
EGVWVEQLKLRAQVGDLEEALARGGANRQALDCD

SEQ ID NO: 1007808 - protein, 70 aa, Homo sapiens
HSVCPHAQRQQEAKKSIDEAYCSAEACMHKLPYRMVMQEQQDSLREANTDTLRISDALARPGKGKEKDSI

SEQ ID NO: 1007809 - protein, 62 aa, Homo sapiens
GSPLVDVVYDTFPDALGCSSTFSRSVGSSVFLPMLCRRSGVLGHPHHPFARVMQVAVAIMSH

SEQ ID NO: 1007810 - protein, 38 aa, Homo sapiens
VTRGYECRWLRSRFTVKLGLQGSRNTPDSGSRVAGTSS

SEQ ID NO: 1007811 - protein, 34 aa, Homo sapiens
  misc_feature (21)..(21): Xaa can be any naturally occurring amino acid
RVVGPFHGYCIYFDRKREVTXTSRTGFENEPLSL

SEQ ID NO: 1007812 - protein, 87 aa, Homo sapiens
DATVLSEDPLVERRDRGQAIITQVLNIWGLILGLFMSILSSSSQCWSPGPAIDQEASIEARSSARDLYPTYSIFHSSACPRRQELCP

SEQ ID NO: 1007813 - protein, 37 aa, Homo sapiens
  misc_feature (1)..(1): Xaa can be any naturally occurring amino acid
XRVRAKIRKTEGDNKKSTVMTKSSGKRKTAKEHLRET

SEQ ID NO: 1007814 - protein, 50 aa, Homo sapiens
  misc_feature (50)..(50): Xaa can be any naturally occurring amino acid
DVNLTFFSDGLTNETTTTLLCVLLRRTDFCHSPHALDYLVTTHTFTLYNX

SEQ ID NO: 1007815 - protein, 73 aa, Homo sapiens
  misc_feature (1)..(1): Xaa can be any naturally occurring amino acid
  misc_feature (54)..(54): Xaa can be any naturally occurring amino acid
  misc_feature (64)..(64): Xaa can be any naturally occurring amino acid
XVERVCVSINYKWITRQKYVKQTKELLQEPKIIQGIFLQVRSVNIQDFYRIMIXAYSGNWMTAXLQEYSSAKR

SEQ ID NO: 1007816 - protein, 49 aa, Homo sapiens
SLFMATSASRVQAILSIASLAASVFFSYPVMVIGSGGWFPSSLSGNWMF

SEQ ID NO: 1007817 - protein, 98 aa, Homo sapiens
RCDLHTHDSLLVVCDDYSLYDNVLFFKRLAGAFTSHPQLLEGLGDVHIMEEMCALSFRQELDYWGIDEIYLASCCQGRLQQKKKQMNEELKREGENLQ

SEQ ID NO: 1007818 - protein, 80 aa, Homo sapiens
PRRSLRLILWPVWSLLSSPLLSSWYCCSSPFGPSLLFGFDAAYCLTVWMRASLLYLEPCFLLFVPGSPDQQKPHGDEHMK

SEQ ID NO: 1007819 - protein, 70 aa, Homo sapiens
RWKSVLSKSKSLRFSLNLFFTSRTSVSVPWFEGLRCEVAAALKCSPGPWSRVSAANGGPAENRRLWTRPK

SEQ ID NO: 1007820 - protein, 100 aa, Homo sapiens
MPGVACPSLTSSPDSSPTDHPSTCAGPAVHEDCWFPKSTDHSFVDKLCTEQGIHPRFQKPMQLKDKTAFSIIHYAGKVPATGPRGLCLRGPPVAAQRRDQ

SEQ ID NO: 1007821 - protein, 46 aa, Homo sapiens
PVRYCVHALHIKVPIQANPYAASRKVECTRCPGLGRRQAVLCAFAC

SEQ ID NO: 1007822 - protein, 64 aa, Homo sapiens
SCCLHSCPHLPVGTIFSDVVVRVPVGWRCVCLAPPSSIESSVDVLGTVAVSPKEQLVRITCVMS

SEQ ID NO: 1007823 - protein, 63 aa, Homo sapiens
CEEADGQEEVYKQLMLELETLPRDVSRLANTQRILEILCAKYWKQKEEITTDLVLIRTELQEM

SEQ ID NO: 1007824 - protein, 184 aa, Homo sapiens
SLPRCELPRRSSCWHTKRSLPHRASLPRGHHLRAIRELERLSGLGTHLVIAALHSTGASKRLERGHTQYKEVHLPRDDARSSRPAPQDKGKLADLGKRRREIHLMYWLLLGRMRDRTSAARRNFITTTDKVRNTSTVSSYAHKRGEPRGALLGTRTDTLRPQDSLPQRTLFLTTSVCHLLQYRD

SEQ ID NO: 1007825 - protein, 35 aa, Homo sapiens
ALRGRRPPGSVSRAPLLHEAPGLVEVLLTQPHHPG

SEQ ID NO: 1007826 - protein, 55 aa, Homo sapiens
RSCAALLLLFPLLSSLSRLASPSLPSTDVCAPDRVLAASTGLRAVVIDMTTSTDP

SEQ ID NO: 1007827 - protein, 58 aa, Homo sapiens
MLYVCVYPLGDGTLSDHFPRLHLLAYISDYISCFYHQYPNFHPILGRERHMLMTVICC

SEQ ID NO: 1007828 - protein, 88 aa, Homo sapiens
MTRHYDFYEHSNWVHCPCSGKYWPEPDQKPEPVDKVAAMRYVPGVSTLTCTSSSSYTEDGLYDSSAIKESSGSDPSGQPRPTAVTLIA

SEQ ID NO: 1007829 - protein, 50 aa, Homo sapiens
TGTFWNTDKDPVTKETSNKICRGSTNLAEVGNRLTEVEKIKTVVFNRITR

SEQ ID NO: 1007830 - protein, 136 aa, Homo sapiens
SLSWRRRTDLCVLHKKVSCSNYTPTHILHTLAANRTVWFIPVIHAKQNVLETMSYKSTILRQTDLDKVLTVIHIAYRFLNSDSKTVPLTIKVNASVPLENLGVAQSSPTHKTRLYFSNWPYSIVCMSVKAIDRWNH

SEQ ID NO: 1007831 - protein, 45 aa, Homo sapiens
SVERLLCSLVLGENVMERKKPGLVSIPGGCCAVLSAGVVHAHLCV

SEQ ID NO: 1007832 - protein, 54 aa, Homo sapiens
  misc_feature (28)..(28): Xaa can be any naturally occurring amino acid
SNDPLLEKGLLKQADKELKKAQRQWELXGLLLWGRGGEHPVDAPRRPYPLFPEP

SEQ ID NO: 1007833 - protein, 107 aa, Homo sapiens
MDVFSAIKHELLLSPSMKENDFAVTLTRDIFEELNDGSVPVYYDARPESVGSILFEEVCILMKLFLYGRLRLRIPKIQQLVQEFFNGKEPSRGINPDKAITYGAAVQ

SEQ ID NO: 1007834 - protein, 58 aa, Homo sapiens
LPTAMHQDWLCNLGCALLSLWAAESCPNVCMASGTAQLWSSACGRTHMVSLALGHQET

SEQ ID NO: 1007835 - protein, 56 aa, Homo sapiens
VGAAGPLRGHSAHRLNAPSPSHWRRDPFLGNRKLLVYCVTQSDVGSHGRCSVDVSL

SEQ ID NO: 1007836 - protein, 79 aa, Homo sapiens
AGRLYDGLPLGTVFSAVAFKWLFCACVCALCMKEKGHSGCGREAGAVVPSREVATSFLFLPIPSLTRQAALAPVYSQKT

SEQ ID NO: 1007837 - protein, 81 aa, Homo sapiens
VDQATAVRLPGREITVTGHGVLRGGGTMLTHDEHSLGSGFVDEMARCYLAEMVMGIDSVHRFVLRCDKRTSNADNILLEPL

SEQ ID NO: 1007838 - protein, 92 aa, Homo sapiens
GLRGKGRGLGWNATWASSALSIQFIQSYFVSDYDPMIEESYTNICRVDGVPARVEFLDTVGQEEFGGNEISVHAVLGTAILLVFVINDRQSF

SEQ ID NO: 1007839 - protein, 174 aa, Homo sapiens
  misc_feature (108)..(109): Xaa can be any naturally occurring amino acid
LGGKRRIPCRHRVLVGVPLVATLVLINRGHNLQDVVVGGQGVGGESVCSPESIESSVDVLDLERVPKGELVDDMRHVWVLWLGCGTVCGHVEVAGDLVDAELPLEAAXXPIVQRDLQGVVDVARVAVGDVFLVGQRVLVGVPLVATLVLVERGHNLQDVVVGGQGVGGESVCSL

SEQ ID NO: 1007840 - protein, 143 aa, Homo sapiens
MQAGAGLQPEGHRGGGRPEGEVCLVHGGQAPAGSAGAEEQLMKQVPPPDAKDTVTPGEEELAQGQGRDLAEVALTTQSPSQPFFCLFWRRSLALSPKARVPWYHHSSPQSPSPRVEQSSCFGLLSSWDYRQHATRPRHIYIFG

SEQ ID NO: 1007841 - protein, 63 aa, Homo sapiens
CLRCMSQPFGLVLLTSGPSDAVLRGPAEKPDSWGSTRSRYAALHDSIFLVSTQRIPARDREYA

SEQ ID NO: 1007842 - protein, 44 aa, Homo sapiens
SANFGSLRGVPSVGRWSRGKRNCGKLSTYKDSITLGYQSPIQIP

SEQ ID NO: 1007843 - protein, 32 aa, Homo sapiens
YVESDVGGRESELSPTLPLCGGICLSRRQLRH

SEQ ID NO: 1007844 - protein, 37 aa, Homo sapiens
CAAALRGLSRTILMCGALIKEETHRRLDDLFLPLVMG

SEQ ID NO: 1007845 - protein, 61 aa, Homo sapiens
MSSQQKLIIVEGCQRQGAIVAVTGDGCESLSSFEESRLGVAMGIAGSDVSKPAADMILLDD

SEQ ID NO: 1007846 - protein, 83 aa, Homo sapiens
  misc_feature (48)..(48): Xaa can be any naturally occurring amino acid
TGDAVEDYRWTKMEETRVRIQVATRLEVDAGEDYRWTNDGGRRRMSAXGGRTTGRYDRGLTEYMVREDWSVDRGLTDYHGGRT

SEQ ID NO: 1007847 - protein, 67 aa, Homo sapiens
GQREKIGGLKSIYFLTAPPGVGGMSVACSLEEKELSAFGKDSFSPQPVNITLQVTRLIPKQCLAGFV

SEQ ID NO: 1007848 - protein, 92 aa, Homo sapiens
YPSGGQLDEQFYLQAAEAAQNRPAMMCPVGDESQVECSTWSETSQFSPSNLGATWNLGQTRHHPFDTGDAVGTSESDLSTRFVARRLPSWGH

SEQ ID NO: 1007849 - protein, 69 aa, Homo sapiens
EREKIGGLKSIFIYRSAGVGGMSVAWCLEEKSICLGRTLFSPHLKHHRSENRANSHTCRVVLDTLDTWV

SEQ ID NO: 1007850 - protein, 176 aa, Homo sapiens
MAGSVERSDCVARSLCLTAGTACRGPTVSPVQQTSSWRLALECSSGLFLLVCSAGPLAACFDVTGRRCYDELSGDLVRGLPELIVLVRKGRVTNGESEPLLATSGPWGEGTQAYTCFVCIHCHAQCITELPPGPPLLTPNAGCGLLIARDAASGADRLASPQCPRRSQRVRVDRIW

SEQ ID NO: 1007851 - protein, 33 aa, Homo sapiens
NAGKGSIRTLCPRMNGSLSQDDGAGGIGRKEEG

SEQ ID NO: 1007852 - protein, 120 aa, Homo sapiens
RWKRRGDEGMLVFLQEMDKPCGCPPGVCDHGTGDRRDPWYSTVGLLPPVRAMSQRNLNAKTEQGPTGVTMTSNPITWGQIKKTTQEAEKLLERQGQAKNPDSMFLAMLAVVVLCGMFPLL

SEQ ID NO: 1007853 - protein, 131 aa, Homo sapiens
MLMLLLLLLLLLLLLLSLVSRRLAQTDSCWAAEWNRPPAGSCCDGVVAAAVECTELVTGLAVGGISCDGMKLAIGTSVLGGPMKWKGVRQVSVLDWVHRWSLAAGSAYAGGKGGCHGDRPWDAGRGVVQPC

SEQ ID NO: 1007854 - protein, 82 aa, Homo sapiens
WVEDGNVIKSTILKAQESRALGIAGLLPKQQGMLCISALAKSVRPQRGLAGSREACIRSEAWAKPNRKCQITGLPLPNRITR

SEQ ID NO: 1007855 - protein, 97 aa, Homo sapiens
TRDAVDQNCKSYVEALTLPYLRQVTLLEIGPLQMYQLMRLNDVLMKRGDLEVTHTQGECHVKMMAEIRVTPLQAEEAKEASKLQKLGQSPEAASPSQ

SEQ ID NO: 1007856 - protein, 45 aa, Homo sapiens
QDPERVLRLRYAKTRALALQPGQQEENNLCHTHKKKNGTKEQTYL

SEQ ID NO: 1007857 - protein, 100 aa, Homo sapiens
RTGDAVGGPRPLDSLWLDWRGPVARGGSGVLIGTGPTCSSVHAGAGWYGPSFRFQDDFSGTSRQAGQCLGLISKPVMLLLSTAANLSLPDPGAPFPPGTS

SEQ ID NO: 1007858 - protein, 54 aa, Homo sapiens
ILIILTGRQGHEGGFPEAAGQWLITGDWTSGPQSSSSTKNTPEIGHGHFNRITR

SEQ ID NO: 1007859 - protein, 81 aa, Homo sapiens
ERVLLVAKYSESVTEASEKLEQAEKKATDAEADVASLNLPHSAGGGGAGPGPSERLATALQKLEEAEKVADESERGMKVIE

SEQ ID NO: 1007860 - protein, 33 aa, Homo sapiens
HAILQPELEAQAPTVWAATSGHTDYDPSSNDHR

SEQ ID NO: 1007861 - protein, 56 aa, Homo sapiens
RVTLVVGVPVPHSWQAVRLPSIQWHLVSLSVWVCGHHPWQWVYCAACHHVVFCCSP

SEQ ID NO: 1007862 - protein, 34 aa, Homo sapiens
YWIAPTKAARDAIKVYCDFSTGETCIRAQPASPV

SEQ ID NO: 1007863 - protein, 106 aa, Homo sapiens
MHEALCDHGIGWTEDFAPYGGTSNFAQNTMPYPGGQGEAERFMTPRVREELVRDQLLEKRSMGMQRPLGMAGSGWDRALEMERMMQAQRQMDTAMFPGEMAGGEGL

SEQ ID NO: 1007864 - protein, 37 aa, Homo sapiens
SRGSRMGDAVELWRRHHTAGRVLDELTLAGPTGDADR

SEQ ID NO: 1007865 - protein, 45 aa, Homo sapiens
MPSPLPPISTTTTAATKATTTTEVSSTTEVVIPTETTSTTTTKVS

SEQ ID NO: 1007866 - protein, 45 aa, Homo sapiens
LDYITLRLQVHPRNPLFRITMRYQMNFNREADYAHSLNCHSPPVR

SEQ ID NO: 1007867 - protein, 50 aa, Homo sapiens
GGKRQFRWRHEKACASPPGSHTVEFGGAGLAFLGQHRAPSVWGTVWTPMH

SEQ ID NO: 1007868 - protein, 77 aa, Homo sapiens
RLSLRLTHPRWTRYRPDSRPTDTTLGDGLDFLGLRTVLTYELRTVSPPHALAKNVHSHWNVCPGACTTLLLPLENAR

SEQ ID NO: 1007869 - protein, 39 aa, Homo sapiens
GKGEILESLQDGAESPRYAYSNGIDYNDHHHPAWTCRRC

SEQ ID NO: 1007870 - protein, 49 aa, Homo sapiens
RWKADVTDEGVLVNGDRLVDHAVCTSPSMDENYLYLAHGCITCGGDLAD

SEQ ID NO: 1007871 - protein, 58 aa, Homo sapiens
  misc_feature (18)..(18): Xaa can be any naturally occurring amino acid
PEQNGDGIPSRTGCSHHXTAVDFITDSGQGVKDRTWLEKRRDVGQCGVELLPCDDLQP

SEQ ID NO: 1007872 - protein, 93 aa, Homo sapiens
EPRCGPFPQQQQQQLIKKKSEIPESAVLKRMCFTPPKEKELMERLKKLSVPTSDEEDEVPAPKPRVGKKTKGGNVFAALIQDQSEEEEEEEKH

SEQ ID NO: 1007873 - protein, 63 aa, Homo sapiens
PGFNQEGLWRYLCILTILKPYGNRDFATFQILQRAFAVTPEPQPTFPIRLSLTSYAPSMGIVQ

SEQ ID NO: 1007874 - protein, 42 aa, Homo sapiens
LLVRGRRFCARFLRTDGETSDCCHMNAAKNVLVWHDETNIMC

SEQ ID NO: 1007875 - protein, 72 aa, Homo sapiens
MLWDGAAEAGCLKGSCLSGFFNSFNEATRVLVSGIMWYAPVAIRFLGAGKIVEMEDVGLLYSPPSHKHRRYR

SEQ ID NO: 1007876 - protein, 35 aa, Homo sapiens
LYMIAQEIESGYNYAASIILDLIASHPIRHPLHNR

SEQ ID NO: 1007877 - protein, 43 aa, Homo sapiens
MAFAAGQKTGLSPKGGTKMNMRNSPENEAQRKETRKRKMENHV

SEQ ID NO: 1007878 - protein, 122 aa, Homo sapiens
GKIGLSLLAGSSCLYSEPMLCSSDSNKGEYSSPECRLQSQIPRTGSQPAPSFLSWATVAIDFLSVPQLLHLCNDDCHSPCFKESLGGLTEKMQGRCLELNAPKKSIWPGTVSHARNPSTSGD

SEQ ID NO: 1007879 - protein, 38 aa, Homo sapiens
DLDDPYGCMHVWLGGELKPVPVAQENSASSSRGTRNQC

SEQ ID NO: 1007880 - protein, 53 aa, Homo sapiens
ERYMGEGTYWDEERTGDEERHWDEQNATGTEAKKGCITLALPKKKSVFNFSGP

SEQ ID NO: 1007881 - protein, 34 aa, Homo sapiens
MDCGNEEDRYSVMAKTTKHRTMPEQHWKKELTLP

SEQ ID NO: 1007882 - protein, 69 aa, Homo sapiens
ENTFFMDPPLERQVETIRKLVDSYVGLINKSIRDLMPKTIMHLMINNTKAFIHHELLVYLYSSADQSSL

SEQ ID NO: 1007883 - protein, 44 aa, Homo sapiens
SPEGGTMTYEDGKVSILNQTENENLCEKQPVSNHQYSQNGGSTD

SEQ ID NO: 1007884 - protein, 97 aa, Homo sapiens
MVCGPFIRMWIMHDSNHDDDRMLDAVMIDAMDELLNGLMNGPNRCMNEVTRMNEEWICRMNELDDGWGGIGRIESNEWLNAMNEWNGLNEEINEGLN

SEQ ID NO: 1007885 - protein, 79 aa, Homo sapiens
KYQLTSKHMEDEDSDSRGGEKRFGPFAAAPLLLLNRFQKLLDCDGEVLHRPAIEVRVHCQLVRLFARGIGENPKPDSHS
